United States Patent Application Publication US 2024/0360455 A1 - sequence listing, part 2

SEQ ID NO: 1352 - RNA, 21 nt, synthetic construct
  source 1..21: mol_type = other RNA
  modified_base 1: mod_base = OTHER; note = 2'-O-methylcytidine-3'-phosphorothioate
  modified_base 2: mod_base = OTHER; note = 2'-O-methylcytidine-3'-phosphorothioate
  modified_base 3: mod_base = OTHER; note = 2'-O-methyluridine-3'-phosphate
  modified_base 4: mod_base = OTHER; note = 2'-O-methylcytidine-3'-phosphate
  modified_base 5: mod_base = OTHER; note = 2'-O-methyluridine-3'-phosphate
  modified_base 6: mod_base = OTHER; note = 2'-O-methyluridine-3'-phosphate
  modified_base 7: mod_base = OTHER; note = 2'-deoxy-2'-fluorocytidine-3'-phosphate
  modified_base 8: mod_base = OTHER; note = 2'-O-methylguanosine-3'-phosphate
  modified_base 9: mod_base = OTHER; note = 2'-deoxy-2'-fluorouridine-3'-phosphate
  modified_base 10: mod_base = OTHER; note = 2'-deoxy-2'-fluorocytidine-3'-phosphate
  modified_base 11: mod_base = OTHER; note = 2'-deoxy-2'-fluorouridine-3'-phosphate
  modified_base 12: mod_base = OTHER; note = 2'-O-methyluridine-3'-phosphate
  modified_base 13: mod_base = OTHER; note = 2'-O-methylcytidine-3'-phosphate
  modified_base 14: mod_base = OTHER; note = 2'-O-methyluridine-3'-phosphate
  modified_base 15: mod_base = OTHER; note = 2'-O-methyluridine-3'-phosphate
  modified_base 16: mod_base = OTHER; note = 2'-O-methylcytidine-3'-phosphate
  modified_base 17: mod_base = OTHER; note = 2'-O-methyladenosine-3'-phosphate
  modified_base 18: mod_base = OTHER; note = 2'-O-methyladenosine-3'-phosphate
  modified_base 19: mod_base = OTHER; note = 2'-O-methylcytidine-3'-phosphate
  modified_base 20: mod_base = OTHER; note = 2'-O-methyluridine-3'-phosphate
  modified_base 21: mod_base = OTHER; note = 2'-O-methyluridine-3'-phosphate ((2S,4R)-1-[29-[[2-(acetylamino)-2-deoxy-beta-D-galactopyra nosyl]oxy]-14,14-bis[[3-[[3-[[5-[[2-(acetylamino)-2-deoxy-b eta-D-galactopyranosyl]oxy]-1-oxopentyl]amino]propyl]amino] -3-oxopropoxy]methyl]-1,12,19,25-tetraoxo-16-oxa-13,20,24-t riazanonacos-1-yl]-4-hydroxy-2-pyrrolidinyl)methyl ester
cctcttcgtcttcttcaactt

SEQ ID NO: 1353 - RNA, 21 nt, synthetic construct
  source 1..21: mol_type = other RNA
  modified_base 1: mod_base = OTHER; note = 2'-O-methylcytidine-3'-phosphorothioate
  modified_base 2: mod_base = OTHER; note = 2'-O-methyluridine-3'-phosphorothioate
  modified_base 3: mod_base = OTHER; note = 2'-O-methyluridine-3'-phosphate
  modified_base 4: mod_base = OTHER; note = 2'-O-methylcytidine-3'-phosphate
  modified_base 5: mod_base = OTHER; note = 2'-O-methyluridine-3'-phosphate
  modified_base 6: mod_base = OTHER; note = 2'-O-methyluridine-3'-phosphate
  modified_base 7: mod_base = OTHER; note = 2'-deoxy-2'-fluorocytidine-3'-phosphate
  modified_base 8: mod_base = OTHER; note = 2'-O-methyladenosine-3'-phosphate
  modified_base 9: mod_base = OTHER; note = 2'-deoxy-2'-fluoroadenosine-3'-phosphate
  modified_base 10: mod_base = OTHER; note = 2'-deoxy-2'-fluorocytidine-3'-phosphate
  modified_base 11: mod_base = OTHER; note = 2'-deoxy-2'-fluorouridine-3'-phosphate
  modified_base 12: mod_base = OTHER; note = 2'-O-methylguanosine-3'-phosphate
  modified_base 13: mod_base = OTHER; note = 2'-O-methylguanosine-3'-phosphate
  modified_base 14: mod_base = OTHER; note = 2'-O-methylcytidine-3'-phosphate
  modified_base 15: mod_base = OTHER; note = 2'-O-methyluridine-3'-phosphate
  modified_base 16: mod_base = OTHER; note = 2'-O-methylguanosine-3'-phosphate
  modified_base 17: mod_base = OTHER; note = 2'-O-methylguanosine-3'-phosphate
  modified_base 18: mod_base = OTHER; note = 2'-O-methylguanosine-3'-phosphate
  modified_base 19: mod_base = OTHER; note = 2'-O-methylcytidine-3'-phosphate
  modified_base 20: mod_base = OTHER; note = 2'-O-methyluridine-3'-phosphate
  modified_base 21: mod_base = OTHER; note = 2'-O-methyluridine-3'-phosphate ((2S,4R)-1-[29-[[2-(acetylamino)-2-deoxy-beta-D-galactopyra nosyl]oxy]-14,14-bis[[3-[[3-[[5-[[2-(acetylamino)-2-deoxy-b eta-D-galactopyranosyl]oxy]-1-oxopentyl]amino]propyl]amino] -3-oxopropoxy]methyl]-1,12,19,25-tetraoxo-16-oxa-13,20,24-t riazanonacos-1-yl]-4-hydroxy-2-pyrrolidinyl)methyl ester
cttcttcaactggctgggctt

SEQ ID NO: 1354 - RNA, 21 nt, synthetic construct
  source 1..21: mol_type = other RNA
  modified_base 1: mod_base = OTHER; note = 2'-O-methyluridine-3'-phosphorothioate
  modified_base 2: mod_base = OTHER; note = 2'-O-methyladenosine-3'-phosphorothioate
  modified_base 3: mod_base = OTHER; note = 2'-O-methylcytidine-3'-phosphate
  modified_base 4: mod_base = OTHER; note = 2'-O-methylguanosine-3'-phosphate
  modified_base 5: mod_base = OTHER; note = 2'-O-methylcytidine-3'-phosphate
  modified_base 6: mod_base = OTHER; note = 2'-O-methylcytidine-3'-phosphate
  modified_base 7: mod_base = OTHER; note = 2'-deoxy-2'-fluoroadenosine-3'-phosphate
  modified_base 8: mod_base = OTHER; note = 2'-O-methyladenosine-3'-phosphate
  modified_base 9: mod_base = OTHER; note = 2'-deoxy-2'-fluorocytidine-3'-phosphate
  modified_base 10: mod_base = OTHER; note = 2'-deoxy-2'-fluorouridine-3'-phosphate
  modified_base 11: mod_base = OTHER; note = 2'-deoxy-2'-fluorocytidine-3'-phosphate
  modified_base 12: mod_base = OTHER; note = 2'-O-methylguanosine-3'-phosphate
  modified_base 13: mod_base = OTHER; note = 2'-O-methylguanosine-3'-phosphate
  modified_base 14: mod_base = OTHER; note = 2'-O-methylcytidine-3'-phosphate
  modified_base 15: mod_base = OTHER; note = 2'-O-methylcytidine-3'-phosphate
  modified_base 16: mod_base = OTHER; note = 2'-O-methyluridine-3'-phosphate
  modified_base 17: mod_base = OTHER; note = 2'-O-methyluridine-3'-phosphate
  modified_base 18: mod_base = OTHER; note = 2'-O-methylcytidine-3'-phosphate
  modified_base 19: mod_base = OTHER; note = 2'-O-methyladenosine-3'-phosphate
  modified_base 20: mod_base = OTHER; note = 2'-O-methyladenosine-3'-phosphate
  modified_base 21: mod_base = OTHER; note = 2'-O-methyluridine-3'-phosphate ((2S,4R)-1-[29-[[2-(acetylamino)-2-deoxy-beta-D-galactopyra nosyl]oxy]-14,14-bis[[3-[[3-[[5-[[2-(acetylamino)-2-deoxy-b eta-D-galactopyranosyl]oxy]-1-oxopentyl]amino]propyl]amino] -3-oxopropoxy]methyl]-1,12,19,25-tetraoxo-16-oxa-13,20,24-t riazanonacos-1-yl]-4-hydroxy-2-pyrrolidinyl)methyl ester
tacgccaactcggccttcaat

SEQ ID NO: 1355 - RNA, 21 nt, synthetic construct
  source 1..21: mol_type = other RNA
  modified_base 1: mod_base = OTHER; note = 2'-O-methylcytidine-3'-phosphorothioate
  modified_base 2: mod_base = OTHER; note = 2'-O-methyladenosine-3'-phosphorothioate
  modified_base 3: mod_base = OTHER; note = 2'-O-methyluridine-3'-phosphate
  modified_base 4: mod_base = OTHER; note = 2'-O-methylcytidine-3'-phosphate
  modified_base 5: mod_base = OTHER; note = 2'-O-methyladenosine-3'-phosphate
  modified_base 6: mod_base = OTHER; note = 2'-O-methyluridine-3'-phosphate
  modified_base 7: mod_base = OTHER; note = 2'-deoxy-2'-fluorocytidine-3'-phosphate
  modified_base 8: mod_base = OTHER; note = 2'-O-methyluridine-3'-phosphate
  modified_base 9: mod_base = OTHER; note = 2'-deoxy-2'-fluoroadenosine-3'-phosphate
  modified_base 10: mod_base = OTHER; note = 2'-deoxy-2'-fluorocytidine-3'-phosphate
  modified_base 11: mod_base = OTHER; note = 2'-deoxy-2'-fluorouridine-3'-phosphate
  modified_base 12: mod_base = OTHER; note = 2'-O-methylguanosine-3'-phosphate
  modified_base 13: mod_base = OTHER; note = 2'-O-methylcytidine-3'-phosphate
  modified_base 14: mod_base = OTHER; note = 2'-O-methylcytidine-3'-phosphate
  modified_base 15: mod_base = OTHER; note = 2'-O-methylguanosine-3'-phosphate
  modified_base 16: mod_base = OTHER; note = 2'-O-methylcytidine-3'-phosphate
  modified_base 17: mod_base = OTHER; note = 2'-O-methyladenosine-3'-phosphate
  modified_base 18: mod_base = OTHER; note = 2'-O-methylguanosine-3'-phosphate
  modified_base 19: mod_base = OTHER; note = 2'-O-methylcytidine-3'-phosphate
  modified_base 20: mod_base = OTHER; note = 2'-O-methylcytidine-3'-phosphate
  modified_base 21: mod_base = OTHER; note = 2'-O-methyluridine-3'-phosphate ((2S,4R)-1-[29-[[2-(acetylamino)-2-deoxy-beta-D-galactopyra nosyl]oxy]-14,14-bis[[3-[[3-[[5-[[2-(acetylamino)-2-deoxy-b eta-D-galactopyranosyl]oxy]-1-oxopentyl]amino]propyl]amino] -3-oxopropoxy]methyl]-1,12,19,25-tetraoxo-16-oxa-13,20,24-t riazanonacos-1-yl]-4-hydroxy-2-pyrrolidinyl)methyl ester
catcatctactgccgcagcct

SEQ ID NO: 1356 - RNA, 21 nt, synthetic construct
  source 1..21: mol_type = other RNA
  modified_base 1: mod_base = OTHER; note = 2'-O-methylcytidine-3'-phosphorothioate
  modified_base 2: mod_base = OTHER; note = 2'-O-methyluridine-3'-phosphorothioate
  modified_base 3: mod_base = OTHER; note = 2'-O-methyluridine-3'-phosphate
  modified_base 4: mod_base = OTHER; note = 2'-O-methylcytidine-3'-phosphate
  modified_base 5: mod_base = OTHER; note = 2'-O-methylcytidine-3'-phosphate
  modified_base 6: mod_base = OTHER; note = 2'-O-methylguanosine-3'-phosphate
  modified_base 7: mod_base = OTHER; note = 2'-deoxy-2'-fluorocytidine-3'-phosphate
  modified_base 8: mod_base = OTHER; note = 2'-O-methyladenosine-3'-phosphate
  modified_base 9: mod_base = OTHER; note = 2'-deoxy-2'-fluoroadenosine-3'-phosphate
  modified_base 10: mod_base = OTHER; note = 2'-deoxy-2'-fluoroguanosine-3'-phosphate
  modified_base 11: mod_base = OTHER; note = 2'-deoxy-2'-fluoroguanosine-3'-phosphate
  modified_base 12: mod_base = OTHER; note = 2'-O-methylcytidine-3'-phosphate
  modified_base 13: mod_base = OTHER; note = 2'-O-methylcytidine-3'-phosphate
  modified_base 14: mod_base = OTHER; note = 2'-O-methyluridine-3'-phosphate
  modified_base 15: mod_base = OTHER; note = 2'-O-methyluridine-3'-phosphate
  modified_base 16: mod_base = OTHER; note = 2'-O-methylcytidine-3'-phosphate
  modified_base 17: mod_base = OTHER; note = 2'-O-methylcytidine-3'-phosphate
  modified_base 18: mod_base = OTHER; note = 2'-O-methyladenosine-3'-phosphate
  modified_base 19: mod_base = OTHER; note = 2'-O-methylguanosine-3'-phosphate
  modified_base 20: mod_base = OTHER; note = 2'-O-methylguanosine-3'-phosphate
  modified_base 21: mod_base = OTHER; note = 2'-O-methyluridine-3'-phosphate ((2S,4R)-1-[29-[[2-(acetylamino)-2-deoxy-beta-D-galactopyra nosyl]oxy]-14,14-bis[[3-[[3-[[5-[[2-(acetylamino)-2-deoxy-b eta-D-galactopyranosyl]oxy]-1-oxopentyl]amino]propyl]amino] -3-oxopropoxy]methyl]-1,12,19,25-tetraoxo-16-oxa-13,20,24-t riazanonacos-1-yl]-4-hydroxy-2-pyrrolidinyl)methyl ester
cttccgcaaggccttccaggt

SEQ ID NO: 1357 - RNA, 21 nt, synthetic construct
  source 1..21: mol_type = other RNA
  modified_base 1: mod_base = OTHER; note = 2'-O-methylcytidine-3'-phosphorothioate
  modified_base 2: mod_base = OTHER; note = 2'-O-methyluridine-3'-phosphorothioate
  modified_base 3: mod_base = OTHER; note = 2'-O-methyluridine-3'-phosphate
  modified_base 4: mod_base = OTHER; note = 2'-O-methylcytidine-3'-phosphate
  modified_base 5: mod_base = OTHER; note = 2'-O-methylcytidine-3'-phosphate
  modified_base 6: mod_base = OTHER; note = 2'-O-methyladenosine-3'-phosphate
  modified_base 7: mod_base = OTHER; note = 2'-deoxy-2'-fluoroguanosine-3'-phosphate
  modified_base 8: mod_base = OTHER; note = 2'-O-methylguanosine-3'-phosphate
  modified_base 9: mod_base = OTHER; note = 2'-deoxy-2'-fluoroguanosine-3'-phosphate
  modified_base 10: mod_base = OTHER; note = 2'-deoxy-2'-fluoroadenosine-3'-phosphate
  modified_base 11: mod_base = OTHER; note = 2'-deoxy-2'-fluorocytidine-3'-phosphate
  modified_base 12: mod_base = OTHER; note = 2'-O-methyluridine-3'-phosphate
  modified_base 13: mod_base = OTHER; note = 2'-O-methylguanosine-3'-phosphate
  modified_base 14: mod_base = OTHER; note = 2'-O-methylcytidine-3'-phosphate
  modified_base 15: mod_base = OTHER; note = 2'-O-methyluridine-3'-phosphate
  modified_base 16: mod_base = OTHER; note = 2'-O-methylcytidine-3'-phosphate
  modified_base 17: mod_base = OTHER; note = 2'-O-methyluridine-3'-phosphate
  modified_base 18: mod_base = OTHER; note = 2'-O-methylguanosine-3'-phosphate
  modified_base 19: mod_base = OTHER; note = 2'-O-methylcytidine-3'-phosphate
  modified_base 20: mod_base = OTHER; note = 2'-O-methyluridine-3'-phosphate
  modified_base 21: mod_base = OTHER; note = 2'-O-methyluridine-3'-phosphate ((2S,4R)-1-[29-[[2-(acetylamino)-2-deoxy-beta-D-galactopyra nosyl]oxy]-14,14-bis[[3-[[3-[[5-[[2-(acetylamino)-2-deoxy-b eta-D-galactopyranosyl]oxy]-1-oxopentyl]amino]propyl]amino] -3-oxopropoxy]methyl]-1,12,19,25-tetraoxo-16-oxa-13,20,24-t riazanonacos-1-yl]-4-hydroxy-2-pyrrolidinyl)methyl ester
cttccagggactgctctgctt

SEQ ID NO: 1358 - RNA, 21 nt, synthetic construct
  source 1..21: mol_type = other RNA
  modified_base 1: mod_base = OTHER; note = 2'-O-methylguanosine-3'-phosphorothioate
  modified_base 2: mod_base = OTHER; note = 2'-O-methyladenosine-3'-phosphorothioate
  modified_base 3: mod_base = OTHER; note = 2'-O-methylcytidine-3'-phosphate
  modified_base 4: mod_base = OTHER; note = 2'-O-methylguanosine-3'-phosphate
  modified_base 5: mod_base = OTHER; note = 2'-O-methyladenosine-3'-phosphate
  modified_base 6: mod_base = OTHER; note = 2'-O-methylcytidine-3'-phosphate
  modified_base 7: mod_base = OTHER; note = 2'-deoxy-2'-fluoroguanosine-3'-phosphate
  modified_base 8: mod_base = OTHER; note = 2'-O-methyladenosine-3'-phosphate
  modified_base 9: mod_base = OTHER; note = 2'-deoxy-2'-fluorocytidine-3'-phosphate
  modified_base 10: mod_base = OTHER; note = 2'-deoxy-2'-fluoroguanosine-3'-phosphate
  modified_base 11: mod_base = OTHER; note = 2'-deoxy-2'-fluoroadenosine-3'-phosphate
  modified_base 12: mod_base = OTHER; note = 2'-O-methyluridine-3'-phosphate
  modified_base 13: mod_base = OTHER; note = 2'-O-methylguanosine-3'-phosphate
  modified_base 14: mod_base = OTHER; note = 2'-O-methyluridine-3'-phosphate
  modified_base 15: mod_base = OTHER; note = 2'-O-methylcytidine-3'-phosphate
  modified_base 16: mod_base = OTHER; note = 2'-O-methylguanosine-3'-phosphate
  modified_base 17: mod_base = OTHER; note = 2'-O-methyluridine-3'-phosphate
  modified_base 18: mod_base = OTHER; note = 2'-O-methylcytidine-3'-phosphate
  modified_base 19: mod_base = OTHER; note = 2'-O-methylguanosine-3'-phosphate
  modified_base 20: mod_base = OTHER; note = 2'-O-methylguanosine-3'-phosphate
  modified_base 21: mod_base = OTHER; note = 2'-O-methyluridine-3'-phosphate ((2S,4R)-1-[29-[[2-(acetylamino)-2-deoxy-beta-D-galactopyra nosyl]oxy]-14,14-bis[[3-[[3-[[5-[[2-(acetylamino)-2-deoxy-b eta-D-galactopyranosyl]oxy]-1-oxopentyl]amino]propyl]amino] -3-oxopropoxy]methyl]-1,12,19,25-tetraoxo-16-oxa-13,20,24-t riazanonacos-1-yl]-4-hydroxy-2-pyrrolidinyl)methyl ester
gacgacgacgatgtcgtcggt

SEQ ID NO: 1359 - RNA, 21 nt, synthetic construct
  source 1..21: mol_type = other RNA
  modified_base 1: mod_base = OTHER; note = 2'-O-methylcytidine-3'-phosphorothioate
  modified_base 2: mod_base = OTHER; note = 2'-O-methylcytidine-3'-phosphorothioate
  modified_base 3: mod_base = OTHER; note = 2'-O-methyluridine-3'-phosphate
  modified_base 4: mod_base = OTHER; note = 2'-O-methylcytidine-3'-phosphate
  modified_base 5: mod_base = OTHER; note = 2'-O-methylguanosine-3'-phosphate
  modified_base 6: mod_base = OTHER; note = 2'-O-methylguanosine-3'-phosphate
  modified_base 7: mod_base = OTHER; note = 2'-deoxy-2'-fluoroadenosine-3'-phosphate
  modified_base 8: mod_base = OTHER; note = 2'-O-methyladenosine-3'-phosphate
  modified_base 9: mod_base = OTHER; note = 2'-deoxy-2'-fluorouridine-3'-phosphate
  modified_base 10: mod_base = OTHER; note = 2'-deoxy-2'-fluorocytidine-3'-phosphate
  modified_base 11: mod_base = OTHER; note = 2'-deoxy-2'-fluorocytidine-3'-phosphate
  modified_base 12: mod_base = OTHER; note = 2'-O-methyladenosine-3'-phosphate
  modified_base 13: mod_base = OTHER; note = 2'-O-methyladenosine-3'-phosphate
  modified_base 14: mod_base = OTHER; note = 2'-O-methylguanosine-3'-phosphate
  modified_base 15: mod_base = OTHER; note = 2'-O-methylguanosine-3'-phosphate
  modified_base 16: mod_base = OTHER; note = 2'-O-methyluridine-3'-phosphate
  modified_base 17: mod_base = OTHER; note = 2'-O-methylguanosine-3'-phosphate
  modified_base 18: mod_base = OTHER; note = 2'-O-methyluridine-3'-phosphate
  modified_base 19: mod_base = OTHER; note = 2'-O-methyladenosine-3'-phosphate
  modified_base 20: mod_base = OTHER; note = 2'-O-methylguanosine-3'-phosphate
  modified_base 21: mod_base = OTHER; note = 2'-O-methyluridine-3'-phosphate ((2S,4R)-1-[29-[[2-(acetylamino)-2-deoxy-beta-D-galactopyra nosyl]oxy]-14,14-bis[[3-[[3-[[5-[[2-(acetylamino)-2-deoxy-b eta-D-galactopyranosyl]oxy]-1-oxopentyl]amino]propyl]amino] -3-oxopropoxy]methyl]-1,12,19,25-tetraoxo-16-oxa-13,20,24-t riazanonacos-1-yl]-4-hydroxy-2-pyrrolidinyl)methyl ester
cctcggaatccaaggtgtagt

SEQ ID NO: 1360 - RNA, 21 nt, synthetic construct
  source 1..21: mol_type = other RNA
  modified_base 1: mod_base = OTHER; note = 2'-O-methylguanosine-3'-phosphorothioate
  modified_base 2: mod_base = OTHER; note = 2'-O-methyladenosine-3'-phosphorothioate
  modified_base 3: mod_base = OTHER; note = 2'-O-methylguanosine-3'-phosphate
  modified_base 4: mod_base = OTHER; note = 2'-O-methylguanosine-3'-phosphate
  modified_base 5: mod_base = OTHER; note = 2'-O-methyladenosine-3'-phosphate
  modified_base 6: mod_base = OTHER; note = 2'-O-methylguanosine-3'-phosphate
  modified_base 7: mod_base = OTHER; note = 2'-deoxy-2'-fluoroadenosine-3'-phosphate
  modified_base 8: mod_base = OTHER; note = 2'-O-methyluridine-3'-phosphate
  modified_base 9: mod_base = OTHER; note = 2'-deoxy-2'-fluorocytidine-3'-phosphate
  modified_base 10: mod_base = OTHER; note = 2'-deoxy-2'-fluorouridine-3'-phosphate
  modified_base 11: mod_base = OTHER; note = 2'-deoxy-2'-fluoroguanosine-3'-phosphate
  modified_base 12: mod_base = OTHER; note = 2'-O-methyluridine-3'-phosphate
  modified_base 13: mod_base = OTHER; note = 2'-O-methylguanosine-3'-phosphate
  modified_base 14: mod_base = OTHER; note = 2'-O-methyluridine-3'-phosphate
  modified_base 15: mod_base = OTHER; note = 2'-O-methyluridine-3'-phosphate
  modified_base 16: mod_base = OTHER; note = 2'-O-methyluridine-3'-phosphate
  modified_base 17: mod_base = OTHER; note = 2'-O-methyladenosine-3'-phosphate
  modified_base 18: mod_base = OTHER; note = 2'-O-methylcytidine-3'-phosphate
  modified_base 19: mod_base = OTHER; note = 2'-O-methyluridine-3'-phosphate
  modified_base 20: mod_base = OTHER; note = 2'-O-methyluridine-3'-phosphate
  modified_base 21: mod_base = OTHER; note = 2'-O-methyluridine-3'-phosphate ((2S,4R)-1-[29-[[2-(acetylamino)-2-deoxy-beta-D-galactopyra nosyl]oxy]-14,14-bis[[3-[[3-[[5-[[2-(acetylamino)-2-deoxy-b eta-D-galactopyranosyl]oxy]-1-oxopentyl]amino]propyl]amino] -3-oxopropoxy]methyl]-1,12,19,25-tetraoxo-16-oxa-13,20,24-t riazanonacos-1-yl]-4-hydroxy-2-pyrrolidinyl)methyl ester
gaggagatctgtgtttacttt

SEQ ID NO: 1361 - RNA, 21 nt, synthetic construct
  source 1..21: mol_type = other RNA
  modified_base 1: mod_base = OTHER; note = 2'-O-methylguanosine-3'-phosphorothioate
  modified_base 2: mod_base = OTHER; note = 2'-O-methyluridine-3'-phosphorothioate
  modified_base 3: mod_base = OTHER; note = 2'-O-methylguanosine-3'-phosphate
  modified_base 4: mod_base = OTHER; note = 2'-O-methyluridine-3'-phosphate
  modified_base 5: mod_base = OTHER; note = 2'-O-methyluridine-3'-phosphate
  modified_base 6: mod_base = OTHER; note = 2'-O-methyluridine-3'-phosphate
  modified_base 7: mod_base = OTHER; note = 2'-deoxy-2'-fluoroadenosine-3'-phosphate
  modified_base 8: mod_base = OTHER; note = 2'-O-methylcytidine-3'-phosphate
  modified_base 9: mod_base = OTHER; note = 2'-deoxy-2'-fluorouridine-3'-phosphate
  modified_base 10: mod_base = OTHER; note = 2'-deoxy-2'-fluorouridine-3'-phosphate
  modified_base 11: mod_base = OTHER; note = 2'-deoxy-2'-fluoroadenosine-3'-phosphate
  modified_base 12: mod_base = OTHER; note = 2'-O-methyladenosine-3'-phosphate
  modified_base 13: mod_base = OTHER; note = 2'-O-methylguanosine-3'-phosphate
  modified_base 14: mod_base = OTHER; note = 2'-O-methyladenosine-3'-phosphate
  modified_base 15: mod_base = OTHER; note = 2'-O-methylcytidine-3'-phosphate
  modified_base 16: mod_base = OTHER; note = 2'-O-methylcytidine-3'-phosphate
  modified_base 17: mod_base = OTHER; note = 2'-O-methylguanosine-3'-phosphate
  modified_base 18: mod_base = OTHER; note = 2'-O-methyladenosine-3'-phosphate
  modified_base 19: mod_base = OTHER; note = 2'-O-methyluridine-3'-phosphate
  modified_base 20: mod_base = OTHER; note = 2'-O-methyladenosine-3'-phosphate
  modified_base 21: mod_base = OTHER; note = 2'-O-methyluridine-3'-phosphate ((2S,4R)-1-[29-[[2-(acetylamino)-2-deoxy-beta-D-galactopyra nosyl]oxy]-14,14-bis[[3-[[3-[[5-[[2-(acetylamino)-2-deoxy-b eta-D-galactopyranosyl]oxy]-1-oxopentyl]amino]propyl]amino] -3-oxopropoxy]methyl]-1,12,19,25-tetraoxo-16-oxa-13,20,24-t riazanonacos-1-yl]-4-hydroxy-2-pyrrolidinyl)methyl ester
gtgtttacttaagaccgatat

SEQ ID NO: 1362 - RNA, 21 nt, synthetic construct
  source 1..21: mol_type = other RNA
  modified_base 1: mod_base = OTHER; note = 2'-O-methyluridine-3'-phosphorothioate
  modified_base 2: mod_base = OTHER; note = 2'-O-methyladenosine-3'-phosphorothioate
  modified_base 3: mod_base = OTHER; note = 2'-O-methyladenosine-3'-phosphate
  modified_base 4: mod_base = OTHER; note = 2'-O-methylguanosine-3'-phosphate
  modified_base 5: mod_base = OTHER; note = 2'-O-methyladenosine-3'-phosphate
  modified_base 6: mod_base = OTHER; note = 2'-O-methylcytidine-3'-phosphate
  modified_base 7: mod_base = OTHER; note = 2'-deoxy-2'-fluorocytidine-3'-phosphate
  modified_base 8: mod_base = OTHER; note = 2'-O-methylguanosine-3'-phosphate
  modified_base 9: mod_base = OTHER; note = 2'-deoxy-2'-fluoroadenosine-3'-phosphate
  modified_base 10: mod_base = OTHER; note = 2'-deoxy-2'-fluorouridine-3'-phosphate
  modified_base 11: mod_base = OTHER; note = 2'-deoxy-2'-fluoroadenosine-3'-phosphate
  modified_base 12: mod_base = OTHER; note = 2'-O-methylguanosine-3'-phosphate
  modified_base 13: mod_base = OTHER; note = 2'-O-methylcytidine-3'-phosphate
  modified_base 14: mod_base = OTHER; note = 2'-O-methyladenosine-3'-phosphate
  modified_base 15: mod_base = OTHER; note = 2'-O-methylguanosine-3'-phosphate
  modified_base 16: mod_base = OTHER; note = 2'-O-methylguanosine-3'-phosphate
  modified_base 17: mod_base = OTHER; note = 2'-O-methyluridine-3'-phosphate
  modified_base 18: mod_base = OTHER; note = 2'-O-methylguanosine-3'-phosphate
  modified_base 19: mod_base = OTHER; note = 2'-O-methyladenosine-3'-phosphate
  modified_base 20: mod_base = OTHER; note = 2'-O-methyladenosine-3'-phosphate
  modified_base 21: mod_base = OTHER; note = 2'-O-methyluridine-3'-phosphate ((2S,4R)-1-[29-[[2-(acetylamino)-2-deoxy-beta-D-galactopyra nosyl]oxy]-14,14-bis[[3-[[3-[[5-[[2-(acetylamino)-2-deoxy-b eta-D-galactopyranosyl]oxy]-1-oxopentyl]amino]propyl]amino] -3-oxopropoxy]methyl]-1,12,19,25-tetraoxo-16-oxa-13,20,24-t riazanonacos-1-yl]-4-hydroxy-2-pyrrolidinyl)methyl ester
taagaccgatagcaggtgaat

SEQ ID NO: 1363 - RNA, 21 nt, synthetic construct
  source 1..21: mol_type = other RNA
  modified_base 1: mod_base = OTHER; note = 2'-O-methyluridine-3'-phosphorothioate
  modified_base 2: mod_base = OTHER; note = 2'-O-methyladenosine-3'-phosphorothioate
  modified_base 3: mod_base = OTHER; note = 2'-O-methylguanosine-3'-phosphate
  modified_base 4: mod_base = OTHER; note = 2'-O-methylcytidine-3'-phosphate
  modified_base 5: mod_base = OTHER; note = 2'-O-methyladenosine-3'-phosphate
  modified_base 6: mod_base = OTHER; note = 2'-O-methylguanosine-3'-phosphate
  modified_base 7: mod_base = OTHER; note = 2'-deoxy-2'-fluoroguanosine-3'-phosphate
  modified_base 8: mod_base = OTHER; note = 2'-O-methyluridine-3'-phosphate
  modified_base 9: mod_base = OTHER; note = 2'-deoxy-2'-fluoroguanosine-3'-phosphate
  modified_base 10: mod_base = OTHER; note = 2'-deoxy-2'-fluoroadenosine-3'-phosphate
  modified_base 11: mod_base = OTHER; note = 2'-deoxy-2'-fluoroadenosine-3'-phosphate
  modified_base 12: mod_base = OTHER; note = 2'-O-methylcytidine-3'-phosphate
  modified_base 13: mod_base = OTHER; note = 2'-O-methyluridine-3'-phosphate
  modified_base 14: mod_base = OTHER; note = 2'-O-methylcytidine-3'-phosphate
  modified_base 15: mod_base = OTHER; note = 2'-O-methylguanosine-3'-phosphate
  modified_base 16: mod_base = OTHER; note = 2'-O-methyladenosine-3'-phosphate
  modified_base 17: mod_base = OTHER; note = 2'-O-methyladenosine-3'-phosphate
  modified_base 18: mod_base = OTHER; note = 2'-O-methylguanosine-3'-phosphate
  modified_base 19: mod_base = OTHER; note = 2'-O-methylcytidine-3'-phosphate
  modified_base 20: mod_base = OTHER; note = 2'-O-methylcytidine-3'-phosphate
  modified_base 21: mod_base = OTHER; note = 2'-O-methyluridine-3'-phosphate ((2S,4R)-1-[29-[[2-(acetylamino)-2-deoxy-beta-D-galactopyra nosyl]oxy]-14,14-bis[[3-[[3-[[5-[[2-(acetylamino)-2-deoxy-b eta-D-galactopyranosyl]oxy]-1-oxopentyl]amino]propyl]amino] -3-oxopropoxy]methyl]-1,12,19,25-tetraoxo-16-oxa-13,20,24-t riazanonacos-1-yl]-4-hydroxy-2-pyrrolidinyl)methyl ester
tagcaggtgaactcgaagcct

SEQ ID NO: 1364 - RNA, 21 nt, synthetic construct
  source 1..21: mol_type = other RNA
  modified_base 1: mod_base = OTHER; note = 2'-O-methylguanosine-3'-phosphorothioate
  modified_base 2: mod_base = OTHER; note = 2'-O-methyladenosine-3'-phosphorothioate
  modified_base 3: mod_base = OTHER; note = 2'-O-methyladenosine-3'-phosphate
  modified_base 4: mod_base = OTHER; note = 2'-O-methylguanosine-3'-phosphate
  modified_base 5: mod_base = OTHER; note = 2'-O-methylcytidine-3'-phosphate
  modified_base 6: mod_base = OTHER; note = 2'-O-methylcytidine-3'-phosphate
  modified_base 7: mod_base = OTHER; note = 2'-deoxy-2'-fluorocytidine-3'-phosphate
  modified_base 8: mod_base = OTHER; note = 2'-O-methyladenosine-3'-phosphate
  modified_base 9: mod_base = OTHER; note = 2'-deoxy-2'-fluorocytidine-3'-phosphate
  modified_base 10: mod_base = OTHER; note = 2'-deoxy-2'-fluoroadenosine-3'-phosphate
  modified_base 11: mod_base = OTHER; note = 2'-deoxy-2'-fluoroadenosine-3'-phosphate
  modified_base 12: mod_base = OTHER; note = 2'-O-methyluridine-3'-phosphate
  modified_base 13: mod_base = OTHER; note = 2'-O-methylcytidine-3'-phosphate
  modified_base 14: mod_base = OTHER; note = 2'-O-methylcytidine-3'-phosphate
  modified_base 15: mod_base = OTHER; note = 2'-O-methyluridine-3'-phosphate
  modified_base 16: mod_base = OTHER; note = 2'-O-methylcytidine-3'-phosphate
  modified_base 17: mod_base = OTHER; note = 2'-O-methylguanosine-3'-phosphate
  modified_base 18: mod_base = OTHER; note = 2'-O-methyluridine-3'-phosphate
  modified_base 19: mod_base = OTHER; note = 2'-O-methylcytidine-3'-phosphate
  modified_base 20: mod_base = OTHER; note = 2'-O-methyluridine-3'-phosphate
  modified_base 21: mod_base = OTHER; note = 2'-O-methyluridine-3'-phosphate ((2S,4R)-1-[29-[[2-(acetylamino)-2-deoxy-beta-D-galactopyra nosyl]oxy]-14,14-bis[[3-[[3-[[5-[[2-(acetylamino)-2-deoxy-b eta-D-galactopyranosyl]oxy]-1-oxopentyl]amino]propyl]amino] -3-oxopropoxy]methyl]-1,12,19,25-tetraoxo-16-oxa-13,20,24-t riazanonacos-1-yl]-4-hydroxy-2-pyrrolidinyl)methyl ester
gaagcccacaatcctcgtctt

SEQ ID NO: 1365 - RNA, 21 nt, synthetic construct
  source 1..21: mol_type = other RNA
  modified_base 1: mod_base = OTHER; note = 2'-O-methyladenosine-3'-phosphorothioate
  modified_base 2: mod_base = OTHER; note = 2'-O-methyladenosine-3'-phosphorothioate
  modified_base 3: mod_base = OTHER; note = 2'-O-methyluridine-3'-phosphate
  modified_base 4: mod_base = OTHER; note = 2'-O-methylcytidine-3'-phosphate
  modified_base 5: mod_base = OTHER; note = 2'-O-methylcytidine-3'-phosphate
  modified_base 6: mod_base = OTHER; note = 2'-O-methyluridine-3'-phosphate
  modified_base 7: mod_base = OTHER; note = 2'-deoxy-2'-fluorocytidine-3'-phosphate
  modified_base 8: mod_base = OTHER; note = 2'-O-methylguanosine-3'-phosphate
  modified_base 9: mod_base = OTHER; note = 2'-deoxy-2'-fluorouridine-3'-phosphate
  modified_base 10: mod_base = OTHER; note = 2'-deoxy-2'-fluorocytidine-3'-phosphate
  modified_base 11: mod_base = OTHER; note = 2'-deoxy-2'-fluorouridine-3'-phosphate
  modified_base 12: mod_base = OTHER; note = 2'-O-methylguanosine-3'-phosphate
  modified_base 13: mod_base = OTHER; note = 2'-O-methyladenosine-3'-phosphate
  modified_base 14: mod_base = OTHER; note = 2'-O-methyladenosine-3'-phosphate
  modified_base 15: mod_base = OTHER; note = 2'-O-methyluridine-3'-phosphate
  modified_base 16: mod_base = OTHER; note = 2'-O-methylcytidine-3'-phosphate
  modified_base 17: mod_base = OTHER; note = 2'-O-methyladenosine-3'-phosphate
  modified_base 18: mod_base = OTHER; note = 2'-O-methyluridine-3'-phosphate
  modified_base 19: mod_base = OTHER; note = 2'-O-methylcytidine-3'-phosphate
  modified_base 20: mod_base = OTHER; note = 2'-O-methylcytidine-3'-phosphate
  modified_base 21: mod_base = OTHER; note = 2'-O-methyluridine-3'-phosphate ((2S,4R)-1-[29-[[2-(acetylamino)-2-deoxy-beta-D-galactopyra nosyl]oxy]-14,14-bis[[3-[[3-[[5-[[2-(acetylamino)-2-deoxy-b eta-D-galactopyranosyl]oxy]-1-oxopentyl]amino]propyl]amino] -3-oxopropoxy]methyl]-1,12,19,25-tetraoxo-16-oxa-13,20,24-t riazanonacos-1-yl]-4-hydroxy-2-pyrrolidinyl)methyl ester
aatcctcgtctgaatcatcct

SEQ ID NO: 1366 - RNA, 21 nt, synthetic construct
  source 1..21: mol_type = other RNA
  modified_base 1: mod_base = OTHER; note = 2'-O-methyluridine-3'-phosphorothioate
  modified_base 2: mod_base = OTHER; note = 2'-O-methylguanosine-3'-phosphorothioate
  modified_base 3: mod_base = OTHER; note = 2'-O-methyladenosine-3'-phosphate
  modified_base 4: mod_base = OTHER; note = 2'-O-methyladenosine-3'-phosphate
  modified_base 5: mod_base = OTHER; note = 2'-O-methyluridine-3'-phosphate
  modified_base 6: mod_base = OTHER; note = 2'-O-methylcytidine-3'-phosphate
  modified_base 7: mod_base = OTHER; note = 2'-deoxy-2'-fluoroadenosine-3'-phosphate
  modified_base 8: mod_base = OTHER; note = 2'-O-methyluridine-3'-phosphate
  modified_base 9: mod_base = OTHER; note = 2'-deoxy-2'-fluorocytidine-3'-phosphate
  modified_base 10: mod_base = OTHER; note = 2'-deoxy-2'-fluorocytidine-3'-phosphate
  modified_base 11: mod_base = OTHER; note = 2'-deoxy-2'-fluoroguanosine-3'-phosphate
  modified_base 12: mod_base = OTHER; note = 2'-O-methyladenosine-3'-phosphate
  modified_base 13: mod_base = OTHER; note = 2'-O-methylguanosine-3'-phosphate
  modified_base 14: mod_base = OTHER; note = 2'-O-methylguanosine-3'-phosphate
  modified_base 15: mod_base = OTHER; note = 2'-O-methylcytidine-3'-phosphate
  modified_base 16: mod_base = OTHER; note = 2'-O-methyladenosine-3'-phosphate
  modified_base 17: mod_base = OTHER; note = 2'-O-methyladenosine-3'-phosphate
  modified_base 18: mod_base = OTHER; note = 2'-O-methyladenosine-3'-phosphate
  modified_base 19: mod_base = OTHER; note = 2'-O-methylguanosine-3'-phosphate
  modified_base 20: mod_base = OTHER; note = 2'-O-methyladenosine-3'-phosphate
  modified_base 21: mod_base = OTHER; note = 2'-O-methyluridine-3'-phosphate ((2S,4R)-1-[29-[[2-(acetylamino)-2-deoxy-beta-D-galactopyra nosyl]oxy]-14,14-bis[[3-[[3-[[5-[[2-(acetylamino)-2-deoxy-b eta-D-galactopyranosyl]oxy]-1-oxopentyl]amino]propyl]amino] -3-oxopropoxy]methyl]-1,12,19,25-tetraoxo-16-oxa-13,20,24-t riazanonacos-1-yl]-4-hydroxy-2-pyrrolidinyl)methyl ester
tgaatcatccgaggcaaagat

SEQ ID NO: 1367 - RNA, 21 nt, synthetic construct
  source 1..21: mol_type = other RNA
  modified_base 1: mod_base = OTHER; note = 2'-O-methylguanosine-3'-phosphorothioate
  modified_base 2: mod_base = OTHER; note = 2'-O-methyladenosine-3'-phosphorothioate
  modified_base 3: mod_base = OTHER; note = 2'-O-methylguanosine-3'-phosphate
  modified_base 4: mod_base = OTHER; note = 2'-O-methylguanosine-3'-phosphate
  modified_base 5: mod_base = OTHER; note = 2'-O-methylcytidine-3'-phosphate
  modified_base 6: mod_base = OTHER; note = 2'-O-methyladenosine-3'-phosphate
  modified_base 7: mod_base = OTHER; note = 2'-deoxy-2'-fluoroadenosine-3'-phosphate
  modified_base 8: mod_base = OTHER; note = 2'-O-methyladenosine-3'-phosphate
  modified_base 9: mod_base = OTHER; note = 2'-deoxy-2'-fluoroguanosine-3'-phosphate
  modified_base 10: mod_base = OTHER; note = 2'-deoxy-2'-fluoroadenosine-3'-phosphate
  modified_base 11: mod_base = OTHER; note = 2'-deoxy-2'-fluoroguanosine-3'-phosphate
  modified_base 12: mod_base = OTHER; note = 2'-O-methyladenosine-3'-phosphate
  modified_base 13: mod_base = OTHER; note = 2'-O-methyladenosine-3'-phosphate
  modified_base 14: mod_base = OTHER; note = 2'-O-methyladenosine-3'-phosphate
  modified_base 15: mod_base = OTHER; note = 2'-O-methyladenosine-3'-phosphate
  modified_base 16: mod_base = OTHER; note = 2'-O-methylguanosine-3'-phosphate
  modified_base 17: mod_base = OTHER; note = 2'-O-methylcytidine-3'-phosphate
  modified_base 18: mod_base = OTHER; note = 2'-O-methylcytidine-3'-phosphate
  modified_base 19: mod_base = OTHER; note = 2'-O-methyladenosine-3'-phosphate
  modified_base 20: mod_base = OTHER; note = 2'-O-methylcytidine-3'-phosphate
  modified_base 21: mod_base = OTHER; note = 2'-O-methyluridine-3'-phosphate ((2S,4R)-1-[29-[[2-(acetylamino)-2-deoxy-beta-D-galactopyra nosyl]oxy]-14,14-bis[[3-[[3-[[5-[[2-(acetylamino)-2-deoxy-b eta-D-galactopyranosyl]oxy]-1-oxopentyl]amino]propyl]amino] -3-oxopropoxy]methyl]-1,12,19,25-tetraoxo-16-oxa-13,20,24-t riazanonacos-1-yl]-4-hydroxy-2-pyrrolidinyl)methyl ester
gaggcaaagagaaaagccact

SEQ ID NO: 1368 - RNA, 21 nt, synthetic construct
  source 1..21: mol_type = other RNA
  modified_base 1: mod_base = OTHER; note = 2'-O-methylguanosine-3'-phosphorothioate
  modified_base 2: mod_base = OTHER; note = 2'-O-methylcytidine-3'-phosphorothioate
  modified_base 3: mod_base = OTHER; note = 2'-O-methylcytidine-3'-phosphate
  modified_base 4: mod_base = OTHER; note = 2'-O-methyladenosine-3'-phosphate
  modified_base 5: mod_base = OTHER; note = 2'-O-methylcytidine-3'-phosphate
  modified_base 6: mod_base = OTHER; note = 2'-O-methylguanosine-3'-phosphate
  modified_base 7: mod_base = OTHER; note = 2'-deoxy-2'-fluoroguanosine-3'-phosphate
  modified_base 8: mod_base = OTHER; note = 2'-O-methyladenosine-3'-phosphate
  modified_base 9: mod_base = OTHER; note = 2'-deoxy-2'-fluorocytidine-3'-phosphate
  modified_base 10: mod_base = OTHER; note = 2'-deoxy-2'-fluorocytidine-3'-phosphate
  modified_base 11: mod_base = OTHER; note = 2'-deoxy-2'-fluoroguanosine-3'-phosphate
  modified_base 12: mod_base = OTHER; note = 2'-O-methyluridine-3'-phosphate
  modified_base 13: mod_base = OTHER; note = 2'-O-methyluridine-3'-phosphate
  modified_base 14: mod_base = OTHER; note = 2'-O-methylguanosine-3'-phosphate
  modified_base 15: mod_base = OTHER; note = 2'-O-methylcytidine-3'-phosphate
  modified_base 16: mod_base = OTHER; note = 2'-O-methyladenosine-3'-phosphate
  modified_base 17: mod_base = OTHER; note = 2'-O-methylcytidine-3'-phosphate
  modified_base 18: mod_base = OTHER; note = 2'-O-methyladenosine-3'-phosphate
  modified_base 19: mod_base = OTHER; note = 2'-O-methyladenosine-3'-phosphate
  modified_base 20: mod_base = OTHER; note = 2'-O-methyladenosine-3'-phosphate
  modified_base 21: mod_base = OTHER; note = 2'-O-methyluridine-3'-phosphate ((2S,4R)-1-[29-[[2-(acetylamino)-2-deoxy-beta-D-galactopyra nosyl]oxy]-14,14-bis[[3-[[3-[[5-[[2-(acetylamino)-2-deoxy-b eta-D-galactopyranosyl]oxy]-1-oxopentyl]amino]propyl]amino] -3-oxopropoxy]methyl]-1,12,19,25-tetraoxo-16-oxa-13,20,24-t riazanonacos-1-yl]-4-hydroxy-2-pyrrolidinyl)methyl ester
gccacggaccgttgcacaaat

SEQ ID NO: 1369 - RNA, 21 nt, synthetic construct
  source 1..21: mol_type = other RNA
  modified_base 1: mod_base = OTHER; note = 2'-O-methyladenosine-3'-phosphorothioate
  modified_base 2: mod_base = OTHER; note = 2'-O-methylguanosine-3'-phosphorothioate
  modified_base 3: mod_base = OTHER; note = 2'-O-methylguanosine-3'-phosphate
  modified_base 4: mod_base = OTHER; note = 2'-O-methyladenosine-3'-phosphate
  modified_base 5: mod_base = OTHER; note = 2'-O-methyladenosine-3'-phosphate
  modified_base 6: mod_base = OTHER; note = 2'-O-methyladenosine-3'-phosphate
  modified_base 7: mod_base = OTHER; note = 2'-deoxy-2'-fluoroguanosine-3'-phosphate
  modified_base 8: mod_base = OTHER; note = 2'-O-methyluridine-3'-phosphate
  modified_base 9: mod_base = OTHER; note = 2'-deoxy-2'-fluorouridine-3'-phosphate
  modified_base 10: mod_base = OTHER; note = 2'-deoxy-2'-fluorouridine-3'-phosphate
  modified_base 11: mod_base = OTHER; note = 2'-deoxy-2'-fluoroguanosine-3'-phosphate
  modified_base 12: mod_base = OTHER; note = 2'-O-methylguanosine-3'-phosphate
  modified_base 13: mod_base = OTHER; note = 2'-O-methylguanosine-3'-phosphate
  modified_base 14: mod_base = OTHER; note = 2'-O-methyladenosine-3'-phosphate
  modified_base 15: mod_base = OTHER; note = 2'-O-methyladenosine-3'-phosphate
  modified_base 16: mod_base = OTHER; note = 2'-O-methylguanosine-3'-phosphate
  modified_base 17: mod_base = OTHER; note = 2'-O-methylguanosine-3'-phosphate
  modified_base 18: mod_base = OTHER; note = 2'-O-methylguanosine-3'-phosphate
  modified_base 19: mod_base = OTHER; note = 2'-O-methyladenosine-3'-phosphate
  modified_base 20: mod_base = OTHER; note = 2'-O-methyluridine-3'-phosphate
  modified_base 21: mod_base = OTHER; note = 2'-O-methyluridine-3'-phosphate ((2S,4R)-1-[29-[[2-(acetylamino)-2-deoxy-beta-D-galactopyra nosyl]oxy]-14,14-bis[[3-[[3-[[5-[[2-(acetylamino)-2-deoxy-b eta-D-galactopyranosyl]oxy]-1-oxopentyl]amino]propyl]amino] -3-oxopropoxy]methyl]-1,12,19,25-tetraoxo-16-oxa-13,20,24-t riazanonacos-1-yl]-4-hydroxy-2-pyrrolidinyl)methyl ester
aggaaagtttgggaagggatt

SEQ ID NO: 1370 - RNA, 21 nt, synthetic construct
  source 1..21: mol_type = other RNA
  modified_base 1: mod_base = OTHER; note = 2'-O-methylguanosine-3'-phosphorothioate
  modified_base 2: mod_base = OTHER; note = 2'-O-methylguanosine-3'-phosphorothioate
  modified_base 3: mod_base = OTHER; note = 2'-O-methyladenosine-3'-phosphate
  modified_base 4: mod_base = OTHER; note = 2'-O-methylguanosine-3'-phosphate
  modified_base 5: mod_base = OTHER; note = 2'-O-methyladenosine-3'-phosphate
  modified_base 6: mod_base = OTHER; note = 2'-O-methylguanosine-3'-phosphate
  modified_base 7: mod_base = OTHER; note = 2'-deoxy-2'-fluorouridine-3'-phosphate
  modified_base 8: mod_base = OTHER; note = 2'-O-methylguanosine-3'-phosphate
  modified_base 9: mod_base = OTHER; note = 2'-deoxy-2'-fluoroguanosine-3'-phosphate
  modified_base 10: mod_base = OTHER; note = 2'-deoxy-2'-fluorocytidine-3'-phosphate
  modified_base 11: mod_base = OTHER; note = 2'-deoxy-2'-fluorouridine-3'-phosphate
  modified_base 12: mod_base = OTHER; note = 2'-O-methyluridine-3'-phosphate
  modified_base 13: mod_base = OTHER; note = 2'-O-methylguanosine-3'-phosphate
  modified_base 14: mod_base = OTHER; note = 2'-O-methylcytidine-3'-phosphate
  modified_base 15: mod_base = OTHER; note = 2'-O-methyluridine-3'-phosphate
  modified_base 16: mod_base = OTHER; note = 2'-O-methylguanosine-3'-phosphate
  modified_base 17: mod_base = OTHER; note = 2'-O-methyladenosine-3'-phosphate
  modified_base 18: mod_base = OTHER; note = 2'-O-methyluridine-3'-phosphate
  modified_base 19: mod_base = OTHER; note = 2'-O-methylguanosine-3'-phosphate
  modified_base 20: mod_base = OTHER; note = 2'-O-methyluridine-3'-phosphate
  modified_base 21: mod_base = OTHER; note = 2'-O-methyluridine-3'-phosphate ((2S,4R)-1-[29-[[2-(acetylamino)-2-deoxy-beta-D-galactopyra nosyl]oxy]-14,14-bis[[3-[[3-[[5-[[2-(acetylamino)-2-deoxy-b eta-D-galactopyranosyl]oxy]-1-oxopentyl]amino]propyl]amino] -3-oxopropoxy]methyl]-1,12,19,25-tetraoxo-16-oxa-13,20,24-t riazanonacos-1-yl]-4-hydroxy-2-pyrrolidinyl)methyl ester
ggagagtggcttgctgatgtt

SEQ ID NO: 1371 - RNA, 21 nt, synthetic construct
  source 1..21: mol_type = other RNA
  modified_base 1: mod_base = OTHER; note = 2'-O-methyluridine-3'-phosphorothioate
  modified_base 2: mod_base = OTHER; note = 2'-O-methyluridine-3'-phosphorothioate
  modified_base 3: mod_base = OTHER; note = 2'-O-methylguanosine-3'-phosphate
  modified_base 4: mod_base = OTHER; note = 2'-O-methylcytidine-3'-phosphate
  modified_base 5: mod_base = OTHER; note = 2'-O-methyluridine-3'-phosphate
  modified_base 6: mod_base = OTHER; note = 2'-O-methylguanosine-3'-phosphate
  modified_base 7: mod_base = OTHER; note = 2'-deoxy-2'-fluoroadenosine-3'-phosphate
  modified_base 8: mod_base = OTHER; note = 2'-O-methyluridine-3'-phosphate
  modified_base 9: mod_base = OTHER; note = 2'-deoxy-2'-fluoroguanosine-3'-phosphate
  modified_base 10: mod_base = OTHER; note = 2'-deoxy-2'-fluorouridine-3'-phosphate
  modified_base 11: mod_base = OTHER; note = 2'-deoxy-2'-fluorouridine-3'-phosphate
  modified_base 12: mod_base = OTHER; note = 2'-O-methylcytidine-3'-phosphate
  modified_base 13: mod_base = OTHER; note = 2'-O-methylcytidine-3'-phosphate
  modified_base 14: mod_base = OTHER; note = 2'-O-methyluridine-3'-phosphate
  modified_base 15: mod_base = OTHER; note = 2'-O-methyluridine-3'-phosphate
  modified_base 16: mod_base = OTHER; note = 2'-O-methylguanosine-3'-phosphate
  modified_base 17: mod_base = OTHER; note = 2'-O-methyluridine-3'-phosphate
  modified_base 18: mod_base = OTHER; note = 2'-O-methyluridine-3'-phosphate
  modified_base 19: mod_base = OTHER; note = 2'-O-methylguanosine-3'-phosphate
  modified_base 20: mod_base = OTHER; note = 2'-O-methyluridine-3'-phosphate
  modified_base 21: mod_base = OTHER; note = 2'-O-methyluridine-3'-phosphate ((2S,4R)-1-[29-[[2-(acetylamino)-2-deoxy-beta-D-galactopyra nosyl]oxy]-14,14-bis[[3-[[3-[[5-[[2-(acetylamino)-2-deoxy-b eta-D-galactopyranosyl]oxy]-1-oxopentyl]amino]propyl]amino] -3-oxopropoxy]methyl]-1,12,19,25-tetraoxo-16-oxa-13,20,24-t riazanonacos-1-yl]-4-hydroxy-2-pyrrolidinyl)methyl ester
ttgctgatgttccttgttgtt

SEQ ID NO: 1372 - RNA, 21 nt, synthetic construct
  source 1..21: mol_type = other RNA
  modified_base 1: mod_base = OTHER; note = 2'-O-methyluridine-3'-phosphorothioate
  modified_base 2: mod_base = OTHER; note = 2'-O-methyluridine-3'-phosphorothioate
  modified_base 3: mod_base = OTHER; note = 2'-O-methyluridine-3'-phosphate
  modified_base 4: mod_base = OTHER; note = 2'-O-methylcytidine-3'-phosphate
  modified_base 5: mod_base = OTHER; note = 2'-O-methyluridine-3'-phosphate
  modified_base 6: mod_base = OTHER; note = 2'-O-methylguanosine-3'-phosphate
  modified_base 7: mod_base = OTHER; note = 2'-deoxy-2'-fluorouridine-3'-phosphate
  modified_base 8: mod_base = OTHER; note = 2'-O-methyluridine-3'-phosphate
  modified_base 9: mod_base = OTHER; note = 2'-deoxy-2'-fluorouridine-3'-phosphate
  modified_base 10: mod_base = OTHER; note = 2'-deoxy-2'-fluoroguanosine-3'-phosphate
  modified_base 11: mod_base = OTHER; note = 2'-deoxy-2'-fluorouridine-3'-phosphate
  modified_base 12: mod_base = OTHER; note = 2'-O-methylguanosine-3'-phosphate
  modified_base 13: mod_base = OTHER; note = 2'-O-methylguanosine-3'-phosphate
  modified_base 14: mod_base = OTHER; note = 2'-O-methyluridine-3'-phosphate
  modified_base 15: mod_base = OTHER; note = 2'-O-methylcytidine-3'-phosphate
  modified_base 16: mod_base = OTHER; note = 2'-O-methylcytidine-3'-phosphate
  modified_base 17: mod_base = OTHER; note = 2'-O-methylguanosine-3'-phosphate
  modified_base 18: mod_base = OTHER; note = 2'-O-methylguanosine-3'-phosphate
  modified_base 19: mod_base = OTHER; note = 2'-O-methylcytidine-3'-phosphate
  modified_base 20: mod_base = OTHER; note = 2'-O-methylcytidine-3'-phosphate
  modified_base 21: mod_base = OTHER; note = 2'-O-methyluridine-3'-phosphate ((2S,4R)-1-[29-[[2-(acetylamino)-2-deoxy-beta-D-galactopyra nosyl]oxy]-14,14-bis[[3-[[3-[[5-[[2-(acetylamino)-2-deoxy-b eta-D-galactopyranosyl]oxy]-1-oxopentyl]amino]propyl]amino] -3-oxopropoxy]methyl]-1,12,19,25-tetraoxo-16-oxa-13,20,24-t riazanonacos-1-yl]-4-hydroxy-2-pyrrolidinyl)methyl ester
tttctgtttgtggtccggcct

SEQ ID NO: 1373 - RNA, 21 nt, synthetic construct
  source 1..21: mol_type = other RNA
  modified_base 1: mod_base = OTHER; note = 2'-O-methylguanosine-3'-phosphorothioate
  modified_base 2: mod_base = OTHER; note = 2'-O-methyluridine-3'-phosphorothioate
  modified_base 3: mod_base = OTHER; note = 2'-O-methylcytidine-3'-phosphate
  modified_base 4: mod_base = OTHER; note = 2'-O-methylcytidine-3'-phosphate
  modified_base 5: mod_base = OTHER; note = 2'-O-methylguanosine-3'-phosphate
  modified_base 6: mod_base = OTHER; note = 2'-O-methylguanosine-3'-phosphate
  modified_base 7: mod_base = OTHER; note = 2'-deoxy-2'-fluorocytidine-3'-phosphate
  modified_base 8: mod_base = OTHER; note = 2'-O-methylcytidine-3'-phosphate
  modified_base 9: mod_base = OTHER; note = 2'-deoxy-2'-fluorouridine-3'-phosphate
  modified_base 10: mod_base = OTHER; note = 2'-deoxy-2'-fluorouridine-3'-phosphate
  modified_base 11: mod_base = OTHER; note = 2'-deoxy-2'-fluorocytidine-3'-phosphate
  modified_base 12: mod_base = OTHER; note = 2'-O-methyluridine-3'-phosphate
  modified_base 13: mod_base = OTHER; note = 2'-O-methyluridine-3'-phosphate
  modified_base 14: mod_base = OTHER; note = 2'-O-methyluridine-3'-phosphate
  modified_base 15: mod_base = OTHER; note = 2'-O-methyluridine-3'-phosphate
  modified_base 16: mod_base = OTHER; note = 2'-O-methylguanosine-3'-phosphate
  modified_base 17: mod_base = OTHER; note = 2'-O-methyluridine-3'-phosphate
  modified_base 18: mod_base = OTHER; note = 2'-O-methylguanosine-3'-phosphate
  modified_base 19: mod_base = OTHER; note = 2'-O-methyluridine-3'-phosphate
  modified_base 20: mod_base = OTHER; note = 2'-O-methylguanosine-3'-phosphate
  modified_base 21: mod_base = OTHER; note = 2'-O-methyluridine-3'-phosphate ((2S,4R)-1-[29-[[2-(acetylamino)-2-deoxy-beta-D-galactopyra nosyl]oxy]-14,14-bis[[3-[[3-[[5-[[2-(acetylamino)-2-deoxy-b eta-D-galactopyranosyl]oxy]-1-oxopentyl]amino]propyl]amino] -3-oxopropoxy]methyl]-1,12,19,25-tetraoxo-16-oxa-13,20,24-t riazanonacos-1-yl]-4-hydroxy-2-pyrrolidinyl)methyl ester
gtccggccttcttttgtgtgt

SEQ ID NO: 1374 - RNA, 21 nt, synthetic construct
  source 1..21: mol_type = other RNA
  modified_base 1: mod_base = OTHER; note = 2'-O-methyluridine-3'-phosphorothioate
  modified_base 2: mod_base = OTHER; note = 2'-O-methylcytidine-3'-phosphorothioate
  modified_base 3: mod_base = OTHER; note = 2'-O-methyluridine-3'-phosphate
  modified_base 4: mod_base = OTHER; note = 2'-O-methyluridine-3'-phosphate
  modified_base 5: mod_base = OTHER; note = 2'-O-methyluridine-3'-phosphate
  modified_base 6: mod_base = OTHER; note = 2'-O-methyluridine-3'-phosphate
  modified_base 7: mod_base = OTHER; note = 2'-deoxy-2'-fluoroguanosine-3'-phosphate
  modified_base 8: mod_base = OTHER; note = 2'-O-methyluridine-3'-phosphate
  modified_base 9: mod_base = OTHER; note = 2'-deoxy-2'-fluoroguanosine-3'-phosphate
  modified_base 10: mod_base = OTHER; note = 2'-deoxy-2'-fluorouridine-3'-phosphate
  modified_base 11: mod_base = OTHER; note = 2'-deoxy-2'-fluoroguanosine-3'-phosphate
  modified_base 12: mod_base = OTHER; note = 2'-O-methyluridine-3'-phosphate
  modified_base 13: mod_base = OTHER; note = 2'-O-methylguanosine-3'-phosphate
  modified_base 14: mod_base = OTHER; note = 2'-O-methylcytidine-3'-phosphate
  modified_base 15: mod_base = OTHER; note = 2'-O-methylguanosine-3'-phosphate
  modified_base 16: mod_base = OTHER; note = 2'-O-methyluridine-3'-phosphate
  modified_base 17: mod_base = OTHER; note = 2'-O-methylguanosine-3'-phosphate
  modified_base 18: mod_base = OTHER; note = 2'-O-methyluridine-3'-phosphate
  modified_base 19: mod_base = OTHER; note = 2'-O-methylguanosine-3'-phosphate
  modified_base 20: mod_base = OTHER; note = 2'-O-methyladenosine-3'-phosphate
  modified_base 21: mod_base = OTHER; note = 2'-O-methyluridine-3'-phosphate ((2S,4R)-1-[29-[[2-(acetylamino)-2-deoxy-beta-D-galactopyra nosyl]oxy]-14,14-bis[[3-[[3-[[5-[[2-(acetylamino)-2-deoxy-b eta-D-galactopyranosyl]oxy]-1-oxopentyl]amino]propyl]amino] -3-oxopropoxy]methyl]-1,12,19,25-tetraoxo-16-oxa-13,20,24-t riazanonacos-1-yl]-4-hydroxy-2-pyrrolidinyl)methyl ester
tcttttgtgtgtgcgtgtgat

SEQ ID NO: 1375 - RNA, 21 nt, synthetic construct
  source 1..21: mol_type = other RNA
  modified_base 1: mod_base = OTHER; note = 2'-O-methylguanosine-3'-phosphorothioate
  modified_base 2: mod_base = OTHER; note = 2'-O-methyluridine-3'-phosphorothioate
  modified_base 3: mod_base = OTHER; note = 2'-O-methylguanosine-3'-phosphate
  modified_base 4: mod_base = OTHER; note = 2'-O-methyladenosine-3'-phosphate
  modified_base 5: mod_base = OTHER; note = 2'-O-methyluridine-3'-phosphate
  modified_base 6: mod_base = OTHER; note = 2'-O-methylguanosine-3'-phosphate
  modified_base 7: mod_base = OTHER; note = 2'-deoxy-2'-fluorocytidine-3'-phosphate
  modified_base 8: mod_base = OTHER; note = 2'-O-methyladenosine-3'-phosphate
  modified_base 9: mod_base = OTHER; note = 2'-deoxy-2'-fluorouridine-3'-phosphate
  modified_base 10: mod_base = OTHER; note = 2'-deoxy-2'-fluorocytidine-3'-phosphate
  modified_base 11: mod_base = OTHER; note = 2'-deoxy-2'-fluorouridine-3'-phosphate
  modified_base 12: mod_base = OTHER; note = 2'-O-methyluridine-3'-phosphate
  modified_base 13: mod_base = OTHER; note = 2'-O-methyluridine-3'-phosphate
  modified_base 14: mod_base = OTHER; note = 2'-O-methyladenosine-3'-phosphate
  modified_base 15: mod_base = OTHER; note = 2'-O-methylguanosine-3'-phosphate
  modified_base 16: mod_base = OTHER; note = 2'-O-methyladenosine-3'-phosphate
  modified_base 17: mod_base = OTHER; note = 2'-O-methyluridine-3'-phosphate
  modified_base 18: mod_base = OTHER; note = 2'-O-methyluridine-3'-phosphate
  modified_base 19: mod_base = OTHER; note = 2'-O-methyluridine-3'-phosphate
  modified_base 20: mod_base = OTHER; note = 2'-O-methyluridine-3'-phosphate
  modified_base 21: mod_base = OTHER; note = 2'-O-methyluridine-3'-phosphate ((2S,4R)-1-[29-[[2-(acetylamino)-2-deoxy-beta-D-galactopyra nosyl]oxy]-14,14-bis[[3-[[3-[[5-[[2-(acetylamino)-2-deoxy-b eta-D-galactopyranosyl]oxy]-1-oxopentyl]amino]propyl]amino] -3-oxopropoxy]methyl]-1,12,19,25-tetraoxo-16-oxa-13,20,24-t riazanonacos-1-yl]-4-hydroxy-2-pyrrolidinyl)methyl ester
gtgatgcatctttagattttt

SEQ ID NO: 1376 - RNA, 21 nt, synthetic construct
  source 1..21: mol_type = other RNA
  modified_base 1: mod_base = OTHER; note = 2'-O-methylguanosine-3'-phosphorothioate
  modified_base 2: mod_base = OTHER; note = 2'-O-methylguanosine-3'-phosphorothioate
  modified_base 3: mod_base = OTHER; note = 2'-O-methyluridine-3'-phosphate
  modified_base 4: mod_base = OTHER; note = 2'-O-methylguanosine-3'-phosphate
  modified_base 5: mod_base = OTHER; note = 2'-O-methylguanosine-3'-phosphate
  modified_base 6: mod_base = OTHER; note = 2'-O-methyluridine-3'-phosphate
  modified_base 7: mod_base = OTHER; note = 2'-deoxy-2'-fluorouridine-3'-phosphate
  modified_base 8: mod_base = OTHER; note = 2'-O-methyluridine-3'-phosphate
  modified_base 9: mod_base = OTHER; note = 2'-deoxy-2'-fluorouridine-3'-phosphate
  modified_base 10: mod_base = OTHER; note = 2'-deoxy-2'-fluorouridine-3'-phosphate
  modified_base 11: mod_base = OTHER; note = 2'-deoxy-2'-fluoroguanosine-3'-phosphate
  modified_base 12: mod_base = OTHER; note = 2'-O-methyladenosine-3'-phosphate
  modified_base 13: mod_base = OTHER; note = 2'-O-methylcytidine-3'-phosphate
  modified_base 14: mod_base = OTHER; note = 2'-O-methyladenosine-3'-phosphate
  modified_base 15: mod_base = OTHER; note = 2'-O-methylcytidine-3'-phosphate
  modified_base 16: mod_base = OTHER; note = 2'-O-methyluridine-3'-phosphate
  modified_base 17: mod_base = OTHER; note = 2'-O-methylcytidine-3'-phosphate
  modified_base 18: mod_base = OTHER; note = 2'-O-methyluridine-3'-phosphate
  modified_base 19: mod_base = OTHER; note = 2'-O-methylcytidine-3'-phosphate
  modified_base 20: mod_base = OTHER; note = 2'-O-methyluridine-3'-phosphate
  modified_base 21: mod_base = OTHER; note = 2'-O-methyluridine-3'-phosphate ((2S,4R)-1-[29-[[2-(acetylamino)-2-deoxy-beta-D-galactopyra nosyl]oxy]-14,14-bis[[3-[[3-[[5-[[2-(acetylamino)-2-deoxy-b eta-D-galactopyranosyl]oxy]-1-oxopentyl]amino]propyl]amino] -3-oxopropoxy]methyl]-1,12,19,25-tetraoxo-16-oxa-13,20,24-t riazanonacos-1-yl]-4-hydroxy-2-pyrrolidinyl)methyl ester
ggtggtttttgacactctctt

SEQ ID NO: 1377 - RNA, 21 nt, synthetic construct
  source 1..21: mol_type = other RNA
  modified_base 1: mod_base = OTHER; note = 2'-O-methylguanosine-3'-phosphorothioate
  modified_base 2: mod_base = OTHER; note = 2'-O-methyladenosine-3'-phosphorothioate
  modified_base 3: mod_base = OTHER; note = 2'-O-methylcytidine-3'-phosphate
  modified_base 4: mod_base = OTHER; note = 2'-O-methyladenosine-3'-phosphate
  modified_base 5: mod_base = OTHER; note = 2'-O-methylcytidine-3'-phosphate
  modified_base 6: mod_base = OTHER; note = 2'-O-methyluridine-3'-phosphate
  modified_base 7: mod_base = OTHER; note = 2'-deoxy-2'-fluorocytidine-3'-phosphate
  modified_base 8: mod_base = OTHER; note = 2'-O-methyluridine-3'-phosphate
  modified_base 9: mod_base = OTHER; note = 2'-deoxy-2'-fluorocytidine-3'-phosphate
  modified_base 10: mod_base = OTHER; note = 2'-deoxy-2'-fluorouridine-3'-phosphate
  modified_base 11: mod_base = OTHER; note = 2'-deoxy-2'-fluoroguanosine-3'-phosphate
  modified_base 12: mod_base = OTHER; note = 2'-O-methyladenosine-3'-phosphate
  modified_base 13: mod_base = OTHER; note = 2'-O-methylguanosine-3'-phosphate
  modified_base 14: mod_base = OTHER; note = 2'-O-methyladenosine-3'-phosphate
  modified_base 15: mod_base = OTHER; note = 2'-O-methylguanosine-3'-phosphate
  modified_base 16: mod_base = OTHER; note = 2'-O-methylguanosine-3'-phosphate
  modified_base 17: mod_base = OTHER; note = 2'-O-methyladenosine-3'-phosphate
  modified_base 18: mod_base = OTHER; note = 2'-O-methylcytidine-3'-phosphate
  modified_base 19: mod_base = OTHER; note = 2'-O-methylcytidine-3'-phosphate
  modified_base 20: mod_base = OTHER; note = 2'-O-methylguanosine-3'-phosphate
  modified_base 21: mod_base = OTHER; note = 2'-O-methyluridine-3'-phosphate ((2S,4R)-1-[29-[[2-(acetylamino)-2-deoxy-beta-D-galactopyra nosyl]oxy]-14,14-bis[[3-[[3-[[5-[[2-(acetylamino)-2-deoxy-b eta-D-galactopyranosyl]oxy]-1-oxopentyl]amino]propyl]amino] -3-oxopropoxy]methyl]-1,12,19,25-tetraoxo-16-oxa-13,20,24-t riazanonacos-1-yl]-4-hydroxy-2-pyrrolidinyl)methyl ester
gacactctctgagaggaccgt

SEQ ID NO: 1378 - RNA, 21 nt, synthetic construct
  source 1..21: mol_type = other RNA
  modified_base 1: mod_base = OTHER; note = 2'-O-methylguanosine-3'-phosphorothioate
  modified_base 2: mod_base = OTHER; note = 2'-O-methyladenosine-3'-phosphorothioate
  modified_base 3: mod_base = OTHER; note = 2'-O-methylguanosine-3'-phosphate
  modified_base 4: mod_base = OTHER; note = 2'-O-methyluridine-3'-phosphate
  modified_base 5: mod_base = OTHER; note = 2'-O-methylguanosine-3'-phosphate
  modified_base 6: mod_base = OTHER; note = 2'-O-methylguanosine-3'-phosphate
  modified_base 7: mod_base = OTHER; note = 2'-deoxy-2'-fluoroadenosine-3'-phosphate
  modified_base 8: mod_base = OTHER; note = 2'-O-methyladenosine-3'-phosphate
  modified_base 9: mod_base = OTHER; note = 2'-deoxy-2'-fluoroguanosine-3'-phosphate
  modified_base 10: mod_base = OTHER; note = 2'-deoxy-2'-fluoroadenosine-3'-phosphate
  modified_base 11: mod_base = OTHER; note = 2'-deoxy-2'-fluorouridine-3'-phosphate
  modified_base 12: mod_base = OTHER; note = 2'-O-methylguanosine-3'-phosphate
  modified_base 13: mod_base = OTHER; note = 2'-O-methylguanosine-3'-phosphate
  modified_base 14: mod_base = OTHER; note = 2'-O-methylguanosine-3'-phosphate
  modified_base 15: mod_base = OTHER; note = 2'-O-methyluridine-3'-phosphate
  modified_base 16: mod_base = OTHER; note = 2'-O-methylguanosine-3'-phosphate
  modified_base 17: mod_base = OTHER; note = 2'-O-methylguanosine-3'-phosphate
  modified_base 18: mod_base = OTHER; note = 2'-O-methylguanosine-3'-phosphate
  modified_base 19: mod_base = OTHER; note = 2'-O-methyluridine-3'-phosphate
  modified_base 20: mod_base = OTHER; note = 2'-O-methyluridine-3'-phosphate
  modified_base 21: mod_base = OTHER; note = 2'-O-methyluridine-3'-phosphate ((2S,4R)-1-[29-[[2-(acetylamino)-2-deoxy-beta-D-galactopyra nosyl]oxy]-14,14-bis[[3-[[3-[[5-[[2-(acetylamino)-2-deoxy-b eta-D-galactopyranosyl]oxy]-1-oxopentyl]amino]propyl]amino] -3-oxopropoxy]methyl]-1,12,19,25-tetraoxo-16-oxa-13,20,24-t riazanonacos-1-yl]-4-hydroxy-2-pyrrolidinyl)methyl ester
gagtggaagatgggtgggttt

SEQ ID NO: 1379 - RNA, 21 nt, synthetic construct
  source 1..21: mol_type = other RNA
  modified_base 1: mod_base = OTHER; note = 2'-O-methyladenosine-3'-phosphorothioate
  modified_base 2: mod_base = OTHER; note = 2'-O-methyladenosine-3'-phosphorothioate
  modified_base 3: mod_base = OTHER; note = 2'-O-methylguanosine-3'-phosphate
  modified_base 4: mod_base = OTHER; note = 2'-O-methylguanosine-3'-phosphate
  modified_base 5: mod_base = OTHER; note = 2'-O-methylguanosine-3'-phosphate
  modified_base 6: mod_base = OTHER; note = 2'-O-methyladenosine-3'-phosphate
  modified_base 7: mod_base = OTHER; note = 2'-deoxy-2'-fluoroguanosine-3'-phosphate
  modified_base 8: mod_base = OTHER; note = 2'-O-methyladenosine-3'-phosphate
  modified_base 9: mod_base = OTHER; note = 2'-deoxy-2'-fluoroadenosine-3'-phosphate
  modified_base 10: mod_base = OTHER; note = 2'-deoxy-2'-fluoroguanosine-3'-phosphate
  modified_base 11: mod_base = OTHER; note = 2'-deoxy-2'-fluorocytidine-3'-phosphate
  modified_base 12: mod_base = OTHER; note = 2'-O-methyladenosine-3'-phosphate
  modified_base 13: mod_base = OTHER; note = 2'-O-methyluridine-3'-phosphate
  modified_base 14: mod_base = OTHER; note = 2'-O-methyluridine-3'-phosphate
  modified_base 15: mod_base = OTHER; note = 2'-O-methyladenosine-3'-phosphate
  modified_base 16: mod_base = OTHER; note = 2'-O-methylguanosine-3'-phosphate
  modified_base 17: mod_base = OTHER; note = 2'-O-methylguanosine-3'-phosphate
  modified_base 18: mod_base = OTHER; note = 2'-O-methyladenosine-3'-phosphate
  modified_base 19: mod_base = OTHER; note = 2'-O-methylguanosine-3'-phosphate
  modified_base 20: mod_base = OTHER; note = 2'-O-methylguanosine-3'-phosphate
  modified_base 21: mod_base = OTHER; note = 2'-O-methyluridine-3'-phosphate ((2S,4R)-1-[29-[[2-(acetylamino)-2-deoxy-beta-D-galactopyra nosyl]oxy]-14,14-bis[[3-[[3-[[5-[[2-(acetylamino)-2-deoxy-b eta-D-galactopyranosyl]oxy]-1-oxopentyl]amino]propyl]amino] -3-oxopropoxy]methyl]-1,12,19,25-tetraoxo-16-oxa-13,20,24-t riazanonacos-1-yl]-4-hydroxy-2-pyrrolidinyl)methyl ester
aagggagaagcattaggaggt

SEQ ID NO: 1380 - RNA, 21 nt, synthetic construct
  source 1..21: mol_type = other RNA
  modified_base 1: mod_base = OTHER; note = 2'-O-methylguanosine-3'-phosphorothioate
  modified_base 2: mod_base = OTHER; note = 2'-O-methyladenosine-3'-phosphorothioate
  modified_base 3: mod_base = OTHER; note = 2'-O-methyluridine-3'-phosphate
  modified_base 4: mod_base = OTHER; note = 2'-O-methyluridine-3'-phosphate
  modified_base 5: mod_base = OTHER; note = 2'-O-methyladenosine-3'-phosphate
  modified_base 6: mod_base = OTHER; note = 2'-O-methyladenosine-3'-phosphate
  modified_base 7: mod_base = OTHER; note = 2'-deoxy-2'-fluoroadenosine-3'-phosphate
  modified_base 8: mod_base = OTHER; note = 2'-O-methyladenosine-3'-phosphate
  modified_base 9: mod_base = OTHER; note = 2'-deoxy-2'-fluorouridine-3'-phosphate
  modified_base 10: mod_base = OTHER; note = 2'-deoxy-2'-fluorocytidine-3'-phosphate
  modified_base 11: mod_base = OTHER; note = 2'-deoxy-2'-fluoroguanosine-3'-phosphate
  modified_base 12: mod_base = OTHER; note = 2'-O-methyladenosine-3'-phosphate
  modified_base 13: mod_base = OTHER; note = 2'-O-methyluridine-3'-phosphate
  modified_base 14: mod_base = OTHER; note = 2'-O-methylcytidine-3'-phosphate
  modified_base 15: mod_base = OTHER; note = 2'-O-methyladenosine-3'-phosphate
  modified_base 16: mod_base = OTHER; note = 2'-O-methyluridine-3'-phosphate
  modified_base 17: mod_base = OTHER; note = 2'-O-methylcytidine-3'-phosphate
  modified_base 18: mod_base = OTHER; note = 2'-O-methylguanosine-3'-phosphate
  modified_base 19: mod_base = OTHER; note = 2'-O-methyluridine-3'-phosphate
  modified_base 20: mod_base = OTHER; note = 2'-O-methylguanosine-3'-phosphate
  modified_base 21: mod_base = OTHER; note = 2'-O-methyluridine-3'-phosphate ((2S,4R)-1-[29-[[2-(acetylamino)-2-deoxy-beta-D-galactopyra nosyl]oxy]-14,14-bis[[3-[[3-[[5-[[2-(acetylamino)-2-deoxy-b eta-D-galactopyranosyl]oxy]-1-oxopentyl]amino]propyl]amino] -3-oxopropoxy]methyl]-1,12,19,25-tetraoxo-16-oxa-13,20,24-t riazanonacos-1-yl]-4-hydroxy-2-pyrrolidinyl)methyl ester
gattaaaatcgatcatcgtgt

SEQ ID NO: 1381 - RNA, 21 nt, synthetic construct
  source 1..21: mol_type = other RNA
  modified_base 1: mod_base = OTHER; note = 2'-O-methyladenosine-3'-phosphorothioate
  modified_base 2: mod_base = OTHER; note = 2'-O-methyluridine-3'-phosphorothioate
  modified_base 3: mod_base = OTHER; note = 2'-O-methylcytidine-3'-phosphate
  modified_base 4: mod_base = OTHER; note = 2'-O-methylguanosine-3'-phosphate
  modified_base 5: mod_base = OTHER; note = 2'-O-methyluridine-3'-phosphate
  modified_base 6: mod_base = OTHER; note = 2'-O-methylguanosine-3'-phosphate
  modified_base 7: mod_base = OTHER; note = 2'-deoxy-2'-fluoroguanosine-3'-phosphate
  modified_base 8: mod_base = OTHER; note = 2'-O-methylcytidine-3'-phosphate
  modified_base 9: mod_base = OTHER; note = 2'-deoxy-2'-fluorouridine-3'-phosphate
  modified_base 10: mod_base = OTHER; note = 2'-deoxy-2'-fluorocytidine-3'-phosphate
  modified_base 11: mod_base = OTHER; note = 2'-deoxy-2'-fluorocytidine-3'-phosphate
  modified_base 12: mod_base = OTHER; note = 2'-O-methylcytidine-3'-phosphate
  modified_base 13: mod_base = OTHER; note = 2'-O-methyladenosine-3'-phosphate
  modified_base 14: mod_base = OTHER; note = 2'-O-methyluridine-3'-phosphate
  modified_base 15: mod_base = OTHER; note = 2'-O-methylcytidine-3'-phosphate
  modified_base 16: mod_base = OTHER; note = 2'-O-methylcytidine-3'-phosphate
  modified_base 17: mod_base = OTHER; note = 2'-O-methylcytidine-3'-phosphate
  modified_base 18: mod_base = OTHER; note = 2'-O-methyluridine-3'-phosphate
  modified_base 19: mod_base = OTHER; note = 2'-O-methyluridine-3'-phosphate
  modified_base 20: mod_base = OTHER; note = 2'-O-methyluridine-3'-phosphate
  modified_base 21: mod_base = OTHER; note = 2'-O-methyluridine-3'-phosphate ((2S,4R)-1-[29-[[2-(acetylamino)-2-deoxy-beta-D-galactopyra nosyl]oxy]-14,14-bis[[3-[[3-[[5-[[2-(acetylamino)-2-deoxy-b eta-D-galactopyranosyl]oxy]-1-oxopentyl]amino]propyl]amino] -3-oxopropoxy]methyl]-1,12,19,25-tetraoxo-16-oxa-13,20,24-t riazanonacos-1-yl]-4-hydroxy-2-pyrrolidinyl)methyl ester
atcgtggctcccatccctttt

SEQ ID NO: 1382 - RNA, 21 nt, synthetic construct
  source 1..21: mol_type = other RNA
  modified_base 1: mod_base = OTHER; note = 2'-O-methylcytidine-3'-phosphorothioate
  modified_base 2: mod_base = OTHER; note = 2'-O-methylcytidine-3'-phosphorothioate
  modified_base 3: mod_base = OTHER; note = 2'-O-methylcytidine-3'-phosphate
  modified_base 4: mod_base = OTHER; note = 2'-O-methyladenosine-3'-phosphate
  modified_base 5: mod_base = OTHER; note = 2'-O-methyluridine-3'-phosphate
  modified_base 6: mod_base = OTHER; note = 2'-O-methylcytidine-3'-phosphate
  modified_base 7: mod_base = OTHER; note = 2'-deoxy-2'-fluorocytidine-3'-phosphate
  modified_base 8: mod_base = OTHER; note = 2'-O-methylcytidine-3'-phosphate
  modified_base 9: mod_base = OTHER; note = 2'-deoxy-2'-fluorouridine-3'-phosphate
  modified_base 10: mod_base = OTHER; note = 2'-deoxy-2'-fluorouridine-3'-phosphate
  modified_base 11: mod_base = OTHER; note = 2'-deoxy-2'-fluorouridine-3'-phosphate
  modified_base 12: mod_base = OTHER; note = 2'-O-methylcytidine-3'-phosphate
  modified_base 13: mod_base = OTHER; note = 2'-O-methylcytidine-3'-phosphate
  modified_base 14: mod_base = OTHER; note = 2'-O-methylcytidine-3'-phosphate
  modified_base 15: mod_base = OTHER; note = 2'-O-methylguanosine-3'-phosphate
  modified_base 16: mod_base = OTHER; note = 2'-O-methylguanosine-3'-phosphate
  modified_base 17: mod_base = OTHER; note = 2'-O-methylguanosine-3'-phosphate
  modified_base 18: mod_base = OTHER; note = 2'-O-methyladenosine-3'-phosphate
  modified_base 19: mod_base = OTHER; note = 2'-O-methyladenosine-3'-phosphate
  modified_base 20: mod_base = OTHER; note = 2'-O-methylcytidine-3'-phosphate
  modified_base 21: mod_base = OTHER; note = 2'-O-methyluridine-3'-phosphate ((2S,4R)-1-[29-[[2-(acetylamino)-2-deoxy-beta-D-galactopyra nosyl]oxy]-14,14-bis[[3-[[3-[[5-[[2-(acetylamino)-2-deoxy-b eta-D-galactopyranosyl]oxy]-1-oxopentyl]amino]propyl]amino] -3-oxopropoxy]methyl]-1,12,19,25-tetraoxo-16-oxa-13,20,24-t riazanonacos-1-yl]-4-hydroxy-2-pyrrolidinyl)methyl ester
cccatccctttcccgggaact

SEQ ID NO: 1383 - RNA, 21 nt, synthetic construct
  source 1..21: mol_type = other RNA
  modified_base 1: mod_base = OTHER; note = 2'-O-methylcytidine-3'-phosphorothioate
  modified_base 2: mod_base = OTHER; note = 2'-O-methylguanosine-3'-phosphorothioate
  modified_base 3: mod_base = OTHER; note = 2'-O-methylguanosine-3'-phosphate
  modified_base 4: mod_base = OTHER; note = 2'-O-methylguanosine-3'-phosphate
  modified_base 5: mod_base = OTHER; note = 2'-O-methyladenosine-3'-phosphate
  modified_base 6: mod_base = OTHER; note = 2'-O-methyladenosine-3'-phosphate
  modified_base 7: mod_base = OTHER; note = 2'-deoxy-2'-fluorocytidine-3'-phosphate
  modified_base 8: mod_base = OTHER; note = 2'-O-methyladenosine-3'-phosphate
  modified_base 9: mod_base = OTHER; note = 2'-deoxy-2'-fluoroguanosine-3'-phosphate
  modified_base 10: mod_base = OTHER; note = 2'-deoxy-2'-fluoroguanosine-3'-phosphate
  modified_base 11: mod_base = OTHER; note = 2'-deoxy-2'-fluoroadenosine-3'-phosphate
  modified_base 12: mod_base = OTHER; note = 2'-O-methyladenosine-3'-phosphate
  modified_base 13: mod_base = OTHER; note = 2'-O-methylcytidine-3'-phosphate
  modified_base 14: mod_base = OTHER; note = 2'-O-methyladenosine-3'-phosphate
  modified_base 15: mod_base = OTHER; note = 2'-O-methylcytidine-3'-phosphate
  modified_base 16: mod_base = OTHER; note = 2'-O-methyladenosine-3'-phosphate
  modified_base 17: mod_base = OTHER; note = 2'-O-methylcytidine-3'-phosphate
  modified_base 18: mod_base = OTHER; note = 2'-O-methyluridine-3'-phosphate
  modified_base 19: mod_base = OTHER; note = 2'-O-methyladenosine-3'-phosphate
  modified_base 20: mod_base = OTHER; note = 2'-O-methylcytidine-3'-phosphate
  modified_base 21: mod_base = OTHER; note = 2'-O-methyluridine-3'-phosphate ((2S,4R)-1-[29-[[2-(acetylamino)-2-deoxy-beta-D-galactopyra nosyl]oxy]-14,14-bis[[3-[[3-[[5-[[2-(acetylamino)-2-deoxy-b eta-D-galactopyranosyl]oxy]-1-oxopentyl]amino]propyl]amino] -3-oxopropoxy]methyl]-1,12,19,25-tetraoxo-16-oxa-13,20,24-t riazanonacos-1-yl]-4-hydroxy-2-pyrrolidinyl)methyl ester
cgggaacaggaacacactact

SEQ ID NO: 1384 - RNA, 21 nt, synthetic construct
  source 1..21: mol_type = other RNA
  modified_base 1: mod_base = OTHER; note = 2'-O-methylguanosine-3'-phosphorothioate
  modified_base 2: mod_base = OTHER; note = 2'-O-methyladenosine-3'-phosphorothioate
  modified_base 3: mod_base = OTHER; note = 2'-O-methyladenosine-3'-phosphate
  modified_base 4: mod_base = OTHER; note = 2'-O-methylcytidine-3'-phosphate
  modified_base 5: mod_base = OTHER; note = 2'-O-methyladenosine-3'-phosphate
  modified_base 6: mod_base = OTHER; note = 2'-O-methylcytidine-3'-phosphate
  modified_base 7: mod_base = OTHER; note = 2'-deoxy-2'-fluoroadenosine-3'-phosphate
  modified_base 8: mod_base = OTHER; note = 2'-O-methylcytidine-3'-phosphate
  modified_base 9: mod_base = OTHER; note = 2'-deoxy-2'-fluorouridine-3'-phosphate
  modified_base 10: mod_base = OTHER; note = 2'-deoxy-2'-fluoroadenosine-3'-phosphate
  modified_base 11: mod_base = OTHER; note = 2'-deoxy-2'-fluorocytidine-3'-phosphate
  modified_base 12: mod_base = OTHER; note = 2'-O-methylcytidine-3'-phosphate
  modified_base 13: mod_base = OTHER; note = 2'-O-methyladenosine-3'-phosphate
  modified_base 14: mod_base = OTHER; note = 2'-O-methylguanosine-3'-phosphate
  modified_base 15: mod_base = OTHER; note = 2'-O-methylcytidine-3'-phosphate
  modified_base 16: mod_base = OTHER; note = 2'-O-methylcytidine-3'-phosphate
  modified_base 17: mod_base = OTHER; note = 2'-O-methyladenosine-3'-phosphate
  modified_base 18: mod_base = OTHER; note = 2'-O-methylguanosine-3'-phosphate
  modified_base 19: mod_base = OTHER; note = 2'-O-methyladenosine-3'-phosphate
  modified_base 20: mod_base = OTHER; note = 2'-O-methylguanosine-3'-phosphate
  modified_base 21: mod_base = OTHER; note = 2'-O-methyluridine-3'-phosphate ((2S,4R)-1-[29-[[2-(acetylamino)-2-deoxy-beta-D-galactopyra nosyl]oxy]-14,14-bis[[3-[[3-[[5-[[2-(acetylamino)-2-deoxy-b eta-D-galactopyranosyl]oxy]-1-oxopentyl]amino]propyl]amino] -3-oxopropoxy]methyl]-1,12,19,25-tetraoxo-16-oxa-13,20,24-t riazanonacos-1-yl]-4-hydroxy-2-pyrrolidinyl)methyl ester
gaacacactaccagccagagt

SEQ ID NO: 1385 - RNA, 21 nt, synthetic construct
  source 1..21: mol_type = other RNA
  modified_base 1: mod_base = OTHER; note = 2'-O-methyladenosine-3'-phosphorothioate
  modified_base 2: mod_base = OTHER; note = 2'-O-methylcytidine-3'-phosphorothioate
  modified_base 3: mod_base = OTHER; note = 2'-O-methylcytidine-3'-phosphate
  modified_base 4: mod_base = OTHER; note = 2'-O-methyladenosine-3'-phosphate
  modified_base 5: mod_base = OTHER; note = 2'-O-methylguanosine-3'-phosphate
  modified_base 6: mod_base = OTHER; note = 2'-O-methylcytidine-3'-phosphate
  modified_base 7: mod_base = OTHER; note = 2'-deoxy-2'-fluorocytidine-3'-phosphate
  modified_base 8: mod_base = OTHER; note = 2'-O-methyladenosine-3'-phosphate
  modified_base 9: mod_base = OTHER; note = 2'-deoxy-2'-fluoroguanosine-3'-phosphate
  modified_base 10: mod_base = OTHER; note = 2'-deoxy-2'-fluoroadenosine-3'-phosphate
  modified_base 11: mod_base = OTHER; note = 2'-deoxy-2'-fluoroguanosine-3'-phosphate
  modified_base 12: mod_base = OTHER; note = 2'-O-methyladenosine-3'-phosphate
  modified_base 13: mod_base = OTHER; note = 2'-O-methylguanosine-3'-phosphate
  modified_base 14: mod_base = OTHER; note = 2'-O-methyladenosine-3'-phosphate
  modified_base 15: mod_base = OTHER; note = 2'-O-methylguanosine-3'-phosphate
  modified_base 16: mod_base = OTHER; note = 2'-O-methylguanosine-3'-phosphate
  modified_base 17: mod_base = OTHER; note = 2'-O-methyladenosine-3'-phosphate
  modified_base 18: mod_base = OTHER; note = 2'-O-methylguanosine-3'-phosphate
  modified_base 19: mod_base = OTHER; note = 2'-O-methyladenosine-3'-phosphate
  modified_base 20: mod_base = OTHER; note = 2'-O-methyladenosine-3'-phosphate
  modified_base 21: mod_base = OTHER; note = 2'-O-methyluridine-3'-phosphate ((2S,4R)-1-[29-[[2-(acetylamino)-2-deoxy-beta-D-galactopyra nosyl]oxy]-14,14-bis[[3-[[3-[[5-[[2-(acetylamino)-2-deoxy-b eta-D-galactopyranosyl]oxy]-1-oxopentyl]amino]propyl]amino] -3-oxopropoxy]methyl]-1,12,19,25-tetraoxo-16-oxa-13,20,24-t riazanonacos-1-yl]-4-hydroxy-2-pyrrolidinyl)methyl ester
accagccagagagaggagaat

SEQ ID NO: 1386 - RNA, 21 nt, synthetic construct
  source 1..21: mol_type = other RNA
  modified_base 1: mod_base = OTHER; note = 2'-O-methyladenosine-3'-phosphorothioate
  modified_base 2: mod_base = OTHER; note = 2'-O-methylguanosine-3'-phosphorothioate
  modified_base 3: mod_base = OTHER; note = 2'-O-methyladenosine-3'-phosphate
  modified_base 4: mod_base = OTHER; note = 2'-O-methylguanosine-3'-phosphate
  modified_base 5: mod_base = OTHER; note = 2'-O-methyladenosine-3'-phosphate
  modified_base 6: mod_base = OTHER; note = 2'-O-methylguanosine-3'-phosphate
  modified_base 7: mod_base = OTHER; note = 2'-deoxy-2'-fluoroguanosine-3'-phosphate
  modified_base 8: mod_base = OTHER; note = 2'-O-methyladenosine-3'-phosphate
  modified_base 9: mod_base = OTHER; note = 2'-deoxy-2'-fluoroguanosine-3'-phosphate
  modified_base 10: mod_base = OTHER; note = 2'-deoxy-2'-fluoroadenosine-3'-phosphate
  modified_base 11: mod_base = OTHER; note = 2'-deoxy-2'-fluoroadenosine-3'-phosphate
  modified_base 12: mod_base = OTHER; note = 2'-O-methyluridine-3'-phosphate
  modified_base 13: mod_base = OTHER; note = 2'-O-methylguanosine-3'-phosphate
  modified_base 14: mod_base = OTHER; note = 2'-O-methyladenosine-3'-phosphate
  modified_base 15: mod_base = OTHER; note = 2'-O-methylcytidine-3'-phosphate
  modified_base 16: mod_base = OTHER; note = 2'-O-methyladenosine-3'-phosphate
  modified_base 17: mod_base = OTHER; note = 2'-O-methylguanosine-3'-phosphate
  modified_base 18: mod_base = OTHER; note = 2'-O-methyluridine-3'-phosphate
  modified_base 19: mod_base = OTHER; note = 2'-O-methyluridine-3'-phosphate
  modified_base 20: mod_base = OTHER; note = 2'-O-methyluridine-3'-phosphate
  modified_base 21: mod_base = OTHER; note = 2'-O-methyluridine-3'-phosphate ((2S,4R)-1-[29-[[2-(acetylamino)-2-deoxy-beta-D-galactopyra nosyl]oxy]-14,14-bis[[3-[[3-[[5-[[2-(acetylamino)-2-deoxy-b eta-D-galactopyranosyl]oxy]-1-oxopentyl]amino]propyl]amino] -3-oxopropoxy]methyl]-1,12,19,25-tetraoxo-16-oxa-13,20,24-t riazanonacos-1-yl]-4-hydroxy-2-pyrrolidinyl)methyl ester
agagaggagaatgacagtttt

SEQ ID NO: 1387 - RNA, 21 nt, synthetic construct
  source 1..21: mol_type = other RNA
  modified_base 1: mod_base = OTHER; note = 2'-O-methyladenosine-3'-phosphorothioate
  modified_base 2: mod_base = OTHER; note = 2'-O-methyluridine-3'-phosphorothioate
  modified_base 3: mod_base = OTHER; note = 2'-O-methylguanosine-3'-phosphate
  modified_base 4: mod_base = OTHER; note = 2'-O-methyladenosine-3'-phosphate
  modified_base 5: mod_base = OTHER; note = 2'-O-methylcytidine-3'-phosphate
  modified_base 6: mod_base = OTHER; note = 2'-O-methyladenosine-3'-phosphate
  modified_base 7: mod_base = OTHER; note = 2'-deoxy-2'-fluoroguanosine-3'-phosphate
  modified_base 8: mod_base = OTHER; note = 2'-O-methyluridine-3'-phosphate
  modified_base 9: mod_base = OTHER; note = 2'-deoxy-2'-fluorouridine-3'-phosphate
  modified_base 10: mod_base = OTHER; note = 2'-deoxy-2'-fluorouridine-3'-phosphate
  modified_base 11: mod_base = OTHER; note = 2'-deoxy-2'-fluoroguanosine-3'-phosphate
  modified_base 12: mod_base = OTHER; note = 2'-O-methyluridine-3'-phosphate
  modified_base 13: mod_base = OTHER; note = 2'-O-methylcytidine-3'-phosphate
  modified_base 14: mod_base = OTHER; note = 2'-O-methyladenosine-3'-phosphate
  modified_base 15: mod_base = OTHER; note = 2'-O-methyladenosine-3'-phosphate
  modified_base 16: mod_base = OTHER; note = 2'-O-methylguanosine-3'-phosphate
  modified_base 17: mod_base = OTHER; note = 2'-O-methyladenosine-3'-phosphate
  modified_base 18: mod_base = OTHER; note = 2'-O-methylcytidine-3'-phosphate
  modified_base 19: mod_base = OTHER; note = 2'-O-methyladenosine-3'-phosphate
  modified_base 20: mod_base = OTHER; note = 2'-O-methyluridine-3'-phosphate
  modified_base 21: mod_base = OTHER; note = 2'-O-methyluridine-3'-phosphate ((2S,4R)-1-[29-[[2-(acetylamino)-2-deoxy-beta-D-galactopyra nosyl]oxy]-14,14-bis[[3-[[3-[[5-[[2-(acetylamino)-2-deoxy-b eta-D-galactopyranosyl]oxy]-1-oxopentyl]amino]propyl]amino] -3-oxopropoxy]methyl]-1,12,19,25-tetraoxo-16-oxa-13,20,24-t riazanonacos-1-yl]-4-hydroxy-2-pyrrolidinyl)methyl ester
atgacagtttgtcaagacatt

SEQ ID NO: 1388 - RNA, 21 nt, synthetic construct
  source 1..21: mol_type = other RNA
  modified_base 1: mod_base = OTHER; note = 2'-O-methyladenosine-3'-phosphorothioate
  modified_base 2: mod_base = OTHER; note = 2'-O-methyladenosine-3'-phosphorothioate
  modified_base 3: mod_base = OTHER; note = 2'-O-methylguanosine-3'-phosphate
  modified_base 4: mod_base = OTHER; note = 2'-O-methyladenosine-3'-phosphate
  modified_base 5: mod_base = OTHER; note = 2'-O-methylcytidine-3'-phosphate
  modified_base 6: mod_base = OTHER; note = 2'-O-methyladenosine-3'-phosphate
  modified_base 7: mod_base = OTHER; note = 2'-deoxy-2'-fluorouridine-3'-phosphate
  modified_base 8: mod_base = OTHER; note = 2'-O-methyladenosine-3'-phosphate
  modified_base 9: mod_base = OTHER; note = 2'-deoxy-2'-fluorouridine-3'-phosphate
  modified_base 10: mod_base = OTHER; note = 2'-deoxy-2'-fluorouridine-3'-phosphate
  modified_base 11: mod_base = OTHER; note = 2'-deoxy-2'-fluorouridine-3'-phosphate
  modified_base 12: mod_base = OTHER; note = 2'-O-methylcytidine-3'-phosphate
  modified_base 13: mod_base = OTHER; note = 2'-O-methylcytidine-3'-phosphate
  modified_base 14: mod_base = OTHER; note = 2'-O-methyluridine-3'-phosphate
  modified_base 15: mod_base = OTHER; note = 2'-O-methyluridine-3'-phosphate
  modified_base 16: mod_base = OTHER; note = 2'-O-methyluridine-3'-phosphate
  modified_base 17: mod_base = OTHER; note = 2'-O-methyluridine-3'-phosphate
  modified_base 18: mod_base = OTHER; note = 2'-O-methylguanosine-3'-phosphate
  modified_base 19: mod_base = OTHER; note = 2'-O-methylcytidine-3'-phosphate
  modified_base 20: mod_base = OTHER; note = 2'-O-methyluridine-3'-phosphate
  modified_base 21: mod_base = OTHER; note = 2'-O-methyluridine-3'-phosphate ((2S,4R)-1-[29-[[2-(acetylamino)-2-deoxy-beta-D-galactopyra nosyl]oxy]-14,14-bis[[3-[[3-[[5-[[2-(acetylamino)-2-deoxy-b eta-D-galactopyranosyl]oxy]-1-oxopentyl]amino]propyl]amino] -3-oxopropoxy]methyl]-1,12,19,25-tetraoxo-16-oxa-13,20,24-t riazanonacos-1-yl]-4-hydroxy-2-pyrrolidinyl)methyl ester
aagacatatttccttttgctt

SEQ ID NO: 1389 - RNA, 21 nt, synthetic construct
  source 1..21: mol_type = other RNA
  modified_base 1: mod_base = OTHER; note = 2'-O-methylcytidine-3'-phosphorothioate
  modified_base 2: mod_base = OTHER; note = 2'-O-methylcytidine-3'-phosphorothioate
  modified_base 3: mod_base = OTHER; note = 2'-O-methyluridine-3'-phosphate
  modified_base 4: mod_base = OTHER; note = 2'-O-methyluridine-3'-phosphate
  modified_base 5: mod_base = OTHER; note = 2'-O-methyluridine-3'-phosphate
  modified_base 6: mod_base = OTHER; note = 2'-O-methyluridine-3'-phosphate
  modified_base 7: mod_base = OTHER; note = 2'-deoxy-2'-fluoroguanosine-3'-phosphate
  modified_base 8: mod_base = OTHER; note = 2'-O-methylcytidine-3'-phosphate
  modified_base 9: mod_base = OTHER; note = 2'-deoxy-2'-fluorouridine-3'-phosphate
  modified_base 10: mod_base = OTHER; note = 2'-deoxy-2'-fluorouridine-3'-phosphate
  modified_base 11: mod_base = OTHER; note = 2'-deoxy-2'-fluorouridine-3'-phosphate
  modified_base 12: mod_base = OTHER; note = 2'-O-methylcytidine-3'-phosphate
  modified_base 13: mod_base = OTHER; note = 2'-O-methylcytidine-3'-phosphate
  modified_base 14: mod_base = OTHER; note = 2'-O-methyladenosine-3'-phosphate
  modified_base 15: mod_base = OTHER; note = 2'-O-methylguanosine-3'-phosphate
  modified_base 16: mod_base = OTHER; note = 2'-O-methyladenosine-3'-phosphate
  modified_base 17: mod_base = OTHER; note = 2'-O-methylguanosine-3'-phosphate
  modified_base 18: mod_base = OTHER; note = 2'-O-methyladenosine-3'-phosphate
  modified_base 19: mod_base = OTHER; note = 2'-O-methyladenosine-3'-phosphate
  modified_base 20: mod_base = OTHER; note = 2'-O-methyladenosine-3'-phosphate
  modified_base 21: mod_base = OTHER; note = 2'-O-methyluridine-3'-phosphate ((2S,4R)-1-[29-[[2-(acetylamino)-2-deoxy-beta-D-galactopyra nosyl]oxy]-14,14-bis[[3-[[3-[[5-[[2-(acetylamino)-2-deoxy-b eta-D-galactopyranosyl]oxy]-1-oxopentyl]amino]propyl]amino] -3-oxopropoxy]methyl]-1,12,19,25-tetraoxo-16-oxa-13,20,24-t riazanonacos-1-yl]-4-hydroxy-2-pyrrolidinyl)methyl ester
ccttttgctttccagagaaat

SEQ ID NO: 1390 - RNA, 21 nt, synthetic construct
  source 1..21: mol_type = other RNA
  modified_base 1: mod_base = OTHER; note = 2'-O-methyluridine-3'-phosphorothioate
  modified_base 2: mod_base = OTHER; note = 2'-O-methyluridine-3'-phosphorothioate
  modified_base 3: mod_base = OTHER; note = 2'-O-methylcytidine-3'-phosphate
  modified_base 4: mod_base = OTHER; note = 2'-O-methylcytidine-3'-phosphate
  modified_base 5: mod_base = OTHER; note = 2'-O-methyladenosine-3'-phosphate
  modified_base 6: mod_base = OTHER; note = 2'-O-methylguanosine-3'-phosphate
  modified_base 7: mod_base = OTHER; note = 2'-deoxy-2'-fluoroadenosine-3'-phosphate
  modified_base 8: mod_base = OTHER; note = 2'-O-methylguanosine-3'-phosphate
  modified_base 9: mod_base = OTHER; note = 2'-deoxy-2'-fluoroadenosine-3'-phosphate
  modified_base 10: mod_base = OTHER; note = 2'-deoxy-2'-fluoroadenosine-3'-phosphate
  modified_base 11: mod_base = OTHER; note = 2'-deoxy-2'-fluoroadenosine-3'-phosphate
  modified_base 12: mod_base = OTHER; note = 2'-O-methyluridine-3'-phosphate
  modified_base 13: mod_base = OTHER; note = 2'-O-methyluridine-3'-phosphate
  modified_base 14: mod_base = OTHER; note = 2'-O-methyluridine-3'-phosphate
  modified_base 15: mod_base = OTHER; note = 2'-O-methylcytidine-3'-phosphate
  modified_base 16: mod_base = OTHER; note = 2'-O-methyladenosine-3'-phosphate
  modified_base 17: mod_base = OTHER; note = 2'-O-methyluridine-3'-phosphate
  modified_base 18: mod_base = OTHER; note = 2'-O-methyluridine-3'-phosphate
  modified_base 19: mod_base = OTHER; note = 2'-O-methyluridine-3'-phosphate
  modified_base 20: mod_base = OTHER; note = 2'-O-methyluridine-3'-phosphate
  modified_base 21: mod_base = OTHER; note = 2'-O-methyluridine-3'-phosphate ((2S,4R)-1-[29-[[2-(acetylamino)-2-deoxy-beta-D-galactopyra nosyl]oxy]-14,14-bis[[3-[[3-[[5-[[2-(acetylamino)-2-deoxy-b eta-D-galactopyranosyl]oxy]-1-oxopentyl]amino]propyl]amino] -3-oxopropoxy]methyl]-1,12,19,25-tetraoxo-16-oxa-13,20,24-t riazanonacos-1-yl]-4-hydroxy-2-pyrrolidinyl)methyl ester
ttccagagaaatttcattttt

SEQ ID NO: 1391 - RNA, 21 nt, synthetic construct
  source 1..21: mol_type = other RNA
  modified_base 1: mod_base = OTHER; note = 2'-O-methyladenosine-3'-phosphorothioate
  modified_base 2: mod_base = OTHER; note = 2'-O-methylguanosine-3'-phosphorothioate
  modified_base 3: mod_base = OTHER; note = 2'-O-methyluridine-3'-phosphate
  modified_base 4: mod_base = OTHER; note = 2'-O-methyladenosine-3'-phosphate
  modified_base 5: mod_base = OTHER; note = 2'-O-methyladenosine-3'-phosphate
  modified_base 6: mod_base = OTHER; note = 2'-O-methyluridine-3'-phosphate
  modified_base 7: mod_base = OTHER; note = 2'-deoxy-2'-fluoroguanosine-3'-phosphate
  modified_base 8: mod_base = OTHER; note = 2'-O-methyladenosine-3'-phosphate
  modified_base 9: mod_base = OTHER; note = 2'-deoxy-2'-fluorouridine-3'-phosphate
  modified_base 10: mod_base = OTHER; note = 2'-deoxy-2'-fluorouridine-3'-phosphate
  modified_base 11: mod_base = OTHER; note = 2'-deoxy-2'-fluorouridine-3'-phosphate
  modified_base 12: mod_base = OTHER; note = 2'-O-methylcytidine-3'-phosphate
  modified_base 13: mod_base = OTHER; note = 2'-O-methyluridine-3'-phosphate
  modified_base 14: mod_base = OTHER; note = 2'-O-methylguanosine-3'-phosphate
  modified_base 15: mod_base = OTHER; note = 2'-O-methylcytidine-3'-phosphate
  modified_base 16: mod_base = OTHER; note = 2'-O-methyluridine-3'-phosphate
  modified_base 17: mod_base = OTHER; note = 2'-O-methylguanosine-3'-phosphate
  modified_base 18: mod_base = OTHER; note = 2'-O-methyluridine-3'-phosphate
  modified_base 19: mod_base = OTHER; note = 2'-O-methyluridine-3'-phosphate
  modified_base 20: mod_base = OTHER; note = 2'-O-methyladenosine-3'-phosphate
  modified_base 21: mod_base = OTHER; note = 2'-O-methyluridine-3'-phosphate ((2S,4R)-1-[29-[[2-(acetylamino)-2-deoxy-beta-D-galactopyra nosyl]oxy]-14,14-bis[[3-[[3-[[5-[[2-(acetylamino)-2-deoxy-b eta-D-galactopyranosyl]oxy]-1-oxopentyl]amino]propyl]amino] -3-oxopropoxy]methyl]-1,12,19,25-tetraoxo-16-oxa-13,20,24-t riazanonacos-1-yl]-4-hydroxy-2-pyrrolidinyl)methyl ester
agtaatgatttctgctgttat

SEQ ID NO: 1392 - RNA, 21 nt, synthetic construct
  source 1..21: mol_type = other RNA
  modified_base 1: mod_base = OTHER; note = 2'-O-methyluridine-3'-phosphorothioate
  modified_base 2: mod_base = OTHER; note = 2'-O-methylguanosine-3'-phosphorothioate
  modified_base 3: mod_base = OTHER; note = 2'-O-methylcytidine-3'-phosphate
  modified_base 4: mod_base = OTHER; note = 2'-O-methyluridine-3'-phosphate
  modified_base 5: mod_base = OTHER; note = 2'-O-methylguanosine-3'-phosphate
  modified_base 6: mod_base = OTHER; note = 2'-O-methyluridine-3'-phosphate
  modified_base 7: mod_base = OTHER; note = 2'-deoxy-2'-fluorouridine-3'-phosphate
  modified_base 8: mod_base = OTHER; note = 2'-O-methyladenosine-3'-phosphate
  modified_base 9: mod_base = OTHER; note = 2'-deoxy-2'-fluorouridine-3'-phosphate
  modified_base 10: mod_base = OTHER; note = 2'-deoxy-2'-fluoroguanosine-3'-phosphate
  modified_base 11: mod_base = OTHER; note = 2'-deoxy-2'-fluoroadenosine-3'-phosphate
  modified_base 12: mod_base = OTHER; note = 2'-O-methyladenosine-3'-phosphate
  modified_base 13: mod_base = OTHER; note = 2'-O-methyladenosine-3'-phosphate
  modified_base 14: mod_base = OTHER; note = 2'-O-methylguanosine-3'-phosphate
  modified_base 15: mod_base = OTHER; note = 2'-O-methylcytidine-3'-phosphate
  modified_base 16: mod_base = OTHER; note = 2'-O-methyladenosine-3'-phosphate
  modified_base 17: mod_base = OTHER; note = 2'-O-methyladenosine-3'-phosphate
  modified_base 18: mod_base = OTHER; note = 2'-O-methyladenosine-3'-phosphate
  modified_base 19: mod_base = OTHER; note = 2'-O-methylguanosine-3'-phosphate
  modified_base 20: mod_base = OTHER; note = 2'-O-methyladenosine-3'-phosphate
  modified_base 21: mod_base = OTHER; note = 2'-O-methyluridine-3'-phosphate ((2S,4R)-1-[29-[[2-(acetylamino)-2-deoxy-beta-D-galactopyra nosyl]oxy]-14,14-bis[[3-[[3-[[5-[[2-(acetylamino)-2-deoxy-b eta-D-galactopyranosyl]oxy]-1-oxopentyl]amino]propyl]amino] -3-oxopropoxy]methyl]-1,12,19,25-tetraoxo-16-oxa-13,20,24-t riazanonacos-1-yl]-4-hydroxy-2-pyrrolidinyl)methyl ester
tgctgttatgaaagcaaagat

SEQ ID NO: 1393 - RNA, 21 nt, synthetic construct
  source 1..21: mol_type = other RNA
  modified_base 1: mod_base = OTHER; note = 2'-O-methyladenosine-3'-phosphorothioate
  modified_base 2: mod_base = OTHER; note = 2'-O-methyladenosine-3'-phosphorothioate
  modified_base 3: mod_base = OTHER; note = 2'-O-methyladenosine-3'-phosphate
  modified_base 4: mod_base = OTHER; note = 2'-O-methylguanosine-3'-phosphate
  modified_base 5: mod_base = OTHER; note = 2'-O-methylcytidine-3'-phosphate
  modified_base 6: mod_base = OTHER; note = 2'-O-methyladenosine-3'-phosphate
  modified_base 7: mod_base = OTHER; note = 2'-deoxy-2'-fluoroadenosine-3'-phosphate
  modified_base 8: mod_base = OTHER; note = 2'-O-methyladenosine-3'-phosphate
  modified_base 9: mod_base = OTHER; note = 2'-deoxy-2'-fluoroguanosine-3'-phosphate
  modified_base 10: mod_base = OTHER; note = 2'-deoxy-2'-fluoroadenosine-3'-phosphate
  modified_base 11: mod_base = OTHER; note = 2'-deoxy-2'-fluoroguanosine-3'-phosphate
  modified_base 12: mod_base = OTHER; note = 2'-O-methyladenosine-3'-phosphate
  modified_base 13: mod_base = OTHER; note = 2'-O-methyladenosine-3'-phosphate
  modified_base 14: mod_base = OTHER; note = 2'-O-methyladenosine-3'-phosphate
  modified_base 15: mod_base = OTHER; note = 2'-O-methylguanosine-3'-phosphate
  modified_base 16: mod_base = OTHER; note = 2'-O-methylguanosine-3'-phosphate
  modified_base 17: mod_base = OTHER; note = 2'-O-methyladenosine-3'-phosphate
  modified_base 18: mod_base = OTHER; note = 2'-O-methyluridine-3'-phosphate
  modified_base 19: mod_base = OTHER; note = 2'-O-methylguanosine-3'-phosphate
  modified_base 20: mod_base = OTHER; note = 2'-O-methylguanosine-3'-phosphate
  modified_base 21: mod_base = OTHER; note = 2'-O-methyluridine-3'-phosphate ((2S,4R)-1-[29-[[2-(acetylamino)-2-deoxy-beta-D-galactopyra nosyl]oxy]-14,14-bis[[3-[[3-[[5-[[2-(acetylamino)-2-deoxy-b eta-D-galactopyranosyl]oxy]-1-oxopentyl]amino]propyl]amino] -3-oxopropoxy]methyl]-1,12,19,25-tetraoxo-16-oxa-13,20,24-t riazanonacos-1-yl]-4-hydroxy-2-pyrrolidinyl)methyl ester
aaagcaaagagaaaggatggt

SEQ ID NO: 1394 - RNA, 21 nt, synthetic construct
  source 1..21: mol_type = other RNA
  modified_base 1: mod_base = OTHER; note = 2'-O-methyladenosine-3'-phosphorothioate
  modified_base 2: mod_base = OTHER; note = 2'-O-methylguanosine-3'-phosphorothioate
  modified_base 3: mod_base = OTHER; note = 2'-O-methyladenosine-3'-phosphate
  modified_base 4: mod_base = OTHER; note = 2'-O-methyladenosine-3'-phosphate
  modified_base 5: mod_base = OTHER; note = 2'-O-methyladenosine-3'-phosphate
  modified_base 6: mod_base = OTHER; note = 2'-O-methylguanosine-3'-phosphate
  modified_base 7: mod_base = OTHER; note = 2'-deoxy-2'-fluoroguanosine-3'-phosphate
  modified_base 8: mod_base = OTHER; note = 2'-O-methyladenosine-3'-phosphate
  modified_base 9: mod_base = OTHER; note = 2'-deoxy-2'-fluorouridine-3'-phosphate
  modified_base 10: mod_base = OTHER; note = 2'-deoxy-2'-fluoroguanosine-3'-phosphate
  modified_base 11: mod_base = OTHER; note = 2'-deoxy-2'-fluoroguanosine-3'-phosphate
  modified_base 12: mod_base = OTHER; note = 2'-O-methyladenosine-3'-phosphate
  modified_base 13: mod_base = OTHER; note = 2'-O-methylguanosine-3'-phosphate
  modified_base 14: mod_base = OTHER; note = 2'-O-methylguanosine-3'-phosphate
  modified_base 15: mod_base = OTHER; note = 2'-O-methylcytidine-3'-phosphate
  modified_base 16: mod_base = OTHER; note = 2'-O-methyladenosine-3'-phosphate
  modified_base 17: mod_base = OTHER; note = 2'-O-methyladenosine-3'-phosphate
  modified_base 18: mod_base = OTHER; note = 2'-O-methyladenosine-3'-phosphate
  modified_base 19: mod_base = OTHER; note = 2'-O-methyladenosine-3'-phosphate
  modified_base 20: mod_base = OTHER; note = 2'-O-methyluridine-3'-phosphate
  modified_base 21: mod_base = OTHER; note = 2'-O-methyluridine-3'-phosphate ((2S,4R)-1-[29-[[2-(acetylamino)-2-deoxy-beta-D-galactopyra nosyl]oxy]-14,14-bis[[3-[[3-[[5-[[2-(acetylamino)-2-deoxy-b eta-D-galactopyranosyl]oxy]-1-oxopentyl]amino]propyl]amino] -3-oxopropoxy]methyl]-1,12,19,25-tetraoxo-16-oxa-13,20,24-t riazanonacos-1-yl]-4-hydroxy-2-pyrrolidinyl)methyl ester
agaaaggatggaggcaaaatt

SEQ ID NO: 1395 - RNA, 21 nt, synthetic construct
  source 1..21: mol_type = other RNA
  modified_base 1: mod_base = OTHER; note = 2'-O-methyladenosine-3'-phosphorothioate
  modified_base 2: mod_base = OTHER; note = 2'-O-methyluridine-3'-phosphorothioate
  modified_base 3: mod_base = OTHER; note = 2'-O-methylcytidine-3'-phosphate
  modified_base 4: mod_base = OTHER; note = 2'-O-methyladenosine-3'-phosphate
  modified_base 5: mod_base = OTHER; note = 2'-O-methylcytidine-3'-phosphate
  modified_base 6: mod_base = OTHER; note = 2'-O-methylguanosine-3'-phosphate
  modified_base 7: mod_base = OTHER; note = 2'-deoxy-2'-fluorouridine-3'-phosphate
  modified_base 8: mod_base = OTHER; note = 2'-O-methyluridine-3'-phosphate
  modified_base 9: mod_base = OTHER; note = 2'-deoxy-2'-fluorouridine-3'-phosphate
  modified_base 10: mod_base = OTHER; note = 2'-deoxy-2'-fluorocytidine-3'-phosphate
  modified_base 11: mod_base = OTHER; note = 2'-deoxy-2'-fluoroadenosine-3'-phosphate
  modified_base 12: mod_base = OTHER; note = 2'-O-methyladenosine-3'-phosphate
  modified_base 13: mod_base = OTHER; note = 2'-O-methylguanosine-3'-phosphate
  modified_base 14: mod_base = OTHER; note = 2'-O-methyladenosine-3'-phosphate
  modified_base 15: mod_base = OTHER; note = 2'-O-methyladenosine-3'-phosphate
  modified_base 16: mod_base = OTHER; note = 2'-O-methyladenosine-3'-phosphate
  modified_base 17: mod_base = OTHER; note = 2'-O-methyluridine-3'-phosphate
  modified_base 18: mod_base = OTHER; note = 2'-O-methylguanosine-3'-phosphate
  modified_base 19: mod_base = OTHER; note = 2'-O-methyluridine-3'-phosphate
  modified_base 20: mod_base = OTHER; note = 2'-O-methyluridine-3'-phosphate
  modified_base 21: mod_base = OTHER; note = 2'-O-methyluridine-3'-phosphate ((2S,4R)-1-[29-[[2-(acetylamino)-2-deoxy-beta-D-galactopyra nosyl]oxy]-14,14-bis[[3-[[3-[[5-[[2-(acetylamino)-2-deoxy-b eta-D-galactopyranosyl]oxy]-1-oxopentyl]amino]propyl]amino] -3-oxopropoxy]methyl]-1,12,19,25-tetraoxo-16-oxa-13,20,24-t riazanonacos-1-yl]-4-hydroxy-2-pyrrolidinyl)methyl ester
atcacgtttcaagaaatgttt

SEQ ID NO: 1396 - RNA, 21 nt, synthetic construct
  source 1..21: mol_type = other RNA
  modified_base 1: mod_base = OTHER; note = 2'-O-methyladenosine-3'-phosphorothioate
  modified_base 2: mod_base = OTHER; note = 2'-O-methyladenosine-3'-phosphorothioate
  modified_base 3: mod_base = OTHER; note = 2'-O-methylguanosine-3'-phosphate
  modified_base 4: mod_base = OTHER; note = 2'-O-methyladenosine-3'-phosphate
  modified_base 5: mod_base = OTHER; note = 2'-O-methyladenosine-3'-phosphate
  modified_base 6: mod_base = OTHER; note = 2'-O-methyladenosine-3'-phosphate
  modified_base 7: mod_base = OTHER; note = 2'-deoxy-2'-fluorouridine-3'-phosphate
  modified_base 8: mod_base = OTHER; note = 2'-O-methylguanosine-3'-phosphate
  modified_base 9: mod_base = OTHER; note = 2'-deoxy-2'-fluorouridine-3'-phosphate
  modified_base 10: mod_base = OTHER; note = 2'-deoxy-2'-fluorouridine-3'-phosphate
  modified_base 11: mod_base = OTHER; note = 2'-deoxy-2'-fluoroadenosine-3'-phosphate
  modified_base 12: mod_base = OTHER; note = 2'-O-methyladenosine-3'-phosphate
  modified_base 13: mod_base = OTHER; note = 2'-O-methylguanosine-3'-phosphate
  modified_base 14: mod_base = OTHER; note = 2'-O-methylcytidine-3'-phosphate
  modified_base 15: mod_base = OTHER; note = 2'-O-methyluridine-3'-phosphate
  modified_base 16: mod_base = OTHER; note = 2'-O-methylcytidine-3'-phosphate
  modified_base 17: mod_base = OTHER; note = 2'-O-methyluridine-3'-phosphate
  modified_base 18: mod_base = OTHER; note = 2'-O-methyluridine-3'-phosphate
  modified_base 19: mod_base = OTHER; note = 2'-O-methylcytidine-3'-phosphate
  modified_base 20: mod_base = OTHER; note = 2'-O-methyluridine-3'-phosphate
  modified_base 21: mod_base = OTHER; note = 2'-O-methyluridine-3'-phosphate ((2S,4R)-1-[29-[[2-(acetylamino)-2-deoxy-beta-D-galactopyra nosyl]oxy]-14,14-bis[[3-[[3-[[5-[[2-(acetylamino)-2-deoxy-b eta-D-galactopyranosyl]oxy]-1-oxopentyl]amino]propyl]amino] -3-oxopropoxy]methyl]-1,12,19,25-tetraoxo-16-oxa-13,20,24-t riazanonacos-1-yl]-4-hydroxy-2-pyrrolidinyl)methyl ester
aagaaatgttaagctcttctt

SEQ ID NO: 1397 - RNA, 21 nt, synthetic construct
  source 1..21: mol_type = other RNA
  modified_base 1: mod_base = OTHER; note = 2'-O-methyladenosine-3'-phosphorothioate
  modified_base 2: mod_base = OTHER; note = 2'-O-methyladenosine-3'-phosphorothioate
  modified_base 3: mod_base = OTHER; note = 2'-O-methylguanosine-3'-phosphate
  modified_base 4: mod_base = OTHER; note = 2'-O-methylcytidine-3'-phosphate
  modified_base 5: mod_base = OTHER; note = 2'-O-methyluridine-3'-phosphate
  modified_base 6: mod_base = OTHER; note = 2'-O-methylcytidine-3'-phosphate
  modified_base 7: mod_base = OTHER; note = 2'-deoxy-2'-fluorouridine-3'-phosphate
  modified_base 8: mod_base = OTHER; note = 2'-O-methyluridine-3'-phosphate
  modified_base 9: mod_base = OTHER; note = 2'-deoxy-2'-fluorocytidine-3'-phosphate
  modified_base 10: mod_base = OTHER; note = 2'-deoxy-2'-fluorouridine-3'-phosphate
  modified_base 11: mod_base = OTHER; note = 2'-deoxy-2'-fluorouridine-3'-phosphate
  modified_base 12: mod_base = OTHER; note = 2'-O-methylguanosine-3'-phosphate
  modified_base 13: mod_base = OTHER; note = 2'-O-methylguanosine-3'-phosphate
  modified_base 14: mod_base = OTHER; note = 2'-O-methyladenosine-3'-phosphate
  modified_base 15: mod_base = OTHER; note = 2'-O-methyladenosine-3'-phosphate
  modified_base 16: mod_base = OTHER; note = 2'-O-methylcytidine-3'-phosphate
  modified_base 17: mod_base = OTHER; note = 2'-O-methyladenosine-3'-phosphate
  modified_base 18: mod_base = OTHER; note = 2'-O-methyladenosine-3'-phosphate
  modified_base 19: mod_base = OTHER; note = 2'-O-methylguanosine-3'-phosphate
  modified_base 20: mod_base = OTHER; note = 2'-O-methylcytidine-3'-phosphate
  modified_base 21: mod_base = OTHER; note = 2'-O-methyluridine-3'-phosphate ((2S,4R)-1-[29-[[2-(acetylamino)-2-deoxy-beta-D-galactopyra nosyl]oxy]-14,14-bis[[3-[[3-[[5-[[2-(acetylamino)-2-deoxy-b eta-D-galactopyranosyl]oxy]-1-oxopentyl]amino]propyl]amino] -3-oxopropoxy]methyl]-1,12,19,25-tetraoxo-16-oxa-13,20,24-t riazanonacos-1-yl]-4-hydroxy-2-pyrrolidinyl)methyl ester
aagctcttcttggaacaagct

SEQ ID NO: 1398 - RNA, 21 nt, synthetic construct
  source 1..21: mol_type = other RNA
  modified_base 1: mod_base = OTHER; note = 2'-O-methylcytidine-3'-phosphorothioate
  modified_base 2: mod_base = OTHER; note = 2'-O-methyladenosine-3'-phosphorothioate
  modified_base 3: mod_base = OTHER; note = 2'-O-methylcytidine-3'-phosphate
  modified_base 4: mod_base = OTHER; note = 2'-O-methylcytidine-3'-phosphate
  modified_base 5: mod_base = OTHER; note = 2'-O-methyluridine-3'-phosphate
  modified_base 6: mod_base = OTHER; note = 2'-O-methyluridine-3'-phosphate
  modified_base 7: mod_base = OTHER; note = 2'-deoxy-2'-fluoroguanosine-3'-phosphate
  modified_base 8: mod_base = OTHER; note = 2'-O-methylcytidine-3'-phosphate
  modified_base 9: mod_base = OTHER; note = 2'-deoxy-2'-fluorouridine-3'-phosphate
  modified_base 10: mod_base = OTHER; note = 2'-deoxy-2'-fluorouridine-3'-phosphate
  modified_base 11: mod_base = OTHER; note = 2'-deoxy-2'-fluorouridine-3'-phosphate
  modified_base 12: mod_base = OTHER; note = 2'-O-methylcytidine-3'-phosphate
  modified_base 13: mod_base = OTHER; note = 2'-O-methylcytidine-3'-phosphate
  modified_base 14: mod_base = OTHER; note = 2'-O-methyluridine-3'-phosphate
  modified_base 15: mod_base = OTHER; note = 2'-O-methyluridine-3'-phosphate
  modified_base 16: mod_base = OTHER; note = 2'-O-methylguanosine-3'-phosphate
  modified_base 17: mod_base = OTHER; note = 2'-O-methyluridine-3'-phosphate
  modified_base 18: mod_base = OTHER; note = 2'-O-methylguanosine-3'-phosphate
  modified_base 19: mod_base = OTHER; note = 2'-O-methyluridine-3'-phosphate
  modified_base 20: mod_base = OTHER; note = 2'-O-methyladenosine-3'-phosphate
  modified_base 21: mod_base = OTHER; note = 2'-O-methyluridine-3'-phosphate ((2S,4R)-1-[29-[[2-(acetylamino)-2-deoxy-beta-D-galactopyra nosyl]oxy]-14,14-bis[[3-[[3-[[5-[[2-(acetylamino)-2-deoxy-b eta-D-galactopyranosyl]oxy]-1-oxopentyl]amino]propyl]amino] -3-oxopropoxy]methyl]-1,12,19,25-tetraoxo-16-oxa-13,20,24-t riazanonacos-1-yl]-4-hydroxy-2-pyrrolidinyl)methyl ester
caccttgctttccttgtgtat

SEQ ID NO: 1399 - RNA, 21 nt, synthetic construct
  source 1..21: mol_type = other RNA
  modified_base 1: mod_base = OTHER; note = 2'-O-methylcytidine-3'-phosphorothioate
  modified_base 2: mod_base = OTHER; note = 2'-O-methyluridine-3'-phosphorothioate
  modified_base 3: mod_base = OTHER; note = 2'-O-methyluridine-3'-phosphate
  modified_base 4: mod_base = OTHER; note = 2'-O-methylguanosine-3'-phosphate
  modified_base 5: mod_base = OTHER; note = 2'-O-methyluridine-3'-phosphate
  modified_base 6: mod_base = OTHER; note = 2'-O-methylguanosine-3'-phosphate
  modified_base 7: mod_base = OTHER; note = 2'-deoxy-2'-fluorouridine-3'-phosphate
  modified_base 8: mod_base = OTHER; note = 2'-O-methyladenosine-3'-phosphate
  modified_base 9: mod_base = OTHER; note = 2'-deoxy-2'-fluoroguanosine-3'-phosphate
  modified_base 10: mod_base = OTHER; note = 2'-deoxy-2'-fluoroguanosine-3'-phosphate
  modified_base 11: mod_base = OTHER; note = 2'-deoxy-2'-fluoroguanosine-3'-phosphate
  modified_base 12: mod_base = OTHER; note = 2'-O-methylcytidine-3'-phosphate
  modified_base 13: mod_base = OTHER; note = 2'-O-methyladenosine-3'-phosphate
  modified_base 14: mod_base = OTHER; note = 2'-O-methyladenosine-3'-phosphate
  modified_base 15: mod_base = OTHER; note = 2'-O-methyladenosine-3'-phosphate
  modified_base 16: mod_base = OTHER; note = 2'-O-methylcytidine-3'-phosphate
  modified_base 17: mod_base = OTHER; note = 2'-O-methylcytidine-3'-phosphate
  modified_base 18: mod_base = OTHER; note = 2'-O-methylcytidine-3'-phosphate
  modified_base 19: mod_base = OTHER; note = 2'-O-methylguanosine-3'-phosphate
  modified_base 20: mod_base = OTHER; note = 2'-O-methylcytidine-3'-phosphate
  modified_base 21: mod_base = OTHER; note = 2'-O-methyluridine-3'-phosphate ((2S,4R)-1-[29-[[2-(acetylamino)-2-deoxy-beta-D-galactopyra nosyl]oxy]-14,14-bis[[3-[[3-[[5-[[2-(acetylamino)-2-deoxy-b eta-D-galactopyranosyl]oxy]-1-oxopentyl]amino]propyl]amino] -3-oxopropoxy]methyl]-1,12,19,25-tetraoxo-16-oxa-13,20,24-t riazanonacos-1-yl]-4-hydroxy-2-pyrrolidinyl)methyl ester
cttgtgtagggcaaacccgct

SEQ ID NO: 1400 - RNA, 21 nt, synthetic construct
  source 1..21: mol_type = other RNA
  modified_base 1: mod_base = OTHER; note = 2'-O-methylguanosine-3'-phosphorothioate
  modified_base 2: mod_base = OTHER; note = 2'-O-methylguanosine-3'-phosphorothioate
  modified_base 3: mod_base = OTHER; note = 2'-O-methyluridine-3'-phosphate
  modified_base 4: mod_base = OTHER; note = 2'-O-methylcytidine-3'-phosphate
  modified_base 5: mod_base = OTHER; note = 2'-O-methyladenosine-3'-phosphate
  modified_base 6: mod_base = OTHER; note = 2'-O-methylguanosine-3'-phosphate
  modified_base 7: mod_base = OTHER; note = 2'-deoxy-2'-fluoroguanosine-3'-phosphate
  modified_base 8: mod_base = OTHER; note = 2'-O-methylcytidine-3'-phosphate
  modified_base 9: mod_base = OTHER; note = 2'-deoxy-2'-fluorouridine-3'-phosphate
  modified_base 10: mod_base = OTHER; note = 2'-deoxy-2'-fluoroguanosine-3'-phosphate
  modified_base 11: mod_base = OTHER; note = 2'-deoxy-2'-fluoroadenosine-3'-phosphate
  modified_base 12: mod_base = OTHER; note = 2'-O-methylguanosine-3'-phosphate
  modified_base 13: mod_base = OTHER; note = 2'-O-methylguanosine-3'-phosphate
  modified_base 14: mod_base = OTHER; note = 2'-O-methylguanosine-3'-phosphate
  modified_base 15: mod_base = OTHER; note = 2'-O-methyladenosine-3'-phosphate
  modified_base 16: mod_base = OTHER; note = 2'-O-methyluridine-3'-phosphate
  modified_base 17: mod_base = OTHER; note = 2'-O-methyluridine-3'-phosphate
  modified_base 18: mod_base = OTHER; note = 2'-O-methyluridine-3'-phosphate
  modified_base 19: mod_base = OTHER; note = 2'-O-methylcytidine-3'-phosphate
  modified_base 20: mod_base = OTHER; note = 2'-O-methyluridine-3'-phosphate
  modified_base 21: mod_base = OTHER; note = 2'-O-methyluridine-3'-phosphate ((2S,4R)-1-[29-[[2-(acetylamino)-2-deoxy-beta-D-galactopyra nosyl]oxy]-14,14-bis[[3-[[3-[[5-[[2-(acetylamino)-2-deoxy-b eta-D-galactopyranosyl]oxy]-1-oxopentyl]amino]propyl]amino] -3-oxopropoxy]methyl]-1,12,19,25-tetraoxo-16-oxa-13,20,24-t riazanonacos-1-yl]-4-hydroxy-2-pyrrolidinyl)methyl ester
ggtcaggctgagggatttctt

SEQ ID NO: 1401 - RNA, 21 nt, synthetic construct
  source 1..21: mol_type = other RNA
  modified_base 1: mod_base = OTHER; note = 2'-O-methylguanosine-3'-phosphorothioate
  modified_base 2: mod_base = OTHER; note = 2'-O-methyladenosine-3'-phosphorothioate
  modified_base 3: mod_base = OTHER; note = 2'-O-methylguanosine-3'-phosphate
  modified_base 4: mod_base = OTHER; note = 2'-O-methylguanosine-3'-phosphate
  modified_base 5: mod_base = OTHER; note = 2'-O-methylguanosine-3'-phosphate
  modified_base 6: mod_base = OTHER; note = 2'-O-methyladenosine-3'-phosphate
  modified_base 7: mod_base = OTHER; note = 2'-deoxy-2'-fluorouridine-3'-phosphate
  modified_base 8: mod_base = OTHER; note = 2'-O-methyluridine-3'-phosphate
  modified_base 9: mod_base = OTHER; note = 2'-deoxy-2'-fluorouridine-3'-phosphate
  modified_base 10: mod_base = OTHER; note = 2'-deoxy-2'-fluorocytidine-3'-phosphate
  modified_base 11: mod_base = OTHER; note = 2'-deoxy-2'-fluorouridine-3'-phosphate
  modified_base 12: mod_base = OTHER; note = 2'-O-methyladenosine-3'-phosphate
  modified_base 13: mod_base = OTHER; note = 2'-O-methylcytidine-3'-phosphate
  modified_base 14: mod_base = OTHER; note = 2'-O-methylcytidine-3'-phosphate
  modified_base 15: mod_base = OTHER; note = 2'-O-methyluridine-3'-phosphate
  modified_base 16: mod_base = OTHER; note = 2'-O-methylcytidine-3'-phosphate
  modified_base 17: mod_base = OTHER; note = 2'-O-methyladenosine-3'-phosphate
  modified_base 18: mod_base = OTHER; note = 2'-O-methylcytidine-3'-phosphate
  modified_base 19: mod_base = OTHER; note = 2'-O-methyladenosine-3'-phosphate
  modified_base 20: mod_base = OTHER; note = 2'-O-methylcytidine-3'-phosphate
  modified_base 21: mod_base = OTHER; note = 2'-O-methyluridine-3'-phosphate ((2S,4R)-1-[29-[[2-(acetylamino)-2-deoxy-beta-D-galactopyra nosyl]oxy]-14,14-bis[[3-[[3-[[5-[[2-(acetylamino)-2-deoxy-b eta-D-galactopyranosyl]oxy]-1-oxopentyl]amino]propyl]amino] -3-oxopropoxy]methyl]-1,12,19,25-tetraoxo-16-oxa-13,20,24-t riazanonacos-1-yl]-4-hydroxy-2-pyrrolidinyl)methyl ester
gagggatttctacctcacact

SEQ ID NO: 1402 - RNA, 21 nt, synthetic construct
  source 1..21: mol_type = other RNA
  modified_base 1: mod_base = OTHER; note = 2'-O-methylcytidine-3'-phosphorothioate
  modified_base 2: mod_base = OTHER; note = 2'-O-methyluridine-3'-phosphorothioate
  modified_base 3: mod_base = OTHER; note = 2'-O-methyladenosine-3'-phosphate
  modified_base 4: mod_base = OTHER; note = 2'-O-methylcytidine-3'-phosphate
  modified_base 5: mod_base = OTHER; note = 2'-O-methylcytidine-3'-phosphate
  modified_base 6: mod_base = OTHER; note = 2'-O-methyluridine-3'-phosphate
  modified_base 7: mod_base = OTHER; note = 2'-deoxy-2'-fluorocytidine-3'-phosphate
  modified_base 8: mod_base = OTHER; note = 2'-O-methyladenosine-3'-phosphate
  modified_base 9: mod_base = OTHER; note = 2'-deoxy-2'-fluorocytidine-3'-phosphate
  modified_base 10: mod_base = OTHER; note = 2'-deoxy-2'-fluoroadenosine-3'-phosphate
  modified_base 11: mod_base = OTHER; note = 2'-deoxy-2'-fluorocytidine-3'-phosphate
  modified_base 12: mod_base = OTHER; note = 2'-O-methyluridine-3'-phosphate
  modified_base 13: mod_base = OTHER; note = 2'-O-methylguanosine-3'-phosphate
  modified_base 14: mod_base = OTHER; note = 2'-O-methyluridine-3'-phosphate
  modified_base 15: mod_base = OTHER; note = 2'-O-methylguanosine-3'-phosphate
  modified_base 16: mod_base = OTHER; note = 2'-O-methylcytidine-3'-phosphate
  modified_base 17: mod_base = OTHER; note = 2'-O-methyladenosine-3'-phosphate
  modified_base 18: mod_base = OTHER; note = 2'-O-methyluridine-3'-phosphate
  modified_base 19: mod_base = OTHER; note = 2'-O-methyluridine-3'-phosphate
  modified_base 20: mod_base = OTHER; note = 2'-O-methyluridine-3'-phosphate
  modified_base 21: mod_base = OTHER; note = 2'-O-methyluridine-3'-phosphate ((2S,4R)-1-[29-[[2-(acetylamino)-2-deoxy-beta-D-galactopyra nosyl]oxy]-14,14-bis[[3-[[3-[[5-[[2-(acetylamino)-2-deoxy-b eta-D-galactopyranosyl]oxy]-1-oxopentyl]amino]propyl]amino] -3-oxopropoxy]methyl]-1,12,19,25-tetraoxo-16-oxa-13,20,24-t riazanonacos-1-yl]-4-hydroxy-2-pyrrolidinyl)methyl ester
ctacctcacactgtgcatttt

SEQ ID NO: 1403 - RNA, 21 nt, synthetic construct
  source 1..21: mol_type = other RNA
  modified_base 1: mod_base = OTHER; note = 2'-O-methylguanosine-3'-phosphorothioate
  modified_base 2: mod_base = OTHER; note = 2'-O-methylcytidine-3'-phosphorothioate
  modified_base 3: mod_base = OTHER; note = 2'-O-methyladenosine-3'-phosphate
  modified_base 4: mod_base = OTHER; note = 2'-O-methyluridine-3'-phosphate
  modified_base 5: mod_base = OTHER; note = 2'-O-methyluridine-3'-phosphate
  modified_base 6: mod_base = OTHER; note = 2'-O-methyluridine-3'-phosphate
  modified_base 7: mod_base = OTHER; note = 2'-deoxy-2'-fluoroguanosine-3'-phosphate
  modified_base 8: mod_base = OTHER; note = 2'-O-methylcytidine-3'-phosphate
  modified_base 9: mod_base = OTHER; note = 2'-deoxy-2'-fluoroadenosine-3'-phosphate
  modified_base 10: mod_base = OTHER; note = 2'-deoxy-2'-fluorocytidine-3'-phosphate
  modified_base 11: mod_base = OTHER; note = 2'-deoxy-2'-fluoroadenosine-3'-phosphate
  modified_base 12: mod_base = OTHER; note = 2'-O-methylguanosine-3'-phosphate
  modified_base 13: mod_base = OTHER; note = 2'-O-methylcytidine-3'-phosphate
  modified_base 14: mod_base = OTHER; note = 2'-O-methyladenosine-3'-phosphate
  modified_base 15: mod_base = OTHER; note = 2'-O-methylguanosine-3'-phosphate
  modified_base 16: mod_base = OTHER; note = 2'-O-methyladenosine-3'-phosphate
  modified_base 17: mod_base = OTHER; note = 2'-O-methyluridine-3'-phosphate
  modified_base 18: mod_base = OTHER; note = 2'-O-methyladenosine-3'-phosphate
  modified_base 19: mod_base = OTHER; note = 2'-O-methylguanosine-3'-phosphate
  modified_base 20: mod_base = OTHER; note = 2'-O-methyladenosine-3'-phosphate
  modified_base 21: mod_base = OTHER; note = 2'-O-methyluridine-3'-phosphate ((2S,4R)-1-[29-[[2-(acetylamino)-2-deoxy-beta-D-galactopyra nosyl]oxy]-14,14-bis[[3-[[3-[[5-[[2-(acetylamino)-2-deoxy-b eta-D-galactopyranosyl]oxy]-1-oxopentyl]amino]propyl]amino] -3-oxopropoxy]methyl]-1,12,19,25-tetraoxo-16-oxa-13,20,24-t riazanonacos-1-yl]-4-hydroxy-2-pyrrolidinyl)methyl ester
gcatttgcacagcagatagat

SEQ ID NO: 1404 - RNA, 21 nt, synthetic construct
  source 1..21: mol_type = other RNA
  modified_base 1: mod_base = OTHER; note = 2'-O-methylguanosine-3'-phosphorothioate
  modified_base 2: mod_base = OTHER; note = 2'-O-methyladenosine-3'-phosphorothioate
  modified_base 3: mod_base = OTHER; note = 2'-O-methyluridine-3'-phosphate
  modified_base 4: mod_base = OTHER; note = 2'-O-methyladenosine-3'-phosphate
  modified_base 5: mod_base = OTHER; note = 2'-O-methylguanosine-3'-phosphate
  modified_base 6: mod_base = OTHER; note = 2'-O-methyladenosine-3'-phosphate
  modified_base 7: mod_base = OTHER; note = 2'-deoxy-2'-fluoroadenosine-3'-phosphate
  modified_base 8: mod_base = OTHER; note = 2'-O-methyladenosine-3'-phosphate
  modified_base 9: mod_base = OTHER; note = 2'-deoxy-2'-fluoroguanosine-3'-phosphate
  modified_base 10: mod_base = OTHER; note = 2'-deoxy-2'-fluoroadenosine-3'-phosphate
  modified_base 11: mod_base = OTHER; note = 2'-deoxy-2'-fluorocytidine-3'-phosphate
  modified_base 12: mod_base = OTHER; note = 2'-O-methyluridine-3'-phosphate
  modified_base 13: mod_base = OTHER; note = 2'-O-methyluridine-3'-phosphate
  modified_base 14: mod_base = OTHER; note = 2'-O-methylguanosine-3'-phosphate
  modified_base 15: mod_base = OTHER; note = 2'-O-methyluridine-3'-phosphate
  modified_base 16: mod_base = OTHER; note = 2'-O-methyluridine-3'-phosphate
  modified_base 17: mod_base = OTHER; note = 2'-O-methyluridine-3'-phosphate
  modified_base 18: mod_base = OTHER; note = 2'-O-methyladenosine-3'-phosphate
  modified_base 19: mod_base = OTHER; note = 2'-O-methyluridine-3'-phosphate
  modified_base 20: mod_base = OTHER; note = 2'-O-methyladenosine-3'-phosphate
  modified_base 21: mod_base = OTHER; note = 2'-O-methyluridine-3'-phosphate ((2S,4R)-1-[29-[[2-(acetylamino)-2-deoxy-beta-D-galactopyra nosyl]oxy]-14,14-bis[[3-[[3-[[5-[[2-(acetylamino)-2-deoxy-b eta-D-galactopyranosyl]oxy]-1-oxopentyl]amino]propyl]amino] -3-oxopropoxy]methyl]-1,12,19,25-tetraoxo-16-oxa-13,20,24-t riazanonacos-1-yl]-4-hydroxy-2-pyrrolidinyl)methyl ester
gatagaaagacttgtttatat

SEQ ID NO: 1405 - RNA, 21 nt, synthetic construct
  source 1..21: mol_type = other RNA
  modified_base 1: mod_base = OTHER; note = 2'-O-methylcytidine-3'-phosphorothioate
  modified_base 2: mod_base = OTHER; note = 2'-O-methyluridine-3'-phosphorothioate
  modified_base 3: mod_base = OTHER; note = 2'-O-methyluridine-3'-phosphate
  modified_base 4: mod_base = OTHER; note = 2'-O-methylguanosine-3'-phosphate
  modified_base 5: mod_base = OTHER; note = 2'-O-methyluridine-3'-phosphate
  modified_base 6: mod_base = OTHER; note = 2'-O-methyluridine-3'-phosphate
  modified_base 7: mod_base = OTHER; note = 2'-deoxy-2'-fluorouridine-3'-phosphate
  modified_base 8: mod_base = OTHER; note = 2'-O-methyladenosine-3'-phosphate
  modified_base 9: mod_base = OTHER; note = 2'-deoxy-2'-fluorouridine-3'-phosphate
  modified_base 10: mod_base = OTHER; note = 2'-deoxy-2'-fluoroadenosine-3'-phosphate
  modified_base 11: mod_base = OTHER; note = 2'-deoxy-2'-fluorouridine-3'-phosphate
  modified_base 12: mod_base = OTHER; note = 2'-O-methyluridine-3'-phosphate
  modified_base 13: mod_base = OTHER; note = 2'-O-methyladenosine-3'-phosphate
  modified_base 14: mod_base = OTHER; note = 2'-O-methyladenosine-3'-phosphate
  modified_base 15: mod_base = OTHER; note = 2'-O-methyladenosine-3'-phosphate
  modified_base 16: mod_base = OTHER; note = 2'-O-methylcytidine-3'-phosphate
  modified_base 17: mod_base = OTHER; note = 2'-O-methyladenosine-3'-phosphate
  modified_base 18: mod_base = OTHER; note = 2'-O-methylguanosine-3'-phosphate
  modified_base 19: mod_base = OTHER; note = 2'-O-methylcytidine-3'-phosphate
  modified_base 20: mod_base = OTHER; note = 2'-O-methyluridine-3'-phosphate
  modified_base 21: mod_base = OTHER; note = 2'-O-methyluridine-3'-phosphate ((2S,4R)-1-[29-[[2-(acetylamino)-2-deoxy-beta-D-galactopyra nosyl]oxy]-14,14-bis[[3-[[3-[[5-[[2-(acetylamino)-2-deoxy-b eta-D-galactopyranosyl]oxy]-1-oxopentyl]amino]propyl]amino] -3-oxopropoxy]methyl]-1,12,19,25-tetraoxo-16-oxa-13,20,24-t riazanonacos-1-yl]-4-hydroxy-2-pyrrolidinyl)methyl ester
cttgtttatattaaacagctt

SEQ ID NO: 1406 - RNA, 21 nt, synthetic construct
  source 1..21: mol_type = other RNA
  modified_base 1: mod_base = OTHER; note = 2'-O-methylguanosine-3'-phosphorothioate
  modified_base 2: mod_base = OTHER; note = 2'-O-methyluridine-3'-phosphorothioate
  modified_base 3: mod_base = OTHER; note = 2'-O-methyladenosine-3'-phosphate
  modified_base 4: mod_base = OTHER; note = 2'-O-methyluridine-3'-phosphate
  modified_base 5: mod_base = OTHER; note = 2'-O-methylcytidine-3'-phosphate
  modified_base 6: mod_base = OTHER; note = 2'-O-methyladenosine-3'-phosphate
  modified_base 7: mod_base = OTHER; note = 2'-deoxy-2'-fluoroadenosine-3'-phosphate
  modified_base 8: mod_base = OTHER; note = 2'-O-methyluridine-3'-phosphate
  modified_base 9: mod_base = OTHER; note = 2'-deoxy-2'-fluoroadenosine-3'-phosphate
  modified_base 10: mod_base = OTHER; note = 2'-deoxy-2'-fluorouridine-3'-phosphate
  modified_base 11: mod_base = OTHER; note = 2'-deoxy-2'-fluorouridine-3'-phosphate
  modified_base 12: mod_base = OTHER; note = 2'-O-methyladenosine-3'-phosphate
  modified_base 13: mod_base = OTHER; note = 2'-O-methylguanosine-3'-phosphate
  modified_base 14: mod_base = OTHER; note = 2'-O-methyluridine-3'-phosphate
  modified_base 15: mod_base = OTHER; note = 2'-O-methyluridine-3'-phosphate
  modified_base 16: mod_base = OTHER; note = 2'-O-methylguanosine-3'-phosphate
  modified_base 17: mod_base = OTHER; note = 2'-O-methylguanosine-3'-phosphate
  modified_base 18: mod_base = OTHER; note = 2'-O-methyladenosine-3'-phosphate
  modified_base 19: mod_base = OTHER; note = 2'-O-methyladenosine-3'-phosphate
  modified_base 20: mod_base = OTHER; note = 2'-O-methylguanosine-3'-phosphate
  modified_base 21: mod_base = OTHER; note = 2'-O-methyluridine-3'-phosphate ((2S,4R)-1-[29-[[2-(acetylamino)-2-deoxy-beta-D-galactopyra nosyl]oxy]-14,14-bis[[3-[[3-[[5-[[2-(acetylamino)-2-deoxy-b eta-D-galactopyranosyl]oxy]-1-oxopentyl]amino]propyl]amino] -3-oxopropoxy]methyl]-1,12,19,25-tetraoxo-16-oxa-13,20,24-t riazanonacos-1-yl]-4-hydroxy-2-pyrrolidinyl)methyl ester
gtatcaatattagttggaagt

SEQ ID NO: 1407 - RNA, 21 nt, synthetic construct
  source 1..21: mol_type = other RNA
  modified_base 1: mod_base = OTHER; note = 2'-O-methylcytidine-3'-phosphorothioate
  modified_base 2: mod_base = OTHER; note = 2'-O-methyladenosine-3'-phosphorothioate
  modified_base 3: mod_base = OTHER; note = 2'-O-methylguanosine-3'-phosphate
  modified_base 4: mod_base = OTHER; note = 2'-O-methylguanosine-3'-phosphate
  modified_base 5: mod_base = OTHER; note = 2'-O-methylcytidine-3'-phosphate
  modified_base 6: mod_base = OTHER; note = 2'-O-methylguanosine-3'-phosphate
  modified_base 7: mod_base = OTHER; note = 2'-deoxy-2'-fluorocytidine-3'-phosphate
  modified_base 8: mod_base = OTHER; note = 2'-O-methyladenosine-3'-phosphate
  modified_base 9: mod_base = OTHER; note = 2'-deoxy-2'-fluoroguanosine-3'-phosphate
  modified_base 10: mod_base = OTHER; note = 2'-deoxy-2'-fluoroadenosine-3'-phosphate
  modified_base 11: mod_base = OTHER; note = 2'-deoxy-2'-fluoroguanosine-3'-phosphate
  modified_base 12: mod_base = OTHER; note = 2'-O-methylcytidine-3'-phosphate
  modified_base 13: mod_base = OTHER; note = 2'-O-methylcytidine-3'-phosphate
  modified_base 14: mod_base = OTHER; note = 2'-O-methyluridine-3'-phosphate
  modified_base 15: mod_base = OTHER; note = 2'-O-methylcytidine-3'-phosphate
  modified_base 16: mod_base = OTHER; note = 2'-O-methyluridine-3'-phosphate
  modified_base 17: mod_base = OTHER; note = 2'-O-methylcytidine-3'-phosphate
  modified_base 18: mod_base = OTHER; note = 2'-O-methyluridine-3'-phosphate
  modified_base 19: mod_base = OTHER; note = 2'-O-methylcytidine-3'-phosphate
  modified_base 20: mod_base = OTHER; note = 2'-O-methyluridine-3'-phosphate
  modified_base 21: mod_base = OTHER; note = 2'-O-methyluridine-3'-phosphate ((2S,4R)-1-[29-[[2-(acetylamino)-2-deoxy-beta-D-galactopyra nosyl]oxy]-14,14-bis[[3-[[3-[[5-[[2-(acetylamino)-2-deoxy-b eta-D-galactopyranosyl]oxy]-1-oxopentyl]amino]propyl]amino] -3-oxopropoxy]methyl]-1,12,19,25-tetraoxo-16-oxa-13,20,24-t riazanonacos-1-yl]-4-hydroxy-2-pyrrolidinyl)methyl ester
caggcgcagagcctctctctt

SEQ ID NO: 1408 - RNA, 21 nt, synthetic construct
  source 1..21: mol_type = other RNA
  modified_base 1: mod_base = OTHER; note = 2'-O-methyladenosine-3'-phosphorothioate
  modified_base 2: mod_base = OTHER; note = 2'-O-methylguanosine-3'-phosphorothioate
  modified_base 3: mod_base = OTHER; note = 2'-O-methylcytidine-3'-phosphate
  modified_base 4: mod_base = OTHER; note = 2'-O-methylcytidine-3'-phosphate
  modified_base 5: mod_base = OTHER; note = 2'-O-methyluridine-3'-phosphate
  modified_base 6: mod_base = OTHER; note = 2'-O-methylcytidine-3'-phosphate
  modified_base 7: mod_base = OTHER; note = 2'-deoxy-2'-fluorouridine-3'-phosphate
  modified_base 8: mod_base = OTHER; note = 2'-O-methylcytidine-3'-phosphate
  modified_base 9: mod_base = OTHER; note = 2'-deoxy-2'-fluorouridine-3'-phosphate
  modified_base 10: mod_base = OTHER; note = 2'-deoxy-2'-fluorocytidine-3'-phosphate
  modified_base 11: mod_base = OTHER; note = 2'-deoxy-2'-fluorouridine-3'-phosphate
  modified_base 12: mod_base = OTHER; note = 2'-O-methylguanosine-3'-phosphate
  modified_base 13: mod_base = OTHER; note = 2'-O-methyluridine-3'-phosphate
  modified_base 14: mod_base = OTHER; note = 2'-O-methylguanosine-3'-phosphate
  modified_base 15: mod_base = OTHER; note = 2'-O-methyladenosine-3'-phosphate
  modified_base 16: mod_base = OTHER; note = 2'-O-methylcytidine-3'-phosphate
  modified_base 17: mod_base = OTHER; note = 2'-O-methyladenosine-3'-phosphate
  modified_base 18: mod_base = OTHER; note = 2'-O-methyluridine-3'-phosphate
  modified_base 19: mod_base = OTHER; note = 2'-O-methylguanosine-3'-phosphate
  modified_base 20: mod_base = OTHER; note = 2'-O-methyluridine-3'-phosphate
  modified_base 21: mod_base = OTHER; note = 2'-O-methyluridine-3'-phosphate ((2S,4R)-1-[29-[[2-(acetylamino)-2-deoxy-beta-D-galactopyra nosyl]oxy]-14,14-bis[[3-[[3-[[5-[[2-(acetylamino)-2-deoxy-b eta-D-galactopyranosyl]oxy]-1-oxopentyl]amino]propyl]amino] -3-oxopropoxy]methyl]-1,12,19,25-tetraoxo-16-oxa-13,20,24-t riazanonacos-1-yl]-4-hydroxy-2-pyrrolidinyl)methyl ester
agcctctctctgtgacatgtt

SEQ ID NO: 1409 - RNA, 21 nt, synthetic construct
  source 1..21: mol_type = other RNA
  modified_base 1: mod_base = OTHER; note = 2'-O-methyluridine-3'-phosphorothioate
  modified_base 2: mod_base = OTHER; note = 2'-O-methylguanosine-3'-phosphorothioate
  modified_base 3: mod_base = OTHER; note = 2'-O-methyluridine-3'-phosphate
  modified_base 4: mod_base = OTHER; note = 2'-O-methylguanosine-3'-phosphate
  modified_base 5: mod_base = OTHER; note = 2'-O-methyladenosine-3'-phosphate
  modified_base 6: mod_base = OTHER; note = 2'-O-methylcytidine-3'-phosphate
  modified_base 7: mod_base = OTHER; note = 2'-deoxy-2'-fluoroadenosine-3'-phosphate
  modified_base 8: mod_base = OTHER; note = 2'-O-methyluridine-3'-phosphate
  modified_base 9: mod_base = OTHER; note = 2'-deoxy-2'-fluoroguanosine-3'-phosphate
  modified_base 10: mod_base = OTHER; note = 2'-deoxy-2'-fluorouridine-3'-phosphate
  modified_base 11: mod_base = OTHER; note = 2'-deoxy-2'-fluoroguanosine-3'-phosphate
  modified_base 12: mod_base = OTHER; note = 2'-O-methyladenosine-3'-phosphate
  modified_base 13: mod_base = OTHER; note = 2'-O-methylcytidine-3'-phosphate
  modified_base 14: mod_base = OTHER; note = 2'-O-methyluridine-3'-phosphate
  modified_base 15: mod_base = OTHER; note = 2'-O-methylcytidine-3'-phosphate
  modified_base 16: mod_base = OTHER; note = 2'-O-methyluridine-3'-phosphate
  modified_base 17: mod_base = OTHER; note = 2'-O-methylguanosine-3'-phosphate
  modified_base 18: mod_base = OTHER; note = 2'-O-methyluridine-3'-phosphate
  modified_base 19: mod_base = OTHER; note = 2'-O-methylcytidine-3'-phosphate
  modified_base 20: mod_base = OTHER; note = 2'-O-methyladenosine-3'-phosphate
  modified_base 21: mod_base = OTHER; note = 2'-O-methyluridine-3'-phosphate ((2S,4R)-1-[29-[[2-(acetylamino)-2-deoxy-beta-D-galactopyra nosyl]oxy]-14,14-bis[[3-[[3-[[5-[[2-(acetylamino)-2-deoxy-b eta-D-galactopyranosyl]oxy]-1-oxopentyl]amino]propyl]amino] -3-oxopropoxy]methyl]-1,12,19,25-tetraoxo-16-oxa-13,20,24-t riazanonacos-1-yl]-4-hydroxy-2-pyrrolidinyl)methyl ester
tgtgacatgtgactctgtcat

SEQ ID NO: 1410 - RNA, 21 nt, synthetic construct
  source 1..21: mol_type = other RNA
  modified_base 1: mod_base = OTHER; note = 2'-O-methyluridine-3'-phosphorothioate
  modified_base 2: mod_base = OTHER; note = 2'-O-methylcytidine-3'-phosphorothioate
  modified_base 3: mod_base = OTHER; note = 2'-O-methyluridine-3'-phosphate
  modified_base 4: mod_base = OTHER; note = 2'-O-methylguanosine-3'-phosphate
  modified_base 5: mod_base = OTHER; note = 2'-O-methyluridine-3'-phosphate
  modified_base 6: mod_base = OTHER; note = 2'-O-methylcytidine-3'-phosphate
  modified_base 7: mod_base = OTHER; note = 2'-deoxy-2'-fluoroadenosine-3'-phosphate
  modified_base 8: mod_base = OTHER; note = 2'-O-methyladenosine-3'-phosphate
  modified_base 9: mod_base = OTHER; note = 2'-deoxy-2'-fluorouridine-3'-phosphate
  modified_base 10: mod_base = OTHER; note = 2'-deoxy-2'-fluorouridine-3'-phosphate
  modified_base 11: mod_base = OTHER; note = 2'-deoxy-2'-fluoroguanosine-3'-phosphate
  modified_base 12: mod_base = OTHER; note = 2'-O-methyladenosine-3'-phosphate
  modified_base 13: mod_base = OTHER; note = 2'-O-methyladenosine-3'-phosphate
  modified_base 14: mod_base = OTHER; note = 2'-O-methylguanosine-3'-phosphate
  modified_base 15: mod_base = OTHER; note = 2'-O-methyladenosine-3'-phosphate
  modified_base 16: mod_base = OTHER; note = 2'-O-methylcytidine-3'-phosphate
  modified_base 17: mod_base = OTHER; note = 2'-O-methyladenosine-3'-phosphate
  modified_base 18: mod_base = OTHER; note = 2'-O-methylguanosine-3'-phosphate
  modified_base 19: mod_base = OTHER; note = 2'-O-methylguanosine-3'-phosphate
  modified_base 20: mod_base = OTHER; note = 2'-O-methyladenosine-3'-phosphate
  modified_base 21: mod_base = OTHER; note = 2'-O-methyluridine-3'-phosphate ((2S,4R)-1-[29-[[2-(acetylamino)-2-deoxy-beta-D-galactopyra nosyl]oxy]-14,14-bis[[3-[[3-[[5-[[2-(acetylamino)-2-deoxy-b eta-D-galactopyranosyl]oxy]-1-oxopentyl]amino]propyl]amino] -3-oxopropoxy]methyl]-1,12,19,25-tetraoxo-16-oxa-13,20,24-t riazanonacos-1-yl]-4-hydroxy-2-pyrrolidinyl)methyl ester
tctgtcaattgaagacaggat

SEQ ID NO: 1411 - RNA, 21 nt, synthetic construct
  source 1..21: mol_type = other RNA
  modified_base 1: mod_base = OTHER; note = 2'-O-methyluridine-3'-phosphorothioate
  modified_base 2: mod_base = OTHER; note = 2'-O-methylguanosine-3'-phosphorothioate
  modified_base 3: mod_base = OTHER; note = 2'-O-methyladenosine-3'-phosphate
  modified_base 4: mod_base = OTHER; note = 2'-O-methyladenosine-3'-phosphate
  modified_base 5: mod_base = OTHER; note = 2'-O-methylguanosine-3'-phosphate
  modified_base 6: mod_base = OTHER; note = 2'-O-methyladenosine-3'-phosphate
  modified_base 7: mod_base = OTHER; note = 2'-deoxy-2'-fluorocytidine-3'-phosphate
  modified_base 8: mod_base = OTHER; note = 2'-O-methyladenosine-3'-phosphate
  modified_base 9: mod_base = OTHER; note = 2'-deoxy-2'-fluoroguanosine-3'-phosphate
  modified_base 10: mod_base = OTHER; note = 2'-deoxy-2'-fluoroguanosine-3'-phosphate
  modified_base 11: mod_base = OTHER; note = 2'-deoxy-2'-fluoroadenosine-3'-phosphate
  modified_base 12: mod_base = OTHER; note = 2'-O-methylcytidine-3'-phosphate
  modified_base 13: mod_base = OTHER; note = 2'-O-methyladenosine-3'-phosphate
  modified_base 14: mod_base = OTHER; note = 2'-O-methyluridine-3'-phosphate
  modified_base 15: mod_base = OTHER; note = 2'-O-methyluridine-3'-phosphate
  modified_base 16: mod_base = OTHER; note = 2'-O-methyladenosine-3'-phosphate
  modified_base 17: mod_base = OTHER; note = 2'-O-methyladenosine-3'-phosphate
  modified_base 18: mod_base = OTHER; note = 2'-O-methyladenosine-3'-phosphate
  modified_base 19: mod_base = OTHER; note = 2'-O-methyladenosine-3'-phosphate
  modified_base 20: mod_base = OTHER; note = 2'-O-methylguanosine-3'-phosphate
  modified_base 21: mod_base = OTHER; note = 2'-O-methyluridine-3'-phosphate ((2S,4R)-1-[29-[[2-(acetylamino)-2-deoxy-beta-D-galactopyra nosyl]oxy]-14,14-bis[[3-[[3-[[5-[[2-(acetylamino)-2-deoxy-b eta-D-galactopyranosyl]oxy]-1-oxopentyl]amino]propyl]amino] -3-oxopropoxy]methyl]-1,12,19,25-tetraoxo-16-oxa-13,20,24-t riazanonacos-1-yl]-4-hydroxy-2-pyrrolidinyl)methyl ester
tgaagacaggacattaaaagt

SEQ ID NO: 1412 - RNA, 21 nt, synthetic construct
  source 1..21: mol_type = other RNA
  modified_base 1: mod_base = OTHER; note = 2'-O-methylguanosine-3'-phosphorothioate
  modified_base 2: mod_base = OTHER; note = 2'-O-methyladenosine-3'-phosphorothioate
  modified_base 3: mod_base = OTHER; note = 2'-O-methylcytidine-3'-phosphate
  modified_base 4: mod_base = OTHER; note = 2'-O-methyladenosine-3'-phosphate
  modified_base 5: mod_base = OTHER; note = 2'-O-methyluridine-3'-phosphate
  modified_base 6: mod_base = OTHER; note = 2'-O-methyluridine-3'-phosphate
  modified_base 7: mod_base = OTHER; note = 2'-deoxy-2'-fluoroadenosine-3'-phosphate
  modified_base 8: mod_base = OTHER; note = 2'-O-methyladenosine-3'-phosphate
  modified_base 9: mod_base = OTHER; note = 2'-deoxy-2'-fluoroadenosine-3'-phosphate
  modified_base 10: mod_base = OTHER; note = 2'-deoxy-2'-fluoroadenosine-3'-phosphate
  modified_base 11: mod_base = OTHER; note = 2'-deoxy-2'-fluoroguanosine-3'-phosphate
  modified_base 12: mod_base = OTHER; note = 2'-O-methyladenosine-3'-phosphate
  modified_base 13: mod_base = OTHER; note = 2'-O-methylguanosine-3'-phosphate
  modified_base 14: mod_base = OTHER; note = 2'-O-methyladenosine-3'-phosphate
  modified_base 15: mod_base = OTHER; note = 2'-O-methylguanosine-3'-phosphate
  modified_base 16: mod_base = OTHER; note = 2'-O-methylcytidine-3'-phosphate
  modified_base 17: mod_base = OTHER; note = 2'-O-methylguanosine-3'-phosphate
  modified_base 18: mod_base = OTHER; note = 2'-O-methyladenosine-3'-phosphate
  modified_base 19: mod_base = OTHER; note = 2'-O-methylguanosine-3'-phosphate
  modified_base 20: mod_base = OTHER; note = 2'-O-methyladenosine-3'-phosphate
  modified_base 21: mod_base = OTHER; note = 2'-O-methyluridine-3'-phosphate ((2S,4R)-1-[29-[[2-(acetylamino)-2-deoxy-beta-D-galactopyra nosyl]oxy]-14,14-bis[[3-[[3-[[5-[[2-(acetylamino)-2-deoxy-b eta-D-galactopyranosyl]oxy]-1-oxopentyl]amino]propyl]amino] -3-oxopropoxy]methyl]-1,12,19,25-tetraoxo-16-oxa-13,20,24-t riazanonacos-1-yl]-4-hydroxy-2-pyrrolidinyl)methyl ester
gacattaaaagagagcgagat

SEQ ID NO: 1413 - RNA, 21 nt, synthetic construct
  source 1..21: mol_type = other RNA
  modified_base 1: mod_base = OTHER; note = 2'-O-methyladenosine-3'-phosphorothioate
  modified_base 2: mod_base = OTHER; note = 2'-O-methylguanosine-3'-phosphorothioate
  modified_base 3: mod_base = OTHER; note = 2'-O-methylcytidine-3'-phosphate
  modified_base 4: mod_base = OTHER; note = 2'-O-methylguanosine-3'-phosphate
  modified_base 5: mod_base = OTHER; note = 2'-O-methyladenosine-3'-phosphate
  modified_base 6: mod_base = OTHER; note = 2'-O-methylguanosine-3'-phosphate
  modified_base 7: mod_base = OTHER; note = 2'-deoxy-2'-fluoroadenosine-3'-phosphate
  modified_base 8: mod_base = OTHER; note = 2'-O-methylguanosine-3'-phosphate
  modified_base 9: mod_base = OTHER; note = 2'-deoxy-2'-fluoroadenosine-3'-phosphate
  modified_base 10: mod_base = OTHER; note = 2'-deoxy-2'-fluoroguanosine-3'-phosphate
  modified_base 11: mod_base = OTHER; note = 2'-deoxy-2'-fluoroadenosine-3'-phosphate
  modified_base 12: mod_base = OTHER; note = 2'-O-methylguanosine-3'-phosphate
  modified_base 13: mod_base = OTHER; note = 2'-O-methyladenosine-3'-phosphate
  modified_base 14: mod_base = OTHER; note = 2'-O-methyladenosine-3'-phosphate
  modified_base 15: mod_base = OTHER; note = 2'-O-methyladenosine-3'-phosphate
  modified_base 16: mod_base = OTHER; note = 2'-O-methylcytidine-3'-phosphate
  modified_base 17: mod_base = OTHER; note = 2'-O-methyladenosine-3'-phosphate
  modified_base 18: mod_base = OTHER; note = 2'-O-methylguanosine-3'-phosphate
  modified_base 19: mod_base = OTHER; note = 2'-O-methyluridine-3'-phosphate
  modified_base 20: mod_base = OTHER; note = 2'-O-methyluridine-3'-phosphate
  modified_base 21: mod_base = OTHER; note = 2'-O-methyluridine-3'-phosphate ((2S,4R)-1-[29-[[2-(acetylamino)-2-deoxy-beta-D-galactopyra nosyl]oxy]-14,14-bis[[3-[[3-[[5-[[2-(acetylamino)-2-deoxy-b eta-D-galactopyranosyl]oxy]-1-oxopentyl]amino]propyl]amino] -3-oxopropoxy]methyl]-1,12,19,25-tetraoxo-16-oxa-13,20,24-t riazanonacos-1-yl]-4-hydroxy-2-pyrrolidinyl)methyl ester
agcgagagagagaaacagttt

SEQ ID NO: 1414 - RNA, 21 nt, synthetic construct
  source 1..21: mol_type = other RNA
  modified_base 1: mod_base = OTHER; note = 2'-O-methylguanosine-3'-phosphorothioate
  modified_base 2: mod_base = OTHER; note = 2'-O-methyladenosine-3'-phosphorothioate
  modified_base 3: mod_base = OTHER; note = 2'-O-methyladenosine-3'-phosphate
  modified_base 4: mod_base = OTHER; note = 2'-O-methyladenosine-3'-phosphate
  modified_base 5: mod_base = OTHER; note = 2'-O-methylcytidine-3'-phosphate
  modified_base 6: mod_base = OTHER; note = 2'-O-methyladenosine-3'-phosphate
  modified_base 7: mod_base = OTHER; note = 2'-deoxy-2'-fluoroguanosine-3'-phosphate
  modified_base 8: mod_base = OTHER; note = 2'-O-methyluridine-3'-phosphate
  modified_base 9: mod_base = OTHER; note = 2'-deoxy-2'-fluorouridine-3'-phosphate
  modified_base 10: mod_base = OTHER; note = 2'-deoxy-2'-fluorocytidine-3'-phosphate
  modified_base 11: mod_base = OTHER; note = 2'-deoxy-2'-fluoroadenosine-3'-phosphate
  modified_base 12: mod_base = OTHER; note = 2'-O-methylguanosine-3'-phosphate
  modified_base 13: mod_base = OTHER; note = 2'-O-methyladenosine-3'-phosphate
  modified_base 14: mod_base = OTHER; note = 2'-O-methyluridine-3'-phosphate
  modified_base 15: mod_base = OTHER; note = 2'-O-methyluridine-3'-phosphate
  modified_base 16: mod_base = OTHER; note = 2'-O-methyladenosine-3'-phosphate
  modified_base 17: mod_base = OTHER; note = 2'-O-methylcytidine-3'-phosphate
  modified_base 18: mod_base = OTHER; note = 2'-O-methyluridine-3'-phosphate
  modified_base 19: mod_base = OTHER; note = 2'-O-methylguanosine-3'-phosphate
  modified_base 20: mod_base = OTHER; note = 2'-O-methylcytidine-3'-phosphate
  modified_base 21: mod_base = OTHER; note = 2'-O-methyluridine-3'-phosphate ((2S,4R)-1-[29-[[2-(acetylamino)-2-deoxy-beta-D-galactopyra nosyl]oxy]-14,14-bis[[3-[[3-[[5-[[2-(acetylamino)-2-deoxy-b eta-D-galactopyranosyl]oxy]-1-oxopentyl]amino]propyl]amino] -3-oxopropoxy]methyl]-1,12,19,25-tetraoxo-16-oxa-13,20,24-t riazanonacos-1-yl]-4-hydroxy-2-pyrrolidinyl)methyl ester
gaaacagttcagattactgct

SEQ ID NO: 1415 - RNA, 21 nt, synthetic construct
  source 1..21: mol_type = other RNA
  modified_base 1: mod_base = OTHER; note = 2'-O-methyladenosine-3'-phosphorothioate
  modified_base 2: mod_base = OTHER; note = 2'-O-methylguanosine-3'-phosphorothioate
  modified_base 3: mod_base = OTHER; note = 2'-O-methyladenosine-3'-phosphate
  modified_base 4: mod_base = OTHER; note = 2'-O-methyluridine-3'-phosphate
  modified_base 5: mod_base = OTHER; note = 2'-O-methyluridine-3'-phosphate
  modified_base 6: mod_base = OTHER; note = 2'-O-methyladenosine-3'-phosphate
  modified_base 7: mod_base = OTHER; note = 2'-deoxy-2'-fluorocytidine-3'-phosphate
  modified_base 8: mod_base = OTHER; note = 2'-O-methyluridine-3'-phosphate
  modified_base 9: mod_base = OTHER; note = 2'-deoxy-2'-fluoroguanosine-3'-phosphate
  modified_base 10: mod_base = OTHER; note = 2'-deoxy-2'-fluorocytidine-3'-phosphate
  modified_base 11: mod_base = OTHER; note = 2'-deoxy-2'-fluoroadenosine-3'-phosphate
  modified_base 12: mod_base = OTHER; note = 2'-O-methylcytidine-3'-phosphate
  modified_base 13: mod_base = OTHER; note = 2'-O-methyladenosine-3'-phosphate
  modified_base 14: mod_base = OTHER; note = 2'-O-methyluridine-3'-phosphate
  modified_base 15: mod_base = OTHER; note = 2'-O-methylguanosine-3'-phosphate
  modified_base 16: mod_base = OTHER; note = 2'-O-methyluridine-3'-phosphate
  modified_base 17: mod_base = OTHER; note = 2'-O-methylguanosine-3'-phosphate
  modified_base 18: mod_base = OTHER; note = 2'-O-methylguanosine-3'-phosphate
  modified_base 19: mod_base = OTHER; note = 2'-O-methyladenosine-3'-phosphate
  modified_base 20: mod_base = OTHER; note = 2'-O-methyluridine-3'-phosphate
  modified_base 21: mod_base = OTHER; note = 2'-O-methyluridine-3'-phosphate ((2S,4R)-1-[29-[[2-(acetylamino)-2-deoxy-beta-D-galactopyra nosyl]oxy]-14,14-bis[[3-[[3-[[5-[[2-(acetylamino)-2-deoxy-b eta-D-galactopyranosyl]oxy]-1-oxopentyl]amino]propyl]amino] -3-oxopropoxy]methyl]-1,12,19,25-tetraoxo-16-oxa-13,20,24-t riazanonacos-1-yl]-4-hydroxy-2-pyrrolidinyl)methyl ester
agattactgcacatgtggatt

SEQ ID NO: 1416 - RNA, 21 nt, synthetic construct
  source 1..21: mol_type = other RNA
  modified_base 1: mod_base = OTHER; note = 2'-O-methylguanosine-3'-phosphorothioate
  modified_base 2: mod_base = OTHER; note = 2'-O-methyluridine-3'-phosphorothioate
  modified_base 3: mod_base = OTHER; note = 2'-O-methylguanosine-3'-phosphate
  modified_base 4: mod_base = OTHER; note = 2'-O-methylguanosine-3'-phosphate
  modified_base 5: mod_base = OTHER; note = 2'-O-methyluridine-3'-phosphate
  modified_base 6: mod_base = OTHER; note = 2'-O-methyluridine-3'-phosphate
  modified_base 7: mod_base = OTHER; note = 2'-deoxy-2'-fluorocytidine-3'-phosphate
  modified_base 8: mod_base = OTHER; note = 2'-O-methyladenosine-3'-phosphate
  modified_base 9: mod_base = OTHER; note = 2'-deoxy-2'-fluoroadenosine-3'-phosphate
  modified_base 10: mod_base = OTHER; note = 2'-deoxy-2'-fluoroadenosine-3'-phosphate
  modified_base 11: mod_base = OTHER; note = 2'-deoxy-2'-fluoroadenosine-3'-phosphate
  modified_base 12: mod_base = OTHER; note = 2'-O-methyluridine-3'-phosphate
  modified_base 13: mod_base = OTHER; note = 2'-O-methylguanosine-3'-phosphate
  modified_base 14: mod_base = OTHER; note = 2'-O-methylcytidine-3'-phosphate
  modified_base 15: mod_base = OTHER; note = 2'-O-methylcytidine-3'-phosphate
  modified_base 16: mod_base = OTHER; note = 2'-O-methyladenosine-3'-phosphate
  modified_base 17: mod_base = OTHER; note = 2'-O-methyluridine-3'-phosphate
  modified_base 18: mod_base = OTHER; note = 2'-O-methyluridine-3'-phosphate
  modified_base 19: mod_base = OTHER; note = 2'-O-methyluridine-3'-phosphate
  modified_base 20: mod_base = OTHER; note = 2'-O-methyluridine-3'-phosphate
  modified_base 21: mod_base = OTHER; note = 2'-O-methyluridine-3'-phosphate ((2S,4R)-1-[29-[[2-(acetylamino)-2-deoxy-beta-D-galactopyra nosyl]oxy]-14,14-bis[[3-[[3-[[5-[[2-(acetylamino)-2-deoxy-b eta-D-galactopyranosyl]oxy]-1-oxopentyl]amino]propyl]amino] -3-oxopropoxy]methyl]-1,12,19,25-tetraoxo-16-oxa-13,20,24-t riazanonacos-1-yl]-4-hydroxy-2-pyrrolidinyl)methyl ester
gtggttcaaaatgccattttt

SEQ ID NO: 1417 - RNA, 21 nt, synthetic construct
  source 1..21: mol_type = other RNA
  modified_base 1: mod_base = OTHER; note = 2'-O-methyluridine-3'-phosphorothioate
  modified_base 2: mod_base = OTHER; note = 2'-O-methylguanosine-3'-phosphorothioate
  modified_base 3: mod_base = OTHER; note = 2'-O-methylcytidine-3'-phosphate
  modified_base 4: mod_base = OTHER; note = 2'-O-methylcytidine-3'-phosphate
  modified_base 5: mod_base = OTHER; note = 2'-O-methyladenosine-3'-phosphate
  modified_base 6: mod_base = OTHER; note = 2'-O-methyluridine-3'-phosphate
  modified_base 7: mod_base = OTHER; note = 2'-deoxy-2'-fluorouridine-3'-phosphate
  modified_base 8: mod_base = OTHER; note = 2'-O-methyluridine-3'-phosphate
  modified_base 9: mod_base = OTHER; note = 2'-deoxy-2'-fluorouridine-3'-phosphate
  modified_base 10: mod_base = OTHER; note = 2'-deoxy-2'-fluorouridine-3'-phosphate
  modified_base 11: mod_base = OTHER; note = 2'-deoxy-2'-fluoroguanosine-3'-phosphate
  modified_base 12: mod_base = OTHER; note = 2'-O-methylcytidine-3'-phosphate
  modified_base 13: mod_base = OTHER; note = 2'-O-methyladenosine-3'-phosphate
  modified_base 14: mod_base = OTHER; note = 2'-O-methylcytidine-3'-phosphate
  modified_base 15: mod_base = OTHER; note = 2'-O-methyladenosine-3'-phosphate
  modified_base 16: mod_base = OTHER; note = 2'-O-methylguanosine-3'-phosphate
  modified_base 17: mod_base = OTHER; note = 2'-O-methyluridine-3'-phosphate
  modified_base 18: mod_base = OTHER; note = 2'-O-methylguanosine-3'-phosphate
  modified_base 19: mod_base = OTHER; note = 2'-O-methyluridine-3'-phosphate
  modified_base 20: mod_base = OTHER; note = 2'-O-methyluridine-3'-phosphate
  modified_base 21: mod_base = OTHER; note = 2'-O-methyluridine-3'-phosphate ((2S,4R)-1-[29-[[2-(acetylamino)-2-deoxy-beta-D-galactopyra nosyl]oxy]-14,14-bis[[3-[[3-[[5-[[2-(acetylamino)-2-deoxy-b eta-D-galactopyranosyl]oxy]-1-oxopentyl]amino]propyl]amino] -3-oxopropoxy]methyl]-1,12,19,25-tetraoxo-16-oxa-13,20,24-t riazanonacos-1-yl]-4-hydroxy-2-pyrrolidinyl)methyl ester
tgccatttttgcacagtgttt

SEQ ID NO: 1418 - RNA, 21 nt, synthetic construct
  source 1..21: mol_type = other RNA
  modified_base 1: mod_base = OTHER; note = 2'-O-methyladenosine-3'-phosphorothioate
  modified_base 2: mod_base = OTHER; note = 2'-O-methylguanosine-3'-phosphorothioate
  modified_base 3: mod_base = OTHER; note = 2'-O-methyluridine-3'-phosphate
  modified_base 4: mod_base = OTHER; note = 2'-O-methylguanosine-3'-phosphate
  modified_base 5: mod_base = OTHER; note = 2'-O-methyluridine-3'-phosphate
  modified_base 6: mod_base = OTHER; note = 2'-O-methyluridine-3'-phosphate
  modified_base 7: mod_base = OTHER; note = 2'-deoxy-2'-fluoroadenosine-3'-phosphate
  modified_base 8: mod_base = OTHER; note = 2'-O-methylguanosine-3'-phosphate
  modified_base 9: mod_base = OTHER; note = 2'-deoxy-2'-fluoroguanosine-3'-phosphate
  modified_base 10: mod_base = OTHER; note = 2'-deoxy-2'-fluoroadenosine-3'-phosphate
  modified_base 11: mod_base = OTHER; note = 2'-deoxy-2'-fluoroadenosine-3'-phosphate
  modified_base 12: mod_base = OTHER; note = 2'-O-methyluridine-3'-phosphate
  modified_base 13: mod_base = OTHER; note = 2'-O-methyluridine-3'-phosphate
  modified_base 14: mod_base = OTHER; note = 2'-O-methyladenosine-3'-phosphate
  modified_base 15: mod_base = OTHER; note = 2'-O-methylcytidine-3'-phosphate
  modified_base 16: mod_base = OTHER; note = 2'-O-methyladenosine-3'-phosphate
  modified_base 17: mod_base = OTHER; note = 2'-O-methyladenosine-3'-phosphate
  modified_base 18: mod_base = OTHER; note = 2'-O-methyladenosine-3'-phosphate
  modified_base 19: mod_base = OTHER; note = 2'-O-methyladenosine-3'-phosphate
  modified_base 20: mod_base = OTHER; note = 2'-O-methyluridine-3'-phosphate
  modified_base 21: mod_base = OTHER; note = 2'-O-methyluridine-3'-phosphate ((2S,4R)-1-[29-[[2-(acetylamino)-2-deoxy-beta-D-galactopyra nosyl]oxy]-14,14-bis[[3-[[3-[[5-[[2-(acetylamino)-2-deoxy-b eta-D-galactopyranosyl]oxy]-1-oxopentyl]amino]propyl]amino] -3-oxopropoxy]methyl]-1,12,19,25-tetraoxo-16-oxa-13,20,24-t riazanonacos-1-yl]-4-hydroxy-2-pyrrolidinyl)methyl ester
agtgttaggaattacaaaatt

SEQ ID NO: 1419 - RNA, 21 nt, synthetic construct
  source 1..21: mol_type = other RNA
  modified_base 1: mod_base = OTHER; note = 2'-O-methyladenosine-3'-phosphorothioate
  modified_base 2: mod_base = OTHER; note = 2'-O-methyladenosine-3'-phosphorothioate
  modified_base 3: mod_base = OTHER; note = 2'-O-methyluridine-3'-phosphate
  modified_base 4: mod_base = OTHER; note = 2'-O-methyluridine-3'-phosphate
  modified_base 5: mod_base = OTHER; note = 2'-O-methyladenosine-3'-phosphate
  modified_base 6: mod_base = OTHER; note = 2'-O-methylcytidine-3'-phosphate
  modified_base 7: mod_base = OTHER; note = 2'-deoxy-2'-fluoroadenosine-3'-phosphate
  modified_base 8: mod_base = OTHER; note = 2'-O-methyladenosine-3'-phosphate
  modified_base 9: mod_base = OTHER; note = 2'-deoxy-2'-fluoroadenosine-3'-phosphate
  modified_base 10: mod_base = OTHER; note = 2'-deoxy-2'-fluoroadenosine-3'-phosphate
  modified_base 11: mod_base = OTHER; note = 2'-deoxy-2'-fluorouridine-3'-phosphate
  modified_base 12: mod_base = OTHER; note = 2'-O-methylcytidine-3'-phosphate
  modified_base 13: mod_base = OTHER; note = 2'-O-methylcytidine-3'-phosphate
  modified_base 14: mod_base = OTHER; note = 2'-O-methyladenosine-3'-phosphate
  modified_base 15: mod_base = OTHER; note = 2'-O-methylcytidine-3'-phosphate
  modified_base 16: mod_base = OTHER; note = 2'-O-methyladenosine-3'-phosphate
  modified_base 17: mod_base = OTHER; note = 2'-O-methylguanosine-3'-phosphate
  modified_base 18: mod_base = OTHER; note = 2'-O-methyladenosine-3'-phosphate
  modified_base 19: mod_base = OTHER; note = 2'-O-methyladenosine-3'-phosphate
  modified_base 20: mod_base = OTHER; note = 2'-O-methylguanosine-3'-phosphate
  modified_base 21: mod_base = OTHER; note = 2'-O-methyluridine-3'-phosphate ((2S,4R)-1-[29-[[2-(acetylamino)-2-deoxy-beta-D-galactopyra nosyl]oxy]-14,14-bis[[3-[[3-[[5-[[2-(acetylamino)-2-deoxy-b eta-D-galactopyranosyl]oxy]-1-oxopentyl]amino]propyl]amino] -3-oxopropoxy]methyl]-1,12,19,25-tetraoxo-16-oxa-13,20,24-t riazanonacos-1-yl]-4-hydroxy-2-pyrrolidinyl)methyl ester
aattacaaaatccacagaagt

SEQ ID NO: 1420 - RNA, 21 nt, synthetic construct
  source 1..21: mol_type = other RNA
  modified_base 1: mod_base = OTHER; note = 2'-O-methylcytidine-3'-phosphorothioate
  modified_base 2: mod_base = OTHER; note = 2'-O-methylcytidine-3'-phosphorothioate
  modified_base 3: mod_base = OTHER; note = 2'-O-methyladenosine-3'-phosphate
  modified_base 4: mod_base = OTHER; note = 2'-O-methylcytidine-3'-phosphate
  modified_base 5: mod_base = OTHER; note = 2'-O-methyladenosine-3'-phosphate
  modified_base 6: mod_base = OTHER; note = 2'-O-methylguanosine-3'-phosphate
  modified_base 7: mod_base = OTHER; note = 2'-deoxy-2'-fluoroadenosine-3'-phosphate
  modified_base 8: mod_base = OTHER; note = 2'-O-methyladenosine-3'-phosphate
  modified_base 9: mod_base = OTHER; note = 2'-deoxy-2'-fluoroguanosine-3'-phosphate
  modified_base 10: mod_base = OTHER; note = 2'-deoxy-2'-fluoroadenosine-3'-phosphate
  modified_base 11: mod_base = OTHER; note = 2'-deoxy-2'-fluorouridine-3'-phosphate
  modified_base 12: mod_base = OTHER; note = 2'-O-methylguanosine-3'-phosphate
  modified_base 13: mod_base = OTHER; note = 2'-O-methyluridine-3'-phosphate
  modified_base 14: mod_base = OTHER; note = 2'-O-methyluridine-3'-phosphate
  modified_base 15: mod_base = OTHER; note = 2'-O-methyladenosine-3'-phosphate
  modified_base 16: mod_base = OTHER; note = 2'-O-methylcytidine-3'-phosphate
  modified_base 17: mod_base = OTHER; note = 2'-O-methyluridine-3'-phosphate
  modified_base 18: mod_base = OTHER; note = 2'-O-methyluridine-3'-phosphate
  modified_base 19: mod_base = OTHER; note = 2'-O-methylguanosine-3'-phosphate
  modified_base 20: mod_base = OTHER; note = 2'-O-methylcytidine-3'-phosphate
  modified_base 21: mod_base = OTHER; note = 2'-O-methyluridine-3'-phosphate ((2S,4R)-1-[29-[[2-(acetylamino)-2-deoxy-beta-D-galactopyra nosyl]oxy]-14,14-bis[[3-[[3-[[5-[[2-(acetylamino)-2-deoxy-b eta-D-galactopyranosyl]oxy]-1-oxopentyl]amino]propyl]amino] -3-oxopropoxy]methyl]-1,12,19,25-tetraoxo-16-oxa-13,20,24-t riazanonacos-1-yl]-4-hydroxy-2-pyrrolidinyl)methyl ester
ccacagaagatgttacttgct

SEQ ID NO: 1421 - RNA, 21 nt, synthetic construct
  source 1..21: mol_type = other RNA
  modified_base 1: mod_base = OTHER; note = 2'-O-methylguanosine-3'-phosphorothioate
  modified_base 2: mod_base = OTHER; note = 2'-O-methylguanosine-3'-phosphorothioate
  modified_base 3: mod_base = OTHER; note = 2'-O-methylguanosine-3'-phosphate
  modified_base 4: mod_base = OTHER; note = 2'-O-methylcytidine-3'-phosphate
  modified_base 5: mod_base = OTHER; note = 2'-O-methyladenosine-3'-phosphate
  modified_base 6: mod_base = OTHER; note = 2'-O-methylguanosine-3'-phosphate
  modified_base 7: mod_base = OTHER; note = 2'-deoxy-2'-fluoroadenosine-3'-phosphate
  modified_base 8: mod_base = OTHER; note = 2'-O-methyluridine-3'-phosphate
  modified_base 9: mod_base = OTHER; note = 2'-deoxy-2'-fluorocytidine-3'-phosphate
  modified_base 10: mod_base = OTHER; note = 2'-deoxy-2'-fluorouridine-3'-phosphate
  modified_base 11: mod_base = OTHER; note = 2'-deoxy-2'-fluorouridine-3'-phosphate
  modified_base 12: mod_base = OTHER; note = 2'-O-methyladenosine-3'-phosphate
  modified_base 13: mod_base = OTHER; note = 2'-O-methyladenosine-3'-phosphate
  modified_base 14: mod_base = OTHER; note = 2'-O-methyladenosine-3'-phosphate
  modified_base 15: mod_base = OTHER; note = 2'-O-methyluridine-3'-phosphate
  modified_base 16: mod_base = OTHER; note = 2'-O-methyladenosine-3'-phosphate
  modified_base 17: mod_base = OTHER; note = 2'-O-methyladenosine-3'-phosphate
  modified_base 18: mod_base = OTHER; note = 2'-O-methyladenosine-3'-phosphate
  modified_base 19: mod_base = OTHER; note = 2'-O-methyladenosine-3'-phosphate
  modified_base 20: mod_base = OTHER; note = 2'-O-methyluridine-3'-phosphate
  modified_base 21: mod_base = OTHER; note = 2'-O-methyluridine-3'-phosphate ((2S,4R)-1-[29-[[2-(acetylamino)-2-deoxy-beta-D-galactopyra nosyl]oxy]-14,14-bis[[3-[[3-[[5-[[2-(acetylamino)-2-deoxy-b eta-D-galactopyranosyl]oxy]-1-oxopentyl]amino]propyl]amino] -3-oxopropoxy]methyl]-1,12,19,25-tetraoxo-16-oxa-13,20,24-t riazanonacos-1-yl]-4-hydroxy-2-pyrrolidinyl)methyl ester
gggcagatcttaaataaaatt

SEQ ID NO: 1422 - RNA, 21 nt, synthetic construct
  source 1..21: mol_type = other RNA
  modified_base 1: mod_base = OTHER; note = 2'-O-methyladenosine-3'-phosphorothioate
  modified_base 2: mod_base = OTHER; note = 2'-O-methyluridine-3'-phosphorothioate
  modified_base 3: mod_base = OTHER; note = 2'-O-methyluridine-3'-phosphate
  modified_base 4: mod_base = OTHER; note = 2'-O-methylcytidine-3'-phosphate
  modified_base 5: mod_base = OTHER; note = 2'-O-methyladenosine-3'-phosphate
  modified_base 6: mod_base = OTHER; note = 2'-O-methyladenosine-3'-phosphate
  modified_base 7: mod_base = OTHER; note = 2'-deoxy-2'-fluoroadenosine-3'-phosphate
  modified_base 8: mod_base = OTHER; note = 2'-O-methylcytidine-3'-phosphate
  modified_base 9: mod_base = OTHER; note = 2'-deoxy-2'-fluorouridine-3'-phosphate
  modified_base 10: mod_base = OTHER; note = 2'-deoxy-2'-fluorocytidine-3'-phosphate
  modified_base 11: mod_base = OTHER; note = 2'-deoxy-2'-fluorouridine-3'-phosphate
  modified_base 12: mod_base = OTHER; note = 2'-O-methyladenosine-3'-phosphate
  modified_base 13: mod_base = OTHER; note = 2'-O-methylcytidine-3'-phosphate
  modified_base 14: mod_base = OTHER; note = 2'-O-methyluridine-3'-phosphate
  modified_base 15: mod_base = OTHER; note = 2'-O-methyluridine-3'-phosphate
  modified_base 16: mod_base = OTHER; note = 2'-O-methylcytidine-3'-phosphate
  modified_base 17: mod_base = OTHER; note = 2'-O-methyluridine-3'-phosphate
  modified_base 18: mod_base = OTHER; note = 2'-O-methylguanosine-3'-phosphate
  modified_base 19: mod_base = OTHER; note = 2'-O-methyluridine-3'-phosphate
  modified_base 20: mod_base = OTHER; note = 2'-O-methyluridine-3'-phosphate
  modified_base 21: mod_base = OTHER; note = 2'-O-methyluridine-3'-phosphate ((2S,4R)-1-[29-[[2-(acetylamino)-2-deoxy-beta-D-galactopyra nosyl]oxy]-14,14-bis[[3-[[3-[[5-[[2-(acetylamino)-2-deoxy-b eta-D-galactopyranosyl]oxy]-1-oxopentyl]amino]propyl]amino] -3-oxopropoxy]methyl]-1,12,19,25-tetraoxo-16-oxa-13,20,24-t riazanonacos-1-yl]-4-hydroxy-2-pyrrolidinyl)methyl ester
attcaaactctacttctgttt

SEQ ID NO: 1423 - RNA, 21 nt, synthetic construct
  source 1..21: mol_type = other RNA
  modified_base 1: mod_base = OTHER; note = 2'-O-methylcytidine-3'-phosphorothioate
  modified_base 2: mod_base = OTHER; note = 2'-O-methyluridine-3'-phosphorothioate
  modified_base 3: mod_base = OTHER; note = 2'-O-methyladenosine-3'-phosphate
  modified_base 4: mod_base = OTHER; note = 2'-O-methylcytidine-3'-phosphate
  modified_base 5: mod_base = OTHER; note = 2'-O-methyluridine-3'-phosphate
  modified_base 6: mod_base = OTHER; note = 2'-O-methyluridine-3'-phosphate
  modified_base 7: mod_base = OTHER; note = 2'-deoxy-2'-fluorocytidine-3'-phosphate
  modified_base 8: mod_base = OTHER; note = 2'-O-methyluridine-3'-phosphate
  modified_base 9: mod_base = OTHER; note = 2'-deoxy-2'-fluoroguanosine-3'-phosphate
  modified_base 10: mod_base = OTHER; note = 2'-deoxy-2'-fluorouridine-3'-phosphate
  modified_base 11: mod_base = OTHER; note = 2'-deoxy-2'-fluorouridine-3'-phosphate
  modified_base 12: mod_base = OTHER; note = 2'-O-methylguanosine-3'-phosphate
  modified_base 13: mod_base = OTHER; note = 2'-O-methyluridine-3'-phosphate
  modified_base 14: mod_base = OTHER; note = 2'-O-methylcytidine-3'-phosphate
  modified_base 15: mod_base = OTHER; note = 2'-O-methyluridine-3'-phosphate
  modified_base 16: mod_base = OTHER; note = 2'-O-methyladenosine-3'-phosphate
  modified_base 17: mod_base = OTHER; note = 2'-O-methylguanosine-3'-phosphate
  modified_base 18: mod_base = OTHER; note = 2'-O-methyluridine-3'-phosphate
  modified_base 19: mod_base = OTHER; note = 2'-O-methyladenosine-3'-phosphate
  modified_base 20: mod_base = OTHER; note = 2'-O-methyluridine-3'-phosphate
  modified_base 21: mod_base = OTHER; note = 2'-O-methyluridine-3'-phosphate ((2S,4R)-1-[29-[[2-(acetylamino)-2-deoxy-beta-D-galactopyra nosyl]oxy]-14,14-bis[[3-[[3-[[5-[[2-(acetylamino)-2-deoxy-b eta-D-galactopyranosyl]oxy]-1-oxopentyl]amino]propyl]amino] -3-oxopropoxy]methyl]-1,12,19,25-tetraoxo-16-oxa-13,20,24-t riazanonacos-1-yl]-4-hydroxy-2-pyrrolidinyl)methyl ester
ctacttctgttgtctagtatt

SEQ ID NO: 1424 - RNA, 21 nt, synthetic construct
  source 1..21: mol_type = other RNA
  modified_base 1: mod_base = OTHER; note = 2'-O-methyluridine-3'-phosphorothioate
  modified_base 2: mod_base = OTHER; note = 2'-O-methyladenosine-3'-phosphorothioate
  modified_base 3: mod_base = OTHER; note = 2'-O-methylguanosine-3'-phosphate
  modified_base 4: mod_base = OTHER; note = 2'-O-methyluridine-3'-phosphate
  modified_base 5: mod_base = OTHER; note = 2'-O-methyladenosine-3'-phosphate
  modified_base 6: mod_base = OTHER; note = 2'-O-methyluridine-3'-phosphate
  modified_base 7: mod_base = OTHER; note = 2'-deoxy-2'-fluoroguanosine-3'-phosphate
  modified_base 8: mod_base = OTHER; note = 2'-O-methyluridine-3'-phosphate
  modified_base 9: mod_base = OTHER; note = 2'-deoxy-2'-fluorouridine-3'-phosphate
  modified_base 10: mod_base = OTHER; note = 2'-deoxy-2'-fluoroadenosine-3'-phosphate
  modified_base 11: mod_base = OTHER; note = 2'-deoxy-2'-fluorouridine-3'-phosphate
  modified_base 12: mod_base = OTHER; note = 2'-O-methyluridine-3'-phosphate
  modified_base 13: mod_base = OTHER; note = 2'-O-methylguanosine-3'-phosphate
  modified_base 14: mod_base = OTHER; note = 2'-O-methyladenosine-3'-phosphate
  modified_base 15: mod_base = OTHER; note = 2'-O-methylguanosine-3'-phosphate
  modified_base 16: mod_base = OTHER; note = 2'-O-methylcytidine-3'-phosphate
  modified_base 17: mod_base = OTHER; note = 2'-O-methyluridine-3'-phosphate
  modified_base 18: mod_base = OTHER; note = 2'-O-methyladenosine-3'-phosphate
  modified_base 19: mod_base = OTHER; note = 2'-O-methyladenosine-3'-phosphate
  modified_base 20: mod_base = OTHER; note = 2'-O-methyluridine-3'-phosphate
  modified_base 21: mod_base = OTHER; note = 2'-O-methyluridine-3'-phosphate ((2S,4R)-1-[29-[[2-(acetylamino)-2-deoxy-beta-D-galactopyra nosyl]oxy]-14,14-bis[[3-[[3-[[5-[[2-(acetylamino)-2-deoxy-b eta-D-galactopyranosyl]oxy]-1-oxopentyl]amino]propyl]amino] -3-oxopropoxy]methyl]-1,12,19,25-tetraoxo-16-oxa-13,20,24-t riazanonacos-1-yl]-4-hydroxy-2-pyrrolidinyl)methyl ester
tagtatgttattgagctaatt

SEQ ID NO: 1425 - RNA, 21 nt, synthetic construct
  source 1..21: mol_type = other RNA
  modified_base 1: mod_base = OTHER; note = 2'-O-methyladenosine-3'-phosphorothioate
  modified_base 2: mod_base = OTHER; note = 2'-O-methyluridine-3'-phosphorothioate
  modified_base 3: mod_base = OTHER; note = 2'-O-methyluridine-3'-phosphate
  modified_base 4: mod_base = OTHER; note = 2'-O-methylguanosine-3'-phosphate
  modified_base 5: mod_base = OTHER; note = 2'-O-methyladenosine-3'-phosphate
  modified_base 6: mod_base = OTHER; note = 2'-O-methylguanosine-3'-phosphate
  modified_base 7: mod_base = OTHER; note = 2'-deoxy-2'-fluorocytidine-3'-phosphate
  modified_base 8: mod_base = OTHER; note = 2'-O-methyluridine-3'-phosphate
  modified_base 9: mod_base = OTHER; note = 2'-deoxy-2'-fluoroadenosine-3'-phosphate
  modified_base 10: mod_base = OTHER; note = 2'-deoxy-2'-fluoroadenosine-3'-phosphate
  modified_base 11: mod_base = OTHER; note = 2'-deoxy-2'-fluorouridine-3'-phosphate
  modified_base 12: mod_base = OTHER; note = 2'-O-methylguanosine-3'-phosphate
  modified_base 13: mod_base = OTHER; note = 2'-O-methyladenosine-3'-phosphate
  modified_base 14: mod_base = OTHER; note = 2'-O-methyluridine-3'-phosphate
  modified_base 15: mod_base = OTHER; note = 2'-O-methyluridine-3'-phosphate
  modified_base 16: mod_base = OTHER; note = 2'-O-methylcytidine-3'-phosphate
  modified_base 17: mod_base = OTHER; note = 2'-O-methyladenosine-3'-phosphate
  modified_base 18: mod_base = OTHER; note = 2'-O-methyluridine-3'-phosphate
  modified_base 19: mod_base = OTHER; note = 2'-O-methyluridine-3'-phosphate
  modified_base 20: mod_base = OTHER; note = 2'-O-methylguanosine-3'-phosphate
  modified_base 21: mod_base = OTHER; note = 2'-O-methyluridine-3'-phosphate ((2S,4R)-1-[29-[[2-(acetylamino)-2-deoxy-beta-D-galactopyra nosyl]oxy]-14,14-bis[[3-[[3-[[5-[[2-(acetylamino)-2-deoxy-b eta-D-galactopyranosyl]oxy]-1-oxopentyl]amino]propyl]amino] -3-oxopropoxy]methyl]-1,12,19,25-tetraoxo-16-oxa-13,20,24-t riazanonacos-1-yl]-4-hydroxy-2-pyrrolidinyl)methyl ester
attgagctaatgattcattgt

SEQ ID NO: 1426 - RNA, 21 nt, synthetic construct
  source 1..21: mol_type = other RNA
  modified_base 1: mod_base = OTHER; note = 2'-O-methyladenosine-3'-phosphorothioate
  modified_base 2: mod_base = OTHER; note = 2'-O-methyluridine-3'-phosphorothioate
  modified_base 3: mod_base = OTHER; note = 2'-O-methyluridine-3'-phosphate
  modified_base 4: mod_base = OTHER; note = 2'-O-methylguanosine-3'-phosphate
  modified_base 5: mod_base = OTHER; note = 2'-O-methylguanosine-3'-phosphate
  modified_base 6: mod_base = OTHER; note = 2'-O-methylguanosine-3'-phosphate
  modified_base 7: mod_base = OTHER; note = 2'-deoxy-2'-fluoroadenosine-3'-phosphate
  modified_base 8: mod_base = OTHER; note = 2'-O-methyladenosine-3'-phosphate
  modified_base 9: mod_base = OTHER; note = 2'-deoxy-2'-fluoroadenosine-3'-phosphate
  modified_base 10: mod_base = OTHER; note = 2'-deoxy-2'-fluoroadenosine-3'-phosphate
  modified_base 11: mod_base = OTHER; note = 2'-deoxy-2'-fluorouridine-3'-phosphate
  modified_base 12: mod_base = OTHER; note = 2'-O-methyladenosine-3'-phosphate
  modified_base 13: mod_base = OTHER; note = 2'-O-methylcytidine-3'-phosphate
  modified_base 14: mod_base = OTHER; note = 2'-O-methylcytidine-3'-phosphate
  modified_base 15: mod_base = OTHER; note = 2'-O-methyluridine-3'-phosphate
  modified_base 16: mod_base = OTHER; note = 2'-O-methyluridine-3'-phosphate
  modified_base 17: mod_base = OTHER; note = 2'-O-methyluridine-3'-phosphate
  modified_base 18: mod_base = OTHER; note = 2'-O-methyluridine-3'-phosphate
  modified_base 19: mod_base = OTHER; note = 2'-O-methyluridine-3'-phosphate
  modified_base 20: mod_base = OTHER; note = 2'-O-methyladenosine-3'-phosphate
  modified_base 21: mod_base = OTHER; note = 2'-O-methyluridine-3'-phosphate ((2S,4R)-1-[29-[[2-(acetylamino)-2-deoxy-beta-D-galactopyra nosyl]oxy]-14,14-bis[[3-[[3-[[5-[[2-(acetylamino)-2-deoxy-b eta-D-galactopyranosyl]oxy]-1-oxopentyl]amino]propyl]amino] -3-oxopropoxy]methyl]-1,12,19,25-tetraoxo-16-oxa-13,20,24-t riazanonacos-1-yl]-4-hydroxy-2-pyrrolidinyl)methyl ester
attgggaaaatacctttttat

SEQ ID NO: 1427 - RNA, 21 nt, synthetic construct
  source 1..21: mol_type = other RNA
  modified_base 1: mod_base = OTHER; note = 2'-O-methylcytidine-3'-phosphorothioate
  modified_base 2: mod_base = OTHER; note = 2'-O-methyluridine-3'-phosphorothioate
  modified_base 3: mod_base = OTHER; note = 2'-O-methyluridine-3'-phosphate
  modified_base 4: mod_base = OTHER; note = 2'-O-methyluridine-3'-phosphate
  modified_base 5: mod_base = OTHER; note = 2'-O-methyluridine-3'-phosphate
  modified_base 6: mod_base = OTHER; note = 2'-O-methyluridine-3'-phosphate
  modified_base 7: mod_base = OTHER; note = 2'-deoxy-2'-fluoroadenosine-3'-phosphate
  modified_base 8: mod_base = OTHER; note = 2'-O-methyluridine-3'-phosphate
  modified_base 9: mod_base = OTHER; note = 2'-deoxy-2'-fluoroadenosine-3'-phosphate
  modified_base 10: mod_base = OTHER; note = 2'-deoxy-2'-fluorocytidine-3'-phosphate
  modified_base 11: mod_base = OTHER; note = 2'-deoxy-2'-fluorouridine-3'-phosphate
  modified_base 12: mod_base = OTHER; note = 2'-O-methylcytidine-3'-phosphate
  modified_base 13: mod_base = OTHER; note = 2'-O-methylcytidine-3'-phosphate
  modified_base 14: mod_base = OTHER; note = 2'-O-methyluridine-3'-phosphate
  modified_base 15: mod_base = OTHER; note = 2'-O-methyluridine-3'-phosphate
  modified_base 16: mod_base = OTHER; note = 2'-O-methyluridine-3'-phosphate
  modified_base 17: mod_base = OTHER; note = 2'-O-methyladenosine-3'-phosphate
  modified_base 18: mod_base = OTHER; note = 2'-O-methyluridine-3'-phosphate
  modified_base 19: mod_base = OTHER; note = 2'-O-methylcytidine-3'-phosphate
  modified_base 20: mod_base = OTHER; note = 2'-O-methyladenosine-3'-phosphate
  modified_base 21: mod_base = OTHER; note = 2'-O-methyluridine-3'-phosphate ((2S,4R)-1-[29-[[2-(acetylamino)-2-deoxy-beta-D-galactopyra nosyl]oxy]-14,14-bis[[3-[[3-[[5-[[2-(acetylamino)-2-deoxy-b eta-D-galactopyranosyl]oxy]-1-oxopentyl]amino]propyl]amino] -3-oxopropoxy]methyl]-1,12,19,25-tetraoxo-16-oxa-13,20,24-t riazanonacos-1-yl]-4-hydroxy-2-pyrrolidinyl)methyl ester
ctttttatactcctttatcat

SEQ ID NO: 1428 - RNA, 21 nt, synthetic construct
  source 1..21: mol_type = other RNA
  modified_base 1: mod_base = OTHER; note = 2'-O-methyluridine-3'-phosphorothioate
  modified_base 2: mod_base = OTHER; note = 2'-O-methylcytidine-3'-phosphorothioate
  modified_base 3: mod_base = OTHER; note = 2'-O-methylcytidine-3'-phosphate
  modified_base 4: mod_base = OTHER; note = 2'-O-methyluridine-3'-phosphate
  modified_base 5: mod_base = OTHER; note = 2'-O-methyluridine-3'-phosphate
  modified_base 6: mod_base = OTHER; note = 2'-O-methyluridine-3'-phosphate
  modified_base 7: mod_base = OTHER; note = 2'-deoxy-2'-fluoroadenosine-3'-phosphate
  modified_base 8: mod_base = OTHER; note = 2'-O-methyluridine-3'-phosphate
  modified_base 9: mod_base = OTHER; note = 2'-deoxy-2'-fluorocytidine-3'-phosphate
  modified_base 10: mod_base = OTHER; note = 2'-deoxy-2'-fluoroadenosine-3'-phosphate
  modified_base 11: mod_base = OTHER; note = 2'-deoxy-2'-fluorouridine-3'-phosphate
  modified_base 12: mod_base = OTHER; note = 2'-O-methylguanosine-3'-phosphate
  modified_base 13: mod_base = OTHER; note = 2'-O-methylguanosine-3'-phosphate
  modified_base 14: mod_base = OTHER; note = 2'-O-methyluridine-3'-phosphate
  modified_base 15: mod_base = OTHER; note = 2'-O-methyladenosine-3'-phosphate
  modified_base 16: mod_base = OTHER; note = 2'-O-methylcytidine-3'-phosphate
  modified_base 17: mod_base = OTHER; note = 2'-O-methyluridine-3'-phosphate
  modified_base 18: mod_base = OTHER; note = 2'-O-methylguanosine-3'-phosphate
  modified_base 19: mod_base = OTHER; note = 2'-O-methyluridine-3'-phosphate
  modified_base 20: mod_base = OTHER; note = 2'-O-methyladenosine-3'-phosphate
  modified_base 21: mod_base = OTHER; note = 2'-O-methyluridine-3'-phosphate ((2S,4R)-1-[29-[[2-(acetylamino)-2-deoxy-beta-D-galactopyra nosyl]oxy]-14,14-bis[[3-[[3-[[5-[[2-(acetylamino)-2-deoxy-b eta-D-galactopyranosyl]oxy]-1-oxopentyl]amino]propyl]amino] -3-oxopropoxy]methyl]-1,12,19,25-tetraoxo-16-oxa-13,20,24-t riazanonacos-1-yl]-4-hydroxy-2-pyrrolidinyl)methyl ester
tcctttatcatggtactgtat

SEQ ID NO: 1429 - RNA, 21 nt, synthetic construct
  source 1..21: mol_type = other RNA
  modified_base 1: mod_base = OTHER; note = 2'-O-methyluridine-3'-phosphorothioate
  modified_base 2: mod_base = OTHER; note = 2'-O-methylguanosine-3'-phosphorothioate
  modified_base 3: mod_base = OTHER; note = 2'-O-methyluridine-3'-phosphate
  modified_base 4: mod_base = OTHER; note = 2'-O-methyladenosine-3'-phosphate
  modified_base 5: mod_base = OTHER; note = 2'-O-methyladenosine-3'-phosphate
  modified_base 6: mod_base = OTHER; note = 2'-O-methylcytidine-3'-phosphate
  modified_base 7: mod_base = OTHER; note = 2'-deoxy-2'-fluorouridine-3'-phosphate
  modified_base 8: mod_base = OTHER; note = 2'-O-methylguanosine-3'-phosphate
  modified_base 9: mod_base = OTHER; note = 2'-deoxy-2'-fluorouridine-3'-phosphate
  modified_base 10: mod_base = OTHER; note = 2'-deoxy-2'-fluoroadenosine-3'-phosphate
  modified_base 11: mod_base = OTHER; note = 2'-deoxy-2'-fluorouridine-3'-phosphate
  modified_base 12: mod_base = OTHER; note = 2'-O-methylcytidine-3'-phosphate
  modified_base 13: mod_base = OTHER; note = 2'-O-methylcytidine-3'-phosphate
  modified_base 14: mod_base = OTHER; note = 2'-O-methyladenosine-3'-phosphate
  modified_base 15: mod_base = OTHER; note = 2'-O-methyluridine-3'-phosphate
  modified_base 16: mod_base = OTHER; note = 2'-O-methyladenosine-3'-phosphate
  modified_base 17: mod_base = OTHER; note = 2'-O-methyluridine-3'-phosphate
  modified_base 18: mod_base = OTHER; note = 2'-O-methyluridine-3'-phosphate
  modified_base 19: mod_base = OTHER; note = 2'-O-methyladenosine-3'-phosphate
  modified_base 20: mod_base = OTHER; note = 2'-O-methyluridine-3'-phosphate
  modified_base 21: mod_base = OTHER; note = 2'-O-methyluridine-3'-phosphate ((2S,4R)-1-[29-[[2-(acetylamino)-2-deoxy-beta-D-galactopyra nosyl]oxy]-14,14-bis[[3-[[3-[[5-[[2-(acetylamino)-2-deoxy-b eta-D-galactopyranosyl]oxy]-1-oxopentyl]amino]propyl]amino] -3-oxopropoxy]methyl]-1,12,19,25-tetraoxo-16-oxa-13,20,24-t riazanonacos-1-yl]-4-hydroxy-2-pyrrolidinyl)methyl ester
tgtaactgtatccatattatt

SEQ ID NO: 1430 - RNA, 21 nt, synthetic construct
  source 1..21: mol_type = other RNA
  modified_base 1: mod_base = OTHER; note = 2'-O-methyluridine-3'-phosphorothioate
  modified_base 2: mod_base = OTHER; note = 2'-O-methyluridine-3'-phosphorothioate
  modified_base 3: mod_base = OTHER; note = 2'-O-methyladenosine-3'-phosphate
  modified_base 4: mod_base = OTHER; note = 2'-O-methyluridine-3'-phosphate
  modified_base 5: mod_base = OTHER; note = 2'-O-methylguanosine-3'-phosphate
  modified_base 6: mod_base = OTHER; note = 2'-O-methyluridine-3'-phosphate
  modified_base 7: mod_base = OTHER; note = 2'-deoxy-2'-fluorocytidine-3'-phosphate
  modified_base 8: mod_base = OTHER; note = 2'-O-methylcytidine-3'-phosphate
  modified_base 9: mod_base = OTHER; note = 2'-deoxy-2'-fluoroadenosine-3'-phosphate
  modified_base 10: mod_base = OTHER; note = 2'-deoxy-2'-fluoroadenosine-3'-phosphate
  modified_base 11: mod_base = OTHER; note = 2'-deoxy-2'-fluoroguanosine-3'-phosphate
  modified_base 12: mod_base = OTHER; note = 2'-O-methyluridine-3'-phosphate
  modified_base 13: mod_base = OTHER; note = 2'-O-methylguanosine-3'-phosphate
  modified_base 14: mod_base = OTHER; note = 2'-O-methylcytidine-3'-phosphate
  modified_base 15: mod_base = OTHER; note = 2'-O-methylcytidine-3'-phosphate
  modified_base 16: mod_base = OTHER; note = 2'-O-methylcytidine-3'-phosphate
  modified_base 17: mod_base = OTHER; note = 2'-O-methyladenosine-3'-phosphate
  modified_base 18: mod_base = OTHER; note = 2'-O-methylcytidine-3'-phosphate
  modified_base 19: mod_base = OTHER; note = 2'-O-methylguanosine-3'-phosphate
  modified_base 20: mod_base = OTHER; note = 2'-O-methyluridine-3'-phosphate
  modified_base 21: mod_base = OTHER; note = 2'-O-methyluridine-3'-phosphate ((2S,4R)-1-[29-[[2-(acetylamino)-2-deoxy-beta-D-galactopyra nosyl]oxy]-14,14-bis[[3-[[3-[[5-[[2-(acetylamino)-2-deoxy-b eta-D-galactopyranosyl]oxy]-1-oxopentyl]amino]propyl]amino] -3-oxopropoxy]methyl]-1,12,19,25-tetraoxo-16-oxa-13,20,24-t riazanonacos-1-yl]-4-hydroxy-2-pyrrolidinyl)methyl ester
ttatgtccaagtgcccacgtt

SEQ ID NO: 1431 - RNA, 21 nt, synthetic construct
  source 1..21: mol_type = other RNA
  modified_base 1: mod_base = OTHER; note = 2'-O-methylcytidine-3'-phosphorothioate
  modified_base 2: mod_base = OTHER; note = 2'-O-methyladenosine-3'-phosphorothioate
  modified_base 3: mod_base = OTHER; note = 2'-O-methylcytidine-3'-phosphate
  modified_base 4: mod_base = OTHER; note = 2'-O-methylguanosine-3'-phosphate
  modified_base 5: mod_base = OTHER; note = 2'-O-methyluridine-3'-phosphate
  modified_base 6: mod_base = OTHER; note = 2'-O-methylguanosine-3'-phosphate
  modified_base 7: mod_base = OTHER; note = 2'-deoxy-2'-fluoroadenosine-3'-phosphate
  modified_base 8: mod_base = OTHER; note = 2'-O-methyladenosine-3'-phosphate
  modified_base 9: mod_base = OTHER; note = 2'-deoxy-2'-fluorouridine-3'-phosphate
  modified_base 10: mod_base = OTHER; note = 2'-deoxy-2'-fluorouridine-3'-phosphate
  modified_base 11: mod_base = OTHER; note = 2'-deoxy-2'-fluorouridine-3'-phosphate
  modified_base 12: mod_base = OTHER; note = 2'-O-methylguanosine-3'-phosphate
  modified_base 13: mod_base = OTHER; note = 2'-O-methylcytidine-3'-phosphate
  modified_base 14: mod_base = OTHER; note = 2'-O-methyluridine-3'-phosphate
  modified_base 15: mod_base = OTHER; note = 2'-O-methylguanosine-3'-phosphate
  modified_base 16: mod_base = OTHER; note = 2'-O-methylguanosine-3'-phosphate
  modified_base 17: mod_base = OTHER; note = 2'-O-methyluridine-3'-phosphate
  modified_base 18: mod_base = OTHER; note = 2'-O-methylguanosine-3'-phosphate
  modified_base 19: mod_base = OTHER; note = 2'-O-methyladenosine-3'-phosphate
  modified_base 20: mod_base = OTHER; note = 2'-O-methyladenosine-3'-phosphate
  modified_base 21: mod_base = OTHER; note = 2'-O-methyluridine-3'-phosphate ((2S,4R)-1-[29-[[2-(acetylamino)-2-deoxy-beta-D-galactopyra nosyl]oxy]-14,14-bis[[3-[[3-[[5-[[2-(acetylamino)-2-deoxy-b eta-D-galactopyranosyl]oxy]-1-oxopentyl]amino]propyl]amino] -3-oxopropoxy]methyl]-1,12,19,25-tetraoxo-16-oxa-13,20,24-t riazanonacos-1-yl]-4-hydroxy-2-pyrrolidinyl)methyl ester
cacgtgaatttgctggtgaat

SEQ ID NO: 1432 - RNA, 21 nt, synthetic construct
  source 1..21: mol_type = other RNA
  modified_base 1: mod_base = OTHER; note = 2'-O-methyluridine-3'-phosphorothioate
  modified_base 2: mod_base = OTHER; note = 2'-O-methyluridine-3'-phosphorothioate
  modified_base 3: mod_base = OTHER; note = 2'-O-methylguanosine-3'-phosphate
  modified_base 4: mod_base = OTHER; note = 2'-O-methylcytidine-3'-phosphate
  modified_base 5: mod_base = OTHER; note = 2'-O-methyluridine-3'-phosphate
  modified_base 6: mod_base = OTHER; note = 2'-O-methylguanosine-3'-phosphate
  modified_base 7: mod_base = OTHER; note = 2'-deoxy-2'-fluoroguanosine-3'-phosphate
  modified_base 8: mod_base = OTHER; note = 2'-O-methyluridine-3'-phosphate
  modified_base 9: mod_base = OTHER; note = 2'-deoxy-2'-fluoroguanosine-3'-phosphate
  modified_base 10: mod_base = OTHER; note = 2'-deoxy-2'-fluoroadenosine-3'-phosphate
  modified_base 11: mod_base = OTHER; note = 2'-deoxy-2'-fluoroadenosine-3'-phosphate
  modified_base 12: mod_base = OTHER; note = 2'-O-methyladenosine-3'-phosphate
  modified_base 13: mod_base = OTHER; note = 2'-O-methylguanosine-3'-phosphate
  modified_base 14: mod_base = OTHER; note = 2'-O-methyluridine-3'-phosphate
  modified_base 15: mod_base = OTHER; note = 2'-O-methyluridine-3'-phosphate
  modified_base 16: mod_base = OTHER; note = 2'-O-methyladenosine-3'-phosphate
  modified_base 17: mod_base = OTHER; note = 2'-O-methylguanosine-3'-phosphate
  modified_base 18: mod_base = OTHER; note = 2'-O-methylcytidine-3'-phosphate
  modified_base 19: mod_base = OTHER; note = 2'-O-methyladenosine-3'-phosphate
  modified_base 20: mod_base = OTHER; note = 2'-O-methylcytidine-3'-phosphate
  modified_base 21: mod_base = OTHER; note = 2'-O-methyluridine-3'-phosphate ((2S,4R)-1-[29-[[2-(acetylamino)-2-deoxy-beta-D-galactopyra nosyl]oxy]-14,14-bis[[3-[[3-[[5-[[2-(acetylamino)-2-deoxy-b eta-D-galactopyranosyl]oxy]-1-oxopentyl]amino]propyl]amino] -3-oxopropoxy]methyl]-1,12,19,25-tetraoxo-16-oxa-13,20,24-t riazanonacos-1-yl]-4-hydroxy-2-pyrrolidinyl)methyl ester
ttgctggtgaaagttagcact

SEQ ID NO: 1433 - RNA, 21 nt, synthetic construct
  source 1..21: mol_type = other RNA
  modified_base 1: mod_base = OTHER; note = 2'-O-methyladenosine-3'-phosphorothioate
  modified_base 2: mod_base = OTHER; note = 2'-O-methyladenosine-3'-phosphorothioate
  modified_base 3: mod_base = OTHER; note = 2'-O-methyladenosine-3'-phosphate
  modified_base 4: mod_base = OTHER; note = 2'-O-methylguanosine-3'-phosphate
  modified_base 5: mod_base = OTHER; note = 2'-O-methyluridine-3'-phosphate
  modified_base 6: mod_base = OTHER; note = 2'-O-methyluridine-3'-phosphate
  modified_base 7: mod_base = OTHER; note = 2'-deoxy-2'-fluoroadenosine-3'-phosphate
  modified_base 8: mod_base = OTHER; note = 2'-O-methylguanosine-3'-phosphate
  modified_base 9: mod_base = OTHER; note = 2'-deoxy-2'-fluorocytidine-3'-phosphate
  modified_base 10: mod_base = OTHER; note = 2'-deoxy-2'-fluoroadenosine-3'-phosphate
  modified_base 11: mod_base = OTHER; note = 2'-deoxy-2'-fluorocytidine-3'-phosphate
  modified_base 12: mod_base = OTHER; note = 2'-O-methyluridine-3'-phosphate
  modified_base 13: mod_base = OTHER; note = 2'-O-methyluridine-3'-phosphate
  modified_base 14: mod_base = OTHER; note = 2'-O-methylguanosine-3'-phosphate
  modified_base 15: mod_base = OTHER; note = 2'-O-methyluridine-3'-phosphate
  modified_base 16: mod_base = OTHER; note = 2'-O-methylguanosine-3'-phosphate
  modified_base 17: mod_base = OTHER; note = 2'-O-methyluridine-3'-phosphate
  modified_base 18: mod_base = OTHER; note = 2'-O-methylguanosine-3'-phosphate
  modified_base 19: mod_base = OTHER; note = 2'-O-methyluridine-3'-phosphate
  modified_base 20: mod_base = OTHER; note = 2'-O-methyladenosine-3'-phosphate
  modified_base 21: mod_base = OTHER; note = 2'-O-methyluridine-3'-phosphate ((2S,4R)-1-[29-[[2-(acetylamino)-2-deoxy-beta-D-galactopyra nosyl]oxy]-14,14-bis[[3-[[3-[[5-[[2-(acetylamino)-2-deoxy-b eta-D-galactopyranosyl]oxy]-1-oxopentyl]amino]propyl]amino] -3-oxopropoxy]methyl]-1,12,19,25-tetraoxo-16-oxa-13,20,24-t riazanonacos-1-yl]-4-hydroxy-2-pyrrolidinyl)methyl ester
aaagttagcacttgtgtgtat

SEQ ID NO: 1434 - RNA, 21 nt, synthetic construct
  source 1..21: mol_type = other RNA
  modified_base 1: mod_base = OTHER; note = 2'-O-methyladenosine-3'-phosphorothioate
  modified_base 2: mod_base = OTHER; note = 2'-O-methylcytidine-3'-phosphorothioate
  modified_base 3: mod_base = OTHER; note = 2'-O-methyluridine-3'-phosphate
  modified_base 4: mod_base = OTHER; note = 2'-O-methyluridine-3'-phosphate
  modified_base 5: mod_base = OTHER; note = 2'-O-methylguanosine-3'-phosphate
  modified_base 6: mod_base = OTHER; note = 2'-O-methyluridine-3'-phosphate
  modified_base 7: mod_base = OTHER; note = 2'-deoxy-2'-fluoroguanosine-3'-phosphate
  modified_base 8: mod_base = OTHER; note = 2'-O-methyluridine-3'-phosphate
  modified_base 9: mod_base = OTHER; note = 2'-deoxy-2'-fluoroguanosine-3'-phosphate
  modified_base 10: mod_base = OTHER; note = 2'-deoxy-2'-fluorouridine-3'-phosphate
  modified_base 11: mod_base = OTHER; note = 2'-deoxy-2'-fluoroadenosine-3'-phosphate
  modified_base 12: mod_base = OTHER; note = 2'-O-methyladenosine-3'-phosphate
  modified_base 13: mod_base = OTHER; note = 2'-O-methyladenosine-3'-phosphate
  modified_base 14: mod_base = OTHER; note = 2'-O-methyluridine-3'-phosphate
  modified_base 15: mod_base = OTHER; note = 2'-O-methyluridine-3'-phosphate
  modified_base 16: mod_base = OTHER; note = 2'-O-methylcytidine-3'-phosphate
  modified_base 17: mod_base = OTHER; note = 2'-O-methyluridine-3'-phosphate
  modified_base 18: mod_base = OTHER; note = 2'-O-methyladenosine-3'-phosphate
  modified_base 19: mod_base = OTHER; note = 2'-O-methylcytidine-3'-phosphate
  modified_base 20: mod_base = OTHER; note = 2'-O-methyluridine-3'-phosphate
  modified_base 21: mod_base = OTHER; note = 2'-O-methyluridine-3'-phosphate ((2S,4R)-1-[29-[[2-(acetylamino)-2-deoxy-beta-D-galactopyra nosyl]oxy]-14,14-bis[[3-[[3-[[5-[[2-(acetylamino)-2-deoxy-b eta-D-galactopyranosyl]oxy]-1-oxopentyl]amino]propyl]amino] -3-oxopropoxy]methyl]-1,12,19,25-tetraoxo-16-oxa-13,20,24-t riazanonacos-1-yl]-4-hydroxy-2-pyrrolidinyl)methyl ester
acttgtgtgtaaattctactt

SEQ ID NO: 1435 - RNA, 21 nt, synthetic construct
  source 1..21: mol_type = other RNA
  modified_base 1: mod_base = OTHER; note = 2'-O-methyluridine-3'-phosphorothioate
  modified_base 2: mod_base = OTHER; note = 2'-O-methyladenosine-3'-phosphorothioate
  modified_base 3: mod_base = OTHER; note = 2'-O-methyladenosine-3'-phosphate
  modified_base 4: mod_base = OTHER; note = 2'-O-methyladenosine-3'-phosphate
  modified_base 5: mod_base = OTHER; note = 2'-O-methyluridine-3'-phosphate
  modified_base 6: mod_base = OTHER; note = 2'-O-methyluridine-3'-phosphate
  modified_base 7: mod_base = OTHER; note = 2'-deoxy-2'-fluorocytidine-3'-phosphate
  modified_base 8: mod_base = OTHER; note = 2'-O-methyluridine-3'-phosphate
  modified_base 9: mod_base = OTHER; note = 2'-deoxy-2'-fluoroadenosine-3'-phosphate
  modified_base 10: mod_base = OTHER; note = 2'-deoxy-2'-fluorocytidine-3'-phosphate
  modified_base 11: mod_base = OTHER; note = 2'-deoxy-2'-fluorouridine-3'-phosphate
  modified_base 12: mod_base = OTHER; note = 2'-O-methyluridine-3'-phosphate
  modified_base 13: mod_base = OTHER; note = 2'-O-methylcytidine-3'-phosphate
  modified_base 14: mod_base = OTHER; note = 2'-O-methylcytidine-3'-phosphate
  modified_base 15: mod_base = OTHER; note = 2'-O-methyluridine-3'-phosphate
  modified_base 16: mod_base = OTHER; note = 2'-O-methylcytidine-3'-phosphate
  modified_base 17: mod_base = OTHER; note = 2'-O-methyluridine-3'-phosphate
  modified_base 18: mod_base = OTHER; note = 2'-O-methyluridine-3'-phosphate
  modified_base 19: mod_base = OTHER; note = 2'-O-methylguanosine-3'-phosphate
  modified_base 20: mod_base = OTHER; note = 2'-O-methyluridine-3'-phosphate
  modified_base 21: mod_base = OTHER; note = 2'-O-methyluridine-3'-phosphate ((2S,4R)-1-[29-[[2-(acetylamino)-2-deoxy-beta-D-galactopyra nosyl]oxy]-14,14-bis[[3-[[3-[[5-[[2-(acetylamino)-2-deoxy-b eta-D-galactopyranosyl]oxy]-1-oxopentyl]amino]propyl]amino] -3-oxopropoxy]methyl]-1,12,19,25-tetraoxo-16-oxa-13,20,24-t riazanonacos-1-yl]-4-hydroxy-2-pyrrolidinyl)methyl ester
taaattctacttcctcttgtt

SEQ ID NO: 1436 - RNA, 21 nt, synthetic construct
  source 1..21: mol_type = other RNA
  modified_base 1: mod_base = OTHER; note = 2'-O-methylcytidine-3'-phosphorothioate
  modified_base 2: mod_base = OTHER; note = 2'-O-methyluridine-3'-phosphorothioate
  modified_base 3: mod_base = OTHER; note = 2'-O-methyluridine-3'-phosphate
  modified_base 4: mod_base = OTHER; note = 2'-O-methylguanosine-3'-phosphate
  modified_base 5: mod_base = OTHER; note = 2'-O-methyluridine-3'-phosphate
  modified_base 6: mod_base = OTHER; note = 2'-O-methylguanosine-3'-phosphate
  modified_base 7: mod_base = OTHER; note = 2'-deoxy-2'-fluorouridine-3'-phosphate
  modified_base 8: mod_base = OTHER; note = 2'-O-methylguanosine-3'-phosphate
  modified_base 9: mod_base = OTHER; note = 2'-deoxy-2'-fluorouridine-3'-phosphate
  modified_base 10: mod_base = OTHER; note = 2'-deoxy-2'-fluorouridine-3'-phosphate
  modified_base 11: mod_base = OTHER; note = 2'-deoxy-2'-fluorouridine-3'-phosphate
  modified_base 12: mod_base = OTHER; note = 2'-O-methyluridine-3'-phosphate
  modified_base 13: mod_base = OTHER; note = 2'-O-methyladenosine-3'-phosphate
  modified_base 14: mod_base = OTHER; note = 2'-O-methylcytidine-3'-phosphate
  modified_base 15: mod_base = OTHER; note = 2'-O-methylcytidine-3'-phosphate
  modified_base 16: mod_base = OTHER; note = 2'-O-methyladenosine-3'-phosphate
  modified_base 17: mod_base = OTHER; note = 2'-O-methyladenosine-3'-phosphate
  modified_base 18: mod_base = OTHER; note = 2'-O-methylguanosine-3'-phosphate
  modified_base 19: mod_base = OTHER; note = 2'-O-methyluridine-3'-phosphate
  modified_base 20: mod_base = OTHER; note = 2'-O-methyladenosine-3'-phosphate
  modified_base 21: mod_base = OTHER; note = 2'-O-methyluridine-3'-phosphate ((2S,4R)-1-[29-[[2-(acetylamino)-2-deoxy-beta-D-galactopyra nosyl]oxy]-14,14-bis[[3-[[3-[[5-[[2-(acetylamino)-2-deoxy-b eta-D-galactopyranosyl]oxy]-1-oxopentyl]amino]propyl]amino] -3-oxopropoxy]methyl]-1,12,19,25-tetraoxo-16-oxa-13,20,24-t riazanonacos-1-yl]-4-hydroxy-2-pyrrolidinyl)methyl ester
cttgtgtgttttaccaagtat

SEQ ID NO: 1437 - RNA, 21 nt, synthetic construct
  source 1..21: mol_type = other RNA
  modified_base 1: mod_base = OTHER; note = 2'-O-methyluridine-3'-phosphorothioate
  modified_base 2: mod_base = OTHER; note = 2'-O-methyluridine-3'-phosphorothioate
  modified_base 3: mod_base = OTHER; note = 2'-O-methyluridine-3'-phosphate
  modified_base 4: mod_base = OTHER; note = 2'-O-methyladenosine-3'-phosphate
  modified_base 5: mod_base = OTHER; note = 2'-O-methylcytidine-3'-phosphate
  modified_base 6: mod_base = OTHER; note = 2'-O-methylcytidine-3'-phosphate
  modified_base 7: mod_base = OTHER; note = 2'-deoxy-2'-fluoroadenosine-3'-phosphate
  modified_base 8: mod_base = OTHER; note = 2'-O-methyladenosine-3'-phosphate
  modified_base 9: mod_base = OTHER; note = 2'-deoxy-2'-fluoroguanosine-3'-phosphate
  modified_base 10: mod_base = OTHER; note = 2'-deoxy-2'-fluorouridine-3'-phosphate
  modified_base 11: mod_base = OTHER; note = 2'-deoxy-2'-fluoroadenosine-3'-phosphate
  modified_base 12: mod_base = OTHER; note = 2'-O-methyluridine-3'-phosphate
  modified_base 13: mod_base = OTHER; note = 2'-O-methyluridine-3'-phosphate
  modified_base 14: mod_base = OTHER; note = 2'-O-methyluridine-3'-phosphate
  modified_base 15: mod_base = OTHER; note = 2'-O-methyladenosine-3'-phosphate
  modified_base 16: mod_base = OTHER; note = 2'-O-methyluridine-3'-phosphate
  modified_base 17: mod_base = OTHER; note = 2'-O-methyladenosine-3'-phosphate
  modified_base 18: mod_base = OTHER; note = 2'-O-methylcytidine-3'-phosphate
  modified_base 19: mod_base = OTHER; note = 2'-O-methyluridine-3'-phosphate
  modified_base 20: mod_base = OTHER; note = 2'-O-methylcytidine-3'-phosphate
  modified_base 21: mod_base = OTHER; note = 2'-O-methyluridine-3'-phosphate ((2S,4R)-1-[29-[[2-(acetylamino)-2-deoxy-beta-D-galactopyra nosyl]oxy]-14,14-bis[[3-[[3-[[5-[[2-(acetylamino)-2-deoxy-b eta-D-galactopyranosyl]oxy]-1-oxopentyl]amino]propyl]amino] -3-oxopropoxy]methyl]-1,12,19,25-tetraoxo-16-oxa-13,20,24-t riazanonacos-1-yl]-4-hydroxy-2-pyrrolidinyl)methyl ester
tttaccaagtatttatactct

SEQ ID NO: 1438 - RNA, 21 nt, synthetic construct
  source 1..21: mol_type = other RNA
  modified_base 1: mod_base = OTHER; note = 2'-O-methyladenosine-3'-phosphorothioate
  modified_base 2: mod_base = OTHER; note = 2'-O-methylcytidine-3'-phosphorothioate
  modified_base 3: mod_base = OTHER; note = 2'-O-methyluridine-3'-phosphate
  modified_base 4: mod_base = OTHER; note = 2'-O-methylcytidine-3'-phosphate
  modified_base 5: mod_base = OTHER; note = 2'-O-methyluridine-3'-phosphate
  modified_base 6: mod_base = OTHER; note = 2'-O-methylguanosine-3'-phosphate
  modified_base 7: mod_base = OTHER; note = 2'-deoxy-2'-fluoroguanosine-3'-phosphate
  modified_base 8: mod_base = OTHER; note = 2'-O-methyluridine-3'-phosphate
  modified_base 9: mod_base = OTHER; note = 2'-deoxy-2'-fluoroguanosine-3'-phosphate
  modified_base 10: mod_base = OTHER; note = 2'-deoxy-2'-fluorocytidine-3'-phosphate
  modified_base 11: mod_base = OTHER; note = 2'-deoxy-2'-fluoroadenosine-3'-phosphate
  modified_base 12: mod_base = OTHER; note = 2'-O-methyladenosine-3'-phosphate
  modified_base 13: mod_base = OTHER; note = 2'-O-methylcytidine-3'-phosphate
  modified_base 14: mod_base = OTHER; note = 2'-O-methyluridine-3'-phosphate
  modified_base 15: mod_base = OTHER; note = 2'-O-methyladenosine-3'-phosphate
  modified_base 16: mod_base = OTHER; note = 2'-O-methyladenosine-3'-phosphate
  modified_base 17: mod_base = OTHER; note = 2'-O-methylcytidine-3'-phosphate
  modified_base 18: mod_base = OTHER; note = 2'-O-methyluridine-3'-phosphate
  modified_base 19: mod_base = OTHER; note = 2'-O-methyladenosine-3'-phosphate
  modified_base 20: mod_base = OTHER; note = 2'-O-methylcytidine-3'-phosphate
  modified_base 21: mod_base = OTHER; note = 2'-O-methyluridine-3'-phosphate ((2S,4R)-1-[29-[[2-(acetylamino)-2-deoxy-beta-D-galactopyra nosyl]oxy]-14,14-bis[[3-[[3-[[5-[[2-(acetylamino)-2-deoxy-b eta-D-galactopyranosyl]oxy]-1-oxopentyl]amino]propyl]amino] -3-oxopropoxy]methyl]-1,12,19,25-tetraoxo-16-oxa-13,20,24-t riazanonacos-1-yl]-4-hydroxy-2-pyrrolidinyl)methyl ester
actctggtgcaactaactact

SEQ ID NO: 1439 - RNA, 21 nt, synthetic construct
  source 1..21: mol_type = other RNA
  modified_base 1: mod_base = OTHER; note = 2'-O-methyluridine-3'-phosphorothioate
  modified_base 2: mod_base = OTHER; note = 2'-O-methyladenosine-3'-phosphorothioate
  modified_base 3: mod_base = OTHER; note = 2'-O-methyladenosine-3'-phosphate
  modified_base 4: mod_base = OTHER; note = 2'-O-methylcytidine-3'-phosphate
  modified_base 5: mod_base = OTHER; note = 2'-O-methyluridine-3'-phosphate
  modified_base 6: mod_base = OTHER; note = 2'-O-methyladenosine-3'-phosphate
  modified_base 7: mod_base = OTHER; note = 2'-deoxy-2'-fluorocytidine-3'-phosphate
  modified_base 8: mod_base = OTHER; note = 2'-O-methyluridine-3'-phosphate
  modified_base 9: mod_base = OTHER; note = 2'-deoxy-2'-fluoroguanosine-3'-phosphate
  modified_base 10: mod_base = OTHER; note = 2'-deoxy-2'-fluorouridine-3'-phosphate
  modified_base 11: mod_base = OTHER; note = 2'-deoxy-2'-fluoroguanosine-3'-phosphate
  modified_base 12: mod_base = OTHER; note = 2'-O-methyluridine-3'-phosphate
  modified_base 13: mod_base = OTHER; note = 2'-O-methylguanosine-3'-phosphate
  modified_base 14: mod_base = OTHER; note = 2'-O-methyladenosine-3'-phosphate
  modified_base 15: mod_base = OTHER; note = 2'-O-methylguanosine-3'-phosphate
  modified_base 16: mod_base = OTHER; note = 2'-O-methylguanosine-3'-phosphate
  modified_base 17: mod_base = OTHER; note = 2'-O-methyladenosine-3'-phosphate
  modified_base 18: mod_base = OTHER; note = 2'-O-methyladenosine-3'-phosphate
  modified_base 19: mod_base = OTHER; note = 2'-O-methyluridine-3'-phosphate
  modified_base 20: mod_base = OTHER; note = 2'-O-methyluridine-3'-phosphate
  modified_base 21: mod_base = OTHER; note = 2'-O-methyluridine-3'-phosphate ((2S,4R)-1-[29-[[2-(acetylamino)-2-deoxy-beta-D-galactopyra nosyl]oxy]-14,14-bis[[3-[[3-[[5-[[2-(acetylamino)-2-deoxy-b eta-D-galactopyranosyl]oxy]-1-oxopentyl]amino]propyl]amino] -3-oxopropoxy]methyl]-1,12,19,25-tetraoxo-16-oxa-13,20,24-t riazanonacos-1-yl]-4-hydroxy-2-pyrrolidinyl)methyl ester
taactactgtgtgaggaattt

SEQ ID NO: 1440 - RNA, 21 nt, synthetic construct
  source 1..21: mol_type = other RNA
  modified_base 1: mod_base = OTHER; note = 2'-O-methylguanosine-3'-phosphorothioate
  modified_base 2: mod_base = OTHER; note = 2'-O-methylguanosine-3'-phosphorothioate
  modified_base 3: mod_base = OTHER; note = 2'-O-methyladenosine-3'-phosphate
  modified_base 4: mod_base = OTHER; note = 2'-O-methyladenosine-3'-phosphate
  modified_base 5: mod_base = OTHER; note = 2'-O-methyluridine-3'-phosphate
  modified_base 6: mod_base = OTHER; note = 2'-O-methyluridine-3'-phosphate
  modified_base 7: mod_base = OTHER; note = 2'-deoxy-2'-fluoroguanosine-3'-phosphate
  modified_base 8: mod_base = OTHER; note = 2'-O-methylguanosine-3'-phosphate
  modified_base 9: mod_base = OTHER; note = 2'-deoxy-2'-fluorouridine-3'-phosphate
  modified_base 10: mod_base = OTHER; note = 2'-deoxy-2'-fluorocytidine-3'-phosphate
  modified_base 11: mod_base = OTHER; note = 2'-deoxy-2'-fluorocytidine-3'-phosphate
  modified_base 12: mod_base = OTHER; note = 2'-O-methyladenosine-3'-phosphate
  modified_base 13: mod_base = OTHER; note = 2'-O-methyluridine-3'-phosphate
  modified_base 14: mod_base = OTHER; note = 2'-O-methylguanosine-3'-phosphate
  modified_base 15: mod_base = OTHER; note = 2'-O-methyluridine-3'-phosphate
  modified_base 16: mod_base = OTHER; note = 2'-O-methylguanosine-3'-phosphate
  modified_base 17: mod_base = OTHER; note = 2'-O-methylcytidine-3'-phosphate
  modified_base 18: mod_base = OTHER; note = 2'-O-methyladenosine-3'-phosphate
  modified_base 19: mod_base = OTHER; note = 2'-O-methyladenosine-3'-phosphate
  modified_base 20: mod_base = OTHER; note = 2'-O-methyluridine-3'-phosphate
  modified_base 21: mod_base = OTHER; note = 2'-O-methyluridine-3'-phosphate ((2S,4R)-1-[29-[[2-(acetylamino)-2-deoxy-beta-D-galactopyra nosyl]oxy]-14,14-bis[[3-[[3-[[5-[[2-(acetylamino)-2-deoxy-b eta-D-galactopyranosyl]oxy]-1-oxopentyl]amino]propyl]amino] -3-oxopropoxy]methyl]-1,12,19,25-tetraoxo-16-oxa-13,20,24-t riazanonacos-1-yl]-4-hydroxy-2-pyrrolidinyl)methyl ester
ggaattggtccatgtgcaatt

SEQ ID NO: 1441 - RNA, 21 nt, synthetic construct
  source 1..21: mol_type = other RNA
  modified_base 1: mod_base = OTHER; note = 2'-O-methylguanosine-3'-phosphorothioate
  modified_base 2: mod_base = OTHER; note = 2'-O-methyluridine-3'-phosphorothioate
  modified_base 3: mod_base = OTHER; note = 2'-O-methylguanosine-3'-phosphate
  modified_base 4: mod_base = OTHER; note = 2'-O-methylcytidine-3'-phosphate
  modified_base 5: mod_base = OTHER; note = 2'-O-methyladenosine-3'-phosphate
  modified_base 6: mod_base = OTHER; note = 2'-O-methyladenosine-3'-phosphate
  modified_base 7: mod_base = OTHER; note = 2'-deoxy-2'-fluorouridine-3'-phosphate
  modified_base 8: mod_base = OTHER; note = 2'-O-methyladenosine-3'-phosphate
  modified_base 9: mod_base = OTHER; note = 2'-deoxy-2'-fluoroadenosine-3'-phosphate
  modified_base 10: mod_base = OTHER; note = 2'-deoxy-2'-fluoroadenosine-3'-phosphate
  modified_base 11: mod_base = OTHER; note = 2'-deoxy-2'-fluorouridine-3'-phosphate
  modified_base 12: mod_base = OTHER; note = 2'-O-methyladenosine-3'-phosphate
  modified_base 13: mod_base = OTHER; note = 2'-O-methylcytidine-3'-phosphate
  modified_base 14: mod_base = OTHER; note = 2'-O-methylcytidine-3'-phosphate
  modified_base 15: mod_base = OTHER; note = 2'-O-methyladenosine-3'-phosphate
  modified_base 16: mod_base = OTHER; note = 2'-O-methyladenosine-3'-phosphate
  modified_base 17: mod_base = OTHER; note = 2'-O-methyluridine-3'-phosphate
  modified_base 18: mod_base = OTHER; note = 2'-O-methylguanosine-3'-phosphate
  modified_base 19: mod_base = OTHER; note = 2'-O-methyladenosine-3'-phosphate
  modified_base 20: mod_base = OTHER; note = 2'-O-methyladenosine-3'-phosphate
  modified_base 21: mod_base = OTHER; note = 2'-O-methyluridine-3'-phosphate ((2S,4R)-1-[29-[[2-(acetylamino)-2-deoxy-beta-D-galactopyra nosyl]oxy]-14,14-bis[[3-[[3-[[5-[[2-(acetylamino)-2-deoxy-b eta-D-galactopyranosyl]oxy]-1-oxopentyl]amino]propyl]amino] -3-oxopropoxy]methyl]-1,12,19,25-tetraoxo-16-oxa-13,20,24-t riazanonacos-1-yl]-4-hydroxy-2-pyrrolidinyl)methyl ester
gtgcaataaataccaatgaat

SEQ ID NO: 1442 - RNA, 23 nt, synthetic construct
  source 1..23: mol_type = other RNA
  modified_base 1: mod_base = OTHER; note = 2'-O-methyladenosine-3'-phosphorothioate
  modified_base 2: mod_base = OTHER; note = 2'-deoxy-2'-fluoroguanosine-3'-phosphorothioate
  modified_base 3: mod_base = OTHER; note = 2'-O-methylcytidine-3'-phosphate
  modified_base 4: mod_base = OTHER; note = 2'-O-methylcytidine-3'-phosphate
  modified_base 5: mod_base = OTHER; note = 2'-O-methylguanosine-3'-phosphate
  modified_base 6: mod_base = OTHER; note = 2'-deoxy-2'-fluoroguanosine-3'-phosphate
  modified_base 7: mod_base = OTHER; note = 2'-O-methylguanosine-3'-phosphate
  modified_base 8: mod_base = OTHER; note = 2'-deoxy-2'-fluoroadenosine-3'-phosphate
  modified_base 9: mod_base = OTHER; note = 2'-deoxy-2'-fluorocytidine-3'-phosphate
  modified_base 10: mod_base = OTHER; note = 2'-O-methyluridine-3'-phosphate
  modified_base 11: mod_base = OTHER; note = 2'-O-methyluridine-3'-phosphate
  modified_base 12: mod_base = OTHER; note = 2'-O-methylcytidine-3'-phosphate
  modified_base 13: mod_base = OTHER; note = 2'-O-methyladenosine-3'-phosphate
  modified_base 14: mod_base = OTHER; note = 2'-deoxy-2'-fluoroguanosine-3'-phosphate
  modified_base 15: mod_base = OTHER; note = 2'-O-methylcytidine-3'-phosphate
  modified_base 16: mod_base = OTHER; note = 2'-deoxy-2'-fluoroadenosine-3'-phosphate
  modified_base 17: mod_base = OTHER; note = 2'-O-methyluridine-3'-phosphate
  modified_base 18: mod_base = OTHER; note = 2'-O-methylguanosine-3'-phosphate
  modified_base 19: mod_base = OTHER; note = 2'-O-methyluridine-3'-phosphate
  modified_base 20: mod_base = OTHER; note = 2'-O-methyluridine-3'-phosphate
  modified_base 21: mod_base = OTHER; note = 2'-O-methyluridine-3'-phosphorothioate
  modified_base 22: mod_base = OTHER; note = 2'-O-methylcytidine-3'-phosphorothioate
  modified_base 23: mod_base = OTHER; note = 2'-O-methyluridine
agccgggacttcagcatgtttct

SEQ ID NO: 1443 - RNA, 23 nt, synthetic construct
  source 1..23: mol_type = other RNA
  modified_base 1: mod_base = OTHER; note = 2'-O-methyladenosine-3'-phosphorothioate
  modified_base 2: mod_base = OTHER; note = 2'-deoxy-2'-fluorouridine-3'-phosphorothioate
  modified_base 3: mod_base = OTHER; note = 2'-O-methylguanosine-3'-phosphate
  modified_base 4: mod_base = OTHER; note = 2'-O-methylguanosine-3'-phosphate
  modified_base 5: mod_base = OTHER; note = 2'-O-methyladenosine-3'-phosphate
  modified_base 6: mod_base = OTHER; note = 2'-deoxy-2'-fluoroadenosine-3'-phosphate
  modified_base 7: mod_base = OTHER; note = 2'-O-methylguanosine-3'-phosphate
  modified_base 8: mod_base = OTHER; note = 2'-deoxy-2'-fluoroadenosine-3'-phosphate
  modified_base 9: mod_base = OTHER; note = 2'-deoxy-2'-fluoroguanosine-3'-phosphate
  modified_base 10: mod_base = OTHER; note = 2'-O-methylcytidine-3'-phosphate
  modified_base 11: mod_base = OTHER; note = 2'-O-methylcytidine-3'-phosphate
  modified_base 12: mod_base = OTHER; note = 2'-O-methylguanosine-3'-phosphate
  modified_base 13: mod_base = OTHER; note = 2'-O-methylcytidine-3'-phosphate
  modified_base 14: mod_base = OTHER; note = 2'-deoxy-2'-fluorocytidine-3'-phosphate
  modified_base 15: mod_base = OTHER; note = 2'-O-methylguanosine-3'-phosphate
  modified_base 16: mod_base = OTHER; note = 2'-deoxy-2'-fluoroguanosine-3'-phosphate
  modified_base 17: mod_base = OTHER; note = 2'-O-methylguanosine-3'-phosphate
  modified_base 18: mod_base = OTHER; note = 2'-O-methyladenosine-3'-phosphate
  modified_base 19: mod_base = OTHER; note = 2'-O-methylcytidine-3'-phosphate
  modified_base 20: mod_base = OTHER; note = 2'-O-methyluridine-3'-phosphate
  modified_base 21: mod_base = OTHER; note = 2'-O-methyluridine-3'-phosphorothioate
  modified_base 22: mod_base = OTHER; note = 2'-O-methylcytidine-3'-phosphorothioate
  modified_base 23: mod_base = OTHER; note = 2'-O-methyladenosine
atggaagagccgccgggacttca

SEQ ID NO: 1444 - RNA, 23 nt, synthetic construct
  source 1..23: mol_type = other RNA
  modified_base 1: mod_base = OTHER; note = 2'-O-methyladenosine-3'-phosphorothioate
  modified_base 2: mod_base = OTHER; note = 2'-deoxy-2'-fluoroadenosine-3'-phosphorothioate
  modified_base 3: mod_base = OTHER; note = 2'-O-methylcytidine-3'-phosphate
  modified_base 4: mod_base = OTHER; note = 2'-O-methylguanosine-3'-phosphate
  modified_base 5: mod_base = OTHER; note = 2'-O-methyladenosine-3'-phosphate
  modified_base 6: mod_base = OTHER; note = 2'-deoxy-2'-fluorocytidine-3'-phosphate
  modified_base 7: mod_base = OTHER; note = 2'-O-methyladenosine-3'-phosphate
  modified_base 8: mod_base = OTHER; note = 2'-deoxy-2'-fluoroguanosine-3'-phosphate
  modified_base 9: mod_base = OTHER; note = 2'-deoxy-2'-fluoroguanosine-3'-phosphate
  modified_base 10: mod_base = OTHER; note = 2'-O-methyluridine-3'-phosphate
  modified_base 11: mod_base = OTHER; note = 2'-O-methyluridine-3'-phosphate
  modified_base 12: mod_base = OTHER; note = 2'-O-methyladenosine-3'-phosphate
  modified_base 13: mod_base = OTHER; note = 2'-O-methylcytidine-3'-phosphate
  modified_base 14: mod_base = OTHER; note = 2'-deoxy-2'-fluorocytidine-3'-phosphate
  modified_base 15: mod_base = OTHER; note = 2'-O-methylguanosine-3'-phosphate
  modified_base 16: mod_base = OTHER; note = 2'-deoxy-2'-fluoroguanosine-3'-phosphate
  modified_base 17: mod_base = OTHER; note = 2'-O-methylguanosine-3'-phosphate
  modified_base 18: mod_base = OTHER; note = 2'-O-methylcytidine-3'-phosphate
  modified_base 19: mod_base = OTHER; note = 2'-O-methyluridine-3'-phosphate
  modified_base 20: mod_base = OTHER; note = 2'-O-methylcytidine-3'-phosphate
  modified_base 21: mod_base = OTHER; note = 2'-O-methylguanosine-3'-phosphorothioate
  modified_base 22: mod_base = OTHER; note = 2'-O-methylguanosine-3'-phosphorothioate
  modified_base 23: mod_base = OTHER; note = 2'-O-methyladenosine
aacgacaggttaccgggctcgga

SEQ ID NO: 1445 - RNA, 23 nt, synthetic construct
  source 1..23: mol_type = other RNA
  modified_base 1: mod_base = OTHER; note = 2'-O-methyladenosine-3'-phosphorothioate
  modified_base 2: mod_base = OTHER; note = 2'-deoxy-2'-fluorouridine-3'-phosphorothioate
  modified_base 3: mod_base = OTHER; note = 2'-O-methylguanosine-3'-phosphate
  modified_base 4: mod_base = OTHER; note = 2'-O-methyluridine-3'-phosphate
  modified_base 5: mod_base = OTHER; note = 2'-O-methylcytidine-3'-phosphate
  modified_base 6: mod_base = OTHER; note = 2'-deoxy-2'-fluorocytidine-3'-phosphate
  modified_base 7: mod_base = OTHER; note = 2'-O-methyladenosine-3'-phosphate
  modified_base 8: mod_base = OTHER; note = 2'-deoxy-2'-fluorocytidine-3'-phosphate
  modified_base 9: mod_base = OTHER; note = 2'-deoxy-2'-fluorouridine-3'-phosphate
  modified_base 10: mod_base = OTHER; note = 2'-O-methylguanosine-3'-phosphate
  modified_base 11: mod_base = OTHER; note = 2'-O-methylcytidine-3'-phosphate
  modified_base 12: mod_base = OTHER; note = 2'-O-methyluridine-3'-phosphate
  modified_base 13: mod_base = OTHER; note = 2'-O-methylguanosine-3'-phosphate
  modified_base 14: mod_base = OTHER; note = 2'-deoxy-2'-fluoroadenosine-3'-phosphate
  modified_base 15: mod_base = OTHER; note = 2'-O-methylguanosine-3'-phosphate
  modified_base 16: mod_base = OTHER; note = 2'-deoxy-2'-fluoroadenosine-3'-phosphate
  modified_base 17: mod_base = OTHER; note = 2'-O-methylcytidine-3'-phosphate
  modified_base 18: mod_base = OTHER; note = 2'-O-methyladenosine-3'-phosphate
  modified_base 19: mod_base = OTHER; note = 2'-O-methylguanosine-3'-phosphate
  modified_base 20: mod_base = OTHER; note = 2'-O-methylcytidine-3'-phosphate
  modified_base 21: mod_base = OTHER; note = 2'-O-methylguanosine-3'-phosphorothioate
  modified_base 22: mod_base = OTHER; note = 2'-O-methylguanosine-3'-phosphorothioate
  modified_base 23: mod_base = OTHER; note = 2'-O-methylcytidine
atgtccactgctgagacagcggc

SEQ ID NO: 1446 - RNA, 23 nt, synthetic construct
  source 1..23: mol_type = other RNA
  modified_base 1: mod_base = OTHER; note = 2'-O-methyladenosine-3'-phosphorothioate
  modified_base 2: mod_base = OTHER; note = 2'-deoxy-2'-fluoroadenosine-3'-phosphorothioate
  modified_base 3: mod_base = OTHER; note = 2'-O-methylguanosine-3'-phosphate
  modified_base 4: mod_base = OTHER; note = 2'-O-methylcytidine-3'-phosphate
  modified_base 5: mod_base = OTHER; note = 2'-O-methylguanosine-3'-phosphate
  modified_base 6: mod_base = OTHER; note = 2'-deoxy-2'-fluorocytidine-3'-phosphate
  modified_base 7: mod_base = OTHER; note = 2'-O-methylcytidine-3'-phosphate
  modified_base 8: mod_base = OTHER; note = 2'-deoxy-2'-fluoroadenosine-3'-phosphate
  modified_base 9: mod_base = OTHER; note = 2'-deoxy-2'-fluorouridine-3'-phosphate
  modified_base 10: mod_base = OTHER; note = 2'-O-methylcytidine-3'-phosphate
  modified_base 11: mod_base = OTHER; note = 2'-O-methyladenosine-3'-phosphate
  modified_base 12: mod_base = OTHER; note = 2'-O-methylguanosine-3'-phosphate
  modified_base 13: mod_base = OTHER; note = 2'-O-methylcytidine-3'-phosphate
  modified_base 14: mod_base = OTHER; note = 2'-deoxy-2'-fluoroadenosine-3'-phosphate
  modified_base 15: mod_base = OTHER; note = 2'-O-methylguanosine-3'-phosphate
  modified_base 16: mod_base = OTHER; note = 2'-deoxy-2'-fluoroadenosine-3'-phosphate
  modified_base 17: mod_base = OTHER; note = 2'-O-methylcytidine-3'-phosphate
  modified_base 18: mod_base = OTHER; note = 2'-O-methylcytidine-3'-phosphate
  modified_base 19: mod_base = OTHER; note = 2'-O-methylcytidine-3'-phosphate
  modified_base 20: mod_base = OTHER; note = 2'-O-methyladenosine-3'-phosphate
  modified_base 21: mod_base = OTHER; note = 2'-O-methyluridine-3'-phosphorothioate
  modified_base 22: mod_base = OTHER; note = 2'-O-methylguanosine-3'-phosphorothioate
  modified_base 23: mod_base = OTHER; note = 2'-O-methylcytidine
aagcgccatcagcagacccatgc

SEQ ID NO: 1447 - RNA, 23 nt, synthetic construct
  source 1..23: mol_type = other RNA
  modified_base 1: mod_base = OTHER; note = 2'-O-methyladenosine-3'-phosphorothioate
  modified_base 2: mod_base = OTHER; note = 2'-deoxy-2'-fluoroadenosine-3'-phosphorothioate
  modified_base 3: mod_base = OTHER; note = 2'-O-methyluridine-3'-phosphate
  modified_base 4: mod_base = OTHER; note = 2'-O-methylguanosine-3'-phosphate
  modified_base 5: mod_base = OTHER; note = 2'-O-methyladenosine-3'-phosphate
  modified_base 6: mod_base = OTHER; note = 2'-deoxy-2'-fluoroguanosine-3'-phosphate
  modified_base 7: mod_base = OTHER; note = 2'-O-methylcytidine-3'-phosphate
  modified_base 8: mod_base = OTHER; note = 2'-deoxy-2'-fluoroadenosine-3'-phosphate
  modified_base 9: mod_base = OTHER; note = 2'-deoxy-2'-fluoroguanosine-3'-phosphate
  modified_base 10: mod_base = OTHER; note = 2'-O-methylcytidine-3'-phosphate
  modified_base 11: mod_base = OTHER; note = 2'-O-methyladenosine-3'-phosphate
  modified_base 12: mod_base = OTHER; note = 2'-O-methylcytidine-3'-phosphate
  modified_base 13: mod_base = OTHER; note = 2'-O-methylguanosine-3'-phosphate
  modified_base 14: mod_base = OTHER; note = 2'-deoxy-2'-fluoroadenosine-3'-phosphate
  modified_base 15: mod_base = OTHER; note = 2'-O-methyluridine-3'-phosphate
  modified_base 16: mod_base = OTHER; note = 2'-deoxy-2'-fluoroguanosine-3'-phosphate
  modified_base 17: mod_base = OTHER; note = 2'-O-methyladenosine-3'-phosphate
  modified_base 18: mod_base = OTHER; note = 2'-O-methylguanosine-3'-phosphate
  modified_base 19: mod_base = OTHER; note = 2'-O-methylcytidine-3'-phosphate
  modified_base 20: mod_base = OTHER; note = 2'-O-methylguanosine-3'-phosphate
  modified_base 21: mod_base = OTHER; note = 2'-O-methylcytidine-3'-phosphorothioate
  modified_base 22: mod_base = OTHER; note = 2'-O-methylcytidine-3'-phosphorothioate
  modified_base 23: mod_base = OTHER; note = 2'-O-methyladenosine
aatgagcagcacgatgagcgcca

SEQ ID NO: 1448 - RNA, 23 nt, synthetic construct
  source 1..23: mol_type = other RNA
  modified_base 1: mod_base = OTHER; note = 2'-O-methyladenosine-3'-phosphorothioate
  modified_base 2: mod_base = OTHER; note = 2'-deoxy-2'-fluorouridine-3'-phosphorothioate
  modified_base 3: mod_base = OTHER; note = 2'-O-methyluridine-3'-phosphate
  modified_base 4: mod_base = OTHER; note = 2'-O-methylguanosine-3'-phosphate
  modified_base 5: mod_base = OTHER; note = 2'-O-methylcytidine-3'-phosphate
  modified_base 6: mod_base = OTHER; note = 2'-deoxy-2'-fluorocytidine-3'-phosphate
  modified_base 7: mod_base = OTHER; note = 2'-O-methylcytidine-3'-phosphate
  modified_base 8: mod_base = OTHER; note = 2'-deoxy-2'-fluoroguanosine-3'-phosphate
  modified_base 9: mod_base = OTHER; note = 2'-deoxy-2'-fluorocytidine-3'-phosphate
  modified_base 10: mod_base = OTHER; note = 2'-O-methylcytidine-3'-phosphate
  modified_base 11: mod_base = OTHER; note = 2'-O-methyladenosine-3'-phosphate
  modified_base 12: mod_base = OTHER; note = 2'-O-methylcytidine-3'-phosphate
  modified_base 13: mod_base = OTHER; note = 2'-O-methylguanosine-3'-phosphate
  modified_base 14: mod_base = OTHER; note = 2'-deoxy-2'-fluoroadenosine-3'-phosphate
  modified_base 15: mod_base = OTHER; note = 2'-O-methyluridine-3'-phosphate
  modified_base 16: mod_base = OTHER; note = 2'-deoxy-2'-fluoroguanosine-3'-phosphate
  modified_base 17: mod_base = OTHER; note = 2'-O-methyladenosine-3'-phosphate
  modified_base 18: mod_base = OTHER; note = 2'-O-methylguanosine-3'-phosphate
  modified_base 19: mod_base = OTHER; note = 2'-O-methylcytidine-3'-phosphate
  modified_base 20: mod_base = OTHER; note = 2'-O-methyladenosine-3'-phosphate
  modified_base 21: mod_base = OTHER; note = 2'-O-methylguanosine-3'-phosphorothioate
  modified_base 22: mod_base = OTHER; note = 2'-O-methylcytidine-3'-phosphorothioate
  modified_base 23: mod_base = OTHER; note = 2'-O-methyladenosine
attgcccgccacgatgagcagca

SEQ ID NO: 1449 - RNA, 23 nt, synthetic construct
  source 1..23: mol_type = other RNA
  modified_base 1: mod_base = OTHER; note = 2'-O-methyladenosine-3'-phosphorothioate
  modified_base 2: mod_base = OTHER; note = 2'-deoxy-2'-fluoroguanosine-3'-phosphorothioate
  modified_base 3: mod_base = OTHER; note = 2'-O-methyladenosine-3'-phosphate
  modified_base 4: mod_base = OTHER; note = 2'-O-methyluridine-3'-phosphate
  modified_base 5: mod_base = OTHER; note = 2'-O-methylcytidine-3'-phosphate
  modified_base 6: mod_base = OTHER; note = 2'-deoxy-2'-fluoroadenosine-3'-phosphate
  modified_base 7: mod_base = OTHER; note = 2'-O-methylcytidine-3'-phosphate
  modified_base 8: mod_base = OTHER; note = 2'-deoxy-2'-fluorocytidine-3'-phosphate
  modified_base 9: mod_base = OTHER; note = 2'-deoxy-2'-fluoroadenosine-3'-phosphate
  modified_base 10: mod_base = OTHER; note = 2'-O-methylguanosine-3'-phosphate
  modified_base 11: mod_base = OTHER; note = 2'-O-methylcytidine-3'-phosphate
  modified_base 12: mod_base = OTHER; note = 2'-O-methyladenosine-3'-phosphate
  modified_base 13: mod_base = OTHER; note = 2'-O-methylcytidine-3'-phosphate
  modified_base 14: mod_base = OTHER; note = 2'-deoxy-2'-fluoroadenosine-3'-phosphate
  modified_base 15: mod_base = OTHER; note = 2'-O-methyluridine-3'-phosphate
  modified_base 16: mod_base = OTHER; note = 2'-deoxy-2'-fluorouridine-3'-phosphate
  modified_base 17: mod_base = OTHER; note = 2'-O-methylguanosine-3'-phosphate
  modified_base 18: mod_base = OTHER; note = 2'-O-methylcytidine-3'-phosphate
  modified_base 19: mod_base = OTHER; note = 2'-O-methylcytidine-3'-phosphate
  modified_base 20: mod_base = OTHER; note = 2'-O-methylcytidine-3'-phosphate
  modified_base 21: mod_base = OTHER; note = 2'-O-methylguanosine-3'-phosphorothioate
  modified_base 22: mod_base = OTHER; note = 2'-O-methylcytidine-3'-phosphorothioate
  modified_base 23: mod_base = OTHER; note = 2'-O-methylcytidine
agatcaccagcacattgcccgcc

SEQ ID NO: 1450 - RNA, 23 nt, synthetic construct
  source 1..23: mol_type = other RNA
  modified_base 1: mod_base = OTHER; note = 2'-O-methyladenosine-3'-phosphorothioate
  modified_base 2: mod_base = OTHER; note = 2'-deoxy-2'-fluorocytidine-3'-phosphorothioate
  modified_base 3: mod_base = OTHER; note = 2'-O-methylguanosine-3'-phosphate
  modified_base 4: mod_base = OTHER; note = 2'-O-methyladenosine-3'-phosphate
  modified_base 5: mod_base = OTHER; note = 2'-O-methyluridine-3'-phosphate
  modified_base 6: mod_base = OTHER; note = 2'-deoxy-2'-fluoroguanosine-3'-phosphate
  modified_base 7: mod_base = OTHER; note = 2'-O-methylguanosine-3'-phosphate
  modified_base 8: mod_base = OTHER; note = 2'-deoxy-2'-fluorocytidine-3'-phosphate
  modified_base 9: mod_base = OTHER; note = 2'-deoxy-2'-fluorocytidine-3'-phosphate
  modified_base 10: mod_base = OTHER; note = 2'-O-methyladenosine-3'-phosphate
  modified_base 11: mod_base = OTHER; note = 2'-O-methylcytidine-3'-phosphate
  modified_base 12: mod_base = OTHER; note = 2'-O-methylguanosine-3'-phosphate
  modified_base 13: mod_base = OTHER; note = 2'-O-methyladenosine-3'-phosphate
  modified_base 14: mod_base = OTHER; note = 2'-deoxy-2'-fluorouridine-3'-phosphate
  modified_base 15: mod_base = OTHER; note = 2'-O-methylcytidine-3'-phosphate
  modified_base 16: mod_base = OTHER; note = 2'-deoxy-2'-fluoroadenosine-3'-phosphate
  modified_base 17: mod_base = OTHER; note = 2'-O-methylcytidine-3'-phosphate
  modified_base 18: mod_base = OTHER; note = 2'-O-methylcytidine-3'-phosphate
  modified_base 19: mod_base = OTHER; note = 2'-O-methyladenosine-3'-phosphate
  modified_base 20: mod_base = OTHER; note = 2'-O-methylguanosine-3'-phosphate
  modified_base 21: mod_base = OTHER; note = 2'-O-methylcytidine-3'-phosphorothioate
  modified_base 22: mod_base = OTHER; note = 2'-O-methyladenosine-3'-phosphorothioate
  modified_base 23: mod_base = OTHER; note = 2'-O-methylcytidine
acgatggccacgatcaccagcac

SEQ ID NO: 1451 - RNA, 23 nt, synthetic construct
  source 1..23: mol_type = other RNA
  modified_base 1: mod_base = OTHER; note = 2'-O-methyladenosine-3'-phosphorothioate
  modified_base 2: mod_base = OTHER; note = 2'-deoxy-2'-fluoroguanosine-3'-phosphorothioate
  modified_base 3: mod_base = OTHER; note = 2'-O-methylcytidine-3'-phosphate
  modified_base 4: mod_base = OTHER; note = 2'-O-methylguanosine-3'-phosphate
  modified_base 5: mod_base = OTHER; note = 2'-O-methyluridine-3'-phosphate
  modified_base 6: mod_base = OTHER; note = 2'-deoxy-2'-fluorocytidine-3'-phosphate
  modified_base 7: mod_base = OTHER; note = 2'-O-methyluridine-3'-phosphate
  modified_base 8: mod_base = OTHER; note = 2'-deoxy-2'-fluorouridine-3'-phosphate
  modified_base 9: mod_base = OTHER; note = 2'-deoxy-2'-fluoroguanosine-3'-phosphate
  modified_base 10: mod_base = OTHER; note = 2'-O-methylguanosine-3'-phosphate
  modified_base 11: mod_base = OTHER; note = 2'-O-methylcytidine-3'-phosphate
  modified_base 12: mod_base = OTHER; note = 2'-O-methylguanosine-3'-phosphate
  modified_base 13: mod_base = OTHER; note = 2'-O-methyladenosine-3'-phosphate
  modified_base 14: mod_base = OTHER; note = 2'-deoxy-2'-fluorouridine-3'-phosphate
  modified_base 15: mod_base = OTHER; note = 2'-O-methylguanosine-3'-phosphate
  modified_base 16: mod_base = OTHER; note = 2'-deoxy-2'-fluoroguanosine-3'-phosphate
  modified_base 17: mod_base = OTHER; note = 2'-O-methylcytidine-3'-phosphate
  modified_base 18: mod_base = OTHER; note = 2'-O-methylcytidine-3'-phosphate
  modified_base 19: mod_base = OTHER; note = 2'-O-methyladenosine-3'-phosphate
  modified_base 20: mod_base = OTHER; note = 2'-O-methylcytidine-3'-phosphate
  modified_base 21: mod_base = OTHER; note = 2'-O-methylguanosine-3'-phosphorothioate
  modified_base 22: mod_base = OTHER; note = 2'-O-methyladenosine-3'-phosphorothioate
  modified_base 23: mod_base = OTHER; note = 2'-O-methyluridine
agcgtcttggcgatggccacgat

SEQ ID NO: 1452 - RNA, 23 nt, synthetic construct
  source 1..23: mol_type = other RNA
  modified_base 1: mod_base = OTHER; note = 2'-O-methyladenosine-3'-phosphorothioate
  modified_base 2: mod_base = OTHER; note = 2'-deoxy-2'-fluoroadenosine-3'-phosphorothioate
  modified_base 3: mod_base = OTHER; note = 2'-O-methylguanosine-3'-phosphate
  modified_base 4: mod_base = OTHER; note = 2'-O-methyladenosine-3'-phosphate
  modified_base 5: mod_base = OTHER; note = 2'-O-methylguanosine-3'-phosphate
  modified_base 6: mod_base = OTHER; note = 2'-deoxy-2'-fluoroguanosine-3'-phosphate
  modified_base 7: mod_base = OTHER; note = 2'-O-methyluridine-3'-phosphate
  modified_base 8: mod_base = OTHER; note = 2'-deoxy-2'-fluorouridine-3'-phosphate
  modified_base 9: mod_base = OTHER; note = 2'-deoxy-2'-fluoroguanosine-3'-phosphate
  modified_base 10: mod_base = OTHER; note = 2'-O-methylguanosine-3'-phosphate
  modified_base 11: mod_base = OTHER; note = 2'-O-methyluridine-3'-phosphate
  modified_base 12: mod_base = OTHER; note = 2'-O-methylguanosine-3'-phosphate
  modified_base 13: mod_base = OTHER; note = 2'-O-methyladenosine-3'-phosphate
  modified_base 14: mod_base = OTHER; note = 2'-deoxy-2'-fluoroguanosine-3'-phosphate
  modified_base 15: mod_base = OTHER; note = 2'-O-methylcytidine-3'-phosphate
  modified_base 16: mod_base = OTHER; note = 2'-deoxy-2'-fluoroguanosine-3'-phosphate
  modified_base 17: mod_base = OTHER; note = 2'-O-methyluridine-3'-phosphate
  modified_base 18: mod_base = OTHER; note = 2'-O-methylcytidine-3'-phosphate
  modified_base 19: mod_base = OTHER; note = 2'-O-methyluridine-3'-phosphate
  modified_base 20: mod_base = OTHER; note = 2'-O-methylguanosine-3'-phosphate
  modified_base 21: mod_base = OTHER; note = 2'-O-methylcytidine-3'-phosphorothioate
  modified_base 22: mod_base = OTHER; note = 2'-O-methyladenosine-3'-phosphorothioate
  modified_base 23: mod_base = OTHER; note = 2'-O-methylguanosine
aagaggttggtgagcgtctgcag

SEQ ID NO: 1453 - RNA, 23 nt, synthetic construct
  source 1..23: mol_type = other RNA
  modified_base 1: mod_base = OTHER; note = 2'-O-methyladenosine-3'-phosphorothioate
  modified_base 2: mod_base = OTHER; note = 2'-deoxy-2'-fluoroadenosine-3'-phosphorothioate
  modified_base 3: mod_base = OTHER; note = 2'-O-methylcytidine-3'-phosphate
  modified_base 4: mod_base = OTHER; note = 2'-O-methyladenosine-3'-phosphate
  modified_base 5: mod_base = OTHER; note = 2'-O-methyluridine-3'-phosphate
  modified_base 6: mod_base = OTHER; note = 2'-deoxy-2'-fluoroguanosine-3'-phosphate
  modified_base 7: mod_base = OTHER; note = 2'-O-methyladenosine-3'-phosphate
  modified_base 8: mod_base = OTHER; note = 2'-deoxy-2'-fluorouridine-3'-phosphate
  modified_base 9: mod_base = OTHER; note = 2'-deoxy-2'-fluoroguanosine-3'-phosphate
  modified_base 10: mod_base = OTHER; note = 2'-O-methyladenosine-3'-phosphate
  modified_base 11: mod_base = OTHER; note = 2'-O-methyladenosine-3'-phosphate
  modified_base 12: mod_base = OTHER; note = 2'-O-methylguanosine-3'-phosphate
  modified_base 13: mod_base = OTHER; note = 2'-O-methyladenosine-3'-phosphate
  modified_base 14: mod_base = OTHER; note = 2'-deoxy-2'-fluoroguanosine-3'-phosphate
  modified_base 15: mod_base = OTHER; note = 2'-O-methylguanosine-3'-phosphate
  modified_base 16: mod_base = OTHER; note = 2'-deoxy-2'-fluorouridine-3'-phosphate
  modified_base 17: mod_base = OTHER; note = 2'-O-methyluridine-3'-phosphate
  modified_base 18: mod_base = OTHER; note = 2'-O-methylguanosine-3'-phosphate
  modified_base 19: mod_base = OTHER; note = 2'-O-methylguanosine-3'-phosphate
  modified_base 20: mod_base = OTHER; note = 2'-O-methyluridine-3'-phosphate
  modified_base 21: mod_base = OTHER; note = 2'-O-methylguanosine-3'-phosphorothioate
  modified_base 22: mod_base = OTHER; note = 2'-O-methyladenosine-3'-phosphorothioate
  modified_base 23: mod_base = OTHER; note = 2'-O-methylguanosine
aacatgatgaagaggttggtgag

SEQ ID NO: 1454 - RNA, 23 nt, synthetic construct
  source 1..23: mol_type = other RNA
  modified_base 1: mod_base = OTHER; note = 2'-O-methyladenosine-3'-phosphorothioate
  modified_base 2: mod_base = OTHER; note = 2'-deoxy-2'-fluorouridine-3'-phosphorothioate
  modified_base 3: mod_base = OTHER; note = 2'-O-methylguanosine-3'-phosphate
  modified_base 4: mod_base = OTHER; note = 2'-O-methylguanosine-3'-phosphate
  modified_base 5: mod_base = OTHER; note = 2'-O-methylcytidine-3'-phosphate
  modified_base 6: mod_base = OTHER; note = 2'-deoxy-2'-fluorocytidine-3'-phosphate
  modified_base 7: mod_base = OTHER; note = 2'-O-methyladenosine-3'-phosphate
  modified_base 8: mod_base = OTHER; note = 2'-deoxy-2'-fluoroguanosine-3'-phosphate
  modified_base 9: mod_base = OTHER; note = 2'-deoxy-2'-fluoroguanosine-3'-phosphate
  modified_base 10: mod_base = OTHER; note = 2'-O-methylguanosine-3'-phosphate
  modified_base 11: mod_base = OTHER; note = 2'-O-methyladenosine-3'-phosphate
  modified_base 12: mod_base = OTHER; note = 2'-O-methylcytidine-3'-phosphate
  modified_base 13: mod_base = OTHER; note = 2'-O-methyladenosine-3'-phosphate
  modified_base 14: mod_base = OTHER; note = 2'-deoxy-2'-fluorouridine-3'-phosphate
  modified_base 15: mod_base = OTHER; note = 2'-O-methylguanosine-3'-phosphate
  modified_base 16: mod_base = OTHER; note = 2'-deoxy-2'-fluoroadenosine-3'-phosphate
  modified_base 17: mod_base = OTHER; note = 2'-O-methyluridine-3'-phosphate
  modified_base 18: mod_base = OTHER; note = 2'-O-methylguanosine-3'-phosphate
  modified_base 19: mod_base = OTHER; note = 2'-O-methyladenosine-3'-phosphate
  modified_base 20: mod_base = OTHER; note = 2'-O-methyladenosine-3'-phosphate
  modified_base 21: mod_base = OTHER; note = 2'-O-methylguanosine-3'-phosphorothioate
  modified_base 22: mod_base = OTHER; note = 2'-O-methyladenosine-3'-phosphorothioate
  modified_base 23: mod_base = OTHER; note = 2'-O-methylguanosine
atggccagggacatgatgaagag

SEQ ID NO: 1455 - RNA, 23 nt, synthetic construct
  source 1..23: mol_type = other RNA
  modified_base 1: mod_base = OTHER; note = 2'-O-methyladenosine-3'-phosphorothioate
  modified_base 2: mod_base = OTHER; note = 2'-deoxy-2'-fluoroadenosine-3'-phosphorothioate
  modified_base 3: mod_base = OTHER; note = 2'-O-methylguanosine-3'-phosphate
  modified_base 4: mod_base = OTHER; note = 2'-O-methyladenosine-3'-phosphate
  modified_base 5: mod_base = OTHER; note = 2'-O-methyladenosine-3'-phosphate
  modified_base 6: mod_base = OTHER; note = 2'-deoxy-2'-fluoroguanosine-3'-phosphate
  modified_base 7: mod_base = OTHER; note = 2'-O-methyladenosine-3'-phosphate
  modified_base 8: mod_base = OTHER; note = 2'-deoxy-2'-fluoroadenosine-3'-phosphate
  modified_base 9: mod_base = OTHER; note = 2'-deoxy-2'-fluoroguanosine-3'-phosphate
  modified_base 10: mod_base = OTHER; note = 2'-O-methylguanosine-3'-phosphate
  modified_base 11: mod_base = OTHER; note = 2'-O-methyladenosine-3'-phosphate
  modified_base 12: mod_base = OTHER; note = 2'-O-methylguanosine-3'-phosphate
  modified_base 13: mod_base = OTHER; note = 2'-O-methylcytidine-3'-phosphate
  modified_base 14: mod_base = OTHER; note = 2'-deoxy-2'-fluorocytidine-3'-phosphate
  modified_base 15: mod_base = OTHER; note = 2'-O-methylguanosine-3'-phosphate
  modified_base 16: mod_base = OTHER; note = 2'-deoxy-2'-fluorouridine-3'-phosphate
  modified_base 17: mod_base = OTHER; note = 2'-O-methyladenosine-3'-phosphate
  modified_base 18: mod_base = OTHER; note = 2'-O-methylcytidine-3'-phosphate
  modified_base 19: mod_base = OTHER; note = 2'-O-methyluridine-3'-phosphate
  modified_base 20: mod_base = OTHER; note = 2'-O-methylcytidine-3'-phosphate
  modified_base 21: mod_base = OTHER; note = 2'-O-methylcytidine-3'-phosphorothioate
  modified_base 22: mod_base = OTHER; note = 2'-O-methylcytidine-3'-phosphorothioate
  modified_base 23: mod_base = OTHER; note = 2'-O-methyladenosine
aagaagaaggagccgtactccca

SEQ ID NO: 1456 - RNA, 23 nt, synthetic construct
  source 1..23: mol_type = other RNA
  modified_base 1: mod_base = OTHER; note = 2'-O-methyladenosine-3'-phosphorothioate
  modified_base 2: mod_base = OTHER; note = 2'-deoxy-2'-fluoroadenosine-3'-phosphorothioate
  modified_base 3: mod_base = OTHER; note = 2'-O-methylcytidine-3'-phosphate
  modified_base 4: mod_base = OTHER; note = 2'-O-methyladenosine-3'-phosphate
  modified_base 5: mod_base = OTHER; note = 2'-O-methylguanosine-3'-phosphate
  modified_base 6: mod_base = OTHER; note = 2'-deoxy-2'-fluorocytidine-3'-phosphate
  modified_base 7: mod_base = OTHER; note = 2'-O-methyluridine-3'-phosphate
  modified_base 8: mod_base = OTHER; note = 2'-deoxy-2'-fluorocytidine-3'-phosphate
  modified_base 9: mod_base = OTHER; note = 2'-deoxy-2'-fluoroguanosine-3'-phosphate
  modified_base 10: mod_base = OTHER; note = 2'-O-methylcytidine-3'-phosphate
  modified_base 11: mod_base = OTHER; note = 2'-O-methyladenosine-3'-phosphate
  modified_base 12: mod_base = OTHER; note = 2'-O-methylguanosine-3'-phosphate
  modified_base 13: mod_base = OTHER; note = 2'-O-methyladenosine-3'-phosphate
  modified_base 14: mod_base = OTHER; note = 2'-deoxy-2'-fluoroadenosine-3'-phosphate
  modified_base 15: mod_base = OTHER; note = 2'-O-methylguanosine-3'-phosphate
  modified_base 16: mod_base = OTHER; note = 2'-deoxy-2'-fluoroadenosine-3'-phosphate
  modified_base 17: mod_base = OTHER; note = 2'-O-methyladenosine-3'-phosphate
  modified_base 18: mod_base = OTHER; note = 2'-O-methylguanosine-3'-phosphate
  modified_base 19: mod_base = OTHER; note = 2'-O-methylguanosine-3'-phosphate
  modified_base 20: mod_base = OTHER; note = 2'-O-methyladenosine-3'-phosphate
  modified_base 21: mod_base = OTHER; note = 2'-O-methylguanosine-3'-phosphorothioate
  modified_base 22: mod_base = OTHER; note = 2'-O-methylcytidine-3'-phosphorothioate
  modified_base 23: mod_base = OTHER; note = 2'-O-methylcytidine
aacagctcgcagaagaaggagcc

SEQ ID NO: 1457 - RNA, 23 nt, synthetic construct
  source 1..23: mol_type = other RNA
  modified_base 1: mod_base = OTHER; note = 2'-O-methyladenosine-3'-phosphorothioate
  modified_base 2: mod_base = OTHER; note = 2'-deoxy-2'-fluoroadenosine-3'-phosphorothioate
  modified_base 3: mod_base = OTHER; note = 2'-O-methylcytidine-3'-phosphate
  modified_base 4: mod_base = OTHER; note = 2'-O-methylguanosine-3'-phosphate
  modified_base 5: mod_base = OTHER; note = 2'-O-methyluridine-3'-phosphate
  modified_base 6: mod_base = OTHER; note = 2'-deoxy-2'-fluorocytidine-3'-phosphate
  modified_base 7: mod_base = OTHER; note = 2'-O-methylcytidine-3'-phosphate
  modified_base 8: mod_base = OTHER; note = 2'-deoxy-2'-fluoroadenosine-3'-phosphate
  modified_base 9: mod_base = OTHER; note = 2'-deoxy-2'-fluorocytidine-3'-phosphate
  modified_base 10: mod_base = OTHER; note = 2'-O-methyluridine-3'-phosphate
  modified_base 11: mod_base = OTHER; note = 2'-O-methylguanosine-3'-phosphate
  modified_base 12: mod_base = OTHER; note = 2'-O-methyladenosine-3'-phosphate
  modified_base 13: mod_base = OTHER; note = 2'-O-methylguanosine-3'-phosphate
  modified_base 14: mod_base = OTHER; note = 2'-deoxy-2'-fluoroguanosine-3'-phosphate
  modified_base 15: mod_base = OTHER; note = 2'-O-methyluridine-3'-phosphate
  modified_base 16: mod_base = OTHER; note = 2'-deoxy-2'-fluorocytidine-3'-phosphate
  modified_base 17: mod_base = OTHER; note = 2'-O-methylcytidine-3'-phosphate
  modified_base 18: mod_base = OTHER; note = 2'-O-methyladenosine-3'-phosphate
  modified_base 19: mod_base = OTHER; note = 2'-O-methylcytidine-3'-phosphate
  modified_base 20: mod_base = OTHER; note = 2'-O-methyladenosine-3'-phosphate
  modified_base 21: mod_base = OTHER; note = 2'-O-methylguanosine-3'-phosphorothioate
  modified_base 22: mod_base = OTHER; note = 2'-O-methylcytidine-3'-phosphorothioate
  modified_base 23: mod_base = OTHER; note = 2'-O-methyluridine
aacgtccactgaggtccacagct

SEQ ID NO: 1458 - RNA, 23 nt, synthetic construct
  source 1..23: mol_type = other RNA
  modified_base 1: mod_base = OTHER; note = 2'-O-methyladenosine-3'-phosphorothioate
  modified_base 2: mod_base = OTHER; note = 2'-deoxy-2'-fluoroadenosine-3'-phosphorothioate
  modified_base 3: mod_base = OTHER; note = 2'-O-methylcytidine-3'-phosphate
  modified_base 4: mod_base = OTHER; note = 2'-O-methylguanosine-3'-phosphate
  modified_base 5: mod_base = OTHER; note = 2'-O-methylcytidine-3'-phosphate
  modified_base 6: mod_base = OTHER; note = 2'-deoxy-2'-fluoroadenosine-3'-phosphate
  modified_base 7: mod_base = OTHER; note = 2'-O-methylcytidine-3'-phosphate
  modified_base 8: mod_base = OTHER; note = 2'-deoxy-2'-fluoroadenosine-3'-phosphate
  modified_base 9: mod_base = OTHER; note = 2'-deoxy-2'-fluoroguanosine-3'-phosphate
  modified_base 10: mod_base = OTHER; note = 2'-O-methylcytidine-3'-phosphate
  modified_base 11: mod_base = OTHER; note = 2'-O-methyladenosine-3'-phosphate
  modified_base 12: mod_base = OTHER; note = 2'-O-methylcytidine-3'-phosphate
  modified_base 13: mod_base = OTHER; note = 2'-O-methylguanosine-3'-phosphate
  modified_base 14: mod_base = OTHER; note = 2'-deoxy-2'-fluorouridine-3'-phosphate
  modified_base 15: mod_base = OTHER; note = 2'-O-methylcytidine-3'-phosphate
  modified_base 16: mod_base = OTHER; note = 2'-deoxy-2'-fluorocytidine-3'-phosphate
  modified_base 17: mod_base = OTHER; note = 2'-O-methyladenosine-3'-phosphate
  modified_base 18: mod_base = OTHER; note = 2'-O-methylcytidine-3'-phosphate
  modified_base 19: mod_base = OTHER; note = 2'-O-methyluridine-3'-phosphate
  modified_base 20: mod_base = OTHER; note = 2'-O-methylguanosine-3'-phosphate
  modified_base 21: mod_base = OTHER; note = 2'-O-methyladenosine-3'-phosphorothioate
  modified_base 22: mod_base = OTHER; note = 2'-O-methylguanosine-3'-phosphorothioate
  modified_base 23: mod_base = OTHER; note = 2'-O-methylguanosine
aacgcacagcacgtccactgagg

SEQ ID NO: 1459 - RNA, 23 nt, synthetic construct
  source 1..23: mol_type = other RNA
  modified_base 1: mod_base = OTHER; note = 2'-O-methyladenosine-3'-phosphorothioate
  modified_base 2: mod_base = OTHER; note = 2'-deoxy-2'-fluoroadenosine-3'-phosphorothioate
  modified_base 3: mod_base = OTHER; note = 2'-O-methylcytidine-3'-phosphate
  modified_base 4: mod_base = OTHER; note = 2'-O-methyladenosine-3'-phosphate
  modified_base 5: mod_base = OTHER; note = 2'-O-methylguanosine-3'-phosphate
  modified_base 6: mod_base = OTHER; note = 2'-deoxy-2'-fluoroguanosine-3'-phosphate
  modified_base 7: mod_base = OTHER; note = 2'-O-methylguanosine-3'-phosphate
  modified_base 8: mod_base = OTHER; note = 2'-deoxy-2'-fluorouridine-3'-phosphate
  modified_base 9: mod_base = OTHER; note = 2'-deoxy-2'-fluorocytidine-3'-phosphate
  modified_base 10: mod_base = OTHER; note = 2'-O-methyluridine-3'-phosphate
  modified_base 11: mod_base = OTHER; note = 2'-O-methylcytidine-3'-phosphate
  modified_base 12: mod_base = OTHER; note = 2'-O-methylguanosine-3'-phosphate
  modified_base 13: mod_base = OTHER; note = 2'-O-methyladenosine-3'-phosphate
  modified_base 14: mod_base = OTHER; note = 2'-deoxy-2'-fluorouridine-3'-phosphate
  modified_base 15: mod_base = OTHER; note = 2'-O-methylguanosine-3'-phosphate
  modified_base 16: mod_base = OTHER; note = 2'-deoxy-2'-fluorocytidine-3'-phosphate
  modified_base 17: mod_base = OTHER; note = 2'-O-methyluridine-3'-phosphate
  modified_base 18: mod_base = OTHER; note = 2'-O-methylguanosine-3'-phosphate
  modified_base 19: mod_base = OTHER; note = 2'-O-methylguanosine-3'-phosphate
  modified_base 20: mod_base = OTHER; note = 2'-O-methylcytidine-3'-phosphate
  modified_base 21: mod_base = OTHER; note = 2'-O-methylcytidine-3'-phosphorothioate
  modified_base 22: mod_base = OTHER; note = 2'-O-methylguanosine-3'-phosphorothioate
  modified_base 23: mod_base = OTHER; note = 2'-O-methyluridine
aacagggtctcgatgctggccgt

SEQ ID NO: 1460 - RNA, 23 nt, synthetic construct
  source 1..23: mol_type = other RNA
  modified_base 1: mod_base = OTHER; note = 2'-O-methyladenosine-3'-phosphorothioate
  modified_base 2: mod_base = OTHER; note = 2'-deoxy-2'-fluoroadenosine-3'-phosphorothioate
  modified_base 3: mod_base = OTHER; note = 2'-O-methylguanosine-3'-phosphate
  modified_base 4: mod_base = OTHER; note = 2'-O-methylguanosine-3'-phosphate
  modified_base 5: mod_base = OTHER; note = 2'-O-methylguanosine-3'-phosphate
  modified_base 6: mod_base = OTHER; note = 2'-deoxy-2'-fluorocytidine-3'-phosphate
  modified_base 7: mod_base = OTHER; note = 2'-O-methyladenosine-3'-phosphate
  modified_base 8: mod_base = OTHER; note = 2'-deoxy-2'-fluoroadenosine-3'-phosphate
  modified_base 9: mod_base = OTHER; note = 2'-deoxy-2'-fluorouridine-3'-phosphate
  modified_base 10: mod_base = OTHER; note = 2'-O-methylguanosine-3'-phosphate
  modified_base 11: mod_base = OTHER; note = 2'-O-methyladenosine-3'-phosphate
  modified_base 12: mod_base = OTHER; note = 2'-O-methylcytidine-3'-phosphate
  modified_base 13: mod_base = OTHER; note = 2'-O-methyladenosine-3'-phosphate
  modified_base 14: mod_base = OTHER; note = 2'-deoxy-2'-fluorocytidine-3'-phosphate
  modified_base 15: mod_base = OTHER; note = 2'-O-methyladenosine-3'-phosphate
  modified_base 16: mod_base = OTHER; note = 2'-deoxy-2'-fluorocytidine-3'-phosphate
  modified_base 17: mod_base = OTHER; note = 2'-O-methyladenosine-3'-phosphate
  modified_base 18: mod_base = OTHER; note = 2'-O-methylguanosine-3'-phosphate
  modified_base 19: mod_base = OTHER; note = 2'-O-methylguanosine-3'-phosphate
  modified_base 20: mod_base = OTHER; note = 2'-O-methylguanosine-3'-phosphate
  modified_base 21: mod_base = OTHER; note = 2'-O-methyluridine-3'-phosphorothioate
  modified_base 22: mod_base = OTHER; note = 2'-O-methylcytidine-3'-phosphorothioate
  modified_base 23: mod_base = OTHER; note = 2'-O-methyluridine
aagggcaatgacacacagggtct

SEQ ID NO: 1461 - RNA, 23 nt, synthetic construct
  source 1..23: mol_type = other RNA
  modified_base 1: mod_base = OTHER; note = 2'-O-methyladenosine-3'-phosphorothioate
  modified_base 2: mod_base = OTHER; note = 2'-deoxy-2'-fluoroadenosine-3'-phosphorothioate
  modified_base 3: mod_base = OTHER; note = 2'-O-methylguanosine-3'-phosphate
  modified_base 4: mod_base = OTHER; note = 2'-O-methylguanosine-3'-phosphate
  modified_base 5: mod_base = OTHER; note = 2'-O-methyluridine-3'-phosphate
  modified_base 6: mod_base = OTHER; note = 2'-deoxy-2'-fluoroadenosine-3'-phosphate
  modified_base 7: mod_base = OTHER; note = 2'-O-methylguanosine-3'-phosphate
  modified_base 8: mod_base = OTHER; note = 2'-deoxy-2'-fluorocytidine-3'-phosphate
  modified_base 9: mod_base = OTHER; note = 2'-deoxy-2'-fluoroguanosine-3'-phosphate
  modified_base 10: mod_base = OTHER; note = 2'-O-methylguanosine-3'-phosphate
  modified_base 11: mod_base = OTHER; note = 2'-O-methyluridine-3'-phosphate
  modified_base 12: mod_base = OTHER; note = 2'-O-methylcytidine-3'-phosphate
  modified_base 13: mod_base = OTHER; note = 2'-O-methylcytidine-3'-phosphate
  modified_base 14: mod_base = OTHER; note = 2'-deoxy-2'-fluoroadenosine-3'-phosphate
  modified_base 15: mod_base = OTHER; note = 2'-O-methylguanosine-3'-phosphate
  modified_base 16: mod_base = OTHER; note = 2'-deoxy-2'-fluoroguanosine-3'-phosphate
  modified_base 17: mod_base = OTHER; note = 2'-O-methylguanosine-3'-phosphate
  modified_base 18: mod_base = OTHER; note = 2'-O-methylcytidine-3'-phosphate
  modified_base 19: mod_base = OTHER; note = 2'-O-methyladenosine-3'-phosphate
  modified_base 20: mod_base = OTHER; note = 2'-O-methyladenosine-3'-phosphate
  modified_base 21: mod_base = OTHER; note = 2'-O-methyluridine-3'-phosphorothioate
  modified_base 22: mod_base = OTHER; note = 2'-O-methylguanosine-3'-phosphorothioate
  modified_base 23: mod_base = OTHER; note = 2'-O-methyladenosine
aaggtagcggtccagggcaatga

SEQ ID NO: 1462 - RNA, 23 nt, synthetic construct
  source 1..23: mol_type = other RNA
  modified_base 1: mod_base = OTHER; note = 2'-O-methyladenosine-3'-phosphorothioate
  modified_base 2: mod_base = OTHER; note = 2'-deoxy-2'-fluoroguanosine-3'-phosphorothioate
  modified_base 3: mod_base = OTHER; note = 2'-O-methyluridine-3'-phosphate
  modified_base 4: mod_base = OTHER; note = 2'-O-methylguanosine-3'-phosphate
  modified_base 5: mod_base = OTHER; note = 2'-O-methyladenosine-3'-phosphate
  modified_base 6: mod_base = OTHER; note = 2'-deoxy-2'-fluorouridine-3'-phosphate
  modified_base 7: mod_base = OTHER; note = 2'-O-methylguanosine-3'-phosphate
  modified_base 8: mod_base = OTHER; note = 2'-deoxy-2'-fluoroguanosine-3'-phosphate
  modified_base 9: mod_base = OTHER; note = 2'-deoxy-2'-fluorocytidine-3'-phosphate
  modified_base 10: mod_base = OTHER; note = 2'-O-methylguanosine-3'-phosphate
  modified_base 11: mod_base = OTHER; note = 2'-O-methyladenosine-3'-phosphate
  modified_base 12: mod_base = OTHER; note = 2'-O-methylguanosine-3'-phosphate
  modified_base 13: mod_base = OTHER; note = 2'-O-methylguanosine-3'-phosphate
  modified_base 14: mod_base = OTHER; note = 2'-deoxy-2'-fluorouridine-3'-phosphate
  modified_base 15: mod_base = OTHER; note = 2'-O-methyladenosine-3'-phosphate
  modified_base 16: mod_base = OTHER; note = 2'-deoxy-2'-fluoroguanosine-3'-phosphate
  modified_base 17: mod_base = OTHER; note = 2'-O-methylcytidine-3'-phosphate
  modified_base 18: mod_base = OTHER; note = 2'-O-methylguanosine-3'-phosphate
  modified_base 19: mod_base = OTHER; note = 2'-O-methylguanosine-3'-phosphate
  modified_base 20: mod_base = OTHER; note = 2'-O-methyluridine-3'-phosphate
  modified_base 21: mod_base = OTHER; note = 2'-O-methylcytidine-3'-phosphorothioate
  modified_base 22: mod_base = OTHER; note = 2'-O-methylcytidine-3'-phosphorothioate
  modified_base 23: mod_base = OTHER; note = 2'-O-methyladenosine
agtgatggcgaggtagcggtcca

SEQ ID NO: 1463 - RNA, 23 nt, synthetic construct
  source 1..23: mol_type = other RNA
  modified_base 1: mod_base = OTHER; note = 2'-O-methyladenosine-3'-phosphorothioate
  modified_base 2: mod_base = OTHER; note = 2'-deoxy-2'-fluoroadenosine-3'-phosphorothioate
  modified_base 3: mod_base = OTHER; note = 2'-O-methyladenosine-3'-phosphate
  modified_base 4: mod_base = OTHER; note = 2'-O-methylguanosine-3'-phosphate
  modified_base 5: mod_base = OTHER; note = 2'-O-methylguanosine-3'-phosphate
  modified_base 6: mod_base = OTHER; note = 2'-deoxy-2'-fluoroguanosine-3'-phosphate
  modified_base 7: mod_base = OTHER; note = 2'-O-methylcytidine-3'-phosphate
  modified_base 8: mod_base = OTHER; note = 2'-deoxy-2'-fluoroguanosine-3'-phosphate
  modified_base 9: mod_base = OTHER; note = 2'-deoxy-2'-fluoroadenosine-3'-phosphate
  modified_base 10: mod_base = OTHER; note = 2'-O-methylguanosine-3'-phosphate
  modified_base 11: mod_base = OTHER; note = 2'-O-methylguanosine-3'-phosphate
  modified_base 12: mod_base = OTHER; note = 2'-O-methyluridine-3'-phosphate
  modified_base 13: mod_base = OTHER; note = 2'-O-methylguanosine-3'-phosphate
  modified_base 14: mod_base = OTHER; note = 2'-deoxy-2'-fluoroadenosine-3'-phosphate
  modified_base 15: mod_base = OTHER; note = 2'-O-methyluridine-3'-phosphate
  modified_base 16: mod_base = OTHER; note = 2'-deoxy-2'-fluoroguanosine-3'-phosphate
  modified_base 17: mod_base = OTHER; note = 2'-O-methylguanosine-3'-phosphate
  modified_base 18: mod_base = OTHER; note = 2'-O-methylcytidine-3'-phosphate
  modified_base 19: mod_base = OTHER; note = 2'-O-methylguanosine-3'-phosphate
  modified_base 20: mod_base = OTHER; note = 2'-O-methyladenosine-3'-phosphate
  modified_base 21: mod_base = OTHER; note = 2'-O-methylguanosine-3'-phosphorothioate
  modified_base 22: mod_base = OTHER; note = 2'-O-methylguanosine-3'-phosphorothioate
  modified_base 23: mod_base = OTHER; note = 2'-O-methyluridine
aaagggcgaggtgatggcgaggt

SEQ ID NO: 1464 - RNA, 23 nt, synthetic construct
  source 1..23: mol_type = other RNA
  modified_base 1: mod_base = OTHER; note = 2'-O-methyladenosine-3'-phosphorothioate
  modified_base 2: mod_base = OTHER; note = 2'-deoxy-2'-fluorouridine-3'-phosphorothioate
  modified_base 3: mod_base = OTHER; note = 2'-O-methylguanosine-3'-phosphate
  modified_base 4: mod_base = OTHER; note = 2'-O-methylguanosine-3'-phosphate
  modified_base 5: mod_base = OTHER; note = 2'-O-methyluridine-3'-phosphate
  modified_base 6: mod_base = OTHER; note = 2'-deoxy-2'-fluoroadenosine-3'-phosphate
  modified_base 7: mod_base = OTHER; note = 2'-O-methylguanosine-3'-phosphate
  modified_base 8: mod_base = OTHER; note = 2'-deoxy-2'-fluorocytidine-3'-phosphate
  modified_base 9: mod_base = OTHER; note = 2'-deoxy-2'-fluoroguanosine-3'-phosphate
  modified_base 10: mod_base = OTHER; note = 2'-O-methylguanosine-3'-phosphate
  modified_base 11: mod_base = OTHER; note = 2'-O-methyladenosine-3'-phosphate
  modified_base 12: mod_base = OTHER; note = 2'-O-methyladenosine-3'-phosphate
  modified_base 13: mod_base = OTHER; note = 2'-O-methylguanosine-3'-phosphate
  modified_base 14: mod_base = OTHER; note = 2'-deoxy-2'-fluoroguanosine-3'-phosphate
  modified_base 15: mod_base = OTHER; note = 2'-O-methylguanosine-3'-phosphate
  modified_base 16: mod_base = OTHER; note = 2'-deoxy-2'-fluorocytidine-3'-phosphate
  modified_base 17: mod_base = OTHER; note = 2'-O-methylguanosine-3'-phosphate
  modified_base 18: mod_base = OTHER; note = 2'-O-methyladenosine-3'-phosphate
  modified_base 19: mod_base = OTHER; note = 2'-O-methylguanosine-3'-phosphate
  modified_base 20: mod_base = OTHER; note = 2'-O-methylguanosine-3'-phosphate
  modified_base 21: mod_base = OTHER; note = 2'-O-methyluridine-3'-phosphorothioate
  modified_base 22: mod_base = OTHER; note = 2'-O-methylguanosine-3'-phosphorothioate
  modified_base 23: mod_base = OTHER; note = 2'-O-methyladenosine
atggtagcggaagggcgaggtga

SEQ ID NO: 1465 - RNA, 23 nt, synthetic construct
  source 1..23: mol_type = other RNA
  modified_base 1: mod_base = OTHER; note = 2'-O-methyladenosine-3'-phosphorothioate
  modified_base 2: mod_base = OTHER; note = 2'-deoxy-2'-fluoroadenosine-3'-phosphorothioate
  modified_base 3: mod_base = OTHER; note = 2'-O-methylguanosine-3'-phosphate
  modified_base 4: mod_base = OTHER; note = 2'-O-methylcytidine-3'-phosphate
  modified_base 5: mod_base = OTHER; note = 2'-O-methyladenosine-3'-phosphate
  modified_base 6: mod_base = OTHER; note = 2'-deoxy-2'-fluoroguanosine-3'-phosphate
  modified_base 7: mod_base = OTHER; note = 2'-O-methylguanosine-3'-phosphate
  modified_base 8: mod_base = OTHER; note = 2'-deoxy-2'-fluorocytidine-3'-phosphate
  modified_base 9: mod_base = OTHER; note = 2'-deoxy-2'-fluorouridine-3'-phosphate
  modified_base 10: mod_base = OTHER; note = 2'-O-methylcytidine-3'-phosphate
  modified_base 11: mod_base = OTHER; note = 2'-O-methyluridine-3'-phosphate
  modified_base 12: mod_base = OTHER; note = 2'-O-methylguanosine-3'-phosphate
  modified_base 13: mod_base = OTHER; note = 2'-O-methylguanosine-3'-phosphate
  modified_base 14: mod_base = OTHER; note = 2'-deoxy-2'-fluorouridine-3'-phosphate
  modified_base 15: mod_base = OTHER; note = 2'-O-methyladenosine-3'-phosphate
  modified_base 16: mod_base = OTHER; note = 2'-deoxy-2'-fluoroguanosine-3'-phosphate
  modified_base 17: mod_base = OTHER; note = 2'-O-methylcytidine-3'-phosphate
  modified_base 18: mod_base = OTHER; note = 2'-O-methylguanosine-3'-phosphate
  modified_base 19: mod_base = OTHER; note = 2'-O-methylguanosine-3'-phosphate
  modified_base 20: mod_base = OTHER; note = 2'-O-methyladenosine-3'-phosphate
  modified_base 21: mod_base = OTHER; note = 2'-O-methyladenosine-3'-phosphorothioate
  modified_base 22: mod_base = OTHER; note = 2'-O-methylguanosine-3'-phosphorothioate
  modified_base 23: mod_base = OTHER; note = 2'-O-methylguanosine
aagcaggctctggtagcggaagg

SEQ ID NO: 1466 - RNA, 23 nt, synthetic construct
  source 1..23: mol_type = other RNA
  modified_base 1: mod_base = OTHER; note = 2'-O-methyladenosine-3'-phosphorothioate
  modified_base 2: mod_base = OTHER; note = 2'-deoxy-2'-fluoroadenosine-3'-phosphorothioate
  modified_base 3: mod_base = OTHER; note = 2'-O-methyladenosine-3'-phosphate
  modified_base 4: mod_base = OTHER; note = 2'-O-methylguanosine-3'-phosphate
  modified_base 5: mod_base = OTHER; note = 2'-O-methylguanosine-3'-phosphate
  modified_base 6: mod_base = OTHER; note = 2'-deoxy-2'-fluoroadenosine-3'-phosphate
  modified_base 7: mod_base = OTHER; note = 2'-O-methylcytidine-3'-phosphate
  modified_base 8: mod_base = OTHER; note = 2'-deoxy-2'-fluoroadenosine-3'-phosphate
  modified_base 9: mod_base = OTHER; note = 2'-deoxy-2'-fluorocytidine-3'-phosphate
  modified_base 10: mod_base = OTHER; note = 2'-O-methylcytidine-3'-phosphate
  modified_base 11: mod_base = OTHER; note = 2'-O-methyladenosine-3'-phosphate
  modified_base 12: mod_base = OTHER; note = 2'-O-methylguanosine-3'-phosphate
  modified_base 13: mod_base = OTHER; note = 2'-O-methylguanosine-3'-phosphate
  modified_base 14: mod_base = OTHER; note = 2'-deoxy-2'-fluoroguanosine-3'-phosphate
  modified_base 15: mod_base = OTHER; note = 2'-O-methylcytidine-3'-phosphate
  modified_base 16: mod_base = OTHER; note = 2'-deoxy-2'-fluorocytidine-3'-phosphate
  modified_base 17: mod_base = OTHER; note = 2'-O-methylguanosine-3'-phosphate
  modified_base 18: mod_base = OTHER; note = 2'-O-methyladenosine-3'-phosphate
  modified_base 19: mod_base = OTHER; note = 2'-O-methylguanosine-3'-phosphate
  modified_base 20: mod_base = OTHER; note = 2'-O-methyladenosine-3'-phosphate
  modified_base 21: mod_base = OTHER; note = 2'-O-methyluridine-3'-phosphorothioate
  modified_base 22: mod_base = OTHER; note = 2'-O-methylguanosine-3'-phosphorothioate
  modified_base 23: mod_base = OTHER; note = 2'-O-methylguanosine
aaaggacaccagggccgagatgg

SEQ ID NO: 1467 - RNA, 23 nt, synthetic construct
  source 1..23: mol_type = other RNA
  modified_base 1: mod_base = OTHER; note = 2'-O-methyladenosine-3'-phosphorothioate
  modified_base 2: mod_base = OTHER; note = 2'-deoxy-2'-fluoroadenosine-3'-phosphorothioate
  modified_base 3: mod_base = OTHER; note = 2'-O-methyluridine-3'-phosphate
  modified_base 4: mod_base = OTHER; note = 2'-O-methylguanosine-3'-phosphate
  modified_base 5: mod_base = OTHER; note = 2'-O-methylguanosine-3'-phosphate
  modified_base 6: mod_base = OTHER; note = 2'-deoxy-2'-fluoroguanosine-3'-phosphate
  modified_base 7: mod_base = OTHER; note = 2'-O-methylcytidine-3'-phosphate
  modified_base 8: mod_base = OTHER; note = 2'-deoxy-2'-fluoroadenosine-3'-phosphate
  modified_base 9: mod_base = OTHER; note = 2'-deoxy-2'-fluoroguanosine-3'-phosphate
  modified_base 10: mod_base = OTHER; note = 2'-O-methylguanosine-3'-phosphate
  modified_base 11: mod_base = OTHER; note = 2'-O-methyladenosine-3'-phosphate
  modified_base 12: mod_base = OTHER; note = 2'-O-methyladenosine-3'-phosphate
  modified_base 13: mod_base = OTHER; note = 2'-O-methylguanosine-3'-phosphate
  modified_base 14: mod_base = OTHER; note = 2'-deoxy-2'-fluoroguanosine-3'-phosphate
  modified_base 15: mod_base = OTHER; note = 2'-O-methyladenosine-3'-phosphate
  modified_base 16: mod_base = OTHER; note = 2'-deoxy-2'-fluorocytidine-3'-phosphate
  modified_base 17: mod_base = OTHER; note = 2'-O-methyladenosine-3'-phosphate
  modified_base 18: mod_base = OTHER; note = 2'-O-methylcytidine-3'-phosphate
  modified_base 19: mod_base = OTHER; note = 2'-O-methylcytidine-3'-phosphate
  modified_base 20: mod_base = OTHER; note = 2'-O-methyladenosine-3'-phosphate
  modified_base 21: mod_base = OTHER; note = 2'-O-methylguanosine-3'-phosphorothioate
  modified_base 22: mod_base = OTHER; note = 2'-O-methylguanosine-3'-phosphorothioate
  modified_base 23: mod_base = OTHER; note = 2'-O-methylguanosine
aatgggcaggaaggacaccaggg

SEQ ID NO: 1468 - RNA, 23 nt, synthetic construct
  source 1..23: mol_type = other RNA
  modified_base 1: mod_base = OTHER; note = 2'-O-methyladenosine-3'-phosphorothioate
  modified_base 2: mod_base = OTHER; note = 2'-deoxy-2'-fluoroadenosine-3'-phosphorothioate
  modified_base 3: mod_base = OTHER; note = 2'-O-methylcytidine-3'-phosphate
  modified_base 4: mod_base = OTHER; note = 2'-O-methylcytidine-3'-phosphate
  modified_base 5: mod_base = OTHER; note = 2'-O-methyladenosine-3'-phosphate
  modified_base 6: mod_base = OTHER; note = 2'-deoxy-2'-fluoroguanosine-3'-phosphate
  modified_base 7: mod_base = OTHER; note = 2'-O-methyluridine-3'-phosphate
  modified_base 8: mod_base = OTHER; note = 2'-deoxy-2'-fluoroguanosine-3'-phosphate
  modified_base 9: mod_base = OTHER; note = 2'-deoxy-2'-fluorocytidine-3'-phosphate
  modified_base 10: mod_base = OTHER; note = 2'-O-methyladenosine-3'-phosphate
  modified_base 11: mod_base = OTHER; note = 2'-O-methyluridine-3'-phosphate
  modified_base 12: mod_base = OTHER; note = 2'-O-methylguanosine-3'-phosphate
  modified_base 13: mod_base = OTHER; note = 2'-O-methyladenosine-3'-phosphate
  modified_base 14: mod_base = OTHER; note = 2'-deoxy-2'-fluoroguanosine-3'-phosphate
  modified_base 15: mod_base = OTHER; note = 2'-O-methylguanosine-3'-phosphate
  modified_base 16: mod_base = OTHER; note = 2'-deoxy-2'-fluoroadenosine-3'-phosphate
  modified_base 17: mod_base = OTHER; note = 2'-O-methyluridine-3'-phosphate
  modified_base 18: mod_base = OTHER; note = 2'-O-methylguanosine-3'-phosphate
  modified_base 19: mod_base = OTHER; note = 2'-O-methylguanosine-3'-phosphate
  modified_base 20: mod_base = OTHER; note = 2'-O-methylguanosine-3'-phosphate
  modified_base 21: mod_base = OTHER; note = 2'-O-methylcytidine-3'-phosphorothioate
  modified_base 22: mod_base = OTHER; note = 2'-O-methyladenosine-3'-phosphorothioate
  modified_base 23: mod_base = OTHER; note = 2'-O-methylguanosine
aaccagtgcatgaggatgggcag

SEQ ID NO: 1469 - RNA, 23 nt, synthetic construct
  source 1..23: mol_type = other RNA
  modified_base 1: mod_base = OTHER; note = 2'-O-methyladenosine-3'-phosphorothioate
  modified_base 2: mod_base = OTHER; note = 2'-deoxy-2'-fluoroguanosine-3'-phosphorothioate
  modified_base 3: mod_base = OTHER; note = 2'-O-methylguanosine-3'-phosphate
  modified_base 4: mod_base = OTHER; note = 2'-O-methyluridine-3'-phosphate
  modified_base 5: mod_base = OTHER; note = 2'-O-methyluridine-3'-phosphate
  modified_base 6: mod_base = OTHER; note = 2'-deoxy-2'-fluoroguanosine-3'-phosphate
  modified_base 7: mod_base = OTHER; note = 2'-O-methylguanosine-3'-phosphate
  modified_base 8: mod_base = OTHER; note = 2'-deoxy-2'-fluorouridine-3'-phosphate
  modified_base 9: mod_base = OTHER; note = 2'-deoxy-2'-fluoroguanosine-3'-phosphate
  modified_base 10: mod_base = OTHER; note = 2'-O-methyladenosine-3'-phosphate
  modified_base 11: mod_base = OTHER; note = 2'-O-methylcytidine-3'-phosphate
  modified_base 12: mod_base = OTHER; note = 2'-O-methylguanosine-3'-phosphate
  modified_base 13: mod_base = OTHER; note = 2'-O-methyladenosine-3'-phosphate
  modified_base 14: mod_base = OTHER; note = 2'-deoxy-2'-fluoroadenosine-3'-phosphate
  modified_base 15: mod_base = OTHER; note = 2'-O-methylguanosine-3'-phosphate
  modified_base 16: mod_base = OTHER; note = 2'-deoxy-2'-fluorouridine-3'-phosphate
  modified_base 17: mod_base = OTHER; note = 2'-O-methylcytidine-3'-phosphate
  modified_base 18: mod_base = OTHER; note = 2'-O-methylguanosine-3'-phosphate
  modified_base 19: mod_base = OTHER; note = 2'-O-methylcytidine-3'-phosphate
  modified_base 20: mod_base = OTHER; note = 2'-O-methyladenosine-3'-phosphate
  modified_base 21: mod_base = OTHER; note = 2'-O-methylguanosine-3'-phosphorothioate
  modified_base 22: mod_base = OTHER; note = 2'-O-methylcytidine-3'-phosphorothioate
  modified_base 23: mod_base = OTHER; note = 2'-O-methyladenosine
aggttggtgacgaagtcgcagca

SEQ ID NO: 1470 - RNA, 23 nt, synthetic construct
  source 1..23: mol_type = other RNA
  modified_base 1: mod_base = OTHER; note = 2'-O-methyladenosine-3'-phosphorothioate
  modified_base 2: mod_base = OTHER; note = 2'-deoxy-2'-fluoroadenosine-3'-phosphorothioate
  modified_base 3: mod_base = OTHER; note = 2'-O-methyluridine-3'-phosphate
  modified_base 4: mod_base = OTHER; note = 2'-O-methylguanosine-3'-phosphate
  modified_base 5: mod_base = OTHER; note = 2'-O-methylguanosine-3'-phosphate
  modified_base 6: mod_base = OTHER; note = 2'-deoxy-2'-fluorocytidine-3'-phosphate
  modified_base 7: mod_base = OTHER; note = 2'-O-methylguanosine-3'-phosphate
  modified_base 8: mod_base = OTHER; note = 2'-deoxy-2'-fluorouridine-3'-phosphate
  modified_base 9: mod_base = OTHER; note = 2'-deoxy-2'-fluoroadenosine-3'-phosphate
  modified_base 10: mod_base = OTHER; note = 2'-O-methylguanosine-3'-phosphate
  modified_base 11: mod_base = OTHER; note = 2'-O-methylguanosine-3'-phosphate
  modified_base 12: mod_base = OTHER; note = 2'-O-methylcytidine-3'-phosphate
  modified_base 13: mod_base = OTHER; note = 2'-O-methylcytidine-3'-phosphate
  modified_base 14: mod_base = OTHER; note = 2'-deoxy-2'-fluorocytidine-3'-phosphate
  modified_base 15: mod_base = OTHER; note = 2'-O-methylguanosine-3'-phosphate
  modified_base 16: mod_base = OTHER; note = 2'-deoxy-2'-fluoroguanosine-3'-phosphate
  modified_base 17: mod_base = OTHER; note = 2'-O-methyluridine-3'-phosphate
  modified_base 18: mod_base = OTHER; note = 2'-O-methyluridine-3'-phosphate
  modified_base 19: mod_base = OTHER; note = 2'-O-methylguanosine-3'-phosphate
  modified_base 20: mod_base = OTHER; note = 2'-O-methylguanosine-3'-phosphate
  modified_base 21: mod_base = OTHER; note = 2'-O-methyluridine-3'-phosphorothioate
  modified_base 22: mod_base = OTHER; note = 2'-O-methylguanosine-3'-phosphorothioate
  modified_base 23: mod_base = OTHER; note = 2'-O-methyladenosine
aatggcgtaggcccggttggtga

SEQ ID NO: 1471 - RNA, 23 nt, synthetic construct
  source 1..23: mol_type = other RNA
  modified_base 1: mod_base = OTHER; note = 2'-O-methyladenosine-3'-phosphorothioate
  modified_base 2: mod_base = OTHER; note = 2'-deoxy-2'-fluoroguanosine-3'-phosphorothioate
  modified_base 3: mod_base = OTHER; note = 2'-O-methyladenosine-3'-phosphate
  modified_base 4: mod_base = OTHER; note = 2'-O-methylguanosine-3'-phosphate
  modified_base 5: mod_base = OTHER; note = 2'-O-methyladenosine-3'-phosphate
  modified_base 6: mod_base = OTHER; note = 2'-deoxy-2'-fluorocytidine-3'-phosphate
  modified_base 7: mod_base = OTHER; note = 2'-O-methyluridine-3'-phosphate
  modified_base 8: mod_base = OTHER; note = 2'-deoxy-2'-fluoroadenosine-3'-phosphate
  modified_base 9: mod_base = OTHER; note = 2'-deoxy-2'-fluorocytidine-3'-phosphate
  modified_base 10: mod_base = OTHER; note = 2'-O-methylguanosine-3'-phosphate
  modified_base 11: mod_base = OTHER; note = 2'-O-methylguanosine-3'-phosphate
  modified_base 12: mod_base = OTHER; note = 2'-O-methyladenosine-3'-phosphate
  modified_base 13: mod_base = OTHER; note = 2'-O-methylcytidine-3'-phosphate
  modified_base 14: mod_base = OTHER; note = 2'-deoxy-2'-fluoroguanosine-3'-phosphate
  modified_base 15: mod_base = OTHER; note = 2'-O-methyladenosine-3'-phosphate
  modified_base 16: mod_base = OTHER; note = 2'-deoxy-2'-fluoroguanosine-3'-phosphate
  modified_base 17: mod_base = OTHER; note = 2'-O-methylguanosine-3'-phosphate
  modified_base 18: mod_base = OTHER; note = 2'-O-methylcytidine-3'-phosphate
  modified_base 19: mod_base = OTHER; note = 2'-O-methylguanosine-3'-phosphate
  modified_base 20: mod_base = OTHER; note = 2'-O-methyladenosine-3'-phosphate
  modified_base 21: mod_base = OTHER; note = 2'-O-methyluridine-3'-phosphorothioate
  modified_base 22: mod_base = OTHER; note = 2'-O-methylguanosine-3'-phosphorothioate
  modified_base 23: mod_base = OTHER; note = 2'-O-methylguanosine
agagactacggacgaggcgatgg

SEQ ID NO: 1472 - RNA, 23 nt, synthetic construct
  source 1..23: mol_type = other RNA
  modified_base 1: mod_base = OTHER; note = 2'-O-methyladenosine-3'-phosphorothioate
  modified_base 2: mod_base = OTHER; note = 2'-deoxy-2'-fluoroadenosine-3'-phosphorothioate
  modified_base 3: mod_base = OTHER; note = 2'-O-methylcytidine-3'-phosphate
  modified_base 4: mod_base = OTHER; note = 2'-O-methylguanosine-3'-phosphate
  modified_base 5: mod_base = OTHER; note = 2'-O-methyluridine-3'-phosphate
  modified_base 6: mod_base = OTHER; note = 2'-deoxy-2'-fluoroadenosine-3'-phosphate
  modified_base 7: mod_base = OTHER; note = 2'-O-methylguanosine-3'-phosphate
  modified_base 8: mod_base = OTHER; note = 2'-deoxy-2'-fluoroadenosine-3'-phosphate
  modified_base 9: mod_base = OTHER; note = 2'-deoxy-2'-fluoroadenosine-3'-phosphate
  modified_base 10: mod_base = OTHER; note = 2'-O-methylguanosine-3'-phosphate
  modified_base 11: mod_base = OTHER; note = 2'-O-methylguanosine-3'-phosphate
  modified_base 12: mod_base = OTHER; note = 2'-O-methyladenosine-3'-phosphate
  modified_base 13: mod_base = OTHER; note = 2'-O-methylguanosine-3'-phosphate
  modified_base 14: mod_base = OTHER; note = 2'-deoxy-2'-fluoroadenosine-3'-phosphate
  modified_base 15: mod_base = OTHER; note = 2'-O-methylcytidine-3'-phosphate
  modified_base 16: mod_base = OTHER; note = 2'-deoxy-2'-fluorouridine-3'-phosphate
  modified_base 17: mod_base = OTHER; note = 2'-O-methyladenosine-3'-phosphate
  modified_base 18: mod_base = OTHER; note = 2'-O-methylcytidine-3'-phosphate
  modified_base 19: mod_base = OTHER; note = 2'-O-methylguanosine-3'-phosphate
  modified_base 20: mod_base = OTHER; note = 2'-O-methylguanosine-3'-phosphate
  modified_base 21: mod_base = OTHER; note = 2'-O-methyladenosine-3'-phosphorothioate
  modified_base 22: mod_base = OTHER; note = 2'-O-methylcytidine-3'-phosphorothioate
  modified_base 23: mod_base = OTHER; note = 2'-O-methylguanosine
aacgtagaaggagactacggacg

SEQ ID NO: 1473 - RNA, 23 nt, synthetic construct
  source 1..23: mol_type = other RNA
  modified_base 1: mod_base = OTHER; note = 2'-O-methyladenosine-3'-phosphorothioate
  modified_base 2: mod_base = OTHER; note = 2'-deoxy-2'-fluoroadenosine-3'-phosphorothioate
  modified_base 3: mod_base = OTHER; note = 2'-O-methylcytidine-3'-phosphate
  modified_base 4: mod_base = OTHER; note = 2'-O-methylguanosine-3'-phosphate
  modified_base 5: mod_base = OTHER; note = 2'-O-methyladenosine-3'-phosphate
  modified_base 6: mod_base = OTHER; note = 2'-deoxy-2'-fluoroadenosine-3'-phosphate
  modified_base 7: mod_base = OTHER; note = 2'-O-methylguanosine-3'-phosphate
  modified_base 8: mod_base = OTHER; note = 2'-deoxy-2'-fluoroguanosine-3'-phosphate
  modified_base 9: mod_base = OTHER; note = 2'-deoxy-2'-fluorocytidine-3'-phosphate
  modified_base 10: mod_base = OTHER; note = 2'-O-methylcytidine-3'-phosphate
  modified_base 11: mod_base = OTHER; note = 2'-O-methyladenosine-3'-phosphate
  modified_base 12: mod_base = OTHER; note = 2'-O-methyluridine-3'-phosphate
  modified_base 13: mod_base = OTHER; note = 2'-O-methylguanosine-3'-phosphate
  modified_base 14: mod_base = OTHER; note = 2'-deoxy-2'-fluoroadenosine-3'-phosphate
  modified_base 15: mod_base = OTHER; note = 2'-O-methyluridine-3'-phosphate
  modified_base 16: mod_base = OTHER; note = 2'-deoxy-2'-fluoroguanosine-3'-phosphate
  modified_base 17: mod_base = OTHER; note = 2'-O-methylcytidine-3'-phosphate
  modified_base 18: mod_base = OTHER; note = 2'-O-methyladenosine-3'-phosphate
  modified_base 19: mod_base = OTHER; note = 2'-O-methylcytidine-3'-phosphate
  modified_base 20: mod_base = OTHER; note = 2'-O-methyladenosine-3'-phosphate
  modified_base 21: mod_base = OTHER; note = 2'-O-methylguanosine-3'-phosphorothioate
  modified_base 22: mod_base = OTHER; note = 2'-O-methylguanosine-3'-phosphorothioate
  modified_base 23: mod_base = OTHER; note = 2'-O-methylguanosine
aacgaaggccatgatgcacaggg

SEQ ID NO: 1474 - RNA, 23 nt, synthetic construct
  source 1..23: mol_type = other RNA
  modified_base 1: mod_base = OTHER; note = 2'-O-methyladenosine-3'-phosphorothioate
  modified_base 2: mod_base = OTHER; note = 2'-deoxy-2'-fluorocytidine-3'-phosphorothioate
  modified_base 3: mod_base = OTHER; note = 2'-O-methylguanosine-3'-phosphate
  modified_base 4: mod_base = OTHER; note = 2'-O-methylcytidine-3'-phosphate
  modified_base 5: mod_base = OTHER; note = 2'-O-methyladenosine-3'-phosphate
  modified_base 6: mod_base = OTHER; note = 2'-deoxy-2'-fluoroguanosine-3'-phosphate
  modified_base 7: mod_base = OTHER; note = 2'-O-methylguanosine-3'-phosphate
  modified_base 8: mod_base = OTHER; note = 2'-deoxy-2'-fluorouridine-3'-phosphate
  modified_base 9: mod_base = OTHER; note = 2'-deoxy-2'-fluoroadenosine-3'-phosphate
  modified_base 10: mod_base = OTHER; note = 2'-O-methylcytidine-3'-phosphate
  modified_base 11: mod_base = OTHER; note = 2'-O-methyladenosine-3'-phosphate
  modified_base 12: mod_base = OTHER; note = 2'-O-methylcytidine-3'-phosphate
  modified_base 13: mod_base = OTHER; note = 2'-O-methylguanosine-3'-phosphate
  modified_base 14: mod_base = OTHER; note = 2'-deoxy-2'-fluoroadenosine-3'-phosphate
  modified_base 15: mod_base = OTHER; note = 2'-O-methyladenosine-3'-phosphate
  modified_base 16: mod_base = OTHER; note = 2'-deoxy-2'-fluoroguanosine-3'-phosphate
  modified_base 17: mod_base = OTHER; note = 2'-O-methylguanosine-3'-phosphate
  modified_base 18: mod_base = OTHER; note = 2'-O-methylcytidine-3'-phosphate
  modified_base 19: mod_base = OTHER; note = 2'-O-methylcytidine-3'-phosphate
  modified_base 20: mod_base = OTHER; note = 2'-O-methyladenosine-3'-phosphate
  modified_base 21: mod_base = OTHER; note = 2'-O-methyluridine-3'-phosphorothioate
  modified_base 22: mod_base = OTHER; note = 2'-O-methylguanosine-3'-phosphorothioate
  modified_base 23: mod_base = OTHER; note = 2'-O-methyladenosine
acgcaggtacacgaaggccatga

SEQ ID NO: 1475 - RNA, 23 nt, synthetic construct
  source 1..23: mol_type = other RNA
  modified_base 1: mod_base = OTHER; note = 2'-O-methyladenosine-3'-phosphorothioate
  modified_base 2: mod_base = OTHER; note = 2'-deoxy-2'-fluorouridine-3'-phosphorothioate
  modified_base 3: mod_base = OTHER; note = 2'-O-methylcytidine-3'-phosphate
  modified_base 4: mod_base = OTHER; note = 2'-O-methylguanosine-3'-phosphate
  modified_base 5: mod_base = OTHER; note = 2'-O-methylcytidine-3'-phosphate
  modified_base 6: mod_base = OTHER; note = 2'-deoxy-2'-fluoroguanosine-3'-phosphate
  modified_base 7: mod_base = OTHER; note = 2'-O-methylguanosine-3'-phosphate
  modified_base 8: mod_base = OTHER; note = 2'-deoxy-2'-fluoroadenosine-3'-phosphate
  modified_base 9: mod_base = OTHER; note = 2'-deoxy-2'-fluoroadenosine-3'-phosphate
  modified_base 10: mod_base = OTHER; note = 2'-O-methylcytidine-3'-phosphate
  modified_base 11: mod_base = OTHER; note = 2'-O-methyladenosine-3'-phosphate
  modified_base 12: mod_base = OTHER; note = 2'-O-methylcytidine-3'-phosphate
  modified_base 13: mod_base = OTHER; note = 2'-O-methylcytidine-3'-phosphate
  modified_base 14: mod_base = OTHER; note = 2'-deoxy-2'-fluorocytidine-3'-phosphate
  modified_base 15: mod_base = OTHER; note = 2'-O-methylguanosine-3'-phosphate
  modified_base 16: mod_base = OTHER; note = 2'-deoxy-2'-fluorocytidine-3'-phosphate
  modified_base 17: mod_base = OTHER; note = 2'-O-methyladenosine-3'-phosphate
  modified_base 18: mod_base = OTHER; note = 2'-O-methylguanosine-3'-phosphate
  modified_base 19: mod_base = OTHER; note = 2'-O-methylguanosine-3'-phosphate
  modified_base 20: mod_base = OTHER; note = 2'-O-methyluridine-3'-phosphate
  modified_base 21: mod_base = OTHER; note = 2'-O-methyladenosine-3'-phosphorothioate
  modified_base 22: mod_base = OTHER; note = 2'-O-methylcytidine-3'-phosphorothioate
  modified_base 23: mod_base = OTHER; note = 2'-O-methyladenosine
atcgcggaacacccgcaggtaca

SEQ ID NO: 1476 - RNA, 23 nt, synthetic construct
  source 1..23: mol_type = other RNA
  modified_base 1: mod_base = OTHER; note = 2'-O-methyladenosine-3'-phosphorothioate
  modified_base 2: mod_base = OTHER; note = 2'-deoxy-2'-fluorouridine-3'-phosphorothioate
  modified_base 3: mod_base = OTHER; note = 2'-O-methyluridine-3'-phosphate
  modified_base 4: mod_base = OTHER; note = 2'-O-methylcytidine-3'-phosphate
  modified_base 5: mod_base = OTHER; note = 2'-O-methyluridine-3'-phosphate
  modified_base 6: mod_base = OTHER; note = 2'-deoxy-2'-fluorouridine-3'-phosphate
  modified_base 7: mod_base = OTHER; note = 2'-O-methylcytidine-3'-phosphate
  modified_base 8: mod_base = OTHER; note = 2'-deoxy-2'-fluoroadenosine-3'-phosphate
  modified_base 9: mod_base = OTHER; note = 2'-deoxy-2'-fluorocytidine-3'-phosphate
  modified_base 10: mod_base = OTHER; note = 2'-O-methylcytidine-3'-phosphate
  modified_base 11: mod_base = OTHER; note = 2'-O-methyluridine-3'-phosphate
  modified_base 12: mod_base = OTHER; note = 2'-O-methylguanosine-3'-phosphate
  modified_base 13: mod_base = OTHER; note = 2'-O-methylcytidine-3'-phosphate
  modified_base 14: mod_base = OTHER; note = 2'-deoxy-2'-fluorouridine-3'-phosphate
  modified_base 15: mod_base = OTHER; note = 2'-O-methyluridine-3'-phosphate
  modified_base 16: mod_base = OTHER; note = 2'-deoxy-2'-fluorocytidine-3'-phosphate
  modified_base 17: mod_base = OTHER; note = 2'-O-methyluridine-3'-phosphate
  modified_base 18: mod_base = OTHER; note = 2'-O-methylguanosine-3'-phosphate
  modified_base 19: mod_base = OTHER; note = 2'-O-methylguanosine-3'-phosphate
  modified_base 20: mod_base = OTHER; note = 2'-O-methylguanosine-3'-phosphate
  modified_base 21: mod_base = OTHER; note = 2'-O-methylcytidine-3'-phosphorothioate
  modified_base 22: mod_base = OTHER; note = 2'-O-methylcytidine-3'-phosphorothioate
  modified_base 23: mod_base = OTHER; note = 2'-O-methyluridine
attcttcacctgcttctgggcct

SEQ ID NO: 1477 - RNA, 23 nt, synthetic construct
  source 1..23: mol_type = other RNA
  modified_base 1: mod_base = OTHER; note = 2'-O-methyladenosine-3'-phosphorothioate
  modified_base 2: mod_base = OTHER; note = 2'-deoxy-2'-fluoroadenosine-3'-phosphorothioate
  modified_base 3: mod_base = OTHER; note = 2'-O-methylguanosine-3'-phosphate
  modified_base 4: mod_base = OTHER; note = 2'-O-methylcytidine-3'-phosphate
  modified_base 5: mod_base = OTHER; note = 2'-O-methyluridine-3'-phosphate
  modified_base 6: mod_base = OTHER; note = 2'-deoxy-2'-fluoroguanosine-3'-phosphate
  modified_base 7: mod_base = OTHER; note = 2'-O-methyluridine-3'-phosphate
  modified_base 8: mod_base = OTHER; note = 2'-deoxy-2'-fluorocytidine-3'-phosphate
  modified_base 9: mod_base = OTHER; note = 2'-deoxy-2'-fluoroguanosine-3'-phosphate
  modified_base 10: mod_base = OTHER; note = 2'-O-methyladenosine-3'-phosphate
  modified_base 11: mod_base = OTHER; note = 2'-O-methyluridine-3'-phosphate
  modified_base 12: mod_base = OTHER; note = 2'-O-methylcytidine-3'-phosphate
  modified_base 13: mod_base = OTHER; note = 2'-O-methyluridine-3'-phosphate
  modified_base 14: mod_base = OTHER; note = 2'-deoxy-2'-fluorouridine-3'-phosphate
  modified_base 15: mod_base = OTHER; note = 2'-O-methylcytidine-3'-phosphate
  modified_base 16: mod_base = OTHER; note = 2'-deoxy-2'-fluorouridine-3'-phosphate
  modified_base 17: mod_base = OTHER; note = 2'-O-methyluridine-3'-phosphate
  modified_base 18: mod_base = OTHER; note = 2'-O-methylcytidine-3'-phosphate
  modified_base 19: mod_base = OTHER; note = 2'-O-methyladenosine-3'-phosphate
  modified_base 20: mod_base = OTHER; note = 2'-O-methylcytidine-3'-phosphate
  modified_base 21: mod_base = OTHER; note = 2'-O-methylcytidine-3'-phosphorothioate
  modified_base 22: mod_base = OTHER; note = 2'-O-methyluridine-3'-phosphorothioate
  modified_base 23: mod_base = OTHER; note = 2'-O-methylguanosine
aagctgtcgatcttcttcacctg

SEQ ID NO: 1478 - RNA, 23 nt, synthetic construct
  source 1..23: mol_type = other RNA
  modified_base 1: mod_base = OTHER; note = 2'-O-methyladenosine-3'-phosphorothioate
  modified_base 2: mod_base = OTHER; note = 2'-deoxy-2'-fluoroadenosine-3'-phosphorothioate
  modified_base 3: mod_base = OTHER; note = 2'-O-methylguanosine-3'-phosphate
  modified_base 4: mod_base = OTHER; note = 2'-O-methylguanosine-3'-phosphate
  modified_base 5: mod_base = OTHER; note = 2'-O-methyladenosine-3'-phosphate
  modified_base 6: mod_base = OTHER; note = 2'-deoxy-2'-fluoroadenosine-3'-phosphate
  modified_base 7: mod_base = OTHER; note = 2'-O-methyladenosine-3'-phosphate
  modified_base 8: mod_base = OTHER; note = 2'-deoxy-2'-fluorocytidine-3'-phosphate
  modified_base 9: mod_base = OTHER; note = 2'-deoxy-2'-fluoroguanosine-3'-phosphate
  modified_base 10: mod_base = OTHER; note = 2'-O-methylguanosine-3'-phosphate
  modified_base 11: mod_base = OTHER; note = 2'-O-methylcytidine-3'-phosphate
  modified_base 12: mod_base = OTHER; note = 2'-O-methylguanosine-3'-phosphate
  modified_base 13: mod_base = OTHER; note = 2'-O-methylcytidine-3'-phosphate
  modified_base 14: mod_base = OTHER; note = 2'-deoxy-2'-fluorouridine-3'-phosphate
  modified_base 15: mod_base = OTHER; note = 2'-O-methylcytidine-3'-phosphate
  modified_base 16: mod_base = OTHER; note = 2'-deoxy-2'-fluoroguanosine-3'-phosphate
  modified_base 17: mod_base = OTHER; note = 2'-O-methylcytidine-3'-phosphate
  modified_base 18: mod_base = OTHER; note = 2'-O-methyladenosine-3'-phosphate
  modified_base 19: mod_base = OTHER; note = 2'-O-methylguanosine-3'-phosphate
  modified_base 20: mod_base = OTHER; note = 2'-O-methylcytidine-3'-phosphate
  modified_base 21: mod_base = OTHER; note = 2'-O-methyluridine-3'-phosphorothioate
  modified_base 22: mod_base = OTHER; note = 2'-O-methylguanosine-3'-phosphorothioate
  modified_base 23: mod_base = OTHER; note = 2'-O-methyluridine
aaggaaacggcgctcgcagctgt

SEQ ID NO: 1479 - RNA, 23 nt, synthetic construct
  source 1..23: mol_type = other RNA
  modified_base 1: mod_base = OTHER; note = 2'-O-methyladenosine-3'-phosphorothioate
  modified_base 2: mod_base = OTHER; note = 2'-deoxy-2'-fluoroadenosine-3'-phosphorothioate
  modified_base 3: mod_base = OTHER; note = 2'-O-methylguanosine-3'-phosphate
  modified_base 4: mod_base = OTHER; note = 2'-O-methylcytidine-3'-phosphate
  modified_base 5: mod_base = OTHER; note = 2'-O-methylguanosine-3'-phosphate
  modified_base 6: mod_base = OTHER; note = 2'-deoxy-2'-fluorouridine-3'-phosphate
  modified_base 7: mod_base = OTHER; note = 2'-O-methylcytidine-3'-phosphate
  modified_base 8: mod_base = OTHER; note = 2'-deoxy-2'-fluorouridine-3'-phosphate
  modified_base 9: mod_base = OTHER; note = 2'-deoxy-2'-fluorouridine-3'-phosphate
  modified_base 10: mod_base = OTHER; note = 2'-O-methylguanosine-3'-phosphate
  modified_base 11: mod_base = OTHER; note = 2'-O-methyladenosine-3'-phosphate
  modified_base 12: mod_base = OTHER; note = 2'-O-methylguanosine-3'-phosphate
  modified_base 13: mod_base = OTHER; note = 2'-O-methylcytidine-3'-phosphate
  modified_base 14: mod_base = OTHER; note = 2'-deoxy-2'-fluoroguanosine-3'-phosphate
  modified_base 15: mod_base = OTHER; note = 2'-O-methylcytidine-3'-phosphate
  modified_base 16: mod_base = OTHER; note = 2'-deoxy-2'-fluorocytidine-3'-phosphate
  modified_base 17: mod_base = OTHER; note = 2'-O-methyluridine-3'-phosphate
  modified_base 18: mod_base = OTHER; note = 2'-O-methyluridine-3'-phosphate
  modified_base 19: mod_base = OTHER; note = 2'-O-methylcytidine-3'-phosphate
  modified_base 20: mod_base = OTHER; note = 2'-O-methyluridine-3'-phosphate
  modified_base 21: mod_base = OTHER; note = 2'-O-methylguanosine-3'-phosphorothioate
  modified_base 22: mod_base = OTHER; note = 2'-O-methylcytidine-3'-phosphorothioate
  modified_base 23: mod_base = OTHER; note = 2'-O-methyluridine
aagcgtcttgagcgccttctgct

SEQ ID NO: 1480 - RNA, 23 nt, synthetic construct
  source 1..23: mol_type = other RNA
  modified_base 1: mod_base = OTHER; note = 2'-O-methyladenosine-3'-phosphorothioate
  modified_base 2: mod_base = OTHER; note = 2'-deoxy-2'-fluoroguanosine-3'-phosphorothioate
  modified_base 3: mod_base = OTHER; note = 2'-O-methyladenosine-3'-phosphate
  modified_base 4: mod_base = OTHER; note = 2'-O-methyluridine-3'-phosphate
  modified_base 5: mod_base = OTHER; note = 2'-O-methylguanosine-3'-phosphate
  modified_base 6: mod_base = OTHER; note = 2'-deoxy-2'-fluoroadenosine-3'-phosphate
  modified_base 7: mod_base = OTHER; note = 2'-O-methyluridine-3'-phosphate
  modified_base 8: mod_base = OTHER; note = 2'-deoxy-2'-fluoroguanosine-3'-phosphate
  modified_base 9: mod_base = OTHER; note = 2'-deoxy-2'-fluorocytidine-3'-phosphate
  modified_base 10: mod_base = OTHER; note = 2'-O-methylcytidine-3'-phosphate
  modified_base 11: mod_base = OTHER; note = 2'-O-methylcytidine-3'-phosphate
  modified_base 12: mod_base = OTHER; note = 2'-O-methyladenosine-3'-phosphate
  modified_base 13: mod_base = OTHER; note = 2'-O-methylguanosine-3'-phosphate
  modified_base 14: mod_base = OTHER; note = 2'-deoxy-2'-fluorocytidine-3'-phosphate
  modified_base 15: mod_base = OTHER; note = 2'-O-methylguanosine-3'-phosphate
  modified_base 16: mod_base = OTHER; note = 2'-deoxy-2'-fluorouridine-3'-phosphate
  modified_base 17: mod_base = OTHER; note = 2'-O-methylcytidine-3'-phosphate
  modified_base 18: mod_base = OTHER; note = 2'-O-methyluridine-3'-phosphate
  modified_base 19: mod_base = OTHER; note = 2'-O-methyluridine-3'-phosphate
  modified_base 20: mod_base = OTHER; note = 2'-O-methylguanosine-3'-phosphate
  modified_base 21: mod_base = OTHER; note = 2'-O-methyladenosine-3'-phosphorothioate
  modified_base 22: mod_base = OTHER; note = 2'-O-methylguanosine-3'-phosphorothioate
  modified_base 23: mod_base = OTHER; note = 2'-O-methylcytidine
agatgatgcccagcgtcttgagc

SEQ ID NO: 1481 - RNA, 23 nt, synthetic construct
  source 1..23: mol_type = other RNA
  modified_base 1: mod_base = OTHER; note = 2'-O-methyladenosine-3'-phosphorothioate
  modified_base 2: mod_base = OTHER; note = 2'-deoxy-2'-fluoroadenosine-3'-phosphorothioate
  modified_base 3: mod_base = OTHER; note = 2'-O-methylguanosine-3'-phosphate
  modified_base 4: mod_base = OTHER; note = 2'-O-methyladenosine-3'-phosphate
  modified_base 5: mod_base = OTHER; note = 2'-O-methylcytidine-3'-phosphate
  modified_base 6: mod_base = OTHER; note = 2'-deoxy-2'-fluoroguanosine-3'-phosphate
  modified_base 7: mod_base = OTHER; note = 2'-O-methylcytidine-3'-phosphate
  modified_base 8: mod_base = OTHER; note = 2'-deoxy-2'-fluorocytidine-3'-phosphate
  modified_base 9: mod_base = OTHER; note = 2'-deoxy-2'-fluorocytidine-3'-phosphate
  modified_base 10: mod_base = OTHER; note = 2'-O-methyladenosine-3'-phosphate
  modified_base 11: mod_base = OTHER; note = 2'-O-methyluridine-3'-phosphate
  modified_base 12: mod_base = OTHER; note = 2'-O-methylguanosine-3'-phosphate
  modified_base 13: mod_base = OTHER; note = 2'-O-methyladenosine-3'-phosphate
  modified_base 14: mod_base = OTHER; note = 2'-deoxy-2'-fluorouridine-3'-phosphate
  modified_base 15: mod_base = OTHER; note = 2'-O-methylguanosine-3'-phosphate
  modified_base 16: mod_base = OTHER; note = 2'-deoxy-2'-fluoroadenosine-3'-phosphate
  modified_base 17: mod_base = OTHER; note = 2'-O-methyluridine-3'-phosphate
  modified_base 18: mod_base = OTHER; note = 2'-O-methylguanosine-3'-phosphate
  modified_base 19: mod_base = OTHER; note = 2'-O-methylcytidine-3'-phosphate
  modified_base 20: mod_base = OTHER; note = 2'-O-methylcytidine-3'-phosphate
  modified_base 21: mod_base = OTHER; note = 2'-O-methylcytidine-3'-phosphorothioate
  modified_base 22: mod_base = OTHER; note = 2'-O-methyladenosine-3'-phosphorothioate
  modified_base 23: mod_base = OTHER; note = 2'-O-methylguanosine
aagacgcccatgatgatgcccag

SEQ ID NO: 1482 - RNA, 23 nt, synthetic construct
  source 1..23: mol_type = other RNA
  modified_base 1: mod_base = OTHER; note = 2'-O-methyladenosine-3'-phosphorothioate
  modified_base 2: mod_base = OTHER; note = 2'-deoxy-2'-fluoroadenosine-3'-phosphorothioate
  modified_base 3: mod_base = OTHER; note = 2'-O-methylguanosine-3'-phosphate
  modified_base 4: mod_base = OTHER; note = 2'-O-methylcytidine-3'-phosphate
  modified_base 5: mod_base = OTHER; note = 2'-O-methyladenosine-3'-phosphate
  modified_base 6: mod_base = OTHER; note = 2'-deoxy-2'-fluoroguanosine-3'-phosphate
  modified_base 7: mod_base = OTHER; note = 2'-O-methyladenosine-3'-phosphate
  modified_base 8: mod_base = OTHER; note = 2'-deoxy-2'-fluoroguanosine-3'-phosphate
  modified_base 9: mod_base = OTHER; note = 2'-deoxy-2'-fluorocytidine-3'-phosphate
  modified_base 10: mod_base = OTHER; note = 2'-O-methylguanosine-3'-phosphate
  modified_base 11: mod_base = OTHER; note = 2'-O-methyluridine-3'-phosphate
  modified_base 12: mod_base = OTHER; note = 2'-O-methylguanosine-3'-phosphate
  modified_base 13: mod_base = OTHER; note = 2'-O-methyladenosine-3'-phosphate
  modified_base 14: mod_base = OTHER; note = 2'-deoxy-2'-fluoroadenosine-3'-phosphate
  modified_base 15: mod_base = OTHER; note = 2'-O-methylguanosine-3'-phosphate
  modified_base 16: mod_base = OTHER; note = 2'-deoxy-2'-fluoroadenosine-3'-phosphate
  modified_base 17: mod_base = OTHER; note = 2'-O-methylcytidine-3'-phosphate
  modified_base 18: mod_base = OTHER; note = 2'-O-methylguanosine-3'-phosphate
  modified_base 19: mod_base = OTHER; note = 2'-O-methylcytidine-3'-phosphate
  modified_base 20: mod_base = OTHER; note = 2'-O-methylcytidine-3'-phosphate
  modified_base 21: mod_base = OTHER; note = 2'-O-methylcytidine-3'-phosphorothioate
  modified_base 22: mod_base = OTHER; note = 2'-O-methyladenosine-3'-phosphorothioate
  modified_base 23: mod_base = OTHER; note = 2'-O-methyluridine
aagcagagcgtgaagacgcccat

SEQ ID NO: 1483 - RNA, 23 nt, synthetic construct
  source 1..23: mol_type = other RNA
  modified_base 1: mod_base = OTHER; note = 2'-O-methyladenosine-3'-phosphorothioate
  modified_base 2: mod_base = OTHER; note = 2'-deoxy-2'-fluoroguanosine-3'-phosphorothioate
  modified_base 3: mod_base = OTHER; note = 2'-O-methylguanosine-3'-phosphate
  modified_base 4: mod_base = OTHER; note = 2'-O-methyladenosine-3'-phosphate
  modified_base 5: mod_base = OTHER; note = 2'-O-methyladenosine-3'-phosphate
  modified_base 6: mod_base = OTHER; note = 2'-deoxy-2'-fluoroguanosine-3'-phosphate
  modified_base 7: mod_base = OTHER; note = 2'-O-methyladenosine-3'-phosphate
  modified_base 8: mod_base = OTHER; note = 2'-deoxy-2'-fluoroadenosine-3'-phosphate
  modified_base 9: mod_base = OTHER; note = 2'-deoxy-2'-fluoroguanosine-3'-phosphate
  modified_base 10: mod_base = OTHER; note = 2'-O-methylguanosine-3'-phosphate
  modified_base 11: mod_base = OTHER; note = 2'-O-methylguanosine-3'-phosphate
  modified_base 12: mod_base = OTHER; note = 2'-O-methylcytidine-3'-phosphate
  modified_base 13: mod_base = OTHER; note = 2'-O-methyladenosine-3'-phosphate
  modified_base 14: mod_base = OTHER; note = 2'-deoxy-2'-fluoroguanosine-3'-phosphate
  modified_base 15: mod_base = OTHER; note = 2'-O-methylcytidine-3'-phosphate
  modified_base 16: mod_base = OTHER; note = 2'-deoxy-2'-fluorocytidine-3'-phosphate
  modified_base 17: mod_base = OTHER; note = 2'-O-methyladenosine-3'-phosphate
  modified_base 18: mod_base = OTHER; note = 2'-O-methylguanosine-3'-phosphate
  modified_base 19: mod_base = OTHER; note = 2'-O-methylcytidine-3'-phosphate
  modified_base 20: mod_base = OTHER; note = 2'-O-methyladenosine-3'-phosphate
  modified_base 21: mod_base = OTHER; note = 2'-O-methylguanosine-3'-phosphorothioate
  modified_base 22: mod_base = OTHER; note = 2'-O-methyladenosine-3'-phosphorothioate
  modified_base 23: mod_base = OTHER; note = 2'-O-methylguanosine
aggaagaagggcagccagcagag

SEQ ID NO: 1484 - RNA, 23 nt, synthetic construct
  source 1..23: mol_type = other RNA
  modified_base 1: mod_base = OTHER; note = 2'-O-methyladenosine-3'-phosphorothioate
  modified_base 2: mod_base = OTHER; note = 2'-deoxy-2'-fluorocytidine-3'-phosphorothioate
  modified_base 3: mod_base = OTHER; note = 2'-O-methylguanosine-3'-phosphate
  modified_base 4: mod_base = OTHER; note = 2'-O-methyluridine-3'-phosphate
  modified_base 5: mod_base = OTHER; note = 2'-O-methyluridine-3'-phosphate
  modified_base 6: mod_base = OTHER; note = 2'-deoxy-2'-fluoroguanosine-3'-phosphate
  modified_base 7: mod_base = OTHER; note = 2'-O-methylguanosine-3'-phosphate
  modified_base 8: mod_base = OTHER; note = 2'-deoxy-2'-fluorocytidine-3'-phosphate
  modified_base 9: mod_base = OTHER; note = 2'-deoxy-2'-fluorocytidine-3'-phosphate
  modified_base 10: mod_base = OTHER; note = 2'-O-methyladenosine-3'-phosphate
  modified_base 11: mod_base = OTHER; note = 2'-O-methylguanosine-3'-phosphate
  modified_base 12: mod_base = OTHER; note = 2'-O-methylguanosine-3'-phosphate
  modified_base 13: mod_base = OTHER; note = 2'-O-methyladenosine-3'-phosphate
  modified_base 14: mod_base = OTHER; note = 2'-deoxy-2'-fluoroadenosine-3'-phosphate
  modified_base 15: mod_base = OTHER; note = 2'-O-methylguanosine-3'-phosphate
  modified_base 16: mod_base = OTHER; note = 2'-deoxy-2'-fluoroadenosine-3'-phosphate
  modified_base 17: mod_base = OTHER; note = 2'-O-methyladenosine-3'-phosphate
  modified_base 18: mod_base = OTHER; note = 2'-O-methylguanosine-3'-phosphate
  modified_base 19: mod_base = OTHER; note = 2'-O-methylguanosine-3'-phosphate
  modified_base 20: mod_base = OTHER; note = 2'-O-methylguanosine-3'-phosphate
  modified_base 21: mod_base = OTHER; note = 2'-O-methylcytidine-3'-phosphorothioate
  modified_base 22: mod_base = OTHER; note = 2'-O-methyladenosine-3'-phosphorothioate
  modified_base 23: mod_base = OTHER; note = 2'-O-methylguanosine
acgttggccaggaagaagggcag

SEQ ID NO: 1485 - RNA, 23 nt, synthetic construct
  source 1..23: mol_type = other RNA
  modified_base 1: mod_base = OTHER; note = 2'-O-methyladenosine-3'-phosphorothioate
  modified_base 2: mod_base = OTHER; note = 2'-deoxy-2'-fluoroadenosine-3'-phosphorothioate
  modified_base 3: mod_base = OTHER; note = 2'-O-methylguanosine-3'-phosphate
  modified_base 4: mod_base = OTHER; note = 2'-O-methylguanosine-3'-phosphate
  modified_base 5: mod_base = OTHER; note = 2'-O-methylcytidine-3'-phosphate
  modified_base 6: mod_base = OTHER; note = 2'-deoxy-2'-fluorocytidine-3'-phosphate
  modified_base 7: mod_base = OTHER; note = 2'-O-methyluridine-3'-phosphate
  modified_base 8: mod_base = OTHER; note = 2'-deoxy-2'-fluorouridine-3'-phosphate
  modified_base 9: mod_base = OTHER; note = 2'-deoxy-2'-fluorocytidine-3'-phosphate
  modified_base 10: mod_base = OTHER; note = 2'-O-methyladenosine-3'-phosphate
  modified_base 11: mod_base = OTHER; note = 2'-O-methylcytidine-3'-phosphate
  modified_base 12: mod_base = OTHER; note = 2'-O-methylcytidine-3'-phosphate
  modified_base 13: mod_base = OTHER; note = 2'-O-methyladenosine-3'-phosphate
  modified_base 14: mod_base = OTHER; note = 2'-deoxy-2'-fluorocytidine-3'-phosphate
  modified_base 15: mod_base = OTHER; note = 2'-O-methylguanosine-3'-phosphate
  modified_base 16: mod_base = OTHER; note = 2'-deoxy-2'-fluorouridine-3'-phosphate
  modified_base 17: mod_base = OTHER; note = 2'-O-methyluridine-3'-phosphate
  modified_base 18: mod_base = OTHER; note = 2'-O-methylguanosine-3'-phosphate
  modified_base 19: mod_base = OTHER; note = 2'-O-methylguanosine-3'-phosphate
  modified_base 20: mod_base = OTHER; note = 2'-O-methylcytidine-3'-phosphate
  modified_base 21: mod_base = OTHER; note = 2'-O-methylcytidine-3'-phosphorothioate
  modified_base 22: mod_base = OTHER; note = 2'-O-methyladenosine-3'-phosphorothioate
  modified_base 23: mod_base = OTHER; note = 2'-O-methylguanosine
aaggccttcaccacgttggccag

SEQ ID NO: 1486 - RNA, 23 nt, synthetic construct
  source 1..23: mol_type = other RNA
  modified_base 1: mod_base = OTHER; note = 2'-O-methyladenosine-3'-phosphorothioate
  modified_base 2: mod_base = OTHER; note = 2'-deoxy-2'-fluoroadenosine-3'-phosphorothioate
  modified_base 3: mod_base = OTHER; note = 2'-O-methylguanosine-3'-phosphate
  modified_base 4: mod_base = OTHER; note = 2'-O-methylcytidine-3'-phosphate
  modified_base 5: mod_base = OTHER; note = 2'-O-methyluridine-3'-phosphate
  modified_base 6: mod_base = OTHER; note = 2'-deoxy-2'-fluorocytidine-3'-phosphate
  modified_base 7: mod_base = OTHER; note = 2'-O-methylguanosine-3'-phosphate
  modified_base 8: mod_base = OTHER; note = 2'-deoxy-2'-fluorocytidine-3'-phosphate
  modified_base 9: mod_base = OTHER; note = 2'-deoxy-2'-fluoroguanosine-3'-phosphate
  modified_base 10: mod_base = OTHER; note = 2'-O-methylguanosine-3'-phosphate
  modified_base 11: mod_base = OTHER; note = 2'-O-methyluridine-3'-phosphate
  modified_base 12: mod_base = OTHER; note = 2'-O-methylguanosine-3'-phosphate
  modified_base 13: mod_base = OTHER; note = 2'-O-methylguanosine-3'-phosphate
  modified_base 14: mod_base = OTHER; note = 2'-deoxy-2'-fluoroadenosine-3'-phosphate
  modified_base 15: mod_base = OTHER; note = 2'-O-methyladenosine-3'-phosphate
  modified_base 16: mod_base = OTHER; note = 2'-deoxy-2'-fluoroguanosine-3'-phosphate
  modified_base 17: mod_base = OTHER; note = 2'-O-methylguanosine-3'-phosphate
  modified_base 18: mod_base = OTHER; note = 2'-O-methylcytidine-3'-phosphate
  modified_base 19: mod_base = OTHER; note = 2'-O-methylcytidine-3'-phosphate
  modified_base 20: mod_base = OTHER; note = 2'-O-methyluridine-3'-phosphate
  modified_base 21: mod_base = OTHER; note = 2'-O-methyluridine-3'-phosphorothioate
  modified_base 22: mod_base = OTHER; note = 2'-O-methylcytidine-3'-phosphorothioate
  modified_base 23: mod_base = OTHER; note = 2'-O-methyladenosine
aagctcgcggtggaaggccttca

SEQ ID NO: 1487 - RNA, 23 nt, synthetic construct
  source 1..23: mol_type = other RNA
  modified_base 1: mod_base = OTHER; note = 2'-O-methyladenosine-3'-phosphorothioate
  modified_base 2: mod_base = OTHER; note = 2'-deoxy-2'-fluoroadenosine-3'-phosphorothioate
  modified_base 3: mod_base = OTHER; note = 2'-O-methylguanosine-3'-phosphate
  modified_base 4: mod_base = OTHER; note = 2'-O-methyluridine-3'-phosphate
  modified_base 5: mod_base = OTHER; note = 2'-O-methyluridine-3'-phosphate
  modified_base 6: mod_base = OTHER; note = 2'-deoxy-2'-fluoroguanosine-3'-phosphate
  modified_base 7: mod_base = OTHER; note = 2'-O-methyladenosine-3'-phosphate
  modified_base 8: mod_base = OTHER; note = 2'-deoxy-2'-fluoroadenosine-3'-phosphate
  modified_base 9: mod_base = OTHER; note = 2'-deoxy-2'-fluoroguanosine-3'-phosphate
  modified_base 10: mod_base = OTHER; note = 2'-O-methyladenosine-3'-phosphate
  modified_base 11: mod_base = OTHER; note = 2'-O-methyladenosine-3'-phosphate
  modified_base 12: mod_base = OTHER; note = 2'-O-methylguanosine-3'-phosphate
  modified_base 13: mod_base = OTHER; note = 2'-O-methyladenosine-3'-phosphate
  modified_base 14: mod_base = OTHER; note = 2'-deoxy-2'-fluorocytidine-3'-phosphate
  modified_base 15: mod_base = OTHER; note = 2'-O-methylguanosine-3'-phosphate
  modified_base 16: mod_base = OTHER; note = 2'-deoxy-2'-fluoroadenosine-3'-phosphate
  modified_base 17: mod_base = OTHER; note = 2'-O-methyladenosine-3'-phosphate
  modified_base 18: mod_base = OTHER; note = 2'-O-methylguanosine-3'-phosphate
  modified_base 19: mod_base = OTHER; note = 2'-O-methyladenosine-3'-phosphate
  modified_base 20: mod_base = OTHER; note = 2'-O-methylguanosine-3'-phosphate
  modified_base 21: mod_base = OTHER; note = 2'-O-methylguanosine-3'-phosphorothioate
  modified_base 22: mod_base = OTHER; note = 2'-O-methylcytidine-3'-phosphorothioate
  modified_base 23: mod_base = OTHER; note = 2'-O-methylguanosine
aagttgaagaagacgaagaggcg

SEQ ID NO: 1488 - RNA, 23 nt, synthetic construct
  source 1..23: mol_type = other RNA
  modified_base 1: mod_base = OTHER; note = 2'-O-methyladenosine-3'-phosphorothioate
  modified_base 2: mod_base = OTHER; note = 2'-deoxy-2'-fluoroadenosine-3'-phosphorothioate
  modified_base 3: mod_base = OTHER; note = 2'-O-methylguanosine-3'-phosphate
  modified_base 4: mod_base = OTHER; note = 2'-O-methylcytidine-3'-phosphate
  modified_base 5: mod_base = OTHER; note = 2'-O-methylcytidine-3'-phosphate
  modified_base 6: mod_base = OTHER; note = 2'-deoxy-2'-fluorocytidine-3'-phosphate
  modified_base 7: mod_base = OTHER; note = 2'-O-methyladenosine-3'-phosphate
  modified_base 8: mod_base = OTHER; note = 2'-deoxy-2'-fluoroguanosine-3'-phosphate
  modified_base 9: mod_base = OTHER; note = 2'-deoxy-2'-fluorocytidine-3'-phosphate
  modified_base 10: mod_base = OTHER; note = 2'-O-methylcytidine-3'-phosphate
  modified_base 11: mod_base = OTHER; note = 2'-O-methyladenosine-3'-phosphate
  modified_base 12: mod_base = OTHER; note = 2'-O-methylguanosine-3'-phosphate
  modified_base 13: mod_base = OTHER; note = 2'-O-methyluridine-3'-phosphate
  modified_base 14: mod_base = OTHER; note = 2'-deoxy-2'-fluorouridine-3'-phosphate
  modified_base 15: mod_base = OTHER; note = 2'-O-methylguanosine-3'-phosphate
  modified_base 16: mod_base = OTHER; note = 2'-deoxy-2'-fluoroadenosine-3'-phosphate
  modified_base 17: mod_base = OTHER; note = 2'-O-methyladenosine-3'-phosphate
  modified_base 18: mod_base = OTHER; note = 2'-O-methylguanosine-3'-phosphate
  modified_base 19: mod_base = OTHER; note = 2'-O-methyladenosine-3'-phosphate
  modified_base 20: mod_base = OTHER; note = 2'-O-methyladenosine-3'-phosphate
  modified_base 21: mod_base = OTHER; note = 2'-O-methylguanosine-3'-phosphorothioate
  modified_base 22: mod_base = OTHER; note = 2'-O-methyladenosine-3'-phosphorothioate
  modified_base 23: mod_base = OTHER; note = 2'-O-methylcytidine
aagcccagccagttgaagaagac

SEQ ID NO: 1489 - RNA, 23 nt, synthetic construct
  source 1..23: mol_type = other RNA
  modified_base 1: mod_base = OTHER; note = 2'-O-methyladenosine-3'-phosphorothioate
  modified_base 2: mod_base = OTHER; note = 2'-deoxy-2'-fluorouridine-3'-phosphorothioate
  modified_base 3: mod_base = OTHER; note = 2'-O-methyluridine-3'-phosphate
  modified_base 4: mod_base = OTHER; note = 2'-O-methylguanosine-3'-phosphate
  modified_base 5: mod_base = OTHER; note = 2'-O-methyladenosine-3'-phosphate
  modified_base 6: mod_base = OTHER; note = 2'-deoxy-2'-fluoroadenosine-3'-phosphate
  modified_base 7: mod_base = OTHER; note = 2'-O-methylguanosine-3'-phosphate
  modified_base 8: mod_base = OTHER; note = 2'-deoxy-2'-fluoroguanosine-3'-phosphate
  modified_base 9: mod_base = OTHER; note = 2'-deoxy-2'-fluorocytidine-3'-phosphate
  modified_base 10: mod_base = OTHER; note = 2'-O-methylcytidine-3'-phosphate
  modified_base 11: mod_base = OTHER; note = 2'-O-methylguanosine-3'-phosphate
  modified_base 12: mod_base = OTHER; note = 2'-O-methyladenosine-3'-phosphate
  modified_base 13: mod_base = OTHER; note = 2'-O-methylguanosine-3'-phosphate
  modified_base 14: mod_base = OTHER; note = 2'-deoxy-2'-fluorouridine-3'-phosphate
  modified_base 15: mod_base = OTHER; note = 2'-O-methyluridine-3'-phosphate
  modified_base 16: mod_base = OTHER; note = 2'-deoxy-2'-fluoroguanosine-3'-phosphate
  modified_base 17: mod_base = OTHER; note = 2'-O-methylguanosine-3'-phosphate
  modified_base 18: mod_base = OTHER; note = 2'-O-methylcytidine-3'-phosphate
  modified_base 19: mod_base = OTHER; note = 2'-O-methylguanosine-3'-phosphate
  modified_base 20: mod_base = OTHER; note = 2'-O-methyluridine-3'-phosphate
  modified_base 21: mod_base = OTHER; note = 2'-O-methyladenosine-3'-phosphorothioate
  modified_base 22: mod_base = OTHER; note = 2'-O-methylguanosine-3'-phosphorothioate
  modified_base 23: mod_base = OTHER; note = 2'-O-methylcytidine
attgaaggccgagttggcgtagc

SEQ ID NO: 1490 - RNA, 23 nt, synthetic construct
  source 1..23: mol_type = other RNA
  modified_base 1: mod_base = OTHER; note = 2'-O-methyladenosine-3'-phosphorothioate
  modified_base 2: mod_base = OTHER; note = 2'-deoxy-2'-fluoroguanosine-3'-phosphorothioate
  modified_base 3: mod_base = OTHER; note = 2'-O-methylguanosine-3'-phosphate
  modified_base 4: mod_base = OTHER; note = 2'-O-methylcytidine-3'-phosphate
  modified_base 5: mod_base = OTHER; note = 2'-O-methyluridine-3'-phosphate
  modified_base 6: mod_base = OTHER; note = 2'-deoxy-2'-fluoroguanosine-3'-phosphate
  modified_base 7: mod_base = OTHER; note = 2'-O-methylcytidine-3'-phosphate
  modified_base 8: mod_base = OTHER; note = 2'-deoxy-2'-fluoroguanosine-3'-phosphate
  modified_base 9: mod_base = OTHER; note = 2'-deoxy-2'-fluoroguanosine-3'-phosphate
  modified_base 10: mod_base = OTHER; note = 2'-O-methylcytidine-3'-phosphate
  modified_base 11: mod_base = OTHER; note = 2'-O-methyladenosine-3'-phosphate
  modified_base 12: mod_base = OTHER; note = 2'-O-methylguanosine-3'-phosphate
  modified_base 13: mod_base = OTHER; note = 2'-O-methyluridine-3'-phosphate
  modified_base 14: mod_base = OTHER; note = 2'-deoxy-2'-fluoroadenosine-3'-phosphate
  modified_base 15: mod_base = OTHER; note = 2'-O-methylguanosine-3'-phosphate
  modified_base 16: mod_base = OTHER; note = 2'-deoxy-2'-fluoroadenosine-3'-phosphate
  modified_base 17: mod_base = OTHER; note = 2'-O-methyluridine-3'-phosphate
  modified_base 18: mod_base = OTHER; note = 2'-O-methylguanosine-3'-phosphate
  modified_base 19: mod_base = OTHER; note = 2'-O-methyladenosine-3'-phosphate
  modified_base 20: mod_base = OTHER; note = 2'-O-methyluridine-3'-phosphate
  modified_base 21: mod_base = OTHER; note = 2'-O-methylguanosine-3'-phosphorothioate
  modified_base 22: mod_base = OTHER; note = 2'-O-methylguanosine-3'-phosphorothioate
  modified_base 23: mod_base = OTHER; note = 2'-O-methylguanosine
aggctgcggcagtagatgatggg

SEQ ID NO: 1491 - RNA, 23 nt, synthetic construct
  source 1..23: mol_type = other RNA
  modified_base 1: mod_base = OTHER; note = 2'-O-methyladenosine-3'-phosphorothioate
  modified_base 2: mod_base = OTHER; note = 2'-deoxy-2'-fluorocytidine-3'-phosphorothioate
  modified_base 3: mod_base = OTHER; note = 2'-O-methylcytidine-3'-phosphate
  modified_base 4: mod_base = OTHER; note = 2'-O-methyluridine-3'-phosphate
  modified_base 5: mod_base = OTHER; note = 2'-O-methylguanosine-3'-phosphate
  modified_base 6: mod_base = OTHER; note = 2'-deoxy-2'-fluoroguanosine-3'-phosphate
  modified_base 7: mod_base = OTHER; note = 2'-O-methyladenosine-3'-phosphate
  modified_base 8: mod_base = OTHER; note = 2'-deoxy-2'-fluoroadenosine-3'-phosphate
  modified_base 9: mod_base = OTHER; note = 2'-deoxy-2'-fluoroguanosine-3'-phosphate
  modified_base 10: mod_base = OTHER; note = 2'-O-methylguanosine-3'-phosphate
  modified_base 11: mod_base = OTHER; note = 2'-O-methylcytidine-3'-phosphate
  modified_base 12: mod_base = OTHER; note = 2'-O-methylcytidine-3'-phosphate
  modified_base 13: mod_base = OTHER; note = 2'-O-methyluridine-3'-phosphate
  modified_base 14: mod_base = OTHER; note = 2'-deoxy-2'-fluorouridine-3'-phosphate
  modified_base 15: mod_base = OTHER; note = 2'-O-methylguanosine-3'-phosphate
  modified_base 16: mod_base = OTHER; note = 2'-deoxy-2'-fluorocytidine-3'-phosphate
  modified_base 17: mod_base = OTHER; note = 2'-O-methylguanosine-3'-phosphate
  modified_base 18: mod_base = OTHER; note = 2'-O-methylguanosine-3'-phosphate
  modified_base 19: mod_base = OTHER; note = 2'-O-methyladenosine-3'-phosphate
  modified_base 20: mod_base = OTHER; note = 2'-O-methyladenosine-3'-phosphate
  modified_base 21: mod_base = OTHER; note = 2'-O-methylguanosine-3'-phosphorothioate
  modified_base 22: mod_base = OTHER; note = 2'-O-methyluridine-3'-phosphorothioate
  modified_base 23: mod_base = OTHER; note = 2'-O-methylcytidine
acctggaaggccttgcggaagtc

SEQ ID NO: 1492 - RNA, 23 nt, synthetic construct
  source 1..23: mol_type = other RNA
  modified_base 1: mod_base = OTHER; note = 2'-O-methyladenosine-3'-phosphorothioate
  modified_base 2: mod_base = OTHER; note = 2'-deoxy-2'-fluoroadenosine-3'-phosphorothioate
  modified_base 3: mod_base = OTHER; note = 2'-O-methylguanosine-3'-phosphate
  modified_base 4: mod_base = OTHER; note = 2'-O-methylcytidine-3'-phosphate
  modified_base 5: mod_base = OTHER; note = 2'-O-methyladenosine-3'-phosphate
  modified_base 6: mod_base = OTHER; note = 2'-deoxy-2'-fluoroguanosine-3'-phosphate
  modified_base 7: mod_base = OTHER; note = 2'-O-methyladenosine-3'-phosphate
  modified_base 8: mod_base = OTHER; note = 2'-deoxy-2'-fluoroguanosine-3'-phosphate
  modified_base 9: mod_base = OTHER; note = 2'-deoxy-2'-fluorocytidine-3'-phosphate
  modified_base 10: mod_base = OTHER; note = 2'-O-methyladenosine-3'-phosphate
  modified_base 11: mod_base = OTHER; note = 2'-O-methylguanosine-3'-phosphate
  modified_base 12: mod_base = OTHER; note = 2'-O-methyluridine-3'-phosphate
  modified_base 13: mod_base = OTHER; note = 2'-O-methylcytidine-3'-phosphate
  modified_base 14: mod_base = OTHER; note = 2'-deoxy-2'-fluorocytidine-3'-phosphate
  modified_base 15: mod_base = OTHER; note = 2'-O-methylcytidine-3'-phosphate
  modified_base 16: mod_base = OTHER; note = 2'-deoxy-2'-fluorouridine-3'-phosphate
  modified_base 17: mod_base = OTHER; note = 2'-O-methylguanosine-3'-phosphate
  modified_base 18: mod_base = OTHER; note = 2'-O-methylguanosine-3'-phosphate
  modified_base 19: mod_base = OTHER; note = 2'-O-methyladenosine-3'-phosphate
  modified_base 20: mod_base = OTHER; note = 2'-O-methyladenosine-3'-phosphate
  modified_base 21: mod_base = OTHER; note = 2'-O-methylguanosine-3'-phosphorothioate
  modified_base 22: mod_base = OTHER; note = 2'-O-methylguanosine-3'-phosphorothioate
  modified_base 23: mod_base = OTHER; note = 2'-O-methylcytidine
aagcagagcagtccctggaaggc

SEQ ID NO: 1493 - RNA, 23 nt, synthetic construct
  source 1..23: mol_type = other RNA
  modified_base 1: mod_base = OTHER; note = 2'-O-methyladenosine-3'-phosphorothioate
  modified_base 2: mod_base = OTHER; note = 2'-deoxy-2'-fluorocytidine-3'-phosphorothioate
  modified_base 3: mod_base = OTHER; note = 2'-O-methylcytidine-3'-phosphate
  modified_base 4: mod_base = OTHER; note = 2'-O-methylguanosine-3'-phosphate
  modified_base 5: mod_base = OTHER; note = 2'-O-methyladenosine-3'-phosphate
  modified_base 6: mod_base = OTHER; note = 2'-deoxy-2'-fluorocytidine-3'-phosphate
  modified_base 7: mod_base = OTHER; note = 2'-O-methylguanosine-3'-phosphate
  modified_base 8: mod_base = OTHER; note = 2'-deoxy-2'-fluoroadenosine-3'-phosphate
  modified_base 9: mod_base = OTHER; note = 2'-deoxy-2'-fluorocytidine-3'-phosphate
  modified_base 10: mod_base = OTHER; note = 2'-O-methyladenosine-3'-phosphate
  modified_base 11: mod_base = OTHER; note = 2'-O-methyluridine-3'-phosphate
  modified_base 12: mod_base = OTHER; note = 2'-O-methylcytidine-3'-phosphate
  modified_base 13: mod_base = OTHER; note = 2'-O-methylguanosine-3'-phosphate
  modified_base 14: mod_base = OTHER; note = 2'-deoxy-2'-fluorouridine-3'-phosphate
  modified_base 15: mod_base = OTHER; note = 2'-O-methylcytidine-3'-phosphate
  modified_base 16: mod_base = OTHER; note = 2'-deoxy-2'-fluoroguanosine-3'-phosphate
  modified_base 17: mod_base = OTHER; note = 2'-O-methyluridine-3'-phosphate
  modified_base 18: mod_base = OTHER; note = 2'-O-methylcytidine-3'-phosphate
  modified_base 19: mod_base = OTHER; note = 2'-O-methylguanosine-3'-phosphate
  modified_base 20: mod_base = OTHER; note = 2'-O-methyluridine-3'-phosphate
  modified_base 21: mod_base = OTHER; note = 2'-O-methylcytidine-3'-phosphorothioate
  modified_base 22: mod_base = OTHER; note = 2'-O-methylguanosine-3'-phosphorothioate
  modified_base 23: mod_base = OTHER; note = 2'-O-methyluridine
accgacgacatcgtcgtcgtcgt

SEQ ID NO: 1494 - RNA, 23 nt, synthetic construct
  source 1..23: mol_type = other RNA
  modified_base 1: mod_base = OTHER; note = 2'-O-methyladenosine-3'-phosphorothioate
  modified_base 2: mod_base = OTHER; note = 2'-deoxy-2'-fluorocytidine-3'-phosphorothioate
  modified_base 3: mod_base = OTHER; note = 2'-O-methyluridine-3'-phosphate
  modified_base 4: mod_base = OTHER; note = 2'-O-methyladenosine-3'-phosphate
  modified_base 5: mod_base = OTHER; note = 2'-O-methylcytidine-3'-phosphate
  modified_base 6: mod_base = OTHER; note = 2'-deoxy-2'-fluoroadenosine-3'-phosphate
  modified_base 7: mod_base = OTHER; note = 2'-O-methylcytidine-3'-phosphate
  modified_base 8: mod_base = OTHER; note = 2'-deoxy-2'-fluorocytidine-3'-phosphate
  modified_base 9: mod_base = OTHER; note = 2'-deoxy-2'-fluorouridine-3'-phosphate
  modified_base 10: mod_base = OTHER; note = 2'-O-methyluridine-3'-phosphate
  modified_base 11: mod_base = OTHER; note = 2'-O-methylguanosine-3'-phosphate
  modified_base 12: mod_base = OTHER; note = 2'-O-methylguanosine-3'-phosphate
  modified_base 13: mod_base = OTHER; note = 2'-O-methyladenosine-3'-phosphate
  modified_base 14: mod_base = OTHER; note = 2'-deoxy-2'-fluorouridine-3'-phosphate
  modified_base 15: mod_base = OTHER; note = 2'-O-methyluridine-3'-phosphate
  modified_base 16: mod_base = OTHER; note = 2'-deoxy-2'-fluorocytidine-3'-phosphate
  modified_base 17: mod_base = OTHER; note = 2'-O-methylcytidine-3'-phosphate
  modified_base 18: mod_base = OTHER; note = 2'-O-methylguanosine-3'-phosphate
  modified_base 19: mod_base = OTHER; note = 2'-O-methyladenosine-3'-phosphate
  modified_base 20: mod_base = OTHER; note = 2'-O-methylguanosine-3'-phosphate
  modified_base 21: mod_base = OTHER; note = 2'-O-methylguanosine-3'-phosphorothioate
  modified_base 22: mod_base = OTHER; note = 2'-O-methylcytidine-3'-phosphorothioate
  modified_base 23: mod_base = OTHER; note = 2'-O-methylguanosine
actacaccttggattccgaggcg

SEQ ID NO: 1495 - RNA, 23 nt, synthetic construct
  source 1..23: mol_type = other RNA
  modified_base 1: mod_base = OTHER; note = 2'-O-methyladenosine-3'-phosphorothioate
  modified_base 2: mod_base = OTHER; note = 2'-deoxy-2'-fluoroadenosine-3'-phosphorothioate
  modified_base 3: mod_base = OTHER; note = 2'-O-methyladenosine-3'-phosphate
  modified_base 4: mod_base = OTHER; note = 2'-O-methylguanosine-3'-phosphate
  modified_base 5: mod_base = OTHER; note = 2'-O-methyluridine-3'-phosphate
  modified_base 6: mod_base = OTHER; note = 2'-deoxy-2'-fluoroadenosine-3'-phosphate
  modified_base 7: mod_base = OTHER; note = 2'-O-methyladenosine-3'-phosphate
  modified_base 8: mod_base = OTHER; note = 2'-deoxy-2'-fluoroadenosine-3'-phosphate
  modified_base 9: mod_base = OTHER; note = 2'-deoxy-2'-fluorocytidine-3'-phosphate
  modified_base 10: mod_base = OTHER; note = 2'-O-methyladenosine-3'-phosphate
  modified_base 11: mod_base = OTHER; note = 2'-O-methylcytidine-3'-phosphate
  modified_base 12: mod_base = OTHER; note = 2'-O-methyladenosine-3'-phosphate
  modified_base 13: mod_base = OTHER; note = 2'-O-methylguanosine-3'-phosphate
  modified_base 14: mod_base = OTHER; note = 2'-deoxy-2'-fluoroadenosine-3'-phosphate
  modified_base 15: mod_base = OTHER; note = 2'-O-methyluridine-3'-phosphate
  modified_base 16: mod_base = OTHER; note = 2'-deoxy-2'-fluorocytidine-3'-phosphate
  modified_base 17: mod_base = OTHER; note = 2'-O-methyluridine-3'-phosphate
  modified_base 18: mod_base = OTHER; note = 2'-O-methylcytidine-3'-phosphate
  modified_base 19: mod_base = OTHER; note = 2'-O-methylcytidine-3'-phosphate
  modified_base 20: mod_base = OTHER; note = 2'-O-methyluridine-3'-phosphate
  modified_base 21: mod_base = OTHER; note = 2'-O-methylcytidine-3'-phosphorothioate
  modified_base 22: mod_base = OTHER; note = 2'-O-methylguanosine-3'-phosphorothioate
  modified_base 23: mod_base = OTHER; note = 2'-O-methyluridine
aaagtaaacacagatctcctcgt

SEQ ID NO: 1496 - RNA, 23 nt, synthetic construct
  source 1..23: mol_type = other RNA
  modified_base 1: mod_base = OTHER; note = 2'-O-methyladenosine-3'-phosphorothioate
  modified_base 2: mod_base = OTHER; note = 2'-deoxy-2'-fluorouridine-3'-phosphorothioate
  modified_base 3: mod_base = OTHER; note = 2'-O-methyladenosine-3'-phosphate
  modified_base 4: mod_base = OTHER; note = 2'-O-methyluridine-3'-phosphate
  modified_base 5: mod_base = OTHER; note = 2'-O-methylcytidine-3'-phosphate
  modified_base 6: mod_base = OTHER; note = 2'-deoxy-2'-fluoroguanosine-3'-phosphate
  modified_base 7: mod_base = OTHER; note = 2'-O-methylguanosine-3'-phosphate
  modified_base 8: mod_base = OTHER; note = 2'-deoxy-2'-fluorouridine-3'-phosphate
  modified_base 9: mod_base = OTHER; note = 2'-deoxy-2'-fluorocytidine-3'-phosphate
  modified_base 10: mod_base = OTHER; note = 2'-O-methyluridine-3'-phosphate
  modified_base 11: mod_base = OTHER; note = 2'-O-methyluridine-3'-phosphate
  modified_base 12: mod_base = OTHER; note = 2'-O-methyladenosine-3'-phosphate
  modified_base 13: mod_base = OTHER; note = 2'-O-methyladenosine-3'-phosphate
  modified_base 14: mod_base = OTHER; note = 2'-deoxy-2'-fluoroguanosine-3'-phosphate
  modified_base 15: mod_base = OTHER; note = 2'-O-methyluridine-3'-phosphate
  modified_base 16: mod_base = OTHER; note = 2'-deoxy-2'-fluoroadenosine-3'-phosphate
  modified_base 17: mod_base = OTHER; note = 2'-O-methyladenosine-3'-phosphate
  modified_base 18: mod_base = OTHER; note = 2'-O-methyladenosine-3'-phosphate
  modified_base 19: mod_base = OTHER; note = 2'-O-methylcytidine-3'-phosphate
  modified_base 20: mod_base = OTHER; note = 2'-O-methyladenosine-3'-phosphate
  modified_base 21: mod_base = OTHER; note = 2'-O-methylcytidine-3'-phosphorothioate
  modified_base 22: mod_base = OTHER; note = 2'-O-methyladenosine-3'-phosphorothioate
  modified_base 23: mod_base = OTHER; note = 2'-O-methylguanosine
atatcggtcttaagtaaacacag

SEQ ID NO: 1497 - RNA, 23 nt, synthetic construct
  source 1..23: mol_type = other RNA
  modified_base 1: mod_base = OTHER; note = 2'-O-methyladenosine-3'-phosphorothioate
  modified_base 2: mod_base = OTHER; note = 2'-deoxy-2'-fluorouridine-3'-phosphorothioate
  modified_base 3: mod_base = OTHER; note = 2'-O-methyluridine-3'-phosphate
  modified_base 4: mod_base = OTHER; note = 2'-O-methylcytidine-3'-phosphate
  modified_base 5: mod_base = OTHER; note = 2'-O-methyladenosine-3'-phosphate
  modified_base 6: mod_base = OTHER; note = 2'-deoxy-2'-fluorocytidine-3'-phosphate
  modified_base 7: mod_base = OTHER; note = 2'-O-methylcytidine-3'-phosphate
  modified_base 8: mod_base = OTHER; note = 2'-deoxy-2'-fluorouridine-3'-phosphate
  modified_base 9: mod_base = OTHER; note = 2'-deoxy-2'-fluoroguanosine-3'-phosphate
  modified_base 10: mod_base = OTHER; note = 2'-O-methylcytidine-3'-phosphate
  modified_base 11: mod_base = OTHER; note = 2'-O-methyluridine-3'-phosphate
  modified_base 12: mod_base = OTHER; note = 2'-O-methyladenosine-3'-phosphate
  modified_base 13: mod_base = OTHER; note = 2'-O-methyluridine-3'-phosphate
  modified_base 14: mod_base = OTHER; note = 2'-deoxy-2'-fluorocytidine-3'-phosphate
  modified_base 15: mod_base = OTHER; note = 2'-O-methylguanosine-3'-phosphate
  modified_base 16: mod_base = OTHER; note = 2'-deoxy-2'-fluoroguanosine-3'-phosphate
  modified_base 17: mod_base = OTHER; note = 2'-O-methyluridine-3'-phosphate
  modified_base 18: mod_base = OTHER; note = 2'-O-methylcytidine-3'-phosphate
  modified_base 19: mod_base = OTHER; note = 2'-O-methyluridine-3'-phosphate
  modified_base 20: mod_base = OTHER; note = 2'-O-methyluridine-3'-phosphate
  modified_base 21: mod_base = OTHER; note = 2'-O-methyladenosine-3'-phosphorothioate
  modified_base 22: mod_base = OTHER; note = 2'-O-methyladenosine-3'-phosphorothioate
  modified_base 23: mod_base = OTHER; note = 2'-O-methylguanosine
attcacctgctatcggtcttaag

SEQ ID NO: 1498 - RNA, 23 nt, synthetic construct
  source 1..23: mol_type = other RNA
  modified_base 1: mod_base = OTHER; note = 2'-O-methyladenosine-3'-phosphorothioate
  modified_base 2: mod_base = OTHER; note = 2'-deoxy-2'-fluoroguanosine-3'-phosphorothioate
  modified_base 3: mod_base = OTHER; note = 2'-O-methylguanosine-3'-phosphate
  modified_base 4: mod_base = OTHER; note = 2'-O-methylcytidine-3'-phosphate
  modified_base 5: mod_base = OTHER; note = 2'-O-methyluridine-3'-phosphate
  modified_base 6: mod_base = OTHER; note = 2'-deoxy-2'-fluorouridine-3'-phosphate
  modified_base 7: mod_base = OTHER; note = 2'-O-methylcytidine-3'-phosphate
  modified_base 8: mod_base = OTHER; note = 2'-deoxy-2'-fluoroguanosine-3'-phosphate
  modified_base 9: mod_base = OTHER; note = 2'-deoxy-2'-fluoroadenosine-3'-phosphate
  modified_base 10: mod_base = OTHER; note = 2'-O-methylguanosine-3'-phosphate
  modified_base 11: mod_base = OTHER; note = 2'-O-methyluridine-3'-phosphate
  modified_base 12: mod_base = OTHER; note = 2'-O-methyluridine-3'-phosphate
  modified_base 13: mod_base = OTHER; note = 2'-O-methylcytidine-3'-phosphate
  modified_base 14: mod_base = OTHER; note = 2'-deoxy-2'-fluoroadenosine-3'-phosphate
  modified_base 15: mod_base = OTHER; note = 2'-O-methylcytidine-3'-phosphate
  modified_base 16: mod_base = OTHER; note = 2'-deoxy-2'-fluorocytidine-3'-phosphate
  modified_base 17: mod_base = OTHER; note = 2'-O-methyluridine-3'-phosphate
  modified_base 18: mod_base = OTHER; note = 2'-O-methylguanosine-3'-phosphate
  modified_base 19: mod_base = OTHER; note = 2'-O-methylcytidine-3'-phosphate
  modified_base 20: mod_base = OTHER; note = 2'-O-methyluridine-3'-phosphate
  modified_base 21: mod_base = OTHER; note = 2'-O-methyladenosine-3'-phosphorothioate
  modified_base 22: mod_base = OTHER; note = 2'-O-methyluridine-3'-phosphorothioate
  modified_base 23: mod_base = OTHER; note = 2'-O-methylcytidine
aggcttcgagttcacctgctatc

SEQ ID NO: 1499 - RNA, 23 nt, synthetic construct
  source 1..23: mol_type = other RNA
  modified_base 1: mod_base = OTHER; note = 2'-O-methyladenosine-3'-phosphorothioate
  modified_base 2: mod_base = OTHER; note = 2'-deoxy-2'-fluoroadenosine-3'-phosphorothioate
  modified_base 3: mod_base = OTHER; note = 2'-O-methylguanosine-3'-phosphate
  modified_base 4: mod_base = OTHER; note = 2'-O-methyladenosine-3'-phosphate
  modified_base 5: mod_base = OTHER; note = 2'-O-methylcytidine-3'-phosphate
  modified_base 6: mod_base = OTHER; note = 2'-deoxy-2'-fluoroguanosine-3'-phosphate
  modified_base 7: mod_base = OTHER; note = 2'-O-methyladenosine-3'-phosphate
  modified_base 8: mod_base = OTHER; note = 2'-deoxy-2'-fluoroguanosine-3'-phosphate
  modified_base 9: mod_base = OTHER; note = 2'-deoxy-2'-fluoroguanosine-3'-phosphate
  modified_base 10: mod_base = OTHER; note = 2'-O-methyladenosine-3'-phosphate
  modified_base 11: mod_base = OTHER; note = 2'-O-methyluridine-3'-phosphate
  modified_base 12: mod_base = OTHER; note = 2'-O-methyluridine-3'-phosphate
  modified_base 13: mod_base = OTHER; note = 2'-O-methylguanosine-3'-phosphate
  modified_base 14: mod_base = OTHER; note = 2'-deoxy-2'-fluorouridine-3'-phosphate
  modified_base 15: mod_base = OTHER; note = 2'-O-methylguanosine-3'-phosphate
  modified_base 16: mod_base = OTHER; note = 2'-deoxy-2'-fluoroguanosine-3'-phosphate
  modified_base 17: mod_base = OTHER; note = 2'-O-methylguanosine-3'-phosphate
  modified_base 18: mod_base = OTHER; note = 2'-O-methylcytidine-3'-phosphate
  modified_base 19: mod_base = OTHER; note = 2'-O-methyluridine-3'-phosphate
  modified_base 20: mod_base = OTHER; note = 2'-O-methyluridine-3'-phosphate
  modified_base 21: mod_base = OTHER; note = 2'-O-methylcytidine-3'-phosphorothioate
  modified_base 22: mod_base = OTHER; note = 2'-O-methylguanosine-3'-phosphorothioate
  modified_base 23: mod_base = OTHER; note = 2'-O-methyladenosine
aagacgaggattgtgggcttcga

SEQ ID NO: 1500 - RNA, 23 nt, synthetic construct
  source 1..23: mol_type = other RNA
  modified_base 1: mod_base = OTHER; note = 2'-O-methyladenosine-3'-phosphorothioate
  modified_base 2: mod_base = OTHER; note = 2'-deoxy-2'-fluoroguanosine-3'-phosphorothioate
  modified_base 3: mod_base = OTHER; note = 2'-O-methylguanosine-3'-phosphate
  modified_base 4: mod_base = OTHER; note = 2'-O-methyladenosine-3'-phosphate
  modified_base 5: mod_base = OTHER; note = 2'-O-methyluridine-3'-phosphate
  modified_base 6: mod_base = OTHER; note = 2'-deoxy-2'-fluoroguanosine-3'-phosphate
  modified_base 7: mod_base = OTHER; note = 2'-O-methyladenosine-3'-phosphate
  modified_base 8: mod_base = OTHER; note = 2'-deoxy-2'-fluorouridine-3'-phosphate
  modified_base 9: mod_base = OTHER; note = 2'-deoxy-2'-fluorouridine-3'-phosphate
  modified_base 10: mod_base = OTHER; note = 2'-O-methylcytidine-3'-phosphate
  modified_base 11: mod_base = OTHER; note = 2'-O-methyladenosine-3'-phosphate
  modified_base 12: mod_base = OTHER; note = 2'-O-methylguanosine-3'-phosphate
  modified_base 13: mod_base = OTHER; note = 2'-O-methyladenosine-3'-phosphate
  modified_base 14: mod_base = OTHER; note = 2'-deoxy-2'-fluorocytidine-3'-phosphate
  modified_base 15: mod_base = OTHER; note = 2'-O-methylguanosine-3'-phosphate
  modified_base 16: mod_base = OTHER; note = 2'-deoxy-2'-fluoroadenosine-3'-phosphate
  modified_base 17: mod_base = OTHER; note = 2'-O-methylguanosine-3'-phosphate
  modified_base 18: mod_base = OTHER; note = 2'-O-methylguanosine-3'-phosphate
  modified_base 19: mod_base = OTHER; note = 2'-O-methyladenosine-3'-phosphate
  modified_base 20: mod_base = OTHER; note = 2'-O-methyluridine-3'-phosphate
  modified_base 21: mod_base = OTHER; note = 2'-O-methyluridine-3'-phosphorothioate
  modified_base 22: mod_base = OTHER; note = 2'-O-methylguanosine-3'-phosphorothioate
  modified_base 23: mod_base = OTHER; note = 2'-O-methyluridine
aggatgattcagacgaggattgt

SEQ ID NO: 1501 - RNA, 23 nt, synthetic construct
  source 1..23: mol_type = other RNA
  modified_base 1: mod_base = OTHER; note = 2'-O-methyladenosine-3'-phosphorothioate
  modified_base 2: mod_base = OTHER; note = 2'-deoxy-2'-fluorouridine-3'-phosphorothioate
  modified_base 3: mod_base = OTHER; note = 2'-O-methylcytidine-3'-phosphate
  modified_base 4: mod_base = OTHER; note = 2'-O-methyluridine-3'-phosphate
  modified_base 5: mod_base = OTHER; note = 2'-O-methyluridine-3'-phosphate
  modified_base 6: mod_base = OTHER; note = 2'-deoxy-2'-fluorouridine-3'-phosphate
  modified_base 7: mod_base = OTHER; note = 2'-O-methylguanosine-3'-phosphate
  modified_base 8: mod_base = OTHER; note = 2'-deoxy-2'-fluorocytidine-3'-phosphate
  modified_base 9: mod_base = OTHER; note = 2'-deoxy-2'-fluorocytidine-3'-phosphate
  modified_base 10: mod_base = OTHER; note = 2'-O-methyluridine-3'-phosphate
  modified_base 11: mod_base = OTHER; note = 2'-O-methylcytidine-3'-phosphate
  modified_base 12: mod_base = OTHER; note = 2'-O-methylguanosine-3'-phosphate
  modified_base 13: mod_base = OTHER; note = 2'-O-methylguanosine-3'-phosphate
  modified_base 14: mod_base = OTHER; note = 2'-deoxy-2'-fluoroadenosine-3'-phosphate
  modified_base 15: mod_base = OTHER; note = 2'-O-methyluridine-3'-phosphate
  modified_base 16: mod_base = OTHER; note = 2'-deoxy-2'-fluoroguanosine-3'-phosphate
  modified_base 17: mod_base = OTHER; note = 2'-O-methyladenosine-3'-phosphate
  modified_base 18: mod_base = OTHER; note = 2'-O-methyluridine-3'-phosphate
  modified_base 19: mod_base = OTHER; note = 2'-O-methyluridine-3'-phosphate
  modified_base 20: mod_base = OTHER; note = 2'-O-methylcytidine-3'-phosphate
  modified_base 21: mod_base = OTHER; note = 2'-O-methyladenosine-3'-phosphorothioate
  modified_base 22: mod_base = OTHER; note = 2'-O-methylguanosine-3'-phosphorothioate
  modified_base 23: mod_base = OTHER; note = 2'-O-methyladenosine
atctttgcctcggatgattcaga

SEQ ID NO: 1502 - RNA, 23 nt, synthetic construct
  source 1..23: mol_type = other RNA
  modified_base 1: mod_base = OTHER; note = 2'-O-methyladenosine-3'-phosphorothioate
  modified_base 2: mod_base = OTHER; note = 2'-deoxy-2'-fluoroguanosine-3'-phosphorothioate
  modified_base 3: mod_base = OTHER; note = 2'-O-methyluridine-3'-phosphate
  modified_base 4: mod_base = OTHER; note = 2'-O-methylguanosine-3'-phosphate
  modified_base 5: mod_base = OTHER; note = 2'-O-methylguanosine-3'-phosphate
  modified_base 6: mod_base = OTHER; note = 2'-deoxy-2'-fluorocytidine-3'-phosphate
  modified_base 7: mod_base = OTHER; note = 2'-O-methyluridine-3'-phosphate
  modified_base 8: mod_base = OTHER; note = 2'-deoxy-2'-fluorouridine-3'-phosphate
  modified_base 9: mod_base = OTHER; note = 2'-deoxy-2'-fluorouridine-3'-phosphate
  modified_base 10: mod_base = OTHER; note = 2'-O-methyluridine-3'-phosphate
  modified_base 11: mod_base = OTHER; note = 2'-O-methylcytidine-3'-phosphate
  modified_base 12: mod_base = OTHER; note = 2'-O-methyluridine-3'-phosphate
  modified_base 13: mod_base = OTHER; note = 2'-O-methylcytidine-3'-phosphate
  modified_base 14: mod_base = OTHER; note = 2'-deoxy-2'-fluorouridine-3'-phosphate
  modified_base 15: mod_base = OTHER; note = 2'-O-methyluridine-3'-phosphate
  modified_base 16: mod_base = OTHER; note = 2'-deoxy-2'-fluorouridine-3'-phosphate
  modified_base 17: mod_base = OTHER; note = 2'-O-methylguanosine-3'-phosphate
  modified_base 18: mod_base = OTHER; note = 2'-O-methylcytidine-3'-phosphate
  modified_base 19: mod_base = OTHER; note = 2'-O-methylcytidine-3'-phosphate
  modified_base 20: mod_base = OTHER; note = 2'-O-methyluridine-3'-phosphate
  modified_base 21: mod_base = OTHER; note = 2'-O-methylcytidine-3'-phosphorothioate
  modified_base 22: mod_base = OTHER; note = 2'-O-methylguanosine-3'-phosphorothioate
  modified_base 23: mod_base = OTHER; note = 2'-O-methylguanosine
agtggcttttctctttgcctcgg

SEQ ID NO: 1503 - RNA, 23 nt, synthetic construct
  source 1..23: mol_type = other RNA
  modified_base 1: mod_base = OTHER; note = 2'-O-methyladenosine-3'-phosphorothioate
  modified_base 2: mod_base = OTHER; note = 2'-deoxy-2'-fluorouridine-3'-phosphorothioate
  modified_base 3: mod_base = OTHER; note = 2'-O-methyluridine-3'-phosphate
  modified_base 4: mod_base = OTHER; note = 2'-O-methyluridine-3'-phosphate
  modified_base 5: mod_base = OTHER; note = 2'-O-methylguanosine-3'-phosphate
  modified_base 6: mod_base = OTHER; note = 2'-deoxy-2'-fluorouridine-3'-phosphate
  modified_base 7: mod_base = OTHER; note = 2'-O-methylguanosine-3'-phosphate
  modified_base 8: mod_base = OTHER; note = 2'-deoxy-2'-fluorocytidine-3'-phosphate
  modified_base 9: mod_base = OTHER; note = 2'-deoxy-2'-fluoroadenosine-3'-phosphate
  modified_base 10: mod_base = OTHER; note = 2'-O-methyladenosine-3'-phosphate
  modified_base 11: mod_base = OTHER; note = 2'-O-methylcytidine-3'-phosphate
  modified_base 12: mod_base = OTHER; note = 2'-O-methylguanosine-3'-phosphate
  modified_base 13: mod_base = OTHER; note = 2'-O-methylguanosine-3'-phosphate
  modified_base 14: mod_base = OTHER; note = 2'-deoxy-2'-fluorouridine-3'-phosphate
  modified_base 15: mod_base = OTHER; note = 2'-O-methylcytidine-3'-phosphate
  modified_base 16: mod_base = OTHER; note = 2'-deoxy-2'-fluorocytidine-3'-phosphate
  modified_base 17: mod_base = OTHER; note = 2'-O-methylguanosine-3'-phosphate
  modified_base 18: mod_base = OTHER; note = 2'-O-methyluridine-3'-phosphate
  modified_base 19: mod_base = OTHER; note = 2'-O-methylguanosine-3'-phosphate
  modified_base 20: mod_base = OTHER; note = 2'-O-methylguanosine-3'-phosphate
  modified_base 21: mod_base = OTHER; note = 2'-O-methylcytidine-3'-phosphorothioate
  modified_base 22: mod_base = OTHER; note = 2'-O-methyluridine-3'-phosphorothioate
  modified_base 23: mod_base = OTHER; note = 2'-O-methyluridine
atttgtgcaacggtccgtggctt

SEQ ID NO: 1504 - RNA, 23 nt, synthetic construct
  source 1..23: mol_type = other RNA
  modified_base 1: mod_base = OTHER; note = 2'-O-methyladenosine-3'-phosphorothioate
  modified_base 2: mod_base = OTHER; note = 2'-deoxy-2'-fluoroadenosine-3'-phosphorothioate
  modified_base 3: mod_base = OTHER; note = 2'-O-methyluridine-3'-phosphate
  modified_base 4: mod_base = OTHER; note = 2'-O-methylcytidine-3'-phosphate
  modified_base 5: mod_base = OTHER; note = 2'-O-methylcytidine-3'-phosphate
  modified_base 6: mod_base = OTHER; note = 2'-deoxy-2'-fluorocytidine-3'-phosphate
  modified_base 7: mod_base = OTHER; note = 2'-O-methyluridine-3'-phosphate
  modified_base 8: mod_base = OTHER; note = 2'-deoxy-2'-fluorouridine-3'-phosphate
  modified_base 9: mod_base = OTHER; note = 2'-deoxy-2'-fluorocytidine-3'-phosphate
  modified_base 10: mod_base = OTHER; note = 2'-O-methylcytidine-3'-phosphate
  modified_base 11: mod_base = OTHER; note = 2'-O-methylcytidine-3'-phosphate
  modified_base 12: mod_base = OTHER; note = 2'-O-methyladenosine-3'-phosphate
  modified_base 13: mod_base = OTHER; note = 2'-O-methyladenosine-3'-phosphate
  modified_base 14: mod_base = OTHER; note = 2'-deoxy-2'-fluoroadenosine-3'-phosphate
  modified_base 15: mod_base = OTHER; note = 2'-O-methylcytidine-3'-phosphate
  modified_base 16: mod_base = OTHER; note = 2'-deoxy-2'-fluorouridine-3'-phosphate
  modified_base 17: mod_base = OTHER; note = 2'-O-methyluridine-3'-phosphate
  modified_base 18: mod_base = OTHER; note = 2'-O-methyluridine-3'-phosphate
  modified_base 19: mod_base = OTHER; note = 2'-O-methylcytidine-3'-phosphate
  modified_base 20: mod_base = OTHER; note = 2'-O-methylcytidine-3'-phosphate
  modified_base 21: mod_base = OTHER; note = 2'-O-methyluridine-3'-phosphorothioate
  modified_base 22: mod_base = OTHER; note = 2'-O-methyluridine-3'-phosphorothioate
  modified_base 23: mod_base = OTHER; note = 2'-O-methyluridine
aatcccttcccaaactttccttt

SEQ ID NO: 1505 - RNA, 23 nt, synthetic construct
  source 1..23: mol_type = other RNA
  modified_base 1: mod_base = OTHER; note = 2'-O-methyladenosine-3'-phosphorothioate
  modified_base 2: mod_base = OTHER; note = 2'-deoxy-2'-fluoroadenosine-3'-phosphorothioate
  modified_base 3: mod_base = OTHER; note = 2'-O-methylcytidine-3'-phosphate
  modified_base 4: mod_base = OTHER; note = 2'-O-methyladenosine-3'-phosphate
  modified_base 5: mod_base = OTHER; note = 2'-O-methyluridine-3'-phosphate
  modified_base 6: mod_base = OTHER; note = 2'-deoxy-2'-fluorocytidine-3'-phosphate
  modified_base 7: mod_base = OTHER; note = 2'-O-methyladenosine-3'-phosphate
  modified_base 8: mod_base = OTHER; note = 2'-deoxy-2'-fluoroguanosine-3'-phosphate
  modified_base 9: mod_base = OTHER; note = 2'-deoxy-2'-fluorocytidine-3'-phosphate
  modified_base 10: mod_base = OTHER; note = 2'-O-methyladenosine-3'-phosphate
  modified_base 11: mod_base = OTHER; note = 2'-O-methyladenosine-3'-phosphate
  modified_base 12: mod_base = OTHER; note = 2'-O-methylguanosine-3'-phosphate
  modified_base 13: mod_base = OTHER; note = 2'-O-methylcytidine-3'-phosphate
  modified_base 14: mod_base = OTHER; note = 2'-deoxy-2'-fluorocytidine-3'-phosphate
  modified_base 15: mod_base = OTHER; note = 2'-O-methyladenosine-3'-phosphate
  modified_base 16: mod_base = OTHER; note = 2'-deoxy-2'-fluorocytidine-3'-phosphate
  modified_base 17: mod_base = OTHER; note = 2'-O-methyluridine-3'-phosphate
  modified_base 18: mod_base = OTHER; note = 2'-O-methylcytidine-3'-phosphate
  modified_base 19: mod_base = OTHER; note = 2'-O-methyluridine-3'-phosphate
  modified_base 20: mod_base = OTHER; note = 2'-O-methylcytidine-3'-phosphate
  modified_base 21: mod_base = OTHER; note = 2'-O-methylcytidine-3'-phosphorothioate
  modified_base 22: mod_base = OTHER; note = 2'-O-methylcytidine-3'-phosphorothioate
  modified_base 23: mod_base = OTHER; note = 2'-O-methyladenosine
aacatcagcaagccactctccca

SEQ ID NO: 1506 - RNA, 23 nt, synthetic construct
  source 1..23: mol_type = other RNA
  modified_base 1: mod_base = OTHER; note = 2'-O-methyladenosine-3'-phosphorothioate
  modified_base 2: mod_base = OTHER; note = 2'-deoxy-2'-fluoroadenosine-3'-phosphorothioate
  modified_base 3: mod_base = OTHER; note = 2'-O-methylcytidine-3'-phosphate
  modified_base 4: mod_base = OTHER; note = 2'-O-methyladenosine-3'-phosphate
  modified_base 5: mod_base = OTHER; note = 2'-O-methyladenosine-3'-phosphate
  modified_base 6: mod_base = OTHER; note = 2'-deoxy-2'-fluorocytidine-3'-phosphate
  modified_base 7: mod_base = OTHER; note = 2'-O-methyladenosine-3'-phosphate
  modified_base 8: mod_base = OTHER; note = 2'-deoxy-2'-fluoroadenosine-3'-phosphate
  modified_base 9: mod_base = OTHER; note = 2'-deoxy-2'-fluoroguanosine-3'-phosphate
  modified_base 10: mod_base = OTHER; note = 2'-O-methylguanosine-3'-phosphate
  modified_base 11: mod_base = OTHER; note = 2'-O-methyladenosine-3'-phosphate
  modified_base 12: mod_base = OTHER; note = 2'-O-methyladenosine-3'-phosphate
  modified_base 13: mod_base = OTHER; note = 2'-O-methylcytidine-3'-phosphate
  modified_base 14: mod_base = OTHER; note = 2'-deoxy-2'-fluoroadenosine-3'-phosphate
  modified_base 15: mod_base = OTHER; note = 2'-O-methyluridine-3'-phosphate
  modified_base 16: mod_base = OTHER; note = 2'-deoxy-2'-fluorocytidine-3'-phosphate
  modified_base 17: mod_base = OTHER; note = 2'-O-methyladenosine-3'-phosphate
  modified_base 18: mod_base = OTHER; note = 2'-O-methylguanosine-3'-phosphate
  modified_base 19: mod_base = OTHER; note = 2'-O-methylcytidine-3'-phosphate
  modified_base 20: mod_base = OTHER; note = 2'-O-methyladenosine-3'-phosphate
  modified_base 21: mod_base = OTHER; note = 2'-O-methyladenosine-3'-phosphorothioate
  modified_base 22: mod_base = OTHER; note = 2'-O-methylguanosine-3'-phosphorothioate
  modified_base 23: mod_base = OTHER; note = 2'-O-methylcytidine
aacaacaaggaacatcagcaagc

SEQ ID NO: 1507 - RNA, 23 nt, synthetic construct
  source 1..23: mol_type = other RNA
  modified_base 1: mod_base = OTHER; note = 2'-O-methyladenosine-3'-phosphorothioate
  modified_base 2: mod_base = OTHER; note = 2'-deoxy-2'-fluoroguanosine-3'-phosphorothioate
  modified_base 3: mod_base = OTHER; note = 2'-O-methylguanosine-3'-phosphate
  modified_base 4: mod_base = OTHER; note = 2'-O-methylcytidine-3'-phosphate
  modified_base 5: mod_base = OTHER; note = 2'-O-methylcytidine-3'-phosphate
  modified_base 6: mod_base = OTHER; note = 2'-deoxy-2'-fluoroguanosine-3'-phosphate
  modified_base 7: mod_base = OTHER; note = 2'-O-methylguanosine-3'-phosphate
  modified_base 8: mod_base = OTHER; note = 2'-deoxy-2'-fluoroadenosine-3'-phosphate
  modified_base 9: mod_base = OTHER; note = 2'-deoxy-2'-fluorocytidine-3'-phosphate
  modified_base 10: mod_base = OTHER; note = 2'-O-methylcytidine-3'-phosphate
  modified_base 11: mod_base = OTHER; note = 2'-O-methyladenosine-3'-phosphate
  modified_base 12: mod_base = OTHER; note = 2'-O-methylcytidine-3'-phosphate
  modified_base 13: mod_base = OTHER; note = 2'-O-methyladenosine-3'-phosphate
  modified_base 14: mod_base = OTHER; note = 2'-deoxy-2'-fluoroadenosine-3'-phosphate
  modified_base 15: mod_base = OTHER; note = 2'-O-methyladenosine-3'-phosphate
  modified_base 16: mod_base = OTHER; note = 2'-deoxy-2'-fluorocytidine-3'-phosphate
  modified_base 17: mod_base = OTHER; note = 2'-O-methyladenosine-3'-phosphate
  modified_base 18: mod_base = OTHER; note = 2'-O-methylguanosine-3'-phosphate
  modified_base 19: mod_base = OTHER; note = 2'-O-methyladenosine-3'-phosphate
  modified_base 20: mod_base = OTHER; note = 2'-O-methyladenosine-3'-phosphate
  modified_base 21: mod_base = OTHER; note = 2'-O-methyladenosine-3'-phosphorothioate
  modified_base 22: mod_base = OTHER; note = 2'-O-methyladenosine-3'-phosphorothioate
  modified_base 23: mod_base = OTHER; note = 2'-O-methyladenosine
aggccggaccacaaacagaaaaa

SEQ ID NO: 1508 - RNA, 23 nt, synthetic construct
  source 1..23: mol_type = other RNA
  modified_base 1: mod_base = OTHER; note = 2'-O-methyladenosine-3'-phosphorothioate
  modified_base 2: mod_base = OTHER; note = 2'-deoxy-2'-fluorocytidine-3'-phosphorothioate
  modified_base 3: mod_base = OTHER; note = 2'-O-methyladenosine-3'-phosphate
  modified_base 4: mod_base = OTHER; note = 2'-O-methylcytidine-3'-phosphate
  modified_base 5: mod_base = OTHER; note = 2'-O-methyladenosine-3'-phosphate
  modified_base 6: mod_base = OTHER; note = 2'-deoxy-2'-fluorocytidine-3'-phosphate
  modified_base 7: mod_base = OTHER; note = 2'-O-methyladenosine-3'-phosphate
  modified_base 8: mod_base = OTHER; note = 2'-deoxy-2'-fluoroadenosine-3'-phosphate
  modified_base 9: mod_base = OTHER; note = 2'-deoxy-2'-fluoroadenosine-3'-phosphate
  modified_base 10: mod_base = OTHER; note = 2'-O-methyladenosine-3'-phosphate
  modified_base 11: mod_base = OTHER; note = 2'-O-methylguanosine-3'-phosphate
  modified_base 12: mod_base = OTHER; note = 2'-O-methyladenosine-3'-phosphate
  modified_base 13: mod_base = OTHER; note = 2'-O-methyladenosine-3'-phosphate
  modified_base 14: mod_base = OTHER; note = 2'-deoxy-2'-fluoroguanosine-3'-phosphate
  modified_base 15: mod_base = OTHER; note = 2'-O-methylguanosine-3'-phosphate
  modified_base 16: mod_base = OTHER; note = 2'-deoxy-2'-fluorocytidine-3'-phosphate
  modified_base 17: mod_base = OTHER; note = 2'-O-methylcytidine-3'-phosphate
  modified_base 18: mod_base = OTHER; note = 2'-O-methylguanosine-3'-phosphate
  modified_base 19: mod_base = OTHER; note = 2'-O-methylguanosine-3'-phosphate
  modified_base 20: mod_base = OTHER; note = 2'-O-methyladenosine-3'-phosphate
  modified_base 21: mod_base = OTHER; note = 2'-O-methylcytidine-3'-phosphorothioate
  modified_base 22: mod_base = OTHER; note = 2'-O-methylcytidine-3'-phosphorothioate
  modified_base 23: mod_base = OTHER; note = 2'-O-methyladenosine
acacacaaaagaaggccggacca

SEQ ID NO: 1509 - RNA, 23 nt, synthetic construct
  source 1..23: mol_type = other RNA
  modified_base 1: mod_base = OTHER; note = 2'-O-methyladenosine-3'-phosphorothioate
  modified_base 2: mod_base = OTHER; note = 2'-deoxy-2'-fluorouridine-3'-phosphorothioate
  modified_base 3: mod_base = OTHER; note = 2'-O-methylcytidine-3'-phosphate
  modified_base 4: mod_base = OTHER; note = 2'-O-methyladenosine-3'-phosphate
  modified_base 5: mod_base = OTHER; note = 2'-O-methylcytidine-3'-phosphate
  modified_base 6: mod_base = OTHER; note = 2'-deoxy-2'-fluoroadenosine-3'-phosphate
  modified_base 7: mod_base = OTHER; note = 2'-O-methylcytidine-3'-phosphate
  modified_base 8: mod_base = OTHER; note = 2'-deoxy-2'-fluoroguanosine-3'-phosphate
  modified_base 9: mod_base = OTHER; note = 2'-deoxy-2'-fluorocytidine-3'-phosphate
  modified_base 10: mod_base = OTHER; note = 2'-O-methyladenosine-3'-phosphate
  modified_base 11: mod_base = OTHER; note = 2'-O-methylcytidine-3'-phosphate
  modified_base 12: mod_base = OTHER; note = 2'-O-methyladenosine-3'-phosphate
  modified_base 13: mod_base = OTHER; note = 2'-O-methylcytidine-3'-phosphate
  modified_base 14: mod_base = OTHER; note = 2'-deoxy-2'-fluoroadenosine-3'-phosphate
  modified_base 15: mod_base = OTHER; note = 2'-O-methylcytidine-3'-phosphate
  modified_base 16: mod_base = OTHER; note = 2'-deoxy-2'-fluoroadenosine-3'-phosphate
  modified_base 17: mod_base = OTHER; note = 2'-O-methyladenosine-3'-phosphate
  modified_base 18: mod_base = OTHER; note = 2'-O-methyladenosine-3'-phosphate
  modified_base 19: mod_base = OTHER; note = 2'-O-methyladenosine-3'-phosphate
  modified_base 20: mod_base = OTHER; note = 2'-O-methylguanosine-3'-phosphate
  modified_base 21: mod_base = OTHER; note = 2'-O-methyladenosine-3'-phosphorothioate
  modified_base 22: mod_base = OTHER; note = 2'-O-methyladenosine-3'-phosphorothioate
  modified_base 23: mod_base = OTHER; note = 2'-O-methylguanosine
atcacacgcacacacaaaagaag

SEQ ID NO: 1510 - RNA, 23 nt, synthetic construct
  source 1..23: mol_type = other RNA
  modified_base 1: mod_base = OTHER; note = 2'-O-methyladenosine-3'-phosphorothioate
  modified_base 2: mod_base = OTHER; note = 2'-deoxy-2'-fluoroadenosine-3'-phosphorothioate
  modified_base 3: mod_base = OTHER; note = 2'-O-methyladenosine-3'-phosphate
  modified_base 4: mod_base = OTHER; note = 2'-O-methyladenosine-3'-phosphate
  modified_base 5: mod_base = OTHER; note = 2'-O-methyladenosine-3'-phosphate
  modified_base 6: mod_base = OTHER; note = 2'-deoxy-2'-fluorouridine-3'-phosphate
  modified_base 7: mod_base = OTHER; note = 2'-O-methylcytidine-3'-phosphate
  modified_base 8: mod_base = OTHER; note = 2'-deoxy-2'-fluorouridine-3'-phosphate
  modified_base 9: mod_base = OTHER; note = 2'-deoxy-2'-fluoroadenosine-3'-phosphate
  modified_base 10: mod_base = OTHER; note = 2'-O-methyladenosine-3'-phosphate
  modified_base 11: mod_base = OTHER; note = 2'-O-methyladenosine-3'-phosphate
  modified_base 12: mod_base = OTHER; note = 2'-O-methylguanosine-3'-phosphate
  modified_base 13: mod_base = OTHER; note = 2'-O-methyladenosine-3'-phosphate
  modified_base 14: mod_base = OTHER; note = 2'-deoxy-2'-fluorouridine-3'-phosphate
  modified_base 15: mod_base = OTHER; note = 2'-O-methylguanosine-3'-phosphate
  modified_base 16: mod_base = OTHER; note = 2'-deoxy-2'-fluorocytidine-3'-phosphate
  modified_base 17: mod_base = OTHER; note = 2'-O-methyladenosine-3'-phosphate
  modified_base 18: mod_base = OTHER; note = 2'-O-methyluridine-3'-phosphate
  modified_base 19: mod_base = OTHER; note = 2'-O-methylcytidine-3'-phosphate
  modified_base 20: mod_base = OTHER; note = 2'-O-methyladenosine-3'-phosphate
  modified_base 21: mod_base = OTHER; note = 2'-O-methylcytidine-3'-phosphorothioate
  modified_base 22: mod_base = OTHER; note = 2'-O-methyladenosine-3'-phosphorothioate
  modified_base 23: mod_base = OTHER; note = 2'-O-methylcytidine
aaaaatctaaagatgcatcacac

SEQ ID NO: 1511 - RNA, 23 nt, synthetic construct
  source 1..23: mol_type = other RNA
  modified_base 1: mod_base = OTHER; note = 2'-O-methyladenosine-3'-phosphorothioate
  modified_base 2: mod_base = OTHER; note = 2'-deoxy-2'-fluoroadenosine-3'-phosphorothioate
  modified_base 3: mod_base = OTHER; note = 2'-O-methylguanosine-3'-phosphate
  modified_base 4: mod_base = OTHER; note = 2'-O-methyladenosine-3'-phosphate
  modified_base 5: mod_base = OTHER; note = 2'-O-methylguanosine-3'-phosphate
  modified_base 6: mod_base = OTHER; note = 2'-deoxy-2'-fluoroadenosine-3'-phosphate
  modified_base 7: mod_base = OTHER; note = 2'-O-methylguanosine-3'-phosphate
  modified_base 8: mod_base = OTHER; note = 2'-deoxy-2'-fluorouridine-3'-phosphate
  modified_base 9: mod_base = OTHER; note = 2'-deoxy-2'-fluoroguanosine-3'-phosphate
  modified_base 10: mod_base = OTHER; note = 2'-O-methyluridine-3'-phosphate
  modified_base 11: mod_base = OTHER; note = 2'-O-methylcytidine-3'-phosphate
  modified_base 12: mod_base = OTHER; note = 2'-O-methyladenosine-3'-phosphate
  modified_base 13: mod_base = OTHER; note = 2'-O-methyladenosine-3'-phosphate
  modified_base 14: mod_base = OTHER; note = 2'-deoxy-2'-fluoroadenosine-3'-phosphate
  modified_base 15: mod_base = OTHER; note = 2'-O-methyladenosine-3'-phosphate
  modified_base 16: mod_base = OTHER; note = 2'-deoxy-2'-fluoroadenosine-3'-phosphate
  modified_base 17: mod_base = OTHER; note = 2'-O-methylcytidine-3'-phosphate
  modified_base 18: mod_base = OTHER; note = 2'-O-methylcytidine-3'-phosphate
  modified_base 19: mod_base = OTHER; note = 2'-O-methyladenosine-3'-phosphate
  modified_base 20: mod_base = OTHER; note = 2'-O-methylcytidine-3'-phosphate
  modified_base 21: mod_base = OTHER; note = 2'-O-methylcytidine-3'-phosphorothioate
  modified_base 22: mod_base = OTHER; note = 2'-O-methyluridine-3'-phosphorothioate
  modified_base 23: mod_base = OTHER; note = 2'-O-methylguanosine
aagagagtgtcaaaaaccacctg

SEQ ID NO: 1512 - RNA, 23 nt, synthetic construct
  source 1..23: mol_type = other RNA
  modified_base 1: mod_base = OTHER; note = 2'-O-methyladenosine-3'-phosphorothioate
  modified_base 2: mod_base = OTHER; note = 2'-deoxy-2'-fluorocytidine-3'-phosphorothioate
  modified_base 3: mod_base = OTHER; note = 2'-O-methylguanosine-3'-phosphate
  modified_base 4: mod_base = OTHER; note = 2'-O-methylguanosine-3'-phosphate
  modified_base 5: mod_base = OTHER; note = 2'-O-methyluridine-3'-phosphate
  modified_base 6: mod_base = OTHER; note = 2'-deoxy-2'-fluorocytidine-3'-phosphate
  modified_base 7: mod_base = OTHER; note = 2'-O-methylcytidine-3'-phosphate
  modified_base 8: mod_base = OTHER; note = 2'-deoxy-2'-fluorouridine-3'-phosphate
  modified_base 9: mod_base = OTHER; note = 2'-deoxy-2'-fluorocytidine-3'-phosphate
  modified_base 10: mod_base = OTHER; note = 2'-O-methyluridine-3'-phosphate
  modified_base 11: mod_base = OTHER; note = 2'-O-methylcytidine-3'-phosphate
  modified_base 12: mod_base = OTHER; note = 2'-O-methyladenosine-3'-phosphate
  modified_base 13: mod_base = OTHER; note = 2'-O-methylguanosine-3'-phosphate
  modified_base 14: mod_base = OTHER; note = 2'-deoxy-2'-fluoroadenosine-3'-phosphate
  modified_base 15: mod_base = OTHER; note = 2'-O-methylguanosine-3'-phosphate
  modified_base 16: mod_base = OTHER; note = 2'-deoxy-2'-fluoroadenosine-3'-phosphate
  modified_base 17: mod_base = OTHER; note = 2'-O-methylguanosine-3'-phosphate
  modified_base 18: mod_base = OTHER; note = 2'-O-methyluridine-3'-phosphate
  modified_base 19: mod_base = OTHER; note = 2'-O-methylguanosine-3'-phosphate
  modified_base 20: mod_base = OTHER; note = 2'-O-methyluridine-3'-phosphate
  modified_base 21: mod_base = OTHER; note = 2'-O-methylcytidine-3'-phosphorothioate
  modified_base 22: mod_base = OTHER; note = 2'-O-methyladenosine-3'-phosphorothioate
  modified_base 23: mod_base = OTHER; note = 2'-O-methyladenosine
acggtcctctcagagagtgtcaa

SEQ ID NO: 1513 - RNA, 23 nt, synthetic construct
  source 1..23: mol_type = other RNA
  modified_base 1: mod_base = OTHER; note = 2'-O-methyladenosine-3'-phosphorothioate
  modified_base 2: mod_base = OTHER; note = 2'-deoxy-2'-fluoroadenosine-3'-phosphorothioate
  modified_base 3: mod_base = OTHER; note = 2'-O-methyladenosine-3'-phosphate
  modified_base 4: mod_base = OTHER; note = 2'-O-methylcytidine-3'-phosphate
  modified_base 5: mod_base = OTHER; note = 2'-O-methylcytidine-3'-phosphate
  modified_base 6: mod_base = OTHER; note = 2'-deoxy-2'-fluorocytidine-3'-phosphate
  modified_base 7: mod_base = OTHER; note = 2'-O-methyladenosine-3'-phosphate
  modified_base 8: mod_base = OTHER; note = 2'-deoxy-2'-fluorocytidine-3'-phosphate
  modified_base 9: mod_base = OTHER; note = 2'-deoxy-2'-fluorocytidine-3'-phosphate
  modified_base 10: mod_base = OTHER; note = 2'-O-methylcytidine-3'-phosphate
  modified_base 11: mod_base = OTHER; note = 2'-O-methyladenosine-3'-phosphate
  modified_base 12: mod_base = OTHER; note = 2'-O-methyluridine-3'-phosphate
  modified_base 13: mod_base = OTHER; note = 2'-O-methylcytidine-3'-phosphate
  modified_base 14: mod_base = OTHER; note = 2'-deoxy-2'-fluorouridine-3'-phosphate
  modified_base 15: mod_base = OTHER; note = 2'-O-methyluridine-3'-phosphate
  modified_base 16: mod_base = OTHER; note = 2'-deoxy-2'-fluorocytidine-3'-phosphate
  modified_base 17: mod_base = OTHER; note = 2'-O-methylcytidine-3'-phosphate
  modified_base 18: mod_base = OTHER; note = 2'-O-methyladenosine-3'-phosphate
  modified_base 19: mod_base = OTHER; note = 2'-O-methylcytidine-3'-phosphate
  modified_base 20: mod_base = OTHER; note = 2'-O-methyluridine-3'-phosphate
  modified_base 21: mod_base = OTHER; note = 2'-O-methylcytidine-3'-phosphorothioate
  modified_base 22: mod_base = OTHER; note = 2'-O-methylcytidine-3'-phosphorothioate
  modified_base 23: mod_base = OTHER; note = 2'-O-methylguanosine
aaacccacccatcttccactccg

SEQ ID NO: 1514 - RNA, 23 nt, synthetic construct
  source 1..23: mol_type = other RNA
  modified_base 1: mod_base = OTHER; note = 2'-O-methyladenosine-3'-phosphorothioate
  modified_base 2: mod_base = OTHER; note = 2'-deoxy-2'-fluorocytidine-3'-phosphorothioate
  modified_base 3: mod_base = OTHER; note = 2'-O-methylcytidine-3'-phosphate
  modified_base 4: mod_base = OTHER; note = 2'-O-methyluridine-3'-phosphate
  modified_base 5: mod_base = OTHER; note = 2'-O-methylcytidine-3'-phosphate
  modified_base 6: mod_base = OTHER; note = 2'-deoxy-2'-fluorocytidine-3'-phosphate
  modified_base 7: mod_base = OTHER; note = 2'-O-methyluridine-3'-phosphate
  modified_base 8: mod_base = OTHER; note = 2'-deoxy-2'-fluoroadenosine-3'-phosphate
  modified_base 9: mod_base = OTHER; note = 2'-deoxy-2'-fluoroadenosine-3'-phosphate
  modified_base 10: mod_base = OTHER; note = 2'-O-methyluridine-3'-phosphate
  modified_base 11: mod_base = OTHER; note = 2'-O-methylguanosine-3'-phosphate
  modified_base 12: mod_base = OTHER; note = 2'-O-methylcytidine-3'-phosphate
  modified_base 13: mod_base = OTHER; note = 2'-O-methyluridine-3'-phosphate
  modified_base 14: mod_base = OTHER; note = 2'-deoxy-2'-fluorouridine-3'-phosphate
  modified_base 15: mod_base = OTHER; note = 2'-O-methylcytidine-3'-phosphate
  modified_base 16: mod_base = OTHER; note = 2'-deoxy-2'-fluorouridine-3'-phosphate
  modified_base 17: mod_base = OTHER; note = 2'-O-methylcytidine-3'-phosphate
  modified_base 18: mod_base = OTHER; note = 2'-O-methylcytidine-3'-phosphate
  modified_base 19: mod_base = OTHER; note = 2'-O-methylcytidine-3'-phosphate
  modified_base 20: mod_base = OTHER; note = 2'-O-methyluridine-3'-phosphate
  modified_base 21: mod_base = OTHER; note = 2'-O-methyluridine-3'-phosphorothioate
  modified_base 22: mod_base = OTHER; note = 2'-O-methylcytidine-3'-phosphorothioate
  modified_base 23: mod_base = OTHER; note = 2'-O-methylcytidine
acctcctaatgcttctcccttcc

SEQ ID NO: 1515 - RNA, 23 nt, synthetic construct
  source 1..23: mol_type = other RNA
  modified_base 1: mod_base = OTHER; note = 2'-O-methyladenosine-3'-phosphorothioate
  modified_base 2: mod_base = OTHER; note = 2'-deoxy-2'-fluorocytidine-3'-phosphorothioate
  modified_base 3: mod_base = OTHER; note = 2'-O-methyladenosine-3'-phosphate
  modified_base 4: mod_base = OTHER; note = 2'-O-methylcytidine-3'-phosphate
  modified_base 5: mod_base = OTHER; note = 2'-O-methylguanosine-3'-phosphate
  modified_base 6: mod_base = OTHER; note = 2'-deoxy-2'-fluoroadenosine-3'-phosphate
  modified_base 7: mod_base = OTHER; note = 2'-O-methyluridine-3'-phosphate
  modified_base 8: mod_base = OTHER; note = 2'-deoxy-2'-fluoroguanosine-3'-phosphate
  modified_base 9: mod_base = OTHER; note = 2'-deoxy-2'-fluoroadenosine-3'-phosphate
  modified_base 10: mod_base = OTHER; note = 2'-O-methyluridine-3'-phosphate
  modified_base 11: mod_base = OTHER; note = 2'-O-methylcytidine-3'-phosphate
  modified_base 12: mod_base = OTHER; note = 2'-O-methylguanosine-3'-phosphate
  modified_base 13: mod_base = OTHER; note = 2'-O-methyladenosine-3'-phosphate
  modified_base 14: mod_base = OTHER; note = 2'-deoxy-2'-fluorouridine-3'-phosphate
  modified_base 15: mod_base = OTHER; note = 2'-O-methyluridine-3'-phosphate
  modified_base 16: mod_base = OTHER; note = 2'-deoxy-2'-fluorouridine-3'-phosphate
  modified_base 17: mod_base = OTHER; note = 2'-O-methyluridine-3'-phosphate
  modified_base 18: mod_base = OTHER; note = 2'-O-methyladenosine-3'-phosphate
  modified_base 19: mod_base = OTHER; note = 2'-O-methyladenosine-3'-phosphate
  modified_base 20: mod_base = OTHER; note = 2'-O-methyluridine-3'-phosphate
  modified_base 21: mod_base = OTHER; note = 2'-O-methylcytidine-3'-phosphorothioate
  modified_base 22: mod_base = OTHER; note = 2'-O-methylcytidine-3'-phosphorothioate
  modified_base 23: mod_base = OTHER; note = 2'-O-methylcytidine
acacgatgatcgattttaatccc

SEQ ID NO: 1516 - RNA, 23 nt, synthetic construct
  source 1..23: mol_type = other RNA
  modified_base 1: mod_base = OTHER; note = 2'-O-methyladenosine-3'-phosphorothioate
  modified_base 2: mod_base = OTHER; note = 2'-deoxy-2'-fluoroadenosine-3'-phosphorothioate
  modified_base 3: mod_base = OTHER; note = 2'-O-methyladenosine-3'-phosphate
  modified_base 4: mod_base = OTHER; note = 2'-O-methyladenosine-3'-phosphate
  modified_base 5: mod_base = OTHER; note = 2'-O-methylguanosine-3'-phosphate
  modified_base 6: mod_base = OTHER; note = 2'-deoxy-2'-fluoroguanosine-3'-phosphate
  modified_base 7: mod_base = OTHER; note = 2'-O-methylguanosine-3'-phosphate
  modified_base 8: mod_base = OTHER; note = 2'-deoxy-2'-fluoroadenosine-3'-phosphate
  modified_base 9: mod_base = OTHER; note = 2'-deoxy-2'-fluorouridine-3'-phosphate
  modified_base 10: mod_base = OTHER; note = 2'-O-methylguanosine-3'-phosphate
  modified_base 11: mod_base = OTHER; note = 2'-O-methylguanosine-3'-phosphate
  modified_base 12: mod_base = OTHER; note = 2'-O-methylguanosine-3'-phosphate
  modified_base 13: mod_base = OTHER; note = 2'-O-methyladenosine-3'-phosphate
  modified_base 14: mod_base = OTHER; note = 2'-deoxy-2'-fluoroguanosine-3'-phosphate
  modified_base 15: mod_base = OTHER; note = 2'-O-methylcytidine-3'-phosphate
  modified_base 16: mod_base = OTHER; note = 2'-deoxy-2'-fluorocytidine-3'-phosphate
  modified_base 17: mod_base = OTHER; note = 2'-O-methyladenosine-3'-phosphate
  modified_base 18: mod_base = OTHER; note = 2'-O-methylcytidine-3'-phosphate
  modified_base 19: mod_base = OTHER; note = 2'-O-methylguanosine-3'-phosphate
  modified_base 20: mod_base = OTHER; note = 2'-O-methyladenosine-3'-phosphate
  modified_base 21: mod_base = OTHER; note = 2'-O-methyluridine-3'-phosphorothioate
  modified_base 22: mod_base = OTHER; note = 2'-O-methylguanosine-3'-phosphorothioate
  modified_base 23: mod_base = OTHER; note = 2'-O-methyladenosine
aaaagggatgggagccacgatga

SEQ ID NO: 1517 - RNA, 23 nt, synthetic construct
  source 1..23: mol_type = other RNA
  modified_base 1: mod_base = OTHER; note = 2'-O-methyladenosine-3'-phosphorothioate
  modified_base 2: mod_base = OTHER; note = 2'-deoxy-2'-fluoroguanosine-3'-phosphorothioate
  modified_base 3: mod_base = OTHER; note = 2'-O-methyluridine-3'-phosphate
  modified_base 4: mod_base = OTHER; note = 2'-O-methyluridine-3'-phosphate
  modified_base 5: mod_base = OTHER; note = 2'-O-methylcytidine-3'-phosphate
  modified_base 6: mod_base = OTHER; note = 2'-deoxy-2'-fluorocytidine-3'-phosphate
  modified_base 7: mod_base = OTHER; note = 2'-O-methylcytidine-3'-phosphate
  modified_base 8: mod_base = OTHER; note = 2'-deoxy-2'-fluoroguanosine-3'-phosphate
  modified_base 9: mod_base = OTHER; note = 2'-deoxy-2'-fluoroguanosine-3'-phosphate
  modified_base 10: mod_base = OTHER; note = 2'-O-methylguanosine-3'-phosphate
  modified_base 11: mod_base = OTHER; note = 2'-O-methyladenosine-3'-phosphate
  modified_base 12: mod_base = OTHER; note = 2'-O-methyladenosine-3'-phosphate
  modified_base 13: mod_base = OTHER; note = 2'-O-methyladenosine-3'-phosphate
  modified_base 14: mod_base = OTHER; note = 2'-deoxy-2'-fluoroguanosine-3'-phosphate
  modified_base 15: mod_base = OTHER; note = 2'-O-methylguanosine-3'-phosphate
  modified_base 16: mod_base = OTHER; note = 2'-deoxy-2'-fluoroguanosine-3'-phosphate
  modified_base 17: mod_base = OTHER; note = 2'-O-methyladenosine-3'-phosphate
  modified_base 18: mod_base = OTHER; note = 2'-O-methyluridine-3'-phosphate
  modified_base 19: mod_base = OTHER; note = 2'-O-methylguanosine-3'-phosphate
  modified_base 20: mod_base = OTHER; note = 2'-O-methylguanosine-3'-phosphate
  modified_base 21: mod_base = OTHER; note = 2'-O-methylguanosine-3'-phosphorothioate
  modified_base 22: mod_base = OTHER; note = 2'-O-methyladenosine-3'-phosphorothioate
  modified_base 23: mod_base = OTHER; note = 2'-O-methylguanosine
agttcccgggaaagggatgggag

SEQ ID NO: 1518 - RNA, 23 nt, synthetic construct
  source 1..23: mol_type = other RNA
  modified_base 1: mod_base = OTHER; note = 2'-O-methyladenosine-3'-phosphorothioate
  modified_base 2: mod_base = OTHER; note = 2'-deoxy-2'-fluoroguanosine-3'-phosphorothioate
  modified_base 3: mod_base = OTHER; note = 2'-O-methyluridine-3'-phosphate
  modified_base 4: mod_base = OTHER; note = 2'-O-methyladenosine-3'-phosphate
  modified_base 5: mod_base = OTHER; note = 2'-O-methylguanosine-3'-phosphate
  modified_base 6: mod_base = OTHER; note = 2'-deoxy-2'-fluorouridine-3'-phosphate
  modified_base 7: mod_base = OTHER; note = 2'-O-methylguanosine-3'-phosphate
  modified_base 8: mod_base = OTHER; note = 2'-deoxy-2'-fluorouridine-3'-phosphate
  modified_base 9: mod_base = OTHER; note = 2'-deoxy-2'-fluoroguanosine-3'-phosphate
  modified_base 10: mod_base = OTHER; note = 2'-O-methyluridine-3'-phosphate
  modified_base 11: mod_base = OTHER; note = 2'-O-methyluridine-3'-phosphate
  modified_base 12: mod_base = OTHER; note = 2'-O-methylcytidine-3'-phosphate
  modified_base 13: mod_base = OTHER; note = 2'-O-methylcytidine-3'-phosphate
  modified_base 14: mod_base = OTHER; note = 2'-deoxy-2'-fluorouridine-3'-phosphate
  modified_base 15: mod_base = OTHER; note = 2'-O-methylguanosine-3'-phosphate
  modified_base 16: mod_base = OTHER; note = 2'-deoxy-2'-fluorouridine-3'-phosphate
  modified_base 17: mod_base = OTHER; note = 2'-O-methyluridine-3'-phosphate
  modified_base 18: mod_base = OTHER; note = 2'-O-methylcytidine-3'-phosphate
  modified_base 19: mod_base = OTHER; note = 2'-O-methylcytidine-3'-phosphate
  modified_base 20: mod_base = OTHER; note = 2'-O-methylcytidine-3'-phosphate
  modified_base 21: mod_base = OTHER; note = 2'-O-methylguanosine-3'-phosphorothioate
  modified_base 22: mod_base = OTHER; note = 2'-O-methylguanosine-3'-phosphorothioate
  modified_base 23: mod_base = OTHER; note = 2'-O-methylguanosine
agtagtgtgttcctgttcccggg

SEQ ID NO: 1519 - RNA, 23 nt, synthetic construct
  source 1..23: mol_type = other RNA
  modified_base 1: mod_base = OTHER; note = 2'-O-methyladenosine-3'-phosphorothioate
  modified_base 2: mod_base = OTHER; note = 2'-deoxy-2'-fluorocytidine-3'-phosphorothioate
  modified_base 3: mod_base = OTHER; note = 2'-O-methyluridine-3'-phosphate
  modified_base 4: mod_base = OTHER; note = 2'-O-methylcytidine-3'-phosphate
  modified_base 5: mod_base = OTHER; note = 2'-O-methyluridine-3'-phosphate
  modified_base 6: mod_base = OTHER; note = 2'-deoxy-2'-fluoroguanosine-3'-phosphate
  modified_base 7: mod_base = OTHER; note = 2'-O-methylguanosine-3'-phosphate
  modified_base 8: mod_base = OTHER; note = 2'-deoxy-2'-fluorocytidine-3'-phosphate
  modified_base 9: mod_base = OTHER; note = 2'-deoxy-2'-fluorouridine-3'-phosphate
  modified_base 10: mod_base = OTHER; note = 2'-O-methylguanosine-3'-phosphate
  modified_base 11: mod_base = OTHER; note = 2'-O-methylguanosine-3'-phosphate
  modified_base 12: mod_base = OTHER; note = 2'-O-methyluridine-3'-phosphate
  modified_base 13: mod_base = OTHER; note = 2'-O-methyladenosine-3'-phosphate
  modified_base 14: mod_base = OTHER; note = 2'-deoxy-2'-fluoroguanosine-3'-phosphate
  modified_base 15: mod_base = OTHER; note = 2'-O-methyluridine-3'-phosphate
  modified_base 16: mod_base = OTHER; note = 2'-deoxy-2'-fluoroguanosine-3'-phosphate
  modified_base 17: mod_base = OTHER; note = 2'-O-methyluridine-3'-phosphate
  modified_base 18: mod_base = OTHER; note = 2'-O-methylguanosine-3'-phosphate
  modified_base 19: mod_base = OTHER; note = 2'-O-methyluridine-3'-phosphate
  modified_base 20: mod_base = OTHER; note = 2'-O-methyluridine-3'-phosphate
  modified_base 21: mod_base = OTHER; note = 2'-O-methylcytidine-3'-phosphorothioate
  modified_base 22: mod_base = OTHER; note = 2'-O-methylcytidine-3'-phosphorothioate
  modified_base 23: mod_base = OTHER; note = 2'-O-methyluridine
actctggctggtagtgtgttcct

SEQ ID NO: 1520 - RNA, 23 nt, synthetic construct
  source 1..23: mol_type = other RNA
  modified_base 1: mod_base = OTHER; note = 2'-O-methyladenosine-3'-phosphorothioate
  modified_base 2: mod_base = OTHER; note = 2'-deoxy-2'-fluorouridine-3'-phosphorothioate
  modified_base 3: mod_base = OTHER; note = 2'-O-methyluridine-3'-phosphate
  modified_base 4: mod_base = OTHER; note = 2'-O-methylcytidine-3'-phosphate
  modified_base 5: mod_base = OTHER; note = 2'-O-methyluridine-3'-phosphate
  modified_base 6: mod_base = OTHER; note = 2'-deoxy-2'-fluorocytidine-3'-phosphate
  modified_base 7: mod_base = OTHER; note = 2'-O-methylcytidine-3'-phosphate
  modified_base 8: mod_base = OTHER; note = 2'-deoxy-2'-fluorouridine-3'-phosphate
  modified_base 9: mod_base = OTHER; note = 2'-deoxy-2'-fluorocytidine-3'-phosphate
  modified_base 10: mod_base = OTHER; note = 2'-O-methyluridine-3'-phosphate
  modified_base 11: mod_base = OTHER; note = 2'-O-methylcytidine-3'-phosphate
  modified_base 12: mod_base = OTHER; note = 2'-O-methyluridine-3'-phosphate
  modified_base 13: mod_base = OTHER; note = 2'-O-methylcytidine-3'-phosphate
  modified_base 14: mod_base = OTHER; note = 2'-deoxy-2'-fluorouridine-3'-phosphate
  modified_base 15: mod_base = OTHER; note = 2'-O-methylguanosine-3'-phosphate
  modified_base 16: mod_base = OTHER; note = 2'-deoxy-2'-fluoroguanosine-3'-phosphate
  modified_base 17: mod_base = OTHER; note = 2'-O-methylcytidine-3'-phosphate
  modified_base 18: mod_base = OTHER; note = 2'-O-methyluridine-3'-phosphate
  modified_base 19: mod_base = OTHER; note = 2'-O-methylguanosine-3'-phosphate
  modified_base 20: mod_base = OTHER; note = 2'-O-methylguanosine-3'-phosphate
  modified_base 21: mod_base = OTHER; note = 2'-O-methyluridine-3'-phosphorothioate
  modified_base 22: mod_base = OTHER; note = 2'-O-methyladenosine-3'-phosphorothioate
  modified_base 23: mod_base = OTHER; note = 2'-O-methylguanosine
attctcctctctctggctggtag

SEQ ID NO: 1521 - RNA, 23 nt, synthetic construct
  source 1..23: mol_type = other RNA
  modified_base 1: mod_base = OTHER; note = 2'-O-methyladenosine-3'-phosphorothioate
  modified_base 2: mod_base = OTHER; note = 2'-deoxy-2'-fluoroadenosine-3'-phosphorothioate
  modified_base 3: mod_base = OTHER; note = 2'-O-methyladenosine-3'-phosphate
  modified_base 4: mod_base = OTHER; note = 2'-O-methyladenosine-3'-phosphate
  modified_base 5: mod_base = OTHER; note = 2'-O-methylcytidine-3'-phosphate
  modified_base 6: mod_base = OTHER; note = 2'-deoxy-2'-fluorouridine-3'-phosphate
  modified_base 7: mod_base = OTHER; note = 2'-O-methylguanosine-3'-phosphate
  modified_base 8: mod_base = OTHER; note = 2'-deoxy-2'-fluorouridine-3'-phosphate
  modified_base 9: mod_base = OTHER; note = 2'-deoxy-2'-fluorocytidine-3'-phosphate
  modified_base 10: mod_base = OTHER; note = 2'-O-methyladenosine-3'-phosphate
  modified_base 11: mod_base = OTHER; note = 2'-O-methyluridine-3'-phosphate
  modified_base 12: mod_base = OTHER; note = 2'-O-methyluridine-3'-phosphate
  modified_base 13: mod_base = OTHER; note = 2'-O-methylcytidine-3'-phosphate
  modified_base 14: mod_base = OTHER; note = 2'-deoxy-2'-fluorouridine-3'-phosphate
  modified_base 15: mod_base = OTHER; note = 2'-O-methylcytidine-3'-phosphate
  modified_base 16: mod_base = OTHER; note = 2'-deoxy-2'-fluorocytidine-3'-phosphate
  modified_base 17: mod_base = OTHER; note = 2'-O-methyluridine-3'-phosphate
  modified_base 18: mod_base = OTHER; note = 2'-O-methylcytidine-3'-phosphate
  modified_base 19: mod_base = OTHER; note = 2'-O-methyluridine-3'-phosphate
  modified_base 20: mod_base = OTHER; note = 2'-O-methylcytidine-3'-phosphate
  modified_base 21: mod_base = OTHER; note = 2'-O-methyluridine-3'-phosphorothioate
  modified_base 22: mod_base = OTHER; note = 2'-O-methylcytidine-3'-phosphorothioate
  modified_base 23: mod_base = OTHER; note = 2'-O-methyluridine
aaaactgtcattctcctctctct

SEQ ID NO: 1522 - RNA, 23 nt, synthetic construct
  source 1..23: mol_type = other RNA
  modified_base 1: mod_base = OTHER; note = 2'-O-methyladenosine-3'-phosphorothioate
  modified_base 2: mod_base = OTHER; note = 2'-deoxy-2'-fluoroadenosine-3'-phosphorothioate
  modified_base 3: mod_base = OTHER; note = 2'-O-methyluridine-3'-phosphate
  modified_base 4: mod_base = OTHER; note = 2'-O-methylguanosine-3'-phosphate
  modified_base 5: mod_base = OTHER; note = 2'-O-methyluridine-3'-phosphate
  modified_base 6: mod_base = OTHER; note = 2'-deoxy-2'-fluorocytidine-3'-phosphate
  modified_base 7: mod_base = OTHER; note = 2'-O-methyluridine-3'-phosphate
  modified_base 8: mod_base = OTHER; note = 2'-deoxy-2'-fluorouridine-3'-phosphate
  modified_base 9: mod_base = OTHER; note = 2'-deoxy-2'-fluoroguanosine-3'-phosphate
  modified_base 10: mod_base = OTHER; note = 2'-O-methyladenosine-3'-phosphate
  modified_base 11: mod_base = OTHER; note = 2'-O-methylcytidine-3'-phosphate
  modified_base 12: mod_base = OTHER; note = 2'-O-methyladenosine-3'-phosphate
  modified_base 13: mod_base = OTHER; note = 2'-O-methyladenosine-3'-phosphate
  modified_base 14: mod_base = OTHER; note = 2'-deoxy-2'-fluoroadenosine-3'-phosphate
  modified_base 15: mod_base = OTHER; note = 2'-O-methylcytidine-3'-phosphate
  modified_base 16: mod_base = OTHER; note = 2'-deoxy-2'-fluorouridine-3'-phosphate
  modified_base 17: mod_base = OTHER; note = 2'-O-methylguanosine-3'-phosphate
  modified_base 18: mod_base = OTHER; note = 2'-O-methyluridine-3'-phosphate
  modified_base 19: mod_base = OTHER; note = 2'-O-methylcytidine-3'-phosphate
  modified_base 20: mod_base = OTHER; note = 2'-O-methyladenosine-3'-phosphate
  modified_base 21: mod_base = OTHER; note = 2'-O-methyluridine-3'-phosphorothioate
  modified_base 22: mod_base = OTHER; note = 2'-O-methyluridine-3'-phosphorothioate
  modified_base 23: mod_base = OTHER; note = 2'-O-methylcytidine
aatgtcttgacaaactgtcattc

SEQ ID NO: 1523 - RNA, 23 nt, synthetic construct
  source 1..23: mol_type = other RNA
  modified_base 1: mod_base = OTHER; note = 2'-O-methyladenosine-3'-phosphorothioate
  modified_base 2: mod_base = OTHER; note = 2'-deoxy-2'-fluoroadenosine-3'-phosphorothioate
  modified_base 3: mod_base = OTHER; note = 2'-O-methylguanosine-3'-phosphate
  modified_base 4: mod_base = OTHER; note = 2'-O-methylcytidine-3'-phosphate
  modified_base 5: mod_base = OTHER; note = 2'-O-methyladenosine-3'-phosphate
  modified_base 6: mod_base = OTHER; note = 2'-deoxy-2'-fluoroadenosine-3'-phosphate
  modified_base 7: mod_base = OTHER; note = 2'-O-methyladenosine-3'-phosphate
  modified_base 8: mod_base = OTHER; note = 2'-deoxy-2'-fluoroadenosine-3'-phosphate
  modified_base 9: mod_base = OTHER; note = 2'-deoxy-2'-fluoroguanosine-3'-phosphate
  modified_base 10: mod_base = OTHER; note = 2'-O-methylguanosine-3'-phosphate
  modified_base 11: mod_base = OTHER; note = 2'-O-methyladenosine-3'-phosphate
  modified_base 12: mod_base = OTHER; note = 2'-O-methyladenosine-3'-phosphate
  modified_base 13: mod_base = OTHER; note = 2'-O-methyladenosine-3'-phosphate
  modified_base 14: mod_base = OTHER; note = 2'-deoxy-2'-fluorouridine-3'-phosphate
  modified_base 15: mod_base = OTHER; note = 2'-O-methyladenosine-3'-phosphate
  modified_base 16: mod_base = OTHER; note = 2'-deoxy-2'-fluorouridine-3'-phosphate
  modified_base 17: mod_base = OTHER; note = 2'-O-methylguanosine-3'-phosphate
  modified_base 18: mod_base = OTHER; note = 2'-O-methyluridine-3'-phosphate
  modified_base 19: mod_base = OTHER; note = 2'-O-methylcytidine-3'-phosphate
  modified_base 20: mod_base = OTHER; note = 2'-O-methyluridine-3'-phosphate
  modified_base 21: mod_base = OTHER; note = 2'-O-methyluridine-3'-phosphorothioate
  modified_base 22: mod_base = OTHER; note = 2'-O-methylguanosine-3'-phosphorothioate
  modified_base 23: mod_base = OTHER; note = 2'-O-methyladenosine
aagcaaaaggaaatatgtcttga

SEQ ID NO: 1524 - RNA, 23 nt, synthetic construct
  source 1..23: mol_type = other RNA
  modified_base 1: mod_base = OTHER; note = 2'-O-methyladenosine-3'-phosphorothioate
  modified_base 2: mod_base = OTHER; note = 2'-deoxy-2'-fluorouridine-3'-phosphorothioate
  modified_base 3: mod_base = OTHER; note = 2'-O-methyluridine-3'-phosphate
  modified_base 4: mod_base = OTHER; note = 2'-O-methyluridine-3'-phosphate
  modified_base 5: mod_base = OTHER; note = 2'-O-methylcytidine-3'-phosphate
  modified_base 6: mod_base = OTHER; note = 2'-deoxy-2'-fluorouridine-3'-phosphate
  modified_base 7: mod_base = OTHER; note = 2'-O-methylcytidine-3'-phosphate
  modified_base 8: mod_base = OTHER; note = 2'-deoxy-2'-fluorouridine-3'-phosphate
  modified_base 9: mod_base = OTHER; note = 2'-deoxy-2'-fluoroguanosine-3'-phosphate
  modified_base 10: mod_base = OTHER; note = 2'-O-methylguanosine-3'-phosphate
  modified_base 11: mod_base = OTHER; note = 2'-O-methyladenosine-3'-phosphate
  modified_base 12: mod_base = OTHER; note = 2'-O-methyladenosine-3'-phosphate
  modified_base 13: mod_base = OTHER; note = 2'-O-methyladenosine-3'-phosphate
  modified_base 14: mod_base = OTHER; note = 2'-deoxy-2'-fluoroguanosine-3'-phosphate
  modified_base 15: mod_base = OTHER; note = 2'-O-methylcytidine-3'-phosphate
  modified_base 16: mod_base = OTHER; note = 2'-deoxy-2'-fluoroadenosine-3'-phosphate
  modified_base 17: mod_base = OTHER; note = 2'-O-methyladenosine-3'-phosphate
  modified_base 18: mod_base = OTHER; note = 2'-O-methyladenosine-3'-phosphate
  modified_base 19: mod_base = OTHER; note = 2'-O-methyladenosine-3'-phosphate
  modified_base 20: mod_base = OTHER; note = 2'-O-methylguanosine-3'-phosphate
  modified_base 21: mod_base = OTHER; note = 2'-O-methylguanosine-3'-phosphorothioate
  modified_base 22: mod_base = OTHER; note = 2'-O-methyladenosine-3'-phosphorothioate
  modified_base 23: mod_base = OTHER; note = 2'-O-methyladenosine
atttctctggaaagcaaaaggaa

SEQ ID NO: 1525 - RNA, 23 nt, synthetic construct
  source 1..23: mol_type = other RNA
  modified_base 1: mod_base = OTHER; note = 2'-O-methyladenosine-3'-phosphorothioate
  modified_base 2: mod_base = OTHER; note = 2'-deoxy-2'-fluoroadenosine-3'-phosphorothioate
  modified_base 3: mod_base = OTHER; note = 2'-O-methyladenosine-3'-phosphate
  modified_base 4: mod_base = OTHER; note = 2'-O-methyladenosine-3'-phosphate
  modified_base 5: mod_base = OTHER; note = 2'-O-methyladenosine-3'-phosphate
  modified_base 6: mod_base = OTHER; note = 2'-deoxy-2'-fluorouridine-3'-phosphate
  modified_base 7: mod_base = OTHER; note = 2'-O-methylguanosine-3'-phosphate
  modified_base 8: mod_base = OTHER; note = 2'-deoxy-2'-fluoroadenosine-3'-phosphate
  modified_base 9: mod_base = OTHER; note = 2'-deoxy-2'-fluoroadenosine-3'-phosphate
  modified_base 10: mod_base = OTHER; note = 2'-O-methyladenosine-3'-phosphate
  modified_base 11: mod_base = OTHER; note = 2'-O-methyluridine-3'-phosphate
  modified_base 12: mod_base = OTHER; note = 2'-O-methyluridine-3'-phosphate
  modified_base 13: mod_base = OTHER; note = 2'-O-methyluridine-3'-phosphate
  modified_base 14: mod_base = OTHER; note = 2'-deoxy-2'-fluorocytidine-3'-phosphate
  modified_base 15: mod_base = OTHER; note = 2'-O-methyluridine-3'-phosphate
  modified_base 16: mod_base = OTHER; note = 2'-deoxy-2'-fluorocytidine-3'-phosphate
  modified_base 17: mod_base = OTHER; note = 2'-O-methyluridine-3'-phosphate
  modified_base 18: mod_base = OTHER; note = 2'-O-methylguanosine-3'-phosphate
  modified_base 19: mod_base = OTHER; note = 2'-O-methylguanosine-3'-phosphate
  modified_base 20: mod_base = OTHER; note = 2'-O-methyladenosine-3'-phosphate
  modified_base 21: mod_base = OTHER; note = 2'-O-methyladenosine-3'-phosphorothioate
  modified_base 22: mod_base = OTHER; note = 2'-O-methyladenosine-3'-phosphorothioate
  modified_base 23: mod_base = OTHER; note = 2'-O-methylguanosine
aaaaatgaaatttctctggaaag

SEQ ID NO: 1526 - RNA, 23 nt, synthetic construct
  source 1..23: mol_type = other RNA
  modified_base 1: mod_base = OTHER; note = 2'-O-methyladenosine-3'-phosphorothioate
  modified_base 2: mod_base = OTHER; note = 2'-deoxy-2'-fluorouridine-3'-phosphorothioate
  modified_base 3: mod_base = OTHER; note = 2'-O-methyladenosine-3'-phosphate
  modified_base 4: mod_base = OTHER; note = 2'-O-methyladenosine-3'-phosphate
  modified_base 5: mod_base = OTHER; note = 2'-O-methylcytidine-3'-phosphate
  modified_base 6: mod_base = OTHER; note = 2'-deoxy-2'-fluoroadenosine-3'-phosphate
  modified_base 7: mod_base = OTHER; note = 2'-O-methylguanosine-3'-phosphate
  modified_base 8: mod_base = OTHER; note = 2'-deoxy-2'-fluorocytidine-3'-phosphate
  modified_base 9: mod_base = OTHER; note = 2'-deoxy-2'-fluoroadenosine-3'-phosphate
  modified_base 10: mod_base = OTHER; note = 2'-O-methylguanosine-3'-phosphate
  modified_base 11: mod_base = OTHER; note = 2'-O-methyladenosine-3'-phosphate
  modified_base 12: mod_base = OTHER; note = 2'-O-methyladenosine-3'-phosphate
  modified_base 13: mod_base = OTHER; note = 2'-O-methyladenosine-3'-phosphate
  modified_base 14: mod_base = OTHER; note = 2'-deoxy-2'-fluorouridine-3'-phosphate
  modified_base 15: mod_base = OTHER; note = 2'-O-methylcytidine-3'-phosphate
  modified_base 16: mod_base = OTHER; note = 2'-deoxy-2'-fluoroadenosine-3'-phosphate
  modified_base 17: mod_base = OTHER; note = 2'-O-methyluridine-3'-phosphate
  modified_base 18: mod_base = OTHER; note = 2'-O-methyluridine-3'-phosphate
  modified_base 19: mod_base = OTHER; note = 2'-O-methyladenosine-3'-phosphate
  modified_base 20: mod_base = OTHER; note = 2'-O-methylcytidine-3'-phosphate
  modified_base 21: mod_base = OTHER; note = 2'-O-methyluridine-3'-phosphorothioate
  modified_base 22: mod_base = OTHER; note = 2'-O-methyluridine-3'-phosphorothioate
  modified_base 23: mod_base = OTHER; note = 2'-O-methyladenosine
ataacagcagaaatcattactta

SEQ ID NO: 1527 - RNA, 23 nt, synthetic construct
  source 1..23: mol_type = other RNA
  modified_base 1: mod_base = OTHER; note = 2'-O-methyladenosine-3'-phosphorothioate
  modified_base 2: mod_base = OTHER; note = 2'-deoxy-2'-fluorouridine-3'-phosphorothioate
  modified_base 3: mod_base = OTHER; note = 2'-O-methylcytidine-3'-phosphate
  modified_base 4: mod_base = OTHER; note = 2'-O-methyluridine-3'-phosphate
  modified_base 5: mod_base = OTHER; note = 2'-O-methyluridine-3'-phosphate
  modified_base 6: mod_base = OTHER; note = 2'-deoxy-2'-fluorouridine-3'-phosphate
  modified_base 7: mod_base = OTHER; note = 2'-O-methylguanosine-3'-phosphate
  modified_base 8: mod_base = OTHER; note = 2'-deoxy-2'-fluorocytidine-3'-phosphate
  modified_base 9: mod_base = OTHER; note = 2'-deoxy-2'-fluorouridine-3'-phosphate
  modified_base 10: mod_base = OTHER; note = 2'-O-methyluridine-3'-phosphate
  modified_base 11: mod_base = OTHER; note = 2'-O-methyluridine-3'-phosphate
  modified_base 12: mod_base = OTHER; note = 2'-O-methylcytidine-3'-phosphate
  modified_base 13: mod_base = OTHER; note = 2'-O-methyladenosine-3'-phosphate
  modified_base 14: mod_base = OTHER; note = 2'-deoxy-2'-fluorouridine-3'-phosphate
  modified_base 15: mod_base = OTHER; note = 2'-O-methyladenosine-3'-phosphate
  modified_base 16: mod_base = OTHER; note = 2'-deoxy-2'-fluoroadenosine-3'-phosphate
  modified_base 17: mod_base = OTHER; note = 2'-O-methylcytidine-3'-phosphate
  modified_base 18: mod_base = OTHER; note = 2'-O-methyladenosine-3'-phosphate
  modified_base 19: mod_base = OTHER; note = 2'-O-methylguanosine-3'-phosphate
  modified_base 20: mod_base = OTHER; note = 2'-O-methylcytidine-3'-phosphate
  modified_base 21: mod_base = OTHER; note = 2'-O-methyladenosine-3'-phosphorothioate
  modified_base 22: mod_base = OTHER; note = 2'-O-methylguanosine-3'-phosphorothioate
  modified_base 23: mod_base = OTHER; note = 2'-O-methyladenosine
atctttgctttcataacagcaga

SEQ ID NO: 1528 - RNA, 23 nt, synthetic construct
  source 1..23: mol_type = other RNA
  modified_base 1: mod_base = OTHER; note = 2'-O-methyladenosine-3'-phosphorothioate
  modified_base 2: mod_base = OTHER; note = 2'-deoxy-2'-fluorocytidine-3'-phosphorothioate
  modified_base 3: mod_base = OTHER; note = 2'-O-methylcytidine-3'-phosphate
  modified_base 4: mod_base = OTHER; note = 2'-O-methyladenosine-3'-phosphate
  modified_base 5: mod_base = OTHER; note = 2'-O-methyluridine-3'-phosphate
  modified_base 6: mod_base = OTHER; note = 2'-deoxy-2'-fluorocytidine-3'-phosphate
  modified_base 7: mod_base = OTHER; note = 2'-O-methylcytidine-3'-phosphate
  modified_base 8: mod_base = OTHER; note = 2'-deoxy-2'-fluorouridine-3'-phosphate
  modified_base 9: mod_base = OTHER; note = 2'-deoxy-2'-fluorouridine-3'-phosphate
  modified_base 10: mod_base = OTHER; note = 2'-O-methyluridine-3'-phosphate
  modified_base 11: mod_base = OTHER; note = 2'-O-methylcytidine-3'-phosphate
  modified_base 12: mod_base = OTHER; note = 2'-O-methyluridine-3'-phosphate
  modified_base 13: mod_base = OTHER; note = 2'-O-methylcytidine-3'-phosphate
  modified_base 14: mod_base = OTHER; note = 2'-deoxy-2'-fluorouridine-3'-phosphate
  modified_base 15: mod_base = OTHER; note = 2'-O-methyluridine-3'-phosphate
  modified_base 16: mod_base = OTHER; note = 2'-deoxy-2'-fluorouridine-3'-phosphate
  modified_base 17: mod_base = OTHER; note = 2'-O-methylguanosine-3'-phosphate
  modified_base 18: mod_base = OTHER; note = 2'-O-methylcytidine-3'-phosphate
  modified_base 19: mod_base = OTHER; note = 2'-O-methyluridine-3'-phosphate
  modified_base 20: mod_base = OTHER; note = 2'-O-methyluridine-3'-phosphate
  modified_base 21: mod_base = OTHER; note = 2'-O-methyluridine-3'-phosphorothioate
  modified_base 22: mod_base = OTHER; note = 2'-O-methylcytidine-3'-phosphorothioate
  modified_base 23: mod_base = OTHER; note = 2'-O-methyladenosine
accatcctttctctttgctttca

SEQ ID NO: 1529 - RNA, 23 nt, synthetic construct
  source 1..23: mol_type = other RNA
  modified_base 1: mod_base = OTHER; note = 2'-O-methyladenosine-3'-phosphorothioate
  modified_base 2: mod_base = OTHER; note = 2'-deoxy-2'-fluoroadenosine-3'-phosphorothioate
  modified_base 3: mod_base = OTHER; note = 2'-O-methyluridine-3'-phosphate
  modified_base 4: mod_base = OTHER; note = 2'-O-methyluridine-3'-phosphate
  modified_base 5: mod_base = OTHER; note = 2'-O-methyluridine-3'-phosphate
  modified_base 6: mod_base = OTHER; note = 2'-deoxy-2'-fluorouridine-3'-phosphate
  modified_base 7: mod_base = OTHER; note = 2'-O-methylguanosine-3'-phosphate
  modified_base 8: mod_base = OTHER; note = 2'-deoxy-2'-fluorocytidine-3'-phosphate
  modified_base 9: mod_base = OTHER; note = 2'-deoxy-2'-fluorocytidine-3'-phosphate
  modified_base 10: mod_base = OTHER; note = 2'-O-methyluridine-3'-phosphate
  modified_base 11: mod_base = OTHER; note = 2'-O-methylcytidine-3'-phosphate
  modified_base 12: mod_base = OTHER; note = 2'-O-methylcytidine-3'-phosphate
  modified_base 13: mod_base = OTHER; note = 2'-O-methyladenosine-3'-phosphate
  modified_base 14: mod_base = OTHER; note = 2'-deoxy-2'-fluorouridine-3'-phosphate
  modified_base 15: mod_base = OTHER; note = 2'-O-methylcytidine-3'-phosphate
  modified_base 16: mod_base = OTHER; note = 2'-deoxy-2'-fluorocytidine-3'-phosphate
  modified_base 17: mod_base = OTHER; note = 2'-O-methyluridine-3'-phosphate
  modified_base 18: mod_base = OTHER; note = 2'-O-methyluridine-3'-phosphate
  modified_base 19: mod_base = OTHER; note = 2'-O-methyluridine-3'-phosphate
  modified_base 20: mod_base = OTHER; note = 2'-O-methylcytidine-3'-phosphate
  modified_base 21: mod_base = OTHER; note = 2'-O-methyluridine-3'-phosphorothioate
  modified_base 22: mod_base = OTHER; note = 2'-O-methylcytidine-3'-phosphorothioate
  modified_base 23: mod_base = OTHER; note = 2'-O-methyluridine
aattttgcctccatcctttctct

SEQ ID NO: 1530 - RNA, 23 nt, synthetic construct
  source 1..23: mol_type = other RNA
  modified_base 1: mod_base = OTHER; note = 2'-O-methyladenosine-3'-phosphorothioate
  modified_base 2: mod_base = OTHER; note = 2'-deoxy-2'-fluoroadenosine-3'-phosphorothioate
  modified_base 3: mod_base = OTHER; note = 2'-O-methyladenosine-3'-phosphate
  modified_base 4: mod_base = OTHER; note = 2'-O-methylcytidine-3'-phosphate
  modified_base 5: mod_base = OTHER; note = 2'-O-methyladenosine-3'-phosphate
  modified_base 6: mod_base = OTHER; note = 2'-deoxy-2'-fluorouridine-3'-phosphate
  modified_base 7: mod_base = OTHER; note = 2'-O-methyluridine-3'-phosphate
  modified_base 8: mod_base = OTHER; note = 2'-deoxy-2'-fluorouridine-3'-phosphate
  modified_base 9: mod_base = OTHER; note = 2'-deoxy-2'-fluorocytidine-3'-phosphate
  modified_base 10: mod_base = OTHER; note = 2'-O-methyluridine-3'-phosphate
  modified_base 11: mod_base = OTHER; note = 2'-O-methyluridine-3'-phosphate
  modified_base 12: mod_base = OTHER; note = 2'-O-methylguanosine-3'-phosphate
  modified_base 13: mod_base = OTHER; note = 2'-O-methyladenosine-3'-phosphate
  modified_base 14: mod_base = OTHER; note = 2'-deoxy-2'-fluoroadenosine-3'-phosphate
  modified_base 15: mod_base = OTHER; note = 2'-O-methyladenosine-3'-phosphate
  modified_base 16: mod_base = OTHER; note = 2'-deoxy-2'-fluorocytidine-3'-phosphate
  modified_base 17: mod_base = OTHER; note = 2'-O-methylguanosine-3'-phosphate
  modified_base 18: mod_base = OTHER; note = 2'-O-methyluridine-3'-phosphate
  modified_base 19: mod_base = OTHER; note = 2'-O-methylguanosine-3'-phosphate
  modified_base 20: mod_base = OTHER; note = 2'-O-methyladenosine-3'-phosphate
  modified_base 21: mod_base = OTHER; note = 2'-O-methyluridine-3'-phosphorothioate
  modified_base 22: mod_base = OTHER; note = 2'-O-methyluridine-3'-phosphorothioate
  modified_base 23: mod_base = OTHER; note = 2'-O-methyluridine
aaacatttcttgaaacgtgattt

SEQ ID NO: 1531 - RNA, 23 nt, synthetic construct
  source 1..23: mol_type = other RNA
  modified_base 1: mod_base = OTHER; note = 2'-O-methyladenosine-3'-phosphorothioate
  modified_base 2: mod_base = OTHER; note = 2'-deoxy-2'-fluoroadenosine-3'-phosphorothioate
  modified_base 3: mod_base = OTHER; note = 2'-O-methylguanosine-3'-phosphate
  modified_base 4: mod_base = OTHER; note = 2'-O-methyladenosine-3'-phosphate
  modified_base 5: mod_base = OTHER; note = 2'-O-methyladenosine-3'-phosphate
  modified_base 6: mod_base = OTHER; note = 2'-deoxy-2'-fluoroguanosine-3'-phosphate
  modified_base 7: mod_base = OTHER; note = 2'-O-methyladenosine-3'-phosphate
  modified_base 8: mod_base = OTHER; note = 2'-deoxy-2'-fluoroguanosine-3'-phosphate
  modified_base 9: mod_base = OTHER; note = 2'-deoxy-2'-fluorocytidine-3'-phosphate
  modified_base 10: mod_base = OTHER; note = 2'-O-methyluridine-3'-phosphate
  modified_base 11: mod_base = OTHER; note = 2'-O-methyluridine-3'-phosphate
  modified_base 12: mod_base = OTHER; note = 2'-O-methyladenosine-3'-phosphate
  modified_base 13: mod_base = OTHER; note = 2'-O-methyladenosine-3'-phosphate
  modified_base 14: mod_base = OTHER; note = 2'-deoxy-2'-fluorocytidine-3'-phosphate
  modified_base 15: mod_base = OTHER; note = 2'-O-methyladenosine-3'-phosphate
  modified_base 16: mod_base = OTHER; note = 2'-deoxy-2'-fluorouridine-3'-phosphate
  modified_base 17: mod_base = OTHER; note = 2'-O-methyluridine-3'-phosphate
  modified_base 18: mod_base = OTHER; note = 2'-O-methyluridine-3'-phosphate
  modified_base 19: mod_base = OTHER; note = 2'-O-methylcytidine-3'-phosphate
  modified_base 20: mod_base = OTHER; note = 2'-O-methyluridine-3'-phosphate
  modified_base 21: mod_base = OTHER; note = 2'-O-methyluridine-3'-phosphorothioate
  modified_base 22: mod_base = OTHER; note = 2'-O-methylguanosine-3'-phosphorothioate
  modified_base 23: mod_base = OTHER; note = 2'-O-methyladenosine
aagaagagcttaacatttcttga

SEQ ID NO: 1532 - RNA, 23 nt, synthetic construct
  source 1..23: mol_type = other RNA
  modified_base 1: mod_base = OTHER; note = 2'-O-methyladenosine-3'-phosphorothioate
  modified_base 2: mod_base = OTHER; note = 2'-deoxy-2'-fluoroguanosine-3'-phosphorothioate
  modified_base 3: mod_base = OTHER; note = 2'-O-methylcytidine-3'-phosphate
  modified_base 4: mod_base = OTHER; note = 2'-O-methyluridine-3'-phosphate
  modified_base 5: mod_base = OTHER; note = 2'-O-methyluridine-3'-phosphate
  modified_base 6: mod_base = OTHER; note = 2'-deoxy-2'-fluoroguanosine-3'-phosphate
  modified_base 7: mod_base = OTHER; note = 2'-O-methyluridine-3'-phosphate
  modified_base 8: mod_base = OTHER; note = 2'-deoxy-2'-fluorouridine-3'-phosphate
  modified_base 9: mod_base = OTHER; note = 2'-deoxy-2'-fluorocytidine-3'-phosphate
  modified_base 10: mod_base = OTHER; note = 2'-O-methylcytidine-3'-phosphate
  modified_base 11: mod_base = OTHER; note = 2'-O-methyladenosine-3'-phosphate
  modified_base 12: mod_base = OTHER; note = 2'-O-methyladenosine-3'-phosphate
  modified_base 13: mod_base = OTHER; note = 2'-O-methylguanosine-3'-phosphate
  modified_base 14: mod_base = OTHER; note = 2'-deoxy-2'-fluoroadenosine-3'-phosphate
  modified_base 15: mod_base = OTHER; note = 2'-O-methyladenosine-3'-phosphate
  modified_base 16: mod_base = OTHER; note = 2'-deoxy-2'-fluoroguanosine-3'-phosphate
  modified_base 17: mod_base = OTHER; note = 2'-O-methyladenosine-3'-phosphate
  modified_base 18: mod_base = OTHER; note = 2'-O-methylguanosine-3'-phosphate
  modified_base 19: mod_base = OTHER; note = 2'-O-methylcytidine-3'-phosphate
  modified_base 20: mod_base = OTHER; note = 2'-O-methyluridine-3'-phosphate
  modified_base 21: mod_base = OTHER; note = 2'-O-methyluridine-3'-phosphorothioate
  modified_base 22: mod_base = OTHER; note = 2'-O-methyladenosine-3'-phosphorothioate
  modified_base 23: mod_base = OTHER; note = 2'-O-methyladenosine
agcttgttccaagaagagcttaa

SEQ ID NO: 1533 - RNA, 23 nt, synthetic construct
  source 1..23: mol_type = other RNA
  modified_base 1: mod_base = OTHER; note = 2'-O-methyladenosine-3'-phosphorothioate
  modified_base 2: mod_base = OTHER; note = 2'-deoxy-2'-fluorouridine-3'-phosphorothioate
  modified_base 3: mod_base = OTHER; note = 2'-O-methyladenosine-3'-phosphate
  modified_base 4: mod_base = OTHER; note = 2'-O-methylcytidine-3'-phosphate
  modified_base 5: mod_base = OTHER; note = 2'-O-methyladenosine-3'-phosphate
  modified_base 6: mod_base = OTHER; note = 2'-deoxy-2'-fluorocytidine-3'-phosphate
  modified_base 7: mod_base = OTHER; note = 2'-O-methyladenosine-3'-phosphate
  modified_base 8: mod_base = OTHER; note = 2'-deoxy-2'-fluoroadenosine-3'-phosphate
  modified_base 9: mod_base = OTHER; note = 2'-deoxy-2'-fluoroguanosine-3'-phosphate
  modified_base 10: mod_base = OTHER; note = 2'-O-methylguanosine-3'-phosphate
  modified_base 11: mod_base = OTHER; note = 2'-O-methyladenosine-3'-phosphate
  modified_base 12: mod_base = OTHER; note = 2'-O-methyladenosine-3'-phosphate
  modified_base 13: mod_base = OTHER; note = 2'-O-methyladenosine-3'-phosphate
  modified_base 14: mod_base = OTHER; note = 2'-deoxy-2'-fluoroguanosine-3'-phosphate
  modified_base 15: mod_base = OTHER; note = 2'-O-methylcytidine-3'-phosphate
  modified_base 16: mod_base = OTHER; note = 2'-deoxy-2'-fluoroadenosine-3'-phosphate
  modified_base 17: mod_base = OTHER; note = 2'-O-methyladenosine-3'-phosphate
  modified_base 18: mod_base = OTHER; note = 2'-O-methylguanosine-3'-phosphate
  modified_base 19: mod_base = OTHER; note = 2'-O-methylguanosine-3'-phosphate
  modified_base 20: mod_base = OTHER; note = 2'-O-methyluridine-3'-phosphate
  modified_base 21: mod_base = OTHER; note = 2'-O-methylguanosine-3'-phosphorothioate
  modified_base 22: mod_base = OTHER; note = 2'-O-methylguanosine-3'-phosphorothioate
  modified_base 23: mod_base = OTHER; note = 2'-O-methylguanosine
atacacaaggaaagcaaggtggg

SEQ ID NO: 1534 - RNA, 23 nt, synthetic construct
  source 1..23: mol_type = other RNA
  modified_base 1: mod_base = OTHER; note = 2'-O-methyladenosine-3'-phosphorothioate
  modified_base 2: mod_base = OTHER; note = 2'-deoxy-2'-fluoroguanosine-3'-phosphorothioate
  modified_base 3: mod_base = OTHER; note = 2'-O-methylcytidine-3'-phosphate
  modified_base 4: mod_base = OTHER; note = 2'-O-methylguanosine-3'-phosphate
  modified_base 5: mod_base = OTHER; note = 2'-O-methylguanosine-3'-phosphate
  modified_base 6: mod_base = OTHER; note = 2'-deoxy-2'-fluoroguanosine-3'-phosphate
  modified_base 7: mod_base = OTHER; note = 2'-O-methyluridine-3'-phosphate
  modified_base 8: mod_base = OTHER; note = 2'-deoxy-2'-fluorouridine-3'-phosphate
  modified_base 9: mod_base = OTHER; note = 2'-deoxy-2'-fluorouridine-3'-phosphate
  modified_base 10: mod_base = OTHER; note = 2'-O-methylguanosine-3'-phosphate
  modified_base 11: mod_base = OTHER; note = 2'-O-methylcytidine-3'-phosphate
  modified_base 12: mod_base = OTHER; note = 2'-O-methylcytidine-3'-phosphate
  modified_base 13: mod_base = OTHER; note = 2'-O-methylcytidine-3'-phosphate
  modified_base 14: mod_base = OTHER; note = 2'-deoxy-2'-fluorouridine-3'-phosphate
  modified_base 15: mod_base = OTHER; note = 2'-O-methyladenosine-3'-phosphate
  modified_base 16: mod_base = OTHER; note = 2'-deoxy-2'-fluorocytidine-3'-phosphate
  modified_base 17: mod_base = OTHER; note = 2'-O-methyladenosine-3'-phosphate
  modified_base 18: mod_base = OTHER; note = 2'-O-methylcytidine-3'-phosphate
  modified_base 19: mod_base = OTHER; note = 2'-O-methyladenosine-3'-phosphate
  modified_base 20: mod_base = OTHER; note = 2'-O-methyladenosine-3'-phosphate
  modified_base 21: mod_base = OTHER; note = 2'-O-methylguanosine-3'-phosphorothioate
  modified_base 22: mod_base = OTHER; note = 2'-O-methylguanosine-3'-phosphorothioate
  modified_base 23: mod_base = OTHER; note = 2'-O-methyladenosine
agcgggtttgccctacacaagga

SEQ ID NO: 1535 - RNA, 23 nt, synthetic construct
  source 1..23: mol_type = other RNA
  modified_base 1: mod_base = OTHER; note = 2'-O-methyladenosine-3'-phosphorothioate
  modified_base 2: mod_base = OTHER; note = 2'-deoxy-2'-fluoroadenosine-3'-phosphorothioate
  modified_base 3: mod_base = OTHER; note = 2'-O-methylguanosine-3'-phosphate
  modified_base 4: mod_base = OTHER; note = 2'-O-methyladenosine-3'-phosphate
  modified_base 5: mod_base = OTHER; note = 2'-O-methyladenosine-3'-phosphate
  modified_base 6: mod_base = OTHER; note = 2'-deoxy-2'-fluoroadenosine-3'-phosphate
  modified_base 7: mod_base = OTHER; note = 2'-O-methyluridine-3'-phosphate
  modified_base 8: mod_base = OTHER; note = 2'-deoxy-2'-fluorocytidine-3'-phosphate
  modified_base 9: mod_base = OTHER; note = 2'-deoxy-2'-fluorocytidine-3'-phosphate
  modified_base 10: mod_base = OTHER; note = 2'-O-methylcytidine-3'-phosphate
  modified_base 11: mod_base = OTHER; note = 2'-O-methyluridine-3'-phosphate
  modified_base 12: mod_base = OTHER; note = 2'-O-methylcytidine-3'-phosphate
  modified_base 13: mod_base = OTHER; note = 2'-O-methyladenosine-3'-phosphate
  modified_base 14: mod_base = OTHER; note = 2'-deoxy-2'-fluoroguanosine-3'-phosphate
  modified_base 15: mod_base = OTHER; note = 2'-O-methylcytidine-3'-phosphate
  modified_base 16: mod_base = OTHER; note = 2'-deoxy-2'-fluorocytidine-3'-phosphate
  modified_base 17: mod_base = OTHER; note = 2'-O-methyluridine-3'-phosphate
  modified_base 18: mod_base = OTHER; note = 2'-O-methylguanosine-3'-phosphate
  modified_base 19: mod_base = OTHER; note = 2'-O-methyladenosine-3'-phosphate
  modified_base 20: mod_base = OTHER; note = 2'-O-methylcytidine-3'-phosphate
  modified_base 21: mod_base = OTHER; note = 2'-O-methylcytidine-3'-phosphorothioate
  modified_base 22: mod_base = OTHER; note = 2'-O-methyladenosine-3'-phosphorothioate
  modified_base 23: mod_base = OTHER; note = 2'-O-methylcytidine
aagaaatccctcagcctgaccac

SEQ ID NO: 1536 - RNA, 23 nt, synthetic construct
  source 1..23: mol_type = other RNA
  modified_base 1: mod_base = OTHER; note = 2'-O-methyladenosine-3'-phosphorothioate
  modified_base 2: mod_base = OTHER; note = 2'-deoxy-2'-fluoroguanosine-3'-phosphorothioate
  modified_base 3: mod_base = OTHER; note = 2'-O-methyluridine-3'-phosphate
  modified_base 4: mod_base = OTHER; note = 2'-O-methylguanosine-3'-phosphate
  modified_base 5: mod_base = OTHER; note = 2'-O-methyluridine-3'-phosphate
  modified_base 6: mod_base = OTHER; note = 2'-deoxy-2'-fluoroguanosine-3'-phosphate
  modified_base 7: mod_base = OTHER; note = 2'-O-methyladenosine-3'-phosphate
  modified_base 8: mod_base = OTHER; note = 2'-deoxy-2'-fluoroguanosine-3'-phosphate
  modified_base 9: mod_base = OTHER; note = 2'-deoxy-2'-fluoroguanosine-3'-phosphate
  modified_base 10: mod_base = OTHER; note = 2'-O-methyluridine-3'-phosphate
  modified_base 11: mod_base = OTHER; note = 2'-O-methyladenosine-3'-phosphate
  modified_base 12: mod_base = OTHER; note = 2'-O-methylguanosine-3'-phosphate
  modified_base 13: mod_base = OTHER; note = 2'-O-methyladenosine-3'-phosphate
  modified_base 14: mod_base = OTHER; note = 2'-deoxy-2'-fluoroadenosine-3'-phosphate
  modified_base 15: mod_base = OTHER; note = 2'-O-methyladenosine-3'-phosphate
  modified_base 16: mod_base = OTHER; note = 2'-deoxy-2'-fluorouridine-3'-phosphate
  modified_base 17: mod_base = OTHER; note = 2'-O-methylcytidine-3'-phosphate
  modified_base 18: mod_base = OTHER; note = 2'-O-methylcytidine-3'-phosphate
  modified_base 19: mod_base = OTHER; note = 2'-O-methylcytidine-3'-phosphate
  modified_base 20: mod_base = OTHER; note = 2'-O-methyluridine-3'-phosphate
  modified_base 21: mod_base = OTHER; note = 2'-O-methylcytidine-3'-phosphorothioate
  modified_base 22: mod_base = OTHER; note = 2'-O-methyladenosine-3'-phosphorothioate
  modified_base 23: mod_base = OTHER; note = 2'-O-methylguanosine
agtgtgaggtagaaatccctcag

SEQ ID NO: 1537 - RNA, 23 nt, synthetic construct
  source 1..23: mol_type = other RNA
  modified_base 1: mod_base = OTHER; note = 2'-O-methyladenosine-3'-phosphorothioate
  modified_base 2: mod_base = OTHER; note = 2'-deoxy-2'-fluoroadenosine-3'-phosphorothioate
  modified_base 3: mod_base = OTHER; note = 2'-O-methyladenosine-3'-phosphate
  modified_base 4: mod_base = OTHER; note = 2'-O-methyladenosine-3'-phosphate
  modified_base 5: mod_base = OTHER; note = 2'-O-methyluridine-3'-phosphate
  modified_base 6: mod_base = OTHER; note = 2'-deoxy-2'-fluoroguanosine-3'-phosphate
  modified_base 7: mod_base = OTHER; note = 2'-O-methylcytidine-3'-phosphate
  modified_base 8: mod_base = OTHER; note = 2'-deoxy-2'-fluoroadenosine-3'-phosphate
  modified_base 9: mod_base = OTHER; note = 2'-deoxy-2'-fluorocytidine-3'-phosphate
  modified_base 10: mod_base = OTHER; note = 2'-O-methyladenosine-3'-phosphate
  modified_base 11: mod_base = OTHER; note = 2'-O-methylguanosine-3'-phosphate
  modified_base 12: mod_base = OTHER; note = 2'-O-methyluridine-3'-phosphate
  modified_base 13: mod_base = OTHER; note = 2'-O-methylguanosine-3'-phosphate
  modified_base 14: mod_base = OTHER; note = 2'-deoxy-2'-fluorouridine-3'-phosphate
  modified_base 15: mod_base = OTHER; note = 2'-O-methylguanosine-3'-phosphate
  modified_base 16: mod_base = OTHER; note = 2'-deoxy-2'-fluoroadenosine-3'-phosphate
  modified_base 17: mod_base = OTHER; note = 2'-O-methylguanosine-3'-phosphate
  modified_base 18: mod_base = OTHER; note = 2'-O-methylguanosine-3'-phosphate
  modified_base 19: mod_base = OTHER; note = 2'-O-methyluridine-3'-phosphate
  modified_base 20: mod_base = OTHER; note = 2'-O-methyladenosine-3'-phosphate
  modified_base 21: mod_base = OTHER; note = 2'-O-methylguanosine-3'-phosphorothioate
  modified_base 22: mod_base = OTHER; note = 2'-O-methyladenosine-3'-phosphorothioate
  modified_base 23: mod_base = OTHER; note = 2'-O-methyladenosine
aaaatgcacagtgtgaggtagaa

SEQ ID NO: 1538 - RNA, 23 nt, synthetic construct
  source 1..23: mol_type = other RNA
  modified_base 1: mod_base = OTHER; note = 2'-O-methyladenosine-3'-phosphorothioate
  modified_base 2: mod_base = OTHER; note = 2'-deoxy-2'-fluorouridine-3'-phosphorothioate
  modified_base 3: mod_base = OTHER; note = 2'-O-methylcytidine-3'-phosphate
  modified_base 4: mod_base = OTHER; note = 2'-O-methyluridine-3'-phosphate
  modified_base 5: mod_base = OTHER; note = 2'-O-methyladenosine-3'-phosphate
  modified_base 6: mod_base = OTHER; note = 2'-deoxy-2'-fluorouridine-3'-phosphate
  modified_base 7: mod_base = OTHER; note = 2'-O-methylcytidine-3'-phosphate
  modified_base 8: mod_base = OTHER; note = 2'-deoxy-2'-fluorouridine-3'-phosphate
  modified_base 9: mod_base = OTHER; note = 2'-deoxy-2'-fluoroguanosine-3'-phosphate
  modified_base 10: mod_base = OTHER; note = 2'-O-methylcytidine-3'-phosphate
  modified_base 11: mod_base = OTHER; note = 2'-O-methyluridine-3'-phosphate
  modified_base 12: mod_base = OTHER; note = 2'-O-methylguanosine-3'-phosphate
  modified_base 13: mod_base = OTHER; note = 2'-O-methyluridine-3'-phosphate
  modified_base 14: mod_base = OTHER; note = 2'-deoxy-2'-fluoroguanosine-3'-phosphate
  modified_base 15: mod_base = OTHER; note = 2'-O-methylcytidine-3'-phosphate
  modified_base 16: mod_base = OTHER; note = 2'-deoxy-2'-fluoroadenosine-3'-phosphate
  modified_base 17: mod_base = OTHER; note = 2'-O-methyladenosine-3'-phosphate
  modified_base 18: mod_base = OTHER; note = 2'-O-methyladenosine-3'-phosphate
  modified_base 19: mod_base = OTHER; note = 2'-O-methyluridine-3'-phosphate
  modified_base 20: mod_base = OTHER; note = 2'-O-methylguanosine-3'-phosphate
  modified_base 21: mod_base = OTHER; note = 2'-O-methylcytidine-3'-phosphorothioate
  modified_base 22: mod_base = OTHER; note = 2'-O-methyladenosine-3'-phosphorothioate
  modified_base 23: mod_base = OTHER; note = 2'-O-methylcytidine
atctatctgctgtgcaaatgcac

SEQ ID NO: 1539 - RNA, 23 nt, synthetic construct
  source 1..23: mol_type = other RNA
  modified_base 1: mod_base = OTHER; note = 2'-O-methyladenosine-3'-phosphorothioate
  modified_base 2: mod_base = OTHER; note = 2'-deoxy-2'-fluorouridine-3'-phosphorothioate
  modified_base 3: mod_base = OTHER; note = 2'-O-methyladenosine-3'-phosphate
  modified_base 4: mod_base = OTHER; note = 2'-O-methyluridine-3'-phosphate
  modified_base 5: mod_base = OTHER; note = 2'-O-methyladenosine-3'-phosphate
  modified_base 6: mod_base = OTHER; note = 2'-deoxy-2'-fluoroadenosine-3'-phosphate
  modified_base 7: mod_base = OTHER; note = 2'-O-methyladenosine-3'-phosphate
  modified_base 8: mod_base = OTHER; note = 2'-deoxy-2'-fluorocytidine-3'-phosphate
  modified_base 9: mod_base = OTHER; note = 2'-deoxy-2'-fluoroadenosine-3'-phosphate
  modified_base 10: mod_base = OTHER; note = 2'-O-methyladenosine-3'-phosphate
  modified_base 11: mod_base = OTHER; note = 2'-O-methylguanosine-3'-phosphate
  modified_base 12: mod_base = OTHER; note = 2'-O-methyluridine-3'-phosphate
  modified_base 13: mod_base = OTHER; note = 2'-O-methylcytidine-3'-phosphate
  modified_base 14: mod_base = OTHER; note = 2'-deoxy-2'-fluorouridine-3'-phosphate
  modified_base 15: mod_base = OTHER; note = 2'-O-methyluridine-3'-phosphate
  modified_base 16: mod_base = OTHER; note = 2'-deoxy-2'-fluorouridine-3'-phosphate
  modified_base 17: mod_base = OTHER; note = 2'-O-methylcytidine-3'-phosphate
  modified_base 18: mod_base = OTHER; note = 2'-O-methyluridine-3'-phosphate
  modified_base 19: mod_base = OTHER; note = 2'-O-methyladenosine-3'-phosphate
  modified_base 20: mod_base = OTHER; note = 2'-O-methyluridine-3'-phosphate
  modified_base 21: mod_base = OTHER; note = 2'-O-methylcytidine-3'-phosphorothioate
  modified_base 22: mod_base = OTHER; note = 2'-O-methyluridine-3'-phosphorothioate
  modified_base 23: mod_base = OTHER; note = 2'-O-methylguanosine
atataaacaagtctttctatctg

SEQ ID NO: 1540 - RNA, 23 nt, synthetic construct
  source 1..23: mol_type = other RNA
  modified_base 1: mod_base = OTHER; note = 2'-O-methyladenosine-3'-phosphorothioate
  modified_base 2: mod_base = OTHER; note = 2'-deoxy-2'-fluoroadenosine-3'-phosphorothioate
  modified_base 3: mod_base = OTHER; note = 2'-O-methylguanosine-3'-phosphate
  modified_base 4: mod_base = OTHER; note = 2'-O-methylcytidine-3'-phosphate
  modified_base 5: mod_base = OTHER; note = 2'-O-methyluridine-3'-phosphate
  modified_base 6: mod_base = OTHER; note = 2'-deoxy-2'-fluoroguanosine-3'-phosphate
  modified_base 7: mod_base = OTHER; note = 2'-O-methyluridine-3'-phosphate
  modified_base 8: mod_base = OTHER; note = 2'-deoxy-2'-fluorouridine-3'-phosphate
  modified_base 9: mod_base = OTHER; note = 2'-deoxy-2'-fluorouridine-3'-phosphate
  modified_base 10: mod_base = OTHER; note = 2'-O-methyladenosine-3'-phosphate
  modified_base 11: mod_base = OTHER; note = 2'-O-methyladenosine-3'-phosphate
  modified_base 12: mod_base = OTHER; note = 2'-O-methyluridine-3'-phosphate
  modified_base 13: mod_base = OTHER; note = 2'-O-methyladenosine-3'-phosphate
  modified_base 14: mod_base = OTHER; note = 2'-deoxy-2'-fluorouridine-3'-phosphate
  modified_base 15: mod_base = OTHER; note = 2'-O-methyladenosine-3'-phosphate
  modified_base 16: mod_base = OTHER; note = 2'-deoxy-2'-fluoroadenosine-3'-phosphate
  modified_base 17: mod_base = OTHER; note = 2'-O-methyladenosine-3'-phosphate
  modified_base 18: mod_base = OTHER; note = 2'-O-methylcytidine-3'-phosphate
  modified_base 19: mod_base = OTHER; note = 2'-O-methyladenosine-3'-phosphate
  modified_base 20: mod_base = OTHER; note = 2'-O-methyladenosine-3'-phosphate
  modified_base 21: mod_base = OTHER; note = 2'-O-methylguanosine-3'-phosphorothioate
  modified_base 22: mod_base = OTHER; note = 2'-O-methyluridine-3'-phosphorothioate
  modified_base 23: mod_base = OTHER; note = 2'-O-methylcytidine
aagctgtttaatataaacaagtc

SEQ ID NO: 1541 - RNA, 23 nt, synthetic construct
  source 1..23: mol_type = other RNA
  modified_base 1: mod_base = OTHER; note = 2'-O-methyladenosine-3'-phosphorothioate
  modified_base 2: mod_base = OTHER; note = 2'-deoxy-2'-fluorocytidine-3'-phosphorothioate
  modified_base 3: mod_base = OTHER; note = 2'-O-methyluridine-3'-phosphate
  modified_base 4: mod_base = OTHER; note = 2'-O-methyluridine-3'-phosphate
  modified_base 5: mod_base = OTHER; note = 2'-O-methylcytidine-3'-phosphate
  modified_base 6: mod_base = OTHER; note = 2'-deoxy-2'-fluorocytidine-3'-phosphate
  modified_base 7: mod_base = OTHER; note = 2'-O-methyladenosine-3'-phosphate
  modified_base 8: mod_base = OTHER; note = 2'-deoxy-2'-fluoroadenosine-3'-phosphate
  modified_base 9: mod_base = OTHER; note = 2'-deoxy-2'-fluorocytidine-3'-phosphate
  modified_base 10: mod_base = OTHER; note = 2'-O-methyluridine-3'-phosphate
  modified_base 11: mod_base = OTHER; note = 2'-O-methyladenosine-3'-phosphate
  modified_base 12: mod_base = OTHER; note = 2'-O-methyladenosine-3'-phosphate
  modified_base 13: mod_base = OTHER; note = 2'-O-methyluridine-3'-phosphate
  modified_base 14: mod_base = OTHER; note = 2'-deoxy-2'-fluoroadenosine-3'-phosphate
  modified_base 15: mod_base = OTHER; note = 2'-O-methyluridine-3'-phosphate
  modified_base 16: mod_base = OTHER; note = 2'-deoxy-2'-fluorouridine-3'-phosphate
  modified_base 17: mod_base = OTHER; note = 2'-O-methylguanosine-3'-phosphate
  modified_base 18: mod_base = OTHER; note = 2'-O-methyladenosine-3'-phosphate
  modified_base 19: mod_base = OTHER; note = 2'-O-methyluridine-3'-phosphate
  modified_base 20: mod_base = OTHER; note = 2'-O-methyladenosine-3'-phosphate
  modified_base 21: mod_base = OTHER; note = 2'-O-methylcytidine-3'-phosphorothioate
  modified_base 22: mod_base = OTHER; note = 2'-O-methyladenosine-3'-phosphorothioate
  modified_base 23: mod_base = OTHER; note = 2'-O-methyluridine
acttccaactaatattgatacat

SEQ ID NO: 1542 - RNA, 23 nt, synthetic construct
  source 1..23: mol_type = other RNA
  modified_base 1: mod_base = OTHER; note = 2'-O-methyladenosine-3'-phosphorothioate
  modified_base 2: mod_base = OTHER; note = 2'-deoxy-2'-fluoroadenosine-3'-phosphorothioate
  modified_base 3: mod_base = OTHER; note = 2'-O-methylguanosine-3'-phosphate
  modified_base 4: mod_base = OTHER; note = 2'-O-methyladenosine-3'-phosphate
  modified_base 5: mod_base = OTHER; note = 2'-O-methylguanosine-3'-phosphate
  modified_base 6: mod_base = OTHER; note = 2'-deoxy-2'-fluoroadenosine-3'-phosphate
  modified_base 7: mod_base = OTHER; note = 2'-O-methylguanosine-3'-phosphate
  modified_base 8: mod_base = OTHER; note = 2'-deoxy-2'-fluoroadenosine-3'-phosphate
  modified_base 9: mod_base = OTHER; note = 2'-deoxy-2'-fluoroguanosine-3'-phosphate
  modified_base 10: mod_base = OTHER; note = 2'-O-methylguanosine-3'-phosphate
  modified_base 11: mod_base = OTHER; note = 2'-O-methylcytidine-3'-phosphate
  modified_base 12: mod_base = OTHER; note = 2'-O-methyluridine-3'-phosphate
  modified_base 13: mod_base = OTHER; note = 2'-O-methylcytidine-3'-phosphate
  modified_base 14: mod_base = OTHER; note = 2'-deoxy-2'-fluorouridine-3'-phosphate
  modified_base 15: mod_base = OTHER; note = 2'-O-methylguanosine-3'-phosphate
  modified_base 16: mod_base = OTHER; note = 2'-deoxy-2'-fluorocytidine-3'-phosphate
  modified_base 17: mod_base = OTHER; note = 2'-O-methylguanosine-3'-phosphate
  modified_base 18: mod_base = OTHER; note = 2'-O-methylcytidine-3'-phosphate
  modified_base 19: mod_base = OTHER; note = 2'-O-methylcytidine-3'-phosphate
  modified_base 20: mod_base = OTHER; note = 2'-O-methyluridine-3'-phosphate
  modified_base 21: mod_base = OTHER; note = 2'-O-methylguanosine-3'-phosphorothioate
  modified_base 22: mod_base = OTHER; note = 2'-O-methylguanosine-3'-phosphorothioate
  modified_base 23: mod_base = OTHER; note = 2'-O-methyluridine
aagagagaggctctgcgcctggt

SEQ ID NO: 1543 - RNA, 23 nt, synthetic construct
  source 1..23: mol_type = other RNA
  modified_base 1: mod_base = OTHER; note = 2'-O-methyladenosine-3'-phosphorothioate
  modified_base 2: mod_base = OTHER; note = 2'-deoxy-2'-fluoroadenosine-3'-phosphorothioate
  modified_base 3: mod_base = OTHER; note = 2'-O-methylcytidine-3'-phosphate
  modified_base 4: mod_base = OTHER; note = 2'-O-methyladenosine-3'-phosphate
  modified_base 5: mod_base = OTHER; note = 2'-O-methyluridine-3'-phosphate
  modified_base 6: mod_base = OTHER; note = 2'-deoxy-2'-fluoroguanosine-3'-phosphate
  modified_base 7: mod_base = OTHER; note = 2'-O-methyluridine-3'-phosphate
  modified_base 8: mod_base = OTHER; note = 2'-deoxy-2'-fluorocytidine-3'-phosphate
  modified_base 9: mod_base = OTHER; note = 2'-deoxy-2'-fluoroadenosine-3'-phosphate
  modified_base 10: mod_base = OTHER; note = 2'-O-methylcytidine-3'-phosphate
  modified_base 11: mod_base = OTHER; note = 2'-O-methyladenosine-3'-phosphate
  modified_base 12: mod_base = OTHER; note = 2'-O-methylguanosine-3'-phosphate
  modified_base 13: mod_base = OTHER; note = 2'-O-methyladenosine-3'-phosphate
  modified_base 14: mod_base = OTHER; note = 2'-deoxy-2'-fluoroguanosine-3'-phosphate
  modified_base 15: mod_base = OTHER; note = 2'-O-methyladenosine-3'-phosphate
  modified_base 16: mod_base = OTHER; note = 2'-deoxy-2'-fluoroguanosine-3'-phosphate
  modified_base 17: mod_base = OTHER; note = 2'-O-methyladenosine-3'-phosphate
  modified_base 18: mod_base = OTHER; note = 2'-O-methylguanosine-3'-phosphate
  modified_base 19: mod_base = OTHER; note = 2'-O-methylguanosine-3'-phosphate
  modified_base 20: mod_base = OTHER; note = 2'-O-methylcytidine-3'-phosphate
  modified_base 21: mod_base = OTHER; note = 2'-O-methyluridine-3'-phosphorothioate
  modified_base 22: mod_base = OTHER; note = 2'-O-methylcytidine-3'-phosphorothioate
  modified_base 23: mod_base = OTHER; note = 2'-O-methyluridine
aacatgtcacagagagaggctct

SEQ ID NO: 1544 - RNA, 23 nt, synthetic construct
  source 1..23: mol_type = other RNA
  modified_base 1: mod_base = OTHER; note = 2'-O-methyladenosine-3'-phosphorothioate
  modified_base 2: mod_base = OTHER; note = 2'-deoxy-2'-fluorouridine-3'-phosphorothioate
  modified_base 3: mod_base = OTHER; note = 2'-O-methylguanosine-3'-phosphate
  modified_base 4: mod_base = OTHER; note = 2'-O-methyladenosine-3'-phosphate
  modified_base 5: mod_base = OTHER; note = 2'-O-methylcytidine-3'-phosphate
  modified_base 6: mod_base = OTHER; note = 2'-deoxy-2'-fluoroadenosine-3'-phosphate
  modified_base 7: mod_base = OTHER; note = 2'-O-methylguanosine-3'-phosphate
  modified_base 8: mod_base = OTHER; note = 2'-deoxy-2'-fluoroadenosine-3'-phosphate
  modified_base 9: mod_base = OTHER; note = 2'-deoxy-2'-fluoroguanosine-3'-phosphate
  modified_base 10: mod_base = OTHER; note = 2'-O-methyluridine-3'-phosphate
  modified_base 11: mod_base = OTHER; note = 2'-O-methylcytidine-3'-phosphate
  modified_base 12: mod_base = OTHER; note = 2'-O-methyladenosine-3'-phosphate
  modified_base 13: mod_base = OTHER; note = 2'-O-methylcytidine-3'-phosphate
  modified_base 14: mod_base = OTHER; note = 2'-deoxy-2'-fluoroadenosine-3'-phosphate
  modified_base 15: mod_base = OTHER; note = 2'-O-methyluridine-3'-phosphate
  modified_base 16: mod_base = OTHER; note = 2'-deoxy-2'-fluoroguanosine-3'-phosphate
  modified_base 17: mod_base = OTHER; note = 2'-O-methyluridine-3'-phosphate
  modified_base 18: mod_base = OTHER; note = 2'-O-methylcytidine-3'-phosphate
  modified_base 19: mod_base = OTHER; note = 2'-O-methyladenosine-3'-phosphate
  modified_base 20: mod_base = OTHER; note = 2'-O-methylcytidine-3'-phosphate
  modified_base 21: mod_base = OTHER; note = 2'-O-methyladenosine-3'-phosphorothioate
  modified_base 22: mod_base = OTHER; note = 2'-O-methylguanosine-3'-phosphorothioate
  modified_base 23: mod_base = OTHER; note = 2'-O-methyladenosine
atgacagagtcacatgtcacaga

SEQ ID NO: 1545 - RNA, 23 nt, synthetic construct
  source 1..23: mol_type = other RNA
  modified_base 1: mod_base = OTHER; note = 2'-O-methyladenosine-3'-phosphorothioate
  modified_base 2: mod_base = OTHER; note = 2'-deoxy-2'-fluorouridine-3'-phosphorothioate
  modified_base 3: mod_base = OTHER; note = 2'-O-methylcytidine-3'-phosphate
  modified_base 4: mod_base = OTHER; note = 2'-O-methylcytidine-3'-phosphate
  modified_base 5: mod_base = OTHER; note = 2'-O-methyluridine-3'-phosphate
  modified_base 6: mod_base = OTHER; note = 2'-deoxy-2'-fluoroguanosine-3'-phosphate
  modified_base 7: mod_base = OTHER; note = 2'-O-methyluridine-3'-phosphate
  modified_base 8: mod_base = OTHER; note = 2'-deoxy-2'-fluorocytidine-3'-phosphate
  modified_base 9: mod_base = OTHER; note = 2'-deoxy-2'-fluorouridine-3'-phosphate
  modified_base 10: mod_base = OTHER; note = 2'-O-methyluridine-3'-phosphate
  modified_base 11: mod_base = OTHER; note = 2'-O-methylcytidine-3'-phosphate
  modified_base 12: mod_base = OTHER; note = 2'-O-methyladenosine-3'-phosphate
  modified_base 13: mod_base = OTHER; note = 2'-O-methyladenosine-3'-phosphate
  modified_base 14: mod_base = OTHER; note = 2'-deoxy-2'-fluorouridine-3'-phosphate
  modified_base 15: mod_base = OTHER; note = 2'-O-methyluridine-3'-phosphate
  modified_base 16: mod_base = OTHER; note = 2'-deoxy-2'-fluoroguanosine-3'-phosphate
  modified_base 17: mod_base = OTHER; note = 2'-O-methyladenosine-3'-phosphate
  modified_base 18: mod_base = OTHER; note = 2'-O-methylcytidine-3'-phosphate
  modified_base 19: mod_base = OTHER; note = 2'-O-methyladenosine-3'-phosphate
  modified_base 20: mod_base = OTHER; note = 2'-O-methylguanosine-3'-phosphate
  modified_base 21: mod_base = OTHER; note = 2'-O-methyladenosine-3'-phosphorothioate
  modified_base 22: mod_base = OTHER; note = 2'-O-methylguanosine-3'-phosphorothioate
  modified_base 23: mod_base = OTHER; note = 2'-O-methyluridine
atcctgtcttcaattgacagagt

SEQ ID NO: 1546 - RNA, 23 nt, synthetic construct
  source 1..23: mol_type = other RNA
  modified_base 1: mod_base = OTHER; note = 2'-O-methyladenosine-3'-phosphorothioate
  modified_base 2: mod_base = OTHER; note = 2'-deoxy-2'-fluorocytidine-3'-phosphorothioate
  modified_base 3: mod_base = OTHER; note = 2'-O-methyluridine-3'-phosphate
  modified_base 4: mod_base = OTHER; note = 2'-O-methyluridine-3'-phosphate
  modified_base 5: mod_base = OTHER; note = 2'-O-methyluridine-3'-phosphate
  modified_base 6: mod_base = OTHER; note = 2'-deoxy-2'-fluorouridine-3'-phosphate
  modified_base 7: mod_base = OTHER; note = 2'-O-methyladenosine-3'-phosphate
  modified_base 8: mod_base = OTHER; note = 2'-deoxy-2'-fluoroadenosine-3'-phosphate
  modified_base 9: mod_base = OTHER; note = 2'-deoxy-2'-fluorouridine-3'-phosphate
  modified_base 10: mod_base = OTHER; note = 2'-O-methylguanosine-3'-phosphate
  modified_base 11: mod_base = OTHER; note = 2'-O-methyluridine-3'-phosphate
  modified_base 12: mod_base = OTHER; note = 2'-O-methylcytidine-3'-phosphate
  modified_base 13: mod_base = OTHER; note = 2'-O-methylcytidine-3'-phosphate
  modified_base 14: mod_base = OTHER; note = 2'-deoxy-2'-fluorouridine-3'-phosphate
  modified_base 15: mod_base = OTHER; note = 2'-O-methylguanosine-3'-phosphate
  modified_base 16: mod_base = OTHER; note = 2'-deoxy-2'-fluorouridine-3'-phosphate
  modified_base 17: mod_base = OTHER; note = 2'-O-methylcytidine-3'-phosphate
  modified_base 18: mod_base = OTHER; note = 2'-O-methyluridine-3'-phosphate
  modified_base 19: mod_base = OTHER; note = 2'-O-methyluridine-3'-phosphate
  modified_base 20: mod_base = OTHER; note = 2'-O-methylcytidine-3'-phosphate
  modified_base 21: mod_base = OTHER; note = 2'-O-methyladenosine-3'-phosphorothioate
  modified_base 22: mod_base = OTHER; note = 2'-O-methyladenosine-3'-phosphorothioate
  modified_base 23: mod_base = OTHER; note = 2'-O-methyluridine
acttttaatgtcctgtcttcaat

SEQ ID NO: 1547 - RNA, 23 nt, synthetic construct
  source 1..23: mol_type = other RNA
  modified_base 1: mod_base = OTHER; note = 2'-O-methyladenosine-3'-phosphorothioate
  modified_base 2: mod_base = OTHER; note = 2'-deoxy-2'-fluorouridine-3'-phosphorothioate
  modified_base 3: mod_base = OTHER; note = 2'-O-methylcytidine-3'-phosphate
  modified_base 4: mod_base = OTHER; note = 2'-O-methyluridine-3'-phosphate
  modified_base 5: mod_base = OTHER; note = 2'-O-methylcytidine-3'-phosphate
  modified_base 6: mod_base = OTHER; note = 2'-deoxy-2'-fluoroguanosine-3'-phosphate
  modified_base 7: mod_base = OTHER; note = 2'-O-methylcytidine-3'-phosphate
  modified_base 8: mod_base = OTHER; note = 2'-deoxy-2'-fluorouridine-3'-phosphate
  modified_base 9: mod_base = OTHER; note = 2'-deoxy-2'-fluorocytidine-3'-phosphate
  modified_base 10: mod_base = OTHER; note = 2'-O-methyluridine-3'-phosphate
  modified_base 11: mod_base = OTHER; note = 2'-O-methylcytidine-3'-phosphate
  modified_base 12: mod_base = OTHER; note = 2'-O-methyluridine-3'-phosphate
  modified_base 13: mod_base = OTHER; note = 2'-O-methyluridine-3'-phosphate
  modified_base 14: mod_base = OTHER; note = 2'-deoxy-2'-fluorouridine-3'-phosphate
  modified_base 15: mod_base = OTHER; note = 2'-O-methyluridine-3'-phosphate
  modified_base 16: mod_base = OTHER; note = 2'-deoxy-2'-fluoroadenosine-3'-phosphate
  modified_base 17: mod_base = OTHER; note = 2'-O-methyladenosine-3'-phosphate
  modified_base 18: mod_base = OTHER; note = 2'-O-methyluridine-3'-phosphate
  modified_base 19: mod_base = OTHER; note = 2'-O-methylguanosine-3'-phosphate
  modified_base 20: mod_base = OTHER; note = 2'-O-methyluridine-3'-phosphate
  modified_base 21: mod_base = OTHER; note = 2'-O-methylcytidine-3'-phosphorothioate
  modified_base 22: mod_base = OTHER; note = 2'-O-methylcytidine-3'-phosphorothioate
  modified_base 23: mod_base = OTHER; note = 2'-O-methyluridine
atctcgctctcttttaatgtcct

SEQ ID NO: 1548 - RNA, 23 nt, synthetic construct
  source 1..23: mol_type = other RNA
  modified_base 1: mod_base = OTHER; note = 2'-O-methyladenosine-3'-phosphorothioate
  modified_base 2: mod_base = OTHER; note = 2'-deoxy-2'-fluoroadenosine-3'-phosphorothioate
  modified_base 3: mod_base = OTHER; note = 2'-O-methyladenosine-3'-phosphate
  modified_base 4: mod_base = OTHER; note = 2'-O-methylcytidine-3'-phosphate
  modified_base 5: mod_base = OTHER; note = 2'-O-methyluridine-3'-phosphate
  modified_base 6: mod_base = OTHER; note = 2'-deoxy-2'-fluoroguanosine-3'-phosphate
  modified_base 7: mod_base = OTHER; note = 2'-O-methyluridine-3'-phosphate
  modified_base 8: mod_base = OTHER; note = 2'-deoxy-2'-fluorouridine-3'-phosphate
  modified_base 9: mod_base = OTHER; note = 2'-deoxy-2'-fluorouridine-3'-phosphate
  modified_base 10: mod_base = OTHER; note = 2'-O-methylcytidine-3'-phosphate
  modified_base 11: mod_base = OTHER; note = 2'-O-methyluridine-3'-phosphate
  modified_base 12: mod_base = OTHER; note = 2'-O-methylcytidine-3'-phosphate
  modified_base 13: mod_base = OTHER; note = 2'-O-methyluridine-3'-phosphate
  modified_base 14: mod_base = OTHER; note = 2'-deoxy-2'-fluorocytidine-3'-phosphate
  modified_base 15: mod_base = OTHER; note = 2'-O-methyluridine-3'-phosphate
  modified_base 16: mod_base = OTHER; note = 2'-deoxy-2'-fluorocytidine-3'-phosphate
  modified_base 17: mod_base = OTHER; note = 2'-O-methyluridine-3'-phosphate
  modified_base 18: mod_base = OTHER; note = 2'-O-methylcytidine-3'-phosphate
  modified_base 19: mod_base = OTHER; note = 2'-O-methylguanosine-3'-phosphate
  modified_base 20: mod_base = OTHER; note = 2'-O-methylcytidine-3'-phosphate
  modified_base 21: mod_base = OTHER; note = 2'-O-methyluridine-3'-phosphorothioate
  modified_base 22: mod_base = OTHER; note = 2'-O-methylcytidine-3'-phosphorothioate
  modified_base 23: mod_base = OTHER; note = 2'-O-methyluridine
aaactgtttctctctctcgctct

SEQ ID NO: 1549 - RNA, 23 nt, synthetic construct
  source 1..23: mol_type = other RNA
  modified_base 1: mod_base = OTHER; note = 2'-O-methyladenosine-3'-phosphorothioate
  modified_base 2: mod_base = OTHER; note = 2'-deoxy-2'-fluoroguanosine-3'-phosphorothioate
  modified_base 3: mod_base = OTHER; note = 2'-O-methylcytidine-3'-phosphate
  modified_base 4: mod_base = OTHER; note = 2'-O-methyladenosine-3'-phosphate
  modified_base 5: mod_base = OTHER; note = 2'-O-methylguanosine-3'-phosphate
  modified_base 6: mod_base = OTHER; note = 2'-deoxy-2'-fluorouridine-3'-phosphate
  modified_base 7: mod_base = OTHER; note = 2'-O-methyladenosine-3'-phosphate
  modified_base 8: mod_base = OTHER; note = 2'-deoxy-2'-fluoroadenosine-3'-phosphate
  modified_base 9: mod_base = OTHER; note = 2'-deoxy-2'-fluorouridine-3'-phosphate
  modified_base 10: mod_base = OTHER; note = 2'-O-methylcytidine-3'-phosphate
  modified_base 11: mod_base = OTHER; note = 2'-O-methyluridine-3'-phosphate
  modified_base 12: mod_base = OTHER; note = 2'-O-methylguanosine-3'-phosphate
  modified_base 13: mod_base = OTHER; note = 2'-O-methyladenosine-3'-phosphate
  modified_base 14: mod_base = OTHER; note = 2'-deoxy-2'-fluoroadenosine-3'-phosphate
  modified_base 15: mod_base = OTHER; note = 2'-O-methylcytidine-3'-phosphate
  modified_base 16: mod_base = OTHER; note = 2'-deoxy-2'-fluorouridine-3'-phosphate
  modified_base 17: mod_base = OTHER; note = 2'-O-methylguanosine-3'-phosphate
  modified_base 18: mod_base = OTHER; note = 2'-O-methyluridine-3'-phosphate
  modified_base 19: mod_base = OTHER; note = 2'-O-methyluridine-3'-phosphate
  modified_base 20: mod_base = OTHER; note = 2'-O-methyluridine-3'-phosphate
  modified_base 21: mod_base = OTHER; note = 2'-O-methylcytidine-3'-phosphorothioate
  modified_base 22: mod_base = OTHER; note = 2'-O-methyluridine-3'-phosphorothioate
  modified_base 23: mod_base = OTHER; note = 2'-O-methylcytidine
agcagtaatctgaactgtttctc

SEQ ID NO: 1550 - RNA, 23 nt, synthetic construct
  source 1..23: mol_type = other RNA
  modified_base 1: mod_base = OTHER; note = 2'-O-methyladenosine-3'-phosphorothioate
  modified_base 2: mod_base = OTHER; note = 2'-deoxy-2'-fluoroadenosine-3'-phosphorothioate
  modified_base 3: mod_base = OTHER; note = 2'-O-methyluridine-3'-phosphate
  modified_base 4: mod_base = OTHER; note = 2'-O-methylcytidine-3'-phosphate
  modified_base 5: mod_base = OTHER; note = 2'-O-methylcytidine-3'-phosphate
  modified_base 6: mod_base = OTHER; note = 2'-deoxy-2'-fluoroadenosine-3'-phosphate
  modified_base 7: mod_base = OTHER; note = 2'-O-methylcytidine-3'-phosphate
  modified_base 8: mod_base = OTHER; note = 2'-deoxy-2'-fluoroadenosine-3'-phosphate
  modified_base 9: mod_base = OTHER; note = 2'-deoxy-2'-fluorouridine-3'-phosphate
  modified_base 10: mod_base = OTHER; note = 2'-O-methylguanosine-3'-phosphate
  modified_base 11: mod_base = OTHER; note = 2'-O-methyluridine-3'-phosphate
  modified_base 12: mod_base = OTHER; note = 2'-O-methylguanosine-3'-phosphate
  modified_base 13: mod_base = OTHER; note = 2'-O-methylcytidine-3'-phosphate
  modified_base 14: mod_base = OTHER; note = 2'-deoxy-2'-fluoroadenosine-3'-phosphate
  modified_base 15: mod_base = OTHER; note = 2'-O-methylguanosine-3'-phosphate
  modified_base 16: mod_base = OTHER; note = 2'-deoxy-2'-fluorouridine-3'-phosphate
  modified_base 17: mod_base = OTHER; note = 2'-O-methyladenosine-3'-phosphate
  modified_base 18: mod_base = OTHER; note = 2'-O-methyladenosine-3'-phosphate
  modified_base 19: mod_base = OTHER; note = 2'-O-methyluridine-3'-phosphate
  modified_base 20: mod_base = OTHER; note = 2'-O-methylcytidine-3'-phosphate
  modified_base 21: mod_base = OTHER; note = 2'-O-methyluridine-3'-phosphorothioate
  modified_base 22: mod_base = OTHER; note = 2'-O-methylguanosine-3'-phosphorothioate
  modified_base 23: mod_base = OTHER; note = 2'-O-methyladenosine
aatccacatgtgcagtaatctga

SEQ ID NO: 1551 - RNA, 23 nt, synthetic construct
  source 1..23: mol_type = other RNA
  modified_base 1: mod_base = OTHER; note = 2'-O-methyladenosine-3'-phosphorothioate
  modified_base 2: mod_base = OTHER; note = 2'-deoxy-2'-fluoroadenosine-3'-phosphorothioate
  modified_base 3: mod_base = OTHER; note = 2'-O-methyladenosine-3'-phosphate
  modified_base 4: mod_base = OTHER; note = 2'-O-methyladenosine-3'-phosphate
  modified_base 5: mod_base = OTHER; note = 2'-O-methyladenosine-3'-phosphate
  modified_base 6: mod_base = OTHER; note = 2'-deoxy-2'-fluorouridine-3'-phosphate
  modified_base 7: mod_base = OTHER; note = 2'-O-methylguanosine-3'-phosphate
  modified_base 8: mod_base = OTHER; note = 2'-deoxy-2'-fluoroguanosine-3'-phosphate
  modified_base 9: mod_base = OTHER; note = 2'-deoxy-2'-fluorocytidine-3'-phosphate
  modified_base 10: mod_base = OTHER; note = 2'-O-methyladenosine-3'-phosphate
  modified_base 11: mod_base = OTHER; note = 2'-O-methyluridine-3'-phosphate
  modified_base 12: mod_base = OTHER; note = 2'-O-methyluridine-3'-phosphate
  modified_base 13: mod_base = OTHER; note = 2'-O-methyluridine-3'-phosphate
  modified_base 14: mod_base = OTHER; note = 2'-deoxy-2'-fluorouridine-3'-phosphate
  modified_base 15: mod_base = OTHER; note = 2'-O-methylguanosine-3'-phosphate
  modified_base 16: mod_base = OTHER; note = 2'-deoxy-2'-fluoroadenosine-3'-phosphate
  modified_base 17: mod_base = OTHER; note = 2'-O-methyladenosine-3'-phosphate
  modified_base 18: mod_base = OTHER; note = 2'-O-methylcytidine-3'-phosphate
  modified_base 19: mod_base = OTHER; note = 2'-O-methylcytidine-3'-phosphate
  modified_base 20: mod_base = OTHER; note = 2'-O-methyladenosine-3'-phosphate
  modified_base 21: mod_base = OTHER; note = 2'-O-methylcytidine-3'-phosphorothioate
  modified_base 22: mod_base = OTHER; note = 2'-O-methyluridine-3'-phosphorothioate
  modified_base 23: mod_base = OTHER; note = 2'-O-methylcytidine
aaaaatggcattttgaaccactc

SEQ ID NO: 1552 - RNA, 23 nt, synthetic construct
  source 1..23: mol_type = other RNA
  modified_base 1: mod_base = OTHER; note = 2'-O-methyladenosine-3'-phosphorothioate
  modified_base 2: mod_base = OTHER; note = 2'-deoxy-2'-fluoroadenosine-3'-phosphorothioate
  modified_base 3: mod_base = OTHER; note = 2'-O-methyladenosine-3'-phosphate
  modified_base 4: mod_base = OTHER; note = 2'-O-methylcytidine-3'-phosphate
  modified_base 5: mod_base = OTHER; note = 2'-O-methyladenosine-3'-phosphate
  modified_base 6: mod_base = OTHER; note = 2'-deoxy-2'-fluorocytidine-3'-phosphate
  modified_base 7: mod_base = OTHER; note = 2'-O-methyluridine-3'-phosphate
  modified_base 8: mod_base = OTHER; note = 2'-deoxy-2'-fluoroguanosine-3'-phosphate
  modified_base 9: mod_base = OTHER; note = 2'-deoxy-2'-fluorouridine-3'-phosphate
  modified_base 10: mod_base = OTHER; note = 2'-O-methylguanosine-3'-phosphate
  modified_base 11: mod_base = OTHER; note = 2'-O-methylcytidine-3'-phosphate
  modified_base 12: mod_base = OTHER; note = 2'-O-methyladenosine-3'-phosphate
  modified_base 13: mod_base = OTHER; note = 2'-O-methyladenosine-3'-phosphate
  modified_base 14: mod_base = OTHER; note = 2'-deoxy-2'-fluoroadenosine-3'-phosphate
  modified_base 15: mod_base = OTHER; note = 2'-O-methyladenosine-3'-phosphate
  modified_base 16: mod_base = OTHER; note = 2'-deoxy-2'-fluoroadenosine-3'-phosphate
  modified_base 17: mod_base = OTHER; note = 2'-O-methyluridine-3'-phosphate
  modified_base 18: mod_base = OTHER; note = 2'-O-methylguanosine-3'-phosphate
  modified_base 19: mod_base = OTHER; note = 2'-O-methylguanosine-3'-phosphate
  modified_base 20: mod_base = OTHER; note = 2'-O-methylcytidine-3'-phosphate
  modified_base 21: mod_base = OTHER; note = 2'-O-methyladenosine-3'-phosphorothioate
  modified_base 22: mod_base = OTHER; note = 2'-O-methyluridine-3'-phosphorothioate
  modified_base 23: mod_base = OTHER; note = 2'-O-methyluridine
aaacactgtgcaaaaatggcatt

SEQ ID NO: 1553 - RNA, 23 nt, synthetic construct
  source 1..23: mol_type = other RNA
  modified_base 1: mod_base = OTHER; note = 2'-O-methyladenosine-3'-phosphorothioate
  modified_base 2: mod_base = OTHER; note = 2'-deoxy-2'-fluoroadenosine-3'-phosphorothioate
  modified_base 3: mod_base = OTHER; note = 2'-O-methyluridine-3'-phosphate
  modified_base 4: mod_base = OTHER; note = 2'-O-methyluridine-3'-phosphate
  modified_base 5: mod_base = OTHER; note = 2'-O-methyluridine-3'-phosphate
  modified_base 6: mod_base = OTHER; note = 2'-deoxy-2'-fluorouridine-3'-phosphate
  modified_base 7: mod_base = OTHER; note = 2'-O-methylguanosine-3'-phosphate
  modified_base 8: mod_base = OTHER; note = 2'-deoxy-2'-fluorouridine-3'-phosphate
  modified_base 9: mod_base = OTHER; note = 2'-deoxy-2'-fluoroadenosine-3'-phosphate
  modified_base 10: mod_base = OTHER; note = 2'-O-methyladenosine-3'-phosphate
  modified_base 11: mod_base = OTHER; note = 2'-O-methyluridine-3'-phosphate
  modified_base 12: mod_base = OTHER; note = 2'-O-methyluridine-3'-phosphate
  modified_base 13: mod_base = OTHER; note = 2'-O-methylcytidine-3'-phosphate
  modified_base 14: mod_base = OTHER; note = 2'-deoxy-2'-fluorocytidine-3'-phosphate
  modified_base 15: mod_base = OTHER; note = 2'-O-methyluridine-3'-phosphate
  modified_base 16: mod_base = OTHER; note = 2'-deoxy-2'-fluoroadenosine-3'-phosphate
  modified_base 17: mod_base = OTHER; note = 2'-O-methyladenosine-3'-phosphate
  modified_base 18: mod_base = OTHER; note = 2'-O-methylcytidine-3'-phosphate
  modified_base 19: mod_base = OTHER; note = 2'-O-methyladenosine-3'-phosphate
  modified_base 20: mod_base = OTHER; note = 2'-O-methylcytidine-3'-phosphate
  modified_base 21: mod_base = OTHER; note = 2'-O-methyluridine-3'-phosphorothioate
  modified_base 22: mod_base = OTHER; note = 2'-O-methylguanosine-3'-phosphorothioate
  modified_base 23: mod_base = OTHER; note = 2'-O-methyluridine
aattttgtaattcctaacactgt

SEQ ID NO: 1554 - RNA, 23 nt, synthetic construct
  source 1..23: mol_type = other RNA
  modified_base 1: mod_base = OTHER; note = 2'-O-methyladenosine-3'-phosphorothioate
  modified_base 2: mod_base = OTHER; note = 2'-deoxy-2'-fluorocytidine-3'-phosphorothioate
  modified_base 3: mod_base = OTHER; note = 2'-O-methyluridine-3'-phosphate
  modified_base 4: mod_base = OTHER; note = 2'-O-methyluridine-3'-phosphate
  modified_base 5: mod_base = OTHER; note = 2'-O-methylcytidine-3'-phosphate
  modified_base 6: mod_base = OTHER; note = 2'-deoxy-2'-fluorouridine-3'-phosphate
  modified_base 7: mod_base = OTHER; note = 2'-O-methylguanosine-3'-phosphate
  modified_base 8: mod_base = OTHER; note = 2'-deoxy-2'-fluorouridine-3'-phosphate
  modified_base 9: mod_base = OTHER; note = 2'-deoxy-2'-fluoroguanosine-3'-phosphate
  modified_base 10: mod_base = OTHER; note = 2'-O-methylguanosine-3'-phosphate
  modified_base 11: mod_base = OTHER; note = 2'-O-methyladenosine-3'-phosphate
  modified_base 12: mod_base = OTHER; note = 2'-O-methyluridine-3'-phosphate
  modified_base 13: mod_base = OTHER; note = 2'-O-methyluridine-3'-phosphate
  modified_base 14: mod_base = OTHER; note = 2'-deoxy-2'-fluorouridine-3'-phosphate
  modified_base 15: mod_base = OTHER; note = 2'-O-methyluridine-3'-phosphate
  modified_base 16: mod_base = OTHER; note = 2'-deoxy-2'-fluoroguanosine-3'-phosphate
  modified_base 17: mod_base = OTHER; note = 2'-O-methyluridine-3'-phosphate
  modified_base 18: mod_base = OTHER; note = 2'-O-methyladenosine-3'-phosphate
  modified_base 19: mod_base = OTHER; note = 2'-O-methyladenosine-3'-phosphate
  modified_base 20: mod_base = OTHER; note = 2'-O-methyluridine-3'-phosphate
  modified_base 21: mod_base = OTHER; note = 2'-O-methyluridine-3'-phosphorothioate
  modified_base 22: mod_base = OTHER; note = 2'-O-methylcytidine-3'-phosphorothioate
  modified_base 23: mod_base = OTHER; note = 2'-O-methylcytidine
acttctgtggattttgtaattcc

SEQ ID NO: 1555 - RNA, 23 nt, synthetic construct
  source 1..23: mol_type = other RNA
  modified_base 1: mod_base = OTHER; note = 2'-O-methyladenosine-3'-phosphorothioate
  modified_base 2: mod_base = OTHER; note = 2'-deoxy-2'-fluoroguanosine-3'-phosphorothioate
  modified_base 3: mod_base = OTHER; note = 2'-O-methylcytidine-3'-phosphate
  modified_base 4: mod_base = OTHER; note = 2'-O-methyladenosine-3'-phosphate
  modified_base 5: mod_base = OTHER; note = 2'-O-methyladenosine-3'-phosphate
  modified_base 6: mod_base = OTHER; note = 2'-deoxy-2'-fluoroguanosine-3'-phosphate
  modified_base 7: mod_base = OTHER; note = 2'-O-methyluridine-3'-phosphate
  modified_base 8: mod_base = OTHER; note = 2'-deoxy-2'-fluoroadenosine-3'-phosphate
  modified_base 9: mod_base = OTHER; note = 2'-deoxy-2'-fluoroadenosine-3'-phosphate
  modified_base 10: mod_base = OTHER; note = 2'-O-methylcytidine-3'-phosphate
  modified_base 11: mod_base = OTHER; note = 2'-O-methyladenosine-3'-phosphate
  modified_base 12: mod_base = OTHER; note = 2'-O-methyluridine-3'-phosphate
  modified_base 13: mod_base = OTHER; note = 2'-O-methylcytidine-3'-phosphate
  modified_base 14: mod_base = OTHER; note = 2'-deoxy-2'-fluorouridine-3'-phosphate
  modified_base 15: mod_base = OTHER; note = 2'-O-methyluridine-3'-phosphate
  modified_base 16: mod_base = OTHER; note = 2'-deoxy-2'-fluorocytidine-3'-phosphate
  modified_base 17: mod_base = OTHER; note = 2'-O-methyluridine-3'-phosphate
  modified_base 18: mod_base = OTHER; note = 2'-O-methylguanosine-3'-phosphate
  modified_base 19: mod_base = OTHER; note = 2'-O-methyluridine-3'-phosphate
  modified_base 20: mod_base = OTHER; note = 2'-O-methylguanosine-3'-phosphate
  modified_base 21: mod_base = OTHER; note = 2'-O-methylguanosine-3'-phosphorothioate
  modified_base 22: mod_base = OTHER; note = 2'-O-methyladenosine-3'-phosphorothioate
  modified_base 23: mod_base = OTHER; note = 2'-O-methyluridine
agcaagtaacatcttctgtggat

SEQ ID NO: 1556 - RNA, 23 nt, synthetic construct
  source 1..23: mol_type = other RNA
  modified_base 1: mod_base = OTHER; note = 2'-O-methyladenosine-3'-phosphorothioate
  modified_base 2: mod_base = OTHER; note = 2'-deoxy-2'-fluoroadenosine-3'-phosphorothioate
  modified_base 3: mod_base = OTHER; note = 2'-O-methyluridine-3'-phosphate
  modified_base 4: mod_base = OTHER; note = 2'-O-methyluridine-3'-phosphate
  modified_base 5: mod_base = OTHER; note = 2'-O-methyluridine-3'-phosphate
  modified_base 6: mod_base = OTHER; note = 2'-deoxy-2'-fluorouridine-3'-phosphate
  modified_base 7: mod_base = OTHER; note = 2'-O-methyladenosine-3'-phosphate
  modified_base 8: mod_base = OTHER; note = 2'-deoxy-2'-fluorouridine-3'-phosphate
  modified_base 9: mod_base = OTHER; note = 2'-deoxy-2'-fluorouridine-3'-phosphate
  modified_base 10: mod_base = OTHER; note = 2'-O-methyluridine-3'-phosphate
  modified_base 11: mod_base = OTHER; note = 2'-O-methyladenosine-3'-phosphate
  modified_base 12: mod_base = OTHER; note = 2'-O-methyladenosine-3'-phosphate
  modified_base 13: mod_base = OTHER; note = 2'-O-methylguanosine-3'-phosphate
  modified_base 14: mod_base = OTHER; note = 2'-deoxy-2'-fluoroadenosine-3'-phosphate
  modified_base 15: mod_base = OTHER; note = 2'-O-methyluridine-3'-phosphate
  modified_base 16: mod_base = OTHER; note = 2'-deoxy-2'-fluorocytidine-3'-phosphate
  modified_base 17: mod_base = OTHER; note = 2'-O-methyluridine-3'-phosphate
  modified_base 18: mod_base = OTHER; note = 2'-O-methylguanosine-3'-phosphate
  modified_base 19: mod_base = OTHER; note = 2'-O-methylcytidine-3'-phosphate
  modified_base 20: mod_base = OTHER; note = 2'-O-methylcytidine-3'-phosphate
  modified_base 21: mod_base = OTHER; note = 2'-O-methylcytidine-3'-phosphorothioate
  modified_base 22: mod_base = OTHER; note = 2'-O-methyladenosine-3'-phosphorothioate
  modified_base 23: mod_base = OTHER; note = 2'-O-methylguanosine
aattttatttaagatctgcccag

SEQ ID NO: 1557 - RNA, 23 nt, synthetic construct
  source 1..23: mol_type = other RNA
  modified_base 1: mod_base = OTHER; note = 2'-O-methyladenosine-3'-phosphorothioate
  modified_base 2: mod_base = OTHER; note = 2'-deoxy-2'-fluoroadenosine-3'-phosphorothioate
  modified_base 3: mod_base = OTHER; note = 2'-O-methyladenosine-3'-phosphate
  modified_base 4: mod_base = OTHER; note = 2'-O-methylcytidine-3'-phosphate
  modified_base 5: mod_base = OTHER; note = 2'-O-methyladenosine-3'-phosphate
  modified_base 6: mod_base = OTHER; note = 2'-deoxy-2'-fluoroguanosine-3'-phosphate
  modified_base 7: mod_base = OTHER; note = 2'-O-methyladenosine-3'-phosphate
  modified_base 8: mod_base = OTHER; note = 2'-deoxy-2'-fluoroadenosine-3'-phosphate
  modified_base 9: mod_base = OTHER; note = 2'-deoxy-2'-fluoroguanosine-3'-phosphate
  modified_base 10: mod_base = OTHER; note = 2'-O-methyluridine-3'-phosphate
  modified_base 11: mod_base = OTHER; note = 2'-O-methyladenosine-3'-phosphate
  modified_base 12: mod_base = OTHER; note = 2'-O-methylguanosine-3'-phosphate
  modified_base 13: mod_base = OTHER; note = 2'-O-methyladenosine-3'-phosphate
  modified_base 14: mod_base = OTHER; note = 2'-deoxy-2'-fluoroguanosine-3'-phosphate
  modified_base 15: mod_base = OTHER; note = 2'-O-methyluridine-3'-phosphate
  modified_base 16: mod_base = OTHER; note = 2'-deoxy-2'-fluorouridine-3'-phosphate
  modified_base 17: mod_base = OTHER; note = 2'-O-methyluridine-3'-phosphate
  modified_base 18: mod_base = OTHER; note = 2'-O-methylguanosine-3'-phosphate
  modified_base 19: mod_base = OTHER; note = 2'-O-methyladenosine-3'-phosphate
  modified_base 20: mod_base = OTHER; note = 2'-O-methyladenosine-3'-phosphate
  modified_base 21: mod_base = OTHER; note = 2'-O-methyluridine-3'-phosphorothioate
  modified_base 22: mod_base = OTHER; note = 2'-O-methyluridine-3'-phosphorothioate
  modified_base 23: mod_base = OTHER; note = 2'-O-methyluridine
aaacagaagtagagtttgaattt

SEQ ID NO: 1558 - RNA, 23 nt, synthetic construct
  source 1..23: mol_type = other RNA
  modified_base 1: mod_base = OTHER; note = 2'-O-methyladenosine-3'-phosphorothioate
  modified_base 2: mod_base = OTHER; note = 2'-deoxy-2'-fluoroadenosine-3'-phosphorothioate
  modified_base 3: mod_base = OTHER; note = 2'-O-methyluridine-3'-phosphate
  modified_base 4: mod_base = OTHER; note = 2'-O-methyladenosine-3'-phosphate
  modified_base 5: mod_base = OTHER; note = 2'-O-methylcytidine-3'-phosphate
  modified_base 6: mod_base = OTHER; note = 2'-deoxy-2'-fluorouridine-3'-phosphate
  modified_base 7: mod_base = OTHER; note = 2'-O-methyladenosine-3'-phosphate
  modified_base 8: mod_base = OTHER; note = 2'-deoxy-2'-fluoroguanosine-3'-phosphate
  modified_base 9: mod_base = OTHER; note = 2'-deoxy-2'-fluoroadenosine-3'-phosphate
  modified_base 10: mod_base = OTHER; note = 2'-O-methylcytidine-3'-phosphate
  modified_base 11: mod_base = OTHER; note = 2'-O-methyladenosine-3'-phosphate
  modified_base 12: mod_base = OTHER; note = 2'-O-methyladenosine-3'-phosphate
  modified_base 13: mod_base = OTHER; note = 2'-O-methylcytidine-3'-phosphate
  modified_base 14: mod_base = OTHER; note = 2'-deoxy-2'-fluoroadenosine-3'-phosphate
  modified_base 15: mod_base = OTHER; note = 2'-O-methylguanosine-3'-phosphate
  modified_base 16: mod_base = OTHER; note = 2'-deoxy-2'-fluoroadenosine-3'-phosphate
  modified_base 17: mod_base = OTHER; note = 2'-O-methyladenosine-3'-phosphate
  modified_base 18: mod_base = OTHER; note = 2'-O-methylguanosine-3'-phosphate
  modified_base 19: mod_base = OTHER; note = 2'-O-methyluridine-3'-phosphate
  modified_base 20: mod_base = OTHER; note = 2'-O-methyladenosine-3'-phosphate
  modified_base 21: mod_base = OTHER; note = 2'-O-methylguanosine-3'-phosphorothioate
  modified_base 22: mod_base = OTHER; note = 2'-O-methyladenosine-3'-phosphorothioate
  modified_base 23: mod_base = OTHER; note = 2'-O-methylguanosine
aatactagacaacagaagtagag

SEQ ID NO: 1559 - RNA, 23 nt, synthetic construct
  source 1..23: mol_type = other RNA
  modified_base 1: mod_base = OTHER; note = 2'-O-methyladenosine-3'-phosphorothioate
  modified_base 2: mod_base = OTHER; note = 2'-deoxy-2'-fluoroadenosine-3'-phosphorothioate
  modified_base 3: mod_base = OTHER; note = 2'-O-methyluridine-3'-phosphate
  modified_base 4: mod_base = OTHER; note = 2'-O-methyluridine-3'-phosphate
  modified_base 5: mod_base = OTHER; note = 2'-O-methyladenosine-3'-phosphate
  modified_base 6: mod_base = OTHER; note = 2'-deoxy-2'-fluoroguanosine-3'-phosphate
  modified_base 7: mod_base = OTHER; note = 2'-O-methylcytidine-3'-phosphate
  modified_base 8: mod_base = OTHER; note = 2'-deoxy-2'-fluorouridine-3'-phosphate
  modified_base 9: mod_base = OTHER; note = 2'-deoxy-2'-fluorocytidine-3'-phosphate
  modified_base 10: mod_base = OTHER; note = 2'-O-methyladenosine-3'-phosphate
  modified_base 11: mod_base = OTHER; note = 2'-O-methyladenosine-3'-phosphate
  modified_base 12: mod_base = OTHER; note = 2'-O-methyluridine-3'-phosphate
  modified_base 13: mod_base = OTHER; note = 2'-O-methyladenosine-3'-phosphate
  modified_base 14: mod_base = OTHER; note = 2'-deoxy-2'-fluoroadenosine-3'-phosphate
  modified_base 15: mod_base = OTHER; note = 2'-O-methylcytidine-3'-phosphate
  modified_base 16: mod_base = OTHER; note = 2'-deoxy-2'-fluoroadenosine-3'-phosphate
  modified_base 17: mod_base = OTHER; note = 2'-O-methyluridine-3'-phosphate
  modified_base 18: mod_base = OTHER; note = 2'-O-methyladenosine-3'-phosphate
  modified_base 19: mod_base = OTHER; note = 2'-O-methylcytidine-3'-phosphate
  modified_base 20: mod_base = OTHER; note = 2'-O-methyluridine-3'-phosphate
  modified_base 21: mod_base = OTHER; note = 2'-O-methyladenosine-3'-phosphorothioate
  modified_base 22: mod_base = OTHER; note = 2'-O-methylguanosine-3'-phosphorothioate
  modified_base 23: mod_base = OTHER; note = 2'-O-methyladenosine
aattagctcaataacatactaga

SEQ ID NO: 1560 - RNA, 23 nt, synthetic construct
  source 1..23: mol_type = other RNA
  modified_base 1: mod_base = OTHER; note = 2'-O-methyladenosine-3'-phosphorothioate
  modified_base 2: mod_base = OTHER; note = 2'-deoxy-2'-fluorocytidine-3'-phosphorothioate
  modified_base 3: mod_base = OTHER; note = 2'-O-methyladenosine-3'-phosphate
  modified_base 4: mod_base = OTHER; note = 2'-O-methyladenosine-3'-phosphate
  modified_base 5: mod_base = OTHER; note = 2'-O-methyluridine-3'-phosphate
  modified_base 6: mod_base = OTHER; note = 2'-deoxy-2'-fluoroguanosine-3'-phosphate
  modified_base 7: mod_base = OTHER; note = 2'-O-methyladenosine-3'-phosphate
  modified_base 8: mod_base = OTHER; note = 2'-deoxy-2'-fluoroadenosine-3'-phosphate
  modified_base 9: mod_base = OTHER; note = 2'-deoxy-2'-fluorouridine-3'-phosphate
  modified_base 10: mod_base = OTHER; note = 2'-O-methylcytidine-3'-phosphate
  modified_base 11: mod_base = OTHER; note = 2'-O-methyladenosine-3'-phosphate
  modified_base 12: mod_base = OTHER; note = 2'-O-methyluridine-3'-phosphate
  modified_base 13: mod_base = OTHER; note = 2'-O-methyluridine-3'-phosphate
  modified_base 14: mod_base = OTHER; note = 2'-deoxy-2'-fluoroadenosine-3'-phosphate
  modified_base 15: mod_base = OTHER; note = 2'-O-methylguanosine-3'-phosphate
  modified_base 16: mod_base = OTHER; note = 2'-deoxy-2'-fluorocytidine-3'-phosphate
  modified_base 17: mod_base = OTHER; note = 2'-O-methyluridine-3'-phosphate
  modified_base 18: mod_base = OTHER; note = 2'-O-methylcytidine-3'-phosphate
  modified_base 19: mod_base = OTHER; note = 2'-O-methyladenosine-3'-phosphate
  modified_base 20: mod_base = OTHER; note = 2'-O-methyladenosine-3'-phosphate
  modified_base 21: mod_base = OTHER; note = 2'-O-methyluridine-3'-phosphorothioate
  modified_base 22: mod_base = OTHER; note = 2'-O-methyladenosine-3'-phosphorothioate
  modified_base 23: mod_base = OTHER; note = 2'-O-methyladenosine
acaatgaatcattagctcaataa

SEQ ID NO: 1561 - RNA, 23 nt, synthetic construct
  source 1..23: mol_type = other RNA
  modified_base 1: mod_base = OTHER; note = 2'-O-methyladenosine-3'-phosphorothioate
  modified_base 2: mod_base = OTHER; note = 2'-deoxy-2'-fluorouridine-3'-phosphorothioate
  modified_base 3: mod_base = OTHER; note = 2'-O-methyladenosine-3'-phosphate
  modified_base 4: mod_base = OTHER; note = 2'-O-methyladenosine-3'-phosphate
  modified_base 5: mod_base = OTHER; note = 2'-O-methyladenosine-3'-phosphate
  modified_base 6: mod_base = OTHER; note = 2'-deoxy-2'-fluoroadenosine-3'-phosphate
  modified_base 7: mod_base = OTHER; note = 2'-O-methyladenosine-3'-phosphate
  modified_base 8: mod_base = OTHER; note = 2'-deoxy-2'-fluoroguanosine-3'-phosphate
  modified_base 9: mod_base = OTHER; note = 2'-deoxy-2'-fluoroguanosine-3'-phosphate
  modified_base 10: mod_base = OTHER; note = 2'-O-methyluridine-3'-phosphate
  modified_base 11: mod_base = OTHER; note = 2'-O-methyladenosine-3'-phosphate
  modified_base 12: mod_base = OTHER; note = 2'-O-methyluridine-3'-phosphate
  modified_base 13: mod_base = OTHER; note = 2'-O-methyluridine-3'-phosphate
  modified_base 14: mod_base = OTHER; note = 2'-deoxy-2'-fluorouridine-3'-phosphate
  modified_base 15: mod_base = OTHER; note = 2'-O-methyluridine-3'-phosphate
  modified_base 16: mod_base = OTHER; note = 2'-deoxy-2'-fluorocytidine-3'-phosphate
  modified_base 17: mod_base = OTHER; note = 2'-O-methylcytidine-3'-phosphate
  modified_base 18: mod_base = OTHER; note = 2'-O-methylcytidine-3'-phosphate
  modified_base 19: mod_base = OTHER; note = 2'-O-methyladenosine-3'-phosphate
  modified_base 20: mod_base = OTHER; note = 2'-O-methyladenosine-3'-phosphate
  modified_base 21: mod_base = OTHER; note = 2'-O-methyluridine-3'-phosphorothioate
  modified_base 22: mod_base = OTHER; note = 2'-O-methylguanosine-3'-phosphorothioate
  modified_base 23: mod_base = OTHER; note = 2'-O-methyladenosine
ataaaaaggtattttcccaatga

SEQ ID NO: 1562 - RNA, 23 nt, synthetic construct
  source 1..23: mol_type = other RNA
  modified_base 1: mod_base = OTHER; note = 2'-O-methyladenosine-3'-phosphorothioate
  modified_base 2: mod_base = OTHER; note = 2'-deoxy-2'-fluorouridine-3'-phosphorothioate
  modified_base 3: mod_base = OTHER; note = 2'-O-methylguanosine-3'-phosphate
  modified_base 4: mod_base = OTHER; note = 2'-O-methyladenosine-3'-phosphate
  modified_base 5: mod_base = OTHER; note = 2'-O-methyluridine-3'-phosphate
  modified_base 6: mod_base = OTHER; note = 2'-deoxy-2'-fluoroadenosine-3'-phosphate
  modified_base 7: mod_base = OTHER; note = 2'-O-methyladenosine-3'-phosphate
  modified_base 8: mod_base = OTHER; note = 2'-deoxy-2'-fluoroadenosine-3'-phosphate
  modified_base 9: mod_base = OTHER; note = 2'-deoxy-2'-fluoroguanosine-3'-phosphate
  modified_base 10: mod_base = OTHER; note = 2'-O-methylguanosine-3'-phosphate
  modified_base 11: mod_base = OTHER; note = 2'-O-methyladenosine-3'-phosphate
  modified_base 12: mod_base = OTHER; note = 2'-O-methylguanosine-3'-phosphate
  modified_base 13: mod_base = OTHER; note = 2'-O-methyluridine-3'-phosphate
  modified_base 14: mod_base = OTHER; note = 2'-deoxy-2'-fluoroadenosine-3'-phosphate
  modified_base 15: mod_base = OTHER; note = 2'-O-methyluridine-3'-phosphate
  modified_base 16: mod_base = OTHER; note = 2'-deoxy-2'-fluoroadenosine-3'-phosphate
  modified_base 17: mod_base = OTHER; note = 2'-O-methyladenosine-3'-phosphate
  modified_base 18: mod_base = OTHER; note = 2'-O-methyladenosine-3'-phosphate
  modified_base 19: mod_base = OTHER; note = 2'-O-methyladenosine-3'-phosphate
  modified_base 20: mod_base = OTHER; note = 2'-O-methyladenosine-3'-phosphate
  modified_base 21: mod_base = OTHER; note = 2'-O-methylguanosine-3'-phosphorothioate
  modified_base 22: mod_base = OTHER; note = 2'-O-methylguanosine-3'-phosphorothioate
  modified_base 23: mod_base = OTHER; note = 2'-O-methyluridine
atgataaaggagtataaaaaggt

SEQ ID NO: 1563 - RNA, 23 nt, synthetic construct
  source 1..23: mol_type = other RNA
  modified_base 1: mod_base = OTHER; note = 2'-O-methyladenosine-3'-phosphorothioate
  modified_base 2: mod_base = OTHER; note = 2'-deoxy-2'-fluorouridine-3'-phosphorothioate
  modified_base 3: mod_base = OTHER; note = 2'-O-methyladenosine-3'-phosphate
  modified_base 4: mod_base = OTHER; note = 2'-O-methylcytidine-3'-phosphate
  modified_base 5: mod_base = OTHER; note = 2'-O-methyladenosine-3'-phosphate
  modified_base 6: mod_base = OTHER; note = 2'-deoxy-2'-fluoroguanosine-3'-phosphate
  modified_base 7: mod_base = OTHER; note = 2'-O-methyluridine-3'-phosphate
  modified_base 8: mod_base = OTHER; note = 2'-deoxy-2'-fluoroadenosine-3'-phosphate
  modified_base 9: mod_base = OTHER; note = 2'-deoxy-2'-fluorocytidine-3'-phosphate
  modified_base 10: mod_base = OTHER; note = 2'-O-methylcytidine-3'-phosphate
  modified_base 11: mod_base = OTHER; note = 2'-O-methyladenosine-3'-phosphate
  modified_base 12: mod_base = OTHER; note = 2'-O-methyluridine-3'-phosphate
  modified_base 13: mod_base = OTHER; note = 2'-O-methylguanosine-3'-phosphate
  modified_base 14: mod_base = OTHER; note = 2'-deoxy-2'-fluoroadenosine-3'-phosphate
  modified_base 15: mod_base = OTHER; note = 2'-O-methyluridine-3'-phosphate
  modified_base 16: mod_base = OTHER; note = 2'-deoxy-2'-fluoroadenosine-3'-phosphate
  modified_base 17: mod_base = OTHER; note = 2'-O-methyladenosine-3'-phosphate
  modified_base 18: mod_base = OTHER; note = 2'-O-methyladenosine-3'-phosphate
  modified_base 19: mod_base = OTHER; note = 2'-O-methylguanosine-3'-phosphate
  modified_base 20: mod_base = OTHER; note = 2'-O-methylguanosine-3'-phosphate
  modified_base 21: mod_base = OTHER; note = 2'-O-methyladenosine-3'-phosphorothioate
  modified_base 22: mod_base = OTHER; note = 2'-O-methylguanosine-3'-phosphorothioate
  modified_base 23: mod_base = OTHER; note = 2'-O-methyluridine
atacagtaccatgataaaggagt

SEQ ID NO: 1564 - RNA, 23 nt, synthetic construct
  source 1..23: mol_type = other RNA
  modified_base 1: mod_base = OTHER; note = 2'-O-methyladenosine-3'-phosphorothioate
  modified_base 2: mod_base = OTHER; note = 2'-deoxy-2'-fluoroadenosine-3'-phosphorothioate
  modified_base 3: mod_base = OTHER; note = 2'-O-methyluridine-3'-phosphate
  modified_base 4: mod_base = OTHER; note = 2'-O-methyladenosine-3'-phosphate
  modified_base 5: mod_base = OTHER; note = 2'-O-methyladenosine-3'-phosphate
  modified_base 6: mod_base = OTHER; note = 2'-deoxy-2'-fluorouridine-3'-phosphate
  modified_base 7: mod_base = OTHER; note = 2'-O-methyladenosine-3'-phosphate
  modified_base 8: mod_base = OTHER; note = 2'-deoxy-2'-fluorouridine-3'-phosphate
  modified_base 9: mod_base = OTHER; note = 2'-deoxy-2'-fluoroguanosine-3'-phosphate
  modified_base 10: mod_base = OTHER; note = 2'-O-methylguanosine-3'-phosphate
  modified_base 11: mod_base = OTHER; note = 2'-O-methyladenosine-3'-phosphate
  modified_base 12: mod_base = OTHER; note = 2'-O-methyluridine-3'-phosphate
  modified_base 13: mod_base = OTHER; note = 2'-O-methyladenosine-3'-phosphate
  modified_base 14: mod_base = OTHER; note = 2'-deoxy-2'-fluorocytidine-3'-phosphate
  modified_base 15: mod_base = OTHER; note = 2'-O-methyladenosine-3'-phosphate
  modified_base 16: mod_base = OTHER; note = 2'-deoxy-2'-fluoroguanosine-3'-phosphate
  modified_base 17: mod_base = OTHER; note = 2'-O-methyluridine-3'-phosphate
  modified_base 18: mod_base = OTHER; note = 2'-O-methyluridine-3'-phosphate
  modified_base 19: mod_base = OTHER; note = 2'-O-methyladenosine-3'-phosphate
  modified_base 20: mod_base = OTHER; note = 2'-O-methylcytidine-3'-phosphate
  modified_base 21: mod_base = OTHER; note = 2'-O-methyladenosine-3'-phosphorothioate
  modified_base 22: mod_base = OTHER; note = 2'-O-methylguanosine-3'-phosphorothioate
  modified_base 23: mod_base = OTHER; note = 2'-O-methyluridine
aataatatggatacagttacagt

SEQ ID NO: 1565 - RNA, 23 nt, synthetic construct
  source 1..23: mol_type = other RNA
  modified_base 1: mod_base = OTHER; note = 2'-O-methyladenosine-3'-phosphorothioate
  modified_base 2: mod_base = OTHER; note = 2'-deoxy-2'-fluoroadenosine-3'-phosphorothioate
  modified_base 3: mod_base = OTHER; note = 2'-O-methylcytidine-3'-phosphate
  modified_base 4: mod_base = OTHER; note = 2'-O-methylguanosine-3'-phosphate
  modified_base 5: mod_base = OTHER; note = 2'-O-methyluridine-3'-phosphate
  modified_base 6: mod_base = OTHER; note = 2'-deoxy-2'-fluoroguanosine-3'-phosphate
  modified_base 7: mod_base = OTHER; note = 2'-O-methylguanosine-3'-phosphate
  modified_base 8: mod_base = OTHER; note = 2'-deoxy-2'-fluoroguanosine-3'-phosphate
  modified_base 9: mod_base = OTHER; note = 2'-deoxy-2'-fluorocytidine-3'-phosphate
  modified_base 10: mod_base = OTHER; note = 2'-O-methyladenosine-3'-phosphate
  modified_base 11: mod_base = OTHER; note = 2'-O-methylcytidine-3'-phosphate
  modified_base 12: mod_base = OTHER; note = 2'-O-methyluridine-3'-phosphate
  modified_base 13: mod_base = OTHER; note = 2'-O-methyluridine-3'-phosphate
  modified_base 14: mod_base = OTHER; note = 2'-deoxy-2'-fluoroguanosine-3'-phosphate
  modified_base 15: mod_base = OTHER; note = 2'-O-methylguanosine-3'-phosphate
  modified_base 16: mod_base = OTHER; note = 2'-deoxy-2'-fluoroadenosine-3'-phosphate
  modified_base 17: mod_base = OTHER; note = 2'-O-methylcytidine-3'-phosphate
  modified_base 18: mod_base = OTHER; note = 2'-O-methyladenosine-3'-phosphate
  modified_base 19: mod_base = OTHER; note = 2'-O-methyluridine-3'-phosphate
  modified_base 20: mod_base = OTHER; note = 2'-O-methyladenosine-3'-phosphate
  modified_base 21: mod_base = OTHER; note = 2'-O-methyladenosine-3'-phosphorothioate
  modified_base 22: mod_base = OTHER; note = 2'-O-methyladenosine-3'-phosphorothioate
  modified_base 23: mod_base = OTHER; note = 2'-O-methyladenosine
aacgtgggcacttggacataaaa

SEQ ID NO: 1566 - RNA, 23 nt, synthetic construct
  source 1..23: mol_type = other RNA
  modified_base 1: mod_base = OTHER; note = 2'-O-methyladenosine-3'-phosphorothioate
  modified_base 2: mod_base = OTHER; note = 2'-deoxy-2'-fluorouridine-3'-phosphorothioate
  modified_base 3: mod_base = OTHER; note = 2'-O-methyluridine-3'-phosphate
  modified_base 4: mod_base = OTHER; note = 2'-O-methylcytidine-3'-phosphate
  modified_base 5: mod_base = OTHER; note = 2'-O-methyladenosine-3'-phosphate
  modified_base 6: mod_base = OTHER; note = 2'-deoxy-2'-fluorocytidine-3'-phosphate
  modified_base 7: mod_base = OTHER; note = 2'-O-methylcytidine-3'-phosphate
  modified_base 8: mod_base = OTHER; note = 2'-deoxy-2'-fluoroadenosine-3'-phosphate
  modified_base 9: mod_base = OTHER; note = 2'-deoxy-2'-fluoroguanosine-3'-phosphate
  modified_base 10: mod_base = OTHER; note = 2'-O-methylcytidine-3'-phosphate
  modified_base 11: mod_base = OTHER; note = 2'-O-methyladenosine-3'-phosphate
  modified_base 12: mod_base = OTHER; note = 2'-O-methyladenosine-3'-phosphate
  modified_base 13: mod_base = OTHER; note = 2'-O-methyladenosine-3'-phosphate
  modified_base 14: mod_base = OTHER; note = 2'-deoxy-2'-fluorouridine-3'-phosphate
  modified_base 15: mod_base = OTHER; note = 2'-O-methyluridine-3'-phosphate
  modified_base 16: mod_base = OTHER; note = 2'-deoxy-2'-fluorocytidine-3'-phosphate
  modified_base 17: mod_base = OTHER; note = 2'-O-methyladenosine-3'-phosphate
  modified_base 18: mod_base = OTHER; note = 2'-O-methylcytidine-3'-phosphate
  modified_base 19: mod_base = OTHER; note = 2'-O-methylguanosine-3'-phosphate
  modified_base 20: mod_base = OTHER; note = 2'-O-methyluridine-3'-phosphate
  modified_base 21: mod_base = OTHER; note = 2'-O-methylguanosine-3'-phosphorothioate
  modified_base 22: mod_base = OTHER; note = 2'-O-methylguanosine-3'-phosphorothioate
  modified_base 23: mod_base = OTHER; note = 2'-O-methylguanosine
attcaccagcaaattcacgtggg

SEQ ID NO: 1567 - RNA, 23 nt, synthetic construct
  source 1..23: mol_type = other RNA
  modified_base 1: mod_base = OTHER; note = 2'-O-methyladenosine-3'-phosphorothioate
  modified_base 2: mod_base = OTHER; note = 2'-deoxy-2'-fluoroguanosine-3'-phosphorothioate
  modified_base 3: mod_base = OTHER; note = 2'-O-methyluridine-3'-phosphate
  modified_base 4: mod_base = OTHER; note = 2'-O-methylguanosine-3'-phosphate
  modified_base 5: mod_base = OTHER; note = 2'-O-methylcytidine-3'-phosphate
  modified_base 6: mod_base = OTHER; note = 2'-deoxy-2'-fluorouridine-3'-phosphate
  modified_base 7: mod_base = OTHER; note = 2'-O-methyladenosine-3'-phosphate
  modified_base 8: mod_base = OTHER; note = 2'-deoxy-2'-fluoroadenosine-3'-phosphate
  modified_base 9: mod_base = OTHER; note = 2'-deoxy-2'-fluorocytidine-3'-phosphate
  modified_base 10: mod_base = OTHER; note = 2'-O-methyluridine-3'-phosphate
  modified_base 11: mod_base = OTHER; note = 2'-O-methyluridine-3'-phosphate
  modified_base 12: mod_base = OTHER; note = 2'-O-methyluridine-3'-phosphate
  modified_base 13: mod_base = OTHER; note = 2'-O-methylcytidine-3'-phosphate
  modified_base 14: mod_base = OTHER; note = 2'-deoxy-2'-fluoroadenosine-3'-phosphate
  modified_base 15: mod_base = OTHER; note = 2'-O-methylcytidine-3'-phosphate
  modified_base 16: mod_base = OTHER; note = 2'-deoxy-2'-fluorocytidine-3'-phosphate
  modified_base 17: mod_base = OTHER; note = 2'-O-methyladenosine-3'-phosphate
  modified_base 18: mod_base = OTHER; note = 2'-O-methylguanosine-3'-phosphate
  modified_base 19: mod_base = OTHER; note = 2'-O-methylcytidine-3'-phosphate
  modified_base 20: mod_base = OTHER; note = 2'-O-methyladenosine-3'-phosphate
  modified_base 21: mod_base = OTHER; note = 2'-O-methyladenosine-3'-phosphorothioate
  modified_base 22: mod_base = OTHER; note = 2'-O-methyladenosine-3'-phosphorothioate
  modified_base 23: mod_base = OTHER; note = 2'-O-methyluridine
agtgctaactttcaccagcaaat

SEQ ID NO: 1568 - RNA, 23 nt, synthetic construct
  source 1..23: mol_type = other RNA
  modified_base 1: mod_base = OTHER; note = 2'-O-methyladenosine-3'-phosphorothioate
  modified_base 2: mod_base = OTHER; note = 2'-deoxy-2'-fluorouridine-3'-phosphorothioate
  modified_base 3: mod_base = OTHER; note = 2'-O-methyladenosine-3'-phosphate
  modified_base 4: mod_base = OTHER; note = 2'-O-methylcytidine-3'-phosphate
  modified_base 5: mod_base = OTHER; note = 2'-O-methyladenosine-3'-phosphate
  modified_base 6: mod_base = OTHER; note = 2'-deoxy-2'-fluorocytidine-3'-phosphate
  modified_base 7: mod_base = OTHER; note = 2'-O-methyladenosine-3'-phosphate
  modified_base 8: mod_base = OTHER; note = 2'-deoxy-2'-fluorocytidine-3'-phosphate
  modified_base 9: mod_base = OTHER; note = 2'-deoxy-2'-fluoroadenosine-3'-phosphate
  modified_base 10: mod_base = OTHER; note = 2'-O-methyladenosine-3'-phosphate
  modified_base 11: mod_base = OTHER; note = 2'-O-methylguanosine-3'-phosphate
  modified_base 12: mod_base = OTHER; note = 2'-O-methyluridine-3'-phosphate
  modified_base 13: mod_base = OTHER; note = 2'-O-methylguanosine-3'-phosphate
  modified_base 14: mod_base = OTHER; note = 2'-deoxy-2'-fluorocytidine-3'-phosphate
  modified_base 15: mod_base = OTHER; note = 2'-O-methyluridine-3'-phosphate
  modified_base 16: mod_base = OTHER; note = 2'-deoxy-2'-fluoroadenosine-3'-phosphate
  modified_base 17: mod_base = OTHER; note = 2'-O-methyladenosine-3'-phosphate
  modified_base 18: mod_base = OTHER; note = 2'-O-methylcytidine-3'-phosphate
  modified_base 19: mod_base = OTHER; note = 2'-O-methyluridine-3'-phosphate
  modified_base 20: mod_base = OTHER; note = 2'-O-methyluridine-3'-phosphate
  modified_base 21: mod_base = OTHER; note = 2'-O-methyluridine-3'-phosphorothioate
  modified_base 22: mod_base = OTHER; note = 2'-O-methylcytidine-3'-phosphorothioate
  modified_base 23: mod_base = OTHER; note = 2'-O-methyladenosine
atacacacaagtgctaactttca

SEQ ID NO: 1569 - RNA, 23 nt, synthetic construct
  source 1..23: mol_type = other RNA
  modified_base 1: mod_base = OTHER; note = 2'-O-methyladenosine-3'-phosphorothioate
  modified_base 2: mod_base = OTHER; note = 2'-deoxy-2'-fluoroadenosine-3'-phosphorothioate
  modified_base 3: mod_base = OTHER; note = 2'-O-methylguanosine-3'-phosphate
  modified_base 4: mod_base = OTHER; note = 2'-O-methyluridine-3'-phosphate
  modified_base 5: mod_base = OTHER; note = 2'-O-methyladenosine-3'-phosphate
  modified_base 6: mod_base = OTHER; note = 2'-deoxy-2'-fluoroguanosine-3'-phosphate
  modified_base 7: mod_base = OTHER; note = 2'-O-methyladenosine-3'-phosphate
  modified_base 8: mod_base = OTHER; note = 2'-deoxy-2'-fluoroadenosine-3'-phosphate
  modified_base 9: mod_base = OTHER; note = 2'-deoxy-2'-fluorouridine-3'-phosphate
  modified_base 10: mod_base = OTHER; note = 2'-O-methyluridine-3'-phosphate
  modified_base 11: mod_base = OTHER; note = 2'-O-methyluridine-3'-phosphate
  modified_base 12: mod_base = OTHER; note = 2'-O-methyladenosine-3'-phosphate
  modified_base 13: mod_base = OTHER; note = 2'-O-methylcytidine-3'-phosphate
  modified_base 14: mod_base = OTHER; note = 2'-deoxy-2'-fluoroadenosine-3'-phosphate
  modified_base 15: mod_base = OTHER; note = 2'-O-methylcytidine-3'-phosphate
  modified_base 16: mod_base = OTHER; note = 2'-deoxy-2'-fluoroadenosine-3'-phosphate
  modified_base 17: mod_base = OTHER; note = 2'-O-methylcytidine-3'-phosphate
  modified_base 18: mod_base = OTHER; note = 2'-O-methyladenosine-3'-phosphate
  modified_base 19: mod_base = OTHER; note = 2'-O-methyladenosine-3'-phosphate
  modified_base 20: mod_base = OTHER; note = 2'-O-methylguanosine-3'-phosphate
  modified_base 21: mod_base = OTHER; note = 2'-O-methyluridine-3'-phosphorothioate
  modified_base 22: mod_base = OTHER; note = 2'-O-methylguanosine-3'-phosphorothioate
  modified_base 23: mod_base = OTHER; note = 2'-O-methylcytidine
aagtagaatttacacacaagtgc

SEQ ID NO: 1570 - RNA, 23 nt, synthetic construct
  source 1..23: mol_type = other RNA
  modified_base 1: mod_base = OTHER; note = 2'-O-methyladenosine-3'-phosphorothioate
  modified_base 2: mod_base = OTHER; note = 2'-deoxy-2'-fluoroadenosine-3'-phosphorothioate
  modified_base 3: mod_base = OTHER; note = 2'-O-methylcytidine-3'-phosphate
  modified_base 4: mod_base = OTHER; note = 2'-O-methyladenosine-3'-phosphate
  modified_base 5: mod_base = OTHER; note = 2'-O-methyladenosine-3'-phosphate
  modified_base 6: mod_base = OTHER; note = 2'-deoxy-2'-fluoroguanosine-3'-phosphate
  modified_base 7: mod_base = OTHER; note = 2'-O-methyladenosine-3'-phosphate
  modified_base 8: mod_base = OTHER; note = 2'-deoxy-2'-fluoroguanosine-3'-phosphate
  modified_base 9: mod_base = OTHER; note = 2'-deoxy-2'-fluoroguanosine-3'-phosphate
  modified_base 10: mod_base = OTHER; note = 2'-O-methyladenosine-3'-phosphate
  modified_base 11: mod_base = OTHER; note = 2'-O-methyladenosine-3'-phosphate
  modified_base 12: mod_base = OTHER; note = 2'-O-methylguanosine-3'-phosphate
  modified_base 13: mod_base = OTHER; note = 2'-O-methyluridine-3'-phosphate
  modified_base 14: mod_base = OTHER; note = 2'-deoxy-2'-fluoroadenosine-3'-phosphate
  modified_base 15: mod_base = OTHER; note = 2'-O-methylguanosine-3'-phosphate
  modified_base 16: mod_base = OTHER; note = 2'-deoxy-2'-fluoroadenosine-3'-phosphate
  modified_base 17: mod_base = OTHER; note = 2'-O-methyladenosine-3'-phosphate
  modified_base 18: mod_base = OTHER; note = 2'-O-methyluridine-3'-phosphate
  modified_base 19: mod_base = OTHER; note = 2'-O-methyluridine-3'-phosphate
  modified_base 20: mod_base = OTHER; note = 2'-O-methyluridine-3'-phosphate
  modified_base 21: mod_base = OTHER; note = 2'-O-methyladenosine-3'-phosphorothioate
  modified_base 22: mod_base = OTHER; note = 2'-O-methylcytidine-3'-phosphorothioate
  modified_base 23: mod_base = OTHER; note = 2'-O-methyladenosine
aacaagaggaagtagaatttaca

SEQ ID NO: 1571 - RNA, 23 nt, synthetic construct
  source 1..23: mol_type = other RNA
  modified_base 1: mod_base = OTHER; note = 2'-O-methyladenosine-3'-phosphorothioate
  modified_base 2: mod_base = OTHER; note = 2'-deoxy-2'-fluorouridine-3'-phosphorothioate
  modified_base 3: mod_base = OTHER; note = 2'-O-methyladenosine-3'-phosphate
  modified_base 4: mod_base = OTHER; note = 2'-O-methylcytidine-3'-phosphate
  modified_base 5: mod_base = OTHER; note = 2'-O-methyluridine-3'-phosphate
  modified_base 6: mod_base = OTHER; note = 2'-deoxy-2'-fluorouridine-3'-phosphate
  modified_base 7: mod_base = OTHER; note = 2'-O-methylguanosine-3'-phosphate
  modified_base 8: mod_base = OTHER; note = 2'-deoxy-2'-fluoroguanosine-3'-phosphate
  modified_base 9: mod_base = OTHER; note = 2'-deoxy-2'-fluorouridine-3'-phosphate
  modified_base 10: mod_base = OTHER; note = 2'-O-methyladenosine-3'-phosphate
  modified_base 11: mod_base = OTHER; note = 2'-O-methyladenosine-3'-phosphate
  modified_base 12: mod_base = OTHER; note = 2'-O-methyladenosine-3'-phosphate
  modified_base 13: mod_base = OTHER; note = 2'-O-methyladenosine-3'-phosphate
  modified_base 14: mod_base = OTHER; note = 2'-deoxy-2'-fluorocytidine-3'-phosphate
  modified_base 15: mod_base = OTHER; note = 2'-O-methyladenosine-3'-phosphate
  modified_base 16: mod_base = OTHER; note = 2'-deoxy-2'-fluorocytidine-3'-phosphate
  modified_base 17: mod_base = OTHER; note = 2'-O-methyladenosine-3'-phosphate
  modified_base 18: mod_base = OTHER; note = 2'-O-methylcytidine-3'-phosphate
  modified_base 19: mod_base = OTHER; note = 2'-O-methyladenosine-3'-phosphate
  modified_base 20: mod_base = OTHER; note = 2'-O-methyladenosine-3'-phosphate
  modified_base 21: mod_base = OTHER; note = 2'-O-methylguanosine-3'-phosphorothioate
  modified_base 22: mod_base = OTHER; note = 2'-O-methyladenosine-3'-phosphorothioate
  modified_base 23: mod_base = OTHER; note = 2'-O-methylguanosine
atacttggtaaaacacacaagag

SEQ ID NO: 1572 - RNA, 23 nt, synthetic construct
  source 1..23: mol_type = other RNA
  modified_base 1: mod_base = OTHER; note = 2'-O-methyladenosine-3'-phosphorothioate
  modified_base 2: mod_base = OTHER; note = 2'-deoxy-2'-fluoroguanosine-3'-phosphorothioate
  modified_base 3: mod_base = OTHER; note = 2'-O-methyladenosine-3'-phosphate
  modified_base 4: mod_base = OTHER; note = 2'-O-methylguanosine-3'-phosphate
  modified_base 5: mod_base = OTHER; note = 2'-O-methyluridine-3'-phosphate
  modified_base 6: mod_base = OTHER; note = 2'-deoxy-2'-fluoroadenosine-3'-phosphate
  modified_base 7: mod_base = OTHER; note = 2'-O-methyluridine-3'-phosphate
  modified_base 8: mod_base = OTHER; note = 2'-deoxy-2'-fluoroadenosine-3'-phosphate
  modified_base 9: mod_base = OTHER; note = 2'-deoxy-2'-fluoroadenosine-3'-phosphate
  modified_base 10: mod_base = OTHER; note = 2'-O-methyladenosine-3'-phosphate
  modified_base 11: mod_base = OTHER; note = 2'-O-methyluridine-3'-phosphate
  modified_base 12: mod_base = OTHER; note = 2'-O-methyladenosine-3'-phosphate
  modified_base 13: mod_base = OTHER; note = 2'-O-methylcytidine-3'-phosphate
  modified_base 14: mod_base = OTHER; note = 2'-deoxy-2'-fluorouridine-3'-phosphate
  modified_base 15: mod_base = OTHER; note = 2'-O-methyluridine-3'-phosphate
  modified_base 16: mod_base = OTHER; note = 2'-deoxy-2'-fluoroguanosine-3'-phosphate
  modified_base 17: mod_base = OTHER; note = 2'-O-methylguanosine-3'-phosphate
  modified_base 18: mod_base = OTHER; note = 2'-O-methyluridine-3'-phosphate
  modified_base 19: mod_base = OTHER; note = 2'-O-methyladenosine-3'-phosphate
  modified_base 20: mod_base = OTHER; note = 2'-O-methyladenosine-3'-phosphate
  modified_base 21: mod_base = OTHER; note = 2'-O-methyladenosine-3'-phosphorothioate
  modified_base 22: mod_base = OTHER; note = 2'-O-methyladenosine-3'-phosphorothioate
  modified_base 23: mod_base = OTHER; note = 2'-O-methylcytidine
agagtataaatacttggtaaaac

SEQ ID NO: 1573 - RNA, 23 nt, synthetic construct
  source 1..23: mol_type = other RNA
  modified_base 1: mod_base = OTHER; note = 2'-O-methyladenosine-3'-phosphorothioate
  modified_base 2: mod_base = OTHER; note = 2'-deoxy-2'-fluoroguanosine-3'-phosphorothioate
  modified_base 3: mod_base = OTHER; note = 2'-O-methyluridine-3'-phosphate
  modified_base 4: mod_base = OTHER; note = 2'-O-methyladenosine-3'-phosphate
  modified_base 5: mod_base = OTHER; note = 2'-O-methylguanosine-3'-phosphate
  modified_base 6: mod_base = OTHER; note = 2'-deoxy-2'-fluorouridine-3'-phosphate
  modified_base 7: mod_base = OTHER; note = 2'-O-methyluridine-3'-phosphate
  modified_base 8: mod_base = OTHER; note = 2'-deoxy-2'-fluoroadenosine-3'-phosphate
  modified_base 9: mod_base = OTHER; note = 2'-deoxy-2'-fluoroguanosine-3'-phosphate
  modified_base 10: mod_base = OTHER; note = 2'-O-methyluridine-3'-phosphate
  modified_base 11: mod_base = OTHER; note = 2'-O-methyluridine-3'-phosphate
  modified_base 12: mod_base = OTHER; note = 2'-O-methylguanosine-3'-phosphate
  modified_base 13: mod_base = OTHER; note = 2'-O-methylcytidine-3'-phosphate
  modified_base 14: mod_base = OTHER; note = 2'-deoxy-2'-fluoroadenosine-3'-phosphate
  modified_base 15: mod_base = OTHER; note = 2'-O-methylcytidine-3'-phosphate
  modified_base 16: mod_base = OTHER; note = 2'-deoxy-2'-fluorocytidine-3'-phosphate
  modified_base 17: mod_base = OTHER; note = 2'-O-methyladenosine-3'-phosphate
  modified_base 18: mod_base = OTHER; note = 2'-O-methylguanosine-3'-phosphate
  modified_base 19: mod_base = OTHER; note = 2'-O-methyladenosine-3'-phosphate
  modified_base 20: mod_base = OTHER; note = 2'-O-methylguanosine-3'-phosphate
  modified_base 21: mod_base = OTHER; note = 2'-O-methyluridine-3'-phosphorothioate
  modified_base 22: mod_base = OTHER; note = 2'-O-methyladenosine-3'-phosphorothioate
  modified_base 23: mod_base = OTHER; note = 2'-O-methyluridine
agtagttagttgcaccagagtat

SEQ ID NO: 1574 - RNA, 23 nt, synthetic construct
  source 1..23: mol_type = other RNA
  modified_base 1: mod_base = OTHER; note = 2'-O-methyladenosine-3'-phosphorothioate
  modified_base 2: mod_base = OTHER; note = 2'-deoxy-2'-fluoroadenosine-3'-phosphorothioate
  modified_base 3: mod_base = OTHER; note = 2'-O-methyladenosine-3'-phosphate
  modified_base 4: mod_base = OTHER; note = 2'-O-methyluridine-3'-phosphate
  modified_base 5: mod_base = OTHER; note = 2'-O-methyluridine-3'-phosphate
  modified_base 6: mod_base = OTHER; note = 2'-deoxy-2'-fluorocytidine-3'-phosphate
  modified_base 7: mod_base = OTHER; note = 2'-O-methylcytidine-3'-phosphate
  modified_base 8: mod_base = OTHER; note = 2'-deoxy-2'-fluorouridine-3'-phosphate
  modified_base 9: mod_base = OTHER; note = 2'-deoxy-2'-fluorocytidine-3'-phosphate
  modified_base 10: mod_base = OTHER; note = 2'-O-methyladenosine-3'-phosphate
  modified_base 11: mod_base = OTHER; note = 2'-O-methylcytidine-3'-phosphate
  modified_base 12: mod_base = OTHER; note = 2'-O-methyladenosine-3'-phosphate
  modified_base 13: mod_base = OTHER; note = 2'-O-methylcytidine-3'-phosphate
  modified_base 14: mod_base = OTHER; note = 2'-deoxy-2'-fluoroadenosine-3'-phosphate
  modified_base 15: mod_base = OTHER; note = 2'-O-methylguanosine-3'-phosphate
  modified_base 16: mod_base = OTHER; note = 2'-deoxy-2'-fluorouridine-3'-phosphate
  modified_base 17: mod_base = OTHER; note = 2'-O-methyladenosine-3'-phosphate
  modified_base 18: mod_base = OTHER; note = 2'-O-methylguanosine-3'-phosphate
  modified_base 19: mod_base = OTHER; note = 2'-O-methyluridine-3'-phosphate
  modified_base 20: mod_base = OTHER; note = 2'-O-methyluridine-3'-phosphate
  modified_base 21: mod_base = OTHER; note = 2'-O-methyladenosine-3'-phosphorothioate
  modified_base 22: mod_base = OTHER; note = 2'-O-methylguanosine-3'-phosphorothioate
  modified_base 23: mod_base = OTHER; note = 2'-O-methyluridine
aaattcctcacacagtagttagt

SEQ ID NO: 1575 - RNA, 23 nt, synthetic construct
  source 1..23: mol_type = other RNA
  modified_base 1: mod_base = OTHER; note = 2'-O-methyladenosine-3'-phosphorothioate
  modified_base 2: mod_base = OTHER; note = 2'-deoxy-2'-fluoroadenosine-3'-phosphorothioate
  modified_base 3: mod_base = OTHER; note = 2'-O-methyluridine-3'-phosphate
  modified_base 4: mod_base = OTHER; note = 2'-O-methyluridine-3'-phosphate
  modified_base 5: mod_base = OTHER; note = 2'-O-methylguanosine-3'-phosphate
  modified_base 6: mod_base = OTHER; note = 2'-deoxy-2'-fluorocytidine-3'-phosphate
  modified_base 7: mod_base = OTHER; note = 2'-O-methyladenosine-3'-phosphate
  modified_base 8: mod_base = OTHER; note = 2'-deoxy-2'-fluorocytidine-3'-phosphate
  modified_base 9: mod_base = OTHER; note = 2'-deoxy-2'-fluoroadenosine-3'-phosphate
  modified_base 10: mod_base = OTHER; note = 2'-O-methyluridine-3'-phosphate
  modified_base 11: mod_base = OTHER; note = 2'-O-methylguanosine-3'-phosphate
  modified_base 12: mod_base = OTHER; note = 2'-O-methylguanosine-3'-phosphate
  modified_base 13: mod_base = OTHER; note = 2'-O-methyladenosine-3'-phosphate
  modified_base 14: mod_base = OTHER; note = 2'-deoxy-2'-fluorocytidine-3'-phosphate
  modified_base 15: mod_base = OTHER; note = 2'-O-methylcytidine-3'-phosphate
  modified_base 16: mod_base = OTHER; note = 2'-deoxy-2'-fluoroadenosine-3'-phosphate
  modified_base 17: mod_base = OTHER; note = 2'-O-methyladenosine-3'-phosphate
  modified_base 18: mod_base = OTHER; note = 2'-O-methyluridine-3'-phosphate
  modified_base 19: mod_base = OTHER; note = 2'-O-methyluridine-3'-phosphate
  modified_base 20: mod_base = OTHER; note = 2'-O-methylcytidine-3'-phosphate
  modified_base 21: mod_base = OTHER; note = 2'-O-methylcytidine-3'-phosphorothioate
  modified_base 22: mod_base = OTHER; note = 2'-O-methyluridine-3'-phosphorothioate
  modified_base 23: mod_base = OTHER; note = 2'-O-methylcytidine
aattgcacatggaccaattcctc

SEQ ID NO: 1576 - RNA, 23 nt, synthetic construct
  source 1..23: mol_type = other RNA
  modified_base 1: mod_base = OTHER; note = 2'-O-methyladenosine-3'-phosphorothioate
  modified_base 2: mod_base = OTHER; note = 2'-deoxy-2'-fluorouridine-3'-phosphorothioate
  modified_base 3: mod_base = OTHER; note = 2'-O-methyluridine-3'-phosphate
  modified_base 4: mod_base = OTHER; note = 2'-O-methylcytidine-3'-phosphate
  modified_base 5: mod_base = OTHER; note = 2'-O-methyladenosine-3'-phosphate
  modified_base 6: mod_base = OTHER; note = 2'-deoxy-2'-fluorouridine-3'-phosphate
  modified_base 7: mod_base = OTHER; note = 2'-O-methyluridine-3'-phosphate
  modified_base 8: mod_base = OTHER; note = 2'-deoxy-2'-fluoroguanosine-3'-phosphate
  modified_base 9: mod_base = OTHER; note = 2'-deoxy-2'-fluoroguanosine-3'-phosphate
  modified_base 10: mod_base = OTHER; note = 2'-O-methyluridine-3'-phosphate
  modified_base 11: mod_base = OTHER; note = 2'-O-methyladenosine-3'-phosphate
  modified_base 12: mod_base = OTHER; note = 2'-O-methyluridine-3'-phosphate
  modified_base 13: mod_base = OTHER; note = 2'-O-methyluridine-3'-phosphate
  modified_base 14: mod_base = OTHER; note = 2'-deoxy-2'-fluorouridine-3'-phosphate
  modified_base 15: mod_base = OTHER; note = 2'-O-methyladenosine-3'-phosphate
  modified_base 16: mod_base = OTHER; note = 2'-deoxy-2'-fluorouridine-3'-phosphate
  modified_base 17: mod_base = OTHER; note = 2'-O-methyluridine-3'-phosphate
  modified_base 18: mod_base = OTHER; note = 2'-O-methylguanosine-3'-phosphate
  modified_base 19: mod_base = OTHER; note = 2'-O-methylcytidine-3'-phosphate
  modified_base 20: mod_base = OTHER; note = 2'-O-methyladenosine-3'-phosphate
  modified_base 21: mod_base = OTHER; note = 2'-O-methylcytidine-3'-phosphorothioate
  modified_base 22: mod_base = OTHER; note = 2'-O-methyladenosine-3'-phosphorothioate
  modified_base 23: mod_base = OTHER; note = 2'-O-methyluridine
attcattggtatttattgcacat

SEQ ID NO: 1577 - RNA, 23 nt, synthetic construct
  source 1..23: mol_type = other RNA
agaaacatgctgaagtcccggcg

SEQ ID NO: 1578 - RNA, 23 nt, synthetic construct
  source 1..23: mol_type = other RNA
tgaagtcccggcggctcttccag

SEQ ID NO: 1579 - RNA, 23 nt, synthetic construct
  source 1..23: mol_type = other RNA
tccgagcccggtaacctgtcgtc

SEQ ID NO: 1580 - RNA, 23 nt, synthetic construct
  source 1..23: mol_type = other RNA
gccgctgtctcagcagtggacag

SEQ ID NO: 1581 - RNA, 23 nt, synthetic construct
  source 1..23: mol_type = other RNA
gcatgggtctgctgatggcgctc

SEQ ID NO: 1582 - RNA, 23 nt, synthetic construct
  source 1..23: mol_type = other RNA
tggcgctcatcgtgctgctcatc

SEQ ID NO: 1583 - RNA, 23 nt, synthetic construct
  source 1..23: mol_type = other RNA
tgctgctcatcgtggcgggcaat

SEQ ID NO: 1584 - RNA, 23 nt, synthetic construct
  source 1..23: mol_type = other RNA
ggcgggcaatgtgctggtgatcg

SEQ ID NO: 1585 - RNA, 23 nt, synthetic construct
  source 1..23: mol_type = other RNA
gtgctggtgatcgtggccatcgc

SEQ ID NO: 1586 - RNA, 23 nt, synthetic construct
  source 1..23: mol_type = other RNA
atcgtggccatcgccaagacgcc

SEQ ID NO: 1587 - RNA, 23 nt, synthetic construct
  source 1..23: mol_type = other RNA
ctgcagacgctcaccaacctctt

SEQ ID NO: 1588 - RNA, 23 nt, synthetic construct
  source 1..23: mol_type = other RNA
ctcaccaacctcttcatcatgtc

SEQ ID NO: 1589 - RNA, 23 nt, synthetic construct
  source 1..23: mol_type = other RNA
ctcttcatcatgtccctggccag

SEQ ID NO: 1590 - RNA, 23 nt, synthetic construct
  source 1..23: mol_type = other RNA
tgggagtacggctccttcttctg

SEQ ID NO: 1591 - RNA, 23 nt, synthetic construct
  source 1..23: mol_type = other RNA
ggctccttcttctgcgagctgtg

SEQ ID NO: 1592 - RNA, 23 nt, synthetic construct
  source 1..23: mol_type = other RNA
agctgtggacctcagtggacgtg

SEQ ID NO: 1593 - RNA, 23 nt, synthetic construct
  source 1..23: mol_type = other RNA
cctcagtggacgtgctgtgcgtg

SEQ ID NO: 1594 - RNA, 23 nt, synthetic construct
  source 1..23: mol_type = other RNA
acggccagcatcgagaccctgtg

SEQ ID NO: 1595 - RNA, 23 nt, synthetic construct
  source 1..23: mol_type = other RNA
agaccctgtgtgtcattgccctg

SEQ ID NO: 1596 - RNA, 23 nt, synthetic construct
  source 1..23: mol_type = other RNA
tcattgccctggaccgctacctc

SEQ ID NO: 1597 - RNA, 23 nt, synthetic construct
  source 1..23: mol_type = other RNA
tggaccgctacctcgccatcacc

SEQ ID NO: 1598 - RNA, 23 nt, synthetic construct
  source 1..23: mol_type = other RNA
acctcgccatcacctcgcccttc

SEQ ID NO: 1599 - RNA, 23 nt, synthetic construct
  source 1..23: mol_type = other RNA
tcacctcgcccttccgctaccag

SEQ ID NO: 1600 - RNA, 23 nt, synthetic construct
  source 1..23: mol_type = other RNA
ccttccgctaccagagcctgctg

SEQ ID NO: 1601 - RNA, 23 nt, synthetic construct
  source 1..23: mol_type = other RNA
ccatctcggccctggtgtccttc

SEQ ID NO: 1602 - RNA, 23 nt, synthetic construct
  source 1..23: mol_type = other RNA
ccctggtgtccttcctgcccatc

SEQ ID NO: 1603 - RNA, 23 nt, synthetic construct
  source 1..23: mol_type = other RNA
ctgcccatcctcatgcactggtg

SEQ ID NO: 1604 - RNA, 23 nt, synthetic construct
  source 1..23: mol_type = other RNA
tgctgcgacttcgtcaccaaccg

SEQ ID NO: 1605 - RNA, 23 nt, synthetic construct
  source 1..23: mol_type = other RNA
tcaccaaccgggcctacgccatc

SEQ ID NO: 1606 - RNA, 23 nt, synthetic construct
  source 1..23: mol_type = other RNA
ccatcgcctcgtccgtagtctcc

SEQ ID NO: 1607 - RNA, 23 nt, synthetic construct
  source 1..23: mol_type = other RNA
cgtccgtagtctccttctacgtg

SEQ ID NO: 1608 - RNA, 23 nt, synthetic construct
  source 1..23: mol_type = other RNA
ccctgtgcatcatggccttcgtg

SEQ ID NO: 1609 - RNA, 23 nt, synthetic construct
  source 1..23: mol_type = other RNA
tcatggccttcgtgtacctgcgg

SEQ ID NO: 1610 - RNA, 23 nt, synthetic construct
  source 1..23: mol_type = other RNA
tgtacctgcgggtgttccgcgag

SEQ ID NO: 1611 - RNA, 23 nt, synthetic construct
  source 1..23: mol_type = other RNA
aggcccagaagcaggtgaagaag

SEQ ID NO: 1612 - RNA, 23 nt, synthetic construct
  source 1..23: mol_type = other RNA
caggtgaagaagatcgacagctg

SEQ ID NO: 1613 - RNA, 23 nt, synthetic construct
  source 1..23: mol_type = other RNA
acagctgcgagcgccgtttcctc

SEQ ID NO: 1614 - RNA, 23 nt, synthetic construct
  source 1..23: mol_type = other RNA
agcagaaggcgctcaagacgctg

SEQ ID NO: 1615 - RNA, 23 nt, synthetic construct
  source 1..23: mol_type = other RNA
gctcaagacgctgggcatcatca

SEQ ID NO: 1616 - RNA, 23 nt, synthetic construct
  source 1..23: mol_type = other RNA
ctgggcatcatcatgggcgtctt

SEQ ID NO: 1617 - RNA, 23 nt, synthetic construct
  source 1..23: mol_type = other RNA
atgggcgtcttcacgctctgctg

SEQ ID NO: 1618 - RNA, 23 nt, synthetic construct
  source 1..23: mol_type = other RNA
ctctgctggctgcccttcttcct

SEQ ID NO: 1619 - RNA, 23 nt, synthetic construct
  source 1..23: mol_type = other RNA
ctgcccttcttcctggccaacgt

SEQ ID NO: 1620 - RNA, 23 nt, synthetic construct
  source 1..23: mol_type = other RNA
ctggccaacgtggtgaaggcctt

SEQ ID NO: 1621 - RNA, 23 nt, synthetic construct
  source 1..23: mol_type = other RNA
tgaaggccttccaccgcgagctg

SEQ ID NO: 1622 - RNA, 23 nt, synthetic construct
  source 1..23: mol_type = other RNA
cgcctcttcgtcttcttcaactg

SEQ ID NO: 1623 - RNA, 23 nt, synthetic construct
  source 1..23: mol_type = other RNA
gtcttcttcaactggctgggcta

SEQ ID NO: 1624 - RNA, 23 nt, synthetic construct
  source 1..23: mol_type = other RNA
gctacgccaactcggccttcaac

SEQ ID NO: 1625 - RNA, 23 nt, synthetic construct
  source 1..23: mol_type = other RNA
cccatcatctactgccgcagccc

SEQ ID NO: 1626 - RNA, 23 nt, synthetic construct
  source 1..23: mol_type = other RNA
gacttccgcaaggccttccaggg

SEQ ID NO: 1627 - RNA, 23 nt, synthetic construct
  source 1..23: mol_type = other RNA
gccttccagggactgctctgctg

SEQ ID NO: 1628 - RNA, 23 nt, synthetic construct
  source 1..23: mol_type = other RNA
acgacgacgacgatgtcgtcggg

SEQ ID NO: 1629 - RNA, 23 nt, synthetic construct
  source 1..23: mol_type = other RNA
cgcctcggaatccaaggtgtagg

SEQ ID NO: 1630 - RNA, 23 nt, synthetic construct
  source 1..23: mol_type = other RNA
acgaggagatctgtgtttactta

SEQ ID NO: 1631 - RNA, 23 nt, synthetic construct
  source 1..23: mol_type = other RNA
ctgtgtttacttaagaccgatag

SEQ ID NO: 1632 - RNA, 23 nt, synthetic construct
  source 1..23: mol_type = other RNA
cttaagaccgatagcaggtgaac

SEQ ID NO: 1633 - RNA, 23 nt, synthetic construct
  source 1..23: mol_type = other RNA
gatagcaggtgaactcgaagccc

SEQ ID NO: 1634 - RNA, 23 nt, synthetic construct
  source 1..23: mol_type = other RNA
tcgaagcccacaatcctcgtctg

SEQ ID NO: 1635 - RNA, 23 nt, synthetic construct
  source 1..23: mol_type = other RNA
acaatcctcgtctgaatcatccg

SEQ ID NO: 1636 - RNA, 23 nt, synthetic construct
  source 1..23: mol_type = other RNA
tctgaatcatccgaggcaaagag

SEQ ID NO: 1637 - RNA, 23 nt, synthetic construct
  source 1..23: mol_type = other RNA
ccgaggcaaagagaaaagccacg

SEQ ID NO: 1638 - RNA, 23 nt, synthetic construct
  source 1..23: mol_type = other RNA
aagccacggaccgttgcacaaaa

SEQ ID NO: 1639 - RNA, 23 nt, synthetic construct
  source 1..23: mol_type = other RNA
aaaggaaagtttgggaagggatg

SEQ ID NO: 1640 - RNA, 23 nt, synthetic construct
  source 1..23: mol_type = other RNA
tgggagagtggcttgctgatgtt

SEQ ID NO: 1641 - RNA, 23 nt, synthetic construct
  source 1..23: mol_type = other RNA
gcttgctgatgttccttgttgtt

SEQ ID NO: 1642 - RNA, 23 nt, synthetic construct
  source 1..23: mol_type = other RNA
tttttctgtttgtggtccggcct

SEQ ID NO: 1643 - RNA, 23 nt, synthetic construct
  source 1..23: mol_type = other RNA
tggtccggccttcttttgtgtgt

SEQ ID NO: 1644 - RNA, 23 nt, synthetic construct
  source 1..23: mol_type = other RNA
cttcttttgtgtgtgcgtgtgat

SEQ ID NO: 1645 - RNA, 23 nt, synthetic construct
  source 1..23: mol_type = other RNA
gtgtgatgcatctttagattttt

SEQ ID NO: 1646 - RNA, 23 nt, synthetic construct
  source 1..23: mol_type = other RNA
caggtggtttttgacactctctg

SEQ ID NO: 1647 - RNA, 23 nt, synthetic construct
  source 1..23: mol_type = other RNA
ttgacactctctgagaggaccgg

SEQ ID NO: 1648 - RNA, 23 nt, synthetic construct
  source 1..23: mol_type = other RNA
cggagtggaagatgggtgggtta

SEQ ID NO: 1649 - RNA, 23 nt, synthetic construct
  source 1..23: mol_type = other RNA
ggaagggagaagcattaggaggg

SEQ ID NO: 1650 - RNA, 23 nt, synthetic construct
  source 1..23: mol_type = other RNA
gggattaaaatcgatcatcgtgg

SEQ ID NO: 1651 - RNA, 23 nt, synthetic construct
  source 1..23: mol_type = other RNA
tcatcgtggctcccatccctttc

SEQ ID NO: 1652 - RNA, 23 nt, synthetic construct
  source 1..23: mol_type = other RNA
ctcccatccctttcccgggaaca

SEQ ID NO: 1653 - RNA, 23 nt, synthetic construct
  source 1..23: mol_type = other RNA
cccgggaacaggaacacactacc

SEQ ID NO: 1654 - RNA, 23 nt, synthetic construct
  source 1..23: mol_type = other RNA
aggaacacactaccagccagaga

SEQ ID NO: 1655 - RNA, 23 nt, synthetic construct
  source 1..23: mol_type = other RNA
ctaccagccagagagaggagaat

SEQ ID NO: 1656 - RNA, 23 nt, synthetic construct
  source 1..23: mol_type = other RNA
agagagaggagaatgacagtttg

SEQ ID NO: 1657 - RNA, 23 nt, synthetic construct
  source 1..23: mol_type = other RNA
gaatgacagtttgtcaagacata

SEQ ID NO: 1658 - RNA, 23 nt, synthetic construct
  source 1..23: mol_type = other RNA
tcaagacatatttccttttgctt

SEQ ID NO: 1659 - RNA, 23 nt, synthetic construct
  source 1..23: mol_type = other RNA
ttccttttgctttccagagaaat

SEQ ID NO: 1660 - RNA, 23 nt, synthetic construct
  source 1..23: mol_type = other RNA
ctttccagagaaatttcatttta

SEQ ID NO: 1661 - RNA, 23 nt, synthetic construct
  source 1..23: mol_type = other RNA
taagtaatgatttctgctgttat

SEQ ID NO: 1662 - RNA, 23 nt, synthetic construct
  source 1..23: mol_type = other RNA
tctgctgttatgaaagcaaagag

SEQ ID NO: 1663 - RNA, 23 nt, synthetic construct
  source 1..23: mol_type = other RNA
tgaaagcaaagagaaaggatgga

SEQ ID NO: 1664 - RNA, 23 nt, synthetic construct
  source 1..23: mol_type = other RNA
agagaaaggatggaggcaaaata

SEQ ID NO: 1665 - RNA, 23 nt, synthetic construct
  source 1..23: mol_type = other RNA
aaatcacgtttcaagaaatgtta

SEQ ID NO: 1666 - RNA, 23 nt, synthetic construct
  source 1..23: mol_type = other RNA
tcaagaaatgttaagctcttctt

SEQ ID NO: 1667 - RNA, 23 nt, synthetic construct
  source 1..23: mol_type = other RNA
ttaagctcttcttggaacaagcc

SEQ ID NO: 1668 - RNA, 23 nt, synthetic construct
  source 1..23: mol_type = other RNA
cccaccttgctttccttgtgtag

SEQ ID NO: 1669 - RNA, 23 nt, synthetic construct
  source 1..23: mol_type = other RNA
tccttgtgtagggcaaacccgct

SEQ ID NO: 1670 - RNA, 23 nt, synthetic construct
  source 1..23: mol_type = other RNA
gtggtcaggctgagggatttcta

SEQ ID NO: 1671 - RNA, 23 nt, synthetic construct
  source 1..23: mol_type = other RNA
ctgagggatttctacctcacact

SEQ ID NO: 1672 - RNA, 23 nt, synthetic construct
  source 1..23: mol_type = other RNA
ttctacctcacactgtgcatttg

SEQ ID NO: 1673 - RNA, 23 nt, synthetic construct
  source 1..23: mol_type = other RNA
gtgcatttgcacagcagatagaa

SEQ ID NO: 1674 - RNA, 23 nt, synthetic construct
  source 1..23: mol_type = other RNA
cagatagaaagacttgtttatat

SEQ ID NO: 1675 - RNA, 23 nt, synthetic construct
  source 1..23: mol_type = other RNA
gacttgtttatattaaacagctt

SEQ ID NO: 1676 - RNA, 23 nt, synthetic construct
  source 1..23: mol_type = other RNA
atgtatcaatattagttggaagg

SEQ ID NO: 1677 - RNA, 23 nt, synthetic construct
  source 1..23: mol_type = other RNA
accaggcgcagagcctctctctg

SEQ ID NO: 1678 - RNA, 23 nt, synthetic construct
  source 1..23: mol_type = other RNA
agagcctctctctgtgacatgtg

SEQ ID NO: 1679 - RNA, 23 nt, synthetic construct
  source 1..23: mol_type = other RNA
tctgtgacatgtgactctgtcaa

SEQ ID NO: 1680 - RNA, 23 nt, synthetic construct
  source 1..23: mol_type = other RNA
actctgtcaattgaagacaggac

SEQ ID NO: 1681 - RNA, 23 nt, synthetic construct
  source 1..23: mol_type = other RNA
attgaagacaggacattaaaaga

SEQ ID NO: 1682 - RNA, 23 nt, synthetic construct
  source 1..23: mol_type = other RNA
aggacattaaaagagagcgagag

SEQ ID NO: 1683 - RNA, 23 nt, synthetic construct
  source 1..23: mol_type = other RNA
agagcgagagagagaaacagttc

SEQ ID NO: 1684 - RNA, 23 nt, synthetic construct
  source 1..23: mol_type = other RNA
gagaaacagttcagattactgca

SEQ ID NO: 1685 - RNA, 23 nt, synthetic construct
  source 1..23: mol_type = other RNA
tcagattactgcacatgtggata

SEQ ID NO: 1686 - RNA, 23 nt, synthetic construct
  source 1..23: mol_type = other RNA
gagtggttcaaaatgccattttt

SEQ ID NO: 1687 - RNA, 23 nt, synthetic construct
  source 1..23: mol_type = other RNA
aatgccatttttgcacagtgtta

SEQ ID NO: 1688 - RNA, 23 nt, synthetic construct
  source 1..23: mol_type = other RNA
acagtgttaggaattacaaaatc

SEQ ID NO: 1689 - RNA, 23 nt, synthetic construct
  source 1..23: mol_type = other RNA
ggaattacaaaatccacagaaga

SEQ ID NO: 1690 - RNA, 23 nt, synthetic construct
  source 1..23: mol_type = other RNA
atccacagaagatgttacttgca

SEQ ID NO: 1691 - RNA, 23 nt, synthetic construct
  source 1..23: mol_type = other RNA
ctgggcagatcttaaataaaatt

SEQ ID NO: 1692 - RNA, 23 nt, synthetic construct
  source 1..23: mol_type = other RNA
aaattcaaactctacttctgttg

SEQ ID NO: 1693 - RNA, 23 nt, synthetic construct
  source 1..23: mol_type = other RNA
ctctacttctgttgtctagtatg

SEQ ID NO: 1694 - RNA, 23 nt, synthetic construct
  source 1..23: mol_type = other RNA
tctagtatgttattgagctaatg

SEQ ID NO: 1695 - RNA, 23 nt, synthetic construct
  source 1..23: mol_type = other RNA
ttattgagctaatgattcattgg

SEQ ID NO: 1696 - RNA, 23 nt, synthetic construct
  source 1..23: mol_type = other RNA
tcattgggaaaatacctttttat

SEQ ID NO: 1697 - RNA, 23 nt, synthetic construct
  source 1..23: mol_type = other RNA
acctttttatactcctttatcat

SEQ ID NO: 1698 - RNA, 23 nt, synthetic construct
  source 1..23: mol_type = other RNA
actcctttatcatggtactgtaa

SEQ ID NO: 1699 - RNA, 23 nt, synthetic construct
  source 1..23: mol_type = other RNA
actgtaactgtatccatattata

SEQ ID NO: 1700 - RNA, 23 nt, synthetic construct
  source 1..23: mol_type = other RNA
ttttatgtccaagtgcccacgtg

SEQ ID NO: 1701 - RNA, 23 nt, synthetic construct
  source 1..23: mol_type = other RNA
cccacgtgaatttgctggtgaaa

SEQ ID NO: 1702 - RNA, 23 nt, synthetic construct
  source 1..23: mol_type = other RNA
atttgctggtgaaagttagcact

SEQ ID NO: 1703 - RNA, 23 nt, synthetic construct
  source 1..23: mol_type = other RNA
tgaaagttagcacttgtgtgtaa

SEQ ID NO: 1704 - RNA, 23 nt, synthetic construct
  source 1..23: mol_type = other RNA
gcacttgtgtgtaaattctactt

SEQ ID NO: 1705 - RNA, 23 nt, synthetic construct
  source 1..23: mol_type = other RNA
tgtaaattctacttcctcttgtg

SEQ ID NO: 1706 - RNA, 23 nt, synthetic construct
  source 1..23: mol_type = other RNA
ctcttgtgtgttttaccaagtat

SEQ ID NO: 1707 - RNA, 23 nt, synthetic construct
  source 1..23: mol_type = other RNA
gttttaccaagtatttatactct

SEQ ID NO: 1708 - RNA, 23 nt, synthetic construct
  source 1..23: mol_type = other RNA
atactctggtgcaactaactact

SEQ ID NO: 1709 - RNA, 23 nt, synthetic construct
  source 1..23: mol_type = other RNA
actaactactgtgtgaggaattg

SEQ ID NO: 1710 - RNA, 23 nt, synthetic construct
  source 1..23: mol_type = other RNA
gaggaattggtccatgtgcaata

SEQ ID NO: 1711 - RNA, 23 nt, synthetic construct
  source 1..23: mol_type = other RNA
atgtgcaataaataccaatgaag

SEQ ID NO: 1712 - RNA, 21 nt, synthetic construct
  source 1..21: mol_type = other RNA
  modified_base 1: mod_base = OTHER; note = 2'-O-methylcytidine-3'-phosphorothioate
  modified_base 2: mod_base = OTHER; note = 2'-O-methyladenosine-3'-phosphorothioate
  modified_base 3: mod_base = OTHER; note = 2'-O-methyluridine-3'-phosphate
  modified_base 4: mod_base = OTHER; note = 2'-O-methyluridine-3'-phosphate
  modified_base 5: mod_base = OTHER; note = 2'-O-methyluridine-3'-phosphate
  modified_base 6: mod_base = OTHER; note = 2'-O-methyluridine-3'-phosphate
  modified_base 7: mod_base = OTHER; note = 2'-deoxy-2'-fluoroadenosine-3'-phosphate
  modified_base 8: mod_base = OTHER; note = 2'-O-methyladenosine-3'-phosphate
  modified_base 9: mod_base = OTHER; note = 2'-deoxy-2'-fluorouridine-3'-phosphate
  modified_base 10: mod_base = OTHER; note = 2'-deoxy-2'-fluorocytidine-3'-phosphate
  modified_base 11: mod_base = OTHER; note = 2'-deoxy-2'-fluorocytidine-3'-phosphate
  modified_base 12: mod_base = OTHER; note = 2'-O-methyluridine-3'-phosphate
  modified_base 13: mod_base = OTHER; note = 2'-O-methylcytidine-3'-phosphate
  modified_base 14: mod_base = OTHER; note = 2'-O-methyladenosine-3'-phosphate
  modified_base 15: mod_base = OTHER; note = 2'-O-methylcytidine-3'-phosphate
  modified_base 16: mod_base = OTHER; note = 2'-O-methyluridine-3'-phosphate
  modified_base 17: mod_base = OTHER; note = 2'-O-methylcytidine-3'-phosphate
  modified_base 18: mod_base = OTHER; note = 2'-O-methyluridine-3'-phosphate
  modified_base 19: mod_base = OTHER; note = 2'-O-methyladenosine-3'-phosphorothioate
  modified_base 20: mod_base = OTHER; note = 2'-O-methyladenosine-3'-phosphorothioate
  modified_base 21: mod_base = OTHER; note = 2'-O-methyladenosine
cattttaatcctcactctaaa

SEQ ID NO: 1713 - RNA, 21 nt, synthetic construct
  source 1..21: mol_type = other RNA
  modified_base 1: mod_base = OTHER; note = 2'-O-methylcytidine-3'-phosphorothioate
  modified_base 2: mod_base = OTHER; note = 2'-O-methyladenosine-3'-phosphorothioate
  modified_base 3: mod_base = OTHER; note = 2'-O-methyluridine-3'-phosphate
  modified_base 4: mod_base = OTHER; note = 2'-O-methyluridine-3'-phosphate
  modified_base 5: mod_base = OTHER; note = 2'-O-methyluridine-3'-phosphate
  modified_base 6: mod_base = OTHER; note 2'-O-(6-(5-(3beta-cholest-5-en-3-yloxcarboxamido)pentyl)car boxamidohexyl)uridine-3'-phosphate
  modified_base 7: mod_base = OTHER; note = 2'-deoxy-2'-fluoroadenosine-3'-phosphate
  modified_base 8: mod_base = OTHER; note = 2'-O-methyladenosine-3'-phosphate
  modified_base 9: mod_base = OTHER; note = 2'-deoxy-2'-fluorouridine-3'-phosphate
  modified_base 10: mod_base = OTHER; note = 2'-deoxy-2'-fluorocytidine-3'-phosphate
  modified_base 11: mod_base = OTHER; note = 2'-deoxy-2'-fluorocytidine-3'-phosphate
  modified_base 12: mod_base = OTHER; note = 2'-O-methyluridine-3'-phosphate
  modified_base 13: mod_base = OTHER; note = 2'-O-methylcytidine-3'-phosphate
  modified_base 14: mod_base = OTHER; note = 2'-O-methyladenosine-3'-phosphate
  modified_base 15: mod_base = OTHER; note = 2'-O-methylcytidine-3'-phosphate
  modified_base 16: mod_base = OTHER; note = 2'-O-methyluridine-3'-phosphate
  modified_base 17: mod_base = OTHER; note = 2'-O-methylcytidine-3'-phosphate
  modified_base 18: mod_base = OTHER; note = 2'-O-methyluridine-3'-phosphate
  modified_base 19: mod_base = OTHER; note = 2'-O-methyladenosine-3'-phosphorothioate
  modified_base 20: mod_base = OTHER; note = 2'-O-methyladenosine-3'-phosphorothioate
  modified_base 21: mod_base = OTHER; note = 2'-O-methyladenosine
cattttaatcctcactctaaa

SEQ ID NO: 1714 - RNA, 21 nt, synthetic construct
  source 1..21: mol_type = other RNA
  modified_base 1: mod_base = OTHER; note = 2'-O-methylcytidine-3'-phosphorothioate
  modified_base 2: mod_base = OTHER; note = 2'-O-methyladenosine-3'-phosphorothioate
  modified_base 3: mod_base = OTHER; note = 2'-O-methyluridine-3'-phosphate
  modified_base 4: mod_base = OTHER; note = 2'-O-methyluridine-3'-phosphate
  modified_base 5: mod_base = OTHER; note = 2'-O-methyluridine-3'-phosphate
  modified_base 6: mod_base = OTHER; note = 2'-O-methyluridine-3'-phosphate
  modified_base 7: mod_base = OTHER; note = 2'-deoxy-2'-fluoroadenosine-3'-phosphate
  modified_base 8: mod_base = OTHER; note = 2'-O-methyladenosine-3'-phosphate
  modified_base 9: mod_base = OTHER; note = 2'-deoxy-2'-fluorouridine-3'-phosphate
  modified_base 10: mod_base = OTHER; note = 2'-deoxy-2'-fluorocytidine-3'-phosphate
  modified_base 11: mod_base = OTHER; note = 2'-deoxy-2'-fluorocytidine-3'-phosphate
  modified_base 12: mod_base = OTHER; note = 2'-O-methyluridine-3'-phosphate
  modified_base 13: mod_base = OTHER; note = 2'-O-methylcytidine-3'-phosphate
  modified_base 14: mod_base = OTHER; note = 2'-O-methyladenosine-3'-phosphate
  modified_base 15: mod_base = OTHER; note = 2'-O-methylcytidine-3'-phosphate
  modified_base 16: mod_base = OTHER; note = 2'-O-methyluridine-3'-phosphate
  modified_base 17: mod_base = OTHER; note = 2'-O-methylcytidine-3'-phosphate
  modified_base 18: mod_base = OTHER; note = 2'-O-methyluridine-3'-phosphate
  modified_base 19: mod_base = OTHER; note = 2'-O-methyladenosine-3'-phosphate
  modified_base 20: mod_base = OTHER; note = 2'-O-methyladenosine-3'-phosphate
  modified_base 21: mod_base = OTHER; note = 2'-O-methyladenosine-3'-phosphate (N-(1-oxo-6-((3beta-cholest-5-en-3-yl)oxcarboxamido)hexyl)- 4-hydroxypyrrolidin-2-yl)methyl ester
cattttaatcctcactctaaa

SEQ ID NO: 1715 - RNA, 21 nt, synthetic construct
  source 1..21: mol_type = other RNA
  modified_base 1: mod_base = OTHER; note = 2'-O-methylcytidine-3'-phosphorothioate
  modified_base 2: mod_base = OTHER; note = 2'-O-methyladenosine-3'-phosphorothioate
  modified_base 3: mod_base = OTHER; note = 2'-O-methyluridine-3'-phosphate
  modified_base 4: mod_base = OTHER; note = 2'-O-methyluridine-3'-phosphate
  modified_base 5: mod_base = OTHER; note = 2'-O-methyluridine-3'-phosphate
  modified_base 6: mod_base = OTHER; note = 2'-O-decyl-uridine-3'-phosphate
  modified_base 7: mod_base = OTHER; note = 2'-deoxy-2'-fluoroadenosine-3'-phosphate
  modified_base 8: mod_base = OTHER; note = 2'-O-methyladenosine-3'-phosphate
  modified_base 9: mod_base = OTHER; note = 2'-deoxy-2'-fluorouridine-3'-phosphate
  modified_base 10: mod_base = OTHER; note = 2'-deoxy-2'-fluorocytidine-3'-phosphate
  modified_base 11: mod_base = OTHER; note = 2'-deoxy-2'-fluorocytidine-3'-phosphate
  modified_base 12: mod_base = OTHER; note = 2'-O-methyluridine-3'-phosphate
  modified_base 13: mod_base = OTHER; note = 2'-O-methylcytidine-3'-phosphate
  modified_base 14: mod_base = OTHER; note = 2'-O-methyladenosine-3'-phosphate
  modified_base 15: mod_base = OTHER; note = 2'-O-methylcytidine-3'-phosphate
  modified_base 16: mod_base = OTHER; note = 2'-O-methyluridine-3'-phosphate
  modified_base 17: mod_base = OTHER; note = 2'-O-methylcytidine-3'-phosphate
  modified_base 18: mod_base = OTHER; note = 2'-O-methyluridine-3'-phosphate
  modified_base 19: mod_base = OTHER; note = 2'-O-methyladenosine-3'-phosphorothioate
  modified_base 20: mod_base = OTHER; note = 2'-O-methyladenosine-3'-phosphorothioate
  modified_base 21: mod_base = OTHER; note = 2'-O-methyladenosine
cattttaatcctcactctaaa

SEQ ID NO: 1716 - RNA, 21 nt, synthetic construct
  source 1..21: mol_type = other RNA
  modified_base 1: mod_base = OTHER; note = 2'-O-methylcytidine-3'-phosphorothioate
  modified_base 2: mod_base = OTHER; note = 2'-O-methyladenosine-3'-phosphorothioate
  modified_base 3: mod_base = OTHER; note = 2'-O-methyluridine-3'-phosphate
  modified_base 4: mod_base = OTHER; note = 2'-O-methyluridine-3'-phosphate
  modified_base 5: mod_base = OTHER; note = 2'-O-methyluridine-3'-phosphate
  modified_base 6: mod_base = OTHER; note = 2'-O-tetradecyl-uridine-3'-phosphate
  modified_base 7: mod_base = OTHER; note = 2'-deoxy-2'-fluoroadenosine-3'-phosphate
  modified_base 8: mod_base = OTHER; note = 2'-O-methyladenosine-3'-phosphate
  modified_base 9: mod_base = OTHER; note = 2'-deoxy-2'-fluorouridine-3'-phosphate
  modified_base 10: mod_base = OTHER; note = 2'-deoxy-2'-fluorocytidine-3'-phosphate
  modified_base 11: mod_base = OTHER; note = 2'-deoxy-2'-fluorocytidine-3'-phosphate
  modified_base 12: mod_base = OTHER; note = 2'-O-methyluridine-3'-phosphate
  modified_base 13: mod_base = OTHER; note = 2'-O-methylcytidine-3'-phosphate
  modified_base 14: mod_base = OTHER; note = 2'-O-methyladenosine-3'-phosphate
  modified_base 15: mod_base = OTHER; note = 2'-O-methylcytidine-3'-phosphate
  modified_base 16: mod_base = OTHER; note = 2'-O-methyluridine-3'-phosphate
  modified_base 17: mod_base = OTHER; note = 2'-O-methylcytidine-3'-phosphate
  modified_base 18: mod_base = OTHER; note = 2'-O-methyluridine-3'-phosphate
  modified_base 19: mod_base = OTHER; note = 2'-O-methyladenosine-3'-phosphorothioate
  modified_base 20: mod_base = OTHER; note = 2'-O-methyladenosine-3'-phosphorothioate
  modified_base 21: mod_base = OTHER; note = 2'-O-methyladenosine
cattttaatcctcactctaaa

SEQ ID NO: 1717 - RNA, 21 nt, synthetic construct
  source 1..21: mol_type = other RNA
  modified_base 1: mod_base = OTHER; note = 2'-O-methylcytidine-3'-phosphorothioate
  modified_base 2: mod_base = OTHER; note = 2'-O-methyladenosine-3'-phosphorothioate
  modified_base 3: mod_base = OTHER; note = 2'-O-methyluridine-3'-phosphate
  modified_base 4: mod_base = OTHER; note = 2'-O-methyluridine-3'-phosphate
  modified_base 5: mod_base = OTHER; note = 2'-O-methyluridine-3'-phosphate
  modified_base 6: mod_base = OTHER; note = 2'-O-hexadecyl-uridine-3'-phosphate
  modified_base 7: mod_base = OTHER; note = 2'-deoxy-2'-fluoroadenosine-3'-phosphate
  modified_base 8: mod_base = OTHER; note = 2'-O-methyladenosine-3'-phosphate
  modified_base 9: mod_base = OTHER; note = 2'-deoxy-2'-fluorouridine-3'-phosphate
  modified_base 10: mod_base = OTHER; note = 2'-deoxy-2'-fluorocytidine-3'-phosphate
  modified_base 11: mod_base = OTHER; note = 2'-deoxy-2'-fluorocytidine-3'-phosphate
  modified_base 12: mod_base = OTHER; note = 2'-O-methyluridine-3'-phosphate
  modified_base 13: mod_base = OTHER; note = 2'-O-methylcytidine-3'-phosphate
  modified_base 14: mod_base = OTHER; note = 2'-O-methyladenosine-3'-phosphate
  modified_base 15: mod_base = OTHER; note = 2'-O-methylcytidine-3'-phosphate
  modified_base 16: mod_base = OTHER; note = 2'-O-methyluridine-3'-phosphate
  modified_base 17: mod_base = OTHER; note = 2'-O-methylcytidine-3'-phosphate
  modified_base 18: mod_base = OTHER; note = 2'-O-methyluridine-3'-phosphate
  modified_base 19: mod_base = OTHER; note = 2'-O-methyladenosine-3'-phosphorothioate
  modified_base 20: mod_base = OTHER; note = 2'-O-methyladenosine-3'-phosphorothioate
  modified_base 21: mod_base = OTHER; note = 2'-O-methyladenosine
cattttaatcctcactctaaa

SEQ ID NO: 1718 - RNA, 21 nt, synthetic construct
  source 1..21: mol_type = other RNA
  modified_base 1: mod_base = OTHER; note = 2'-O-methylcytidine-3'-phosphorothioate
  modified_base 2: mod_base = OTHER; note = 2'-O-methyladenosine-3'-phosphorothioate
  modified_base 3: mod_base = OTHER; note = 2'-O-methyluridine-3'-phosphate
  modified_base 4: mod_base = OTHER; note = 2'-O-methyluridine-3'-phosphate
  modified_base 5: mod_base = OTHER; note = 2'-O-methyluridine-3'-phosphate
  modified_base 6: mod_base = OTHER; note = 2'-O-octadecyl-uridine-3'-phosphate
  modified_base 7: mod_base = OTHER; note = 2'-deoxy-2'-fluoroadenosine-3'-phosphate
  modified_base 8: mod_base = OTHER; note = 2'-O-methyladenosine-3'-phosphate
  modified_base 9: mod_base = OTHER; note = 2'-deoxy-2'-fluorouridine-3'-phosphate
  modified_base 10: mod_base = OTHER; note = 2'-deoxy-2'-fluorocytidine-3'-phosphate
  modified_base 11: mod_base = OTHER; note = 2'-deoxy-2'-fluorocytidine-3'-phosphate
  modified_base 12: mod_base = OTHER; note = 2'-O-methyluridine-3'-phosphate
  modified_base 13: mod_base = OTHER; note = 2'-O-methylcytidine-3'-phosphate
  modified_base 14: mod_base = OTHER; note = 2'-O-methyladenosine-3'-phosphate
  modified_base 15: mod_base = OTHER; note = 2'-O-methylcytidine-3'-phosphate
  modified_base 16: mod_base = OTHER; note = 2'-O-methyluridine-3'-phosphate
  modified_base 17: mod_base = OTHER; note = 2'-O-methylcytidine-3'-phosphate
  modified_base 18: mod_base = OTHER; note = 2'-O-methyluridine-3'-phosphate
  modified_base 19: mod_base = OTHER; note = 2'-O-methyladenosine-3'-phosphorothioate
  modified_base 20: mod_base = OTHER; note = 2'-O-methyladenosine-3'-phosphorothioate
  modified_base 21: mod_base = OTHER; note = 2'-O-methyladenosine
cattttaatcctcactctaaa

SEQ ID NO: 1719 - RNA, 21 nt, synthetic construct
  source 1..21: mol_type = other RNA
  modified_base 1: mod_base = OTHER; note = 2'-O-methylcytidine-3'-phosphorothioate
  modified_base 2: mod_base = OTHER; note = 2'-O-methyladenosine-3'-phosphorothioate
  modified_base 3: mod_base = OTHER; note = 2'-O-methyluridine-3'-phosphate
  modified_base 4: mod_base = OTHER; note = 2'-O-methyluridine-3'-phosphate
  modified_base 5: mod_base = OTHER; note = 2'-O-methyluridine-3'-phosphate
  modified_base 6: mod_base = OTHER; note = 2'-O-oleyl-uridine-3'-phosphate
  modified_base 7: mod_base = OTHER; note = 2'-deoxy-2'-fluoroadenosine-3'-phosphate
  modified_base 8: mod_base = OTHER; note = 2'-O-methyladenosine-3'-phosphate
  modified_base 9: mod_base = OTHER; note = 2'-deoxy-2'-fluorouridine-3'-phosphate
  modified_base 10: mod_base = OTHER; note = 2'-deoxy-2'-fluorocytidine-3'-phosphate
  modified_base 11: mod_base = OTHER; note = 2'-deoxy-2'-fluorocytidine-3'-phosphate
  modified_base 12: mod_base = OTHER; note = 2'-O-methyluridine-3'-phosphate
  modified_base 13: mod_base = OTHER; note = 2'-O-methylcytidine-3'-phosphate
  modified_base 14: mod_base = OTHER; note = 2'-O-methyladenosine-3'-phosphate
  modified_base 15: mod_base = OTHER; note = 2'-O-methylcytidine-3'-phosphate
  modified_base 16: mod_base = OTHER; note = 2'-O-methyluridine-3'-phosphate
  modified_base 17: mod_base = OTHER; note = 2'-O-methylcytidine-3'-phosphate
  modified_base 18: mod_base = OTHER; note = 2'-O-methyluridine-3'-phosphate
  modified_base 19: mod_base = OTHER; note = 2'-O-methyladenosine-3'-phosphorothioate
  modified_base 20: mod_base = OTHER; note = 2'-O-methyladenosine-3'-phosphorothioate
  modified_base 21: mod_base = OTHER; note = 2'-O-methyladenosine
cattttaatcctcactctaaa

SEQ ID NO: 1720 - RNA, 21 nt, synthetic construct
  source 1..21: mol_type = other RNA
  modified_base 1: mod_base = OTHER; note = 2'-O-methylcytidine-3'-phosphorothioate
  modified_base 2: mod_base = OTHER; note = 2'-O-methyladenosine-3'-phosphorothioate
  modified_base 3: mod_base = OTHER; note = 2'-O-methyluridine-3'-phosphate
  modified_base 4: mod_base = OTHER; note = 2'-O-methyluridine-3'-phosphate
  modified_base 5: mod_base = OTHER; note = 2'-O-methyluridine-3'-phosphate
  modified_base 6: mod_base = OTHER; note = 2'-O-docosanyl-uridine-3'-phosphate
  modified_base 7: mod_base = OTHER; note = 2'-deoxy-2'-fluoroadenosine-3'-phosphate
  modified_base 8: mod_base = OTHER; note = 2'-O-methyladenosine-3'-phosphate
  modified_base 9: mod_base = OTHER; note = 2'-deoxy-2'-fluorouridine-3'-phosphate
  modified_base 10: mod_base = OTHER; note = 2'-deoxy-2'-fluorocytidine-3'-phosphate
  modified_base 11: mod_base = OTHER; note = 2'-deoxy-2'-fluorocytidine-3'-phosphate
  modified_base 12: mod_base = OTHER; note = 2'-O-methyluridine-3'-phosphate
  modified_base 13: mod_base = OTHER; note = 2'-O-methylcytidine-3'-phosphate
  modified_base 14: mod_base = OTHER; note = 2'-O-methyladenosine-3'-phosphate
  modified_base 15: mod_base = OTHER; note = 2'-O-methylcytidine-3'-phosphate
  modified_base 16: mod_base = OTHER; note = 2'-O-methyluridine-3'-phosphate
  modified_base 17: mod_base = OTHER; note = 2'-O-methylcytidine-3'-phosphate
  modified_base 18: mod_base = OTHER; note = 2'-O-methyluridine-3'-phosphate
  modified_base 19: mod_base = OTHER; note = 2'-O-methyladenosine-3'-phosphorothioate
  modified_base 20: mod_base = OTHER; note = 2'-O-methyladenosine-3'-phosphorothioate
  modified_base 21: mod_base = OTHER; note = 2'-O-methyladenosine
cattttaatcctcactctaaa

SEQ ID NO: 1721 - RNA, 21 nt, synthetic construct
  source 1..21: mol_type = other RNA
  modified_base 1: mod_base = OTHER; note = 2'-O-methylcytidine-3'-phosphorothioate
  modified_base 2: mod_base = OTHER; note = 2'-O-methyladenosine-3'-phosphorothioate
  modified_base 3: mod_base = OTHER; note = 2'-O-methyluridine-3'-phosphate
  modified_base 4: mod_base = OTHER; note = 2'-O-methyluridine-3'-phosphate
  modified_base 5: mod_base = OTHER; note = 2'-O-methyluridine-3'-phosphate
  modified_base 6: mod_base = OTHER; note 2'-O-methyluridine-3'-(hexadecylsulfonyl)phosphoramidate
  modified_base 7: mod_base = OTHER; note = 2'-deoxy-2'-fluoroadenosine-3'-phosphate
  modified_base 8: mod_base = OTHER; note = 2'-O-methyladenosine-3'-phosphate
  modified_base 9: mod_base = OTHER; note = 2'-deoxy-2'-fluorouridine-3'-phosphate
  modified_base 10: mod_base = OTHER; note = 2'-deoxy-2'-fluorocytidine-3'-phosphate
  modified_base 11: mod_base = OTHER; note = 2'-deoxy-2'-fluorocytidine-3'-phosphate
  modified_base 12: mod_base = OTHER; note = 2'-O-methyluridine-3'-phosphate
  modified_base 13: mod_base = OTHER; note = 2'-O-methylcytidine-3'-phosphate
  modified_base 14: mod_base = OTHER; note = 2'-O-methyladenosine-3'-phosphate
  modified_base 15: mod_base = OTHER; note = 2'-O-methylcytidine-3'-phosphate
  modified_base 16: mod_base = OTHER; note = 2'-O-methyluridine-3'-phosphate
  modified_base 17: mod_base = OTHER; note = 2'-O-methylcytidine-3'-phosphate
  modified_base 18: mod_base = OTHER; note = 2'-O-methyluridine-3'-phosphate
  modified_base 19: mod_base = OTHER; note = 2'-O-methyladenosine-3'-phosphorothioate
  modified_base 20: mod_base = OTHER; note = 2'-O-methyladenosine-3'-phosphorothioate
  modified_base 21: mod_base = OTHER; note = 2'-O-methyladenosine
cattttaatcctcactctaaa

SEQ ID NO: 1722 - RNA, 21 nt, synthetic construct
  source 1..21: mol_type = other RNA
  modified_base 1: mod_base = OTHER; note = 2'-O-methylcytidine-3'-phosphorothioate
  modified_base 2: mod_base = OTHER; note = 2'-O-methyladenosine-3'-phosphorothioate
  modified_base 3: mod_base = OTHER; note = 2'-O-methyluridine-3'-phosphate
  modified_base 4: mod_base = OTHER; note = 2'-O-methyluridine-3'-phosphate
  modified_base 5: mod_base = OTHER; note = 2'-O-methyluridine-3'-phosphate
  modified_base 6: mod_base = OTHER; note = 2'-O-hexyl-uridine-3'-phosphate
  modified_base 7: mod_base = OTHER; note = 2'-deoxy-2'-fluoroadenosine-3'-phosphate
  modified_base 8: mod_base = OTHER; note = 2'-O-methyladenosine-3'-phosphate
  modified_base 9: mod_base = OTHER; note = 2'-deoxy-2'-fluorouridine-3'-phosphate
  modified_base 10: mod_base = OTHER; note = 2'-deoxy-2'-fluorocytidine-3'-phosphate
  modified_base 11: mod_base = OTHER; note = 2'-deoxy-2'-fluorocytidine-3'-phosphate
  modified_base 12: mod_base = OTHER; note = 2'-O-methyluridine-3'-phosphate
  modified_base 13: mod_base = OTHER; note = 2'-O-methylcytidine-3'-phosphate
  modified_base 14: mod_base = OTHER; note = 2'-O-methyladenosine-3'-phosphate
  modified_base 15: mod_base = OTHER; note = 2'-O-methylcytidine-3'-phosphate
  modified_base 16: mod_base = OTHER; note = 2'-O-hexyl-uridine-3'-phosphate
  modified_base 17: mod_base = OTHER; note = 2'-O-methylcytidine-3'-phosphate
  modified_base 18: mod_base = OTHER; note = 2'-O-methyluridine-3'-phosphate
  modified_base 19: mod_base = OTHER; note = 2'-O-methyladenosine-3'-phosphorothioate
  modified_base 20: mod_base = OTHER; note = 2'-O-methyladenosine-3'-phosphorothioate
  modified_base 21: mod_base = OTHER; note = 2'-O-methyladenosine
cattttaatcctcactctaaa

SEQ ID NO: 1723 - RNA, 21 nt, synthetic construct
  source 1..21: mol_type = other RNA
  modified_base 1: mod_base = OTHER; note = 2'-O-methylcytidine-3'-phosphorothioate
  modified_base 2: mod_base = OTHER; note = 2'-O-methyladenosine-3'-phosphorothioate
  modified_base 3: mod_base = OTHER; note = 2'-O-methyluridine-3'-phosphate
  modified_base 4: mod_base = OTHER; note = 2'-O-methyluridine-3'-phosphate
  modified_base 5: mod_base = OTHER; note = 2'-O-methyluridine-3'-phosphate
  modified_base 6: mod_base = OTHER; note = 2'-O-hexyl-uridine-3'-phosphate
  modified_base 7: mod_base = OTHER; note = 2'-deoxy-2'-fluoroadenosine-3'-phosphate
  modified_base 8: mod_base = OTHER; note = 2'-O-methyladenosine-3'-phosphate
  modified_base 9: mod_base = OTHER; note = 2'-deoxy-2'-fluorouridine-3'-phosphate
  modified_base 10: mod_base = OTHER; note = 2'-deoxy-2'-fluorocytidine-3'-phosphate
  modified_base 11: mod_base = OTHER; note = 2'-deoxy-2'-fluorocytidine-3'-phosphate
  modified_base 12: mod_base = OTHER; note = 2'-O-methyluridine-3'-phosphate
  modified_base 13: mod_base = OTHER; note = 2'-O-methylcytidine-3'-phosphate
  modified_base 14: mod_base = OTHER; note = 2'-O-methyladenosine-3'-phosphate
  modified_base 15: mod_base = OTHER; note = 2'-O-methylcytidine-3'-phosphate
  modified_base 16: mod_base = OTHER; note = 2'-O-hexyl-uridine-3'-phosphate
  modified_base 17: mod_base = OTHER; note = 2'-O-methylcytidine-3'-phosphate
  modified_base 18: mod_base = OTHER; note = 2'-O-methyluridine-3'-phosphate
  modified_base 19: mod_base = OTHER; note = 2'-O-methyladenosine-3'-phosphorothioate
  modified_base 20: mod_base = OTHER; note = 2'-O-methyladenosine-3'-phosphorothioate
  modified_base 21: mod_base = OTHER; note = 2'-O-hexyl-adenosine
cattttaatcctcactctaaa

SEQ ID NO: 1724 - RNA, 21 nt, synthetic construct
  source 1..21: mol_type = other RNA
  modified_base 1: mod_base = OTHER; note = 2'-O-hexyl-cytidine-3'-phosphorothioate
  modified_base 2: mod_base = OTHER; note = 2'-O-methyladenosine-3'-phosphorothioate
  modified_base 3: mod_base = OTHER; note = 2'-O-methyluridine-3'-phosphate
  modified_base 4: mod_base = OTHER; note = 2'-O-methyluridine-3'-phosphate
  modified_base 5: mod_base = OTHER; note = 2'-O-methyluridine-3'-phosphate
  modified_base 6: mod_base = OTHER; note = 2'-O-hexyl-uridine-3'-phosphate
  modified_base 7: mod_base = OTHER; note = 2'-deoxy-2'-fluoroadenosine-3'-phosphate
  modified_base 8: mod_base = OTHER; note = 2'-O-methyladenosine-3'-phosphate
  modified_base 9: mod_base = OTHER; note = 2'-deoxy-2'-fluorouridine-3'-phosphate
  modified_base 10: mod_base = OTHER; note = 2'-deoxy-2'-fluorocytidine-3'-phosphate
  modified_base 11: mod_base = OTHER; note = 2'-deoxy-2'-fluorocytidine-3'-phosphate
  modified_base 12: mod_base = OTHER; note = 2'-O-methyluridine-3'-phosphate
  modified_base 13: mod_base = OTHER; note = 2'-O-methylcytidine-3'-phosphate
  modified_base 14: mod_base = OTHER; note = 2'-O-methyladenosine-3'-phosphate
  modified_base 15: mod_base = OTHER; note = 2'-O-methylcytidine-3'-phosphate
  modified_base 16: mod_base = OTHER; note = 2'-O-hexyl-uridine-3'-phosphate
  modified_base 17: mod_base = OTHER; note = 2'-O-hexyl-cytidine-3'-phosphate
  modified_base 18: mod_base = OTHER; note = 2'-O-methyluridine-3'-phosphate
  modified_base 19: mod_base = OTHER; note = 2'-O-methyladenosine-3'-phosphorothioate
  modified_base 20: mod_base = OTHER; note = 2'-O-methyladenosine-3'-phosphorothioate
  modified_base 21: mod_base = OTHER; note = 2'-O-hexyl-adenosine
cattttaatcctcactctaaa

SEQ ID NO: 1725 - RNA, 21 nt, synthetic construct
  source 1..21: mol_type = other RNA
  modified_base 1: mod_base = OTHER; note = 2'-O-methyluridine-3'-phosphorothioate
  modified_base 2: mod_base = OTHER; note = 2'-O-methyluridine-3'-phosphorothioate
  modified_base 3: mod_base = OTHER; note = 2'-O-methylguanosine-3'-phosphate
  modified_base 4: mod_base = OTHER; note = 2'-O-methylguanosine-3'-phosphate
  modified_base 5: mod_base = OTHER; note = 2'-O-methylguanosine-3'-phosphate
  modified_base 6: mod_base = OTHER; note = 2'-O-docosanyl-cytidine-3'-phosphate
  modified_base 7: mod_base = OTHER; note = 2'-deoxy-2'-fluoroadenosine-3'-phosphate
  modified_base 8: mod_base = OTHER; note = 2'-O-methyladenosine-3'-phosphate
  modified_base 9: mod_base = OTHER; note = 2'-deoxy-2'-fluoroadenosine-3'-phosphate
  modified_base 10: mod_base = OTHER; note = 2'-deoxy-2'-fluoroguanosine-3'-phosphate
  modified_base 11: mod_base = OTHER; note = 2'-deoxy-2'-fluoroguanosine-3'-phosphate
  modified_base 12: mod_base = OTHER; note = 2'-O-methyluridine-3'-phosphate
  modified_base 13: mod_base = OTHER; note = 2'-O-methylguanosine-3'-phosphate
  modified_base 14: mod_base = OTHER; note = 2'-O-methylguanosine-3'-phosphate
  modified_base 15: mod_base = OTHER; note = 2'-O-methyladenosine-3'-phosphate
  modified_base 16: mod_base = OTHER; note = 2'-O-methyladenosine-3'-phosphate
  modified_base 17: mod_base = OTHER; note = 2'-O-methyladenosine-3'-phosphate
  modified_base 18: mod_base = OTHER; note = 2'-O-methyluridine-3'-phosphate
  modified_base 19: mod_base = OTHER; note = 2'-O-methylguanosine-3'-phosphorothioate
  modified_base 20: mod_base = OTHER; note = 2'-O-methyladenosine-3'-phosphorothioate
  modified_base 21: mod_base = OTHER; note = 2'-O-methyladenosine
ttgggcaaaggtggaaatgaa

SEQ ID NO: 1726 - RNA, 21 nt, synthetic construct
  source 1..21: mol_type = other RNA
  modified_base 1: mod_base = OTHER; note = 2'-O-methyladenosine-3'-phosphorothioate
  modified_base 2: mod_base = OTHER; note = 2'-O-methyluridine-3'-phosphorothioate
  modified_base 3: mod_base = OTHER; note = 2'-O-methylguanosine-3'-phosphate
  modified_base 4: mod_base = OTHER; note = 2'-O-methylguanosine-3'-phosphate
  modified_base 5: mod_base = OTHER; note = 2'-O-methylcytidine-3'-phosphate
  modified_base 6: mod_base = OTHER; note = 2'-O-docosanyl-adenosine-3'-phosphate
  modified_base 7: mod_base = OTHER; note = 2'-deoxy-2'-fluoroadenosine-3'-phosphate
  modified_base 8: mod_base = OTHER; note = 2'-O-methyladenosine-3'-phosphate
  modified_base 9: mod_base = OTHER; note = 2'-deoxy-2'-fluoroguanosine-3'-phosphate
  modified_base 10: mod_base = OTHER; note = 2'-deoxy-2'-fluoroadenosine-3'-phosphate
  modified_base 11: mod_base = OTHER; note = 2'-deoxy-2'-fluoroadenosine-3'-phosphate
  modified_base 12: mod_base = OTHER; note = 2'-O-methylcytidine-3'-phosphate
  modified_base 13: mod_base = OTHER; note = 2'-O-methyladenosine-3'-phosphate
  modified_base 14: mod_base = OTHER; note = 2'-O-methyladenosine-3'-phosphate
  modified_base 15: mod_base = OTHER; note = 2'-O-methyladenosine-3'-phosphate
  modified_base 16: mod_base = OTHER; note = 2'-O-methyluridine-3'-phosphate
  modified_base 17: mod_base = OTHER; note = 2'-O-methyladenosine-3'-phosphate
  modified_base 18: mod_base = OTHER; note = 2'-O-methyladenosine-3'-phosphate
  modified_base 19: mod_base = OTHER; note = 2'-O-methyluridine-3'-phosphorothioate
  modified_base 20: mod_base = OTHER; note = 2'-O-methyladenosine-3'-phosphorothioate
  modified_base 21: mod_base = OTHER; note = 2'-O-methyladenosine
atggcaaagaacaaataataa

SEQ ID NO: 1727 - RNA, 21 nt, synthetic construct
  source 1..21: mol_type = other RNA
  modified_base 1: mod_base = OTHER; note = 2'-O-methylcytidine-3'-phosphorothioate
  modified_base 2: mod_base = OTHER; note = 2'-O-methyladenosine-3'-phosphorothioate
  modified_base 3: mod_base = OTHER; note = 2'-O-methyluridine-3'-phosphate
  modified_base 4: mod_base = OTHER; note = 2'-O-methyluridine-3'-phosphate
  modified_base 5: mod_base = OTHER; note = 2'-O-methyluridine-3'-phosphate
  modified_base 6: mod_base = OTHER; note = 2'-O-methyluridine-3'-phosphate
  modified_base 7: mod_base = OTHER; note = 2'-deoxy-2'-fluoroadenosine-3'-phosphate
  modified_base 8: mod_base = OTHER; note = 2'-O-methyladenosine-3'-phosphate
  modified_base 9: mod_base = OTHER; note = 2'-deoxy-2'-fluorouridine-3'-phosphate
  modified_base 10: mod_base = OTHER; note = 2'-deoxy-2'-fluorocytidine-3'-phosphate
  modified_base 11: mod_base = OTHER; note = 2'-deoxy-2'-fluorocytidine-3'-phosphate
  modified_base 12: mod_base = OTHER; note = 2'-O-methyluridine-3'-phosphate
  modified_base 13: mod_base = OTHER; note = 2'-O-methylcytidine-3'-phosphate
  modified_base 14: mod_base = OTHER; note = 2'-O-methyladenosine-3'-phosphate
  modified_base 15: mod_base = OTHER; note = 2'-O-methylcytidine-3'-phosphate
  modified_base 16: mod_base = OTHER; note = 2'-O-methyluridine-3'-phosphate
  modified_base 17: mod_base = OTHER; note = 2'-O-methylcytidine-3'-phosphate
  modified_base 18: mod_base = OTHER; note = 2'-O-methyluridine-3'-phosphate
  modified_base 19: mod_base = OTHER; note = 2'-O-methyladenosine-3'-phosphorothioate
  modified_base 20: mod_base = OTHER; note = 2'-O-methyladenosine-3'-phosphorothioate
  modified_base 21: mod_base = OTHER; note = 2'-O-methyladenosine
cattttaatcctcactctaaa

SEQ ID NO: 1728 - RNA, 23 nt, synthetic construct
  source 1..23: mol_type = other RNA
  modified_base 1: mod_base = OTHER; note = 2'-O-methyluridine-3'-phosphorothioate 5'-(E)-Vinylphosphonate
  modified_base 2: mod_base = OTHER; note = 2'-deoxy-2'-fluorouridine-3'-phosphorothioate
  modified_base 3: mod_base = OTHER; note = 2'-O-methyluridine-3'-phosphate
  modified_base 4: mod_base = OTHER; note = 2'-O-methyladenosine-3'-phosphate
  modified_base 5: mod_base = OTHER; note = 2'-O-methylguanosine-3'-phosphate
  modified_base 6: mod_base = OTHER; note = 2'-deoxy-2'-fluoroadenosine-3'-phosphate
  modified_base 7: mod_base = OTHER; note = 2'-O-methylguanosine-3'-phosphate
  modified_base 8: mod_base = OTHER; note = 2'-deoxy-2'-fluorouridine-3'-phosphate
  modified_base 9: mod_base = OTHER; note = 2'-deoxy-2'-fluoroguanosine-3'-phosphate
  modified_base 10: mod_base = OTHER; note = 2'-O-methyladenosine-3'-phosphate
  modified_base 11: mod_base = OTHER; note = 2'-O-methylguanosine-3'-phosphate
  modified_base 12: mod_base = OTHER; note = 2'-O-methylguanosine-3'-phosphate
  modified_base 13: mod_base = OTHER; note = 2'-O-methyladenosine-3'-phosphate
  modified_base 14: mod_base = OTHER; note = 2'-deoxy-2'-fluorouridine-3'-phosphate
  modified_base 15: mod_base = OTHER; note = 2'-O-methyluridine-3'-phosphate
  modified_base 16: mod_base = OTHER; note = 2'-deoxy-2'-fluoroadenosine-3'-phosphate
  modified_base 17: mod_base = OTHER; note = 2'-O-methyladenosine-3'-phosphate
  modified_base 18: mod_base = OTHER; note = 2'-O-methyladenosine-3'-phosphate
  modified_base 19: mod_base = OTHER; note = 2'-O-methyladenosine-3'-phosphate
  modified_base 20: mod_base = OTHER; note = 2'-O-methyluridine-3'-phosphate
  modified_base 21: mod_base = OTHER; note = 2'-O-methylguanosine-3'-phosphorothioate
  modified_base 22: mod_base = OTHER; note = 2'-O-methyladenosine-3'-phosphorothioate
  modified_base 23: mod_base = OTHER; note = 2'-O-methylguanosine
tttagagtgaggattaaaatgag

SEQ ID NO: 1729 - RNA, 21 nt, synthetic construct
  source 1..21: mol_type = other RNA
  modified_base 1: mod_base = OTHER; note = 2'-O-methylcytidine-3'-phosphorothioate
  modified_base 2: mod_base = OTHER; note = 2'-O-methyladenosine-3'-phosphorothioate
  modified_base 3: mod_base = OTHER; note = 2'-O-methyluridine-3'-phosphate
  modified_base 4: mod_base = OTHER; note = 2'-O-methyluridine-3'-phosphate
  modified_base 5: mod_base = OTHER; note = 2'-O-methyluridine-3'-phosphate
  modified_base 6: mod_base = OTHER; note 2'-O-(6-(5-(3beta-cholest-5-en-3-yloxcarboxamido)pentyl)car boxamidohexyl)uridine-3'-phosphate
  modified_base 7: mod_base = OTHER; note = 2'-deoxy-2'-fluoroadenosine-3'-phosphate
  modified_base 8: mod_base = OTHER; note = 2'-O-methyladenosine-3'-phosphate
  modified_base 9: mod_base = OTHER; note = 2'-deoxy-2'-fluorouridine-3'-phosphate
  modified_base 10: mod_base = OTHER; note = 2'-deoxy-2'-fluorocytidine-3'-phosphate
  modified_base 11: mod_base = OTHER; note = 2'-deoxy-2'-fluorocytidine-3'-phosphate
  modified_base 12: mod_base = OTHER; note = 2'-O-methyluridine-3'-phosphate
  modified_base 13: mod_base = OTHER; note = 2'-O-methylcytidine-3'-phosphate
  modified_base 14: mod_base = OTHER; note = 2'-O-methyladenosine-3'-phosphate
  modified_base 15: mod_base = OTHER; note = 2'-O-methylcytidine-3'-phosphate
  modified_base 16: mod_base = OTHER; note = 2'-O-methyluridine-3'-phosphate
  modified_base 17: mod_base = OTHER; note = 2'-O-methylcytidine-3'-phosphate
  modified_base 18: mod_base = OTHER; note = 2'-O-methyluridine-3'-phosphate
  modified_base 19: mod_base = OTHER; note = 2'-O-methyladenosine-3'-phosphorothioate
  modified_base 20: mod_base = OTHER; note = 2'-O-methyladenosine-3'-phosphorothioate
  modified_base 21: mod_base = OTHER; note = 2'-O-methyladenosine
cattttaatcctcactctaaa

SEQ ID NO: 1730 - RNA, 23 nt, synthetic construct
  source 1..23: mol_type = other RNA
  modified_base 1: mod_base = OTHER; note = 2'-O-methyluridine-3'-phosphorothioate 5'-(E)-Vinylphosphonate
  modified_base 2: mod_base = OTHER; note = 2'-deoxy-2'-fluorouridine-3'-phosphorothioate
  modified_base 3: mod_base = OTHER; note = 2'-O-methyluridine-3'-phosphate
  modified_base 4: mod_base = OTHER; note = 2'-O-methyladenosine-3'-phosphate
  modified_base 5: mod_base = OTHER; note = 2'-O-methylguanosine-3'-phosphate
  modified_base 6: mod_base = OTHER; note = 2'-deoxy-2'-fluoroadenosine-3'-phosphate
  modified_base 7: mod_base = OTHER; note = 2'-O-methylguanosine-3'-phosphate
  modified_base 8: mod_base = OTHER; note = 2'-deoxy-2'-fluorouridine-3'-phosphate
  modified_base 9: mod_base = OTHER; note = 2'-deoxy-2'-fluoroguanosine-3'-phosphate
  modified_base 10: mod_base = OTHER; note = 2'-O-methyladenosine-3'-phosphate
  modified_base 11: mod_base = OTHER; note = 2'-O-methylguanosine-3'-phosphate
  modified_base 12: mod_base = OTHER; note = 2'-O-methylguanosine-3'-phosphate
  modified_base 13: mod_base = OTHER; note = 2'-O-methyladenosine-3'-phosphate
  modified_base 14: mod_base = OTHER; note = 2'-deoxy-2'-fluorouridine-3'-phosphate
  modified_base 15: mod_base = OTHER; note = 2'-O-methyluridine-3'-phosphate
  modified_base 16: mod_base = OTHER; note = 2'-deoxy-2'-fluoroadenosine-3'-phosphate
  modified_base 17: mod_base = OTHER; note = 2'-O-methyladenosine-3'-phosphate
  modified_base 18: mod_base = OTHER; note = 2'-O-methyladenosine-3'-phosphate
  modified_base 19: mod_base = OTHER; note = 2'-O-methyladenosine-3'-phosphate
  modified_base 20: mod_base = OTHER; note = 2'-O-methyluridine-3'-phosphate
  modified_base 21: mod_base = OTHER; note = 2'-O-methylguanosine-3'-phosphorothioate
  modified_base 22: mod_base = OTHER; note = 2'-O-methyladenosine-3'-phosphorothioate
  modified_base 23: mod_base = OTHER; note = 2'-O-methylguanosine
tttagagtgaggattaaaatgag

SEQ ID NO: 1731 - RNA, 21 nt, synthetic construct
  source 1..21: mol_type = other RNA
  modified_base 1: mod_base = OTHER; note = 2'-O-methylcytidine-3'-phosphorothioate
  modified_base 2: mod_base = OTHER; note = 2'-O-methyladenosine-3'-phosphorothioate
  modified_base 3: mod_base = OTHER; note = 2'-O-methyluridine-3'-phosphate
  modified_base 4: mod_base = OTHER; note = 2'-O-methyluridine-3'-phosphate
  modified_base 5: mod_base = OTHER; note = 2'-O-methyluridine-3'-phosphate
  modified_base 6: mod_base = OTHER; note = 2'-O-methyluridine-3'-phosphate
  modified_base 7: mod_base = OTHER; note = 2'-deoxy-2'-fluoroadenosine-3'-phosphate
  modified_base 8: mod_base = OTHER; note = 2'-O-methyladenosine-3'-phosphate
  modified_base 9: mod_base = OTHER; note = 2'-deoxy-2'-fluorouridine-3'-phosphate
  modified_base 10: mod_base = OTHER; note = 2'-deoxy-2'-fluorocytidine-3'-phosphate
  modified_base 11: mod_base = OTHER; note = 2'-deoxy-2'-fluorocytidine-3'-phosphate
  modified_base 12: mod_base = OTHER; note = 2'-O-methyluridine-3'-phosphate
  modified_base 13: mod_base = OTHER; note = 2'-O-methylcytidine-3'-phosphate
  modified_base 14: mod_base = OTHER; note = 2'-O-methyladenosine-3'-phosphate
  modified_base 15: mod_base = OTHER; note = 2'-O-methylcytidine-3'-phosphate
  modified_base 16: mod_base = OTHER; note = 2'-O-methyluridine-3'-phosphate
  modified_base 17: mod_base = OTHER; note = 2'-O-methylcytidine-3'-phosphate
  modified_base 18: mod_base = OTHER; note = 2'-O-methyluridine-3'-phosphate
  modified_base 19: mod_base = OTHER; note = 2'-O-methyladenosine-3'-phosphate
  modified_base 20: mod_base = OTHER; note = 2'-O-methyladenosine-3'-phosphate
  modified_base 21: mod_base = OTHER; note = 2'-O-methyladenosine-3'-phosphate (N-(1-oxo-6-((3beta-cholest-5-en-3-yl)oxcarboxamido)hexyl)- 4-hydroxypyrrolidin-2-yl)methyl ester
cattttaatcctcactctaaa

SEQ ID NO: 1732 - RNA, 23 nt, synthetic construct
  source 1..23: mol_type = other RNA
  modified_base 1: mod_base = OTHER; note = 2'-O-methyluridine-3'-phosphorothioate 5'-(E)-Vinylphosphonate
  modified_base 2: mod_base = OTHER; note = 2'-deoxy-2'-fluorouridine-3'-phosphorothioate
  modified_base 3: mod_base = OTHER; note = 2'-O-methyluridine-3'-phosphate
  modified_base 4: mod_base = OTHER; note = 2'-O-methyladenosine-3'-phosphate
  modified_base 5: mod_base = OTHER; note = 2'-O-methylguanosine-3'-phosphate
  modified_base 6: mod_base = OTHER; note = 2'-deoxy-2'-fluoroadenosine-3'-phosphate
  modified_base 7: mod_base = OTHER; note = 2'-O-methylguanosine-3'-phosphate
  modified_base 8: mod_base = OTHER; note = 2'-deoxy-2'-fluorouridine-3'-phosphate
  modified_base 9: mod_base = OTHER; note = 2'-deoxy-2'-fluoroguanosine-3'-phosphate
  modified_base 10: mod_base = OTHER; note = 2'-O-methyladenosine-3'-phosphate
  modified_base 11: mod_base = OTHER; note = 2'-O-methylguanosine-3'-phosphate
  modified_base 12: mod_base = OTHER; note = 2'-O-methylguanosine-3'-phosphate
  modified_base 13: mod_base = OTHER; note = 2'-O-methyladenosine-3'-phosphate
  modified_base 14: mod_base = OTHER; note = 2'-deoxy-2'-fluorouridine-3'-phosphate
  modified_base 15: mod_base = OTHER; note = 2'-O-methyluridine-3'-phosphate
  modified_base 16: mod_base = OTHER; note = 2'-deoxy-2'-fluoroadenosine-3'-phosphate
  modified_base 17: mod_base = OTHER; note = 2'-O-methyladenosine-3'-phosphate
  modified_base 18: mod_base = OTHER; note = 2'-O-methyladenosine-3'-phosphate
  modified_base 19: mod_base = OTHER; note = 2'-O-methyladenosine-3'-phosphate
  modified_base 20: mod_base = OTHER; note = 2'-O-methyluridine-3'-phosphate
  modified_base 21: mod_base = OTHER; note = 2'-O-methylguanosine-3'-phosphorothioate
  modified_base 22: mod_base = OTHER; note = 2'-O-methyladenosine-3'-phosphorothioate
  modified_base 23: mod_base = OTHER; note = 2'-O-methylguanosine
tttagagtgaggattaaaatgag

SEQ ID NO: 1733 - RNA, 21 nt, synthetic construct
  source 1..21: mol_type = other RNA
  modified_base 1: mod_base = OTHER; note = 2'-O-methylcytidine-3'-phosphorothioate
  modified_base 2: mod_base = OTHER; note = 2'-O-methyladenosine-3'-phosphorothioate
  modified_base 3: mod_base = OTHER; note = 2'-O-methyluridine-3'-phosphate
  modified_base 4: mod_base = OTHER; note = 2'-O-methyluridine-3'-phosphate
  modified_base 5: mod_base = OTHER; note = 2'-O-methyluridine-3'-phosphate
  modified_base 6: mod_base = OTHER; note = 2'-O-decyl-uridine-3'-phosphate
  modified_base 7: mod_base = OTHER; note = 2'-deoxy-2'-fluoroadenosine-3'-phosphate
  modified_base 8: mod_base = OTHER; note = 2'-O-methyladenosine-3'-phosphate
  modified_base 9: mod_base = OTHER; note = 2'-deoxy-2'-fluorouridine-3'-phosphate
  modified_base 10: mod_base = OTHER; note = 2'-deoxy-2'-fluorocytidine-3'-phosphate
  modified_base 11: mod_base = OTHER; note = 2'-deoxy-2'-fluorocytidine-3'-phosphate
  modified_base 12: mod_base = OTHER; note = 2'-O-methyluridine-3'-phosphate
  modified_base 13: mod_base = OTHER; note = 2'-O-methylcytidine-3'-phosphate
  modified_base 14: mod_base = OTHER; note = 2'-O-methyladenosine-3'-phosphate
  modified_base 15: mod_base = OTHER; note = 2'-O-methylcytidine-3'-phosphate
  modified_base 16: mod_base = OTHER; note = 2'-O-methyluridine-3'-phosphate
  modified_base 17: mod_base = OTHER; note = 2'-O-methylcytidine-3'-phosphate
  modified_base 18: mod_base = OTHER; note = 2'-O-methyluridine-3'-phosphate
  modified_base 19: mod_base = OTHER; note = 2'-O-methyladenosine-3'-phosphorothioate
  modified_base 20: mod_base = OTHER; note = 2'-O-methyladenosine-3'-phosphorothioate
  modified_base 21: mod_base = OTHER; note = 2'-O-methyladenosine
cattttaatcctcactctaaa

SEQ ID NO: 1734 - RNA, 23 nt, synthetic construct
  source 1..23: mol_type = other RNA
  modified_base 1: mod_base = OTHER; note = 2'-O-methyluridine-3'-phosphorothioate 5'-(E)-Vinylphosphonate
  modified_base 2: mod_base = OTHER; note = 2'-deoxy-2'-fluorouridine-3'-phosphorothioate
  modified_base 3: mod_base = OTHER; note = 2'-O-methyluridine-3'-phosphate
  modified_base 4: mod_base = OTHER; note = 2'-O-methyladenosine-3'-phosphate
  modified_base 5: mod_base = OTHER; note = 2'-O-methylguanosine-3'-phosphate
  modified_base 6: mod_base = OTHER; note = 2'-deoxy-2'-fluoroadenosine-3'-phosphate
  modified_base 7: mod_base = OTHER; note = 2'-O-methylguanosine-3'-phosphate
  modified_base 8: mod_base = OTHER; note = 2'-deoxy-2'-fluorouridine-3'-phosphate
  modified_base 9: mod_base = OTHER; note = 2'-deoxy-2'-fluoroguanosine-3'-phosphate
  modified_base 10: mod_base = OTHER; note = 2'-O-methyladenosine-3'-phosphate
  modified_base 11: mod_base = OTHER; note = 2'-O-methylguanosine-3'-phosphate
  modified_base 12: mod_base = OTHER; note = 2'-O-methylguanosine-3'-phosphate
  modified_base 13: mod_base = OTHER; note = 2'-O-methyladenosine-3'-phosphate
  modified_base 14: mod_base = OTHER; note = 2'-deoxy-2'-fluorouridine-3'-phosphate
  modified_base 15: mod_base = OTHER; note = 2'-O-methyluridine-3'-phosphate
  modified_base 16: mod_base = OTHER; note = 2'-deoxy-2'-fluoroadenosine-3'-phosphate
  modified_base 17: mod_base = OTHER; note = 2'-O-methyladenosine-3'-phosphate
  modified_base 18: mod_base = OTHER; note = 2'-O-methyladenosine-3'-phosphate
  modified_base 19: mod_base = OTHER; note = 2'-O-methyladenosine-3'-phosphate
  modified_base 20: mod_base = OTHER; note = 2'-O-methyluridine-3'-phosphate
  modified_base 21: mod_base = OTHER; note = 2'-O-methylguanosine-3'-phosphorothioate
  modified_base 22: mod_base = OTHER; note = 2'-O-methyladenosine-3'-phosphorothioate
  modified_base 23: mod_base = OTHER; note = 2'-O-methylguanosine
tttagagtgaggattaaaatgag

SEQ ID NO: 1735 - RNA, 21 nt, synthetic construct
  source 1..21: mol_type = other RNA
  modified_base 1: mod_base = OTHER; note = 2'-O-methylcytidine-3'-phosphorothioate
  modified_base 2: mod_base = OTHER; note = 2'-O-methyladenosine-3'-phosphorothioate
  modified_base 3: mod_base = OTHER; note = 2'-O-methyluridine-3'-phosphate
  modified_base 4: mod_base = OTHER; note = 2'-O-methyluridine-3'-phosphate
  modified_base 5: mod_base = OTHER; note = 2'-O-methyluridine-3'-phosphate
  modified_base 6: mod_base = OTHER; note = 2'-O-tetradecyl-uridine-3'-phosphate
  modified_base 7: mod_base = OTHER; note = 2'-deoxy-2'-fluoroadenosine-3'-phosphate
  modified_base 8: mod_base = OTHER; note = 2'-O-methyladenosine-3'-phosphate
  modified_base 9: mod_base = OTHER; note = 2'-deoxy-2'-fluorouridine-3'-phosphate
  modified_base 10: mod_base = OTHER; note = 2'-deoxy-2'-fluorocytidine-3'-phosphate
  modified_base 11: mod_base = OTHER; note = 2'-deoxy-2'-fluorocytidine-3'-phosphate
  modified_base 12: mod_base = OTHER; note = 2'-O-methyluridine-3'-phosphate
  modified_base 13: mod_base = OTHER; note = 2'-O-methylcytidine-3'-phosphate
  modified_base 14: mod_base = OTHER; note = 2'-O-methyladenosine-3'-phosphate
  modified_base 15: mod_base = OTHER; note = 2'-O-methylcytidine-3'-phosphate
  modified_base 16: mod_base = OTHER; note = 2'-O-methyluridine-3'-phosphate
  modified_base 17: mod_base = OTHER; note = 2'-O-methylcytidine-3'-phosphate
  modified_base 18: mod_base = OTHER; note = 2'-O-methyluridine-3'-phosphate
  modified_base 19: mod_base = OTHER; note = 2'-O-methyladenosine-3'-phosphorothioate
  modified_base 20: mod_base = OTHER; note = 2'-O-methyladenosine-3'-phosphorothioate
  modified_base 21: mod_base = OTHER; note = 2'-O-methyladenosine
cattttaatcctcactctaaa

SEQ ID NO: 1736 - RNA, 23 nt, synthetic construct
  source 1..23: mol_type = other RNA
  modified_base 1: mod_base = OTHER; note = 2'-O-methyluridine-3'-phosphorothioate 5'-(E)-Vinylphosphonate
  modified_base 2: mod_base = OTHER; note = 2'-deoxy-2'-fluorouridine-3'-phosphorothioate
  modified_base 3: mod_base = OTHER; note = 2'-O-methyluridine-3'-phosphate
  modified_base 4: mod_base = OTHER; note = 2'-O-methyladenosine-3'-phosphate
  modified_base 5: mod_base = OTHER; note = 2'-O-methylguanosine-3'-phosphate
  modified_base 6: mod_base = OTHER; note = 2'-deoxy-2'-fluoroadenosine-3'-phosphate
  modified_base 7: mod_base = OTHER; note = 2'-O-methylguanosine-3'-phosphate
  modified_base 8: mod_base = OTHER; note = 2'-deoxy-2'-fluorouridine-3'-phosphate
  modified_base 9: mod_base = OTHER; note = 2'-deoxy-2'-fluoroguanosine-3'-phosphate
  modified_base 10: mod_base = OTHER; note = 2'-O-methyladenosine-3'-phosphate
  modified_base 11: mod_base = OTHER; note = 2'-O-methylguanosine-3'-phosphate
  modified_base 12: mod_base = OTHER; note = 2'-O-methylguanosine-3'-phosphate
  modified_base 13: mod_base = OTHER; note = 2'-O-methyladenosine-3'-phosphate
  modified_base 14: mod_base = OTHER; note = 2'-deoxy-2'-fluorouridine-3'-phosphate
  modified_base 15: mod_base = OTHER; note = 2'-O-methyluridine-3'-phosphate
  modified_base 16: mod_base = OTHER; note = 2'-deoxy-2'-fluoroadenosine-3'-phosphate
  modified_base 17: mod_base = OTHER; note = 2'-O-methyladenosine-3'-phosphate
  modified_base 18: mod_base = OTHER; note = 2'-O-methyladenosine-3'-phosphate
  modified_base 19: mod_base = OTHER; note = 2'-O-methyladenosine-3'-phosphate
  modified_base 20: mod_base = OTHER; note = 2'-O-methyluridine-3'-phosphate
  modified_base 21: mod_base = OTHER; note = 2'-O-methylguanosine-3'-phosphorothioate
  modified_base 22: mod_base = OTHER; note = 2'-O-methyladenosine-3'-phosphorothioate
  modified_base 23: mod_base = OTHER; note = 2'-O-methylguanosine
tttagagtgaggattaaaatgag

SEQ ID NO: 1737 - RNA, 21 nt, synthetic construct
  source 1..21: mol_type = other RNA
  modified_base 1: mod_base = OTHER; note = 2'-O-methylcytidine-3'-phosphorothioate
  modified_base 2: mod_base = OTHER; note = 2'-O-methyladenosine-3'-phosphorothioate
  modified_base 3: mod_base = OTHER; note = 2'-O-methyluridine-3'-phosphate
  modified_base 4: mod_base = OTHER; note = 2'-O-methyluridine-3'-phosphate
  modified_base 5: mod_base = OTHER; note = 2'-O-methyluridine-3'-phosphate
  modified_base 6: mod_base = OTHER; note = 2'-O-hexadecyl-uridine-3'-phosphate
  modified_base 7: mod_base = OTHER; note = 2'-deoxy-2'-fluoroadenosine-3'-phosphate
  modified_base 8: mod_base = OTHER; note = 2'-O-methyladenosine-3'-phosphate
  modified_base 9: mod_base = OTHER; note = 2'-deoxy-2'-fluorouridine-3'-phosphate
  modified_base 10: mod_base = OTHER; note = 2'-deoxy-2'-fluorocytidine-3'-phosphate
  modified_base 11: mod_base = OTHER; note = 2'-deoxy-2'-fluorocytidine-3'-phosphate
  modified_base 12: mod_base = OTHER; note = 2'-O-methyluridine-3'-phosphate
  modified_base 13: mod_base = OTHER; note = 2'-O-methylcytidine-3'-phosphate
  modified_base 14: mod_base = OTHER; note = 2'-O-methyladenosine-3'-phosphate
  modified_base 15: mod_base = OTHER; note = 2'-O-methylcytidine-3'-phosphate
  modified_base 16: mod_base = OTHER; note = 2'-O-methyluridine-3'-phosphate
  modified_base 17: mod_base = OTHER; note = 2'-O-methylcytidine-3'-phosphate
  modified_base 18: mod_base = OTHER; note = 2'-O-methyluridine-3'-phosphate
  modified_base 19: mod_base = OTHER; note = 2'-O-methyladenosine-3'-phosphorothioate
  modified_base 20: mod_base = OTHER; note = 2'-O-methyladenosine-3'-phosphorothioate
  modified_base 21: mod_base = OTHER; note = 2'-O-methyladenosine
cattttaatcctcactctaaa

SEQ ID NO: 1738 - RNA, 23 nt, synthetic construct
  source 1..23: mol_type = other RNA
  modified_base 1: mod_base = OTHER; note = 2'-O-methyluridine-3'-phosphorothioate 5'-(E)-Vinylphosphonate
  modified_base 2: mod_base = OTHER; note = 2'-deoxy-2'-fluorouridine-3'-phosphorothioate
  modified_base 3: mod_base = OTHER; note = 2'-O-methyluridine-3'-phosphate
  modified_base 4: mod_base = OTHER; note = 2'-O-methyladenosine-3'-phosphate
  modified_base 5: mod_base = OTHER; note = 2'-O-methylguanosine-3'-phosphate
  modified_base 6: mod_base = OTHER; note = 2'-deoxy-2'-fluoroadenosine-3'-phosphate
  modified_base 7: mod_base = OTHER; note = 2'-O-methylguanosine-3'-phosphate
  modified_base 8: mod_base = OTHER; note = 2'-deoxy-2'-fluorouridine-3'-phosphate
  modified_base 9: mod_base = OTHER; note = 2'-deoxy-2'-fluoroguanosine-3'-phosphate
  modified_base 10: mod_base = OTHER; note = 2'-O-methyladenosine-3'-phosphate
  modified_base 11: mod_base = OTHER; note = 2'-O-methylguanosine-3'-phosphate
  modified_base 12: mod_base = OTHER; note = 2'-O-methylguanosine-3'-phosphate
  modified_base 13: mod_base = OTHER; note = 2'-O-methyladenosine-3'-phosphate
  modified_base 14: mod_base = OTHER; note = 2'-deoxy-2'-fluorouridine-3'-phosphate
  modified_base 15: mod_base = OTHER; note = 2'-O-methyluridine-3'-phosphate
  modified_base 16: mod_base = OTHER; note = 2'-deoxy-2'-fluoroadenosine-3'-phosphate
  modified_base 17: mod_base = OTHER; note = 2'-O-methyladenosine-3'-phosphate
  modified_base 18: mod_base = OTHER; note = 2'-O-methyladenosine-3'-phosphate
  modified_base 19: mod_base = OTHER; note = 2'-O-methyladenosine-3'-phosphate
  modified_base 20: mod_base = OTHER; note = 2'-O-methyluridine-3'-phosphate
  modified_base 21: mod_base = OTHER; note = 2'-O-methylguanosine-3'-phosphorothioate
  modified_base 22: mod_base = OTHER; note = 2'-O-methyladenosine-3'-phosphorothioate
  modified_base 23: mod_base = OTHER; note = 2'-O-methylguanosine
tttagagtgaggattaaaatgag

SEQ ID NO: 1739 - RNA, 21 nt, synthetic construct
  source 1..21: mol_type = other RNA
  modified_base 1: mod_base = OTHER; note = 2'-O-methylcytidine-3'-phosphorothioate
  modified_base 2: mod_base = OTHER; note = 2'-O-methyladenosine-3'-phosphorothioate
  modified_base 3: mod_base = OTHER; note = 2'-O-methyluridine-3'-phosphate
  modified_base 4: mod_base = OTHER; note = 2'-O-methyluridine-3'-phosphate
  modified_base 5: mod_base = OTHER; note = 2'-O-methyluridine-3'-phosphate
  modified_base 6: mod_base = OTHER; note = 2'-O-octadecyl-uridine-3'-phosphate
  modified_base 7: mod_base = OTHER; note = 2'-deoxy-2'-fluoroadenosine-3'-phosphate
  modified_base 8: mod_base = OTHER; note = 2'-O-methyladenosine-3'-phosphate
  modified_base 9: mod_base = OTHER; note = 2'-deoxy-2'-fluorouridine-3'-phosphate
  modified_base 10: mod_base = OTHER; note = 2'-deoxy-2'-fluorocytidine-3'-phosphate
  modified_base 11: mod_base = OTHER; note = 2'-deoxy-2'-fluorocytidine-3'-phosphate
  modified_base 12: mod_base = OTHER; note = 2'-O-methyluridine-3'-phosphate
  modified_base 13: mod_base = OTHER; note = 2'-O-methylcytidine-3'-phosphate
  modified_base 14: mod_base = OTHER; note = 2'-O-methyladenosine-3'-phosphate
  modified_base 15: mod_base = OTHER; note = 2'-O-methylcytidine-3'-phosphate
  modified_base 16: mod_base = OTHER; note = 2'-O-methyluridine-3'-phosphate
  modified_base 17: mod_base = OTHER; note = 2'-O-methylcytidine-3'-phosphate
  modified_base 18: mod_base = OTHER; note = 2'-O-methyluridine-3'-phosphate
  modified_base 19: mod_base = OTHER; note = 2'-O-methyladenosine-3'-phosphorothioate
  modified_base 20: mod_base = OTHER; note = 2'-O-methyladenosine-3'-phosphorothioate
  modified_base 21: mod_base = OTHER; note = 2'-O-methyladenosine
cattttaatcctcactctaaa

SEQ ID NO: 1740 - RNA, 23 nt, synthetic construct
  source 1..23: mol_type = other RNA
  modified_base 1: mod_base = OTHER; note = 2'-O-methyluridine-3'-phosphorothioate 5'-(E)-Vinylphosphonate
  modified_base 2: mod_base = OTHER; note = 2'-deoxy-2'-fluorouridine-3'-phosphorothioate
  modified_base 3: mod_base = OTHER; note = 2'-O-methyluridine-3'-phosphate
  modified_base 4: mod_base = OTHER; note = 2'-O-methyladenosine-3'-phosphate
  modified_base 5: mod_base = OTHER; note = 2'-O-methylguanosine-3'-phosphate
  modified_base 6: mod_base = OTHER; note = 2'-deoxy-2'-fluoroadenosine-3'-phosphate
  modified_base 7: mod_base = OTHER; note = 2'-O-methylguanosine-3'-phosphate
  modified_base 8: mod_base = OTHER; note = 2'-deoxy-2'-fluorouridine-3'-phosphate
  modified_base 9: mod_base = OTHER; note = 2'-deoxy-2'-fluoroguanosine-3'-phosphate
  modified_base 10: mod_base = OTHER; note = 2'-O-methyladenosine-3'-phosphate
  modified_base 11: mod_base = OTHER; note = 2'-O-methylguanosine-3'-phosphate
  modified_base 12: mod_base = OTHER; note = 2'-O-methylguanosine-3'-phosphate
  modified_base 13: mod_base = OTHER; note = 2'-O-methyladenosine-3'-phosphate
  modified_base 14: mod_base = OTHER; note = 2'-deoxy-2'-fluorouridine-3'-phosphate
  modified_base 15: mod_base = OTHER; note = 2'-O-methyluridine-3'-phosphate
  modified_base 16: mod_base = OTHER; note = 2'-deoxy-2'-fluoroadenosine-3'-phosphate
  modified_base 17: mod_base = OTHER; note = 2'-O-methyladenosine-3'-phosphate
  modified_base 18: mod_base = OTHER; note = 2'-O-methyladenosine-3'-phosphate
  modified_base 19: mod_base = OTHER; note = 2'-O-methyladenosine-3'-phosphate
  modified_base 20: mod_base = OTHER; note = 2'-O-methyluridine-3'-phosphate
  modified_base 21: mod_base = OTHER; note = 2'-O-methylguanosine-3'-phosphorothioate
  modified_base 22: mod_base = OTHER; note = 2'-O-methyladenosine-3'-phosphorothioate
  modified_base 23: mod_base = OTHER; note = 2'-O-methylguanosine
tttagagtgaggattaaaatgag

SEQ ID NO: 1741 - RNA, 21 nt, synthetic construct
  source 1..21: mol_type = other RNA
  modified_base 1: mod_base = OTHER; note = 2'-O-methylcytidine-3'-phosphorothioate
  modified_base 2: mod_base = OTHER; note = 2'-O-methyladenosine-3'-phosphorothioate
  modified_base 3: mod_base = OTHER; note = 2'-O-methyluridine-3'-phosphate
  modified_base 4: mod_base = OTHER; note = 2'-O-methyluridine-3'-phosphate
  modified_base 5: mod_base = OTHER; note = 2'-O-methyluridine-3'-phosphate
  modified_base 6: mod_base = OTHER; note = 2'-O-oleyl-uridine-3'-phosphate
  modified_base 7: mod_base = OTHER; note = 2'-deoxy-2'-fluoroadenosine-3'-phosphate
  modified_base 8: mod_base = OTHER; note = 2'-O-methyladenosine-3'-phosphate
  modified_base 9: mod_base = OTHER; note = 2'-deoxy-2'-fluorouridine-3'-phosphate
  modified_base 10: mod_base = OTHER; note = 2'-deoxy-2'-fluorocytidine-3'-phosphate
  modified_base 11: mod_base = OTHER; note = 2'-deoxy-2'-fluorocytidine-3'-phosphate
  modified_base 12: mod_base = OTHER; note = 2'-O-methyluridine-3'-phosphate
  modified_base 13: mod_base = OTHER; note = 2'-O-methylcytidine-3'-phosphate
  modified_base 14: mod_base = OTHER; note = 2'-O-methyladenosine-3'-phosphate
  modified_base 15: mod_base = OTHER; note = 2'-O-methylcytidine-3'-phosphate
  modified_base 16: mod_base = OTHER; note = 2'-O-methyluridine-3'-phosphate
  modified_base 17: mod_base = OTHER; note = 2'-O-methylcytidine-3'-phosphate
  modified_base 18: mod_base = OTHER; note = 2'-O-methyluridine-3'-phosphate
  modified_base 19: mod_base = OTHER; note = 2'-O-methyladenosine-3'-phosphorothioate
  modified_base 20: mod_base = OTHER; note = 2'-O-methyladenosine-3'-phosphorothioate
  modified_base 21: mod_base = OTHER; note = 2'-O-methyladenosine
cattttaatcctcactctaaa

SEQ ID NO: 1742 - RNA, 23 nt, synthetic construct
  source 1..23: mol_type = other RNA
  modified_base 1: mod_base = OTHER; note = 2'-O-methyluridine-3'-phosphorothioate 5'-(E)-Vinylphosphonate
  modified_base 2: mod_base = OTHER; note = 2'-deoxy-2'-fluorouridine-3'-phosphorothioate
  modified_base 3: mod_base = OTHER; note = 2'-O-methyluridine-3'-phosphate
  modified_base 4: mod_base = OTHER; note = 2'-O-methyladenosine-3'-phosphate
  modified_base 5: mod_base = OTHER; note = 2'-O-methylguanosine-3'-phosphate
  modified_base 6: mod_base = OTHER; note = 2'-deoxy-2'-fluoroadenosine-3'-phosphate
  modified_base 7: mod_base = OTHER; note = 2'-O-methylguanosine-3'-phosphate
  modified_base 8: mod_base = OTHER; note = 2'-deoxy-2'-fluorouridine-3'-phosphate
  modified_base 9: mod_base = OTHER; note = 2'-deoxy-2'-fluoroguanosine-3'-phosphate
  modified_base 10: mod_base = OTHER; note = 2'-O-methyladenosine-3'-phosphate
  modified_base 11: mod_base = OTHER; note = 2'-O-methylguanosine-3'-phosphate
  modified_base 12: mod_base = OTHER; note = 2'-O-methylguanosine-3'-phosphate
  modified_base 13: mod_base = OTHER; note = 2'-O-methyladenosine-3'-phosphate
  modified_base 14: mod_base = OTHER; note = 2'-deoxy-2'-fluorouridine-3'-phosphate
  modified_base 15: mod_base = OTHER; note = 2'-O-methyluridine-3'-phosphate
  modified_base 16: mod_base = OTHER; note = 2'-deoxy-2'-fluoroadenosine-3'-phosphate
  modified_base 17: mod_base = OTHER; note = 2'-O-methyladenosine-3'-phosphate
  modified_base 18: mod_base = OTHER; note = 2'-O-methyladenosine-3'-phosphate
  modified_base 19: mod_base = OTHER; note = 2'-O-methyladenosine-3'-phosphate
  modified_base 20: mod_base = OTHER; note = 2'-O-methyluridine-3'-phosphate
  modified_base 21: mod_base = OTHER; note = 2'-O-methylguanosine-3'-phosphorothioate
  modified_base 22: mod_base = OTHER; note = 2'-O-methyladenosine-3'-phosphorothioate
  modified_base 23: mod_base = OTHER; note = 2'-O-methylguanosine
tttagagtgaggattaaaatgag

SEQ ID NO: 1743 - RNA, 21 nt, synthetic construct
  source 1..21: mol_type = other RNA
  modified_base 1: mod_base = OTHER; note = 2'-O-methylcytidine-3'-phosphorothioate
  modified_base 2: mod_base = OTHER; note = 2'-O-methyladenosine-3'-phosphorothioate
  modified_base 3: mod_base = OTHER; note = 2'-O-methyluridine-3'-phosphate
  modified_base 4: mod_base = OTHER; note = 2'-O-methyluridine-3'-phosphate
  modified_base 5: mod_base = OTHER; note = 2'-O-methyluridine-3'-phosphate
  modified_base 6: mod_base = OTHER; note = 2'-O-docosanyl-uridine-3'-phosphate
  modified_base 7: mod_base = OTHER; note = 2'-deoxy-2'-fluoroadenosine-3'-phosphate
  modified_base 8: mod_base = OTHER; note = 2'-O-methyladenosine-3'-phosphate
  modified_base 9: mod_base = OTHER; note = 2'-deoxy-2'-fluorouridine-3'-phosphate
  modified_base 10: mod_base = OTHER; note = 2'-deoxy-2'-fluorocytidine-3'-phosphate
  modified_base 11: mod_base = OTHER; note = 2'-deoxy-2'-fluorocytidine-3'-phosphate
  modified_base 12: mod_base = OTHER; note = 2'-O-methyluridine-3'-phosphate
  modified_base 13: mod_base = OTHER; note = 2'-O-methylcytidine-3'-phosphate
  modified_base 14: mod_base = OTHER; note = 2'-O-methyladenosine-3'-phosphate
  modified_base 15: mod_base = OTHER; note = 2'-O-methylcytidine-3'-phosphate
  modified_base 16: mod_base = OTHER; note = 2'-O-methyluridine-3'-phosphate
  modified_base 17: mod_base = OTHER; note = 2'-O-methylcytidine-3'-phosphate
  modified_base 18: mod_base = OTHER; note = 2'-O-methyluridine-3'-phosphate
  modified_base 19: mod_base = OTHER; note = 2'-O-methyladenosine-3'-phosphorothioate
  modified_base 20: mod_base = OTHER; note = 2'-O-methyladenosine-3'-phosphorothioate
  modified_base 21: mod_base = OTHER; note = 2'-O-methyladenosine
cattttaatcctcactctaaa

SEQ ID NO: 1744 - RNA, 23 nt, synthetic construct
  source 1..23: mol_type = other RNA
  modified_base 1: mod_base = OTHER; note = 2'-O-methyluridine-3'-phosphorothioate 5'-(E)-Vinylphosphonate
  modified_base 2: mod_base = OTHER; note = 2'-deoxy-2'-fluorouridine-3'-phosphorothioate
  modified_base 3: mod_base = OTHER; note = 2'-O-methyluridine-3'-phosphate
  modified_base 4: mod_base = OTHER; note = 2'-O-methyladenosine-3'-phosphate
  modified_base 5: mod_base = OTHER; note = 2'-O-methylguanosine-3'-phosphate
  modified_base 6: mod_base = OTHER; note = 2'-deoxy-2'-fluoroadenosine-3'-phosphate
  modified_base 7: mod_base = OTHER; note = 2'-O-methylguanosine-3'-phosphate
  modified_base 8: mod_base = OTHER; note = 2'-deoxy-2'-fluorouridine-3'-phosphate
  modified_base 9: mod_base = OTHER; note = 2'-deoxy-2'-fluoroguanosine-3'-phosphate
  modified_base 10: mod_base = OTHER; note = 2'-O-methyladenosine-3'-phosphate
  modified_base 11: mod_base = OTHER; note = 2'-O-methylguanosine-3'-phosphate
  modified_base 12: mod_base = OTHER; note = 2'-O-methylguanosine-3'-phosphate
  modified_base 13: mod_base = OTHER; note = 2'-O-methyladenosine-3'-phosphate
  modified_base 14: mod_base = OTHER; note = 2'-deoxy-2'-fluorouridine-3'-phosphate
  modified_base 15: mod_base = OTHER; note = 2'-O-methyluridine-3'-phosphate
  modified_base 16: mod_base = OTHER; note = 2'-deoxy-2'-fluoroadenosine-3'-phosphate
  modified_base 17: mod_base = OTHER; note = 2'-O-methyladenosine-3'-phosphate
  modified_base 18: mod_base = OTHER; note = 2'-O-methyladenosine-3'-phosphate
  modified_base 19: mod_base = OTHER; note = 2'-O-methyladenosine-3'-phosphate
  modified_base 20: mod_base = OTHER; note = 2'-O-methyluridine-3'-phosphate
  modified_base 21: mod_base = OTHER; note = 2'-O-methylguanosine-3'-phosphorothioate
  modified_base 22: mod_base = OTHER; note = 2'-O-methyladenosine-3'-phosphorothioate
  modified_base 23: mod_base = OTHER; note = 2'-O-methylguanosine
tttagagtgaggattaaaatgag

SEQ ID NO: 1745 - RNA, 21 nt, synthetic construct
  source 1..21: mol_type = other RNA
  modified_base 1: mod_base = OTHER; note = 2'-O-methylcytidine-3'-phosphorothioate
  modified_base 2: mod_base = OTHER; note = 2'-O-methyladenosine-3'-phosphorothioate
  modified_base 3: mod_base = OTHER; note = 2'-O-methyluridine-3'-phosphate
  modified_base 4: mod_base = OTHER; note = 2'-O-methyluridine-3'-phosphate
  modified_base 5: mod_base = OTHER; note = 2'-O-methyluridine-3'-phosphate
  modified_base 6: mod_base = OTHER; note 2'-O-methyluridine-3'-(hexadecylsulfonyl)phosphoramidate
  modified_base 7: mod_base = OTHER; note = 2'-deoxy-2'-fluoroadenosine-3'-phosphate
  modified_base 8: mod_base = OTHER; note = 2'-O-methyladenosine-3'-phosphate
  modified_base 9: mod_base = OTHER; note = 2'-deoxy-2'-fluorouridine-3'-phosphate
  modified_base 10: mod_base = OTHER; note = 2'-deoxy-2'-fluorocytidine-3'-phosphate
  modified_base 11: mod_base = OTHER; note = 2'-deoxy-2'-fluorocytidine-3'-phosphate
  modified_base 12: mod_base = OTHER; note = 2'-O-methyluridine-3'-phosphate
  modified_base 13: mod_base = OTHER; note = 2'-O-methylcytidine-3'-phosphate
  modified_base 14: mod_base = OTHER; note = 2'-O-methyladenosine-3'-phosphate
  modified_base 15: mod_base = OTHER; note = 2'-O-methylcytidine-3'-phosphate
  modified_base 16: mod_base = OTHER; note = 2'-O-methyluridine-3'-phosphate
  modified_base 17: mod_base = OTHER; note = 2'-O-methylcytidine-3'-phosphate
  modified_base 18: mod_base = OTHER; note = 2'-O-methyluridine-3'-phosphate
  modified_base 19: mod_base = OTHER; note = 2'-O-methyladenosine-3'-phosphorothioate
  modified_base 20: mod_base = OTHER; note = 2'-O-methyladenosine-3'-phosphorothioate
  modified_base 21: mod_base = OTHER; note = 2'-O-methyladenosine
cattttaatcctcactctaaa

SEQ ID NO: 1746 - RNA, 23 nt, synthetic construct
  source 1..23: mol_type = other RNA
  modified_base 1: mod_base = OTHER; note = 2'-O-methyluridine-3'-phosphorothioate 5'-(E)-Vinylphosphonate
  modified_base 2: mod_base = OTHER; note = 2'-deoxy-2'-fluorouridine-3'-phosphorothioate
  modified_base 3: mod_base = OTHER; note = 2'-O-methyluridine-3'-phosphate
  modified_base 4: mod_base = OTHER; note = 2'-O-methyladenosine-3'-phosphate
  modified_base 5: mod_base = OTHER; note = 2'-O-methylguanosine-3'-phosphate
  modified_base 6: mod_base = OTHER; note = 2'-deoxy-2'-fluoroadenosine-3'-phosphate
  modified_base 7: mod_base = OTHER; note = 2'-O-methylguanosine-3'-phosphate
  modified_base 8: mod_base = OTHER; note = 2'-deoxy-2'-fluorouridine-3'-phosphate
  modified_base 9: mod_base = OTHER; note = 2'-deoxy-2'-fluoroguanosine-3'-phosphate
  modified_base 10: mod_base = OTHER; note = 2'-O-methyladenosine-3'-phosphate
  modified_base 11: mod_base = OTHER; note = 2'-O-methylguanosine-3'-phosphate
  modified_base 12: mod_base = OTHER; note = 2'-O-methylguanosine-3'-phosphate
  modified_base 13: mod_base = OTHER; note = 2'-O-methyladenosine-3'-phosphate
  modified_base 14: mod_base = OTHER; note = 2'-deoxy-2'-fluorouridine-3'-phosphate
  modified_base 15: mod_base = OTHER; note = 2'-O-methyluridine-3'-phosphate
  modified_base 16: mod_base = OTHER; note = 2'-deoxy-2'-fluoroadenosine-3'-phosphate
  modified_base 17: mod_base = OTHER; note = 2'-O-methyladenosine-3'-phosphate
  modified_base 18: mod_base = OTHER; note = 2'-O-methyladenosine-3'-phosphate
  modified_base 19: mod_base = OTHER; note = 2'-O-methyladenosine-3'-phosphate
  modified_base 20: mod_base = OTHER; note = 2'-O-methyluridine-3'-phosphate
  modified_base 21: mod_base = OTHER; note = 2'-O-methylguanosine-3'-phosphorothioate
  modified_base 22: mod_base = OTHER; note = 2'-O-methyladenosine-3'-phosphorothioate
  modified_base 23: mod_base = OTHER; note = 2'-O-methylguanosine
tttagagtgaggattaaaatgag

SEQ ID NO: 1747 - RNA, 21 nt, synthetic construct
  source 1..21: mol_type = other RNA
  modified_base 1: mod_base = OTHER; note = 2'-O-methylcytidine-3'-phosphorothioate
  modified_base 2: mod_base = OTHER; note = 2'-O-methyladenosine-3'-phosphorothioate
  modified_base 3: mod_base = OTHER; note = 2'-O-methyluridine-3'-phosphate
  modified_base 4: mod_base = OTHER; note = 2'-O-methyluridine-3'-phosphate
  modified_base 5: mod_base = OTHER; note = 2'-O-methyluridine-3'-phosphate
  modified_base 6: mod_base = OTHER; note = 2'-O-hexyl-uridine-3'-phosphate
  modified_base 7: mod_base = OTHER; note = 2'-deoxy-2'-fluoroadenosine-3'-phosphate
  modified_base 8: mod_base = OTHER; note = 2'-O-methyladenosine-3'-phosphate
  modified_base 9: mod_base = OTHER; note = 2'-deoxy-2'-fluorouridine-3'-phosphate
  modified_base 10: mod_base = OTHER; note = 2'-deoxy-2'-fluorocytidine-3'-phosphate
  modified_base 11: mod_base = OTHER; note = 2'-deoxy-2'-fluorocytidine-3'-phosphate
  modified_base 12: mod_base = OTHER; note = 2'-O-methyluridine-3'-phosphate
  modified_base 13: mod_base = OTHER; note = 2'-O-methylcytidine-3'-phosphate
  modified_base 14: mod_base = OTHER; note = 2'-O-methyladenosine-3'-phosphate
  modified_base 15: mod_base = OTHER; note = 2'-O-methylcytidine-3'-phosphate
  modified_base 16: mod_base = OTHER; note = 2'-O-hexyl-uridine-3'-phosphate
  modified_base 17: mod_base = OTHER; note = 2'-O-methylcytidine-3'-phosphate
  modified_base 18: mod_base = OTHER; note = 2'-O-methyluridine-3'-phosphate
  modified_base 19: mod_base = OTHER; note = 2'-O-methyladenosine-3'-phosphorothioate
  modified_base 20: mod_base = OTHER; note = 2'-O-methyladenosine-3'-phosphorothioate
  modified_base 21: mod_base = OTHER; note = 2'-O-methyladenosine
cattttaatcctcactctaaa

SEQ ID NO: 1748 - RNA, 23 nt, synthetic construct
  source 1..23: mol_type = other RNA
  modified_base 1: mod_base = OTHER; note = 2'-O-methyluridine-3'-phosphorothioate 5'-(E)-Vinylphosphonate
  modified_base 2: mod_base = OTHER; note = 2'-deoxy-2'-fluorouridine-3'-phosphorothioate
  modified_base 3: mod_base = OTHER; note = 2'-O-methyluridine-3'-phosphate
  modified_base 4: mod_base = OTHER; note = 2'-O-methyladenosine-3'-phosphate
  modified_base 5: mod_base = OTHER; note = 2'-O-methylguanosine-3'-phosphate
  modified_base 6: mod_base = OTHER; note = 2'-deoxy-2'-fluoroadenosine-3'-phosphate
  modified_base 7: mod_base = OTHER; note = 2'-O-methylguanosine-3'-phosphate
  modified_base 8: mod_base = OTHER; note = 2'-deoxy-2'-fluorouridine-3'-phosphate
  modified_base 9: mod_base = OTHER; note = 2'-deoxy-2'-fluoroguanosine-3'-phosphate
  modified_base 10: mod_base = OTHER; note = 2'-O-methyladenosine-3'-phosphate
  modified_base 11: mod_base = OTHER; note = 2'-O-methylguanosine-3'-phosphate
  modified_base 12: mod_base = OTHER; note = 2'-O-methylguanosine-3'-phosphate
  modified_base 13: mod_base = OTHER; note = 2'-O-methyladenosine-3'-phosphate
  modified_base 14: mod_base = OTHER; note = 2'-deoxy-2'-fluorouridine-3'-phosphate
  modified_base 15: mod_base = OTHER; note = 2'-O-methyluridine-3'-phosphate
  modified_base 16: mod_base = OTHER; note = 2'-deoxy-2'-fluoroadenosine-3'-phosphate
  modified_base 17: mod_base = OTHER; note = 2'-O-methyladenosine-3'-phosphate
  modified_base 18: mod_base = OTHER; note = 2'-O-methyladenosine-3'-phosphate
  modified_base 19: mod_base = OTHER; note = 2'-O-methyladenosine-3'-phosphate
  modified_base 20: mod_base = OTHER; note = 2'-O-methyluridine-3'-phosphate
  modified_base 21: mod_base = OTHER; note = 2'-O-methylguanosine-3'-phosphorothioate
  modified_base 22: mod_base = OTHER; note = 2'-O-methyladenosine-3'-phosphorothioate
  modified_base 23: mod_base = OTHER; note = 2'-O-methylguanosine
tttagagtgaggattaaaatgag

SEQ ID NO: 1749 - RNA, 21 nt, synthetic construct
  source 1..21: mol_type = other RNA
  modified_base 1: mod_base = OTHER; note = 2'-O-methylcytidine-3'-phosphorothioate
  modified_base 2: mod_base = OTHER; note = 2'-O-methyladenosine-3'-phosphorothioate
  modified_base 3: mod_base = OTHER; note = 2'-O-methyluridine-3'-phosphate
  modified_base 4: mod_base = OTHER; note = 2'-O-methyluridine-3'-phosphate
  modified_base 5: mod_base = OTHER; note = 2'-O-methyluridine-3'-phosphate
  modified_base 6: mod_base = OTHER; note = 2'-O-hexyl-uridine-3'-phosphate
  modified_base 7: mod_base = OTHER; note = 2'-deoxy-2'-fluoroadenosine-3'-phosphate
  modified_base 8: mod_base = OTHER; note = 2'-O-methyladenosine-3'-phosphate
  modified_base 9: mod_base = OTHER; note = 2'-deoxy-2'-fluorouridine-3'-phosphate
  modified_base 10: mod_base = OTHER; note = 2'-deoxy-2'-fluorocytidine-3'-phosphate
  modified_base 11: mod_base = OTHER; note = 2'-deoxy-2'-fluorocytidine-3'-phosphate
  modified_base 12: mod_base = OTHER; note = 2'-O-methyluridine-3'-phosphate
  modified_base 13: mod_base = OTHER; note = 2'-O-methylcytidine-3'-phosphate
  modified_base 14: mod_base = OTHER; note = 2'-O-methyladenosine-3'-phosphate
  modified_base 15: mod_base = OTHER; note = 2'-O-methylcytidine-3'-phosphate
  modified_base 16: mod_base = OTHER; note = 2'-O-hexyl-uridine-3'-phosphate
  modified_base 17: mod_base = OTHER; note = 2'-O-methylcytidine-3'-phosphate
  modified_base 18: mod_base = OTHER; note = 2'-O-methyluridine-3'-phosphate
  modified_base 19: mod_base = OTHER; note = 2'-O-methyladenosine-3'-phosphorothioate
  modified_base 20: mod_base = OTHER; note = 2'-O-methyladenosine-3'-phosphorothioate
  modified_base 21: mod_base = OTHER; note = 2'-O-hexyl-adenosine
cattttaatcctcactctaaa

SEQ ID NO: 1750 - RNA, 23 nt, synthetic construct
  source 1..23: mol_type = other RNA
  modified_base 1: mod_base = OTHER; note = 2'-O-methyluridine-3'-phosphorothioate 5'-(E)-Vinylphosphonate
  modified_base 2: mod_base = OTHER; note = 2'-deoxy-2'-fluorouridine-3'-phosphorothioate
  modified_base 3: mod_base = OTHER; note = 2'-O-methyluridine-3'-phosphate
  modified_base 4: mod_base = OTHER; note = 2'-O-methyladenosine-3'-phosphate
  modified_base 5: mod_base = OTHER; note = 2'-O-methylguanosine-3'-phosphate
  modified_base 6: mod_base = OTHER; note = 2'-deoxy-2'-fluoroadenosine-3'-phosphate
  modified_base 7: mod_base = OTHER; note = 2'-O-methylguanosine-3'-phosphate
  modified_base 8: mod_base = OTHER; note = 2'-deoxy-2'-fluorouridine-3'-phosphate
  modified_base 9: mod_base = OTHER; note = 2'-deoxy-2'-fluoroguanosine-3'-phosphate
  modified_base 10: mod_base = OTHER; note = 2'-O-methyladenosine-3'-phosphate
  modified_base 11: mod_base = OTHER; note = 2'-O-methylguanosine-3'-phosphate
  modified_base 12: mod_base = OTHER; note = 2'-O-methylguanosine-3'-phosphate
  modified_base 13: mod_base = OTHER; note = 2'-O-methyladenosine-3'-phosphate
  modified_base 14: mod_base = OTHER; note = 2'-deoxy-2'-fluorouridine-3'-phosphate
  modified_base 15: mod_base = OTHER; note = 2'-O-methyluridine-3'-phosphate
  modified_base 16: mod_base = OTHER; note = 2'-deoxy-2'-fluoroadenosine-3'-phosphate
  modified_base 17: mod_base = OTHER; note = 2'-O-methyladenosine-3'-phosphate
  modified_base 18: mod_base = OTHER; note = 2'-O-methyladenosine-3'-phosphate
  modified_base 19: mod_base = OTHER; note = 2'-O-methyladenosine-3'-phosphate
  modified_base 20: mod_base = OTHER; note = 2'-O-methyluridine-3'-phosphate
  modified_base 21: mod_base = OTHER; note = 2'-O-methylguanosine-3'-phosphorothioate
  modified_base 22: mod_base = OTHER; note = 2'-O-methyladenosine-3'-phosphorothioate
  modified_base 23: mod_base = OTHER; note = 2'-O-methylguanosine
tttagagtgaggattaaaatgag

SEQ ID NO: 1751 - RNA, 21 nt, synthetic construct
  source 1..21: mol_type = other RNA
  modified_base 1: mod_base = OTHER; note = 2'-O-hexyl-cytidine-3'-phosphorothioate
  modified_base 2: mod_base = OTHER; note = 2'-O-methyladenosine-3'-phosphorothioate
  modified_base 3: mod_base = OTHER; note = 2'-O-methyluridine-3'-phosphate
  modified_base 4: mod_base = OTHER; note = 2'-O-methyluridine-3'-phosphate
  modified_base 5: mod_base = OTHER; note = 2'-O-methyluridine-3'-phosphate
  modified_base 6: mod_base = OTHER; note = 2'-O-hexyl-uridine-3'-phosphate
  modified_base 7: mod_base = OTHER; note = 2'-deoxy-2'-fluoroadenosine-3'-phosphate
  modified_base 8: mod_base = OTHER; note = 2'-O-methyladenosine-3'-phosphate
  modified_base 9: mod_base = OTHER; note = 2'-deoxy-2'-fluorouridine-3'-phosphate
  modified_base 10: mod_base = OTHER; note = 2'-deoxy-2'-fluorocytidine-3'-phosphate
  modified_base 11: mod_base = OTHER; note = 2'-deoxy-2'-fluorocytidine-3'-phosphate
  modified_base 12: mod_base = OTHER; note = 2'-O-methyluridine-3'-phosphate
  modified_base 13: mod_base = OTHER; note = 2'-O-methylcytidine-3'-phosphate
  modified_base 14: mod_base = OTHER; note = 2'-O-methyladenosine-3'-phosphate
  modified_base 15: mod_base = OTHER; note = 2'-O-methylcytidine-3'-phosphate
  modified_base 16: mod_base = OTHER; note = 2'-O-hexyl-uridine-3'-phosphate
  modified_base 17: mod_base = OTHER; note = 2'-O-hexyl-cytidine-3'-phosphate
  modified_base 18: mod_base = OTHER; note = 2'-O-methyluridine-3'-phosphate
  modified_base 19: mod_base = OTHER; note = 2'-O-methyladenosine-3'-phosphorothioate
  modified_base 20: mod_base = OTHER; note = 2'-O-methyladenosine-3'-phosphorothioate
  modified_base 21: mod_base = OTHER; note = 2'-O-hexyl-adenosine
cattttaatcctcactctaaa

SEQ ID NO: 1752 - RNA, 23 nt, synthetic construct
  source 1..23: mol_type = other RNA
  modified_base 1: mod_base = OTHER; note = 2'-O-methyluridine-3'-phosphorothioate 5'-(E)-Vinylphosphonate
  modified_base 2: mod_base = OTHER; note = 2'-deoxy-2'-fluorouridine-3'-phosphorothioate
  modified_base 3: mod_base = OTHER; note = 2'-O-methyluridine-3'-phosphate
  modified_base 4: mod_base = OTHER; note = 2'-O-methyladenosine-3'-phosphate
  modified_base 5: mod_base = OTHER; note = 2'-O-methylguanosine-3'-phosphate
  modified_base 6: mod_base = OTHER; note = 2'-deoxy-2'-fluoroadenosine-3'-phosphate
  modified_base 7: mod_base = OTHER; note = 2'-O-methylguanosine-3'-phosphate
  modified_base 8: mod_base = OTHER; note = 2'-deoxy-2'-fluorouridine-3'-phosphate
  modified_base 9: mod_base = OTHER; note = 2'-deoxy-2'-fluoroguanosine-3'-phosphate
  modified_base 10: mod_base = OTHER; note = 2'-O-methyladenosine-3'-phosphate
  modified_base 11: mod_base = OTHER; note = 2'-O-methylguanosine-3'-phosphate
  modified_base 12: mod_base = OTHER; note = 2'-O-methylguanosine-3'-phosphate
  modified_base 13: mod_base = OTHER; note = 2'-O-methyladenosine-3'-phosphate
  modified_base 14: mod_base = OTHER; note = 2'-deoxy-2'-fluorouridine-3'-phosphate
  modified_base 15: mod_base = OTHER; note = 2'-O-methyluridine-3'-phosphate
  modified_base 16: mod_base = OTHER; note = 2'-deoxy-2'-fluoroadenosine-3'-phosphate
  modified_base 17: mod_base = OTHER; note = 2'-O-methyladenosine-3'-phosphate
  modified_base 18: mod_base = OTHER; note = 2'-O-methyladenosine-3'-phosphate
  modified_base 19: mod_base = OTHER; note = 2'-O-methyladenosine-3'-phosphate
  modified_base 20: mod_base = OTHER; note = 2'-O-methyluridine-3'-phosphate
  modified_base 21: mod_base = OTHER; note = 2'-O-methylguanosine-3'-phosphorothioate
  modified_base 22: mod_base = OTHER; note = 2'-O-methyladenosine-3'-phosphorothioate
  modified_base 23: mod_base = OTHER; note = 2'-O-methylguanosine
tttagagtgaggattaaaatgag

SEQ ID NO: 1753 - RNA, 21 nt, synthetic construct
  source 1..21: mol_type = other RNA
  modified_base 1: mod_base = OTHER; note = 2'-O-methyladenosine-3'-phosphorothioate
  modified_base 2: mod_base = OTHER; note = 2'-O-methyluridine-3'-phosphorothioate
  modified_base 3: mod_base = OTHER; note = 2'-O-methylguanosine-3'-phosphate
  modified_base 4: mod_base = OTHER; note = 2'-O-methylguanosine-3'-phosphate
  modified_base 5: mod_base = OTHER; note = 2'-O-methylcytidine-3'-phosphate
  modified_base 6: mod_base = OTHER; note = 2'-O-docosanyl-adenosine-3'-phosphate
  modified_base 7: mod_base = OTHER; note = 2'-deoxy-2'-fluoroadenosine-3'-phosphate
  modified_base 8: mod_base = OTHER; note = 2'-O-methyladenosine-3'-phosphate
  modified_base 9: mod_base = OTHER; note = 2'-deoxy-2'-fluoroguanosine-3'-phosphate
  modified_base 10: mod_base = OTHER; note = 2'-deoxy-2'-fluoroadenosine-3'-phosphate
  modified_base 11: mod_base = OTHER; note = 2'-deoxy-2'-fluoroadenosine-3'-phosphate
  modified_base 12: mod_base = OTHER; note = 2'-O-methylcytidine-3'-phosphate
  modified_base 13: mod_base = OTHER; note = 2'-O-methyladenosine-3'-phosphate
  modified_base 14: mod_base = OTHER; note = 2'-O-methyladenosine-3'-phosphate
  modified_base 15: mod_base = OTHER; note = 2'-O-methyladenosine-3'-phosphate
  modified_base 16: mod_base = OTHER; note = 2'-O-methyluridine-3'-phosphate
  modified_base 17: mod_base = OTHER; note = 2'-O-methyladenosine-3'-phosphate
  modified_base 18: mod_base = OTHER; note = 2'-O-methyladenosine-3'-phosphate
  modified_base 19: mod_base = OTHER; note = 2'-O-methyluridine-3'-phosphorothioate
  modified_base 20: mod_base = OTHER; note = 2'-O-methyladenosine-3'-phosphorothioate
  modified_base 21: mod_base = OTHER; note = 2'-O-methyladenosine
atggcaaagaacaaataataa

SEQ ID NO: 1754 - RNA, 23 nt, synthetic construct
  source 1..23: mol_type = other RNA
  modified_base 1: mod_base = OTHER; note = 2'-O-methyluridine-3'-phosphorothioate 5'-(E)-Vinylphosphonate
  modified_base 2: mod_base = OTHER; note = 2'-deoxy-2'-fluorouridine-3'-phosphorothioate
  modified_base 3: mod_base = OTHER; note = 2'-O-methyladenosine-3'-phosphate
  modified_base 4: mod_base = OTHER; note = 2'-O-methyluridine-3'-phosphate
  modified_base 5: mod_base = OTHER; note = 2'-O-methyluridine-3'-phosphate
  modified_base 6: mod_base = OTHER; note = 2'-deoxy-2'-fluoroadenosine-3'-phosphate
  modified_base 7: mod_base = OTHER; note = 2'-O-methyluridine-3'-phosphate
  modified_base 8: mod_base = OTHER; note = 2'-deoxy-2'-fluorouridine-3'-phosphate
  modified_base 9: mod_base = OTHER; note = 2'-deoxy-2'-fluorouridine-3'-phosphate
  modified_base 10: mod_base = OTHER; note = 2'-O-methylguanosine-3'-phosphate
  modified_base 11: mod_base = OTHER; note = 2'-O-methyluridine-3'-phosphate
  modified_base 12: mod_base = OTHER; note = 2'-O-methyluridine-3'-phosphate
  modified_base 13: mod_base = OTHER; note = 2'-O-methylcytidine-3'-phosphate
  modified_base 14: mod_base = OTHER; note = 2'-deoxy-2'-fluorouridine-3'-phosphate
  modified_base 15: mod_base = OTHER; note = 2'-O-methyluridine-3'-phosphate
  modified_base 16: mod_base = OTHER; note = 2'-deoxy-2'-fluorouridine-3'-phosphate
  modified_base 17: mod_base = OTHER; note = 2'-O-methylguanosine-3'-phosphate
  modified_base 18: mod_base = OTHER; note = 2'-O-methylcytidine-3'-phosphate
  modified_base 19: mod_base = OTHER; note = 2'-O-methylcytidine-3'-phosphate
  modified_base 20: mod_base = OTHER; note = 2'-O-methyladenosine-3'-phosphate
  modified_base 21: mod_base = OTHER; note = 2'-O-methyluridine-3'-phosphorothioate
  modified_base 22: mod_base = OTHER; note = 2'-O-methyluridine-3'-phosphorothioate
  modified_base 23: mod_base = OTHER; note = 2'-O-methyladenosine
ttattatttgttctttgccatta

SEQ ID NO: 1755 - RNA, 21 nt, synthetic construct
  source 1..21: mol_type = other RNA
  modified_base 1: mod_base = OTHER; note = 2'-O-methyluridine-3'-phosphorothioate
  modified_base 2: mod_base = OTHER; note = 2'-O-methyluridine-3'-phosphorothioate
  modified_base 3: mod_base = OTHER; note = 2'-O-methylguanosine-3'-phosphate
  modified_base 4: mod_base = OTHER; note = 2'-O-methylguanosine-3'-phosphate
  modified_base 5: mod_base = OTHER; note = 2'-O-methylguanosine-3'-phosphate
  modified_base 6: mod_base = OTHER; note = 2'-O-docosanyl-cytidine-3'-phosphate
  modified_base 7: mod_base = OTHER; note = 2'-deoxy-2'-fluoroadenosine-3'-phosphate
  modified_base 8: mod_base = OTHER; note = 2'-O-methyladenosine-3'-phosphate
  modified_base 9: mod_base = OTHER; note = 2'-deoxy-2'-fluoroadenosine-3'-phosphate
  modified_base 10: mod_base = OTHER; note = 2'-deoxy-2'-fluoroguanosine-3'-phosphate
  modified_base 11: mod_base = OTHER; note = 2'-deoxy-2'-fluoroguanosine-3'-phosphate
  modified_base 12: mod_base = OTHER; note = 2'-O-methyluridine-3'-phosphate
  modified_base 13: mod_base = OTHER; note = 2'-O-methylguanosine-3'-phosphate
  modified_base 14: mod_base = OTHER; note = 2'-O-methylguanosine-3'-phosphate
  modified_base 15: mod_base = OTHER; note = 2'-O-methyladenosine-3'-phosphate
  modified_base 16: mod_base = OTHER; note = 2'-O-methyladenosine-3'-phosphate
  modified_base 17: mod_base = OTHER; note = 2'-O-methyladenosine-3'-phosphate
  modified_base 18: mod_base = OTHER; note = 2'-O-methyluridine-3'-phosphate
  modified_base 19: mod_base = OTHER; note = 2'-O-methylguanosine-3'-phosphorothioate
  modified_base 20: mod_base = OTHER; note = 2'-O-methyladenosine-3'-phosphorothioate
  modified_base 21: mod_base = OTHER; note = 2'-O-methyladenosine
ttgggcaaaggtggaaatgaa

SEQ ID NO: 1756 - RNA, 23 nt, synthetic construct
  source 1..23: mol_type = other RNA
  modified_base 1: mod_base = OTHER; note = 2'-O-methyluridine-3'-phosphorothioate 5'-(E)-Vinylphosphonate
  modified_base 2: mod_base = OTHER; note = 2'-deoxy-2'-fluorouridine-3'-phosphorothioate
  modified_base 3: mod_base = OTHER; note = 2'-O-methylcytidine-3'-phosphate
  modified_base 4: mod_base = OTHER; note = 2'-O-methyladenosine-3'-phosphate
  modified_base 5: mod_base = OTHER; note = 2'-O-methyluridine-3'-phosphate
  modified_base 6: mod_base = OTHER; note = 2'-deoxy-2'-fluorouridine-3'-phosphate
  modified_base 7: mod_base = OTHER; note = 2'-O-methyluridine-3'-phosphate
  modified_base 8: mod_base = OTHER; note = 2'-deoxy-2'-fluorocytidine-3'-phosphate
  modified_base 9: mod_base = OTHER; note = 2'-deoxy-2'-fluorocytidine-3'-phosphate
  modified_base 10: mod_base = OTHER; note = 2'-O-methyladenosine-3'-phosphate
  modified_base 11: mod_base = OTHER; note = 2'-O-methylcytidine-3'-phosphate
  modified_base 12: mod_base = OTHER; note = 2'-O-methylcytidine-3'-phosphate
  modified_base 13: mod_base = OTHER; note = 2'-O-methyluridine-3'-phosphate
  modified_base 14: mod_base = OTHER; note = 2'-deoxy-2'-fluorouridine-3'-phosphate
  modified_base 15: mod_base = OTHER; note = 2'-O-methyluridine-3'-phosphate
  modified_base 16: mod_base = OTHER; note = 2'-deoxy-2'-fluoroguanosine-3'-phosphate
  modified_base 17: mod_base = OTHER; note = 2'-O-methylcytidine-3'-phosphate
  modified_base 18: mod_base = OTHER; note = 2'-O-methylcytidine-3'-phosphate
  modified_base 19: mod_base = OTHER; note = 2'-O-methylcytidine-3'-phosphate
  modified_base 20: mod_base = OTHER; note = 2'-O-methyladenosine-3'-phosphate
  modified_base 21: mod_base = OTHER; note = 2'-O-methyladenosine-3'-phosphorothioate
  modified_base 22: mod_base = OTHER; note = 2'-O-methylguanosine-3'-phosphorothioate
  modified_base 23: mod_base = OTHER; note = 2'-O-methyluridine
ttcatttccacctttgcccaagt

SEQ ID NO: 1757 - RNA, 21 nt, synthetic construct
  source 1..21: mol_type = other RNA
  modified_base 1: mod_base = OTHER; note = 2'-O-methyladenosine-3'-phosphorothioate
  modified_base 2: mod_base = OTHER; note = 2'-O-methyladenosine-3'-phosphorothioate
  modified_base 3: mod_base = OTHER; note = 2'-O-methylcytidine-3'-phosphate
  modified_base 4: mod_base = OTHER; note = 2'-O-methylguanosine-3'-phosphate
  modified_base 5: mod_base = OTHER; note = 2'-O-methyladenosine-3'-phosphate
  modified_base 6: mod_base = OTHER; note = 2'-O-docosanyl-cytidine-3'-phosphate
  modified_base 7: mod_base = OTHER; note = 2'-deoxy-2'-fluorouridine-3'-phosphate
  modified_base 8: mod_base = OTHER; note = 2'-O-methylguanosine-3'-phosphate
  modified_base 9: mod_base = OTHER; note = 2'-deoxy-2'-fluoroguanosine-3'-phosphate
  modified_base 10: mod_base = OTHER; note = 2'-deoxy-2'-fluoroadenosine-3'-phosphate
  modified_base 11: mod_base = OTHER; note = 2'-deoxy-2'-fluoroguanosine-3'-phosphate
  modified_base 12: mod_base = OTHER; note = 2'-O-methyluridine-3'-phosphate
  modified_base 13: mod_base = OTHER; note = 2'-O-methyladenosine-3'-phosphate
  modified_base 14: mod_base = OTHER; note = 2'-O-methyluridine-3'-phosphate
  modified_base 15: mod_base = OTHER; note = 2'-O-methylguanosine-3'-phosphate
  modified_base 16: mod_base = OTHER; note = 2'-O-methyladenosine-3'-phosphate
  modified_base 17: mod_base = OTHER; note = 2'-O-methyluridine-3'-phosphate
  modified_base 18: mod_base = OTHER; note = 2'-O-methyluridine-3'-phosphate
  modified_base 19: mod_base = OTHER; note = 2'-O-methyladenosine-3'-phosphorothioate
  modified_base 20: mod_base = OTHER; note = 2'-O-methyladenosine-3'-phosphorothioate
  modified_base 21: mod_base = OTHER; note = 2'-O-methyladenosine
aacgactggagtatgattaaa

SEQ ID NO: 1758 - RNA, 23 nt, synthetic construct
  source 1..23: mol_type = other RNA
  modified_base 1: mod_base = OTHER; note = 2'-O-methyluridine-3'-phosphorothioate 5'-(E)-Vinylphosphonate
  modified_base 2: mod_base = OTHER; note = 2'-deoxy-2'-fluorouridine-3'-phosphorothioate
  modified_base 3: mod_base = OTHER; note = 2'-O-methyluridine-3'-phosphate
  modified_base 4: mod_base = OTHER; note = 2'-O-methyladenosine-3'-phosphate
  modified_base 5: mod_base = OTHER; note = 2'-O-methyladenosine-3'-phosphate
  modified_base 6: mod_base = OTHER; note = 2'-O-methyluridine-3'-phosphate
  modified_base 7: mod_base = OTHER; note = 2'-O-methylcytidine-3'-phosphate
  modified_base 8: mod_base = OTHER; note = 2'-O-methyladenosine-3'-phosphate
  modified_base 9: mod_base = OTHER; note = 2'-O-methyluridine-3'-phosphate
  modified_base 10: mod_base = OTHER; note = 2'-O-methyladenosine-3'-phosphate
  modified_base 11: mod_base = OTHER; note = 2'-O-methylcytidine-3'-phosphate
  modified_base 12: mod_base = OTHER; note = 2'-O-methyluridine-3'-phosphate
  modified_base 13: mod_base = OTHER; note = 2'-O-methylcytidine-3'-phosphate
  modified_base 14: mod_base = OTHER; note = 2'-deoxy-2'-fluorocytidine-3'-phosphate
  modified_base 15: mod_base = OTHER; note = 2'-O-methyladenosine-3'-phosphate
  modified_base 16: mod_base = OTHER; note = 2'-deoxy-2'-fluoroguanosine-3'-phosphate
  modified_base 17: mod_base = OTHER; note = 2'-O-methyluridine-3'-phosphate
  modified_base 18: mod_base = OTHER; note = 2'-O-methylcytidine-3'-phosphate
  modified_base 19: mod_base = OTHER; note = 2'-O-methylguanosine-3'-phosphate
  modified_base 20: mod_base = OTHER; note = 2'-O-methyluridine-3'-phosphate
  modified_base 21: mod_base = OTHER; note = 2'-O-methyluridine-3'-phosphorothioate
  modified_base 22: mod_base = OTHER; note = 2'-O-methyluridine-3'-phosphorothioate
  modified_base 23: mod_base = OTHER; note = 2'-O-methylcytidine
tttaatcatactccagtcgtttc

SEQ ID NO: 1759 - RNA, 21 nt, synthetic construct
  source 1..21: mol_type = other RNA
  modified_base 1: mod_base = OTHER; note = 2'-O-methylcytidine-3'-phosphorothioate
  modified_base 2: mod_base = OTHER; note = 2'-O-methylcytidine-3'-phosphorothioate
  modified_base 3: mod_base = OTHER; note = 2'-O-methylguanosine-3'-phosphate
  modified_base 4: mod_base = OTHER; note = 2'-O-methylcytidine-3'-phosphate
  modified_base 5: mod_base = OTHER; note = 2'-O-methyluridine-3'-phosphate
  modified_base 6: mod_base = OTHER; note = 2'-O-methylguanosine-3'-phosphate
  modified_base 7: mod_base = OTHER; note = 2'-deoxy-2'-fluorocytidine-3'-phosphate
  modified_base 8: mod_base = OTHER; note = 2'-O-methyluridine-3'-phosphate
  modified_base 9: mod_base = OTHER; note = 2'-deoxy-2'-fluoroadenosine-3'-phosphate
  modified_base 10: mod_base = OTHER; note = 2'-deoxy-2'-fluorouridine-3'-phosphate
  modified_base 11: mod_base = OTHER; note = 2'-deoxy-2'-fluorouridine-3'-phosphate
  modified_base 12: mod_base = OTHER; note = 2'-O-methyladenosine-3'-phosphate
  modified_base 13: mod_base = OTHER; note = 2'-O-methylguanosine-3'-phosphate
  modified_base 14: mod_base = OTHER; note = 2'-O-methyladenosine-3'-phosphate
  modified_base 15: mod_base = OTHER; note = 2'-O-methyladenosine-3'-phosphate
  modified_base 16: mod_base = OTHER; note = 2'-O-methyluridine-3'-phosphate
  modified_base 17: mod_base = OTHER; note = 2'-O-methylguanosine-3'-phosphate
  modified_base 18: mod_base = OTHER; note = 2'-O-methylcytidine-3'-phosphate
  modified_base 19: mod_base = OTHER; note = 2'-O-methyladenosine-3'-phosphorothioate
  modified_base 20: mod_base = OTHER; note = 2'-O-methyluridine-3'-phosphorothioate
  modified_base 21: mod_base = OTHER; note = 2'-O-methyladenosine
ccgctgctattagaatgcata

SEQ ID NO: 1760 - RNA, 23 nt, synthetic construct
  source 1..23: mol_type = other RNA
  modified_base 1: mod_base = OTHER; note = 2'-O-methyluridine-3'-phosphorothioate 5'-(E)-Vinylphosphonate
  modified_base 2: mod_base = OTHER; note = 2'-deoxy-2'-fluoroadenosine-3'-phosphorothioate
  modified_base 3: mod_base = OTHER; note = 2'-O-methyluridine-3'-phosphate
  modified_base 4: mod_base = OTHER; note = 2'-O-methylguanosine-3'-phosphate
  modified_base 5: mod_base = OTHER; note = 2'-O-methylcytidine-3'-phosphate
  modified_base 6: mod_base = OTHER; note = 2'-O-methyladenosine-3'-phosphate
  modified_base 7: mod_base = OTHER; note = 2'-O-methyluridine-3'-phosphate
  modified_base 8: mod_base = OTHER; note = 2'-O-methyluridine-3'-phosphate
  modified_base 9: mod_base = OTHER; note = 2'-O-methylcytidine-3'-phosphate
  modified_base 10: mod_base = OTHER; note = 2'-O-methyluridine-3'-phosphate
  modified_base 11: mod_base = OTHER; note = 2'-O-methyladenosine-3'-phosphate
  modified_base 12: mod_base = OTHER; note = 2'-O-methyladenosine-3'-phosphate
  modified_base 13: mod_base = OTHER; note = 2'-O-methyluridine-3'-phosphate
  modified_base 14: mod_base = OTHER; note = 2'-deoxy-2'-fluoroadenosine-3'-phosphate
  modified_base 15: mod_base = OTHER; note = 2'-O-methylguanosine-3'-phosphate
  modified_base 16: mod_base = OTHER; note = 2'-O-docosanyl-cytidine-3'-phosphate
  modified_base 17: mod_base = OTHER; note = 2'-O-methyladenosine-3'-phosphate
  modified_base 18: mod_base = OTHER; note = 2'-O-methylguanosine-3'-phosphate
  modified_base 19: mod_base = OTHER; note = 2'-O-methylcytidine-3'-phosphate
  modified_base 20: mod_base = OTHER; note = 2'-O-methylguanosine-3'-phosphate
  modified_base 21: mod_base = OTHER; note = 2'-O-methylguanosine-3'-phosphorothioate
  modified_base 22: mod_base = OTHER; note = 2'-O-methylguanosine-3'-phosphorothioate
  modified_base 23: mod_base = OTHER; note = 2'-O-methyladenosine
tatgcattctaatagcagcggga

SEQ ID NO: 1761 - RNA, 21 nt, synthetic construct
  source 1..21: mol_type = other RNA
  modified_base 1: mod_base = OTHER; note = 2'-O-methyluridine-3'-phosphorothioate
  modified_base 2: mod_base = OTHER; note = 2'-O-methyluridine-3'-phosphorothioate
  modified_base 3: mod_base = OTHER; note = 2'-O-methylguanosine-3'-phosphate
  modified_base 4: mod_base = OTHER; note = 2'-O-methyladenosine-3'-phosphate
  modified_base 5: mod_base = OTHER; note = 2'-O-methyladenosine-3'-phosphate
  modified_base 6: mod_base = OTHER; note = 2'-O-docosanyl-guanosine-3'-phosphate
  modified_base 7: mod_base = OTHER; note = 2'-deoxy-2'-fluorouridine-3'-phosphate
  modified_base 8: mod_base = OTHER; note = 2'-O-methylguanosine-3'-phosphate
  modified_base 9: mod_base = OTHER; note = 2'-deoxy-2'-fluorouridine-3'-phosphate
  modified_base 10: mod_base = OTHER; note = 2'-deoxy-2'-fluoroadenosine-3'-phosphate
  modified_base 11: mod_base = OTHER; note = 2'-deoxy-2'-fluoroguanosine-3'-phosphate
  modified_base 12: mod_base = OTHER; note = 2'-O-methyluridine-3'-phosphate
  modified_base 13: mod_base = OTHER; note = 2'-O-methyluridine-3'-phosphate
  modified_base 14: mod_base = OTHER; note = 2'-O-methyluridine-3'-phosphate
  modified_base 15: mod_base = OTHER; note = 2'-O-methyluridine-3'-phosphate
  modified_base 16: mod_base = OTHER; note = 2'-O-methyladenosine-3'-phosphate
  modified_base 17: mod_base = OTHER; note = 2'-O-methyluridine-3'-phosphate
  modified_base 18: mod_base = OTHER; note = 2'-O-methyladenosine-3'-phosphate
  modified_base 19: mod_base = OTHER; note = 2'-O-methylcytidine-3'-phosphorothioate
  modified_base 20: mod_base = OTHER; note = 2'-O-methyladenosine-3'-phosphorothioate
  modified_base 21: mod_base = OTHER; note = 2'-O-methyladenosine
ttgaagtgtagttttatacaa

SEQ ID NO: 1762 - RNA, 23 nt, synthetic construct
  source 1..23: mol_type = other RNA
  modified_base 1: mod_base = OTHER; note = 2'-O-methyluridine-3'-phosphorothioate 5'-(E)-Vinylphosphonate
  modified_base 2: mod_base = OTHER; note = 2'-deoxy-2'-fluorouridine-3'-phosphorothioate
  modified_base 3: mod_base = OTHER; note = 2'-O-methylguanosine-3'-phosphate
  modified_base 4: mod_base = OTHER; note = 2'-O-methyluridine-3'-phosphate
  modified_base 5: mod_base = OTHER; note = 2'-O-methyladenosine-3'-phosphate
  modified_base 6: mod_base = OTHER; note = 2'-deoxy-2'-fluorouridine-3'-phosphate
  modified_base 7: mod_base = OTHER; note = 2'-O-methyladenosine-3'-phosphate
  modified_base 8: mod_base = OTHER; note = 2'-deoxy-2'-fluoroadenosine-3'-phosphate
  modified_base 9: mod_base = OTHER; note = 2'-deoxy-2'-fluoroadenosine-3'-phosphate
  modified_base 10: mod_base = OTHER; note = 2'-O-methyladenosine-3'-phosphate
  modified_base 11: mod_base = OTHER; note = 2'-O-methylcytidine-3'-phosphate
  modified_base 12: mod_base = OTHER; note = 2'-O-methyluridine-3'-phosphate
  modified_base 13: mod_base = OTHER; note = 2'-O-methyladenosine-3'-phosphate
  modified_base 14: mod_base = OTHER; note = 2'-deoxy-2'-fluorocytidine-3'-phosphate
  modified_base 15: mod_base = OTHER; note = 2'-O-methyladenosine-3'-phosphate
  modified_base 16: mod_base = OTHER; note = 2'-deoxy-2'-fluorocytidine-3'-phosphate
  modified_base 17: mod_base = OTHER; note = 2'-O-methyluridine-3'-phosphate
  modified_base 18: mod_base = OTHER; note = 2'-O-methyluridine-3'-phosphate
  modified_base 19: mod_base = OTHER; note = 2'-O-methylcytidine-3'-phosphate
  modified_base 20: mod_base = OTHER; note = 2'-O-methyladenosine-3'-phosphate
  modified_base 21: mod_base = OTHER; note = 2'-O-methyladenosine-3'-phosphorothioate
  modified_base 22: mod_base = OTHER; note = 2'-O-methylguanosine-3'-phosphorothioate
  modified_base 23: mod_base = OTHER; note = 2'-O-methylcytidine
ttgtataaaactacacttcaagc

SEQ ID NO: 1763 - RNA, 21 nt, synthetic construct
  source 1..21: mol_type = other RNA
  modified_base 1: mod_base = OTHER; note = 2'-O-methylguanosine-3'-phosphorothioate
  modified_base 2: mod_base = OTHER; note = 2'-O-methyluridine-3'-phosphorothioate
  modified_base 3: mod_base = OTHER; note = 2'-O-methylguanosine-3'-phosphate
  modified_base 4: mod_base = OTHER; note = 2'-O-methyladenosine-3'-phosphate
  modified_base 5: mod_base = OTHER; note = 2'-O-methylcytidine-3'-phosphate
  modified_base 6: mod_base = OTHER; note = 2'-O-docosanyl-uridine-3'-phosphate
  modified_base 7: mod_base = OTHER; note = 2'-deoxy-2'-fluoroguanosine-3'-phosphate
  modified_base 8: mod_base = OTHER; note = 2'-O-methylguanosine-3'-phosphate
  modified_base 9: mod_base = OTHER; note = 2'-deoxy-2'-fluorouridine-3'-phosphate
  modified_base 10: mod_base = OTHER; note = 2'-deoxy-2'-fluorouridine-3'-phosphate
  modified_base 11: mod_base = OTHER; note = 2'-deoxy-2'-fluorouridine-3'-phosphate
  modified_base 12: mod_base = OTHER; note = 2'-O-methyluridine-3'-phosphate
  modified_base 13: mod_base = OTHER; note = 2'-O-methylguanosine-3'-phosphate
  modified_base 14: mod_base = OTHER; note = 2'-O-methyluridine-3'-phosphate
  modified_base 15: mod_base = OTHER; note = 2'-O-methyluridine-3'-phosphate
  modified_base 16: mod_base = OTHER; note = 2'-O-methyluridine-3'-phosphate
  modified_base 17: mod_base = OTHER; note = 2'-O-methylcytidine-3'-phosphate
  modified_base 18: mod_base = OTHER; note = 2'-O-methyluridine-3'-phosphate
  modified_base 19: mod_base = OTHER; note = 2'-O-methyladenosine-3'-phosphorothioate
  modified_base 20: mod_base = OTHER; note = 2'-O-methyluridine-3'-phosphorothioate
  modified_base 21: mod_base = OTHER; note = 2'-O-methyladenosine
gtgactggttttgtttctata

SEQ ID NO: 1764 - RNA, 23 nt, synthetic construct
  source 1..23: mol_type = other RNA
  modified_base 1: mod_base = OTHER; note = 2'-O-methyluridine-3'-phosphorothioate 5'-(E)-Vinylphosphonate
  modified_base 2: mod_base = OTHER; note = 2'-deoxy-2'-fluoroadenosine-3'-phosphorothioate
  modified_base 3: mod_base = OTHER; note = 2'-O-methyluridine-3'-phosphate
  modified_base 4: mod_base = OTHER; note = 2'-O-methyladenosine-3'-phosphate
  modified_base 5: mod_base = OTHER; note = 2'-O-methylguanosine-3'-phosphate
  modified_base 6: mod_base = OTHER; note = 2'-deoxy-2'-fluoroadenosine-3'-phosphate
  modified_base 7: mod_base = OTHER; note = 2'-O-methyladenosine-3'-phosphate
  modified_base 8: mod_base = OTHER; note = 2'-deoxy-2'-fluoroadenosine-3'-phosphate
  modified_base 9: mod_base = OTHER; note = 2'-deoxy-2'-fluorocytidine-3'-phosphate
  modified_base 10: mod_base = OTHER; note = 2'-O-methyladenosine-3'-phosphate
  modified_base 11: mod_base = OTHER; note = 2'-O-methyladenosine-3'-phosphate
  modified_base 12: mod_base = OTHER; note = 2'-O-methyladenosine-3'-phosphate
  modified_base 13: mod_base = OTHER; note = 2'-O-methyladenosine-3'-phosphate
  modified_base 14: mod_base = OTHER; note = 2'-deoxy-2'-fluorocytidine-3'-phosphate
  modified_base 15: mod_base = OTHER; note = 2'-O-methylcytidine-3'-phosphate
  modified_base 16: mod_base = OTHER; note = 2'-deoxy-2'-fluoroadenosine-3'-phosphate
  modified_base 17: mod_base = OTHER; note = 2'-O-methylguanosine-3'-phosphate
  modified_base 18: mod_base = OTHER; note = 2'-O-methyluridine-3'-phosphate
  modified_base 19: mod_base = OTHER; note = 2'-O-methylcytidine-3'-phosphate
  modified_base 20: mod_base = OTHER; note = 2'-O-methyladenosine-3'-phosphate
  modified_base 21: mod_base = OTHER; note = 2'-O-methylcytidine-3'-phosphorothioate
  modified_base 22: mod_base = OTHER; note = 2'-O-methylcytidine-3'-phosphorothioate
  modified_base 23: mod_base = OTHER; note = 2'-O-methyladenosine
tatagaaacaaaaccagtcacca

SEQ ID NO: 1765 - RNA, 21 nt, synthetic construct
  source 1..21: mol_type = other RNA
  modified_base 1: mod_base = OTHER; note = 2'-O-methyladenosine-3'-phosphorothioate
  modified_base 2: mod_base = OTHER; note = 2'-O-methyluridine-3'-phosphorothioate
  modified_base 3: mod_base = OTHER; note = 2'-O-methylguanosine-3'-phosphate
  modified_base 4: mod_base = OTHER; note = 2'-O-methylguanosine-3'-phosphate
  modified_base 5: mod_base = OTHER; note = 2'-O-methylcytidine-3'-phosphate
  modified_base 6: mod_base = OTHER; note = 2'-O-docosanyl-adenosine-3'-phosphate
  modified_base 7: mod_base = OTHER; note = 2'-deoxy-2'-fluoroadenosine-3'-phosphate
  modified_base 8: mod_base = OTHER; note = 2'-O-methyladenosine-3'-phosphate
  modified_base 9: mod_base = OTHER; note = 2'-deoxy-2'-fluoroguanosine-3'-phosphate
  modified_base 10: mod_base = OTHER; note = 2'-deoxy-2'-fluoroadenosine-3'-phosphate
  modified_base 11: mod_base = OTHER; note = 2'-deoxy-2'-fluoroadenosine-3'-phosphate
  modified_base 12: mod_base = OTHER; note = 2'-O-methylcytidine-3'-phosphate
  modified_base 13: mod_base = OTHER; note = 2'-O-methyladenosine-3'-phosphate
  modified_base 14: mod_base = OTHER; note = 2'-O-methyladenosine-3'-phosphate
  modified_base 15: mod_base = OTHER; note = 2'-O-methyladenosine-3'-phosphate
  modified_base 16: mod_base = OTHER; note = 2'-O-methyluridine-3'-phosphate
  modified_base 17: mod_base = OTHER; note = 2'-O-methyladenosine-3'-phosphate
  modified_base 18: mod_base = OTHER; note = 2'-O-methyladenosine-3'-phosphate
  modified_base 19: mod_base = OTHER; note = 2'-O-methyluridine-3'-phosphorothioate
  modified_base 20: mod_base = OTHER; note = 2'-O-methyladenosine-3'-phosphorothioate
  modified_base 21: mod_base = OTHER; note = 2'-O-methyladenosine
atggcaaagaacaaataataa

SEQ ID NO: 1766 - RNA, 23 nt, synthetic construct
  source 1..23: mol_type = other RNA
  modified_base 1: mod_base = OTHER; note = 2'-O-methyluridine-3'-phosphorothioate 5'-(E)-Vinylphosphonate
  modified_base 2: mod_base = OTHER; note = 2'-deoxy-2'-fluorouridine-3'-phosphorothioate
  modified_base 3: mod_base = OTHER; note = 2'-O-methyladenosine-3'-phosphate
  modified_base 4: mod_base = OTHER; note = 2'-O-methyluridine-3'-phosphate
  modified_base 5: mod_base = OTHER; note = 2'-O-methyluridine-3'-phosphate
  modified_base 6: mod_base = OTHER; note = 2'-deoxy-2'-fluoroadenosine-3'-phosphate
  modified_base 7: mod_base = OTHER; note = 2'-O-methyluridine-3'-phosphate
  modified_base 8: mod_base = OTHER; note = 2'-deoxy-2'-fluorouridine-3'-phosphate
  modified_base 9: mod_base = OTHER; note = 2'-deoxy-2'-fluorouridine-3'-phosphate
  modified_base 10: mod_base = OTHER; note = 2'-O-methylguanosine-3'-phosphate
  modified_base 11: mod_base = OTHER; note = 2'-O-methyluridine-3'-phosphate
  modified_base 12: mod_base = OTHER; note = 2'-O-methyluridine-3'-phosphate
  modified_base 13: mod_base = OTHER; note = 2'-O-methylcytidine-3'-phosphate
  modified_base 14: mod_base = OTHER; note = 2'-deoxy-2'-fluorouridine-3'-phosphate
  modified_base 15: mod_base = OTHER; note = 2'-O-methyluridine-3'-phosphate
  modified_base 16: mod_base = OTHER; note = 2'-deoxy-2'-fluorouridine-3'-phosphate
  modified_base 17: mod_base = OTHER; note = 2'-O-methylguanosine-3'-phosphate
  modified_base 18: mod_base = OTHER; note = 2'-O-methylcytidine-3'-phosphate
  modified_base 19: mod_base = OTHER; note = 2'-O-methylcytidine-3'-phosphate
  modified_base 20: mod_base = OTHER; note = 2'-O-methyladenosine-3'-phosphate
  modified_base 21: mod_base = OTHER; note = 2'-O-methyluridine-3'-phosphorothioate
  modified_base 22: mod_base = OTHER; note = 2'-O-methyluridine-3'-phosphorothioate
  modified_base 23: mod_base = OTHER; note = 2'-O-methyladenosine
ttattatttgttctttgccatta

SEQ ID NO: 1767 - RNA, 21 nt, synthetic construct
  source 1..21: mol_type = other RNA
  modified_base 1: mod_base = OTHER; note = 2'-O-methyladenosine-3'-phosphorothioate
  modified_base 2: mod_base = OTHER; note = 2'-O-methyluridine-3'-phosphorothioate
  modified_base 3: mod_base = OTHER; note = 2'-O-methylguanosine-3'-phosphate
  modified_base 4: mod_base = OTHER; note = 2'-O-methylguanosine-3'-phosphate
  modified_base 5: mod_base = OTHER; note = 2'-O-methylcytidine-3'-phosphate
  modified_base 6: mod_base = OTHER; note = 2'-O-docosanyl-adenosine-3'-phosphate
  modified_base 7: mod_base = OTHER; note = 2'-deoxy-2'-fluoroadenosine-3'-phosphate
  modified_base 8: mod_base = OTHER; note = 2'-O-methyladenosine-3'-phosphate
  modified_base 9: mod_base = OTHER; note = 2'-deoxy-2'-fluoroguanosine-3'-phosphate
  modified_base 10: mod_base = OTHER; note = 2'-deoxy-2'-fluoroadenosine-3'-phosphate
  modified_base 11: mod_base = OTHER; note = 2'-deoxy-2'-fluoroadenosine-3'-phosphate
  modified_base 12: mod_base = OTHER; note = 2'-O-methylcytidine-3'-phosphate
  modified_base 13: mod_base = OTHER; note = 2'-O-methyladenosine-3'-phosphate
  modified_base 14: mod_base = OTHER; note = 2'-O-methyladenosine-3'-phosphate
  modified_base 15: mod_base = OTHER; note = 2'-O-methyladenosine-3'-phosphate
  modified_base 16: mod_base = OTHER; note = 2'-O-methyluridine-3'-phosphate
  modified_base 17: mod_base = OTHER; note = 2'-O-methyladenosine-3'-phosphate
  modified_base 18: mod_base = OTHER; note = 2'-O-methyladenosine-3'-phosphate
  modified_base 19: mod_base = OTHER; note = 2'-O-methyluridine-3'-phosphorothioate
  modified_base 20: mod_base = OTHER; note = 2'-O-methyladenosine-3'-phosphorothioate
  modified_base 21: mod_base = OTHER; note = 2'-O-methyladenosine
atggcaaagaacaaataataa

SEQ ID NO: 1768 - RNA, 23 nt, synthetic construct
  source 1..23: mol_type = other RNA
  modified_base 1: mod_base = OTHER; note = 2'-O-methyluridine-3'-phosphorothioate
  modified_base 2: mod_base = OTHER; note = 2'-deoxy-2'-fluorouridine-3'-phosphorothioate
  modified_base 3: mod_base = OTHER; note = 2'-O-methyladenosine-3'-phosphate
  modified_base 4: mod_base = OTHER; note = 2'-O-methyluridine-3'-phosphate
  modified_base 5: mod_base = OTHER; note = 2'-O-methyluridine-3'-phosphate
  modified_base 6: mod_base = OTHER; note = 2'-deoxy-2'-fluoroadenosine-3'-phosphate
  modified_base 7: mod_base = OTHER; note = 2'-O-methyluridine-3'-phosphate
  modified_base 8: mod_base = OTHER; note = 2'-deoxy-2'-fluorouridine-3'-phosphate
  modified_base 9: mod_base = OTHER; note = 2'-deoxy-2'-fluorouridine-3'-phosphate
  modified_base 10: mod_base = OTHER; note = 2'-O-methylguanosine-3'-phosphate
  modified_base 11: mod_base = OTHER; note = 2'-O-methyluridine-3'-phosphate
  modified_base 12: mod_base = OTHER; note = 2'-O-methyluridine-3'-phosphate
  modified_base 13: mod_base = OTHER; note = 2'-O-methylcytidine-3'-phosphate
  modified_base 14: mod_base = OTHER; note = 2'-deoxy-2'-fluorouridine-3'-phosphate
  modified_base 15: mod_base = OTHER; note = 2'-O-methyluridine-3'-phosphate
  modified_base 16: mod_base = OTHER; note = 2'-deoxy-2'-fluorouridine-3'-phosphate
  modified_base 17: mod_base = OTHER; note = 2'-O-methylguanosine-3'-phosphate
  modified_base 18: mod_base = OTHER; note = 2'-O-methylcytidine-3'-phosphate
  modified_base 19: mod_base = OTHER; note = 2'-O-methylcytidine-3'-phosphate
  modified_base 20: mod_base = OTHER; note = 2'-O-methyladenosine-3'-phosphate
  modified_base 21: mod_base = OTHER; note = 2'-O-methyluridine-3'-phosphorothioate
  modified_base 22: mod_base = OTHER; note = 2'-O-methyluridine-3'-phosphorothioate
  modified_base 23: mod_base = OTHER; note = 2'-O-methyladenosine
ttattatttgttctttgccatta

SEQ ID NO: 1769 - RNA, 21 nt, synthetic construct
  source 1..21: mol_type = other RNA
  modified_base 1: mod_base = OTHER; note = 2'-O-methyladenosine-3'-phosphorothioate
  modified_base 2: mod_base = OTHER; note = 2'-O-methyluridine-3'-phosphorothioate
  modified_base 3: mod_base = OTHER; note = 2'-O-methylguanosine-3'-phosphate
  modified_base 4: mod_base = OTHER; note = 2'-O-methylguanosine-3'-phosphate
  modified_base 5: mod_base = OTHER; note = 2'-O-methylcytidine-3'-phosphate
  modified_base 6: mod_base = OTHER; note = 2'-O-docosanyl-adenosine-3'-phosphate
  modified_base 7: mod_base = OTHER; note = 2'-deoxy-2'-fluoroadenosine-3'-phosphate
  modified_base 8: mod_base = OTHER; note = 2'-O-methyladenosine-3'-phosphate
  modified_base 9: mod_base = OTHER; note = 2'-deoxy-2'-fluoroguanosine-3'-phosphate
  modified_base 10: mod_base = OTHER; note = 2'-deoxy-2'-fluoroadenosine-3'-phosphate
  modified_base 11: mod_base = OTHER; note = 2'-deoxy-2'-fluoroadenosine-3'-phosphate
  modified_base 12: mod_base = OTHER; note = 2'-O-methylcytidine-3'-phosphate
  modified_base 13: mod_base = OTHER; note = 2'-O-methyladenosine-3'-phosphate
  modified_base 14: mod_base = OTHER; note = 2'-O-methyladenosine-3'-phosphate
  modified_base 15: mod_base = OTHER; note = 2'-O-methyladenosine-3'-phosphate
  modified_base 16: mod_base = OTHER; note = 2'-O-methyluridine-3'-phosphate
  modified_base 17: mod_base = OTHER; note = 2'-O-methyladenosine-3'-phosphate
  modified_base 18: mod_base = OTHER; note = 2'-O-methyladenosine-3'-phosphate
  modified_base 19: mod_base = OTHER; note = 2'-O-methyluridine-3'-phosphorothioate
  modified_base 20: mod_base = OTHER; note = 2'-O-methyladenosine-3'-phosphorothioate
  modified_base 21: mod_base = OTHER; note = 2'-O-methyladenosine
atggcaaagaacaaataataa

SEQ ID NO: 1770 - RNA, 23 nt, synthetic construct
  source 1..23: mol_type = other RNA
  modified_base 1: mod_base = OTHER; note = 2'-O-methyluridine-3'-phosphorothioate 5'-[((4R,5S)-3,3,5-trimethyl-1,2-dithiolan-4-ol)-phosphorot hiodiester]
  modified_base 2: mod_base = OTHER; note = 2'-deoxy-2'-fluorouridine-3'-phosphorothioate
  modified_base 3: mod_base = OTHER; note = 2'-O-methyladenosine-3'-phosphate
  modified_base 4: mod_base = OTHER; note = 2'-O-methyluridine-3'-phosphate
  modified_base 5: mod_base = OTHER; note = 2'-O-methyluridine-3'-phosphate
  modified_base 6: mod_base = OTHER; note = 2'-deoxy-2'-fluoroadenosine-3'-phosphate
  modified_base 7: mod_base = OTHER; note = 2'-O-methyluridine-3'-phosphate
  modified_base 8: mod_base = OTHER; note = 2'-deoxy-2'-fluorouridine-3'-phosphate
  modified_base 9: mod_base = OTHER; note = 2'-deoxy-2'-fluorouridine-3'-phosphate
  modified_base 10: mod_base = OTHER; note = 2'-O-methylguanosine-3'-phosphate
  modified_base 11: mod_base = OTHER; note = 2'-O-methyluridine-3'-phosphate
  modified_base 12: mod_base = OTHER; note = 2'-O-methyluridine-3'-phosphate
  modified_base 13: mod_base = OTHER; note = 2'-O-methylcytidine-3'-phosphate
  modified_base 14: mod_base = OTHER; note = 2'-deoxy-2'-fluorouridine-3'-phosphate
  modified_base 15: mod_base = OTHER; note = 2'-O-methyluridine-3'-phosphate
  modified_base 16: mod_base = OTHER; note = 2'-deoxy-2'-fluorouridine-3'-phosphate
  modified_base 17: mod_base = OTHER; note = 2'-O-methylguanosine-3'-phosphate
  modified_base 18: mod_base = OTHER; note = 2'-O-methylcytidine-3'-phosphate
  modified_base 19: mod_base = OTHER; note = 2'-O-methylcytidine-3'-phosphate
  modified_base 20: mod_base = OTHER; note = 2'-O-methyladenosine-3'-phosphate
  modified_base 21: mod_base = OTHER; note = 2'-O-methyluridine-3'-phosphorothioate
  modified_base 22: mod_base = OTHER; note = 2'-O-methyluridine-3'-phosphorothioate
  modified_base 23: mod_base = OTHER; note = 2'-O-methyladenosine
ttattatttgttctttgccatta

SEQ ID NO: 1771 - RNA, 21 nt, synthetic construct
  source 1..21: mol_type = other RNA
  modified_base 1: mod_base = OTHER; note = 2'-O-methyladenosine-3'-phosphorothioate
  modified_base 2: mod_base = OTHER; note = 2'-O-methyluridine-3'-phosphorothioate
  modified_base 3: mod_base = OTHER; note = 2'-O-methylguanosine-3'-phosphate
  modified_base 4: mod_base = OTHER; note = 2'-O-methylguanosine-3'-phosphate
  modified_base 5: mod_base = OTHER; note = 2'-O-methylcytidine-3'-phosphate
  modified_base 6: mod_base = OTHER; note = 2'-O-docosanyl-adenosine-3'-phosphate
  modified_base 7: mod_base = OTHER; note = 2'-deoxy-2'-fluoroadenosine-3'-phosphate
  modified_base 8: mod_base = OTHER; note = 2'-O-methyladenosine-3'-phosphate
  modified_base 9: mod_base = OTHER; note = 2'-deoxy-2'-fluoroguanosine-3'-phosphate
  modified_base 10: mod_base = OTHER; note = 2'-deoxy-2'-fluoroadenosine-3'-phosphate
  modified_base 11: mod_base = OTHER; note = 2'-deoxy-2'-fluoroadenosine-3'-phosphate
  modified_base 12: mod_base = OTHER; note = 2'-O-methylcytidine-3'-phosphate
  modified_base 13: mod_base = OTHER; note = 2'-O-methyladenosine-3'-phosphate
  modified_base 14: mod_base = OTHER; note = 2'-O-methyladenosine-3'-phosphate
  modified_base 15: mod_base = OTHER; note = 2'-O-methyladenosine-3'-phosphate
  modified_base 16: mod_base = OTHER; note = 2'-O-methyluridine-3'-phosphate
  modified_base 17: mod_base = OTHER; note = 2'-O-methyladenosine-3'-phosphate
  modified_base 18: mod_base = OTHER; note = 2'-O-methyladenosine-3'-phosphate
  modified_base 19: mod_base = OTHER; note = 2'-O-methyluridine-3'-phosphorothioate
  modified_base 20: mod_base = OTHER; note = 2'-O-methyladenosine-3'-phosphorothioate
  modified_base 21: mod_base = OTHER; note = 2'-O-methyladenosine
atggcaaagaacaaataataa

SEQ ID NO: 1772 - RNA, 23 nt, synthetic construct
  source 1..23: mol_type = other RNA
  modified_base 1: mod_base = OTHER; note = 2'-O-methyluridine-3'-phosphorothioate 5'-[((4R,5R)-3,3,5-trimethyl-1,2-dithiolan-4-ol)-phosphorot hiodiester]
  modified_base 2: mod_base = OTHER; note = 2'-deoxy-2'-fluorouridine-3'-phosphorothioate
  modified_base 3: mod_base = OTHER; note = 2'-O-methyladenosine-3'-phosphate
  modified_base 4: mod_base = OTHER; note = 2'-O-methyluridine-3'-phosphate
  modified_base 5: mod_base = OTHER; note = 2'-O-methyluridine-3'-phosphate
  modified_base 6: mod_base = OTHER; note = 2'-deoxy-2'-fluoroadenosine-3'-phosphate
  modified_base 7: mod_base = OTHER; note = 2'-O-methyluridine-3'-phosphate
  modified_base 8: mod_base = OTHER; note = 2'-deoxy-2'-fluorouridine-3'-phosphate
  modified_base 9: mod_base = OTHER; note = 2'-deoxy-2'-fluorouridine-3'-phosphate
  modified_base 10: mod_base = OTHER; note = 2'-O-methylguanosine-3'-phosphate
  modified_base 11: mod_base = OTHER; note = 2'-O-methyluridine-3'-phosphate
  modified_base 12: mod_base = OTHER; note = 2'-O-methyluridine-3'-phosphate
  modified_base 13: mod_base = OTHER; note = 2'-O-methylcytidine-3'-phosphate
  modified_base 14: mod_base = OTHER; note = 2'-deoxy-2'-fluorouridine-3'-phosphate
  modified_base 15: mod_base = OTHER; note = 2'-O-methyluridine-3'-phosphate
  modified_base 16: mod_base = OTHER; note = 2'-deoxy-2'-fluorouridine-3'-phosphate
  modified_base 17: mod_base = OTHER; note = 2'-O-methylguanosine-3'-phosphate
  modified_base 18: mod_base = OTHER; note = 2'-O-methylcytidine-3'-phosphate
  modified_base 19: mod_base = OTHER; note = 2'-O-methylcytidine-3'-phosphate
  modified_base 20: mod_base = OTHER; note = 2'-O-methyladenosine-3'-phosphate
  modified_base 21: mod_base = OTHER; note = 2'-O-methyluridine-3'-phosphorothioate
  modified_base 22: mod_base = OTHER; note = 2'-O-methyluridine-3'-phosphorothioate
  modified_base 23: mod_base = OTHER; note = 2'-O-methyladenosine-3'-phosphate
ttattatttgttctttgccatta

SEQ ID NO: 1773 - RNA, 21 nt, synthetic construct
  source 1..21: mol_type = other RNA
  modified_base 1: mod_base = OTHER; note = 2'-O-methyladenosine-3'-phosphorothioate
  modified_base 2: mod_base = OTHER; note = 2'-O-methyluridine-3'-phosphorothioate
  modified_base 3: mod_base = OTHER; note = 2'-O-methylguanosine-3'-phosphate
  modified_base 4: mod_base = OTHER; note = 2'-O-methylguanosine-3'-phosphate
  modified_base 5: mod_base = OTHER; note = 2'-O-methylcytidine-3'-phosphate
  modified_base 6: mod_base = OTHER; note = 2'-O-methyladenosine-3'-phosphate
  modified_base 7: mod_base = OTHER; note = 2'-deoxy-2'-fluoroadenosine-3'-phosphate
  modified_base 8: mod_base = OTHER; note = 2'-O-methyladenosine-3'-phosphate
  modified_base 9: mod_base = OTHER; note = 2'-deoxy-2'-fluoroguanosine-3'-phosphate
  modified_base 10: mod_base = OTHER; note = 2'-deoxy-2'-fluoroadenosine-3'-phosphate
  modified_base 11: mod_base = OTHER; note = 2'-deoxy-2'-fluoroadenosine-3'-phosphate
  modified_base 12: mod_base = OTHER; note = 2'-O-methylcytidine-3'-phosphate
  modified_base 13: mod_base = OTHER; note = 2'-O-methyladenosine-3'-phosphate
  modified_base 14: mod_base = OTHER; note = 2'-O-methyladenosine-3'-phosphate
  modified_base 15: mod_base = OTHER; note = 2'-O-methyladenosine-3'-phosphate
  modified_base 16: mod_base = OTHER; note = 2'-O-methyluridine-3'-phosphate
  modified_base 17: mod_base = OTHER; note = 2'-O-methyladenosine-3'-phosphate
  modified_base 18: mod_base = OTHER; note = 2'-O-methyladenosine-3'-phosphate
  modified_base 19: mod_base = OTHER; note = 2'-O-methyluridine-3'-phosphate
  modified_base 20: mod_base = OTHER; note = 2'-O-methyladenosine-3'-phosphate
  modified_base 21: mod_base = OTHER; note = 2'-O-methyladenosine-3'-phosphate (N-(1-oxo-6-((3beta-cholest-5-en-3-yl)oxcarboxamido)hexyl)- 4-hydroxypyrrolidin-2-yl)methyl ester
atggcaaagaacaaataataa

SEQ ID NO: 1774 - RNA, 23 nt, synthetic construct
  source 1..23: mol_type = other RNA
  modified_base 1: mod_base = OTHER; note = 2'-O-methyluridine-3'-phosphorothioate 5'-(E)-Vinylphosphonate
  modified_base 2: mod_base = OTHER; note = 2'-deoxy-2'-fluorouridine-3'-phosphorothioate
  modified_base 3: mod_base = OTHER; note = 2'-O-methyladenosine-3'-phosphate
  modified_base 4: mod_base = OTHER; note = 2'-O-methyluridine-3'-phosphate
  modified_base 5: mod_base = OTHER; note = 2'-O-methyluridine-3'-phosphate
  modified_base 6: mod_base = OTHER; note = 2'-deoxy-2'-fluoroadenosine-3'-phosphate
  modified_base 7: mod_base = OTHER; note = 2'-O-methyluridine-3'-phosphate
  modified_base 8: mod_base = OTHER; note = 2'-deoxy-2'-fluorouridine-3'-phosphate
  modified_base 9: mod_base = OTHER; note = 2'-deoxy-2'-fluorouridine-3'-phosphate
  modified_base 10: mod_base = OTHER; note = 2'-O-methylguanosine-3'-phosphate
  modified_base 11: mod_base = OTHER; note = 2'-O-methyluridine-3'-phosphate
  modified_base 12: mod_base = OTHER; note = 2'-O-methyluridine-3'-phosphate
  modified_base 13: mod_base = OTHER; note = 2'-O-methylcytidine-3'-phosphate
  modified_base 14: mod_base = OTHER; note = 2'-deoxy-2'-fluorouridine-3'-phosphate
  modified_base 15: mod_base = OTHER; note = 2'-O-methyluridine-3'-phosphate
  modified_base 16: mod_base = OTHER; note = 2'-deoxy-2'-fluorouridine-3'-phosphate
  modified_base 17: mod_base = OTHER; note = 2'-O-methylguanosine-3'-phosphate
  modified_base 18: mod_base = OTHER; note = 2'-O-methylcytidine-3'-phosphate
  modified_base 19: mod_base = OTHER; note = 2'-O-methylcytidine-3'-phosphate
  modified_base 20: mod_base = OTHER; note = 2'-O-methyladenosine-3'-phosphate
  modified_base 21: mod_base = OTHER; note = 2'-O-methyluridine-3'-phosphorothioate
  modified_base 22: mod_base = OTHER; note = 2'-O-methyluridine-3'-phosphorothioate
  modified_base 23: mod_base = OTHER; note = 2'-O-methyladenosine
ttattatttgttctttgccatta

SEQ ID NO: 1775 - RNA, 21 nt, synthetic construct
  source 1..21: mol_type = other RNA
  modified_base 1: mod_base = OTHER; note = 2'-O-methylcytidine-3'-phosphorothioate
  modified_base 2: mod_base = OTHER; note = 2'-O-methyladenosine-3'-phosphorothioate
  modified_base 3: mod_base = OTHER; note = 2'-O-methyluridine-3'-phosphate
  modified_base 4: mod_base = OTHER; note = 2'-O-methyluridine-3'-phosphate
  modified_base 5: mod_base = OTHER; note = 2'-O-methyluridine-3'-phosphate
  modified_base 6: mod_base = OTHER; note = 2'-O-docosanyl-uridine-3'-phosphate
  modified_base 7: mod_base = OTHER; note = 2'-deoxy-2'-fluoroadenosine-3'-phosphate
  modified_base 8: mod_base = OTHER; note = 2'-O-methyladenosine-3'-phosphate
  modified_base 9: mod_base = OTHER; note = 2'-deoxy-2'-fluorouridine-3'-phosphate
  modified_base 10: mod_base = OTHER; note = 2'-deoxy-2'-fluorocytidine-3'-phosphate
  modified_base 11: mod_base = OTHER; note = 2'-deoxy-2'-fluorocytidine-3'-phosphate
  modified_base 12: mod_base = OTHER; note = 2'-O-methyluridine-3'-phosphate
  modified_base 13: mod_base = OTHER; note = 2'-O-methylcytidine-3'-phosphate
  modified_base 14: mod_base = OTHER; note = 2'-O-methyladenosine-3'-phosphate
  modified_base 15: mod_base = OTHER; note = 2'-O-methylcytidine-3'-phosphate
  modified_base 16: mod_base = OTHER; note = 2'-O-methyluridine-3'-phosphate
  modified_base 17: mod_base = OTHER; note = 2'-O-methylcytidine-3'-phosphate
  modified_base 18: mod_base = OTHER; note = 2'-O-methyluridine-3'-phosphate
  modified_base 19: mod_base = OTHER; note = 2'-O-methyladenosine-3'-phosphorothioate
  modified_base 20: mod_base = OTHER; note = 2'-O-methyladenosine-3'-phosphorothioate
  modified_base 21: mod_base = OTHER; note = 2'-O-methyladenosine
cattttaatcctcactctaaa

SEQ ID NO: 1776 - RNA, 23 nt, synthetic construct
  source 1..23: mol_type = other RNA
  modified_base 1: mod_base = OTHER; note = 2'-O-methyluridine-3'-phosphorothioate 5'-(E)-Vinylphosphonate
  modified_base 2: mod_base = OTHER; note = 2'-deoxy-2'-fluorouridine-3'-phosphorothioate
  modified_base 3: mod_base = OTHER; note = 2'-O-methyluridine-3'-phosphate
  modified_base 4: mod_base = OTHER; note = 2'-O-methyladenosine-3'-phosphate
  modified_base 5: mod_base = OTHER; note = 2'-O-methylguanosine-3'-phosphate
  modified_base 6: mod_base = OTHER; note = 2'-deoxy-2'-fluoroadenosine-3'-phosphate
  modified_base 7: mod_base = OTHER; note = 2'-O-methylguanosine-3'-phosphate
  modified_base 8: mod_base = OTHER; note = 2'-deoxy-2'-fluorouridine-3'-phosphate
  modified_base 9: mod_base = OTHER; note = 2'-deoxy-2'-fluoroguanosine-3'-phosphate
  modified_base 10: mod_base = OTHER; note = 2'-O-methyladenosine-3'-phosphate
  modified_base 11: mod_base = OTHER; note = 2'-O-methylguanosine-3'-phosphate
  modified_base 12: mod_base = OTHER; note = 2'-O-methylguanosine-3'-phosphate
  modified_base 13: mod_base = OTHER; note = 2'-O-methyladenosine-3'-phosphate
  modified_base 14: mod_base = OTHER; note = 2'-deoxy-2'-fluorouridine-3'-phosphate
  modified_base 15: mod_base = OTHER; note = 2'-O-methyluridine-3'-phosphate
  modified_base 16: mod_base = OTHER; note = 2'-deoxy-2'-fluoroadenosine-3'-phosphate
  modified_base 17: mod_base = OTHER; note = 2'-O-methyladenosine-3'-phosphate
  modified_base 18: mod_base = OTHER; note = 2'-O-methyladenosine-3'-phosphate
  modified_base 19: mod_base = OTHER; note = 2'-O-methyladenosine-3'-phosphate
  modified_base 20: mod_base = OTHER; note = 2'-O-methyluridine-3'-phosphate
  modified_base 21: mod_base = OTHER; note = 2'-O-methylguanosine-3'-phosphorothioate
  modified_base 22: mod_base = OTHER; note = 2'-O-methyladenosine-3'-phosphorothioate
  modified_base 23: mod_base = OTHER; note = 2'-O-methylguanosine
tttagagtgaggattaaaatgag

SEQ ID NO: 1777 - RNA, 21 nt, synthetic construct
  source 1..21: mol_type = other RNA
  modified_base 1: mod_base = OTHER; note = 2'-O-methyluridine-3'-phosphorothioate
  modified_base 2: mod_base = OTHER; note = 2'-O-methyluridine-3'-phosphorothioate
  modified_base 3: mod_base = OTHER; note = 2'-O-methylguanosine-3'-phosphate
  modified_base 4: mod_base = OTHER; note = 2'-O-methylguanosine-3'-phosphate
  modified_base 5: mod_base = OTHER; note = 2'-O-methylguanosine-3'-phosphate
  modified_base 6: mod_base = OTHER; note = 2'-O-docosanyl-cytidine-3'-phosphate
  modified_base 7: mod_base = OTHER; note = 2'-deoxy-2'-fluoroadenosine-3'-phosphate
  modified_base 8: mod_base = OTHER; note = 2'-O-methyladenosine-3'-phosphate
  modified_base 9: mod_base = OTHER; note = 2'-deoxy-2'-fluoroadenosine-3'-phosphate
  modified_base 10: mod_base = OTHER; note = 2'-deoxy-2'-fluoroguanosine-3'-phosphate
  modified_base 11: mod_base = OTHER; note = 2'-deoxy-2'-fluoroguanosine-3'-phosphate
  modified_base 12: mod_base = OTHER; note = 2'-O-methyluridine-3'-phosphate
  modified_base 13: mod_base = OTHER; note = 2'-O-methylguanosine-3'-phosphate
  modified_base 14: mod_base = OTHER; note = 2'-O-methylguanosine-3'-phosphate
  modified_base 15: mod_base = OTHER; note = 2'-O-methyladenosine-3'-phosphate
  modified_base 16: mod_base = OTHER; note = 2'-O-methyladenosine-3'-phosphate
  modified_base 17: mod_base = OTHER; note = 2'-O-methyladenosine-3'-phosphate
  modified_base 18: mod_base = OTHER; note = 2'-O-methyluridine-3'-phosphate
  modified_base 19: mod_base = OTHER; note = 2'-O-methylguanosine-3'-phosphorothioate
  modified_base 20: mod_base = OTHER; note = 2'-O-methyladenosine-3'-phosphorothioate
  modified_base 21: mod_base = OTHER; note = 2'-O-methyladenosine
ttgggcaaaggtggaaatgaa

SEQ ID NO: 1778 - RNA, 23 nt, synthetic construct
  source 1..23: mol_type = other RNA
  modified_base 1: mod_base = OTHER; note = 2'-O-methyluridine-3'-phosphorothioate 5'-(E)-Vinylphosphonate
  modified_base 2: mod_base = OTHER; note = 2'-deoxy-2'-fluorouridine-3'-phosphorothioate
  modified_base 3: mod_base = OTHER; note = 2'-O-methylcytidine-3'-phosphate
  modified_base 4: mod_base = OTHER; note = 2'-O-methyladenosine-3'-phosphate
  modified_base 5: mod_base = OTHER; note = 2'-O-methyluridine-3'-phosphate
  modified_base 6: mod_base = OTHER; note = 2'-deoxy-2'-fluorouridine-3'-phosphate
  modified_base 7: mod_base = OTHER; note = 2'-O-methyluridine-3'-phosphate
  modified_base 8: mod_base = OTHER; note = 2'-deoxy-2'-fluorocytidine-3'-phosphate
  modified_base 9: mod_base = OTHER; note = 2'-deoxy-2'-fluorocytidine-3'-phosphate
  modified_base 10: mod_base = OTHER; note = 2'-O-methyladenosine-3'-phosphate
  modified_base 11: mod_base = OTHER; note = 2'-O-methylcytidine-3'-phosphate
  modified_base 12: mod_base = OTHER; note = 2'-O-methylcytidine-3'-phosphate
  modified_base 13: mod_base = OTHER; note = 2'-O-methyluridine-3'-phosphate
  modified_base 14: mod_base = OTHER; note = 2'-deoxy-2'-fluorouridine-3'-phosphate
  modified_base 15: mod_base = OTHER; note = 2'-O-methyluridine-3'-phosphate
  modified_base 16: mod_base = OTHER; note = 2'-deoxy-2'-fluoroguanosine-3'-phosphate
  modified_base 17: mod_base = OTHER; note = 2'-O-methylcytidine-3'-phosphate
  modified_base 18: mod_base = OTHER; note = 2'-O-methylcytidine-3'-phosphate
  modified_base 19: mod_base = OTHER; note = 2'-O-methylcytidine-3'-phosphate
  modified_base 20: mod_base = OTHER; note = 2'-O-methyladenosine-3'-phosphate
  modified_base 21: mod_base = OTHER; note = 2'-O-methyladenosine-3'-phosphorothioate
  modified_base 22: mod_base = OTHER; note = 2'-O-methylguanosine-3'-phosphorothioate
  modified_base 23: mod_base = OTHER; note = 2'-O-methyluridine-3'-phosphate
ttcatttccacctttgcccaagt

SEQ ID NO: 1779 - RNA, 21 nt, synthetic construct
  source 1..21: mol_type = other RNA
  modified_base 1: mod_base = OTHER; note = 2'-O-methyladenosine-3'-phosphorothioate
  modified_base 2: mod_base = OTHER; note = 2'-O-methyluridine-3'-phosphorothioate
  modified_base 3: mod_base = OTHER; note = 2'-O-methylguanosine-3'-phosphate
  modified_base 4: mod_base = OTHER; note = 2'-O-methylguanosine-3'-phosphate
  modified_base 5: mod_base = OTHER; note = 2'-O-methylcytidine-3'-phosphate
  modified_base 6: mod_base = OTHER; note = 2'-O-docosanyl-adenosine-3'-phosphate
  modified_base 7: mod_base = OTHER; note = 2'-deoxy-2'-fluoroadenosine-3'-phosphate
  modified_base 8: mod_base = OTHER; note = 2'-O-methyladenosine-3'-phosphate
  modified_base 9: mod_base = OTHER; note = 2'-deoxy-2'-fluoroguanosine-3'-phosphate
  modified_base 10: mod_base = OTHER; note = 2'-deoxy-2'-fluoroadenosine-3'-phosphate
  modified_base 11: mod_base = OTHER; note = 2'-deoxy-2'-fluoroadenosine-3'-phosphate
  modified_base 12: mod_base = OTHER; note = 2'-O-methylcytidine-3'-phosphate
  modified_base 13: mod_base = OTHER; note = 2'-O-methyladenosine-3'-phosphate
  modified_base 14: mod_base = OTHER; note = 2'-O-methyladenosine-3'-phosphate
  modified_base 15: mod_base = OTHER; note = 2'-O-methyladenosine-3'-phosphate
  modified_base 16: mod_base = OTHER; note = 2'-O-methyluridine-3'-phosphate
  modified_base 17: mod_base = OTHER; note = 2'-O-methyladenosine-3'-phosphate
  modified_base 18: mod_base = OTHER; note = 2'-O-methyladenosine-3'-phosphate
  modified_base 19: mod_base = OTHER; note = 2'-O-methyluridine-3'-phosphorothioate
  modified_base 20: mod_base = OTHER; note = 2'-O-methyladenosine-3'-phosphorothioate
  modified_base 21: mod_base = OTHER; note = 2'-O-methyladenosine
atggcaaagaacaaataataa

SEQ ID NO: 1780 - RNA, 23 nt, synthetic construct
  source 1..23: mol_type = other RNA
  modified_base 1: mod_base = OTHER; note = 2'-O-methyluridine-3'-phosphorothioate 5'-(E)-Vinylphosphonate
  modified_base 2: mod_base = OTHER; note = 2'-deoxy-2'-fluorouridine-3'-phosphorothioate
  modified_base 3: mod_base = OTHER; note = 2'-O-methyladenosine-3'-phosphate
  modified_base 4: mod_base = OTHER; note = 2'-O-methyluridine-3'-phosphate
  modified_base 5: mod_base = OTHER; note = 2'-O-methyluridine-3'-phosphate
  modified_base 6: mod_base = OTHER; note = 2'-deoxy-2'-fluoroadenosine-3'-phosphate
  modified_base 7: mod_base = OTHER; note = 2'-O-methyluridine-3'-phosphate
  modified_base 8: mod_base = OTHER; note = 2'-deoxy-2'-fluorouridine-3'-phosphate
  modified_base 9: mod_base = OTHER; note = 2'-deoxy-2'-fluorouridine-3'-phosphate
  modified_base 10: mod_base = OTHER; note = 2'-O-methylguanosine-3'-phosphate
  modified_base 11: mod_base = OTHER; note = 2'-O-methyluridine-3'-phosphate
  modified_base 12: mod_base = OTHER; note = 2'-O-methyluridine-3'-phosphate
  modified_base 13: mod_base = OTHER; note = 2'-O-methylcytidine-3'-phosphate
  modified_base 14: mod_base = OTHER; note = 2'-deoxy-2'-fluorouridine-3'-phosphate
  modified_base 15: mod_base = OTHER; note = 2'-O-methyluridine-3'-phosphate
  modified_base 16: mod_base = OTHER; note = 2'-deoxy-2'-fluorouridine-3'-phosphate
  modified_base 17: mod_base = OTHER; note = 2'-O-methylguanosine-3'-phosphate
  modified_base 18: mod_base = OTHER; note = 2'-O-methylcytidine-3'-phosphate
  modified_base 19: mod_base = OTHER; note = 2'-O-methylcytidine-3'-phosphate
  modified_base 20: mod_base = OTHER; note = 2'-O-methyladenosine-3'-phosphate
  modified_base 21: mod_base = OTHER; note = 2'-O-methyluridine-3'-phosphorothioate
  modified_base 22: mod_base = OTHER; note = 2'-O-methyluridine-3'-phosphorothioate
  modified_base 23: mod_base = OTHER; note = 2'-O-methyladenosine
ttattatttgttctttgccatta

SEQ ID NO: 1781 - RNA, 21 nt, synthetic construct
  source 1..21: mol_type = other RNA
aatgtgttttctgaataacaa

SEQ ID NO: 1782 - RNA, 21 nt, synthetic construct
  source 1..21: mol_type = other RNA
tgaatcaaagcagttaactta

SEQ ID NO: 1783 - RNA, 21 nt, synthetic construct
  source 1..21: mol_type = other RNA
gtgaaacttcctaagtataaa

SEQ ID NO: 1784 - RNA, 21 nt, synthetic construct
  source 1..21: mol_type = other RNA
tctcgtaactggtttcattta

SEQ ID NO: 1785 - RNA, 21 nt, synthetic construct
  source 1..21: mol_type = other RNA
tgcactttgtaacatgtttaa

SEQ ID NO: 1786 - RNA, 21 nt, synthetic construct
  source 1..21: mol_type = other RNA
ctgtccaaggaaacttgaata

SEQ ID NO: 1787 - RNA, 21 nt, synthetic construct
  source 1..21: mol_type = other RNA
tgaagaaaactcctttagcaa

SEQ ID NO: 1788 - RNA, 21 nt, synthetic construct
  source 1..21: mol_type = other RNA
ggagtgagatcattttcttaa

SEQ ID NO: 1789 - RNA, 21 nt, synthetic construct
  source 1..21: mol_type = other RNA
ttgtctgtttttgtaacttaa

SEQ ID NO: 1790 - RNA, 21 nt, synthetic construct
  source 1..21: mol_type = other RNA
gcatgccaaattgtagttcta

SEQ ID NO: 1791 - RNA, 21 nt, synthetic construct
  source 1..21: mol_type = other RNA
aagggtaaagaagtttgataa

SEQ ID NO: 1792 - RNA, 21 nt, synthetic construct
  source 1..21: mol_type = other RNA
ttaggatgtttttcatgaaaa

SEQ ID NO: 1793 - RNA, 21 nt, synthetic construct
  source 1..21: mol_type = other RNA
cctcatcaagacaattgtcaa

SEQ ID NO: 1794 - RNA, 21 nt, synthetic construct
  source 1..21: mol_type = other RNA
tcacattcaggaagatgaaaa

SEQ ID NO: 1795 - RNA, 21 nt, synthetic construct
  source 1..21: mol_type = other RNA
tttgtcaagtgtcatatgtaa

SEQ ID NO: 1796 - RNA, 21 nt, synthetic construct
  source 1..21: mol_type = other RNA
cctttgaaacaagataactga

SEQ ID NO: 1797 - RNA, 21 nt, synthetic construct
  source 1..21: mol_type = other RNA
ctccttttgcttgaaaccaaa

SEQ ID NO: 1798 - RNA, 21 nt, synthetic construct
  source 1..21: mol_type = other RNA
caccaggatcaatgacattta

SEQ ID NO: 1799 - RNA, 21 nt, synthetic construct
  source 1..21: mol_type = other RNA
cttcaaatccatccagaataa

SEQ ID NO: 1800 - RNA, 21 nt, synthetic construct
  source 1..21: mol_type = other RNA
gggctgaaagccatttgttga

SEQ ID NO: 1801 - RNA, 21 nt, synthetic construct
  source 1..21: mol_type = other RNA
gagctgaacccattttgagta

SEQ ID NO: 1802 - RNA, 21 nt, synthetic construct
  source 1..21: mol_type = other RNA
gctgtgtttttgctatcacaa

SEQ ID NO: 1803 - RNA, 21 nt, synthetic construct
  source 1..21: mol_type = other RNA
atccaggactctgtcaattta

SEQ ID NO: 1804 - RNA, 21 nt, synthetic construct
  source 1..21: mol_type = other RNA
ttccagaaacgtgatccaaaa

SEQ ID NO: 1805 - RNA, 21 nt, synthetic construct
  source 1..21: mol_type = other RNA
catggcagtgttcctatttga

SEQ ID NO: 1806 - RNA, 21 nt, synthetic construct
  source 1..21: mol_type = other RNA
aagccttttgctcacaaaaca

SEQ ID NO: 1807 - RNA, 21 nt, synthetic construct
  source 1..21: mol_type = other RNA
ctactgtgactgatgttacaa

SEQ ID NO: 1808 - RNA, 21 nt, synthetic construct
  source 1..21: mol_type = other RNA
tggaagcacatgtttatttaa

SEQ ID NO: 1809 - RNA, 21 nt, synthetic construct
  source 1..21: mol_type = other RNA
gcatcttagcttctattataa

SEQ ID NO: 1810 - RNA, 21 nt, synthetic construct
  source 1..21: mol_type = other RNA
ttcagccatcaacaagagtta

SEQ ID NO: 1811 - RNA, 21 nt, synthetic construct
  source 1..21: mol_type = other RNA
agctcacccaataaacattaa

SEQ ID NO: 1812 - RNA, 21 nt, synthetic construct
  source 1..21: mol_type = other RNA
tggccctatcttttctatgta

SEQ ID NO: 1813 - RNA, 21 nt, synthetic construct
  source 1..21: mol_type = other RNA
gatcacactctgggtttatta

SEQ ID NO: 1814 - RNA, 21 nt, synthetic construct
  source 1..21: mol_type = other RNA
tcaccggtttggacttcatta

SEQ ID NO: 1815 - RNA, 21 nt, synthetic construct
  source 1..21: mol_type = other RNA
gagcgagattccgtcttaaaa

SEQ ID NO: 1816 - RNA, 21 nt, synthetic construct
  source 1..21: mol_type = other RNA
ttatcttctgcaattgcttaa

SEQ ID NO: 1817 - RNA, 21 nt, synthetic construct
  source 1..21: mol_type = other RNA
gagtagcaagttctagagaaa

SEQ ID NO: 1818 - RNA, 21 nt, synthetic construct
  source 1..21: mol_type = other RNA
cctgttttgttggaaggttta

SEQ ID NO: 1819 - RNA, 21 nt, synthetic construct
  source 1..21: mol_type = other RNA
acaggagaatcgcttaaacca

SEQ ID NO: 1820 - RNA, 21 nt, synthetic construct
  source 1..21: mol_type = other RNA
actcttccaaaggcataagaa

SEQ ID NO: 1821 - RNA, 21 nt, synthetic construct
  source 1..21: mol_type = other RNA
gatggatttgaagcaaagcaa

SEQ ID NO: 1822 - RNA, 21 nt, synthetic construct
  source 1..21: mol_type = other RNA
ctcctccaaacagaaagtcaa

SEQ ID NO: 1823 - RNA, 21 nt, synthetic construct
  source 1..21: mol_type = other RNA
ctggaaaagaggagtttcgaa

SEQ ID NO: 1824 - RNA, 21 nt, synthetic construct
  source 1..21: mol_type = other RNA
cagtttccaatcccatagata

SEQ ID NO: 1825 - RNA, 21 nt, synthetic construct
  source 1..21: mol_type = other RNA
acctggcacaatggctaatta

SEQ ID NO: 1826 - RNA, 21 nt, synthetic construct
  source 1..21: mol_type = other RNA
tccaaggaccaggttatttta

SEQ ID NO: 1827 - RNA, 21 nt, synthetic construct
  source 1..21: mol_type = other RNA
cctgggaaggaaaatgcatta

SEQ ID NO: 1828 - RNA, 21 nt, synthetic construct
  source 1..21: mol_type = other RNA
agtccaagatgacaccaaaaa

SEQ ID NO: 1829 - RNA, 21 nt, synthetic construct
  source 1..21: mol_type = other RNA
tcctcacaaccacctaatcaa

SEQ ID NO: 1830 - RNA, 21 nt, synthetic construct
  source 1..21: mol_type = other RNA
agcaaggccaaaattaccaaa

SEQ ID NO: 1831 - RNA, 21 nt, synthetic construct
  source 1..21: mol_type = other RNA
cactgaatgcctcaatgtgaa

SEQ ID NO: 1832 - RNA, 21 nt, synthetic construct
  source 1..21: mol_type = other RNA
ttacatcacagtgtttgcaaa

SEQ ID NO: 1833 - RNA, 21 nt, synthetic construct
  source 1..21: mol_type = other RNA
tccaaggagttccatgaagaa

SEQ ID NO: 1834 - RNA, 21 nt, synthetic construct
  source 1..21: mol_type = other RNA
aggattgaagagcattgcata

SEQ ID NO: 1835 - RNA, 21 nt, synthetic construct
  source 1..21: mol_type = other RNA
aagggagaaggatctagaata

SEQ ID NO: 1836 - RNA, 21 nt, synthetic construct
  source 1..21: mol_type = other RNA
tattaaaggagttaagagtaa

SEQ ID NO: 1837 - RNA, 21 nt, synthetic construct
  source 1..21: mol_type = other RNA
gtggtctttcctatcatggaa

SEQ ID NO: 1838 - RNA, 21 nt, synthetic construct
  source 1..21: mol_type = other RNA
tctgcattttattctggatga

SEQ ID NO: 1839 - RNA, 21 nt, synthetic construct
  source 1..21: mol_type = other RNA
tcctgcaaggactacgttaaa

SEQ ID NO: 1840 - RNA, 21 nt, synthetic construct
  source 1..21: mol_type = other RNA
gttccctctgagaattccaaa

SEQ ID NO: 1841 - RNA, 21 nt, synthetic construct
  source 1..21: mol_type = other RNA
gaagctgatgctttgcttcaa

SEQ ID NO: 1842 - RNA, 21 nt, synthetic construct
  source 1..21: mol_type = other RNA
aaatacataagaccataacaa

SEQ ID NO: 1843 - RNA, 21 nt, synthetic construct
  source 1..21: mol_type = other RNA
cctttggatgaccagaacaaa

SEQ ID NO: 1844 - RNA, 21 nt, synthetic construct
  source 1..21: mol_type = other RNA
ggagatgcagaggtaaaagta

SEQ ID NO: 1845 - RNA, 21 nt, synthetic construct
  source 1..21: mol_type = other RNA
ttgggttcatctgagcaagaa

SEQ ID NO: 1846 - RNA, 21 nt, synthetic construct
  source 1..21: mol_type = other RNA
gctctccagttagttctctca

SEQ ID NO: 1847 - RNA, 21 nt, synthetic construct
  source 1..21: mol_type = other RNA
agtgtgagcagtgagttacaa

SEQ ID NO: 1848 - RNA, 21 nt, synthetic construct
  source 1..21: mol_type = other RNA
tacacaggatcctattctcaa

SEQ ID NO: 1849 - RNA, 21 nt, synthetic construct
  source 1..21: mol_type = other RNA
gtgcggattcttgtggcttta

SEQ ID NO: 1850 - RNA, 21 nt, synthetic construct
  source 1..21: mol_type = other RNA
atcaggctgaggtgtcttaaa

SEQ ID NO: 1851 - RNA, 21 nt, synthetic construct
  source 1..21: mol_type = other RNA
ttcgaggtagagtttgaagga

SEQ ID NO: 1852 - RNA, 21 nt, synthetic construct
  source 1..21: mol_type = other RNA
tcctgaccttatccaagatga

SEQ ID NO: 1853 - RNA, 21 nt, synthetic construct
  source 1..21: mol_type = other RNA
ccttgaaggtcactcttccta

SEQ ID NO: 1854 - RNA, 21 nt, synthetic construct
  source 1..21: mol_type = other RNA
ctggctttctccgactgctaa

SEQ ID NO: 1855 - RNA, 21 nt, synthetic construct
  source 1..21: mol_type = other RNA
ttgcattcccagtggtcaaaa

SEQ ID NO: 1856 - RNA, 21 nt, synthetic construct
  source 1..21: mol_type = other RNA
cagctgaacagccaaatgcaa

SEQ ID NO: 1857 - RNA, 21 nt, synthetic construct
  source 1..21: mol_type = other RNA
atacccagagcattacgtgaa

SEQ ID NO: 1858 - RNA, 21 nt, synthetic construct
  source 1..21: mol_type = other RNA
ctggcagtctaccaacagata

SEQ ID NO: 1859 - RNA, 21 nt, synthetic construct
  source 1..21: mol_type = other RNA
agagctgctctggaaaatgta

SEQ ID NO: 1860 - RNA, 21 nt, synthetic construct
  source 1..21: mol_type = other RNA
gagcacctgcttcatgctcaa

SEQ ID NO: 1861 - RNA, 21 nt, synthetic construct
  source 1..21: mol_type = other RNA
ggtgggaaatggtatgagcta

SEQ ID NO: 1862 - RNA, 21 nt, synthetic construct
  source 1..21: mol_type = other RNA
gtgtggtgggttctttggaaa

SEQ ID NO: 1863 - RNA, 21 nt, synthetic construct
  source 1..21: mol_type = other RNA
gttcttgtctgattggctcaa

SEQ ID NO: 1864 - RNA, 21 nt, synthetic construct
  source 1..21: mol_type = other RNA
gatcacaaggtcactagatga

SEQ ID NO: 1865 - RNA, 21 nt, synthetic construct
  source 1..21: mol_type = other RNA
ctccgggatcttcttcacgta

SEQ ID NO: 1866 - RNA, 21 nt, synthetic construct
  source 1..21: mol_type = other RNA
gtcctggaagcttcaggctaa

SEQ ID NO: 1867 - RNA, 21 nt, synthetic construct
  source 1..21: mol_type = other RNA
atttccctgactcctctaaga

SEQ ID NO: 1868 - RNA, 21 nt, synthetic construct
  source 1..21: mol_type = other RNA
tgactgcgatcttcagagcaa

SEQ ID NO: 1869 - RNA, 21 nt, synthetic construct
  source 1..21: mol_type = other RNA
ccagcttctccaggctcttta

SEQ ID NO: 1870 - RNA, 21 nt, synthetic construct
  source 1..21: mol_type = other RNA
tctggcttccaggtatctcca

SEQ ID NO: 1871 - RNA, 21 nt, synthetic construct
  source 1..21: mol_type = other RNA
cctggccaacatggtgaaaca

SEQ ID NO: 1872 - RNA, 21 nt, synthetic construct
  source 1..21: mol_type = other RNA
gtttttactccagtggtgaaa

SEQ ID NO: 1873 - RNA, 21 nt, synthetic construct
  source 1..21: mol_type = other RNA
atgcatggtgcagttgacaga

SEQ ID NO: 1874 - RNA, 21 nt, synthetic construct
  source 1..21: mol_type = other RNA
agagtacagtgagccaagata

SEQ ID NO: 1875 - RNA, 21 nt, synthetic construct
  source 1..21: mol_type = other RNA
aacacaaaagttagctgagca

SEQ ID NO: 1876 - RNA, 21 nt, synthetic construct
  source 1..21: mol_type = other RNA
tcccagcaacacaagctggaa

SEQ ID NO: 1877 - RNA, 21 nt, synthetic construct
  source 1..21: mol_type = other RNA
agacctgacaagcactgctaa

SEQ ID NO: 1878 - RNA, 21 nt, synthetic construct
  source 1..21: mol_type = other RNA
atttcacacacgcagtcagta

SEQ ID NO: 1879 - RNA, 21 nt, synthetic construct
  source 1..21: mol_type = other RNA
caggtaatgagggactggaaa

SEQ ID NO: 1880 - RNA, 21 nt, synthetic construct
  source 1..21: mol_type = other RNA
tgagggatgtgaattgcctga

SEQ ID NO: 1881 - RNA, 21 nt, synthetic construct
  source 1..21: mol_type = other RNA
gatcctcaccagtatgcctta

SEQ ID NO: 1882 - RNA, 21 nt, synthetic construct
  source 1..21: mol_type = other RNA
ctggccttctctaagagctga

SEQ ID NO: 1883 - RNA, 21 nt, synthetic construct
  source 1..21: mol_type = other RNA
gattcccaccaaggtcttcaa

SEQ ID NO: 1884 - RNA, 21 nt, synthetic construct
  source 1..21: mol_type = other RNA
atatccaacgacctggagaaa

SEQ ID NO: 1885 - RNA, 21 nt, synthetic construct
  source 1..21: mol_type = other RNA
catgctgaagggaccttgaaa

SEQ ID NO: 1886 - RNA, 21 nt, synthetic construct
  source 1..21: mol_type = other RNA
tggtgctataggctggagaaa

SEQ ID NO: 1887 - RNA, 21 nt, synthetic construct
  source 1..21: mol_type = other RNA
catccacacacgcaggaacta

SEQ ID NO: 1888 - RNA, 21 nt, synthetic construct
  source 1..21: mol_type = other RNA
ttgccctgagtggatctccaa

SEQ ID NO: 1889 - RNA, 21 nt, synthetic construct
  source 1..21: mol_type = other RNA
cgcactcacccatgtgccaaa

SEQ ID NO: 1890 - RNA, 21 nt, synthetic construct
  source 1..21: mol_type = other RNA
gcggttgcaaggcccaagaaa

SEQ ID NO: 1891 - RNA, 21 nt, synthetic construct
  source 1..21: mol_type = other RNA
ctggagagaagtttctggcca

SEQ ID NO: 1892 - RNA, 21 nt, synthetic construct
  source 1..21: mol_type = other RNA
gcctgcagagagaagcctgta

SEQ ID NO: 1893 - RNA, 21 nt, synthetic construct
  source 1..21: mol_type = other RNA
cctctgaatggtccagggtta

SEQ ID NO: 1894 - RNA, 21 nt, synthetic construct
  source 1..21: mol_type = other RNA
cattaagattgaggcctgcca

SEQ ID NO: 1895 - RNA, 21 nt, synthetic construct
  source 1..21: mol_type = other RNA
gagaccgagcgctttctggaa

SEQ ID NO: 1896 - RNA, 21 nt, synthetic construct
  source 1..21: mol_type = other RNA
agcgagaggcagagaaagaaa

SEQ ID NO: 1897 - RNA, 21 nt, synthetic construct
  source 1..21: mol_type = other RNA
tgccaccatcctgctgctgta

SEQ ID NO: 1898 - RNA, 21 nt, synthetic construct
  source 1..21: mol_type = other RNA
ctgccctcagggatcttgcaa

SEQ ID NO: 1899 - RNA, 21 nt, synthetic construct
  source 1..21: mol_type = other RNA
ccaagctgtgcccatccaaaa

SEQ ID NO: 1900 - RNA, 21 nt, synthetic construct
  source 1..21: mol_type = other RNA
cacagggaaccctgcttgcaa

SEQ ID NO: 1901 - RNA, 21 nt, synthetic construct
  source 1..21: mol_type = other RNA
atagcccaggtcctctgataa

SEQ ID NO: 1902 - RNA, 21 nt, synthetic construct
  source 1..21: mol_type = other RNA
gtctctgcaggacatgctgta

SEQ ID NO: 1903 - RNA, 21 nt, synthetic construct
  source 1..21: mol_type = other RNA
acggtcccacactggtgacta

SEQ ID NO: 1904 - RNA, 21 nt, synthetic construct
  source 1..21: mol_type = other RNA
agtgggctgcatctgggatta

SEQ ID NO: 1905 - RNA, 21 nt, synthetic construct
  source 1..21: mol_type = other RNA
ccttcccactggaggtcacaa

SEQ ID NO: 1906 - RNA, 21 nt, synthetic construct
  source 1..21: mol_type = other RNA
actgcactccggcctgatgaa

SEQ ID NO: 1907 - RNA, 21 nt, synthetic construct
  source 1..21: mol_type = other RNA
agtggcctggagaccttggaa

SEQ ID NO: 1908 - RNA, 21 nt, synthetic construct
  source 1..21: mol_type = other RNA
gtccacccagcaaagagtgga

SEQ ID NO: 1909 - RNA, 21 nt, synthetic construct
  source 1..21: mol_type = other RNA
ggctactccacagaggtggta

SEQ ID NO: 1910 - RNA, 21 nt, synthetic construct
  source 1..21: mol_type = other RNA
tggcaggaccaggactataga

SEQ ID NO: 1911 - RNA, 21 nt, synthetic construct
  source 1..21: mol_type = other RNA
gttaagggaaggaactctgga

SEQ ID NO: 1912 - RNA, 21 nt, synthetic construct
  source 1..21: mol_type = other RNA
acagtgggtggtggatctgta

SEQ ID NO: 1913 - RNA, 21 nt, synthetic construct
  source 1..21: mol_type = other RNA
gagctggcaaaggtggctcta

SEQ ID NO: 1914 - RNA, 21 nt, synthetic construct
  source 1..21: mol_type = other RNA
ccactcgggaggctgagacaa

SEQ ID NO: 1915 - RNA, 23 nt, synthetic construct
  source 1..23: mol_type = other RNA
ttgttattcagaaaacacattct

SEQ ID NO: 1916 - RNA, 23 nt, synthetic construct
  source 1..23: mol_type = other RNA
taagttaactgctttgattcaag

SEQ ID NO: 1917 - RNA, 23 nt, synthetic construct
  source 1..23: mol_type = other RNA
tttatacttaggaagtttcacac

SEQ ID NO: 1918 - RNA, 23 nt, synthetic construct
  source 1..23: mol_type = other RNA
taaatgaaaccagttacgagaga

SEQ ID NO: 1919 - RNA, 23 nt, synthetic construct
  source 1..23: mol_type = other RNA
ttaaacatgttacaaagtgcaag

SEQ ID NO: 1920 - RNA, 23 nt, synthetic construct
  source 1..23: mol_type = other RNA
tattcaagtttccttggacagat

SEQ ID NO: 1921 - RNA, 23 nt, synthetic construct
  source 1..23: mol_type = other RNA
ttgctaaaggagttttcttcacc

SEQ ID NO: 1922 - RNA, 23 nt, synthetic construct
  source 1..23: mol_type = other RNA
ttaagaaaatgatctcactcctt

SEQ ID NO: 1923 - RNA, 23 nt, synthetic construct
  source 1..23: mol_type = other RNA
ttaagttacaaaaacagacaacc

SEQ ID NO: 1924 - RNA, 23 nt, synthetic construct
  source 1..23: mol_type = other RNA
tagaactacaatttggcatgcaa

SEQ ID NO: 1925 - RNA, 23 nt, synthetic construct
  source 1..23: mol_type = other RNA
ttatcaaacttctttacccttca

SEQ ID NO: 1926 - RNA, 23 nt, synthetic construct
  source 1..23: mol_type = other RNA
ttttcatgaaaaacatcctaagc

SEQ ID NO: 1927 - RNA, 23 nt, synthetic construct
  source 1..23: mol_type = other RNA
ttgacaattgtcttgatgagggt

SEQ ID NO: 1928 - RNA, 23 nt, synthetic construct
  source 1..23: mol_type = other RNA
ttttcatcttcctgaatgtgacc

SEQ ID NO: 1929 - RNA, 23 nt, synthetic construct
  source 1..23: mol_type = other RNA
ttacatatgacacttgacaaaac

SEQ ID NO: 1930 - RNA, 23 nt, synthetic construct
  source 1..23: mol_type = other RNA
tcagttatcttgtttcaaaggga

SEQ ID NO: 1931 - RNA, 23 nt, synthetic construct
  source 1..23: mol_type = other RNA
tttggtttcaagcaaaaggaggc

SEQ ID NO: 1932 - RNA, 23 nt, synthetic construct
  source 1..23: mol_type = other RNA
taaatgtcattgatcctggtgac

SEQ ID NO: 1933 - RNA, 23 nt, synthetic construct
  source 1..23: mol_type = other RNA
ttattctggatggatttgaagca

SEQ ID NO: 1934 - RNA, 23 nt, synthetic construct
  source 1..23: mol_type = other RNA
tcaacaaatggctttcagccctt

SEQ ID NO: 1935 - RNA, 23 nt, synthetic construct
  source 1..23: mol_type = other RNA
tactcaaaatgggttcagctcag

SEQ ID NO: 1936 - RNA, 23 nt, synthetic construct
  source 1..23: mol_type = other RNA
ttgtgatagcaaaaacacagcag

SEQ ID NO: 1937 - RNA, 23 nt, synthetic construct
  source 1..23: mol_type = other RNA
taaattgacagagtcctggataa

SEQ ID NO: 1938 - RNA, 23 nt, synthetic construct
  source 1..23: mol_type = other RNA
ttttggatcacgtttctggaagg

SEQ ID NO: 1939 - RNA, 23 nt, synthetic construct
  source 1..23: mol_type = other RNA
tcaaataggaacactgccatgta

SEQ ID NO: 1940 - RNA, 23 nt, synthetic construct
  source 1..23: mol_type = other RNA
tgttttgtgagcaaaaggcttaa

SEQ ID NO: 1941 - RNA, 23 nt, synthetic construct
  source 1..23: mol_type = other RNA
ttgtaacatcagtcacagtagaa

SEQ ID NO: 1942 - RNA, 23 nt, synthetic construct
  source 1..23: mol_type = other RNA
ttaaataaacatgtgcttccagc

SEQ ID NO: 1943 - RNA, 23 nt, synthetic construct
  source 1..23: mol_type = other RNA
ttataatagaagctaagatgccc

SEQ ID NO: 1944 - RNA, 23 nt, synthetic construct
  source 1..23: mol_type = other RNA
taactcttgttgatggctgaaga

SEQ ID NO: 1945 - RNA, 23 nt, synthetic construct
  source 1..23: mol_type = other RNA
ttaatgtttattgggtgagcttc

SEQ ID NO: 1946 - RNA, 23 nt, synthetic construct
  source 1..23: mol_type = other RNA
tacatagaaaagatagggccaaa

SEQ ID NO: 1947 - RNA, 23 nt, synthetic construct
  source 1..23: mol_type = other RNA
taataaacccagagtgtgatcaa

SEQ ID NO: 1948 - RNA, 23 nt, synthetic construct
  source 1..23: mol_type = other RNA
taatgaagtccaaaccggtgact

SEQ ID NO: 1949 - RNA, 23 nt, synthetic construct
  source 1..23: mol_type = other RNA
ttttaagacggaatctcgctctg

SEQ ID NO: 1950 - RNA, 23 nt, synthetic construct
  source 1..23: mol_type = other RNA
ttaagcaattgcagaagataaga

SEQ ID NO: 1951 - RNA, 23 nt, synthetic construct
  source 1..23: mol_type = other RNA
tttctctagaacttgctactctt

SEQ ID NO: 1952 - RNA, 23 nt, synthetic construct
  source 1..23: mol_type = other RNA
taaaccttccaacaaaacaggct

SEQ ID NO: 1953 - RNA, 23 nt, synthetic construct
  source 1..23: mol_type = other RNA
tggtttaagcgattctcctgtct

SEQ ID NO: 1954 - RNA, 23 nt, synthetic construct
  source 1..23: mol_type = other RNA
ttcttatgcctttggaagagtgg

SEQ ID NO: 1955 - RNA, 23 nt, synthetic construct
  source 1..23: mol_type = other RNA
ttgctttgcttcaaatccatcca

SEQ ID NO: 1956 - RNA, 23 nt, synthetic construct
  source 1..23: mol_type = other RNA
ttgactttctgtttggaggagac

SEQ ID NO: 1957 - RNA, 23 nt, synthetic construct
  source 1..23: mol_type = other RNA
ttcgaaactcctcttttccagaa

SEQ ID NO: 1958 - RNA, 23 nt, synthetic construct
  source 1..23: mol_type = other RNA
tatctatgggattggaaactgca

SEQ ID NO: 1959 - RNA, 23 nt, synthetic construct
  source 1..23: mol_type = other RNA
taattagccattgtgccaggttt

SEQ ID NO: 1960 - RNA, 23 nt, synthetic construct
  source 1..23: mol_type = other RNA
taaaataacctggtccttggaga

SEQ ID NO: 1961 - RNA, 23 nt, synthetic construct
  source 1..23: mol_type = other RNA
taatgcattttccttcccaggat

SEQ ID NO: 1962 - RNA, 23 nt, synthetic construct
  source 1..23: mol_type = other RNA
tttttggtgtcatcttggacttt

SEQ ID NO: 1963 - RNA, 23 nt, synthetic construct
  source 1..23: mol_type = other RNA
ttgattaggtggttgtgaggatc

SEQ ID NO: 1964 - RNA, 23 nt, synthetic construct
  source 1..23: mol_type = other RNA
tttggtaattttggccttgcttg

SEQ ID NO: 1965 - RNA, 23 nt, synthetic construct
  source 1..23: mol_type = other RNA
ttcacattgaggcattcagtgag

SEQ ID NO: 1966 - RNA, 23 nt, synthetic construct
  source 1..23: mol_type = other RNA
tttgcaaacactgtgatgtaaca

SEQ ID NO: 1967 - RNA, 23 nt, synthetic construct
  source 1..23: mol_type = other RNA
ttcttcatggaactccttggaat

SEQ ID NO: 1968 - RNA, 23 nt, synthetic construct
  source 1..23: mol_type = other RNA
tatgcaatgctcttcaatcctgg

SEQ ID NO: 1969 - RNA, 23 nt, synthetic construct
  source 1..23: mol_type = other RNA
tattctagatccttctcccttct

SEQ ID NO: 1970 - RNA, 23 nt, synthetic construct
  source 1..23: mol_type = other RNA
ttactcttaactcctttaatatc

SEQ ID NO: 1971 - RNA, 23 nt, synthetic construct
  source 1..23: mol_type = other RNA
ttccatgataggaaagaccactc

SEQ ID NO: 1972 - RNA, 23 nt, synthetic construct
  source 1..23: mol_type = other RNA
tcatccagaataaaatgcagaat

SEQ ID NO: 1973 - RNA, 23 nt, synthetic construct
  source 1..23: mol_type = other RNA
tttaacgtagtccttgcaggaag

SEQ ID NO: 1974 - RNA, 23 nt, synthetic construct
  source 1..23: mol_type = other RNA
tttggaattctcagagggaacct

SEQ ID NO: 1975 - RNA, 23 nt, synthetic construct
  source 1..23: mol_type = other RNA
ttgaagcaaagcatcagcttctc

SEQ ID NO: 1976 - RNA, 23 nt, synthetic construct
  source 1..23: mol_type = other RNA
ttgttatggtcttatgtattttc

SEQ ID NO: 1977 - RNA, 23 nt, synthetic construct
  source 1..23: mol_type = other RNA
tttgttctggtcatccaaaggct

SEQ ID NO: 1978 - RNA, 23 nt, synthetic construct
  source 1..23: mol_type = other RNA
tacttttacctctgcatctccac

SEQ ID NO: 1979 - RNA, 23 nt, synthetic construct
  source 1..23: mol_type = other RNA
ttcttgctcagatgaacccaacc

SEQ ID NO: 1980 - RNA, 23 nt, synthetic construct
  source 1..23: mol_type = other RNA
tgagagaactaactggagagcca

SEQ ID NO: 1981 - RNA, 23 nt, synthetic construct
  source 1..23: mol_type = other RNA
ttgtaactcactgctcacacttt

SEQ ID NO: 1982 - RNA, 23 nt, synthetic construct
  source 1..23: mol_type = other RNA
ttgagaataggatcctgtgtata

SEQ ID NO: 1983 - RNA, 23 nt, synthetic construct
  source 1..23: mol_type = other RNA
taaagccacaagaatccgcacag

SEQ ID NO: 1984 - RNA, 23 nt, synthetic construct
  source 1..23: mol_type = other RNA
tttaagacacctcagcctgatta

SEQ ID NO: 1985 - RNA, 23 nt, synthetic construct
  source 1..23: mol_type = other RNA
tccttcaaactctacctcgaaac

SEQ ID NO: 1986 - RNA, 23 nt, synthetic construct
  source 1..23: mol_type = other RNA
tcatcttggataaggtcaggatg

SEQ ID NO: 1987 - RNA, 23 nt, synthetic construct
  source 1..23: mol_type = other RNA
taggaagagtgaccttcaaggcc

SEQ ID NO: 1988 - RNA, 23 nt, synthetic construct
  source 1..23: mol_type = other RNA
ttagcagtcggagaaagccagag

SEQ ID NO: 1989 - RNA, 23 nt, synthetic construct
  source 1..23: mol_type = other RNA
ttttgaccactgggaatgcaaga

SEQ ID NO: 1990 - RNA, 23 nt, synthetic construct
  source 1..23: mol_type = other RNA
ttgcatttggctgttcagctgct

SEQ ID NO: 1991 - RNA, 23 nt, synthetic construct
  source 1..23: mol_type = other RNA
ttcacgtaatgctctgggtatca

SEQ ID NO: 1992 - RNA, 23 nt, synthetic construct
  source 1..23: mol_type = other RNA
tatctgttggtagactgccagtg

SEQ ID NO: 1993 - RNA, 23 nt, synthetic construct
  source 1..23: mol_type = other RNA
tacattttccagagcagctctca

SEQ ID NO: 1994 - RNA, 23 nt, synthetic construct
  source 1..23: mol_type = other RNA
ttgagcatgaagcaggtgctcag

SEQ ID NO: 1995 - RNA, 23 nt, synthetic construct
  source 1..23: mol_type = other RNA
tagctcataccatttcccacctg

SEQ ID NO: 1996 - RNA, 23 nt, synthetic construct
  source 1..23: mol_type = other RNA
tttccaaagaacccaccacacaa

SEQ ID NO: 1997 - RNA, 23 nt, synthetic construct
  source 1..23: mol_type = other RNA
ttgagccaatcagacaagaacta

SEQ ID NO: 1998 - RNA, 23 nt, synthetic construct
  source 1..23: mol_type = other RNA
tcatctagtgaccttgtgatccc

SEQ ID NO: 1999 - RNA, 23 nt, synthetic construct
  source 1..23: mol_type = other RNA
tacgtgaagaagatcccggaggt

SEQ ID NO: 2000 - RNA, 23 nt, synthetic construct
  source 1..23: mol_type = other RNA
ttagcctgaagcttccaggacac

SEQ ID NO: 2001 - RNA, 23 nt, synthetic construct
  source 1..23: mol_type = other RNA
tcttagaggagtcagggaaattg

SEQ ID NO: 2002 - RNA, 23 nt, synthetic construct
  source 1..23: mol_type = other RNA
ttgctctgaagatcgcagtcacc

SEQ ID NO: 2003 - RNA, 23 nt, synthetic construct
  source 1..23: mol_type = other RNA
taaagagcctggagaagctggtg

SEQ ID NO: 2004 - RNA, 23 nt, synthetic construct
  source 1..23: mol_type = other RNA
tggagatacctggaagccagagt

SEQ ID NO: 2005 - RNA, 23 nt, synthetic construct
  source 1..23: mol_type = other RNA
tgtttcaccatgttggccaggat

SEQ ID NO: 2006 - RNA, 23 nt, synthetic construct
  source 1..23: mol_type = other RNA
tttcaccactggagtaaaaaccc

SEQ ID NO: 2007 - RNA, 23 nt, synthetic construct
  source 1..23: mol_type = other RNA
tctgtcaactgcaccatgcattt

SEQ ID NO: 2008 - RNA, 23 nt, synthetic construct
  source 1..23: mol_type = other RNA
tatcttggctcactgtactctcc

SEQ ID NO: 2009 - RNA, 23 nt, synthetic construct
  source 1..23: mol_type = other RNA
tgctcagctaacttttgtgtttt

SEQ ID NO: 2010 - RNA, 23 nt, synthetic construct
  source 1..23: mol_type = other RNA
ttccagcttgtgttgctgggagt

SEQ ID NO: 2011 - RNA, 23 nt, synthetic construct
  source 1..23: mol_type = other RNA
ttagcagtgcttgtcaggtctca

SEQ ID NO: 2012 - RNA, 23 nt, synthetic construct
  source 1..23: mol_type = other RNA
tactgactgcgtgtgtgaaatgt

SEQ ID NO: 2013 - RNA, 23 nt, synthetic construct
  source 1..23: mol_type = other RNA
tttccagtccctcattacctggc

SEQ ID NO: 2014 - RNA, 23 nt, synthetic construct
  source 1..23: mol_type = other RNA
tcaggcaattcacatccctcacc

SEQ ID NO: 2015 - RNA, 23 nt, synthetic construct
  source 1..23: mol_type = other RNA
taaggcatactggtgaggatctg

SEQ ID NO: 2016 - RNA, 23 nt, synthetic construct
  source 1..23: mol_type = other RNA
tcagctcttagagaaggccagca

SEQ ID NO: 2017 - RNA, 23 nt, synthetic construct
  source 1..23: mol_type = other RNA
ttgaagaccttggtgggaatccc

SEQ ID NO: 2018 - RNA, 23 nt, synthetic construct
  source 1..23: mol_type = other RNA
tttctccaggtcgttggatattt

SEQ ID NO: 2019 - RNA, 23 nt, synthetic construct
  source 1..23: mol_type = other RNA
tttcaaggtcccttcagcatggc

SEQ ID NO: 2020 - RNA, 23 nt, synthetic construct
  source 1..23: mol_type = other RNA
tttctccagcctatagcaccagt

SEQ ID NO: 2021 - RNA, 23 nt, synthetic construct
  source 1..23: mol_type = other RNA
tagttcctgcgtgtgtggatgtg

SEQ ID NO: 2022 - RNA, 23 nt, synthetic construct
  source 1..23: mol_type = other RNA
ttggagatccactcagggcaaca

SEQ ID NO: 2023 - RNA, 23 nt, synthetic construct
  source 1..23: mol_type = other RNA
tttggcacatgggtgagtgcggt

SEQ ID NO: 2024 - RNA, 23 nt, synthetic construct
  source 1..23: mol_type = other RNA
tttcttgggccttgcaaccgctg

SEQ ID NO: 2025 - RNA, 23 nt, synthetic construct
  source 1..23: mol_type = other RNA
tggccagaaacttctctccaggg

SEQ ID NO: 2026 - RNA, 23 nt, synthetic construct
  source 1..23: mol_type = other RNA
tacaggcttctctctgcaggcaa

SEQ ID NO: 2027 - RNA, 23 nt, synthetic construct
  source 1..23: mol_type = other RNA
taaccctggaccattcagagggt

SEQ ID NO: 2028 - RNA, 23 nt, synthetic construct
  source 1..23: mol_type = other RNA
tggcaggcctcaatcttaatgtt

SEQ ID NO: 2029 - RNA, 23 nt, synthetic construct
  source 1..23: mol_type = other RNA
ttccagaaagcgctcggtctccc

SEQ ID NO: 2030 - RNA, 23 nt, synthetic construct
  source 1..23: mol_type = other RNA
tttctttctctgcctctcgctgt

SEQ ID NO: 2031 - RNA, 23 nt, synthetic construct
  source 1..23: mol_type = other RNA
tacagcagcaggatggtggcaga

SEQ ID NO: 2032 - RNA, 23 nt, synthetic construct
  source 1..23: mol_type = other RNA
ttgcaagatccctgagggcaggc

SEQ ID NO: 2033 - RNA, 23 nt, synthetic construct
  source 1..23: mol_type = other RNA
ttttggatgggcacagcttggac

SEQ ID NO: 2034 - RNA, 23 nt, synthetic construct
  source 1..23: mol_type = other RNA
ttgcaagcagggttccctgtggg

SEQ ID NO: 2035 - RNA, 23 nt, synthetic construct
  source 1..23: mol_type = other RNA
ttatcagaggacctgggctatag

SEQ ID NO: 2036 - RNA, 23 nt, synthetic construct
  source 1..23: mol_type = other RNA
tacagcatgtcctgcagagaccc

SEQ ID NO: 2037 - RNA, 23 nt, synthetic construct
  source 1..23: mol_type = other RNA
tagtcaccagtgtgggaccgtca

SEQ ID NO: 2038 - RNA, 23 nt, synthetic construct
  source 1..23: mol_type = other RNA
taatcccagatgcagcccactct

SEQ ID NO: 2039 - RNA, 23 nt, synthetic construct
  source 1..23: mol_type = other RNA
ttgtgacctccagtgggaagggc

SEQ ID NO: 2040 - RNA, 23 nt, synthetic construct
  source 1..23: mol_type = other RNA
ttcatcaggccggagtgcagtgg

SEQ ID NO: 2041 - RNA, 23 nt, synthetic construct
  source 1..23: mol_type = other RNA
ttccaaggtctccaggccactgg

SEQ ID NO: 2042 - RNA, 23 nt, synthetic construct
  source 1..23: mol_type = other RNA
tccactctttgctgggtggaccc

SEQ ID NO: 2043 - RNA, 23 nt, synthetic construct
  source 1..23: mol_type = other RNA
taccacctctgtggagtagcctg

SEQ ID NO: 2044 - RNA, 23 nt, synthetic construct
  source 1..23: mol_type = other RNA
tctatagtcctggtcctgccacc

SEQ ID NO: 2045 - RNA, 23 nt, synthetic construct
  source 1..23: mol_type = other RNA
tccagagttccttcccttaacgt

SEQ ID NO: 2046 - RNA, 23 nt, synthetic construct
  source 1..23: mol_type = other RNA
tacagatccaccacccactgtgt

SEQ ID NO: 2047 - RNA, 23 nt, synthetic construct
  source 1..23: mol_type = other RNA
tagagccacctttgccagctctt

SEQ ID NO: 2048 - RNA, 23 nt, synthetic construct
  source 1..23: mol_type = other RNA
ttgtctcagcctcccgagtggct

SEQ ID NO: 2049 - RNA, 21 nt, synthetic construct
  source 1..21: mol_type = other RNA
  modified_base 1: mod_base = OTHER; note = 2'-O-methyladenosine-3'-phosphorothioate
  modified_base 2: mod_base = OTHER; note = 2'-O-methyladenosine-3'-phosphorothioate
  modified_base 3: mod_base = OTHER; note = 2'-O-methyluridine-3'-phosphate
  modified_base 4: mod_base = OTHER; note = 2'-O-methylguanosine-3'-phosphate
  modified_base 5: mod_base = OTHER; note = 2'-O-methyluridine-3'-phosphate
  modified_base 6: mod_base = OTHER; note = 2'-O-docosanyl-guanosine-3'-phosphate
  modified_base 7: mod_base = OTHER; note = 2'-deoxy-2'-fluorouridine-3'-phosphate
  modified_base 8: mod_base = OTHER; note = 2'-O-methyluridine-3'-phosphate
  modified_base 9: mod_base = OTHER; note = 2'-deoxy-2'-fluorouridine-3'-phosphate
  modified_base 10: mod_base = OTHER; note = 2'-deoxy-2'-fluorouridine-3'-phosphate
  modified_base 11: mod_base = OTHER; note = 2'-deoxy-2'-fluorocytidine-3'-phosphate
  modified_base 12: mod_base = OTHER; note = 2'-O-methyluridine-3'-phosphate
  modified_base 13: mod_base = OTHER; note = 2'-O-methylguanosine-3'-phosphate
  modified_base 14: mod_base = OTHER; note = 2'-O-methyladenosine-3'-phosphate
  modified_base 15: mod_base = OTHER; note = 2'-O-methyladenosine-3'-phosphate
  modified_base 16: mod_base = OTHER; note = 2'-O-methyluridine-3'-phosphate
  modified_base 17: mod_base = OTHER; note = 2'-O-methyladenosine-3'-phosphate
  modified_base 18: mod_base = OTHER; note = 2'-O-methyladenosine-3'-phosphate
  modified_base 19: mod_base = OTHER; note = 2'-O-methylcytidine-3'-phosphorothioate
  modified_base 20: mod_base = OTHER; note = 2'-O-methyladenosine-3'-phosphorothioate
  modified_base 21: mod_base = OTHER; note = 2'-O-methyladenosine
aatgtgttttctgaataacaa

SEQ ID NO: 2050 - RNA, 21 nt, synthetic construct
  source 1..21: mol_type = other RNA
  modified_base 1: mod_base = OTHER; note = 2'-O-methyluridine-3'-phosphorothioate
  modified_base 2: mod_base = OTHER; note = 2'-O-methylguanosine-3'-phosphorothioate
  modified_base 3: mod_base = OTHER; note = 2'-O-methyladenosine-3'-phosphate
  modified_base 4: mod_base = OTHER; note = 2'-O-methyladenosine-3'-phosphate
  modified_base 5: mod_base = OTHER; note = 2'-O-methyluridine-3'-phosphate
  modified_base 6: mod_base = OTHER; note = 2'-O-docosanyl-cytidine-3'-phosphate
  modified_base 7: mod_base = OTHER; note = 2'-deoxy-2'-fluoroadenosine-3'-phosphate
  modified_base 8: mod_base = OTHER; note = 2'-O-methyladenosine-3'-phosphate
  modified_base 9: mod_base = OTHER; note = 2'-deoxy-2'-fluoroadenosine-3'-phosphate
  modified_base 10: mod_base = OTHER; note = 2'-deoxy-2'-fluoroguanosine-3'-phosphate
  modified_base 11: mod_base = OTHER; note = 2'-deoxy-2'-fluorocytidine-3'-phosphate
  modified_base 12: mod_base = OTHER; note = 2'-O-methyladenosine-3'-phosphate
  modified_base 13: mod_base = OTHER; note = 2'-O-methylguanosine-3'-phosphate
  modified_base 14: mod_base = OTHER; note = 2'-O-methyluridine-3'-phosphate
  modified_base 15: mod_base = OTHER; note = 2'-O-methyluridine-3'-phosphate
  modified_base 16: mod_base = OTHER; note = 2'-O-methyladenosine-3'-phosphate
  modified_base 17: mod_base = OTHER; note = 2'-O-methyladenosine-3'-phosphate
  modified_base 18: mod_base = OTHER; note = 2'-O-methylcytidine-3'-phosphate
  modified_base 19: mod_base = OTHER; note = 2'-O-methyluridine-3'-phosphorothioate
  modified_base 20: mod_base = OTHER; note = 2'-O-methyluridine-3'-phosphorothioate
  modified_base 21: mod_base = OTHER; note = 2'-O-methyladenosine
tgaatcaaagcagttaactta

SEQ ID NO: 2051 - RNA, 21 nt, synthetic construct
  source 1..21: mol_type = other RNA
  modified_base 1: mod_base = OTHER; note = 2'-O-methylguanosine-3'-phosphorothioate
  modified_base 2: mod_base = OTHER; note = 2'-O-methyluridine-3'-phosphorothioate
  modified_base 3: mod_base = OTHER; note = 2'-O-methylguanosine-3'-phosphate
  modified_base 4: mod_base = OTHER; note = 2'-O-methyladenosine-3'-phosphate
  modified_base 5: mod_base = OTHER; note = 2'-O-methyladenosine-3'-phosphate
  modified_base 6: mod_base = OTHER; note = 2'-O-docosanyl-adenosine-3'-phosphate
  modified_base 7: mod_base = OTHER; note = 2'-deoxy-2'-fluorocytidine-3'-phosphate
  modified_base 8: mod_base = OTHER; note = 2'-O-methyluridine-3'-phosphate
  modified_base 9: mod_base = OTHER; note = 2'-deoxy-2'-fluorouridine-3'-phosphate
  modified_base 10: mod_base = OTHER; note = 2'-deoxy-2'-fluorocytidine-3'-phosphate
  modified_base 11: mod_base = OTHER; note = 2'-deoxy-2'-fluorocytidine-3'-phosphate
  modified_base 12: mod_base = OTHER; note = 2'-O-methyluridine-3'-phosphate
  modified_base 13: mod_base = OTHER; note = 2'-O-methyladenosine-3'-phosphate
  modified_base 14: mod_base = OTHER; note = 2'-O-methyladenosine-3'-phosphate
  modified_base 15: mod_base = OTHER; note = 2'-O-methylguanosine-3'-phosphate
  modified_base 16: mod_base = OTHER; note = 2'-O-methyluridine-3'-phosphate
  modified_base 17: mod_base = OTHER; note = 2'-O-methyladenosine-3'-phosphate
  modified_base 18: mod_base = OTHER; note = 2'-O-methyluridine-3'-phosphate
  modified_base 19: mod_base = OTHER; note = 2'-O-methyladenosine-3'-phosphorothioate
  modified_base 20: mod_base = OTHER; note = 2'-O-methyladenosine-3'-phosphorothioate
  modified_base 21: mod_base = OTHER; note = 2'-O-methyladenosine
gtgaaacttcctaagtataaa

SEQ ID NO: 2052 - RNA, 21 nt, synthetic construct
  source 1..21: mol_type = other RNA
  modified_base 1: mod_base = OTHER; note = 2'-O-methyluridine-3'-phosphorothioate
  modified_base 2: mod_base = OTHER; note = 2'-O-methylcytidine-3'-phosphorothioate
  modified_base 3: mod_base = OTHER; note = 2'-O-methyluridine-3'-phosphate
  modified_base 4: mod_base = OTHER; note = 2'-O-methylcytidine-3'-phosphate
  modified_base 5: mod_base = OTHER; note = 2'-O-methylguanosine-3'-phosphate
  modified_base 6: mod_base = OTHER; note = 2'-O-docosanyl-uridine-3'-phosphate
  modified_base 7: mod_base = OTHER; note = 2'-deoxy-2'-fluoroadenosine-3'-phosphate
  modified_base 8: mod_base = OTHER; note = 2'-O-methyladenosine-3'-phosphate
  modified_base 9: mod_base = OTHER; note = 2'-deoxy-2'-fluorocytidine-3'-phosphate
  modified_base 10: mod_base = OTHER; note = 2'-deoxy-2'-fluorouridine-3'-phosphate
  modified_base 11: mod_base = OTHER; note = 2'-deoxy-2'-fluoroguanosine-3'-phosphate
  modified_base 12: mod_base = OTHER; note = 2'-O-methylguanosine-3'-phosphate
  modified_base 13: mod_base = OTHER; note = 2'-O-methyluridine-3'-phosphate
  modified_base 14: mod_base = OTHER; note = 2'-O-methyluridine-3'-phosphate
  modified_base 15: mod_base = OTHER; note = 2'-O-methyluridine-3'-phosphate
  modified_base 16: mod_base = OTHER; note = 2'-O-methylcytidine-3'-phosphate
  modified_base 17: mod_base = OTHER; note = 2'-O-methyladenosine-3'-phosphate
  modified_base 18: mod_base = OTHER; note = 2'-O-methyluridine-3'-phosphate
  modified_base 19: mod_base = OTHER; note = 2'-O-methyluridine-3'-phosphorothioate
  modified_base 20: mod_base = OTHER; note = 2'-O-methyluridine-3'-phosphorothioate
  modified_base 21: mod_base = OTHER; note = 2'-O-methyladenosine
tctcgtaactggtttcattta

SEQ ID NO: 2053 - RNA, 21 nt, synthetic construct
  source 1..21: mol_type = other RNA
  modified_base 1: mod_base = OTHER; note = 2'-O-methyluridine-3'-phosphorothioate
  modified_base 2: mod_base = OTHER; note = 2'-O-methylguanosine-3'-phosphorothioate
  modified_base 3: mod_base = OTHER; note = 2'-O-methylcytidine-3'-phosphate
  modified_base 4: mod_base = OTHER; note = 2'-O-methyladenosine-3'-phosphate
  modified_base 5: mod_base = OTHER; note = 2'-O-methylcytidine-3'-phosphate
  modified_base 6: mod_base = OTHER; note = 2'-O-docosanyl-uridine-3'-phosphate
  modified_base 7: mod_base = OTHER; note = 2'-deoxy-2'-fluorouridine-3'-phosphate
  modified_base 8: mod_base = OTHER; note = 2'-O-methyluridine-3'-phosphate
  modified_base 9: mod_base = OTHER; note = 2'-deoxy-2'-fluoroguanosine-3'-phosphate
  modified_base 10: mod_base = OTHER; note = 2'-deoxy-2'-fluorouridine-3'-phosphate
  modified_base 11: mod_base = OTHER; note = 2'-deoxy-2'-fluoroadenosine-3'-phosphate
  modified_base 12: mod_base = OTHER; note = 2'-O-methyladenosine-3'-phosphate
  modified_base 13: mod_base = OTHER; note = 2'-O-methylcytidine-3'-phosphate
  modified_base 14: mod_base = OTHER; note = 2'-O-methyladenosine-3'-phosphate
  modified_base 15: mod_base = OTHER; note = 2'-O-methyluridine-3'-phosphate
  modified_base 16: mod_base = OTHER; note = 2'-O-methylguanosine-3'-phosphate
  modified_base 17: mod_base = OTHER; note = 2'-O-methyluridine-3'-phosphate
  modified_base 18: mod_base = OTHER; note = 2'-O-methyluridine-3'-phosphate
  modified_base 19: mod_base = OTHER; note = 2'-O-methyluridine-3'-phosphorothioate
  modified_base 20: mod_base = OTHER; note = 2'-O-methyladenosine-3'-phosphorothioate
  modified_base 21: mod_base = OTHER; note = 2'-O-methyladenosine
tgcactttgtaacatgtttaa

SEQ ID NO: 2054 - RNA, 21 nt, synthetic construct
  source 1..21: mol_type = other RNA
  modified_base 1: mod_base = OTHER; note = 2'-O-methylcytidine-3'-phosphorothioate
  modified_base 2: mod_base = OTHER; note = 2'-O-methyluridine-3'-phosphorothioate
  modified_base 3: mod_base = OTHER; note = 2'-O-methylguanosine-3'-phosphate
  modified_base 4: mod_base = OTHER; note = 2'-O-methyluridine-3'-phosphate
  modified_base 5: mod_base = OTHER; note = 2'-O-methylcytidine-3'-phosphate
  modified_base 6: mod_base = OTHER; note = 2'-O-docosanyl-cytidine-3'-phosphate
  modified_base 7: mod_base = OTHER; note = 2'-deoxy-2'-fluoroadenosine-3'-phosphate
  modified_base 8: mod_base = OTHER; note = 2'-O-methyladenosine-3'-phosphate
  modified_base 9: mod_base = OTHER; note = 2'-deoxy-2'-fluoroguanosine-3'-phosphate
  modified_base 10: mod_base = OTHER; note = 2'-deoxy-2'-fluoroguanosine-3'-phosphate
  modified_base 11: mod_base = OTHER; note = 2'-deoxy-2'-fluoroadenosine-3'-phosphate
  modified_base 12: mod_base = OTHER; note = 2'-O-methyladenosine-3'-phosphate
  modified_base 13: mod_base = OTHER; note = 2'-O-methyladenosine-3'-phosphate
  modified_base 14: mod_base = OTHER; note = 2'-O-methylcytidine-3'-phosphate
  modified_base 15: mod_base = OTHER; note = 2'-O-methyluridine-3'-phosphate
  modified_base 16: mod_base = OTHER; note = 2'-O-methyluridine-3'-phosphate
  modified_base 17: mod_base = OTHER; note = 2'-O-methylguanosine-3'-phosphate
  modified_base 18: mod_base = OTHER; note = 2'-O-methyladenosine-3'-phosphate
  modified_base 19: mod_base = OTHER; note = 2'-O-methyladenosine-3'-phosphorothioate
  modified_base 20: mod_base = OTHER; note = 2'-O-methyluridine-3'-phosphorothioate
  modified_base 21: mod_base = OTHER; note = 2'-O-methyladenosine
ctgtccaaggaaacttgaata

SEQ ID NO: 2055 - RNA, 21 nt, synthetic construct
  source 1..21: mol_type = other RNA
  modified_base 1: mod_base = OTHER; note = 2'-O-methyluridine-3'-phosphorothioate
  modified_base 2: mod_base = OTHER; note = 2'-O-methylguanosine-3'-phosphorothioate
  modified_base 3: mod_base = OTHER; note = 2'-O-methyladenosine-3'-phosphate
  modified_base 4: mod_base = OTHER; note = 2'-O-methyladenosine-3'-phosphate
  modified_base 5: mod_base = OTHER; note = 2'-O-methylguanosine-3'-phosphate
  modified_base 6: mod_base = OTHER; note = 2'-O-docosanyl-adenosine-3'-phosphate
  modified_base 7: mod_base = OTHER; note = 2'-deoxy-2'-fluoroadenosine-3'-phosphate
  modified_base 8: mod_base = OTHER; note = 2'-O-methyladenosine-3'-phosphate
  modified_base 9: mod_base = OTHER; note = 2'-deoxy-2'-fluoroadenosine-3'-phosphate
  modified_base 10: mod_base = OTHER; note = 2'-deoxy-2'-fluorocytidine-3'-phosphate
  modified_base 11: mod_base = OTHER; note = 2'-deoxy-2'-fluorouridine-3'-phosphate
  modified_base 12: mod_base = OTHER; note = 2'-O-methylcytidine-3'-phosphate
  modified_base 13: mod_base = OTHER; note = 2'-O-methylcytidine-3'-phosphate
  modified_base 14: mod_base = OTHER; note = 2'-O-methyluridine-3'-phosphate
  modified_base 15: mod_base = OTHER; note = 2'-O-methyluridine-3'-phosphate
  modified_base 16: mod_base = OTHER; note = 2'-O-methyluridine-3'-phosphate
  modified_base 17: mod_base = OTHER; note = 2'-O-methyladenosine-3'-phosphate
  modified_base 18: mod_base = OTHER; note = 2'-O-methylguanosine-3'-phosphate
  modified_base 19: mod_base = OTHER; note = 2'-O-methylcytidine-3'-phosphorothioate
  modified_base 20: mod_base = OTHER; note = 2'-O-methyladenosine-3'-phosphorothioate
  modified_base 21: mod_base = OTHER; note = 2'-O-methyladenosine
tgaagaaaactcctttagcaa

SEQ ID NO: 2056 - RNA, 21 nt, synthetic construct
  source 1..21: mol_type = other RNA
  modified_base 1: mod_base = OTHER; note = 2'-O-methylguanosine-3'-phosphorothioate
  modified_base 2: mod_base = OTHER; note = 2'-O-methylguanosine-3'-phosphorothioate
  modified_base 3: mod_base = OTHER; note = 2'-O-methyladenosine-3'-phosphate
  modified_base 4: mod_base = OTHER; note = 2'-O-methylguanosine-3'-phosphate
  modified_base 5: mod_base = OTHER; note = 2'-O-methyluridine-3'-phosphate
  modified_base 6: mod_base = OTHER; note = 2'-O-docosanyl-guanosine-3'-phosphate
  modified_base 7: mod_base = OTHER; note = 2'-deoxy-2'-fluoroadenosine-3'-phosphate
  modified_base 8: mod_base = OTHER; note = 2'-O-methylguanosine-3'-phosphate
  modified_base 9: mod_base = OTHER; note = 2'-deoxy-2'-fluoroadenosine-3'-phosphate
  modified_base 10: mod_base = OTHER; note = 2'-deoxy-2'-fluorouridine-3'-phosphate
  modified_base 11: mod_base = OTHER; note = 2'-deoxy-2'-fluorocytidine-3'-phosphate
  modified_base 12: mod_base = OTHER; note = 2'-O-methyladenosine-3'-phosphate
  modified_base 13: mod_base = OTHER; note = 2'-O-methyluridine-3'-phosphate
  modified_base 14: mod_base = OTHER; note = 2'-O-methyluridine-3'-phosphate
  modified_base 15: mod_base = OTHER; note = 2'-O-methyluridine-3'-phosphate
  modified_base 16: mod_base = OTHER; note = 2'-O-methyluridine-3'-phosphate
  modified_base 17: mod_base = OTHER; note = 2'-O-methylcytidine-3'-phosphate
  modified_base 18: mod_base = OTHER; note = 2'-O-methyluridine-3'-phosphate
  modified_base 19: mod_base = OTHER; note = 2'-O-methyluridine-3'-phosphorothioate
  modified_base 20: mod_base = OTHER; note = 2'-O-methyladenosine-3'-phosphorothioate
  modified_base 21: mod_base = OTHER; note = 2'-O-methyladenosine
ggagtgagatcattttcttaa

SEQ ID NO: 2057 - RNA, 21 nt, synthetic construct
  source 1..21: mol_type = other RNA
  modified_base 1: mod_base = OTHER; note = 2'-O-methyluridine-3'-phosphorothioate
  modified_base 2: mod_base = OTHER; note = 2'-O-methyluridine-3'-phosphorothioate
  modified_base 3: mod_base = OTHER; note = 2'-O-methylguanosine-3'-phosphate
  modified_base 4: mod_base = OTHER; note = 2'-O-methyluridine-3'-phosphate
  modified_base 5: mod_base = OTHER; note = 2'-O-methylcytidine-3'-phosphate
  modified_base 6: mod_base = OTHER; note = 2'-O-docosanyl-uridine-3'-phosphate
  modified_base 7: mod_base = OTHER; note = 2'-deoxy-2'-fluoroguanosine-3'-phosphate
  modified_base 8: mod_base = OTHER; note = 2'-O-methyluridine-3'-phosphate
  modified_base 9: mod_base = OTHER; note = 2'-deoxy-2'-fluorouridine-3'-phosphate
  modified_base 10: mod_base = OTHER; note = 2'-deoxy-2'-fluorouridine-3'-phosphate
  modified_base 11: mod_base = OTHER; note = 2'-deoxy-2'-fluorouridine-3'-phosphate
  modified_base 12: mod_base = OTHER; note = 2'-O-methyluridine-3'-phosphate
  modified_base 13: mod_base = OTHER; note = 2'-O-methylguanosine-3'-phosphate
  modified_base 14: mod_base = OTHER; note = 2'-O-methyluridine-3'-phosphate
  modified_base 15: mod_base = OTHER; note = 2'-O-methyladenosine-3'-phosphate
  modified_base 16: mod_base = OTHER; note = 2'-O-methyladenosine-3'-phosphate
  modified_base 17: mod_base = OTHER; note = 2'-O-methylcytidine-3'-phosphate
  modified_base 18: mod_base = OTHER; note = 2'-O-methyluridine-3'-phosphate
  modified_base 19: mod_base = OTHER; note = 2'-O-methyluridine-3'-phosphorothioate
  modified_base 20: mod_base = OTHER; note = 2'-O-methyladenosine-3'-phosphorothioate
  modified_base 21: mod_base = OTHER; note = 2'-O-methyladenosine
ttgtctgtttttgtaacttaa

SEQ ID NO: 2058 - RNA, 21 nt, synthetic construct
  source 1..21: mol_type = other RNA
  modified_base 1: mod_base = OTHER; note = 2'-O-methylguanosine-3'-phosphorothioate
  modified_base 2: mod_base = OTHER; note = 2'-O-methylcytidine-3'-phosphorothioate
  modified_base 3: mod_base = OTHER; note = 2'-O-methyladenosine-3'-phosphate
  modified_base 4: mod_base = OTHER; note = 2'-O-methyluridine-3'-phosphate
  modified_base 5: mod_base = OTHER; note = 2'-O-methylguanosine-3'-phosphate
  modified_base 6: mod_base = OTHER; note = 2'-O-docosanyl-cytidine-3'-phosphate
  modified_base 7: mod_base = OTHER; note = 2'-deoxy-2'-fluorocytidine-3'-phosphate
  modified_base 8: mod_base = OTHER; note = 2'-O-methyladenosine-3'-phosphate
  modified_base 9: mod_base = OTHER; note = 2'-deoxy-2'-fluoroadenosine-3'-phosphate
  modified_base 10: mod_base = OTHER; note = 2'-deoxy-2'-fluoroadenosine-3'-phosphate
  modified_base 11: mod_base = OTHER; note = 2'-deoxy-2'-fluorouridine-3'-phosphate
  modified_base 12: mod_base = OTHER; note = 2'-O-methyluridine-3'-phosphate
  modified_base 13: mod_base = OTHER; note = 2'-O-methylguanosine-3'-phosphate
  modified_base 14: mod_base = OTHER; note = 2'-O-methyluridine-3'-phosphate
  modified_base 15: mod_base = OTHER; note = 2'-O-methyladenosine-3'-phosphate
  modified_base 16: mod_base = OTHER; note = 2'-O-methylguanosine-3'-phosphate
  modified_base 17: mod_base = OTHER; note = 2'-O-methyluridine-3'-phosphate
  modified_base 18: mod_base = OTHER; note = 2'-O-methyluridine-3'-phosphate
  modified_base 19: mod_base = OTHER; note = 2'-O-methylcytidine-3'-phosphorothioate
  modified_base 20: mod_base = OTHER; note = 2'-O-methyluridine-3'-phosphorothioate
  modified_base 21: mod_base = OTHER; note = 2'-O-methyladenosine
gcatgccaaattgtagttcta

SEQ ID NO: 2059 - RNA, 21 nt, synthetic construct
  source 1..21: mol_type = other RNA
  modified_base 1: mod_base = OTHER; note = 2'-O-methyladenosine-3'-phosphorothioate
  modified_base 2: mod_base = OTHER; note = 2'-O-methyladenosine-3'-phosphorothioate
  modified_base 3: mod_base = OTHER; note = 2'-O-methylguanosine-3'-phosphate
  modified_base 4: mod_base = OTHER; note = 2'-O-methylguanosine-3'-phosphate
  modified_base 5: mod_base = OTHER; note = 2'-O-methylguanosine-3'-phosphate
  modified_base 6: mod_base = OTHER; note = 2'-O-docosanyl-uridine-3'-phosphate
  modified_base 7: mod_base = OTHER; note = 2'-deoxy-2'-fluoroadenosine-3'-phosphate
  modified_base 8: mod_base = OTHER; note = 2'-O-methyladenosine-3'-phosphate
  modified_base 9: mod_base = OTHER; note = 2'-deoxy-2'-fluoroadenosine-3'-phosphate
  modified_base 10: mod_base = OTHER; note = 2'-deoxy-2'-fluoroguanosine-3'-phosphate
  modified_base 11: mod_base = OTHER; note = 2'-deoxy-2'-fluoroadenosine-3'-phosphate
  modified_base 12: mod_base = OTHER; note = 2'-O-methyladenosine-3'-phosphate
  modified_base 13: mod_base = OTHER; note = 2'-O-methylguanosine-3'-phosphate
  modified_base 14: mod_base = OTHER; note = 2'-O-methyluridine-3'-phosphate
  modified_base 15: mod_base = OTHER; note = 2'-O-methyluridine-3'-phosphate
  modified_base 16: mod_base = OTHER; note = 2'-O-methyluridine-3'-phosphate
  modified_base 17: mod_base = OTHER; note = 2'-O-methylguanosine-3'-phosphate
  modified_base 18: mod_base = OTHER; note = 2'-O-methyladenosine-3'-phosphate
  modified_base 19: mod_base = OTHER; note = 2'-O-methyluridine-3'-phosphorothioate
  modified_base 20: mod_base = OTHER; note = 2'-O-methyladenosine-3'-phosphorothioate
  modified_base 21: mod_base = OTHER; note = 2'-O-methyladenosine
aagggtaaagaagtttgataa

SEQ ID NO: 2060 - RNA, 21 nt, synthetic construct
  source 1..21: mol_type = other RNA
  modified_base 1: mod_base = OTHER; note = 2'-O-methyluridine-3'-phosphorothioate
  modified_base 2: mod_base = OTHER; note = 2'-O-methyluridine-3'-phosphorothioate
  modified_base 3: mod_base = OTHER; note = 2'-O-methyladenosine-3'-phosphate
  modified_base 4: mod_base = OTHER; note = 2'-O-methylguanosine-3'-phosphate
  modified_base 5: mod_base = OTHER; note = 2'-O-methylguanosine-3'-phosphate
  modified_base 6: mod_base = OTHER; note = 2'-O-docosanyl-adenosine-3'-phosphate
  modified_base 7: mod_base = OTHER; note = 2'-deoxy-2'-fluorouridine-3'-phosphate
  modified_base 8: mod_base = OTHER; note = 2'-O-methylguanosine-3'-phosphate
  modified_base 9: mod_base = OTHER; note = 2'-deoxy-2'-fluorouridine-3'-phosphate
  modified_base 10: mod_base = OTHER; note = 2'-deoxy-2'-fluorouridine-3'-phosphate
  modified_base 11: mod_base = OTHER; note = 2'-deoxy-2'-fluorouridine-3'-phosphate
  modified_base 12: mod_base = OTHER; note = 2'-O-methyluridine-3'-phosphate
  modified_base 13: mod_base = OTHER; note = 2'-O-methyluridine-3'-phosphate
  modified_base 14: mod_base = OTHER; note = 2'-O-methylcytidine-3'-phosphate
  modified_base 15: mod_base = OTHER; note = 2'-O-methyladenosine-3'-phosphate
  modified_base 16: mod_base = OTHER; note = 2'-O-methyluridine-3'-phosphate
  modified_base 17: mod_base = OTHER; note = 2'-O-methylguanosine-3'-phosphate
  modified_base 18: mod_base = OTHER; note = 2'-O-methyladenosine-3'-phosphate
  modified_base 19: mod_base = OTHER; note = 2'-O-methyladenosine-3'-phosphorothioate
  modified_base 20: mod_base = OTHER; note = 2'-O-methyladenosine-3'-phosphorothioate
  modified_base 21: mod_base = OTHER; note = 2'-O-methyladenosine
ttaggatgtttttcatgaaaa

SEQ ID NO: 2061 - RNA, 21 nt, synthetic construct
  source 1..21: mol_type = other RNA
  modified_base 1: mod_base = OTHER; note = 2'-O-methylcytidine-3'-phosphorothioate
  modified_base 2: mod_base = OTHER; note = 2'-O-methylcytidine-3'-phosphorothioate
  modified_base 3: mod_base = OTHER; note = 2'-O-methyluridine-3'-phosphate
  modified_base 4: mod_base = OTHER; note = 2'-O-methylcytidine-3'-phosphate
  modified_base 5: mod_base = OTHER; note = 2'-O-methyladenosine-3'-phosphate
  modified_base 6: mod_base = OTHER; note = 2'-O-docosanyl-uridine-3'-phosphate
  modified_base 7: mod_base = OTHER; note = 2'-deoxy-2'-fluorocytidine-3'-phosphate
  modified_base 8: mod_base = OTHER; note = 2'-O-methyladenosine-3'-phosphate
  modified_base 9: mod_base = OTHER; note = 2'-deoxy-2'-fluoroadenosine-3'-phosphate
  modified_base 10: mod_base = OTHER; note = 2'-deoxy-2'-fluoroguanosine-3'-phosphate
  modified_base 11: mod_base = OTHER; note = 2'-deoxy-2'-fluoroadenosine-3'-phosphate
  modified_base 12: mod_base = OTHER; note = 2'-O-methylcytidine-3'-phosphate
  modified_base 13: mod_base = OTHER; note = 2'-O-methyladenosine-3'-phosphate
  modified_base 14: mod_base = OTHER; note = 2'-O-methyladenosine-3'-phosphate
  modified_base 15: mod_base = OTHER; note = 2'-O-methyluridine-3'-phosphate
  modified_base 16: mod_base = OTHER; note = 2'-O-methyluridine-3'-phosphate
  modified_base 17: mod_base = OTHER; note = 2'-O-methylguanosine-3'-phosphate
  modified_base 18: mod_base = OTHER; note = 2'-O-methyluridine-3'-phosphate
  modified_base 19: mod_base = OTHER; note = 2'-O-methylcytidine-3'-phosphorothioate
  modified_base 20: mod_base = OTHER; note = 2'-O-methyladenosine-3'-phosphorothioate
  modified_base 21: mod_base = OTHER; note = 2'-O-methyladenosine
cctcatcaagacaattgtcaa

SEQ ID NO: 2062 - RNA, 21 nt, synthetic construct
  source 1..21: mol_type = other RNA
  modified_base 1: mod_base = OTHER; note = 2'-O-methyluridine-3'-phosphorothioate
  modified_base 2: mod_base = OTHER; note = 2'-O-methylcytidine-3'-phosphorothioate
  modified_base 3: mod_base = OTHER; note = 2'-O-methyladenosine-3'-phosphate
  modified_base 4: mod_base = OTHER; note = 2'-O-methylcytidine-3'-phosphate
  modified_base 5: mod_base = OTHER; note = 2'-O-methyladenosine-3'-phosphate
  modified_base 6: mod_base = OTHER; note = 2'-O-docosanyl-uridine-3'-phosphate
  modified_base 7: mod_base = OTHER; note = 2'-deoxy-2'-fluorouridine-3'-phosphate
  modified_base 8: mod_base = OTHER; note = 2'-O-methylcytidine-3'-phosphate
  modified_base 9: mod_base = OTHER; note = 2'-deoxy-2'-fluoroadenosine-3'-phosphate
  modified_base 10: mod_base = OTHER; note = 2'-deoxy-2'-fluoroguanosine-3'-phosphate
  modified_base 11: mod_base = OTHER; note = 2'-deoxy-2'-fluoroguanosine-3'-phosphate
  modified_base 12: mod_base = OTHER; note = 2'-O-methyladenosine-3'-phosphate
  modified_base 13: mod_base = OTHER; note = 2'-O-methyladenosine-3'-phosphate
  modified_base 14: mod_base = OTHER; note = 2'-O-methylguanosine-3'-phosphate
  modified_base 15: mod_base = OTHER; note = 2'-O-methyladenosine-3'-phosphate
  modified_base 16: mod_base = OTHER; note = 2'-O-methyluridine-3'-phosphate
  modified_base 17: mod_base = OTHER; note = 2'-O-methylguanosine-3'-phosphate
  modified_base 18: mod_base = OTHER; note = 2'-O-methyladenosine-3'-phosphate
  modified_base 19: mod_base = OTHER; note = 2'-O-methyladenosine-3'-phosphorothioate
  modified_base 20: mod_base = OTHER; note = 2'-O-methyladenosine-3'-phosphorothioate
  modified_base 21: mod_base = OTHER; note = 2'-O-methyladenosine
tcacattcaggaagatgaaaa

SEQ ID NO: 2063 - RNA, 21 nt, synthetic construct
  source 1..21: mol_type = other RNA
  modified_base 1: mod_base = OTHER; note = 2'-O-methyluridine-3'-phosphorothioate
  modified_base 2: mod_base = OTHER; note = 2'-O-methyluridine-3'-phosphorothioate
  modified_base 3: mod_base = OTHER; note = 2'-O-methyluridine-3'-phosphate
  modified_base 4: mod_base = OTHER; note = 2'-O-methylguanosine-3'-phosphate
  modified_base 5: mod_base = OTHER; note = 2'-O-methyluridine-3'-phosphate
  modified_base 6: mod_base = OTHER; note = 2'-O-docosanyl-cytidine-3'-phosphate
  modified_base 7: mod_base = OTHER; note = 2'-deoxy-2'-fluoroadenosine-3'-phosphate
  modified_base 8: mod_base = OTHER; note = 2'-O-methyladenosine-3'-phosphate
  modified_base 9: mod_base = OTHER; note = 2'-deoxy-2'-fluoroguanosine-3'-phosphate
  modified_base 10: mod_base = OTHER; note = 2'-deoxy-2'-fluorouridine-3'-phosphate
  modified_base 11: mod_base = OTHER; note = 2'-deoxy-2'-fluoroguanosine-3'-phosphate
  modified_base 12: mod_base = OTHER; note = 2'-O-methyluridine-3'-phosphate
  modified_base 13: mod_base = OTHER; note = 2'-O-methylcytidine-3'-phosphate
  modified_base 14: mod_base = OTHER; note = 2'-O-methyladenosine-3'-phosphate
  modified_base 15: mod_base = OTHER; note = 2'-O-methyluridine-3'-phosphate
  modified_base 16: mod_base = OTHER; note = 2'-O-methyladenosine-3'-phosphate
  modified_base 17: mod_base = OTHER; note = 2'-O-methyluridine-3'-phosphate
  modified_base 18: mod_base = OTHER; note = 2'-O-methylguanosine-3'-phosphate
  modified_base 19: mod_base = OTHER; note = 2'-O-methyluridine-3'-phosphorothioate
  modified_base 20: mod_base = OTHER; note = 2'-O-methyladenosine-3'-phosphorothioate
  modified_base 21: mod_base = OTHER; note = 2'-O-methyladenosine
tttgtcaagtgtcatatgtaa

SEQ ID NO: 2064 - RNA, 21 nt, synthetic construct
  source 1..21: mol_type = other RNA
  modified_base 1: mod_base = OTHER; note = 2'-O-methylcytidine-3'-phosphorothioate
  modified_base 2: mod_base = OTHER; note = 2'-O-methylcytidine-3'-phosphorothioate
  modified_base 3: mod_base = OTHER; note = 2'-O-methyluridine-3'-phosphate
  modified_base 4: mod_base = OTHER; note = 2'-O-methyluridine-3'-phosphate
  modified_base 5: mod_base = OTHER; note = 2'-O-methyluridine-3'-phosphate
  modified_base 6: mod_base = OTHER; note = 2'-O-docosanyl-guanosine-3'-phosphate
  modified_base 7: mod_base = OTHER; note = 2'-deoxy-2'-fluoroadenosine-3'-phosphate
  modified_base 8: mod_base = OTHER; note = 2'-O-methyladenosine-3'-phosphate
  modified_base 9: mod_base = OTHER; note = 2'-deoxy-2'-fluoroadenosine-3'-phosphate
  modified_base 10: mod_base = OTHER; note = 2'-deoxy-2'-fluorocytidine-3'-phosphate
  modified_base 11: mod_base = OTHER; note = 2'-deoxy-2'-fluoroadenosine-3'-phosphate
  modified_base 12: mod_base = OTHER; note = 2'-O-methyladenosine-3'-phosphate
  modified_base 13: mod_base = OTHER; note = 2'-O-methylguanosine-3'-phosphate
  modified_base 14: mod_base = OTHER; note = 2'-O-methyladenosine-3'-phosphate
  modified_base 15: mod_base = OTHER; note = 2'-O-methyluridine-3'-phosphate
  modified_base 16: mod_base = OTHER; note = 2'-O-methyladenosine-3'-phosphate
  modified_base 17: mod_base = OTHER; note = 2'-O-methyladenosine-3'-phosphate
  modified_base 18: mod_base = OTHER; note = 2'-O-methylcytidine-3'-phosphate
  modified_base 19: mod_base = OTHER; note = 2'-O-methyluridine-3'-phosphorothioate
  modified_base 20: mod_base = OTHER; note = 2'-O-methylguanosine-3'-phosphorothioate
  modified_base 21: mod_base = OTHER; note = 2'-O-methyladenosine
cctttgaaacaagataactga

SEQ ID NO: 2065 - RNA, 21 nt, synthetic construct
  source 1..21: mol_type = other RNA
  modified_base 1: mod_base = OTHER; note = 2'-O-methylcytidine-3'-phosphorothioate
  modified_base 2: mod_base = OTHER; note = 2'-O-methyluridine-3'-phosphorothioate
  modified_base 3: mod_base = OTHER; note = 2'-O-methylcytidine-3'-phosphate
  modified_base 4: mod_base = OTHER; note = 2'-O-methylcytidine-3'-phosphate
  modified_base 5: mod_base = OTHER; note = 2'-O-methyluridine-3'-phosphate
  modified_base 6: mod_base = OTHER; note = 2'-O-docosanyl-uridine-3'-phosphate
  modified_base 7: mod_base = OTHER; note = 2'-deoxy-2'-fluorouridine-3'-phosphate
  modified_base 8: mod_base = OTHER; note = 2'-O-methyluridine-3'-phosphate
  modified_base 9: mod_base = OTHER; note = 2'-deoxy-2'-fluoroguanosine-3'-phosphate
  modified_base 10: mod_base = OTHER; note = 2'-deoxy-2'-fluorocytidine-3'-phosphate
  modified_base 11: mod_base = OTHER; note = 2'-deoxy-2'-fluorouridine-3'-phosphate
  modified_base 12: mod_base = OTHER; note = 2'-O-methyluridine-3'-phosphate
  modified_base 13: mod_base = OTHER; note = 2'-O-methylguanosine-3'-phosphate
  modified_base 14: mod_base = OTHER; note = 2'-O-methyladenosine-3'-phosphate
  modified_base 15: mod_base = OTHER; note = 2'-O-methyladenosine-3'-phosphate
  modified_base 16: mod_base = OTHER; note = 2'-O-methyladenosine-3'-phosphate
  modified_base 17: mod_base = OTHER; note = 2'-O-methylcytidine-3'-phosphate
  modified_base 18: mod_base = OTHER; note = 2'-O-methylcytidine-3'-phosphate
  modified_base 19: mod_base = OTHER; note = 2'-O-methyladenosine-3'-phosphorothioate
  modified_base 20: mod_base = OTHER; note = 2'-O-methyladenosine-3'-phosphorothioate
  modified_base 21: mod_base = OTHER; note = 2'-O-methyladenosine
ctccttttgcttgaaaccaaa

SEQ ID NO: 2066 - RNA, 21 nt, synthetic construct
  source 1..21: mol_type = other RNA
  modified_base 1: mod_base = OTHER; note = 2'-O-methylcytidine-3'-phosphorothioate
  modified_base 2: mod_base = OTHER; note = 2'-O-methyladenosine-3'-phosphorothioate
  modified_base 3: mod_base = OTHER; note = 2'-O-methylcytidine-3'-phosphate
  modified_base 4: mod_base = OTHER; note = 2'-O-methylcytidine-3'-phosphate
  modified_base 5: mod_base = OTHER; note = 2'-O-methyladenosine-3'-phosphate
  modified_base 6: mod_base = OTHER; note = 2'-O-docosanyl-guanosine-3'-phosphate
  modified_base 7: mod_base = OTHER; note = 2'-deoxy-2'-fluoroguanosine-3'-phosphate
  modified_base 8: mod_base = OTHER; note = 2'-O-methyladenosine-3'-phosphate
  modified_base 9: mod_base = OTHER; note = 2'-deoxy-2'-fluorouridine-3'-phosphate
  modified_base 10: mod_base = OTHER; note = 2'-deoxy-2'-fluorocytidine-3'-phosphate
  modified_base 11: mod_base = OTHER; note = 2'-deoxy-2'-fluoroadenosine-3'-phosphate
  modified_base 12: mod_base = OTHER; note = 2'-O-methyladenosine-3'-phosphate
  modified_base 13: mod_base = OTHER; note = 2'-O-methyluridine-3'-phosphate
  modified_base 14: mod_base = OTHER; note = 2'-O-methylguanosine-3'-phosphate
  modified_base 15: mod_base = OTHER; note = 2'-O-methyladenosine-3'-phosphate
  modified_base 16: mod_base = OTHER; note = 2'-O-methylcytidine-3'-phosphate
  modified_base 17: mod_base = OTHER; note = 2'-O-methyladenosine-3'-phosphate
  modified_base 18: mod_base = OTHER; note = 2'-O-methyluridine-3'-phosphate
  modified_base 19: mod_base = OTHER; note = 2'-O-methyluridine-3'-phosphorothioate
  modified_base 20: mod_base = OTHER; note = 2'-O-methyluridine-3'-phosphorothioate
  modified_base 21: mod_base = OTHER; note = 2'-O-methyladenosine
caccaggatcaatgacattta

SEQ ID NO: 2067 - RNA, 21 nt, synthetic construct
  source 1..21: mol_type = other RNA
  modified_base 1: mod_base = OTHER; note = 2'-O-methylcytidine-3'-phosphorothioate
  modified_base 2: mod_base = OTHER; note = 2'-O-methyluridine-3'-phosphorothioate
  modified_base 3: mod_base = OTHER; note = 2'-O-methyluridine-3'-phosphate
  modified_base 4: mod_base = OTHER; note = 2'-O-methylcytidine-3'-phosphate
  modified_base 5: mod_base = OTHER; note = 2'-O-methyladenosine-3'-phosphate
  modified_base 6: mod_base = OTHER; note = 2'-O-docosanyl-adenosine-3'-phosphate
  modified_base 7: mod_base = OTHER; note = 2'-deoxy-2'-fluoroadenosine-3'-phosphate
  modified_base 8: mod_base = OTHER; note = 2'-O-methyluridine-3'-phosphate
  modified_base 9: mod_base = OTHER; note = 2'-deoxy-2'-fluorocytidine-3'-phosphate
  modified_base 10: mod_base = OTHER; note = 2'-deoxy-2'-fluorocytidine-3'-phosphate
  modified_base 11: mod_base = OTHER; note = 2'-deoxy-2'-fluoroadenosine-3'-phosphate
  modified_base 12: mod_base = OTHER; note = 2'-O-methyluridine-3'-phosphate
  modified_base 13: mod_base = OTHER; note = 2'-O-methylcytidine-3'-phosphate
  modified_base 14: mod_base = OTHER; note = 2'-O-methylcytidine-3'-phosphate
  modified_base 15: mod_base = OTHER; note = 2'-O-methyladenosine-3'-phosphate
  modified_base 16: mod_base = OTHER; note = 2'-O-methylguanosine-3'-phosphate
  modified_base 17: mod_base = OTHER; note = 2'-O-methyladenosine-3'-phosphate
  modified_base 18: mod_base = OTHER; note = 2'-O-methyladenosine-3'-phosphate
  modified_base 19: mod_base = OTHER; note = 2'-O-methyluridine-3'-phosphorothioate
  modified_base 20: mod_base = OTHER; note = 2'-O-methyladenosine-3'-phosphorothioate
  modified_base 21: mod_base = OTHER; note = 2'-O-methyladenosine
cttcaaatccatccagaataa

SEQ ID NO: 2068 - RNA, 21 nt, synthetic construct
  source 1..21: mol_type = other RNA
  modified_base 1: mod_base = OTHER; note = 2'-O-methylguanosine-3'-phosphorothioate
  modified_base 2: mod_base = OTHER; note = 2'-O-methylguanosine-3'-phosphorothioate
  modified_base 3: mod_base = OTHER; note = 2'-O-methylguanosine-3'-phosphate
  modified_base 4: mod_base = OTHER; note = 2'-O-methylcytidine-3'-phosphate
  modified_base 5: mod_base = OTHER; note = 2'-O-methyluridine-3'-phosphate
  modified_base 6: mod_base = OTHER; note = 2'-O-docosanyl-guanosine-3'-phosphate
  modified_base 7: mod_base = OTHER; note = 2'-deoxy-2'-fluoroadenosine-3'-phosphate
  modified_base 8: mod_base = OTHER; note = 2'-O-methyladenosine-3'-phosphate
  modified_base 9: mod_base = OTHER; note = 2'-deoxy-2'-fluoroadenosine-3'-phosphate
  modified_base 10: mod_base = OTHER; note = 2'-deoxy-2'-fluoroguanosine-3'-phosphate
  modified_base 11: mod_base = OTHER; note = 2'-deoxy-2'-fluorocytidine-3'-phosphate
  modified_base 12: mod_base = OTHER; note = 2'-O-methylcytidine-3'-phosphate
  modified_base 13: mod_base = OTHER; note = 2'-O-methyladenosine-3'-phosphate
  modified_base 14: mod_base = OTHER; note = 2'-O-methyluridine-3'-phosphate
  modified_base 15: mod_base = OTHER; note = 2'-O-methyluridine-3'-phosphate
  modified_base 16: mod_base = OTHER; note = 2'-O-methyluridine-3'-phosphate
  modified_base 17: mod_base = OTHER; note = 2'-O-methylguanosine-3'-phosphate
  modified_base 18: mod_base = OTHER; note = 2'-O-methyluridine-3'-phosphate
  modified_base 19: mod_base = OTHER; note = 2'-O-methyluridine-3'-phosphorothioate
  modified_base 20: mod_base = OTHER; note = 2'-O-methylguanosine-3'-phosphorothioate
  modified_base 21: mod_base = OTHER; note = 2'-O-methyladenosine
gggctgaaagccatttgttga

SEQ ID NO: 2069 - RNA, 21 nt, synthetic construct
  source 1..21: mol_type = other RNA
  modified_base 1: mod_base = OTHER; note = 2'-O-methylguanosine-3'-phosphorothioate
  modified_base 2: mod_base = OTHER; note = 2'-O-methyladenosine-3'-phosphorothioate
  modified_base 3: mod_base = OTHER; note = 2'-O-methylguanosine-3'-phosphate
  modified_base 4: mod_base = OTHER; note = 2'-O-methylcytidine-3'-phosphate
  modified_base 5: mod_base = OTHER; note = 2'-O-methyluridine-3'-phosphate
  modified_base 6: mod_base = OTHER; note = 2'-O-docosanyl-guanosine-3'-phosphate
  modified_base 7: mod_base = OTHER; note = 2'-deoxy-2'-fluoroadenosine-3'-phosphate
  modified_base 8: mod_base = OTHER; note = 2'-O-methyladenosine-3'-phosphate
  modified_base 9: mod_base = OTHER; note = 2'-deoxy-2'-fluorocytidine-3'-phosphate
  modified_base 10: mod_base = OTHER; note = 2'-deoxy-2'-fluorocytidine-3'-phosphate
  modified_base 11: mod_base = OTHER; note = 2'-deoxy-2'-fluorocytidine-3'-phosphate
  modified_base 12: mod_base = OTHER; note = 2'-O-methyladenosine-3'-phosphate
  modified_base 13: mod_base = OTHER; note = 2'-O-methyluridine-3'-phosphate
  modified_base 14: mod_base = OTHER; note = 2'-O-methyluridine-3'-phosphate
  modified_base 15: mod_base = OTHER; note = 2'-O-methyluridine-3'-phosphate
  modified_base 16: mod_base = OTHER; note = 2'-O-methyluridine-3'-phosphate
  modified_base 17: mod_base = OTHER; note = 2'-O-methylguanosine-3'-phosphate
  modified_base 18: mod_base = OTHER; note = 2'-O-methyladenosine-3'-phosphate
  modified_base 19: mod_base = OTHER; note = 2'-O-methylguanosine-3'-phosphorothioate
  modified_base 20: mod_base = OTHER; note = 2'-O-methyluridine-3'-phosphorothioate
  modified_base 21: mod_base = OTHER; note = 2'-O-methyladenosine
gagctgaacccattttgagta

SEQ ID NO: 2070 - RNA, 21 nt, synthetic construct
  source 1..21: mol_type = other RNA
  modified_base 1: mod_base = OTHER; note = 2'-O-methylguanosine-3'-phosphorothioate
  modified_base 2: mod_base = OTHER; note = 2'-O-methylcytidine-3'-phosphorothioate
  modified_base 3: mod_base = OTHER; note = 2'-O-methyluridine-3'-phosphate
  modified_base 4: mod_base = OTHER; note = 2'-O-methylguanosine-3'-phosphate
  modified_base 5: mod_base = OTHER; note = 2'-O-methyluridine-3'-phosphate
  modified_base 6: mod_base = OTHER; note = 2'-O-docosanyl-guanosine-3'-phosphate
  modified_base 7: mod_base = OTHER; note = 2'-deoxy-2'-fluorouridine-3'-phosphate
  modified_base 8: mod_base = OTHER; note = 2'-O-methyluridine-3'-phosphate
  modified_base 9: mod_base = OTHER; note = 2'-deoxy-2'-fluorouridine-3'-phosphate
  modified_base 10: mod_base = OTHER; note = 2'-deoxy-2'-fluorouridine-3'-phosphate
  modified_base 11: mod_base = OTHER; note = 2'-deoxy-2'-fluorouridine-3'-phosphate
  modified_base 12: mod_base = OTHER; note = 2'-O-methylguanosine-3'-phosphate
  modified_base 13: mod_base = OTHER; note = 2'-O-methylcytidine-3'-phosphate
  modified_base 14: mod_base = OTHER; note = 2'-O-methyluridine-3'-phosphate
  modified_base 15: mod_base = OTHER; note = 2'-O-methyladenosine-3'-phosphate
  modified_base 16: mod_base = OTHER; note = 2'-O-methyluridine-3'-phosphate
  modified_base 17: mod_base = OTHER; note = 2'-O-methylcytidine-3'-phosphate
  modified_base 18: mod_base = OTHER; note = 2'-O-methyladenosine-3'-phosphate
  modified_base 19: mod_base = OTHER; note = 2'-O-methylcytidine-3'-phosphorothioate
  modified_base 20: mod_base = OTHER; note = 2'-O-methyladenosine-3'-phosphorothioate
  modified_base 21: mod_base = OTHER; note = 2'-O-methyladenosine
gctgtgtttttgctatcacaa

SEQ ID NO: 2071 - RNA, 21 nt, synthetic construct
  source 1..21: mol_type = other RNA
  modified_base 1: mod_base = OTHER; note = 2'-O-methyladenosine-3'-phosphorothioate
  modified_base 2: mod_base = OTHER; note = 2'-O-methyluridine-3'-phosphorothioate
  modified_base 3: mod_base = OTHER; note = 2'-O-methylcytidine-3'-phosphate
  modified_base 4: mod_base = OTHER; note = 2'-O-methylcytidine-3'-phosphate
  modified_base 5: mod_base = OTHER; note = 2'-O-methyladenosine-3'-phosphate
  modified_base 6: mod_base = OTHER; note = 2'-O-docosanyl-guanosine-3'-phosphate
  modified_base 7: mod_base = OTHER; note = 2'-deoxy-2'-fluoroguanosine-3'-phosphate
  modified_base 8: mod_base = OTHER; note = 2'-O-methyladenosine-3'-phosphate
  modified_base 9: mod_base = OTHER; note = 2'-deoxy-2'-fluorocytidine-3'-phosphate
  modified_base 10: mod_base = OTHER; note = 2'-deoxy-2'-fluorouridine-3'-phosphate
  modified_base 11: mod_base = OTHER; note = 2'-deoxy-2'-fluorocytidine-3'-phosphate
  modified_base 12: mod_base = OTHER; note = 2'-O-methyluridine-3'-phosphate
  modified_base 13: mod_base = OTHER; note = 2'-O-methylguanosine-3'-phosphate
  modified_base 14: mod_base = OTHER; note = 2'-O-methyluridine-3'-phosphate
  modified_base 15: mod_base = OTHER; note = 2'-O-methylcytidine-3'-phosphate
  modified_base 16: mod_base = OTHER; note = 2'-O-methyladenosine-3'-phosphate
  modified_base 17: mod_base = OTHER; note = 2'-O-methyladenosine-3'-phosphate
  modified_base 18: mod_base = OTHER; note = 2'-O-methyluridine-3'-phosphate
  modified_base 19: mod_base = OTHER; note = 2'-O-methyluridine-3'-phosphorothioate
  modified_base 20: mod_base = OTHER; note = 2'-O-methyluridine-3'-phosphorothioate
  modified_base 21: mod_base = OTHER; note = 2'-O-methyladenosine
atccaggactctgtcaattta

SEQ ID NO: 2072 - RNA, 21 nt, synthetic construct
  source 1..21: mol_type = other RNA
  modified_base 1: mod_base = OTHER; note = 2'-O-methyluridine-3'-phosphorothioate
  modified_base 2: mod_base = OTHER; note = 2'-O-methyluridine-3'-phosphorothioate
  modified_base 3: mod_base = OTHER; note = 2'-O-methylcytidine-3'-phosphate
  modified_base 4: mod_base = OTHER; note = 2'-O-methylcytidine-3'-phosphate
  modified_base 5: mod_base = OTHER; note = 2'-O-methyladenosine-3'-phosphate
  modified_base 6: mod_base = OTHER; note = 2'-O-docosanyl-guanosine-3'-phosphate
  modified_base 7: mod_base = OTHER; note = 2'-deoxy-2'-fluoroadenosine-3'-phosphate
  modified_base 8: mod_base = OTHER; note = 2'-O-methyladenosine-3'-phosphate
  modified_base 9: mod_base = OTHER; note = 2'-deoxy-2'-fluoroadenosine-3'-phosphate
  modified_base 10: mod_base = OTHER; note = 2'-deoxy-2'-fluorocytidine-3'-phosphate
  modified_base 11: mod_base = OTHER; note = 2'-deoxy-2'-fluoroguanosine-3'-phosphate
  modified_base 12: mod_base = OTHER; note = 2'-O-methyluridine-3'-phosphate
  modified_base 13: mod_base = OTHER; note = 2'-O-methylguanosine-3'-phosphate
  modified_base 14: mod_base = OTHER; note = 2'-O-methyladenosine-3'-phosphate
  modified_base 15: mod_base = OTHER; note = 2'-O-methyluridine-3'-phosphate
  modified_base 16: mod_base = OTHER; note = 2'-O-methylcytidine-3'-phosphate
  modified_base 17: mod_base = OTHER; note = 2'-O-methylcytidine-3'-phosphate
  modified_base 18: mod_base = OTHER; note = 2'-O-methyladenosine-3'-phosphate
  modified_base 19: mod_base = OTHER; note = 2'-O-methyladenosine-3'-phosphorothioate
  modified_base 20: mod_base = OTHER; note = 2'-O-methyladenosine-3'-phosphorothioate
  modified_base 21: mod_base = OTHER; note = 2'-O-methyladenosine
ttccagaaacgtgatccaaaa

SEQ ID NO: 2073 - RNA, 21 nt, synthetic construct
  source 1..21: mol_type = other RNA
  modified_base 1: mod_base = OTHER; note = 2'-O-methylcytidine-3'-phosphorothioate
  modified_base 2: mod_base = OTHER; note = 2'-O-methyladenosine-3'-phosphorothioate
  modified_base 3: mod_base = OTHER; note = 2'-O-methyluridine-3'-phosphate
  modified_base 4: mod_base = OTHER; note = 2'-O-methylguanosine-3'-phosphate
  modified_base 5: mod_base = OTHER; note = 2'-O-methylguanosine-3'-phosphate
  modified_base 6: mod_base = OTHER; note = 2'-O-docosanyl-cytidine-3'-phosphate
  modified_base 7: mod_base = OTHER; note = 2'-deoxy-2'-fluoroadenosine-3'-phosphate
  modified_base 8: mod_base = OTHER; note = 2'-O-methylguanosine-3'-phosphate
  modified_base 9: mod_base = OTHER; note = 2'-deoxy-2'-fluorouridine-3'-phosphate
  modified_base 10: mod_base = OTHER; note = 2'-deoxy-2'-fluoroguanosine-3'-phosphate
  modified_base 11: mod_base = OTHER; note = 2'-deoxy-2'-fluorouridine-3'-phosphate
  modified_base 12: mod_base = OTHER; note = 2'-O-methyluridine-3'-phosphate
  modified_base 13: mod_base = OTHER; note = 2'-O-methylcytidine-3'-phosphate
  modified_base 14: mod_base = OTHER; note = 2'-O-methylcytidine-3'-phosphate
  modified_base 15: mod_base = OTHER; note = 2'-O-methyluridine-3'-phosphate
  modified_base 16: mod_base = OTHER; note = 2'-O-methyladenosine-3'-phosphate
  modified_base 17: mod_base = OTHER; note = 2'-O-methyluridine-3'-phosphate
  modified_base 18: mod_base = OTHER; note = 2'-O-methyluridine-3'-phosphate
  modified_base 19: mod_base = OTHER; note = 2'-O-methyluridine-3'-phosphorothioate
  modified_base 20: mod_base = OTHER; note = 2'-O-methylguanosine-3'-phosphorothioate
  modified_base 21: mod_base = OTHER; note = 2'-O-methyladenosine
catggcagtgttcctatttga

SEQ ID NO: 2074 - RNA, 21 nt, synthetic construct
  source 1..21: mol_type = other RNA
  modified_base 1: mod_base = OTHER; note = 2'-O-methyladenosine-3'-phosphorothioate
  modified_base 2: mod_base = OTHER; note = 2'-O-methyladenosine-3'-phosphorothioate
  modified_base 3: mod_base = OTHER; note = 2'-O-methylguanosine-3'-phosphate
  modified_base 4: mod_base = OTHER; note = 2'-O-methylcytidine-3'-phosphate
  modified_base 5: mod_base = OTHER; note = 2'-O-methylcytidine-3'-phosphate
  modified_base 6: mod_base = OTHER; note = 2'-O-docosanyl-uridine-3'-phosphate
  modified_base 7: mod_base = OTHER; note = 2'-deoxy-2'-fluorouridine-3'-phosphate
  modified_base 8: mod_base = OTHER; note = 2'-O-methyluridine-3'-phosphate
  modified_base 9: mod_base = OTHER; note = 2'-deoxy-2'-fluorouridine-3'-phosphate
  modified_base 10: mod_base = OTHER; note = 2'-deoxy-2'-fluoroguanosine-3'-phosphate
  modified_base 11: mod_base = OTHER; note = 2'-deoxy-2'-fluorocytidine-3'-phosphate
  modified_base 12: mod_base = OTHER; note = 2'-O-methyluridine-3'-phosphate
  modified_base 13: mod_base = OTHER; note = 2'-O-methylcytidine-3'-phosphate
  modified_base 14: mod_base = OTHER; note = 2'-O-methyladenosine-3'-phosphate
  modified_base 15: mod_base = OTHER; note = 2'-O-methylcytidine-3'-phosphate
  modified_base 16: mod_base = OTHER; note = 2'-O-methyladenosine-3'-phosphate
  modified_base 17: mod_base = OTHER; note = 2'-O-methyladenosine-3'-phosphate
  modified_base 18: mod_base = OTHER; note = 2'-O-methyladenosine-3'-phosphate
  modified_base 19: mod_base = OTHER; note = 2'-O-methyladenosine-3'-phosphorothioate
  modified_base 20: mod_base = OTHER; note = 2'-O-methylcytidine-3'-phosphorothioate
  modified_base 21: mod_base = OTHER; note = 2'-O-methyladenosine
aagccttttgctcacaaaaca

SEQ ID NO: 2075 - RNA, 21 nt, synthetic construct
  source 1..21: mol_type = other RNA
  modified_base 1: mod_base = OTHER; note = 2'-O-methylcytidine-3'-phosphorothioate
  modified_base 2: mod_base = OTHER; note = 2'-O-methyluridine-3'-phosphorothioate
  modified_base 3: mod_base = OTHER; note = 2'-O-methyladenosine-3'-phosphate
  modified_base 4: mod_base = OTHER; note = 2'-O-methylcytidine-3'-phosphate
  modified_base 5: mod_base = OTHER; note = 2'-O-methyluridine-3'-phosphate
  modified_base 6: mod_base = OTHER; note = 2'-O-docosanyl-guanosine-3'-phosphate
  modified_base 7: mod_base = OTHER; note = 2'-deoxy-2'-fluorouridine-3'-phosphate
  modified_base 8: mod_base = OTHER; note = 2'-O-methylguanosine-3'-phosphate
  modified_base 9: mod_base = OTHER; note = 2'-deoxy-2'-fluoroadenosine-3'-phosphate
  modified_base 10: mod_base = OTHER; note = 2'-deoxy-2'-fluorocytidine-3'-phosphate
  modified_base 11: mod_base = OTHER; note = 2'-deoxy-2'-fluorouridine-3'-phosphate
  modified_base 12: mod_base = OTHER; note = 2'-O-methylguanosine-3'-phosphate
  modified_base 13: mod_base = OTHER; note = 2'-O-methyladenosine-3'-phosphate
  modified_base 14: mod_base = OTHER; note = 2'-O-methyluridine-3'-phosphate
  modified_base 15: mod_base = OTHER; note = 2'-O-methylguanosine-3'-phosphate
  modified_base 16: mod_base = OTHER; note = 2'-O-methyluridine-3'-phosphate
  modified_base 17: mod_base = OTHER; note = 2'-O-methyluridine-3'-phosphate
  modified_base 18: mod_base = OTHER; note = 2'-O-methyladenosine-3'-phosphate
  modified_base 19: mod_base = OTHER; note = 2'-O-methylcytidine-3'-phosphorothioate
  modified_base 20: mod_base = OTHER; note = 2'-O-methyladenosine-3'-phosphorothioate
  modified_base 21: mod_base = OTHER; note = 2'-O-methyladenosine
ctactgtgactgatgttacaa

SEQ ID NO: 2076 - RNA, 21 nt, synthetic construct
  source 1..21: mol_type = other RNA
  modified_base 1: mod_base = OTHER; note = 2'-O-methyluridine-3'-phosphorothioate
  modified_base 2: mod_base = OTHER; note = 2'-O-methylguanosine-3'-phosphorothioate
  modified_base 3: mod_base = OTHER; note = 2'-O-methylguanosine-3'-phosphate
  modified_base 4: mod_base = OTHER; note = 2'-O-methyladenosine-3'-phosphate
  modified_base 5: mod_base = OTHER; note = 2'-O-methyladenosine-3'-phosphate
  modified_base 6: mod_base = OTHER; note = 2'-O-docosanyl-guanosine-3'-phosphate
  modified_base 7: mod_base = OTHER; note = 2'-deoxy-2'-fluorocytidine-3'-phosphate
  modified_base 8: mod_base = OTHER; note = 2'-O-methyladenosine-3'-phosphate
  modified_base 9: mod_base = OTHER; note = 2'-deoxy-2'-fluorocytidine-3'-phosphate
  modified_base 10: mod_base = OTHER; note = 2'-deoxy-2'-fluoroadenosine-3'-phosphate
  modified_base 11: mod_base = OTHER; note = 2'-deoxy-2'-fluorouridine-3'-phosphate
  modified_base 12: mod_base = OTHER; note = 2'-O-methylguanosine-3'-phosphate
  modified_base 13: mod_base = OTHER; note = 2'-O-methyluridine-3'-phosphate
  modified_base 14: mod_base = OTHER; note = 2'-O-methyluridine-3'-phosphate
  modified_base 15: mod_base = OTHER; note = 2'-O-methyluridine-3'-phosphate
  modified_base 16: mod_base = OTHER; note = 2'-O-methyladenosine-3'-phosphate
  modified_base 17: mod_base = OTHER; note = 2'-O-methyluridine-3'-phosphate
  modified_base 18: mod_base = OTHER; note = 2'-O-methyluridine-3'-phosphate
  modified_base 19: mod_base = OTHER; note = 2'-O-methyluridine-3'-phosphorothioate
  modified_base 20: mod_base = OTHER; note = 2'-O-methyladenosine-3'-phosphorothioate
  modified_base 21: mod_base = OTHER; note = 2'-O-methyladenosine
tggaagcacatgtttatttaa

SEQ ID NO: 2077 - RNA, 21 nt, synthetic construct
  source 1..21: mol_type = other RNA
  modified_base 1: mod_base = OTHER; note = 2'-O-methylguanosine-3'-phosphorothioate
  modified_base 2: mod_base = OTHER; note = 2'-O-methylcytidine-3'-phosphorothioate
  modified_base 3: mod_base = OTHER; note = 2'-O-methyladenosine-3'-phosphate
  modified_base 4: mod_base = OTHER; note = 2'-O-methyluridine-3'-phosphate
  modified_base 5: mod_base = OTHER; note = 2'-O-methylcytidine-3'-phosphate
  modified_base 6: mod_base = OTHER; note = 2'-O-docosanyl-uridine-3'-phosphate
  modified_base 7: mod_base = OTHER; note = 2'-deoxy-2'-fluorouridine-3'-phosphate
  modified_base 8: mod_base = OTHER; note = 2'-O-methyladenosine-3'-phosphate
  modified_base 9: mod_base = OTHER; note = 2'-deoxy-2'-fluoroguanosine-3'-phosphate
  modified_base 10: mod_base = OTHER; note = 2'-deoxy-2'-fluorocytidine-3'-phosphate
  modified_base 11: mod_base = OTHER; note = 2'-deoxy-2'-fluorouridine-3'-phosphate
  modified_base 12: mod_base = OTHER; note = 2'-O-methyluridine-3'-phosphate
  modified_base 13: mod_base = OTHER; note = 2'-O-methylcytidine-3'-phosphate
  modified_base 14: mod_base = OTHER; note = 2'-O-methyluridine-3'-phosphate
  modified_base 15: mod_base = OTHER; note = 2'-O-methyladenosine-3'-phosphate
  modified_base 16: mod_base = OTHER; note = 2'-O-methyluridine-3'-phosphate
  modified_base 17: mod_base = OTHER; note = 2'-O-methyluridine-3'-phosphate
  modified_base 18: mod_base = OTHER; note = 2'-O-methyladenosine-3'-phosphate
  modified_base 19: mod_base = OTHER; note = 2'-O-methyluridine-3'-phosphorothioate
  modified_base 20: mod_base = OTHER; note = 2'-O-methyladenosine-3'-phosphorothioate
  modified_base 21: mod_base = OTHER; note = 2'-O-methyladenosine
gcatcttagcttctattataa

SEQ ID NO: 2078 - RNA, 21 nt, synthetic construct
  source 1..21: mol_type = other RNA
  modified_base 1: mod_base = OTHER; note = 2'-O-methyluridine-3'-phosphorothioate
  modified_base 2: mod_base = OTHER; note = 2'-O-methyluridine-3'-phosphorothioate
  modified_base 3: mod_base = OTHER; note = 2'-O-methylcytidine-3'-phosphate
  modified_base 4: mod_base = OTHER; note = 2'-O-methyladenosine-3'-phosphate
  modified_base 5: mod_base = OTHER; note = 2'-O-methylguanosine-3'-phosphate
  modified_base 6: mod_base = OTHER; note = 2'-O-docosanyl-cytidine-3'-phosphate
  modified_base 7: mod_base = OTHER; note = 2'-deoxy-2'-fluorocytidine-3'-phosphate
  modified_base 8: mod_base = OTHER; note = 2'-O-methyladenosine-3'-phosphate
  modified_base 9: mod_base = OTHER; note = 2'-deoxy-2'-fluorouridine-3'-phosphate
  modified_base 10: mod_base = OTHER; note = 2'-deoxy-2'-fluorocytidine-3'-phosphate
  modified_base 11: mod_base = OTHER; note = 2'-deoxy-2'-fluoroadenosine-3'-phosphate
  modified_base 12: mod_base = OTHER; note = 2'-O-methyladenosine-3'-phosphate
  modified_base 13: mod_base = OTHER; note = 2'-O-methylcytidine-3'-phosphate
  modified_base 14: mod_base = OTHER; note = 2'-O-methyladenosine-3'-phosphate
  modified_base 15: mod_base = OTHER; note = 2'-O-methyladenosine-3'-phosphate
  modified_base 16: mod_base = OTHER; note = 2'-O-methylguanosine-3'-phosphate
  modified_base 17: mod_base = OTHER; note = 2'-O-methyladenosine-3'-phosphate
  modified_base 18: mod_base = OTHER; note = 2'-O-methylguanosine-3'-phosphate
  modified_base 19: mod_base = OTHER; note = 2'-O-methyluridine-3'-phosphorothioate
  modified_base 20: mod_base = OTHER; note = 2'-O-methyluridine-3'-phosphorothioate
  modified_base 21: mod_base = OTHER; note = 2'-O-methyladenosine
ttcagccatcaacaagagtta

SEQ ID NO: 2079 - RNA, 21 nt, synthetic construct
  source 1..21: mol_type = other RNA
  modified_base 1: mod_base = OTHER; note = 2'-O-methyladenosine-3'-phosphorothioate
  modified_base 2: mod_base = OTHER; note = 2'-O-methylguanosine-3'-phosphorothioate
  modified_base 3: mod_base = OTHER; note = 2'-O-methylcytidine-3'-phosphate
  modified_base 4: mod_base = OTHER; note = 2'-O-methyluridine-3'-phosphate
  modified_base 5: mod_base = OTHER; note = 2'-O-methylcytidine-3'-phosphate
  modified_base 6: mod_base = OTHER; note = 2'-O-docosanyl-adenosine-3'-phosphate
  modified_base 7: mod_base = OTHER; note = 2'-deoxy-2'-fluorocytidine-3'-phosphate
  modified_base 8: mod_base = OTHER; note = 2'-O-methylcytidine-3'-phosphate
  modified_base 9: mod_base = OTHER; note = 2'-deoxy-2'-fluorocytidine-3'-phosphate
  modified_base 10: mod_base = OTHER; note = 2'-deoxy-2'-fluoroadenosine-3'-phosphate
  modified_base 11: mod_base = OTHER; note = 2'-deoxy-2'-fluoroadenosine-3'-phosphate
  modified_base 12: mod_base = OTHER; note = 2'-O-methyluridine-3'-phosphate
  modified_base 13: mod_base = OTHER; note = 2'-O-methyladenosine-3'-phosphate
  modified_base 14: mod_base = OTHER; note = 2'-O-methyladenosine-3'-phosphate
  modified_base 15: mod_base = OTHER; note = 2'-O-methyladenosine-3'-phosphate
  modified_base 16: mod_base = OTHER; note = 2'-O-methylcytidine-3'-phosphate
  modified_base 17: mod_base = OTHER; note = 2'-O-methyladenosine-3'-phosphate
  modified_base 18: mod_base = OTHER; note = 2'-O-methyluridine-3'-phosphate
  modified_base 19: mod_base = OTHER; note = 2'-O-methyluridine-3'-phosphorothioate
  modified_base 20: mod_base = OTHER; note = 2'-O-methyladenosine-3'-phosphorothioate
  modified_base 21: mod_base = OTHER; note = 2'-O-methyladenosine
agctcacccaataaacattaa

SEQ ID NO: 2080 - RNA, 21 nt, synthetic construct
  source 1..21: mol_type = other RNA
  modified_base 1: mod_base = OTHER; note = 2'-O-methyluridine-3'-phosphorothioate
  modified_base 2: mod_base = OTHER; note = 2'-O-methylguanosine-3'-phosphorothioate
  modified_base 3: mod_base = OTHER; note = 2'-O-methylguanosine-3'-phosphate
  modified_base 4: mod_base = OTHER; note = 2'-O-methylcytidine-3'-phosphate
  modified_base 5: mod_base = OTHER; note = 2'-O-methylcytidine-3'-phosphate
  modified_base 6: mod_base = OTHER; note = 2'-O-docosanyl-cytidine-3'-phosphate
  modified_base 7: mod_base = OTHER; note = 2'-deoxy-2'-fluorouridine-3'-phosphate
  modified_base 8: mod_base = OTHER; note = 2'-O-methyladenosine-3'-phosphate
  modified_base 9: mod_base = OTHER; note = 2'-deoxy-2'-fluorouridine-3'-phosphate
  modified_base 10: mod_base = OTHER; note = 2'-deoxy-2'-fluorocytidine-3'-phosphate
  modified_base 11: mod_base = OTHER; note = 2'-deoxy-2'-fluorouridine-3'-phosphate
  modified_base 12: mod_base = OTHER; note = 2'-O-methyluridine-3'-phosphate
  modified_base 13: mod_base = OTHER; note = 2'-O-methyluridine-3'-phosphate
  modified_base 14: mod_base = OTHER; note = 2'-O-methyluridine-3'-phosphate
  modified_base 15: mod_base = OTHER; note = 2'-O-methylcytidine-3'-phosphate
  modified_base 16: mod_base = OTHER; note = 2'-O-methyluridine-3'-phosphate
  modified_base 17: mod_base = OTHER; note = 2'-O-methyladenosine-3'-phosphate
  modified_base 18: mod_base = OTHER; note = 2'-O-methyluridine-3'-phosphate
  modified_base 19: mod_base = OTHER; note = 2'-O-methylguanosine-3'-phosphorothioate
  modified_base 20: mod_base = OTHER; note = 2'-O-methyluridine-3'-phosphorothioate
  modified_base 21: mod_base = OTHER; note = 2'-O-methyladenosine
tggccctatcttttctatgta

SEQ ID NO: 2081 - RNA, 21 nt, synthetic construct
  source 1..21: mol_type = other RNA
  modified_base 1: mod_base = OTHER; note = 2'-O-methylguanosine-3'-phosphorothioate
  modified_base 2: mod_base = OTHER; note = 2'-O-methyladenosine-3'-phosphorothioate
  modified_base 3: mod_base = OTHER; note = 2'-O-methyluridine-3'-phosphate
  modified_base 4: mod_base = OTHER; note = 2'-O-methylcytidine-3'-phosphate
  modified_base 5: mod_base = OTHER; note = 2'-O-methyladenosine-3'-phosphate
  modified_base 6: mod_base = OTHER; note = 2'-O-docosanyl-cytidine-3'-phosphate
  modified_base 7: mod_base = OTHER; note = 2'-deoxy-2'-fluoroadenosine-3'-phosphate
  modified_base 8: mod_base = OTHER; note = 2'-O-methylcytidine-3'-phosphate
  modified_base 9: mod_base = OTHER; note = 2'-deoxy-2'-fluorouridine-3'-phosphate
  modified_base 10: mod_base = OTHER; note = 2'-deoxy-2'-fluorocytidine-3'-phosphate
  modified_base 11: mod_base = OTHER; note = 2'-deoxy-2'-fluorouridine-3'-phosphate
  modified_base 12: mod_base = OTHER; note = 2'-O-methylguanosine-3'-phosphate
  modified_base 13: mod_base = OTHER; note = 2'-O-methylguanosine-3'-phosphate
  modified_base 14: mod_base = OTHER; note = 2'-O-methylguanosine-3'-phosphate
  modified_base 15: mod_base = OTHER; note = 2'-O-methyluridine-3'-phosphate
  modified_base 16: mod_base = OTHER; note = 2'-O-methyluridine-3'-phosphate
  modified_base 17: mod_base = OTHER; note = 2'-O-methyluridine-3'-phosphate
  modified_base 18: mod_base = OTHER; note = 2'-O-methyladenosine-3'-phosphate
  modified_base 19: mod_base = OTHER; note = 2'-O-methyluridine-3'-phosphorothioate
  modified_base 20: mod_base = OTHER; note = 2'-O-methyluridine-3'-phosphorothioate
  modified_base 21: mod_base = OTHER; note = 2'-O-methyladenosine
gatcacactctgggtttatta

SEQ ID NO: 2082 - RNA, 21 nt, synthetic construct
  source 1..21: mol_type = other RNA
  modified_base 1: mod_base = OTHER; note = 2'-O-methyluridine-3'-phosphorothioate
  modified_base 2: mod_base = OTHER; note = 2'-O-methylcytidine-3'-phosphorothioate
  modified_base 3: mod_base = OTHER; note = 2'-O-methyladenosine-3'-phosphate
  modified_base 4: mod_base = OTHER; note = 2'-O-methylcytidine-3'-phosphate
  modified_base 5: mod_base = OTHER; note = 2'-O-methylcytidine-3'-phosphate
  modified_base 6: mod_base = OTHER; note = 2'-O-docosanyl-guanosine-3'-phosphate
  modified_base 7: mod_base = OTHER; note = 2'-deoxy-2'-fluoroguanosine-3'-phosphate
  modified_base 8: mod_base = OTHER; note = 2'-O-methyluridine-3'-phosphate
  modified_base 9: mod_base = OTHER; note = 2'-deoxy-2'-fluorouridine-3'-phosphate
  modified_base 10: mod_base = OTHER; note = 2'-deoxy-2'-fluorouridine-3'-phosphate
  modified_base 11: mod_base = OTHER; note = 2'-deoxy-2'-fluoroguanosine-3'-phosphate
  modified_base 12: mod_base = OTHER; note = 2'-O-methylguanosine-3'-phosphate
  modified_base 13: mod_base = OTHER; note = 2'-O-methyladenosine-3'-phosphate
  modified_base 14: mod_base = OTHER; note = 2'-O-methylcytidine-3'-phosphate
  modified_base 15: mod_base = OTHER; note = 2'-O-methyluridine-3'-phosphate
  modified_base 16: mod_base = OTHER; note = 2'-O-methyluridine-3'-phosphate
  modified_base 17: mod_base = OTHER; note = 2'-O-methylcytidine-3'-phosphate
  modified_base 18: mod_base = OTHER; note = 2'-O-methyladenosine-3'-phosphate
  modified_base 19: mod_base = OTHER; note = 2'-O-methyluridine-3'-phosphorothioate
  modified_base 20: mod_base = OTHER; note = 2'-O-methyluridine-3'-phosphorothioate
  modified_base 21: mod_base = OTHER; note = 2'-O-methyladenosine
tcaccggtttggacttcatta

SEQ ID NO: 2083 - RNA, 21 nt, synthetic construct
  source 1..21: mol_type = other RNA
  modified_base 1: mod_base = OTHER; note = 2'-O-methylguanosine-3'-phosphorothioate
  modified_base 2: mod_base = OTHER; note = 2'-O-methyladenosine-3'-phosphorothioate
  modified_base 3: mod_base = OTHER; note = 2'-O-methylguanosine-3'-phosphate
  modified_base 4: mod_base = OTHER; note = 2'-O-methylcytidine-3'-phosphate
  modified_base 5: mod_base = OTHER; note = 2'-O-methylguanosine-3'-phosphate
  modified_base 6: mod_base = OTHER; note = 2'-O-docosanyl-adenosine-3'-phosphate
  modified_base 7: mod_base = OTHER; note = 2'-deoxy-2'-fluoroguanosine-3'-phosphate
  modified_base 8: mod_base = OTHER; note = 2'-O-methyladenosine-3'-phosphate
  modified_base 9: mod_base = OTHER; note = 2'-deoxy-2'-fluorouridine-3'-phosphate
  modified_base 10: mod_base = OTHER; note = 2'-deoxy-2'-fluorouridine-3'-phosphate
  modified_base 11: mod_base = OTHER; note = 2'-deoxy-2'-fluorocytidine-3'-phosphate
  modified_base 12: mod_base = OTHER; note = 2'-O-methylcytidine-3'-phosphate
  modified_base 13: mod_base = OTHER; note = 2'-O-methylguanosine-3'-phosphate
  modified_base 14: mod_base = OTHER; note = 2'-O-methyluridine-3'-phosphate
  modified_base 15: mod_base = OTHER; note = 2'-O-methylcytidine-3'-phosphate
  modified_base 16: mod_base = OTHER; note = 2'-O-methyluridine-3'-phosphate
  modified_base 17: mod_base = OTHER; note = 2'-O-methyluridine-3'-phosphate
  modified_base 18: mod_base = OTHER; note = 2'-O-methyladenosine-3'-phosphate
  modified_base 19: mod_base = OTHER; note = 2'-O-methyladenosine-3'-phosphorothioate
  modified_base 20: mod_base = OTHER; note = 2'-O-methyladenosine-3'-phosphorothioate
  modified_base 21: mod_base = OTHER; note = 2'-O-methyladenosine
gagcgagattccgtcttaaaa

SEQ ID NO: 2084 - RNA, 21 nt, synthetic construct
  source 1..21: mol_type = other RNA
  modified_base 1: mod_base = OTHER; note = 2'-O-methyluridine-3'-phosphorothioate
  modified_base 2: mod_base = OTHER; note = 2'-O-methyluridine-3'-phosphorothioate
  modified_base 3: mod_base = OTHER; note = 2'-O-methyladenosine-3'-phosphate
  modified_base 4: mod_base = OTHER; note = 2'-O-methyluridine-3'-phosphate
  modified_base 5: mod_base = OTHER; note = 2'-O-methylcytidine-3'-phosphate
  modified_base 6: mod_base = OTHER; note = 2'-O-docosanyl-uridine-3'-phosphate
  modified_base 7: mod_base = OTHER; note = 2'-deoxy-2'-fluorouridine-3'-phosphate
  modified_base 8: mod_base = OTHER; note = 2'-O-methylcytidine-3'-phosphate
  modified_base 9: mod_base = OTHER; note = 2'-deoxy-2'-fluorouridine-3'-phosphate
  modified_base 10: mod_base = OTHER; note = 2'-deoxy-2'-fluoroguanosine-3'-phosphate
  modified_base 11: mod_base = OTHER; note = 2'-deoxy-2'-fluorocytidine-3'-phosphate
  modified_base 12: mod_base = OTHER; note = 2'-O-methyladenosine-3'-phosphate
  modified_base 13: mod_base = OTHER; note = 2'-O-methyladenosine-3'-phosphate
  modified_base 14: mod_base = OTHER; note = 2'-O-methyluridine-3'-phosphate
  modified_base 15: mod_base = OTHER; note = 2'-O-methyluridine-3'-phosphate
  modified_base 16: mod_base = OTHER; note = 2'-O-methylguanosine-3'-phosphate
  modified_base 17: mod_base = OTHER; note = 2'-O-methylcytidine-3'-phosphate
  modified_base 18: mod_base = OTHER; note = 2'-O-methyluridine-3'-phosphate
  modified_base 19: mod_base = OTHER; note = 2'-O-methyluridine-3'-phosphorothioate
  modified_base 20: mod_base = OTHER; note = 2'-O-methyladenosine-3'-phosphorothioate
  modified_base 21: mod_base = OTHER; note = 2'-O-methyladenosine
ttatcttctgcaattgcttaa

SEQ ID NO: 2085 - RNA, 21 nt, synthetic construct
  source 1..21: mol_type = other RNA
  modified_base 1: mod_base = OTHER; note = 2'-O-methylguanosine-3'-phosphorothioate
  modified_base 2: mod_base = OTHER; note = 2'-O-methyladenosine-3'-phosphorothioate
  modified_base 3: mod_base = OTHER; note = 2'-O-methylguanosine-3'-phosphate
  modified_base 4: mod_base = OTHER; note = 2'-O-methyluridine-3'-phosphate
  modified_base 5: mod_base = OTHER; note = 2'-O-methyladenosine-3'-phosphate
  modified_base 6: mod_base = OTHER; note = 2'-O-docosanyl-guanosine-3'-phosphate
  modified_base 7: mod_base = OTHER; note = 2'-deoxy-2'-fluorocytidine-3'-phosphate
  modified_base 8: mod_base = OTHER; note = 2'-O-methyladenosine-3'-phosphate
  modified_base 9: mod_base = OTHER; note = 2'-deoxy-2'-fluoroadenosine-3'-phosphate
  modified_base 10: mod_base = OTHER; note = 2'-deoxy-2'-fluoroguanosine-3'-phosphate
  modified_base 11: mod_base = OTHER; note = 2'-deoxy-2'-fluorouridine-3'-phosphate
  modified_base 12: mod_base = OTHER; note = 2'-O-methyluridine-3'-phosphate
  modified_base 13: mod_base = OTHER; note = 2'-O-methylcytidine-3'-phosphate
  modified_base 14: mod_base = OTHER; note = 2'-O-methyluridine-3'-phosphate
  modified_base 15: mod_base = OTHER; note = 2'-O-methyladenosine-3'-phosphate
  modified_base 16: mod_base = OTHER; note = 2'-O-methylguanosine-3'-phosphate
  modified_base 17: mod_base = OTHER; note = 2'-O-methyladenosine-3'-phosphate
  modified_base 18: mod_base = OTHER; note = 2'-O-methylguanosine-3'-phosphate
  modified_base 19: mod_base = OTHER; note = 2'-O-methyladenosine-3'-phosphorothioate
  modified_base 20: mod_base = OTHER; note = 2'-O-methyladenosine-3'-phosphorothioate
  modified_base 21: mod_base = OTHER; note = 2'-O-methyladenosine
gagtagcaagttctagagaaa

SEQ ID NO: 2086 - RNA, 21 nt, synthetic construct
  source 1..21: mol_type = other RNA
  modified_base 1: mod_base = OTHER; note = 2'-O-methylcytidine-3'-phosphorothioate
  modified_base 2: mod_base = OTHER; note = 2'-O-methylcytidine-3'-phosphorothioate
  modified_base 3: mod_base = OTHER; note = 2'-O-methyluridine-3'-phosphate
  modified_base 4: mod_base = OTHER; note = 2'-O-methylguanosine-3'-phosphate
  modified_base 5: mod_base = OTHER; note = 2'-O-methyluridine-3'-phosphate
  modified_base 6: mod_base = OTHER; note = 2'-O-docosanyl-uridine-3'-phosphate
  modified_base 7: mod_base = OTHER; note = 2'-deoxy-2'-fluorouridine-3'-phosphate
  modified_base 8: mod_base = OTHER; note = 2'-O-methyluridine-3'-phosphate
  modified_base 9: mod_base = OTHER; note = 2'-deoxy-2'-fluoroguanosine-3'-phosphate
  modified_base 10: mod_base = OTHER; note = 2'-deoxy-2'-fluorouridine-3'-phosphate
  modified_base 11: mod_base = OTHER; note = 2'-deoxy-2'-fluorouridine-3'-phosphate
  modified_base 12: mod_base = OTHER; note = 2'-O-methylguanosine-3'-phosphate
  modified_base 13: mod_base = OTHER; note = 2'-O-methylguanosine-3'-phosphate
  modified_base 14: mod_base = OTHER; note = 2'-O-methyladenosine-3'-phosphate
  modified_base 15: mod_base = OTHER; note = 2'-O-methyladenosine-3'-phosphate
  modified_base 16: mod_base = OTHER; note = 2'-O-methylguanosine-3'-phosphate
  modified_base 17: mod_base = OTHER; note = 2'-O-methylguanosine-3'-phosphate
  modified_base 18: mod_base = OTHER; note = 2'-O-methyluridine-3'-phosphate
  modified_base 19: mod_base = OTHER; note = 2'-O-methyluridine-3'-phosphorothioate
  modified_base 20: mod_base = OTHER; note = 2'-O-methyluridine-3'-phosphorothioate
  modified_base 21: mod_base = OTHER; note = 2'-O-methyladenosine
cctgttttgttggaaggttta

SEQ ID NO: 2087 - RNA, 21 nt, synthetic construct
  source 1..21: mol_type = other RNA
  modified_base 1: mod_base = OTHER; note = 2'-O-methyladenosine-3'-phosphorothioate
  modified_base 2: mod_base = OTHER; note = 2'-O-methylcytidine-3'-phosphorothioate
  modified_base 3: mod_base = OTHER; note = 2'-O-methyladenosine-3'-phosphate
  modified_base 4: mod_base = OTHER; note = 2'-O-methylguanosine-3'-phosphate
  modified_base 5: mod_base = OTHER; note = 2'-O-methylguanosine-3'-phosphate
  modified_base 6: mod_base = OTHER; note = 2'-O-docosanyl-adenosine-3'-phosphate
  modified_base 7: mod_base = OTHER; note = 2'-deoxy-2'-fluoroguanosine-3'-phosphate
  modified_base 8: mod_base = OTHER; note = 2'-O-methyladenosine-3'-phosphate
  modified_base 9: mod_base = OTHER; note = 2'-deoxy-2'-fluoroadenosine-3'-phosphate
  modified_base 10: mod_base = OTHER; note = 2'-deoxy-2'-fluorouridine-3'-phosphate
  modified_base 11: mod_base = OTHER; note = 2'-deoxy-2'-fluorocytidine-3'-phosphate
  modified_base 12: mod_base = OTHER; note = 2'-O-methylguanosine-3'-phosphate
  modified_base 13: mod_base = OTHER; note = 2'-O-methylcytidine-3'-phosphate
  modified_base 14: mod_base = OTHER; note = 2'-O-methyluridine-3'-phosphate
  modified_base 15: mod_base = OTHER; note = 2'-O-methyluridine-3'-phosphate
  modified_base 16: mod_base = OTHER; note = 2'-O-methyladenosine-3'-phosphate
  modified_base 17: mod_base = OTHER; note = 2'-O-methyladenosine-3'-phosphate
  modified_base 18: mod_base = OTHER; note = 2'-O-methyladenosine-3'-phosphate
  modified_base 19: mod_base = OTHER; note = 2'-O-methylcytidine-3'-phosphorothioate
  modified_base 20: mod_base = OTHER; note = 2'-O-methylcytidine-3'-phosphorothioate
  modified_base 21: mod_base = OTHER; note = 2'-O-methyladenosine
acaggagaatcgcttaaacca

SEQ ID NO: 2088 - RNA, 21 nt, synthetic construct
  source 1..21: mol_type = other RNA
  modified_base 1: mod_base = OTHER; note = 2'-O-methyladenosine-3'-phosphorothioate
  modified_base 2: mod_base = OTHER; note = 2'-O-methylcytidine-3'-phosphorothioate
  modified_base 3: mod_base = OTHER; note = 2'-O-methyluridine-3'-phosphate
  modified_base 4: mod_base = OTHER; note = 2'-O-methylcytidine-3'-phosphate
  modified_base 5: mod_base = OTHER; note = 2'-O-methyluridine-3'-phosphate
  modified_base 6: mod_base = OTHER; note = 2'-O-docosanyl-uridine-3'-phosphate
  modified_base 7: mod_base = OTHER; note = 2'-deoxy-2'-fluorocytidine-3'-phosphate
  modified_base 8: mod_base = OTHER; note = 2'-O-methylcytidine-3'-phosphate
  modified_base 9: mod_base = OTHER; note = 2'-deoxy-2'-fluoroadenosine-3'-phosphate
  modified_base 10: mod_base = OTHER; note = 2'-deoxy-2'-fluoroadenosine-3'-phosphate
  modified_base 11: mod_base = OTHER; note = 2'-deoxy-2'-fluoroadenosine-3'-phosphate
  modified_base 12: mod_base = OTHER; note = 2'-O-methylguanosine-3'-phosphate
  modified_base 13: mod_base = OTHER; note = 2'-O-methylguanosine-3'-phosphate
  modified_base 14: mod_base = OTHER; note = 2'-O-methylcytidine-3'-phosphate
  modified_base 15: mod_base = OTHER; note = 2'-O-methyladenosine-3'-phosphate
  modified_base 16: mod_base = OTHER; note = 2'-O-methyluridine-3'-phosphate
  modified_base 17: mod_base = OTHER; note = 2'-O-methyladenosine-3'-phosphate
  modified_base 18: mod_base = OTHER; note = 2'-O-methyladenosine-3'-phosphate
  modified_base 19: mod_base = OTHER; note = 2'-O-methylguanosine-3'-phosphorothioate
  modified_base 20: mod_base = OTHER; note = 2'-O-methyladenosine-3'-phosphorothioate
  modified_base 21: mod_base = OTHER; note = 2'-O-methyladenosine
actcttccaaaggcataagaa

SEQ ID NO: 2089 - RNA, 21 nt, synthetic construct
  source 1..21: mol_type = other RNA
  modified_base 1: mod_base = OTHER; note = 2'-O-methylguanosine-3'-phosphorothioate
  modified_base 2: mod_base = OTHER; note = 2'-O-methyladenosine-3'-phosphorothioate
  modified_base 3: mod_base = OTHER; note = 2'-O-methyluridine-3'-phosphate
  modified_base 4: mod_base = OTHER; note = 2'-O-methylguanosine-3'-phosphate
  modified_base 5: mod_base = OTHER; note = 2'-O-methylguanosine-3'-phosphate
  modified_base 6: mod_base = OTHER; note = 2'-O-docosanyl-adenosine-3'-phosphate
  modified_base 7: mod_base = OTHER; note = 2'-deoxy-2'-fluorouridine-3'-phosphate
  modified_base 8: mod_base = OTHER; note = 2'-O-methyluridine-3'-phosphate
  modified_base 9: mod_base = OTHER; note = 2'-deoxy-2'-fluorouridine-3'-phosphate
  modified_base 10: mod_base = OTHER; note = 2'-deoxy-2'-fluoroguanosine-3'-phosphate
  modified_base 11: mod_base = OTHER; note = 2'-deoxy-2'-fluoroadenosine-3'-phosphate
  modified_base 12: mod_base = OTHER; note = 2'-O-methyladenosine-3'-phosphate
  modified_base 13: mod_base = OTHER; note = 2'-O-methylguanosine-3'-phosphate
  modified_base 14: mod_base = OTHER; note = 2'-O-methylcytidine-3'-phosphate
  modified_base 15: mod_base = OTHER; note = 2'-O-methyladenosine-3'-phosphate
  modified_base 16: mod_base = OTHER; note = 2'-O-methyladenosine-3'-phosphate
  modified_base 17: mod_base = OTHER; note = 2'-O-methyladenosine-3'-phosphate
  modified_base 18: mod_base = OTHER; note = 2'-O-methylguanosine-3'-phosphate
  modified_base 19: mod_base = OTHER; note = 2'-O-methylcytidine-3'-phosphorothioate
  modified_base 20: mod_base = OTHER; note = 2'-O-methyladenosine-3'-phosphorothioate
  modified_base 21: mod_base = OTHER; note = 2'-O-methyladenosine
gatggatttgaagcaaagcaa

SEQ ID NO: 2090 - RNA, 21 nt, synthetic construct
  source 1..21: mol_type = other RNA
  modified_base 1: mod_base = OTHER; note = 2'-O-methylcytidine-3'-phosphorothioate
  modified_base 2: mod_base = OTHER; note = 2'-O-methyluridine-3'-phosphorothioate
  modified_base 3: mod_base = OTHER; note = 2'-O-methylcytidine-3'-phosphate
  modified_base 4: mod_base = OTHER; note = 2'-O-methylcytidine-3'-phosphate
  modified_base 5: mod_base = OTHER; note = 2'-O-methyluridine-3'-phosphate
  modified_base 6: mod_base = OTHER; note = 2'-O-docosanyl-cytidine-3'-phosphate
  modified_base 7: mod_base = OTHER; note = 2'-deoxy-2'-fluorocytidine-3'-phosphate
  modified_base 8: mod_base = OTHER; note = 2'-O-methyladenosine-3'-phosphate
  modified_base 9: mod_base = OTHER; note = 2'-deoxy-2'-fluoroadenosine-3'-phosphate
  modified_base 10: mod_base = OTHER; note = 2'-deoxy-2'-fluoroadenosine-3'-phosphate
  modified_base 11: mod_base = OTHER; note = 2'-deoxy-2'-fluorocytidine-3'-phosphate
  modified_base 12: mod_base = OTHER; note = 2'-O-methyladenosine-3'-phosphate
  modified_base 13: mod_base = OTHER; note = 2'-O-methylguanosine-3'-phosphate
  modified_base 14: mod_base = OTHER; note = 2'-O-methyladenosine-3'-phosphate
  modified_base 15: mod_base = OTHER; note = 2'-O-methyladenosine-3'-phosphate
  modified_base 16: mod_base = OTHER; note = 2'-O-methyladenosine-3'-phosphate
  modified_base 17: mod_base = OTHER; note = 2'-O-methylguanosine-3'-phosphate
  modified_base 18: mod_base = OTHER; note = 2'-O-methyluridine-3'-phosphate
  modified_base 19: mod_base = OTHER; note = 2'-O-methylcytidine-3'-phosphorothioate
  modified_base 20: mod_base = OTHER; note = 2'-O-methyladenosine-3'-phosphorothioate
  modified_base 21: mod_base = OTHER; note = 2'-O-methyladenosine
ctcctccaaacagaaagtcaa

SEQ ID NO: 2091 - RNA, 21 nt, synthetic construct
  source 1..21: mol_type = other RNA
  modified_base 1: mod_base = OTHER; note = 2'-O-methylcytidine-3'-phosphorothioate
  modified_base 2: mod_base = OTHER; note = 2'-O-methyluridine-3'-phosphorothioate
  modified_base 3: mod_base = OTHER; note = 2'-O-methylguanosine-3'-phosphate
  modified_base 4: mod_base = OTHER; note = 2'-O-methylguanosine-3'-phosphate
  modified_base 5: mod_base = OTHER; note = 2'-O-methyladenosine-3'-phosphate
  modified_base 6: mod_base = OTHER; note = 2'-O-docosanyl-adenosine-3'-phosphate
  modified_base 7: mod_base = OTHER; note = 2'-deoxy-2'-fluoroadenosine-3'-phosphate
  modified_base 8: mod_base = OTHER; note = 2'-O-methyladenosine-3'-phosphate
  modified_base 9: mod_base = OTHER; note = 2'-deoxy-2'-fluoroguanosine-3'-phosphate
  modified_base 10: mod_base = OTHER; note = 2'-deoxy-2'-fluoroadenosine-3'-phosphate
  modified_base 11: mod_base = OTHER; note = 2'-deoxy-2'-fluoroguanosine-3'-phosphate
  modified_base 12: mod_base = OTHER; note = 2'-O-methylguanosine-3'-phosphate
  modified_base 13: mod_base = OTHER; note = 2'-O-methyladenosine-3'-phosphate
  modified_base 14: mod_base = OTHER; note = 2'-O-methylguanosine-3'-phosphate
  modified_base 15: mod_base = OTHER; note = 2'-O-methyluridine-3'-phosphate
  modified_base 16: mod_base = OTHER; note = 2'-O-methyluridine-3'-phosphate
  modified_base 17: mod_base = OTHER; note = 2'-O-methyluridine-3'-phosphate
  modified_base 18: mod_base = OTHER; note = 2'-O-methylcytidine-3'-phosphate
  modified_base 19: mod_base = OTHER; note = 2'-O-methylguanosine-3'-phosphorothioate
  modified_base 20: mod_base = OTHER; note = 2'-O-methyladenosine-3'-phosphorothioate
  modified_base 21: mod_base = OTHER; note = 2'-O-methyladenosine
ctggaaaagaggagtttcgaa

SEQ ID NO: 2092 - RNA, 21 nt, synthetic construct
  source 1..21: mol_type = other RNA
  modified_base 1: mod_base = OTHER; note = 2'-O-methylcytidine-3'-phosphorothioate
  modified_base 2: mod_base = OTHER; note = 2'-O-methyladenosine-3'-phosphorothioate
  modified_base 3: mod_base = OTHER; note = 2'-O-methylguanosine-3'-phosphate
  modified_base 4: mod_base = OTHER; note = 2'-O-methyluridine-3'-phosphate
  modified_base 5: mod_base = OTHER; note = 2'-O-methyluridine-3'-phosphate
  modified_base 6: mod_base = OTHER; note = 2'-O-docosanyl-uridine-3'-phosphate
  modified_base 7: mod_base = OTHER; note = 2'-deoxy-2'-fluorocytidine-3'-phosphate
  modified_base 8: mod_base = OTHER; note = 2'-O-methylcytidine-3'-phosphate
  modified_base 9: mod_base = OTHER; note = 2'-deoxy-2'-fluoroadenosine-3'-phosphate
  modified_base 10: mod_base = OTHER; note = 2'-deoxy-2'-fluoroadenosine-3'-phosphate
  modified_base 11: mod_base = OTHER; note = 2'-deoxy-2'-fluorouridine-3'-phosphate
  modified_base 12: mod_base = OTHER; note = 2'-O-methylcytidine-3'-phosphate
  modified_base 13: mod_base = OTHER; note = 2'-O-methylcytidine-3'-phosphate
  modified_base 14: mod_base = OTHER; note = 2'-O-methylcytidine-3'-phosphate
  modified_base 15: mod_base = OTHER; note = 2'-O-methyladenosine-3'-phosphate
  modified_base 16: mod_base = OTHER; note = 2'-O-methyluridine-3'-phosphate
  modified_base 17: mod_base = OTHER; note = 2'-O-methyladenosine-3'-phosphate
  modified_base 18: mod_base = OTHER; note = 2'-O-methylguanosine-3'-phosphate
  modified_base 19: mod_base = OTHER; note = 2'-O-methyladenosine-3'-phosphorothioate
  modified_base 20: mod_base = OTHER; note = 2'-O-methyluridine-3'-phosphorothioate
  modified_base 21: mod_base = OTHER; note = 2'-O-methyladenosine
cagtttccaatcccatagata

SEQ ID NO: 2093 - RNA, 21 nt, synthetic construct
  source 1..21: mol_type = other RNA
  modified_base 1: mod_base = OTHER; note = 2'-O-methyladenosine-3'-phosphorothioate
  modified_base 2: mod_base = OTHER; note = 2'-O-methylcytidine-3'-phosphorothioate
  modified_base 3: mod_base = OTHER; note = 2'-O-methylcytidine-3'-phosphate
  modified_base 4: mod_base = OTHER; note = 2'-O-methyluridine-3'-phosphate
  modified_base 5: mod_base = OTHER; note = 2'-O-methylguanosine-3'-phosphate
  modified_base 6: mod_base = OTHER; note = 2'-O-docosanyl-guanosine-3'-phosphate
  modified_base 7: mod_base = OTHER; note = 2'-deoxy-2'-fluorocytidine-3'-phosphate
  modified_base 8: mod_base = OTHER; note = 2'-O-methyladenosine-3'-phosphate
  modified_base 9: mod_base = OTHER; note = 2'-deoxy-2'-fluorocytidine-3'-phosphate
  modified_base 10: mod_base = OTHER; note = 2'-deoxy-2'-fluoroadenosine-3'-phosphate
  modified_base 11: mod_base = OTHER; note = 2'-deoxy-2'-fluoroadenosine-3'-phosphate
  modified_base 12: mod_base = OTHER; note = 2'-O-methyluridine-3'-phosphate
  modified_base 13: mod_base = OTHER; note = 2'-O-methylguanosine-3'-phosphate
  modified_base 14: mod_base = OTHER; note = 2'-O-methylguanosine-3'-phosphate
  modified_base 15: mod_base = OTHER; note = 2'-O-methylcytidine-3'-phosphate
  modified_base 16: mod_base = OTHER; note = 2'-O-methyluridine-3'-phosphate
  modified_base 17: mod_base = OTHER; note = 2'-O-methyladenosine-3'-phosphate
  modified_base 18: mod_base = OTHER; note = 2'-O-methyladenosine-3'-phosphate
  modified_base 19: mod_base = OTHER; note = 2'-O-methyluridine-3'-phosphorothioate
  modified_base 20: mod_base = OTHER; note = 2'-O-methyluridine-3'-phosphorothioate
  modified_base 21: mod_base = OTHER; note = 2'-O-methyladenosine
acctggcacaatggctaatta

SEQ ID NO: 2094 - RNA, 21 nt, synthetic construct
  source 1..21: mol_type = other RNA
  modified_base 1: mod_base = OTHER; note = 2'-O-methyluridine-3'-phosphorothioate
  modified_base 2: mod_base = OTHER; note = 2'-O-methylcytidine-3'-phosphorothioate
  modified_base 3: mod_base = OTHER; note = 2'-O-methylcytidine-3'-phosphate
  modified_base 4: mod_base = OTHER; note = 2'-O-methyladenosine-3'-phosphate
  modified_base 5: mod_base = OTHER; note = 2'-O-methyladenosine-3'-phosphate
  modified_base 6: mod_base = OTHER; note = 2'-O-docosanyl-guanosine-3'-phosphate
  modified_base 7: mod_base = OTHER; note = 2'-deoxy-2'-fluoroguanosine-3'-phosphate
  modified_base 8: mod_base = OTHER; note = 2'-O-methyladenosine-3'-phosphate
  modified_base 9: mod_base = OTHER; note = 2'-deoxy-2'-fluorocytidine-3'-phosphate
  modified_base 10: mod_base = OTHER; note = 2'-deoxy-2'-fluorocytidine-3'-phosphate
  modified_base 11: mod_base = OTHER; note = 2'-deoxy-2'-fluoroadenosine-3'-phosphate
  modified_base 12: mod_base = OTHER; note = 2'-O-methylguanosine-3'-phosphate
  modified_base 13: mod_base = OTHER; note = 2'-O-methylguanosine-3'-phosphate
  modified_base 14: mod_base = OTHER; note = 2'-O-methyluridine-3'-phosphate
  modified_base 15: mod_base = OTHER; note = 2'-O-methyluridine-3'-phosphate
  modified_base 16: mod_base = OTHER; note = 2'-O-methyladenosine-3'-phosphate
  modified_base 17: mod_base = OTHER; note = 2'-O-methyluridine-3'-phosphate
  modified_base 18: mod_base = OTHER; note = 2'-O-methyluridine-3'-phosphate
  modified_base 19: mod_base = OTHER; note = 2'-O-methyluridine-3'-phosphorothioate
  modified_base 20: mod_base = OTHER; note = 2'-O-methyluridine-3'-phosphorothioate
  modified_base 21: mod_base = OTHER; note = 2'-O-methyladenosine
tccaaggaccaggttatttta

SEQ ID NO: 2095 - RNA, 21 nt, synthetic construct
  source 1..21: mol_type = other RNA
  modified_base 1: mod_base = OTHER; note = 2'-O-methylcytidine-3'-phosphorothioate
  modified_base 2: mod_base = OTHER; note = 2'-O-methylcytidine-3'-phosphorothioate
  modified_base 3: mod_base = OTHER; note = 2'-O-methyluridine-3'-phosphate
  modified_base 4: mod_base = OTHER; note = 2'-O-methylguanosine-3'-phosphate
  modified_base 5: mod_base = OTHER; note = 2'-O-methylguanosine-3'-phosphate
  modified_base 6: mod_base = OTHER; note = 2'-O-docosanyl-guanosine-3'-phosphate
  modified_base 7: mod_base = OTHER; note = 2'-deoxy-2'-fluoroadenosine-3'-phosphate
  modified_base 8: mod_base = OTHER; note = 2'-O-methyladenosine-3'-phosphate
  modified_base 9: mod_base = OTHER; note = 2'-deoxy-2'-fluoroguanosine-3'-phosphate
  modified_base 10: mod_base = OTHER; note = 2'-deoxy-2'-fluoroguanosine-3'-phosphate
  modified_base 11: mod_base = OTHER; note = 2'-deoxy-2'-fluoroadenosine-3'-phosphate
  modified_base 12: mod_base = OTHER; note = 2'-O-methyladenosine-3'-phosphate
  modified_base 13: mod_base = OTHER; note = 2'-O-methyladenosine-3'-phosphate
  modified_base 14: mod_base = OTHER; note = 2'-O-methyladenosine-3'-phosphate
  modified_base 15: mod_base = OTHER; note = 2'-O-methyluridine-3'-phosphate
  modified_base 16: mod_base = OTHER; note = 2'-O-methylguanosine-3'-phosphate
  modified_base 17: mod_base = OTHER; note = 2'-O-methylcytidine-3'-phosphate
  modified_base 18: mod_base = OTHER; note = 2'-O-methyladenosine-3'-phosphate
  modified_base 19: mod_base = OTHER; note = 2'-O-methyluridine-3'-phosphorothioate
  modified_base 20: mod_base = OTHER; note = 2'-O-methyluridine-3'-phosphorothioate
  modified_base 21: mod_base = OTHER; note = 2'-O-methyladenosine
cctgggaaggaaaatgcatta

SEQ ID NO: 2096 - RNA, 21 nt, synthetic construct
  source 1..21: mol_type = other RNA
  modified_base 1: mod_base = OTHER; note = 2'-O-methyladenosine-3'-phosphorothioate
  modified_base 2: mod_base = OTHER; note = 2'-O-methylguanosine-3'-phosphorothioate
  modified_base 3: mod_base = OTHER; note = 2'-O-methyluridine-3'-phosphate
  modified_base 4: mod_base = OTHER; note = 2'-O-methylcytidine-3'-phosphate
  modified_base 5: mod_base = OTHER; note = 2'-O-methylcytidine-3'-phosphate
  modified_base 6: mod_base = OTHER; note = 2'-O-docosanyl-adenosine-3'-phosphate
  modified_base 7: mod_base = OTHER; note = 2'-deoxy-2'-fluoroadenosine-3'-phosphate
  modified_base 8: mod_base = OTHER; note = 2'-O-methylguanosine-3'-phosphate
  modified_base 9: mod_base = OTHER; note = 2'-deoxy-2'-fluoroadenosine-3'-phosphate
  modified_base 10: mod_base = OTHER; note = 2'-deoxy-2'-fluorouridine-3'-phosphate
  modified_base 11: mod_base = OTHER; note = 2'-deoxy-2'-fluoroguanosine-3'-phosphate
  modified_base 12: mod_base = OTHER; note = 2'-O-methyladenosine-3'-phosphate
  modified_base 13: mod_base = OTHER; note = 2'-O-methylcytidine-3'-phosphate
  modified_base 14: mod_base = OTHER; note = 2'-O-methyladenosine-3'-phosphate
  modified_base 15: mod_base = OTHER; note = 2'-O-methylcytidine-3'-phosphate
  modified_base 16: mod_base = OTHER; note = 2'-O-methylcytidine-3'-phosphate
  modified_base 17: mod_base = OTHER; note = 2'-O-methyladenosine-3'-phosphate
  modified_base 18: mod_base = OTHER; note = 2'-O-methyladenosine-3'-phosphate
  modified_base 19: mod_base = OTHER; note = 2'-O-methyladenosine-3'-phosphorothioate
  modified_base 20: mod_base = OTHER; note = 2'-O-methyladenosine-3'-phosphorothioate
  modified_base 21: mod_base = OTHER; note = 2'-O-methyladenosine
agtccaagatgacaccaaaaa

SEQ ID NO: 2097 - RNA, 21 nt, synthetic construct
  source 1..21: mol_type = other RNA
  modified_base 1: mod_base = OTHER; note = 2'-O-methyluridine-3'-phosphorothioate
  modified_base 2: mod_base = OTHER; note = 2'-O-methylcytidine-3'-phosphorothioate
  modified_base 3: mod_base = OTHER; note = 2'-O-methylcytidine-3'-phosphate
  modified_base 4: mod_base = OTHER; note = 2'-O-methyluridine-3'-phosphate
  modified_base 5: mod_base = OTHER; note = 2'-O-methylcytidine-3'-phosphate
  modified_base 6: mod_base = OTHER; note = 2'-O-docosanyl-adenosine-3'-phosphate
  modified_base 7: mod_base = OTHER; note = 2'-deoxy-2'-fluorocytidine-3'-phosphate
  modified_base 8: mod_base = OTHER; note = 2'-O-methyladenosine-3'-phosphate
  modified_base 9: mod_base = OTHER; note = 2'-deoxy-2'-fluoroadenosine-3'-phosphate
  modified_base 10: mod_base = OTHER; note = 2'-deoxy-2'-fluorocytidine-3'-phosphate
  modified_base 11: mod_base = OTHER; note = 2'-deoxy-2'-fluorocytidine-3'-phosphate
  modified_base 12: mod_base = OTHER; note = 2'-O-methyladenosine-3'-phosphate
  modified_base 13: mod_base = OTHER; note = 2'-O-methylcytidine-3'-phosphate
  modified_base 14: mod_base = OTHER; note = 2'-O-methylcytidine-3'-phosphate
  modified_base 15: mod_base = OTHER; note = 2'-O-methyluridine-3'-phosphate
  modified_base 16: mod_base = OTHER; note = 2'-O-methyladenosine-3'-phosphate
  modified_base 17: mod_base = OTHER; note = 2'-O-methyladenosine-3'-phosphate
  modified_base 18: mod_base = OTHER; note = 2'-O-methyluridine-3'-phosphate
  modified_base 19: mod_base = OTHER; note = 2'-O-methylcytidine-3'-phosphorothioate
  modified_base 20: mod_base = OTHER; note = 2'-O-methyladenosine-3'-phosphorothioate
  modified_base 21: mod_base = OTHER; note = 2'-O-methyladenosine
tcctcacaaccacctaatcaa

SEQ ID NO: 2098 - RNA, 21 nt, synthetic construct
  source 1..21: mol_type = other RNA
  modified_base 1: mod_base = OTHER; note = 2'-O-methyladenosine-3'-phosphorothioate
  modified_base 2: mod_base = OTHER; note = 2'-O-methylguanosine-3'-phosphorothioate
  modified_base 3: mod_base = OTHER; note = 2'-O-methylcytidine-3'-phosphate
  modified_base 4: mod_base = OTHER; note = 2'-O-methyladenosine-3'-phosphate
  modified_base 5: mod_base = OTHER; note = 2'-O-methyladenosine-3'-phosphate
  modified_base 6: mod_base = OTHER; note = 2'-O-docosanyl-guanosine-3'-phosphate
  modified_base 7: mod_base = OTHER; note = 2'-deoxy-2'-fluoroguanosine-3'-phosphate
  modified_base 8: mod_base = OTHER; note = 2'-O-methylcytidine-3'-phosphate
  modified_base 9: mod_base = OTHER; note = 2'-deoxy-2'-fluorocytidine-3'-phosphate
  modified_base 10: mod_base = OTHER; note = 2'-deoxy-2'-fluoroadenosine-3'-phosphate
  modified_base 11: mod_base = OTHER; note = 2'-deoxy-2'-fluoroadenosine-3'-phosphate
  modified_base 12: mod_base = OTHER; note = 2'-O-methyladenosine-3'-phosphate
  modified_base 13: mod_base = OTHER; note = 2'-O-methyladenosine-3'-phosphate
  modified_base 14: mod_base = OTHER; note = 2'-O-methyluridine-3'-phosphate
  modified_base 15: mod_base = OTHER; note = 2'-O-methyluridine-3'-phosphate
  modified_base 16: mod_base = OTHER; note = 2'-O-methyladenosine-3'-phosphate
  modified_base 17: mod_base = OTHER; note = 2'-O-methylcytidine-3'-phosphate
  modified_base 18: mod_base = OTHER; note = 2'-O-methylcytidine-3'-phosphate
  modified_base 19: mod_base = OTHER; note = 2'-O-methyladenosine-3'-phosphorothioate
  modified_base 20: mod_base = OTHER; note = 2'-O-methyladenosine-3'-phosphorothioate
  modified_base 21: mod_base = OTHER; note = 2'-O-methyladenosine
agcaaggccaaaattaccaaa

SEQ ID NO: 2099 - RNA, 21 nt, synthetic construct
  source 1..21: mol_type = other RNA
  modified_base 1: mod_base = OTHER; note = 2'-O-methylcytidine-3'-phosphorothioate
  modified_base 2: mod_base = OTHER; note = 2'-O-methyladenosine-3'-phosphorothioate
  modified_base 3: mod_base = OTHER; note = 2'-O-methylcytidine-3'-phosphate
  modified_base 4: mod_base = OTHER; note = 2'-O-methyluridine-3'-phosphate
  modified_base 5: mod_base = OTHER; note = 2'-O-methylguanosine-3'-phosphate
  modified_base 6: mod_base = OTHER; note = 2'-O-docosanyl-adenosine-3'-phosphate
  modified_base 7: mod_base = OTHER; note = 2'-deoxy-2'-fluoroadenosine-3'-phosphate
  modified_base 8: mod_base = OTHER; note = 2'-O-methyluridine-3'-phosphate
  modified_base 9: mod_base = OTHER; note = 2'-deoxy-2'-fluoroguanosine-3'-phosphate
  modified_base 10: mod_base = OTHER; note = 2'-deoxy-2'-fluorocytidine-3'-phosphate
  modified_base 11: mod_base = OTHER; note = 2'-deoxy-2'-fluorocytidine-3'-phosphate
  modified_base 12: mod_base = OTHER; note = 2'-O-methyluridine-3'-phosphate
  modified_base 13: mod_base = OTHER; note = 2'-O-methylcytidine-3'-phosphate
  modified_base 14: mod_base = OTHER; note = 2'-O-methyladenosine-3'-phosphate
  modified_base 15: mod_base = OTHER; note = 2'-O-methyladenosine-3'-phosphate
  modified_base 16: mod_base = OTHER; note = 2'-O-methyluridine-3'-phosphate
  modified_base 17: mod_base = OTHER; note = 2'-O-methylguanosine-3'-phosphate
  modified_base 18: mod_base = OTHER; note = 2'-O-methyluridine-3'-phosphate
  modified_base 19: mod_base = OTHER; note = 2'-O-methylguanosine-3'-phosphorothioate
  modified_base 20: mod_base = OTHER; note = 2'-O-methyladenosine-3'-phosphorothioate
  modified_base 21: mod_base = OTHER; note = 2'-O-methyladenosine
cactgaatgcctcaatgtgaa

SEQ ID NO: 2100 - RNA, 21 nt, synthetic construct
  source 1..21: mol_type = other RNA
  modified_base 1: mod_base = OTHER; note = 2'-O-methyluridine-3'-phosphorothioate
  modified_base 2: mod_base = OTHER; note = 2'-O-methyluridine-3'-phosphorothioate
  modified_base 3: mod_base = OTHER; note = 2'-O-methyladenosine-3'-phosphate
  modified_base 4: mod_base = OTHER; note = 2'-O-methylcytidine-3'-phosphate
  modified_base 5: mod_base = OTHER; note = 2'-O-methyladenosine-3'-phosphate
  modified_base 6: mod_base = OTHER; note = 2'-O-docosanyl-uridine-3'-phosphate
  modified_base 7: mod_base = OTHER; note = 2'-deoxy-2'-fluorocytidine-3'-phosphate
  modified_base 8: mod_base = OTHER; note = 2'-O-methyladenosine-3'-phosphate
  modified_base 9: mod_base = OTHER; note = 2'-deoxy-2'-fluorocytidine-3'-phosphate
  modified_base 10: mod_base = OTHER; note = 2'-deoxy-2'-fluoroadenosine-3'-phosphate
  modified_base 11: mod_base = OTHER; note = 2'-deoxy-2'-fluoroguanosine-3'-phosphate
  modified_base 12: mod_base = OTHER; note = 2'-O-methyluridine-3'-phosphate
  modified_base 13: mod_base = OTHER; note = 2'-O-methylguanosine-3'-phosphate
  modified_base 14: mod_base = OTHER; note = 2'-O-methyluridine-3'-phosphate
  modified_base 15: mod_base = OTHER; note = 2'-O-methyluridine-3'-phosphate
  modified_base 16: mod_base = OTHER; note = 2'-O-methyluridine-3'-phosphate
  modified_base 17: mod_base = OTHER; note = 2'-O-methylguanosine-3'-phosphate
  modified_base 18: mod_base = OTHER; note = 2'-O-methylcytidine-3'-phosphate
  modified_base 19: mod_base = OTHER; note = 2'-O-methyladenosine-3'-phosphorothioate
  modified_base 20: mod_base = OTHER; note = 2'-O-methyladenosine-3'-phosphorothioate
  modified_base 21: mod_base = OTHER; note = 2'-O-methyladenosine
ttacatcacagtgtttgcaaa

SEQ ID NO: 2101 - RNA, 21 nt, synthetic construct
  source 1..21: mol_type = other RNA
  modified_base 1: mod_base = OTHER; note = 2'-O-methyluridine-3'-phosphorothioate
  modified_base 2: mod_base = OTHER; note = 2'-O-methylcytidine-3'-phosphorothioate
  modified_base 3: mod_base = OTHER; note = 2'-O-methylcytidine-3'-phosphate
  modified_base 4: mod_base = OTHER; note = 2'-O-methyladenosine-3'-phosphate
  modified_base 5: mod_base = OTHER; note = 2'-O-methyladenosine-3'-phosphate
  modified_base 6: mod_base = OTHER; note = 2'-O-docosanyl-guanosine-3'-phosphate
  modified_base 7: mod_base = OTHER; note = 2'-deoxy-2'-fluoroguanosine-3'-phosphate
  modified_base 8: mod_base = OTHER; note = 2'-O-methyladenosine-3'-phosphate
  modified_base 9: mod_base = OTHER; note = 2'-deoxy-2'-fluoroguanosine-3'-phosphate
  modified_base 10: mod_base = OTHER; note = 2'-deoxy-2'-fluorouridine-3'-phosphate
  modified_base 11: mod_base = OTHER; note = 2'-deoxy-2'-fluorouridine-3'-phosphate
  modified_base 12: mod_base = OTHER; note = 2'-O-methylcytidine-3'-phosphate
  modified_base 13: mod_base = OTHER; note = 2'-O-methylcytidine-3'-phosphate
  modified_base 14: mod_base = OTHER; note = 2'-O-methyladenosine-3'-phosphate
  modified_base 15: mod_base = OTHER; note = 2'-O-methyluridine-3'-phosphate
  modified_base 16: mod_base = OTHER; note = 2'-O-methylguanosine-3'-phosphate
  modified_base 17: mod_base = OTHER; note = 2'-O-methyladenosine-3'-phosphate
  modified_base 18: mod_base = OTHER; note = 2'-O-methyladenosine-3'-phosphate
  modified_base 19: mod_base = OTHER; note = 2'-O-methylguanosine-3'-phosphorothioate
  modified_base 20: mod_base = OTHER; note = 2'-O-methyladenosine-3'-phosphorothioate
  modified_base 21: mod_base = OTHER; note = 2'-O-methyladenosine
tccaaggagttccatgaagaa

SEQ ID NO: 2102 - RNA, 21 nt, synthetic construct
  source 1..21: mol_type = other RNA
  modified_base 1: mod_base = OTHER; note = 2'-O-methyladenosine-3'-phosphorothioate
  modified_base 2: mod_base = OTHER; note = 2'-O-methylguanosine-3'-phosphorothioate
  modified_base 3: mod_base = OTHER; note = 2'-O-methylguanosine-3'-phosphate
  modified_base 4: mod_base = OTHER; note = 2'-O-methyladenosine-3'-phosphate
  modified_base 5: mod_base = OTHER; note = 2'-O-methyluridine-3'-phosphate
  modified_base 6: mod_base = OTHER; note = 2'-O-docosanyl-uridine-3'-phosphate
  modified_base 7: mod_base = OTHER; note = 2'-deoxy-2'-fluoroguanosine-3'-phosphate
  modified_base 8: mod_base = OTHER; note = 2'-O-methyladenosine-3'-phosphate
  modified_base 9: mod_base = OTHER; note = 2'-deoxy-2'-fluoroadenosine-3'-phosphate
  modified_base 10: mod_base = OTHER; note = 2'-deoxy-2'-fluoroguanosine-3'-phosphate
  modified_base 11: mod_base = OTHER; note = 2'-deoxy-2'-fluoroadenosine-3'-phosphate
  modified_base 12: mod_base = OTHER; note = 2'-O-methylguanosine-3'-phosphate
  modified_base 13: mod_base = OTHER; note = 2'-O-methylcytidine-3'-phosphate
  modified_base 14: mod_base = OTHER; note = 2'-O-methyladenosine-3'-phosphate
  modified_base 15: mod_base = OTHER; note = 2'-O-methyluridine-3'-phosphate
  modified_base 16: mod_base = OTHER; note = 2'-O-methyluridine-3'-phosphate
  modified_base 17: mod_base = OTHER; note = 2'-O-methylguanosine-3'-phosphate
  modified_base 18: mod_base = OTHER; note = 2'-O-methylcytidine-3'-phosphate
  modified_base 19: mod_base = OTHER; note = 2'-O-methyladenosine-3'-phosphorothioate
  modified_base 20: mod_base = OTHER; note = 2'-O-methyluridine-3'-phosphorothioate
  modified_base 21: mod_base = OTHER; note = 2'-O-methyladenosine
aggattgaagagcattgcata

SEQ ID NO: 2103 - RNA, 21 nt, synthetic construct
  source 1..21: mol_type = other RNA
  modified_base 1: mod_base = OTHER; note = 2'-O-methyladenosine-3'-phosphorothioate
  modified_base 2: mod_base = OTHER; note = 2'-O-methyladenosine-3'-phosphorothioate
  modified_base 3: mod_base = OTHER; note = 2'-O-methylguanosine-3'-phosphate
  modified_base 4: mod_base = OTHER; note = 2'-O-methylguanosine-3'-phosphate
  modified_base 5: mod_base = OTHER; note = 2'-O-methylguanosine-3'-phosphate
  modified_base 6: mod_base = OTHER; note = 2'-O-docosanyl-adenosine-3'-phosphate
  modified_base 7: mod_base = OTHER; note = 2'-deoxy-2'-fluoroguanosine-3'-phosphate
  modified_base 8: mod_base = OTHER; note = 2'-O-methyladenosine-3'-phosphate
  modified_base 9: mod_base = OTHER; note = 2'-deoxy-2'-fluoroadenosine-3'-phosphate
  modified_base 10: mod_base = OTHER; note = 2'-deoxy-2'-fluoroguanosine-3'-phosphate
  modified_base 11: mod_base = OTHER; note = 2'-deoxy-2'-fluoroguanosine-3'-phosphate
  modified_base 12: mod_base = OTHER; note = 2'-O-methyladenosine-3'-phosphate
  modified_base 13: mod_base = OTHER; note = 2'-O-methyluridine-3'-phosphate
  modified_base 14: mod_base = OTHER; note = 2'-O-methylcytidine-3'-phosphate
  modified_base 15: mod_base = OTHER; note = 2'-O-methyluridine-3'-phosphate
  modified_base 16: mod_base = OTHER; note = 2'-O-methyladenosine-3'-phosphate
  modified_base 17: mod_base = OTHER; note = 2'-O-methylguanosine-3'-phosphate
  modified_base 18: mod_base = OTHER; note = 2'-O-methyladenosine-3'-phosphate
  modified_base 19: mod_base = OTHER; note = 2'-O-methyladenosine-3'-phosphorothioate
  modified_base 20: mod_base = OTHER; note = 2'-O-methyluridine-3'-phosphorothioate
  modified_base 21: mod_base = OTHER; note = 2'-O-methyladenosine
aagggagaaggatctagaata

SEQ ID NO: 2104 - RNA, 21 nt, synthetic construct
  source 1..21: mol_type = other RNA
  modified_base 1: mod_base = OTHER; note = 2'-O-methyluridine-3'-phosphorothioate
  modified_base 2: mod_base = OTHER; note = 2'-O-methyladenosine-3'-phosphorothioate
  modified_base 3: mod_base = OTHER; note = 2'-O-methyluridine-3'-phosphate
  modified_base 4: mod_base = OTHER; note = 2'-O-methyluridine-3'-phosphate
  modified_base 5: mod_base = OTHER; note = 2'-O-methyladenosine-3'-phosphate
  modified_base 6: mod_base = OTHER; note = 2'-O-docosanyl-adenosine-3'-phosphate
  modified_base 7: mod_base = OTHER; note = 2'-deoxy-2'-fluoroadenosine-3'-phosphate
  modified_base 8: mod_base = OTHER; note = 2'-O-methylguanosine-3'-phosphate
  modified_base 9: mod_base = OTHER; note = 2'-deoxy-2'-fluoroguanosine-3'-phosphate
  modified_base 10: mod_base = OTHER; note = 2'-deoxy-2'-fluoroadenosine-3'-phosphate
  modified_base 11: mod_base = OTHER; note = 2'-deoxy-2'-fluoroguanosine-3'-phosphate
  modified_base 12: mod_base = OTHER; note = 2'-O-methyluridine-3'-phosphate
  modified_base 13: mod_base = OTHER; note = 2'-O-methyluridine-3'-phosphate
  modified_base 14: mod_base = OTHER; note = 2'-O-methyladenosine-3'-phosphate
  modified_base 15: mod_base = OTHER; note = 2'-O-methyladenosine-3'-phosphate
  modified_base 16: mod_base = OTHER; note = 2'-O-methylguanosine-3'-phosphate
  modified_base 17: mod_base = OTHER; note = 2'-O-methyladenosine-3'-phosphate
  modified_base 18: mod_base = OTHER; note = 2'-O-methylguanosine-3'-phosphate
  modified_base 19: mod_base = OTHER; note = 2'-O-methyluridine-3'-phosphorothioate
  modified_base 20: mod_base = OTHER; note = 2'-O-methyladenosine-3'-phosphorothioate
  modified_base 21: mod_base = OTHER; note = 2'-O-methyladenosine
tattaaaggagttaagagtaa

SEQ ID NO: 2105 - RNA, 21 nt, synthetic construct
  source 1..21: mol_type = other RNA
  modified_base 1: mod_base = OTHER; note = 2'-O-methylguanosine-3'-phosphorothioate
  modified_base 2: mod_base = OTHER; note = 2'-O-methyluridine-3'-phosphorothioate
  modified_base 3: mod_base = OTHER; note = 2'-O-methylguanosine-3'-phosphate
  modified_base 4: mod_base = OTHER; note = 2'-O-methylguanosine-3'-phosphate
  modified_base 5: mod_base = OTHER; note = 2'-O-methyluridine-3'-phosphate
  modified_base 6: mod_base = OTHER; note = 2'-O-docosanyl-cytidine-3'-phosphate
  modified_base 7: mod_base = OTHER; note = 2'-deoxy-2'-fluorouridine-3'-phosphate
  modified_base 8: mod_base = OTHER; note = 2'-O-methyluridine-3'-phosphate
  modified_base 9: mod_base = OTHER; note = 2'-deoxy-2'-fluorouridine-3'-phosphate
  modified_base 10: mod_base = OTHER; note = 2'-deoxy-2'-fluorocytidine-3'-phosphate
  modified_base 11: mod_base = OTHER; note = 2'-deoxy-2'-fluorocytidine-3'-phosphate
  modified_base 12: mod_base = OTHER; note = 2'-O-methyluridine-3'-phosphate
  modified_base 13: mod_base = OTHER; note = 2'-O-methyladenosine-3'-phosphate
  modified_base 14: mod_base = OTHER; note = 2'-O-methyluridine-3'-phosphate
  modified_base 15: mod_base = OTHER; note = 2'-O-methylcytidine-3'-phosphate
  modified_base 16: mod_base = OTHER; note = 2'-O-methyladenosine-3'-phosphate
  modified_base 17: mod_base = OTHER; note = 2'-O-methyluridine-3'-phosphate
  modified_base 18: mod_base = OTHER; note = 2'-O-methylguanosine-3'-phosphate
  modified_base 19: mod_base = OTHER; note = 2'-O-methylguanosine-3'-phosphorothioate
  modified_base 20: mod_base = OTHER; note = 2'-O-methyladenosine-3'-phosphorothioate
  modified_base 21: mod_base = OTHER; note = 2'-O-methyladenosine
gtggtctttcctatcatggaa

SEQ ID NO: 2106 - RNA, 21 nt, synthetic construct
  source 1..21: mol_type = other RNA
  modified_base 1: mod_base = OTHER; note = 2'-O-methyluridine-3'-phosphorothioate
  modified_base 2: mod_base = OTHER; note = 2'-O-methylcytidine-3'-phosphorothioate
  modified_base 3: mod_base = OTHER; note = 2'-O-methyluridine-3'-phosphate
  modified_base 4: mod_base = OTHER; note = 2'-O-methylguanosine-3'-phosphate
  modified_base 5: mod_base = OTHER; note = 2'-O-methylcytidine-3'-phosphate
  modified_base 6: mod_base = OTHER; note = 2'-O-docosanyl-adenosine-3'-phosphate
  modified_base 7: mod_base = OTHER; note = 2'-deoxy-2'-fluorouridine-3'-phosphate
  modified_base 8: mod_base = OTHER; note = 2'-O-methyluridine-3'-phosphate
  modified_base 9: mod_base = OTHER; note = 2'-deoxy-2'-fluorouridine-3'-phosphate
  modified_base 10: mod_base = OTHER; note = 2'-deoxy-2'-fluorouridine-3'-phosphate
  modified_base 11: mod_base = OTHER; note = 2'-deoxy-2'-fluoroadenosine-3'-phosphate
  modified_base 12: mod_base = OTHER; note = 2'-O-methyluridine-3'-phosphate
  modified_base 13: mod_base = OTHER; note = 2'-O-methyluridine-3'-phosphate
  modified_base 14: mod_base = OTHER; note = 2'-O-methylcytidine-3'-phosphate
  modified_base 15: mod_base = OTHER; note = 2'-O-methyluridine-3'-phosphate
  modified_base 16: mod_base = OTHER; note = 2'-O-methylguanosine-3'-phosphate
  modified_base 17: mod_base = OTHER; note = 2'-O-methylguanosine-3'-phosphate
  modified_base 18: mod_base = OTHER; note = 2'-O-methyladenosine-3'-phosphate
  modified_base 19: mod_base = OTHER; note = 2'-O-methyluridine-3'-phosphorothioate
  modified_base 20: mod_base = OTHER; note = 2'-O-methylguanosine-3'-phosphorothioate
  modified_base 21: mod_base = OTHER; note = 2'-O-methyladenosine
tctgcattttattctggatga

SEQ ID NO: 2107 - RNA, 21 nt, synthetic construct
  source 1..21: mol_type = other RNA
  modified_base 1: mod_base = OTHER; note = 2'-O-methyluridine-3'-phosphorothioate
  modified_base 2: mod_base = OTHER; note = 2'-O-methylcytidine-3'-phosphorothioate
  modified_base 3: mod_base = OTHER; note = 2'-O-methylcytidine-3'-phosphate
  modified_base 4: mod_base = OTHER; note = 2'-O-methyluridine-3'-phosphate
  modified_base 5: mod_base = OTHER; note = 2'-O-methylguanosine-3'-phosphate
  modified_base 6: mod_base = OTHER; note = 2'-O-docosanyl-cytidine-3'-phosphate
  modified_base 7: mod_base = OTHER; note = 2'-deoxy-2'-fluoroadenosine-3'-phosphate
  modified_base 8: mod_base = OTHER; note = 2'-O-methyladenosine-3'-phosphate
  modified_base 9: mod_base = OTHER; note = 2'-deoxy-2'-fluoroguanosine-3'-phosphate
  modified_base 10: mod_base = OTHER; note = 2'-deoxy-2'-fluoroguanosine-3'-phosphate
  modified_base 11: mod_base = OTHER; note = 2'-deoxy-2'-fluoroadenosine-3'-phosphate
  modified_base 12: mod_base = OTHER; note = 2'-O-methylcytidine-3'-phosphate
  modified_base 13: mod_base = OTHER; note = 2'-O-methyluridine-3'-phosphate
  modified_base 14: mod_base = OTHER; note = 2'-O-methyladenosine-3'-phosphate
  modified_base 15: mod_base = OTHER; note = 2'-O-methylcytidine-3'-phosphate
  modified_base 16: mod_base = OTHER; note = 2'-O-methylguanosine-3'-phosphate
  modified_base 17: mod_base = OTHER; note = 2'-O-methyluridine-3'-phosphate
  modified_base 18: mod_base = OTHER; note = 2'-O-methyluridine-3'-phosphate
  modified_base 19: mod_base = OTHER; note = 2'-O-methyladenosine-3'-phosphorothioate
  modified_base 20: mod_base = OTHER; note = 2'-O-methyladenosine-3'-phosphorothioate
  modified_base 21: mod_base = OTHER; note = 2'-O-methyladenosine
tcctgcaaggactacgttaaa

SEQ ID NO: 2108 - RNA, 21 nt, synthetic construct
  source 1..21: mol_type = other RNA
  modified_base 1: mod_base = OTHER; note = 2'-O-methylguanosine-3'-phosphorothioate
  modified_base 2: mod_base = OTHER; note = 2'-O-methyluridine-3'-phosphorothioate
  modified_base 3: mod_base = OTHER; note = 2'-O-methyluridine-3'-phosphate
  modified_base 4: mod_base = OTHER; note = 2'-O-methylcytidine-3'-phosphate
  modified_base 5: mod_base = OTHER; note = 2'-O-methylcytidine-3'-phosphate
  modified_base 6: mod_base = OTHER; note = 2'-O-docosanyl-cytidine-3'-phosphate
  modified_base 7: mod_base = OTHER; note = 2'-deoxy-2'-fluorouridine-3'-phosphate
  modified_base 8: mod_base = OTHER; note = 2'-O-methylcytidine-3'-phosphate
  modified_base 9: mod_base = OTHER; note = 2'-deoxy-2'-fluorouridine-3'-phosphate
  modified_base 10: mod_base = OTHER; note = 2'-deoxy-2'-fluoroguanosine-3'-phosphate
  modified_base 11: mod_base = OTHER; note = 2'-deoxy-2'-fluoroadenosine-3'-phosphate
  modified_base 12: mod_base = OTHER; note = 2'-O-methylguanosine-3'-phosphate
  modified_base 13: mod_base = OTHER; note = 2'-O-methyladenosine-3'-phosphate
  modified_base 14: mod_base = OTHER; note = 2'-O-methyladenosine-3'-phosphate
  modified_base 15: mod_base = OTHER; note = 2'-O-methyluridine-3'-phosphate
  modified_base 16: mod_base = OTHER; note = 2'-O-methyluridine-3'-phosphate
  modified_base 17: mod_base = OTHER; note = 2'-O-methylcytidine-3'-phosphate
  modified_base 18: mod_base = OTHER; note = 2'-O-methylcytidine-3'-phosphate
  modified_base 19: mod_base = OTHER; note = 2'-O-methyladenosine-3'-phosphorothioate
  modified_base 20: mod_base = OTHER; note = 2'-O-methyladenosine-3'-phosphorothioate
  modified_base 21: mod_base = OTHER; note = 2'-O-methyladenosine
gttccctctgagaattccaaa

SEQ ID NO: 2109 - RNA, 21 nt, synthetic construct
  source 1..21: mol_type = other RNA
  modified_base 1: mod_base = OTHER; note = 2'-O-methylguanosine-3'-phosphorothioate
  modified_base 2: mod_base = OTHER; note = 2'-O-methyladenosine-3'-phosphorothioate
  modified_base 3: mod_base = OTHER; note = 2'-O-methyladenosine-3'-phosphate
  modified_base 4: mod_base = OTHER; note = 2'-O-methylguanosine-3'-phosphate
  modified_base 5: mod_base = OTHER; note = 2'-O-methylcytidine-3'-phosphate
  modified_base 6: mod_base = OTHER; note = 2'-O-docosanyl-uridine-3'-phosphate
  modified_base 7: mod_base = OTHER; note = 2'-deoxy-2'-fluoroguanosine-3'-phosphate
  modified_base 8: mod_base = OTHER; note = 2'-O-methyladenosine-3'-phosphate
  modified_base 9: mod_base = OTHER; note = 2'-deoxy-2'-fluorouridine-3'-phosphate
  modified_base 10: mod_base = OTHER; note = 2'-deoxy-2'-fluoroguanosine-3'-phosphate
  modified_base 11: mod_base = OTHER; note = 2'-deoxy-2'-fluorocytidine-3'-phosphate
  modified_base 12: mod_base = OTHER; note = 2'-O-methyluridine-3'-phosphate
  modified_base 13: mod_base = OTHER; note = 2'-O-methyluridine-3'-phosphate
  modified_base 14: mod_base = OTHER; note = 2'-O-methyluridine-3'-phosphate
  modified_base 15: mod_base = OTHER; note = 2'-O-methylguanosine-3'-phosphate
  modified_base 16: mod_base = OTHER; note = 2'-O-methylcytidine-3'-phosphate
  modified_base 17: mod_base = OTHER; note = 2'-O-methyluridine-3'-phosphate
  modified_base 18: mod_base = OTHER; note = 2'-O-methyluridine-3'-phosphate
  modified_base 19: mod_base = OTHER; note = 2'-O-methylcytidine-3'-phosphorothioate
  modified_base 20: mod_base = OTHER; note = 2'-O-methyladenosine-3'-phosphorothioate
  modified_base 21: mod_base = OTHER; note = 2'-O-methyladenosine
gaagctgatgctttgcttcaa

SEQ ID NO: 2110 - RNA, 21 nt, synthetic construct
  source 1..21: mol_type = other RNA
  modified_base 1: mod_base = OTHER; note = 2'-O-methyladenosine-3'-phosphorothioate
  modified_base 2: mod_base = OTHER; note = 2'-O-methyladenosine-3'-phosphorothioate
  modified_base 3: mod_base = OTHER; note = 2'-O-methyladenosine-3'-phosphate
  modified_base 4: mod_base = OTHER; note = 2'-O-methyluridine-3'-phosphate
  modified_base 5: mod_base = OTHER; note = 2'-O-methyladenosine-3'-phosphate
  modified_base 6: mod_base = OTHER; note = 2'-O-docosanyl-cytidine-3'-phosphate
  modified_base 7: mod_base = OTHER; note = 2'-deoxy-2'-fluoroadenosine-3'-phosphate
  modified_base 8: mod_base = OTHER; note = 2'-O-methyluridine-3'-phosphate
  modified_base 9: mod_base = OTHER; note = 2'-deoxy-2'-fluoroadenosine-3'-phosphate
  modified_base 10: mod_base = OTHER; note = 2'-deoxy-2'-fluoroadenosine-3'-phosphate
  modified_base 11: mod_base = OTHER; note = 2'-deoxy-2'-fluoroguanosine-3'-phosphate
  modified_base 12: mod_base = OTHER; note = 2'-O-methyladenosine-3'-phosphate
  modified_base 13: mod_base = OTHER; note = 2'-O-methylcytidine-3'-phosphate
  modified_base 14: mod_base = OTHER; note = 2'-O-methylcytidine-3'-phosphate
  modified_base 15: mod_base = OTHER; note = 2'-O-methyladenosine-3'-phosphate
  modified_base 16: mod_base = OTHER; note = 2'-O-methyluridine-3'-phosphate
  modified_base 17: mod_base = OTHER; note = 2'-O-methyladenosine-3'-phosphate
  modified_base 18: mod_base = OTHER; note = 2'-O-methyladenosine-3'-phosphate
  modified_base 19: mod_base = OTHER; note = 2'-O-methylcytidine-3'-phosphorothioate
  modified_base 20: mod_base = OTHER; note = 2'-O-methyladenosine-3'-phosphorothioate
  modified_base 21: mod_base = OTHER; note = 2'-O-methyladenosine
aaatacataagaccataacaa

SEQ ID NO: 2111 - RNA, 21 nt, synthetic construct
  source 1..21: mol_type = other RNA
  modified_base 1: mod_base = OTHER; note = 2'-O-methylcytidine-3'-phosphorothioate
  modified_base 2: mod_base = OTHER; note = 2'-O-methylcytidine-3'-phosphorothioate
  modified_base 3: mod_base = OTHER; note = 2'-O-methyluridine-3'-phosphate
  modified_base 4: mod_base = OTHER; note = 2'-O-methyluridine-3'-phosphate
  modified_base 5: mod_base = OTHER; note = 2'-O-methyluridine-3'-phosphate
  modified_base 6: mod_base = OTHER; note = 2'-O-docosanyl-guanosine-3'-phosphate
  modified_base 7: mod_base = OTHER; note = 2'-deoxy-2'-fluoroguanosine-3'-phosphate
  modified_base 8: mod_base = OTHER; note = 2'-O-methyladenosine-3'-phosphate
  modified_base 9: mod_base = OTHER; note = 2'-deoxy-2'-fluorouridine-3'-phosphate
  modified_base 10: mod_base = OTHER; note = 2'-deoxy-2'-fluoroguanosine-3'-phosphate
  modified_base 11: mod_base = OTHER; note = 2'-deoxy-2'-fluoroadenosine-3'-phosphate
  modified_base 12: mod_base = OTHER; note = 2'-O-methylcytidine-3'-phosphate
  modified_base 13: mod_base = OTHER; note = 2'-O-methylcytidine-3'-phosphate
  modified_base 14: mod_base = OTHER; note = 2'-O-methyladenosine-3'-phosphate
  modified_base 15: mod_base = OTHER; note = 2'-O-methylguanosine-3'-phosphate
  modified_base 16: mod_base = OTHER; note = 2'-O-methyladenosine-3'-phosphate
  modified_base 17: mod_base = OTHER; note = 2'-O-methyladenosine-3'-phosphate
  modified_base 18: mod_base = OTHER; note = 2'-O-methylcytidine-3'-phosphate
  modified_base 19: mod_base = OTHER; note = 2'-O-methyladenosine-3'-phosphorothioate
  modified_base 20: mod_base = OTHER; note = 2'-O-methyladenosine-3'-phosphorothioate
  modified_base 21: mod_base = OTHER; note = 2'-O-methyladenosine
cctttggatgaccagaacaaa

SEQ ID NO: 2112 - RNA, 21 nt, synthetic construct
  source 1..21: mol_type = other RNA
  modified_base 1: mod_base = OTHER; note = 2'-O-methylguanosine-3'-phosphorothioate
  modified_base 2: mod_base = OTHER; note = 2'-O-methylguanosine-3'-phosphorothioate
  modified_base 3: mod_base = OTHER; note = 2'-O-methyladenosine-3'-phosphate
  modified_base 4: mod_base = OTHER; note = 2'-O-methylguanosine-3'-phosphate
  modified_base 5: mod_base = OTHER; note = 2'-O-methyladenosine-3'-phosphate
  modified_base 6: mod_base = OTHER; note = 2'-O-docosanyl-uridine-3'-phosphate
  modified_base 7: mod_base = OTHER; note = 2'-deoxy-2'-fluoroguanosine-3'-phosphate
  modified_base 8: mod_base = OTHER; note = 2'-O-methylcytidine-3'-phosphate
  modified_base 9: mod_base = OTHER; note = 2'-deoxy-2'-fluoroadenosine-3'-phosphate
  modified_base 10: mod_base = OTHER; note = 2'-deoxy-2'-fluoroguanosine-3'-phosphate
  modified_base 11: mod_base = OTHER; note = 2'-deoxy-2'-fluoroadenosine-3'-phosphate
  modified_base 12: mod_base = OTHER; note = 2'-O-methylguanosine-3'-phosphate
  modified_base 13: mod_base = OTHER; note = 2'-O-methylguanosine-3'-phosphate
  modified_base 14: mod_base = OTHER; note = 2'-O-methyluridine-3'-phosphate
  modified_base 15: mod_base = OTHER; note = 2'-O-methyladenosine-3'-phosphate
  modified_base 16: mod_base = OTHER; note = 2'-O-methyladenosine-3'-phosphate
  modified_base 17: mod_base = OTHER; note = 2'-O-methyladenosine-3'-phosphate
  modified_base 18: mod_base = OTHER; note = 2'-O-methyladenosine-3'-phosphate
  modified_base 19: mod_base = OTHER; note = 2'-O-methylguanosine-3'-phosphorothioate
  modified_base 20: mod_base = OTHER; note = 2'-O-methyluridine-3'-phosphorothioate
  modified_base 21: mod_base = OTHER; note = 2'-O-methyladenosine
ggagatgcagaggtaaaagta

SEQ ID NO: 2113 - RNA, 21 nt, synthetic construct
  source 1..21: mol_type = other RNA
  modified_base 1: mod_base = OTHER; note = 2'-O-methyluridine-3'-phosphorothioate
  modified_base 2: mod_base = OTHER; note = 2'-O-methyluridine-3'-phosphorothioate
  modified_base 3: mod_base = OTHER; note = 2'-O-methylguanosine-3'-phosphate
  modified_base 4: mod_base = OTHER; note = 2'-O-methylguanosine-3'-phosphate
  modified_base 5: mod_base = OTHER; note = 2'-O-methylguanosine-3'-phosphate
  modified_base 6: mod_base = OTHER; note = 2'-O-docosanyl-uridine-3'-phosphate
  modified_base 7: mod_base = OTHER; note = 2'-deoxy-2'-fluorouridine-3'-phosphate
  modified_base 8: mod_base = OTHER; note = 2'-O-methylcytidine-3'-phosphate
  modified_base 9: mod_base = OTHER; note = 2'-deoxy-2'-fluoroadenosine-3'-phosphate
  modified_base 10: mod_base = OTHER; note = 2'-deoxy-2'-fluorouridine-3'-phosphate
  modified_base 11: mod_base = OTHER; note = 2'-deoxy-2'-fluorocytidine-3'-phosphate
  modified_base 12: mod_base = OTHER; note = 2'-O-methyluridine-3'-phosphate
  modified_base 13: mod_base = OTHER; note = 2'-O-methylguanosine-3'-phosphate
  modified_base 14: mod_base = OTHER; note = 2'-O-methyladenosine-3'-phosphate
  modified_base 15: mod_base = OTHER; note = 2'-O-methylguanosine-3'-phosphate
  modified_base 16: mod_base = OTHER; note = 2'-O-methylcytidine-3'-phosphate
  modified_base 17: mod_base = OTHER; note = 2'-O-methyladenosine-3'-phosphate
  modified_base 18: mod_base = OTHER; note = 2'-O-methyladenosine-3'-phosphate
  modified_base 19: mod_base = OTHER; note = 2'-O-methylguanosine-3'-phosphorothioate
  modified_base 20: mod_base = OTHER; note = 2'-O-methyladenosine-3'-phosphorothioate
  modified_base 21: mod_base = OTHER; note = 2'-O-methyladenosine
ttgggttcatctgagcaagaa

SEQ ID NO: 2114 - RNA, 21 nt, synthetic construct
  source 1..21: mol_type = other RNA
  modified_base 1: mod_base = OTHER; note = 2'-O-methylguanosine-3'-phosphorothioate
  modified_base 2: mod_base = OTHER; note = 2'-O-methylcytidine-3'-phosphorothioate
  modified_base 3: mod_base = OTHER; note = 2'-O-methyluridine-3'-phosphate
  modified_base 4: mod_base = OTHER; note = 2'-O-methylcytidine-3'-phosphate
  modified_base 5: mod_base = OTHER; note = 2'-O-methyluridine-3'-phosphate
  modified_base 6: mod_base = OTHER; note = 2'-O-docosanyl-cytidine-3'-phosphate
  modified_base 7: mod_base = OTHER; note = 2'-deoxy-2'-fluorocytidine-3'-phosphate
  modified_base 8: mod_base = OTHER; note = 2'-O-methyladenosine-3'-phosphate
  modified_base 9: mod_base = OTHER; note = 2'-deoxy-2'-fluoroguanosine-3'-phosphate
  modified_base 10: mod_base = OTHER; note = 2'-deoxy-2'-fluorouridine-3'-phosphate
  modified_base 11: mod_base = OTHER; note = 2'-deoxy-2'-fluorouridine-3'-phosphate
  modified_base 12: mod_base = OTHER; note = 2'-O-methyladenosine-3'-phosphate
  modified_base 13: mod_base = OTHER; note = 2'-O-methylguanosine-3'-phosphate
  modified_base 14: mod_base = OTHER; note = 2'-O-methyluridine-3'-phosphate
  modified_base 15: mod_base = OTHER; note = 2'-O-methyluridine-3'-phosphate
  modified_base 16: mod_base = OTHER; note = 2'-O-methylcytidine-3'-phosphate
  modified_base 17: mod_base = OTHER; note = 2'-O-methyluridine-3'-phosphate
  modified_base 18: mod_base = OTHER; note = 2'-O-methylcytidine-3'-phosphate
  modified_base 19: mod_base = OTHER; note = 2'-O-methyluridine-3'-phosphorothioate
  modified_base 20: mod_base = OTHER; note = 2'-O-methylcytidine-3'-phosphorothioate
  modified_base 21: mod_base = OTHER; note = 2'-O-methyladenosine
gctctccagttagttctctca

SEQ ID NO: 2115 - RNA, 21 nt, synthetic construct
  source 1..21: mol_type = other RNA
  modified_base 1: mod_base = OTHER; note = 2'-O-methyladenosine-3'-phosphorothioate
  modified_base 2: mod_base = OTHER; note = 2'-O-methylguanosine-3'-phosphorothioate
  modified_base 3: mod_base = OTHER; note = 2'-O-methyluridine-3'-phosphate
  modified_base 4: mod_base = OTHER; note = 2'-O-methylguanosine-3'-phosphate
  modified_base 5: mod_base = OTHER; note = 2'-O-methyluridine-3'-phosphate
  modified_base 6: mod_base = OTHER; note = 2'-O-docosanyl-guanosine-3'-phosphate
  modified_base 7: mod_base = OTHER; note = 2'-deoxy-2'-fluoroadenosine-3'-phosphate
  modified_base 8: mod_base = OTHER; note = 2'-O-methylguanosine-3'-phosphate
  modified_base 9: mod_base = OTHER; note = 2'-deoxy-2'-fluorocytidine-3'-phosphate
  modified_base 10: mod_base = OTHER; note = 2'-deoxy-2'-fluoroadenosine-3'-phosphate
  modified_base 11: mod_base = OTHER; note = 2'-deoxy-2'-fluoroguanosine-3'-phosphate
  modified_base 12: mod_base = OTHER; note = 2'-O-methyluridine-3'-phosphate
  modified_base 13: mod_base = OTHER; note = 2'-O-methylguanosine-3'-phosphate
  modified_base 14: mod_base = OTHER; note = 2'-O-methyladenosine-3'-phosphate
  modified_base 15: mod_base = OTHER; note = 2'-O-methylguanosine-3'-phosphate
  modified_base 16: mod_base = OTHER; note = 2'-O-methyluridine-3'-phosphate
  modified_base 17: mod_base = OTHER; note = 2'-O-methyluridine-3'-phosphate
  modified_base 18: mod_base = OTHER; note = 2'-O-methyladenosine-3'-phosphate
  modified_base 19: mod_base = OTHER; note = 2'-O-methylcytidine-3'-phosphorothioate
  modified_base 20: mod_base = OTHER; note = 2'-O-methyladenosine-3'-phosphorothioate
  modified_base 21: mod_base = OTHER; note = 2'-O-methyladenosine
agtgtgagcagtgagttacaa

SEQ ID NO: 2116 - RNA, 21 nt, synthetic construct
  source 1..21: mol_type = other RNA
  modified_base 1: mod_base = OTHER; note = 2'-O-methyluridine-3'-phosphorothioate
  modified_base 2: mod_base = OTHER; note = 2'-O-methyladenosine-3'-phosphorothioate
  modified_base 3: mod_base = OTHER; note = 2'-O-methylcytidine-3'-phosphate
  modified_base 4: mod_base = OTHER; note = 2'-O-methyladenosine-3'-phosphate
  modified_base 5: mod_base = OTHER; note = 2'-O-methylcytidine-3'-phosphate
  modified_base 6: mod_base = OTHER; note = 2'-O-docosanyl-adenosine-3'-phosphate
  modified_base 7: mod_base = OTHER; note = 2'-deoxy-2'-fluoroguanosine-3'-phosphate
  modified_base 8: mod_base = OTHER; note = 2'-O-methylguanosine-3'-phosphate
  modified_base 9: mod_base = OTHER; note = 2'-deoxy-2'-fluoroadenosine-3'-phosphate
  modified_base 10: mod_base = OTHER; note = 2'-deoxy-2'-fluorouridine-3'-phosphate
  modified_base 11: mod_base = OTHER; note = 2'-deoxy-2'-fluorocytidine-3'-phosphate
  modified_base 12: mod_base = OTHER; note = 2'-O-methylcytidine-3'-phosphate
  modified_base 13: mod_base = OTHER; note = 2'-O-methyluridine-3'-phosphate
  modified_base 14: mod_base = OTHER; note = 2'-O-methyladenosine-3'-phosphate
  modified_base 15: mod_base = OTHER; note = 2'-O-methyluridine-3'-phosphate
  modified_base 16: mod_base = OTHER; note = 2'-O-methyluridine-3'-phosphate
  modified_base 17: mod_base = OTHER; note = 2'-O-methylcytidine-3'-phosphate
  modified_base 18: mod_base = OTHER; note = 2'-O-methyluridine-3'-phosphate
  modified_base 19: mod_base = OTHER; note = 2'-O-methylcytidine-3'-phosphorothioate
  modified_base 20: mod_base = OTHER; note = 2'-O-methyladenosine-3'-phosphorothioate
  modified_base 21: mod_base = OTHER; note = 2'-O-methyladenosine
tacacaggatcctattctcaa

SEQ ID NO: 2117 - RNA, 21 nt, synthetic construct
  source 1..21: mol_type = other RNA
  modified_base 1: mod_base = OTHER; note = 2'-O-methylguanosine-3'-phosphorothioate
  modified_base 2: mod_base = OTHER; note = 2'-O-methyluridine-3'-phosphorothioate
  modified_base 3: mod_base = OTHER; note = 2'-O-methylguanosine-3'-phosphate
  modified_base 4: mod_base = OTHER; note = 2'-O-methylcytidine-3'-phosphate
  modified_base 5: mod_base = OTHER; note = 2'-O-methylguanosine-3'-phosphate
  modified_base 6: mod_base = OTHER; note = 2'-O-docosanyl-guanosine-3'-phosphate
  modified_base 7: mod_base = OTHER; note = 2'-deoxy-2'-fluoroadenosine-3'-phosphate
  modified_base 8: mod_base = OTHER; note = 2'-O-methyluridine-3'-phosphate
  modified_base 9: mod_base = OTHER; note = 2'-deoxy-2'-fluorouridine-3'-phosphate
  modified_base 10: mod_base = OTHER; note = 2'-deoxy-2'-fluorocytidine-3'-phosphate
  modified_base 11: mod_base = OTHER; note = 2'-deoxy-2'-fluorouridine-3'-phosphate
  modified_base 12: mod_base = OTHER; note = 2'-O-methyluridine-3'-phosphate
  modified_base 13: mod_base = OTHER; note = 2'-O-methylguanosine-3'-phosphate
  modified_base 14: mod_base = OTHER; note = 2'-O-methyluridine-3'-phosphate
  modified_base 15: mod_base = OTHER; note = 2'-O-methylguanosine-3'-phosphate
  modified_base 16: mod_base = OTHER; note = 2'-O-methylguanosine-3'-phosphate
  modified_base 17: mod_base = OTHER; note = 2'-O-methylcytidine-3'-phosphate
  modified_base 18: mod_base = OTHER; note = 2'-O-methyluridine-3'-phosphate
  modified_base 19: mod_base = OTHER; note = 2'-O-methyluridine-3'-phosphorothioate
  modified_base 20: mod_base = OTHER; note = 2'-O-methyluridine-3'-phosphorothioate
  modified_base 21: mod_base = OTHER; note = 2'-O-methyladenosine
gtgcggattcttgtggcttta

SEQ ID NO: 2118 - RNA, 21 nt, synthetic construct
  source 1..21: mol_type = other RNA
  modified_base 1: mod_base = OTHER; note = 2'-O-methyladenosine-3'-phosphorothioate
  modified_base 2: mod_base = OTHER; note = 2'-O-methyluridine-3'-phosphorothioate
  modified_base 3: mod_base = OTHER; note = 2'-O-methylcytidine-3'-phosphate
  modified_base 4: mod_base = OTHER; note = 2'-O-methyladenosine-3'-phosphate
  modified_base 5: mod_base = OTHER; note = 2'-O-methylguanosine-3'-phosphate
  modified_base 6: mod_base = OTHER; note = 2'-O-docosanyl-guanosine-3'-phosphate
  modified_base 7: mod_base = OTHER; note = 2'-deoxy-2'-fluorocytidine-3'-phosphate
  modified_base 8: mod_base = OTHER; note = 2'-O-methyluridine-3'-phosphate
  modified_base 9: mod_base = OTHER; note = 2'-deoxy-2'-fluoroguanosine-3'-phosphate
  modified_base 10: mod_base = OTHER; note = 2'-deoxy-2'-fluoroadenosine-3'-phosphate
  modified_base 11: mod_base = OTHER; note = 2'-deoxy-2'-fluoroguanosine-3'-phosphate
  modified_base 12: mod_base = OTHER; note = 2'-O-methylguanosine-3'-phosphate
  modified_base 13: mod_base = OTHER; note = 2'-O-methyluridine-3'-phosphate
  modified_base 14: mod_base = OTHER; note = 2'-O-methylguanosine-3'-phosphate
  modified_base 15: mod_base = OTHER; note = 2'-O-methyluridine-3'-phosphate
  modified_base 16: mod_base = OTHER; note = 2'-O-methylcytidine-3'-phosphate
  modified_base 17: mod_base = OTHER; note = 2'-O-methyluridine-3'-phosphate
  modified_base 18: mod_base = OTHER; note = 2'-O-methyluridine-3'-phosphate
  modified_base 19: mod_base = OTHER; note = 2'-O-methyladenosine-3'-phosphorothioate
  modified_base 20: mod_base = OTHER; note = 2'-O-methyladenosine-3'-phosphorothioate
  modified_base 21: mod_base = OTHER; note = 2'-O-methyladenosine
atcaggctgaggtgtcttaaa

SEQ ID NO: 2119 - RNA, 21 nt, synthetic construct
  source 1..21: mol_type = other RNA
  modified_base 1: mod_base = OTHER; note = 2'-O-methyluridine-3'-phosphorothioate
  modified_base 2: mod_base = OTHER; note = 2'-O-methyluridine-3'-phosphorothioate
  modified_base 3: mod_base = OTHER; note = 2'-O-methylcytidine-3'-phosphate
  modified_base 4: mod_base = OTHER; note = 2'-O-methylguanosine-3'-phosphate
  modified_base 5: mod_base = OTHER; note = 2'-O-methyladenosine-3'-phosphate
  modified_base 6: mod_base = OTHER; note = 2'-O-docosanyl-guanosine-3'-phosphate
  modified_base 7: mod_base = OTHER; note = 2'-deoxy-2'-fluoroguanosine-3'-phosphate
  modified_base 8: mod_base = OTHER; note = 2'-O-methyluridine-3'-phosphate
  modified_base 9: mod_base = OTHER; note = 2'-deoxy-2'-fluoroadenosine-3'-phosphate
  modified_base 10: mod_base = OTHER; note = 2'-deoxy-2'-fluoroguanosine-3'-phosphate
  modified_base 11: mod_base = OTHER; note = 2'-deoxy-2'-fluoroadenosine-3'-phosphate
  modified_base 12: mod_base = OTHER; note = 2'-O-methylguanosine-3'-phosphate
  modified_base 13: mod_base = OTHER; note = 2'-O-methyluridine-3'-phosphate
  modified_base 14: mod_base = OTHER; note = 2'-O-methyluridine-3'-phosphate
  modified_base 15: mod_base = OTHER; note = 2'-O-methyluridine-3'-phosphate
  modified_base 16: mod_base = OTHER; note = 2'-O-methylguanosine-3'-phosphate
  modified_base 17: mod_base = OTHER; note = 2'-O-methyladenosine-3'-phosphate
  modified_base 18: mod_base = OTHER; note = 2'-O-methyladenosine-3'-phosphate
  modified_base 19: mod_base = OTHER; note = 2'-O-methylguanosine-3'-phosphorothioate
  modified_base 20: mod_base = OTHER; note = 2'-O-methylguanosine-3'-phosphorothioate
  modified_base 21: mod_base = OTHER; note = 2'-O-methyladenosine
ttcgaggtagagtttgaagga

SEQ ID NO: 2120 - RNA, 21 nt, synthetic construct
  source 1..21: mol_type = other RNA
  modified_base 1: mod_base = OTHER; note = 2'-O-methyluridine-3'-phosphorothioate
  modified_base 2: mod_base = OTHER; note = 2'-O-methylcytidine-3'-phosphorothioate
  modified_base 3: mod_base = OTHER; note = 2'-O-methylcytidine-3'-phosphate
  modified_base 4: mod_base = OTHER; note = 2'-O-methyluridine-3'-phosphate
  modified_base 5: mod_base = OTHER; note = 2'-O-methylguanosine-3'-phosphate
  modified_base 6: mod_base = OTHER; note = 2'-O-docosanyl-adenosine-3'-phosphate
  modified_base 7: mod_base = OTHER; note = 2'-deoxy-2'-fluorocytidine-3'-phosphate
  modified_base 8: mod_base = OTHER; note = 2'-O-methylcytidine-3'-phosphate
  modified_base 9: mod_base = OTHER; note = 2'-deoxy-2'-fluorouridine-3'-phosphate
  modified_base 10: mod_base = OTHER; note = 2'-deoxy-2'-fluorouridine-3'-phosphate
  modified_base 11: mod_base = OTHER; note = 2'-deoxy-2'-fluoroadenosine-3'-phosphate
  modified_base 12: mod_base = OTHER; note = 2'-O-methyluridine-3'-phosphate
  modified_base 13: mod_base = OTHER; note = 2'-O-methylcytidine-3'-phosphate
  modified_base 14: mod_base = OTHER; note = 2'-O-methylcytidine-3'-phosphate
  modified_base 15: mod_base = OTHER; note = 2'-O-methyladenosine-3'-phosphate
  modified_base 16: mod_base = OTHER; note = 2'-O-methyladenosine-3'-phosphate
  modified_base 17: mod_base = OTHER; note = 2'-O-methylguanosine-3'-phosphate
  modified_base 18: mod_base = OTHER; note = 2'-O-methyladenosine-3'-phosphate
  modified_base 19: mod_base = OTHER; note = 2'-O-methyluridine-3'-phosphorothioate
  modified_base 20: mod_base = OTHER; note = 2'-O-methylguanosine-3'-phosphorothioate
  modified_base 21: mod_base = OTHER; note = 2'-O-methyladenosine
tcctgaccttatccaagatga

SEQ ID NO: 2121 - RNA, 21 nt, synthetic construct
  source 1..21: mol_type = other RNA
  modified_base 1: mod_base = OTHER; note = 2'-O-methylcytidine-3'-phosphorothioate
  modified_base 2: mod_base = OTHER; note = 2'-O-methylcytidine-3'-phosphorothioate
  modified_base 3: mod_base = OTHER; note = 2'-O-methyluridine-3'-phosphate
  modified_base 4: mod_base = OTHER; note = 2'-O-methyluridine-3'-phosphate
  modified_base 5: mod_base = OTHER; note = 2'-O-methylguanosine-3'-phosphate
  modified_base 6: mod_base = OTHER; note = 2'-O-docosanyl-adenosine-3'-phosphate
  modified_base 7: mod_base = OTHER; note = 2'-deoxy-2'-fluoroadenosine-3'-phosphate
  modified_base 8: mod_base = OTHER; note = 2'-O-methylguanosine-3'-phosphate
  modified_base 9: mod_base = OTHER; note = 2'-deoxy-2'-fluoroguanosine-3'-phosphate
  modified_base 10: mod_base = OTHER; note = 2'-deoxy-2'-fluorouridine-3'-phosphate
  modified_base 11: mod_base = OTHER; note = 2'-deoxy-2'-fluorocytidine-3'-phosphate
  modified_base 12: mod_base = OTHER; note = 2'-O-methyladenosine-3'-phosphate
  modified_base 13: mod_base = OTHER; note = 2'-O-methylcytidine-3'-phosphate
  modified_base 14: mod_base = OTHER; note = 2'-O-methyluridine-3'-phosphate
  modified_base 15: mod_base = OTHER; note = 2'-O-methylcytidine-3'-phosphate
  modified_base 16: mod_base = OTHER; note = 2'-O-methyluridine-3'-phosphate
  modified_base 17: mod_base = OTHER; note = 2'-O-methyluridine-3'-phosphate
  modified_base 18: mod_base = OTHER; note = 2'-O-methylcytidine-3'-phosphate
  modified_base 19: mod_base = OTHER; note = 2'-O-methylcytidine-3'-phosphorothioate
  modified_base 20: mod_base = OTHER; note = 2'-O-methyluridine-3'-phosphorothioate
  modified_base 21: mod_base = OTHER; note = 2'-O-methyladenosine
ccttgaaggtcactcttccta

SEQ ID NO: 2122 - RNA, 21 nt, synthetic construct
  source 1..21: mol_type = other RNA
  modified_base 1: mod_base = OTHER; note = 2'-O-methylcytidine-3'-phosphorothioate
  modified_base 2: mod_base = OTHER; note = 2'-O-methyluridine-3'-phosphorothioate
  modified_base 3: mod_base = OTHER; note = 2'-O-methylguanosine-3'-phosphate
  modified_base 4: mod_base = OTHER; note = 2'-O-methylguanosine-3'-phosphate
  modified_base 5: mod_base = OTHER; note = 2'-O-methylcytidine-3'-phosphate
  modified_base 6: mod_base = OTHER; note = 2'-O-docosanyl-uridine-3'-phosphate
  modified_base 7: mod_base = OTHER; note = 2'-deoxy-2'-fluorouridine-3'-phosphate
  modified_base 8: mod_base = OTHER; note = 2'-O-methyluridine-3'-phosphate
  modified_base 9: mod_base = OTHER; note = 2'-deoxy-2'-fluorocytidine-3'-phosphate
  modified_base 10: mod_base = OTHER; note = 2'-deoxy-2'-fluorouridine-3'-phosphate
  modified_base 11: mod_base = OTHER; note = 2'-deoxy-2'-fluorocytidine-3'-phosphate
  modified_base 12: mod_base = OTHER; note = 2'-O-methylcytidine-3'-phosphate
  modified_base 13: mod_base = OTHER; note = 2'-O-methylguanosine-3'-phosphate
  modified_base 14: mod_base = OTHER; note = 2'-O-methyladenosine-3'-phosphate
  modified_base 15: mod_base = OTHER; note = 2'-O-methylcytidine-3'-phosphate
  modified_base 16: mod_base = OTHER; note = 2'-O-methyluridine-3'-phosphate
  modified_base 17: mod_base = OTHER; note = 2'-O-methylguanosine-3'-phosphate
  modified_base 18: mod_base = OTHER; note = 2'-O-methylcytidine-3'-phosphate
  modified_base 19: mod_base = OTHER; note = 2'-O-methyluridine-3'-phosphorothioate
  modified_base 20: mod_base = OTHER; note = 2'-O-methyladenosine-3'-phosphorothioate
  modified_base 21: mod_base = OTHER; note = 2'-O-methyladenosine
ctggctttctccgactgctaa

SEQ ID NO: 2123 - RNA, 21 nt, synthetic construct
  source 1..21: mol_type = other RNA
  modified_base 1: mod_base = OTHER; note = 2'-O-methyluridine-3'-phosphorothioate
  modified_base 2: mod_base = OTHER; note = 2'-O-methyluridine-3'-phosphorothioate
  modified_base 3: mod_base = OTHER; note = 2'-O-methylguanosine-3'-phosphate
  modified_base 4: mod_base = OTHER; note = 2'-O-methylcytidine-3'-phosphate
  modified_base 5: mod_base = OTHER; note = 2'-O-methyladenosine-3'-phosphate
  modified_base 6: mod_base = OTHER; note = 2'-O-docosanyl-uridine-3'-phosphate
  modified_base 7: mod_base = OTHER; note = 2'-deoxy-2'-fluorouridine-3'-phosphate
  modified_base 8: mod_base = OTHER; note = 2'-O-methylcytidine-3'-phosphate
  modified_base 9: mod_base = OTHER; note = 2'-deoxy-2'-fluorocytidine-3'-phosphate
  modified_base 10: mod_base = OTHER; note = 2'-deoxy-2'-fluorocytidine-3'-phosphate
  modified_base 11: mod_base = OTHER; note = 2'-deoxy-2'-fluoroadenosine-3'-phosphate
  modified_base 12: mod_base = OTHER; note = 2'-O-methylguanosine-3'-phosphate
  modified_base 13: mod_base = OTHER; note = 2'-O-methyluridine-3'-phosphate
  modified_base 14: mod_base = OTHER; note = 2'-O-methylguanosine-3'-phosphate
  modified_base 15: mod_base = OTHER; note = 2'-O-methylguanosine-3'-phosphate
  modified_base 16: mod_base = OTHER; note = 2'-O-methyluridine-3'-phosphate
  modified_base 17: mod_base = OTHER; note = 2'-O-methylcytidine-3'-phosphate
  modified_base 18: mod_base = OTHER; note = 2'-O-methyladenosine-3'-phosphate
  modified_base 19: mod_base = OTHER; note = 2'-O-methyladenosine-3'-phosphorothioate
  modified_base 20: mod_base = OTHER; note = 2'-O-methyladenosine-3'-phosphorothioate
  modified_base 21: mod_base = OTHER; note = 2'-O-methyladenosine
ttgcattcccagtggtcaaaa

SEQ ID NO: 2124 - RNA, 21 nt, synthetic construct
  source 1..21: mol_type = other RNA
  modified_base 1: mod_base = OTHER; note = 2'-O-methylcytidine-3'-phosphorothioate
  modified_base 2: mod_base = OTHER; note = 2'-O-methyladenosine-3'-phosphorothioate
  modified_base 3: mod_base = OTHER; note = 2'-O-methylguanosine-3'-phosphate
  modified_base 4: mod_base = OTHER; note = 2'-O-methylcytidine-3'-phosphate
  modified_base 5: mod_base = OTHER; note = 2'-O-methyluridine-3'-phosphate
  modified_base 6: mod_base = OTHER; note = 2'-O-docosanyl-guanosine-3'-phosphate
  modified_base 7: mod_base = OTHER; note = 2'-deoxy-2'-fluoroadenosine-3'-phosphate
  modified_base 8: mod_base = OTHER; note = 2'-O-methyladenosine-3'-phosphate
  modified_base 9: mod_base = OTHER; note = 2'-deoxy-2'-fluorocytidine-3'-phosphate
  modified_base 10: mod_base = OTHER; note = 2'-deoxy-2'-fluoroadenosine-3'-phosphate
  modified_base 11: mod_base = OTHER; note = 2'-deoxy-2'-fluoroguanosine-3'-phosphate
  modified_base 12: mod_base = OTHER; note = 2'-O-methylcytidine-3'-phosphate
  modified_base 13: mod_base = OTHER; note = 2'-O-methylcytidine-3'-phosphate
  modified_base 14: mod_base = OTHER; note = 2'-O-methyladenosine-3'-phosphate
  modified_base 15: mod_base = OTHER; note = 2'-O-methyladenosine-3'-phosphate
  modified_base 16: mod_base = OTHER; note = 2'-O-methyladenosine-3'-phosphate
  modified_base 17: mod_base = OTHER; note = 2'-O-methyluridine-3'-phosphate
  modified_base 18: mod_base = OTHER; note = 2'-O-methylguanosine-3'-phosphate
  modified_base 19: mod_base = OTHER; note = 2'-O-methylcytidine-3'-phosphorothioate
  modified_base 20: mod_base = OTHER; note = 2'-O-methyladenosine-3'-phosphorothioate
  modified_base 21: mod_base = OTHER; note = 2'-O-methyladenosine
cagctgaacagccaaatgcaa

SEQ ID NO: 2125 - RNA, 21 nt, synthetic construct
  source 1..21: mol_type = other RNA
  modified_base 1: mod_base = OTHER; note = 2'-O-methyladenosine-3'-phosphorothioate
  modified_base 2: mod_base = OTHER; note = 2'-O-methyluridine-3'-phosphorothioate
  modified_base 3: mod_base = OTHER; note = 2'-O-methyladenosine-3'-phosphate
  modified_base 4: mod_base = OTHER; note = 2'-O-methylcytidine-3'-phosphate
  modified_base 5: mod_base = OTHER; note = 2'-O-methylcytidine-3'-phosphate
  modified_base 6: mod_base = OTHER; note = 2'-O-docosanyl-cytidine-3'-phosphate
  modified_base 7: mod_base = OTHER; note = 2'-deoxy-2'-fluoroadenosine-3'-phosphate
  modified_base 8: mod_base = OTHER; note = 2'-O-methylguanosine-3'-phosphate
  modified_base 9: mod_base = OTHER; note = 2'-deoxy-2'-fluoroadenosine-3'-phosphate
  modified_base 10: mod_base = OTHER; note = 2'-deoxy-2'-fluoroguanosine-3'-phosphate
  modified_base 11: mod_base = OTHER; note = 2'-deoxy-2'-fluorocytidine-3'-phosphate
  modified_base 12: mod_base = OTHER; note = 2'-O-methyladenosine-3'-phosphate
  modified_base 13: mod_base = OTHER; note = 2'-O-methyluridine-3'-phosphate
  modified_base 14: mod_base = OTHER; note = 2'-O-methyluridine-3'-phosphate
  modified_base 15: mod_base = OTHER; note = 2'-O-methyladenosine-3'-phosphate
  modified_base 16: mod_base = OTHER; note = 2'-O-methylcytidine-3'-phosphate
  modified_base 17: mod_base = OTHER; note = 2'-O-methylguanosine-3'-phosphate
  modified_base 18: mod_base = OTHER; note = 2'-O-methyluridine-3'-phosphate
  modified_base 19: mod_base = OTHER; note = 2'-O-methylguanosine-3'-phosphorothioate
  modified_base 20: mod_base = OTHER; note = 2'-O-methyladenosine-3'-phosphorothioate
  modified_base 21: mod_base = OTHER; note = 2'-O-methyladenosine
atacccagagcattacgtgaa

SEQ ID NO: 2126 - RNA, 21 nt, synthetic construct
  source 1..21: mol_type = other RNA
  modified_base 1: mod_base = OTHER; note = 2'-O-methylcytidine-3'-phosphorothioate
  modified_base 2: mod_base = OTHER; note = 2'-O-methyluridine-3'-phosphorothioate
  modified_base 3: mod_base = OTHER; note = 2'-O-methylguanosine-3'-phosphate
  modified_base 4: mod_base = OTHER; note = 2'-O-methylguanosine-3'-phosphate
  modified_base 5: mod_base = OTHER; note = 2'-O-methylcytidine-3'-phosphate
  modified_base 6: mod_base = OTHER; note = 2'-O-docosanyl-adenosine-3'-phosphate
  modified_base 7: mod_base = OTHER; note = 2'-deoxy-2'-fluoroguanosine-3'-phosphate
  modified_base 8: mod_base = OTHER; note = 2'-O-methyluridine-3'-phosphate
  modified_base 9: mod_base = OTHER; note = 2'-deoxy-2'-fluorocytidine-3'-phosphate
  modified_base 10: mod_base = OTHER; note = 2'-deoxy-2'-fluorouridine-3'-phosphate
  modified_base 11: mod_base = OTHER; note = 2'-deoxy-2'-fluoroadenosine-3'-phosphate
  modified_base 12: mod_base = OTHER; note = 2'-O-methylcytidine-3'-phosphate
  modified_base 13: mod_base = OTHER; note = 2'-O-methylcytidine-3'-phosphate
  modified_base 14: mod_base = OTHER; note = 2'-O-methyladenosine-3'-phosphate
  modified_base 15: mod_base = OTHER; note = 2'-O-methyladenosine-3'-phosphate
  modified_base 16: mod_base = OTHER; note = 2'-O-methylcytidine-3'-phosphate
  modified_base 17: mod_base = OTHER; note = 2'-O-methyladenosine-3'-phosphate
  modified_base 18: mod_base = OTHER; note = 2'-O-methylguanosine-3'-phosphate
  modified_base 19: mod_base = OTHER; note = 2'-O-methyladenosine-3'-phosphorothioate
  modified_base 20: mod_base = OTHER; note = 2'-O-methyluridine-3'-phosphorothioate
  modified_base 21: mod_base = OTHER; note = 2'-O-methyladenosine
ctggcagtctaccaacagata

SEQ ID NO: 2127 - RNA, 21 nt, synthetic construct
  source 1..21: mol_type = other RNA
  modified_base 1: mod_base = OTHER; note = 2'-O-methyladenosine-3'-phosphorothioate
  modified_base 2: mod_base = OTHER; note = 2'-O-methylguanosine-3'-phosphorothioate
  modified_base 3: mod_base = OTHER; note = 2'-O-methyladenosine-3'-phosphate
  modified_base 4: mod_base = OTHER; note = 2'-O-methylguanosine-3'-phosphate
  modified_base 5: mod_base = OTHER; note = 2'-O-methylcytidine-3'-phosphate
  modified_base 6: mod_base = OTHER; note = 2'-O-docosanyl-uridine-3'-phosphate
  modified_base 7: mod_base = OTHER; note = 2'-deoxy-2'-fluoroguanosine-3'-phosphate
  modified_base 8: mod_base = OTHER; note = 2'-O-methylcytidine-3'-phosphate
  modified_base 9: mod_base = OTHER; note = 2'-deoxy-2'-fluorouridine-3'-phosphate
  modified_base 10: mod_base = OTHER; note = 2'-deoxy-2'-fluorocytidine-3'-phosphate
  modified_base 11: mod_base = OTHER; note = 2'-deoxy-2'-fluorouridine-3'-phosphate
  modified_base 12: mod_base = OTHER; note = 2'-O-methylguanosine-3'-phosphate
  modified_base 13: mod_base = OTHER; note = 2'-O-methylguanosine-3'-phosphate
  modified_base 14: mod_base = OTHER; note = 2'-O-methyladenosine-3'-phosphate
  modified_base 15: mod_base = OTHER; note = 2'-O-methyladenosine-3'-phosphate
  modified_base 16: mod_base = OTHER; note = 2'-O-methyladenosine-3'-phosphate
  modified_base 17: mod_base = OTHER; note = 2'-O-methyladenosine-3'-phosphate
  modified_base 18: mod_base = OTHER; note = 2'-O-methyluridine-3'-phosphate
  modified_base 19: mod_base = OTHER; note = 2'-O-methylguanosine-3'-phosphorothioate
  modified_base 20: mod_base = OTHER; note = 2'-O-methyluridine-3'-phosphorothioate
  modified_base 21: mod_base = OTHER; note = 2'-O-methyladenosine
agagctgctctggaaaatgta

SEQ ID NO: 2128 - RNA, 21 nt, synthetic construct
  source 1..21: mol_type = other RNA
  modified_base 1: mod_base = OTHER; note = 2'-O-methylguanosine-3'-phosphorothioate
  modified_base 2: mod_base = OTHER; note = 2'-O-methyladenosine-3'-phosphorothioate
  modified_base 3: mod_base = OTHER; note = 2'-O-methylguanosine-3'-phosphate
  modified_base 4: mod_base = OTHER; note = 2'-O-methylcytidine-3'-phosphate
  modified_base 5: mod_base = OTHER; note = 2'-O-methyladenosine-3'-phosphate
  modified_base 6: mod_base = OTHER; note = 2'-O-docosanyl-cytidine-3'-phosphate
  modified_base 7: mod_base = OTHER; note = 2'-deoxy-2'-fluorocytidine-3'-phosphate
  modified_base 8: mod_base = OTHER; note = 2'-O-methyluridine-3'-phosphate
  modified_base 9: mod_base = OTHER; note = 2'-deoxy-2'-fluoroguanosine-3'-phosphate
  modified_base 10: mod_base = OTHER; note = 2'-deoxy-2'-fluorocytidine-3'-phosphate
  modified_base 11: mod_base = OTHER; note = 2'-deoxy-2'-fluorouridine-3'-phosphate
  modified_base 12: mod_base = OTHER; note = 2'-O-methyluridine-3'-phosphate
  modified_base 13: mod_base = OTHER; note = 2'-O-methylcytidine-3'-phosphate
  modified_base 14: mod_base = OTHER; note = 2'-O-methyladenosine-3'-phosphate
  modified_base 15: mod_base = OTHER; note = 2'-O-methyluridine-3'-phosphate
  modified_base 16: mod_base = OTHER; note = 2'-O-methylguanosine-3'-phosphate
  modified_base 17: mod_base = OTHER; note = 2'-O-methylcytidine-3'-phosphate
  modified_base 18: mod_base = OTHER; note = 2'-O-methyluridine-3'-phosphate
  modified_base 19: mod_base = OTHER; note = 2'-O-methylcytidine-3'-phosphorothioate
  modified_base 20: mod_base = OTHER; note = 2'-O-methyladenosine-3'-phosphorothioate
  modified_base 21: mod_base = OTHER; note = 2'-O-methyladenosine
gagcacctgcttcatgctcaa

SEQ ID NO: 2129 - RNA, 21 nt, synthetic construct
  source 1..21: mol_type = other RNA
  modified_base 1: mod_base = OTHER; note = 2'-O-methylguanosine-3'-phosphorothioate
  modified_base 2: mod_base = OTHER; note = 2'-O-methylguanosine-3'-phosphorothioate
  modified_base 3: mod_base = OTHER; note = 2'-O-methyluridine-3'-phosphate
  modified_base 4: mod_base = OTHER; note = 2'-O-methylguanosine-3'-phosphate
  modified_base 5: mod_base = OTHER; note = 2'-O-methylguanosine-3'-phosphate
  modified_base 6: mod_base = OTHER; note = 2'-O-docosanyl-guanosine-3'-phosphate
  modified_base 7: mod_base = OTHER; note = 2'-deoxy-2'-fluoroadenosine-3'-phosphate
  modified_base 8: mod_base = OTHER; note = 2'-O-methyladenosine-3'-phosphate
  modified_base 9: mod_base = OTHER; note = 2'-deoxy-2'-fluoroadenosine-3'-phosphate
  modified_base 10: mod_base = OTHER; note = 2'-deoxy-2'-fluorouridine-3'-phosphate
  modified_base 11: mod_base = OTHER; note = 2'-deoxy-2'-fluoroguanosine-3'-phosphate
  modified_base 12: mod_base = OTHER; note = 2'-O-methylguanosine-3'-phosphate
  modified_base 13: mod_base = OTHER; note = 2'-O-methyluridine-3'-phosphate
  modified_base 14: mod_base = OTHER; note = 2'-O-methyladenosine-3'-phosphate
  modified_base 15: mod_base = OTHER; note = 2'-O-methyluridine-3'-phosphate
  modified_base 16: mod_base = OTHER; note = 2'-O-methylguanosine-3'-phosphate
  modified_base 17: mod_base = OTHER; note = 2'-O-methyladenosine-3'-phosphate
  modified_base 18: mod_base = OTHER; note = 2'-O-methylguanosine-3'-phosphate
  modified_base 19: mod_base = OTHER; note = 2'-O-methylcytidine-3'-phosphorothioate
  modified_base 20: mod_base = OTHER; note = 2'-O-methyluridine-3'-phosphorothioate
  modified_base 21: mod_base = OTHER; note = 2'-O-methyladenosine
ggtgggaaatggtatgagcta

SEQ ID NO: 2130 - RNA, 21 nt, synthetic construct
  source 1..21: mol_type = other RNA
  modified_base 1: mod_base = OTHER; note = 2'-O-methylguanosine-3'-phosphorothioate
  modified_base 2: mod_base = OTHER; note = 2'-O-methyluridine-3'-phosphorothioate
  modified_base 3: mod_base = OTHER; note = 2'-O-methylguanosine-3'-phosphate
  modified_base 4: mod_base = OTHER; note = 2'-O-methyluridine-3'-phosphate
  modified_base 5: mod_base = OTHER; note = 2'-O-methylguanosine-3'-phosphate
  modified_base 6: mod_base = OTHER; note = 2'-O-docosanyl-guanosine-3'-phosphate
  modified_base 7: mod_base = OTHER; note = 2'-deoxy-2'-fluorouridine-3'-phosphate
  modified_base 8: mod_base = OTHER; note = 2'-O-methylguanosine-3'-phosphate
  modified_base 9: mod_base = OTHER; note = 2'-deoxy-2'-fluoroguanosine-3'-phosphate
  modified_base 10: mod_base = OTHER; note = 2'-deoxy-2'-fluoroguanosine-3'-phosphate
  modified_base 11: mod_base = OTHER; note = 2'-deoxy-2'-fluorouridine-3'-phosphate
  modified_base 12: mod_base = OTHER; note = 2'-O-methyluridine-3'-phosphate
  modified_base 13: mod_base = OTHER; note = 2'-O-methylcytidine-3'-phosphate
  modified_base 14: mod_base = OTHER; note = 2'-O-methyluridine-3'-phosphate
  modified_base 15: mod_base = OTHER; note = 2'-O-methyluridine-3'-phosphate
  modified_base 16: mod_base = OTHER; note = 2'-O-methyluridine-3'-phosphate
  modified_base 17: mod_base = OTHER; note = 2'-O-methylguanosine-3'-phosphate
  modified_base 18: mod_base = OTHER; note = 2'-O-methylguanosine-3'-phosphate
  modified_base 19: mod_base = OTHER; note = 2'-O-methyladenosine-3'-phosphorothioate
  modified_base 20: mod_base = OTHER; note = 2'-O-methyladenosine-3'-phosphorothioate
  modified_base 21: mod_base = OTHER; note = 2'-O-methyladenosine
gtgtggtgggttctttggaaa

SEQ ID NO: 2131 - RNA, 21 nt, synthetic construct
  source 1..21: mol_type = other RNA
  modified_base 1: mod_base = OTHER; note = 2'-O-methylguanosine-3'-phosphorothioate
  modified_base 2: mod_base = OTHER; note = 2'-O-methyluridine-3'-phosphorothioate
  modified_base 3: mod_base = OTHER; note = 2'-O-methyluridine-3'-phosphate
  modified_base 4: mod_base = OTHER; note = 2'-O-methylcytidine-3'-phosphate
  modified_base 5: mod_base = OTHER; note = 2'-O-methyluridine-3'-phosphate
  modified_base 6: mod_base = OTHER; note = 2'-O-docosanyl-uridine-3'-phosphate
  modified_base 7: mod_base = OTHER; note = 2'-deoxy-2'-fluoroguanosine-3'-phosphate
  modified_base 8: mod_base = OTHER; note = 2'-O-methyluridine-3'-phosphate
  modified_base 9: mod_base = OTHER; note = 2'-deoxy-2'-fluorocytidine-3'-phosphate
  modified_base 10: mod_base = OTHER; note = 2'-deoxy-2'-fluorouridine-3'-phosphate
  modified_base 11: mod_base = OTHER; note = 2'-deoxy-2'-fluoroguanosine-3'-phosphate
  modified_base 12: mod_base = OTHER; note = 2'-O-methyladenosine-3'-phosphate
  modified_base 13: mod_base = OTHER; note = 2'-O-methyluridine-3'-phosphate
  modified_base 14: mod_base = OTHER; note = 2'-O-methyluridine-3'-phosphate
  modified_base 15: mod_base = OTHER; note = 2'-O-methylguanosine-3'-phosphate
  modified_base 16: mod_base = OTHER; note = 2'-O-methylguanosine-3'-phosphate
  modified_base 17: mod_base = OTHER; note = 2'-O-methylcytidine-3'-phosphate
  modified_base 18: mod_base = OTHER; note = 2'-O-methyluridine-3'-phosphate
  modified_base 19: mod_base = OTHER; note = 2'-O-methylcytidine-3'-phosphorothioate
  modified_base 20: mod_base = OTHER; note = 2'-O-methyladenosine-3'-phosphorothioate
  modified_base 21: mod_base = OTHER; note = 2'-O-methyladenosine
gttcttgtctgattggctcaa

SEQ ID NO: 2132 - RNA, 21 nt, synthetic construct
  source 1..21: mol_type = other RNA
  modified_base 1: mod_base = OTHER; note = 2'-O-methylguanosine-3'-phosphorothioate
  modified_base 2: mod_base = OTHER; note = 2'-O-methyladenosine-3'-phosphorothioate
  modified_base 3: mod_base = OTHER; note = 2'-O-methyluridine-3'-phosphate
  modified_base 4: mod_base = OTHER; note = 2'-O-methylcytidine-3'-phosphate
  modified_base 5: mod_base = OTHER; note = 2'-O-methyladenosine-3'-phosphate
  modified_base 6: mod_base = OTHER; note = 2'-O-docosanyl-cytidine-3'-phosphate
  modified_base 7: mod_base = OTHER; note = 2'-deoxy-2'-fluoroadenosine-3'-phosphate
  modified_base 8: mod_base = OTHER; note = 2'-O-methyladenosine-3'-phosphate
  modified_base 9: mod_base = OTHER; note = 2'-deoxy-2'-fluoroguanosine-3'-phosphate
  modified_base 10: mod_base = OTHER; note = 2'-deoxy-2'-fluoroguanosine-3'-phosphate
  modified_base 11: mod_base = OTHER; note = 2'-deoxy-2'-fluorouridine-3'-phosphate
  modified_base 12: mod_base = OTHER; note = 2'-O-methylcytidine-3'-phosphate
  modified_base 13: mod_base = OTHER; note = 2'-O-methyladenosine-3'-phosphate
  modified_base 14: mod_base = OTHER; note = 2'-O-methylcytidine-3'-phosphate
  modified_base 15: mod_base = OTHER; note = 2'-O-methyluridine-3'-phosphate
  modified_base 16: mod_base = OTHER; note = 2'-O-methyladenosine-3'-phosphate
  modified_base 17: mod_base = OTHER; note = 2'-O-methylguanosine-3'-phosphate
  modified_base 18: mod_base = OTHER; note = 2'-O-methyladenosine-3'-phosphate
  modified_base 19: mod_base = OTHER; note = 2'-O-methyluridine-3'-phosphorothioate
  modified_base 20: mod_base = OTHER; note = 2'-O-methylguanosine-3'-phosphorothioate
  modified_base 21: mod_base = OTHER; note = 2'-O-methyladenosine
gatcacaaggtcactagatga

SEQ ID NO: 2133 - RNA, 21 nt, synthetic construct
  source 1..21: mol_type = other RNA
  modified_base 1: mod_base = OTHER; note = 2'-O-methylcytidine-3'-phosphorothioate
  modified_base 2: mod_base = OTHER; note = 2'-O-methyluridine-3'-phosphorothioate
  modified_base 3: mod_base = OTHER; note = 2'-O-methylcytidine-3'-phosphate
  modified_base 4: mod_base = OTHER; note = 2'-O-methylcytidine-3'-phosphate
  modified_base 5: mod_base = OTHER; note = 2'-O-methylguanosine-3'-phosphate
  modified_base 6: mod_base = OTHER; note = 2'-O-docosanyl-guanosine-3'-phosphate
  modified_base 7: mod_base = OTHER; note = 2'-deoxy-2'-fluoroguanosine-3'-phosphate
  modified_base 8: mod_base = OTHER; note = 2'-O-methyladenosine-3'-phosphate
  modified_base 9: mod_base = OTHER; note = 2'-deoxy-2'-fluorouridine-3'-phosphate
  modified_base 10: mod_base = OTHER; note = 2'-deoxy-2'-fluorocytidine-3'-phosphate
  modified_base 11: mod_base = OTHER; note = 2'-deoxy-2'-fluorouridine-3'-phosphate
  modified_base 12: mod_base = OTHER; note = 2'-O-methyluridine-3'-phosphate
  modified_base 13: mod_base = OTHER; note = 2'-O-methylcytidine-3'-phosphate
  modified_base 14: mod_base = OTHER; note = 2'-O-methyluridine-3'-phosphate
  modified_base 15: mod_base = OTHER; note = 2'-O-methyluridine-3'-phosphate
  modified_base 16: mod_base = OTHER; note = 2'-O-methylcytidine-3'-phosphate
  modified_base 17: mod_base = OTHER; note = 2'-O-methyladenosine-3'-phosphate
  modified_base 18: mod_base = OTHER; note = 2'-O-methylcytidine-3'-phosphate
  modified_base 19: mod_base = OTHER; note = 2'-O-methylguanosine-3'-phosphorothioate
  modified_base 20: mod_base = OTHER; note = 2'-O-methyluridine-3'-phosphorothioate
  modified_base 21: mod_base = OTHER; note = 2'-O-methyladenosine
ctccgggatcttcttcacgta

SEQ ID NO: 2134 - RNA, 21 nt, synthetic construct
  source 1..21: mol_type = other RNA
  modified_base 1: mod_base = OTHER; note = 2'-O-methylguanosine-3'-phosphorothioate
  modified_base 2: mod_base = OTHER; note = 2'-O-methyluridine-3'-phosphorothioate
  modified_base 3: mod_base = OTHER; note = 2'-O-methylcytidine-3'-phosphate
  modified_base 4: mod_base = OTHER; note = 2'-O-methylcytidine-3'-phosphate
  modified_base 5: mod_base = OTHER; note = 2'-O-methyluridine-3'-phosphate
  modified_base 6: mod_base = OTHER; note = 2'-O-docosanyl-guanosine-3'-phosphate
  modified_base 7: mod_base = OTHER; note = 2'-deoxy-2'-fluoroguanosine-3'-phosphate
  modified_base 8: mod_base = OTHER; note = 2'-O-methyladenosine-3'-phosphate
  modified_base 9: mod_base = OTHER; note = 2'-deoxy-2'-fluoroadenosine-3'-phosphate
  modified_base 10: mod_base = OTHER; note = 2'-deoxy-2'-fluoroguanosine-3'-phosphate
  modified_base 11: mod_base = OTHER; note = 2'-deoxy-2'-fluorocytidine-3'-phosphate
  modified_base 12: mod_base = OTHER; note = 2'-O-methyluridine-3'-phosphate
  modified_base 13: mod_base = OTHER; note = 2'-O-methyluridine-3'-phosphate
  modified_base 14: mod_base = OTHER; note = 2'-O-methylcytidine-3'-phosphate
  modified_base 15: mod_base = OTHER; note = 2'-O-methyladenosine-3'-phosphate
  modified_base 16: mod_base = OTHER; note = 2'-O-methylguanosine-3'-phosphate
  modified_base 17: mod_base = OTHER; note = 2'-O-methylguanosine-3'-phosphate
  modified_base 18: mod_base = OTHER; note = 2'-O-methylcytidine-3'-phosphate
  modified_base 19: mod_base = OTHER; note = 2'-O-methyluridine-3'-phosphorothioate
  modified_base 20: mod_base = OTHER; note = 2'-O-methyladenosine-3'-phosphorothioate
  modified_base 21: mod_base = OTHER; note = 2'-O-methyladenosine
gtcctggaagcttcaggctaa

SEQ ID NO: 2135 - RNA, 21 nt, synthetic construct
  source 1..21: mol_type = other RNA
  modified_base 1: mod_base = OTHER; note = 2'-O-methyladenosine-3'-phosphorothioate
  modified_base 2: mod_base = OTHER; note = 2'-O-methyluridine-3'-phosphorothioate
  modified_base 3: mod_base = OTHER; note = 2'-O-methyluridine-3'-phosphate
  modified_base 4: mod_base = OTHER; note = 2'-O-methyluridine-3'-phosphate
  modified_base 5: mod_base = OTHER; note = 2'-O-methylcytidine-3'-phosphate
  modified_base 6: mod_base = OTHER; note = 2'-O-docosanyl-cytidine-3'-phosphate
  modified_base 7: mod_base = OTHER; note = 2'-deoxy-2'-fluorocytidine-3'-phosphate
  modified_base 8: mod_base = OTHER; note = 2'-O-methyluridine-3'-phosphate
  modified_base 9: mod_base = OTHER; note = 2'-deoxy-2'-fluoroguanosine-3'-phosphate
  modified_base 10: mod_base = OTHER; note = 2'-deoxy-2'-fluoroadenosine-3'-phosphate
  modified_base 11: mod_base = OTHER; note = 2'-deoxy-2'-fluorocytidine-3'-phosphate
  modified_base 12: mod_base = OTHER; note = 2'-O-methyluridine-3'-phosphate
  modified_base 13: mod_base = OTHER; note = 2'-O-methylcytidine-3'-phosphate
  modified_base 14: mod_base = OTHER; note = 2'-O-methylcytidine-3'-phosphate
  modified_base 15: mod_base = OTHER; note = 2'-O-methyluridine-3'-phosphate
  modified_base 16: mod_base = OTHER; note = 2'-O-methylcytidine-3'-phosphate
  modified_base 17: mod_base = OTHER; note = 2'-O-methyluridine-3'-phosphate
  modified_base 18: mod_base = OTHER; note = 2'-O-methyladenosine-3'-phosphate
  modified_base 19: mod_base = OTHER; note = 2'-O-methyladenosine-3'-phosphorothioate
  modified_base 20: mod_base = OTHER; note = 2'-O-methylguanosine-3'-phosphorothioate
  modified_base 21: mod_base = OTHER; note = 2'-O-methyladenosine
atttccctgactcctctaaga

SEQ ID NO: 2136 - RNA, 21 nt, synthetic construct
  source 1..21: mol_type = other RNA
  modified_base 1: mod_base = OTHER; note = 2'-O-methyluridine-3'-phosphorothioate
  modified_base 2: mod_base = OTHER; note = 2'-O-methylguanosine-3'-phosphorothioate
  modified_base 3: mod_base = OTHER; note = 2'-O-methyladenosine-3'-phosphate
  modified_base 4: mod_base = OTHER; note = 2'-O-methylcytidine-3'-phosphate
  modified_base 5: mod_base = OTHER; note = 2'-O-methyluridine-3'-phosphate
  modified_base 6: mod_base = OTHER; note = 2'-O-docosanyl-guanosine-3'-phosphate
  modified_base 7: mod_base = OTHER; note = 2'-deoxy-2'-fluorocytidine-3'-phosphate
  modified_base 8: mod_base = OTHER; note = 2'-O-methylguanosine-3'-phosphate
  modified_base 9: mod_base = OTHER; note = 2'-deoxy-2'-fluoroadenosine-3'-phosphate
  modified_base 10: mod_base = OTHER; note = 2'-deoxy-2'-fluorouridine-3'-phosphate
  modified_base 11: mod_base = OTHER; note = 2'-deoxy-2'-fluorocytidine-3'-phosphate
  modified_base 12: mod_base = OTHER; note = 2'-O-methyluridine-3'-phosphate
  modified_base 13: mod_base = OTHER; note = 2'-O-methyluridine-3'-phosphate
  modified_base 14: mod_base = OTHER; note = 2'-O-methylcytidine-3'-phosphate
  modified_base 15: mod_base = OTHER; note = 2'-O-methyladenosine-3'-phosphate
  modified_base 16: mod_base = OTHER; note = 2'-O-methylguanosine-3'-phosphate
  modified_base 17: mod_base = OTHER; note = 2'-O-methyladenosine-3'-phosphate
  modified_base 18: mod_base = OTHER; note = 2'-O-methylguanosine-3'-phosphate
  modified_base 19: mod_base = OTHER; note = 2'-O-methylcytidine-3'-phosphorothioate
  modified_base 20: mod_base = OTHER; note = 2'-O-methyladenosine-3'-phosphorothioate
  modified_base 21: mod_base = OTHER; note = 2'-O-methyladenosine
tgactgcgatcttcagagcaa

SEQ ID NO: 2137 - RNA, 21 nt, synthetic construct
  source 1..21: mol_type = other RNA
  modified_base 1: mod_base = OTHER; note = 2'-O-methylcytidine-3'-phosphorothioate
  modified_base 2: mod_base = OTHER; note = 2'-O-methylcytidine-3'-phosphorothioate
  modified_base 3: mod_base = OTHER; note = 2'-O-methyladenosine-3'-phosphate
  modified_base 4: mod_base = OTHER; note = 2'-O-methylguanosine-3'-phosphate
  modified_base 5: mod_base = OTHER; note = 2'-O-methylcytidine-3'-phosphate
  modified_base 6: mod_base = OTHER; note = 2'-O-docosanyl-uridine-3'-phosphate
  modified_base 7: mod_base = OTHER; note = 2'-deoxy-2'-fluorouridine-3'-phosphate
  modified_base 8: mod_base = OTHER; note = 2'-O-methylcytidine-3'-phosphate
  modified_base 9: mod_base = OTHER; note = 2'-deoxy-2'-fluorouridine-3'-phosphate
  modified_base 10: mod_base = OTHER; note = 2'-deoxy-2'-fluorocytidine-3'-phosphate
  modified_base 11: mod_base = OTHER; note = 2'-deoxy-2'-fluorocytidine-3'-phosphate
  modified_base 12: mod_base = OTHER; note = 2'-O-methyladenosine-3'-phosphate
  modified_base 13: mod_base = OTHER; note = 2'-O-methylguanosine-3'-phosphate
  modified_base 14: mod_base = OTHER; note = 2'-O-methylguanosine-3'-phosphate
  modified_base 15: mod_base = OTHER; note = 2'-O-methylcytidine-3'-phosphate
  modified_base 16: mod_base = OTHER; note = 2'-O-methyluridine-3'-phosphate
  modified_base 17: mod_base = OTHER; note = 2'-O-methylcytidine-3'-phosphate
  modified_base 18: mod_base = OTHER; note = 2'-O-methyluridine-3'-phosphate
  modified_base 19: mod_base = OTHER; note = 2'-O-methyluridine-3'-phosphorothioate
  modified_base 20: mod_base = OTHER; note = 2'-O-methyluridine-3'-phosphorothioate
  modified_base 21: mod_base = OTHER; note = 2'-O-methyladenosine
ccagcttctccaggctcttta

SEQ ID NO: 2138 - RNA, 21 nt, synthetic construct
  source 1..21: mol_type = other RNA
  modified_base 1: mod_base = OTHER; note = 2'-O-methyluridine-3'-phosphorothioate
  modified_base 2: mod_base = OTHER; note = 2'-O-methylcytidine-3'-phosphorothioate
  modified_base 3: mod_base = OTHER; note = 2'-O-methyluridine-3'-phosphate
  modified_base 4: mod_base = OTHER; note = 2'-O-methylguanosine-3'-phosphate
  modified_base 5: mod_base = OTHER; note = 2'-O-methylguanosine-3'-phosphate
  modified_base 6: mod_base = OTHER; note = 2'-O-docosanyl-cytidine-3'-phosphate
  modified_base 7: mod_base = OTHER; note = 2'-deoxy-2'-fluorouridine-3'-phosphate
  modified_base 8: mod_base = OTHER; note = 2'-O-methyluridine-3'-phosphate
  modified_base 9: mod_base = OTHER; note = 2'-deoxy-2'-fluorocytidine-3'-phosphate
  modified_base 10: mod_base = OTHER; note = 2'-deoxy-2'-fluorocytidine-3'-phosphate
  modified_base 11: mod_base = OTHER; note = 2'-deoxy-2'-fluoroadenosine-3'-phosphate
  modified_base 12: mod_base = OTHER; note = 2'-O-methylguanosine-3'-phosphate
  modified_base 13: mod_base = OTHER; note = 2'-O-methylguanosine-3'-phosphate
  modified_base 14: mod_base = OTHER; note = 2'-O-methyluridine-3'-phosphate
  modified_base 15: mod_base = OTHER; note = 2'-O-methyladenosine-3'-phosphate
  modified_base 16: mod_base = OTHER; note = 2'-O-methyluridine-3'-phosphate
  modified_base 17: mod_base = OTHER; note = 2'-O-methylcytidine-3'-phosphate
  modified_base 18: mod_base = OTHER; note = 2'-O-methyluridine-3'-phosphate
  modified_base 19: mod_base = OTHER; note = 2'-O-methylcytidine-3'-phosphorothioate
  modified_base 20: mod_base = OTHER; note = 2'-O-methylcytidine-3'-phosphorothioate
  modified_base 21: mod_base = OTHER; note = 2'-O-methyladenosine
tctggcttccaggtatctcca

SEQ ID NO: 2139 - RNA, 21 nt, synthetic construct
  source 1..21: mol_type = other RNA
  modified_base 1: mod_base = OTHER; note = 2'-O-methylcytidine-3'-phosphorothioate
  modified_base 2: mod_base = OTHER; note = 2'-O-methylcytidine-3'-phosphorothioate
  modified_base 3: mod_base = OTHER; note = 2'-O-methyluridine-3'-phosphate
  modified_base 4: mod_base = OTHER; note = 2'-O-methylguanosine-3'-phosphate
  modified_base 5: mod_base = OTHER; note = 2'-O-methylguanosine-3'-phosphate
  modified_base 6: mod_base = OTHER; note = 2'-O-docosanyl-cytidine-3'-phosphate
  modified_base 7: mod_base = OTHER; note = 2'-deoxy-2'-fluorocytidine-3'-phosphate
  modified_base 8: mod_base = OTHER; note = 2'-O-methyladenosine-3'-phosphate
  modified_base 9: mod_base = OTHER; note = 2'-deoxy-2'-fluoroadenosine-3'-phosphate
  modified_base 10: mod_base = OTHER; note = 2'-deoxy-2'-fluorocytidine-3'-phosphate
  modified_base 11: mod_base = OTHER; note = 2'-deoxy-2'-fluoroadenosine-3'-phosphate
  modified_base 12: mod_base = OTHER; note = 2'-O-methyluridine-3'-phosphate
  modified_base 13: mod_base = OTHER; note = 2'-O-methylguanosine-3'-phosphate
  modified_base 14: mod_base = OTHER; note = 2'-O-methylguanosine-3'-phosphate
  modified_base 15: mod_base = OTHER; note = 2'-O-methyluridine-3'-phosphate
  modified_base 16: mod_base = OTHER; note = 2'-O-methylguanosine-3'-phosphate
  modified_base 17: mod_base = OTHER; note = 2'-O-methyladenosine-3'-phosphate
  modified_base 18: mod_base = OTHER; note = 2'-O-methyladenosine-3'-phosphate
  modified_base 19: mod_base = OTHER; note = 2'-O-methyladenosine-3'-phosphorothioate
  modified_base 20: mod_base = OTHER; note = 2'-O-methylcytidine-3'-phosphorothioate
  modified_base 21: mod_base = OTHER; note = 2'-O-methyladenosine
cctggccaacatggtgaaaca

SEQ ID NO: 2140 - RNA, 21 nt, synthetic construct
  source 1..21: mol_type = other RNA
  modified_base 1: mod_base = OTHER; note = 2'-O-methylguanosine-3'-phosphorothioate
  modified_base 2: mod_base = OTHER; note = 2'-O-methyluridine-3'-phosphorothioate
  modified_base 3: mod_base = OTHER; note = 2'-O-methyluridine-3'-phosphate
  modified_base 4: mod_base = OTHER; note = 2'-O-methyluridine-3'-phosphate
  modified_base 5: mod_base = OTHER; note = 2'-O-methyluridine-3'-phosphate
  modified_base 6: mod_base = OTHER; note = 2'-O-docosanyl-uridine-3'-phosphate
  modified_base 7: mod_base = OTHER; note = 2'-deoxy-2'-fluoroadenosine-3'-phosphate
  modified_base 8: mod_base = OTHER; note = 2'-O-methylcytidine-3'-phosphate
  modified_base 9: mod_base = OTHER; note = 2'-deoxy-2'-fluorouridine-3'-phosphate
  modified_base 10: mod_base = OTHER; note = 2'-deoxy-2'-fluorocytidine-3'-phosphate
  modified_base 11: mod_base = OTHER; note = 2'-deoxy-2'-fluorocytidine-3'-phosphate
  modified_base 12: mod_base = OTHER; note = 2'-O-methyladenosine-3'-phosphate
  modified_base 13: mod_base = OTHER; note = 2'-O-methylguanosine-3'-phosphate
  modified_base 14: mod_base = OTHER; note = 2'-O-methyluridine-3'-phosphate
  modified_base 15: mod_base = OTHER; note = 2'-O-methylguanosine-3'-phosphate
  modified_base 16: mod_base = OTHER; note = 2'-O-methylguanosine-3'-phosphate
  modified_base 17: mod_base = OTHER; note = 2'-O-methyluridine-3'-phosphate
  modified_base 18: mod_base = OTHER; note = 2'-O-methylguanosine-3'-phosphate
  modified_base 19: mod_base = OTHER; note = 2'-O-methyladenosine-3'-phosphorothioate
  modified_base 20: mod_base = OTHER; note = 2'-O-methyladenosine-3'-phosphorothioate
  modified_base 21: mod_base = OTHER; note = 2'-O-methyladenosine
gtttttactccagtggtgaaa

SEQ ID NO: 2141 - RNA, 21 nt, synthetic construct
  source 1..21: mol_type = other RNA
  modified_base 1: mod_base = OTHER; note = 2'-O-methyladenosine-3'-phosphorothioate
  modified_base 2: mod_base = OTHER; note = 2'-O-methyluridine-3'-phosphorothioate
  modified_base 3: mod_base = OTHER; note = 2'-O-methylguanosine-3'-phosphate
  modified_base 4: mod_base = OTHER; note = 2'-O-methylcytidine-3'-phosphate
  modified_base 5: mod_base = OTHER; note = 2'-O-methyladenosine-3'-phosphate
  modified_base 6: mod_base = OTHER; note = 2'-O-docosanyl-uridine-3'-phosphate
  modified_base 7: mod_base = OTHER; note = 2'-deoxy-2'-fluoroguanosine-3'-phosphate
  modified_base 8: mod_base = OTHER; note = 2'-O-methylguanosine-3'-phosphate
  modified_base 9: mod_base = OTHER; note = 2'-deoxy-2'-fluorouridine-3'-phosphate
  modified_base 10: mod_base = OTHER; note = 2'-deoxy-2'-fluoroguanosine-3'-phosphate
  modified_base 11: mod_base = OTHER; note = 2'-deoxy-2'-fluorocytidine-3'-phosphate
  modified_base 12: mod_base = OTHER; note = 2'-O-methyladenosine-3'-phosphate
  modified_base 13: mod_base = OTHER; note = 2'-O-methylguanosine-3'-phosphate
  modified_base 14: mod_base = OTHER; note = 2'-O-methyluridine-3'-phosphate
  modified_base 15: mod_base = OTHER; note = 2'-O-methyluridine-3'-phosphate
  modified_base 16: mod_base = OTHER; note = 2'-O-methylguanosine-3'-phosphate
  modified_base 17: mod_base = OTHER; note = 2'-O-methyladenosine-3'-phosphate
  modified_base 18: mod_base = OTHER; note = 2'-O-methylcytidine-3'-phosphate
  modified_base 19: mod_base = OTHER; note = 2'-O-methyladenosine-3'-phosphorothioate
  modified_base 20: mod_base = OTHER; note = 2'-O-methylguanosine-3'-phosphorothioate
  modified_base 21: mod_base = OTHER; note = 2'-O-methyladenosine
atgcatggtgcagttgacaga

SEQ ID NO: 2142 - RNA, 21 nt, synthetic construct
  source 1..21: mol_type = other RNA
  modified_base 1: mod_base = OTHER; note = 2'-O-methyladenosine-3'-phosphorothioate
  modified_base 2: mod_base = OTHER; note = 2'-O-methylguanosine-3'-phosphorothioate
  modified_base 3: mod_base = OTHER; note = 2'-O-methyladenosine-3'-phosphate
  modified_base 4: mod_base = OTHER; note = 2'-O-methylguanosine-3'-phosphate
  modified_base 5: mod_base = OTHER; note = 2'-O-methyluridine-3'-phosphate
  modified_base 6: mod_base = OTHER; note = 2'-O-docosanyl-adenosine-3'-phosphate
  modified_base 7: mod_base = OTHER; note = 2'-deoxy-2'-fluorocytidine-3'-phosphate
  modified_base 8: mod_base = OTHER; note = 2'-O-methyladenosine-3'-phosphate
  modified_base 9: mod_base = OTHER; note = 2'-deoxy-2'-fluoroguanosine-3'-phosphate
  modified_base 10: mod_base = OTHER; note = 2'-deoxy-2'-fluorouridine-3'-phosphate
  modified_base 11: mod_base = OTHER; note = 2'-deoxy-2'-fluoroguanosine-3'-phosphate
  modified_base 12: mod_base = OTHER; note = 2'-O-methyladenosine-3'-phosphate
  modified_base 13: mod_base = OTHER; note = 2'-O-methylguanosine-3'-phosphate
  modified_base 14: mod_base = OTHER; note = 2'-O-methylcytidine-3'-phosphate
  modified_base 15: mod_base = OTHER; note = 2'-O-methylcytidine-3'-phosphate
  modified_base 16: mod_base = OTHER; note = 2'-O-methyladenosine-3'-phosphate
  modified_base 17: mod_base = OTHER; note = 2'-O-methyladenosine-3'-phosphate
  modified_base 18: mod_base = OTHER; note = 2'-O-methylguanosine-3'-phosphate
  modified_base 19: mod_base = OTHER; note = 2'-O-methyladenosine-3'-phosphorothioate
  modified_base 20: mod_base = OTHER; note = 2'-O-methyluridine-3'-phosphorothioate
  modified_base 21: mod_base = OTHER; note = 2'-O-methyladenosine
agagtacagtgagccaagata

SEQ ID NO: 2143 - RNA, 21 nt, synthetic construct
  source 1..21: mol_type = other RNA
  modified_base 1: mod_base = OTHER; note = 2'-O-methyladenosine-3'-phosphorothioate
  modified_base 2: mod_base = OTHER; note = 2'-O-methyladenosine-3'-phosphorothioate
  modified_base 3: mod_base = OTHER; note = 2'-O-methylcytidine-3'-phosphate
  modified_base 4: mod_base = OTHER; note = 2'-O-methyladenosine-3'-phosphate
  modified_base 5: mod_base = OTHER; note = 2'-O-methylcytidine-3'-phosphate
  modified_base 6: mod_base = OTHER; note = 2'-O-docosanyl-adenosine-3'-phosphate
  modified_base 7: mod_base = OTHER; note = 2'-deoxy-2'-fluoroadenosine-3'-phosphate
  modified_base 8: mod_base = OTHER; note = 2'-O-methyladenosine-3'-phosphate
  modified_base 9: mod_base = OTHER; note = 2'-deoxy-2'-fluoroadenosine-3'-phosphate
  modified_base 10: mod_base = OTHER; note = 2'-deoxy-2'-fluoroguanosine-3'-phosphate
  modified_base 11: mod_base = OTHER; note = 2'-deoxy-2'-fluorouridine-3'-phosphate
  modified_base 12: mod_base = OTHER; note = 2'-O-methyluridine-3'-phosphate
  modified_base 13: mod_base = OTHER; note = 2'-O-methyladenosine-3'-phosphate
  modified_base 14: mod_base = OTHER; note = 2'-O-methylguanosine-3'-phosphate
  modified_base 15: mod_base = OTHER; note = 2'-O-methylcytidine-3'-phosphate
  modified_base 16: mod_base = OTHER; note = 2'-O-methyluridine-3'-phosphate
  modified_base 17: mod_base = OTHER; note = 2'-O-methylguanosine-3'-phosphate
  modified_base 18: mod_base = OTHER; note = 2'-O-methyladenosine-3'-phosphate
  modified_base 19: mod_base = OTHER; note = 2'-O-methylguanosine-3'-phosphorothioate
  modified_base 20: mod_base = OTHER; note = 2'-O-methylcytidine-3'-phosphorothioate
  modified_base 21: mod_base = OTHER; note = 2'-O-methyladenosine
aacacaaaagttagctgagca

SEQ ID NO: 2144 - RNA, 21 nt, synthetic construct
  source 1..21: mol_type = other RNA
  modified_base 1: mod_base = OTHER; note = 2'-O-methyluridine-3'-phosphorothioate
  modified_base 2: mod_base = OTHER; note = 2'-O-methylcytidine-3'-phosphorothioate
  modified_base 3: mod_base = OTHER; note = 2'-O-methylcytidine-3'-phosphate
  modified_base 4: mod_base = OTHER; note = 2'-O-methylcytidine-3'-phosphate
  modified_base 5: mod_base = OTHER; note = 2'-O-methyladenosine-3'-phosphate
  modified_base 6: mod_base = OTHER; note = 2'-O-docosanyl-guanosine-3'-phosphate
  modified_base 7: mod_base = OTHER; note = 2'-deoxy-2'-fluorocytidine-3'-phosphate
  modified_base 8: mod_base = OTHER; note = 2'-O-methyladenosine-3'-phosphate
  modified_base 9: mod_base = OTHER; note = 2'-deoxy-2'-fluoroadenosine-3'-phosphate
  modified_base 10: mod_base = OTHER; note = 2'-deoxy-2'-fluorocytidine-3'-phosphate
  modified_base 11: mod_base = OTHER; note = 2'-deoxy-2'-fluoroadenosine-3'-phosphate
  modified_base 12: mod_base = OTHER; note = 2'-O-methylcytidine-3'-phosphate
  modified_base 13: mod_base = OTHER; note = 2'-O-methyladenosine-3'-phosphate
  modified_base 14: mod_base = OTHER; note = 2'-O-methyladenosine-3'-phosphate
  modified_base 15: mod_base = OTHER; note = 2'-O-methylguanosine-3'-phosphate
  modified_base 16: mod_base = OTHER; note = 2'-O-methylcytidine-3'-phosphate
  modified_base 17: mod_base = OTHER; note = 2'-O-methyluridine-3'-phosphate
  modified_base 18: mod_base = OTHER; note = 2'-O-methylguanosine-3'-phosphate
  modified_base 19: mod_base = OTHER; note = 2'-O-methylguanosine-3'-phosphorothioate
  modified_base 20: mod_base = OTHER; note = 2'-O-methyladenosine-3'-phosphorothioate
  modified_base 21: mod_base = OTHER; note = 2'-O-methyladenosine
tcccagcaacacaagctggaa

SEQ ID NO: 2145 - RNA, 21 nt, synthetic construct
  source 1..21: mol_type = other RNA
  modified_base 1: mod_base = OTHER; note = 2'-O-methyladenosine-3'-phosphorothioate
  modified_base 2: mod_base = OTHER; note = 2'-O-methylguanosine-3'-phosphorothioate
  modified_base 3: mod_base = OTHER; note = 2'-O-methyladenosine-3'-phosphate
  modified_base 4: mod_base = OTHER; note = 2'-O-methylcytidine-3'-phosphate
  modified_base 5: mod_base = OTHER; note = 2'-O-methylcytidine-3'-phosphate
  modified_base 6: mod_base = OTHER; note = 2'-O-docosanyl-uridine-3'-phosphate
  modified_base 7: mod_base = OTHER; note = 2'-deoxy-2'-fluoroguanosine-3'-phosphate
  modified_base 8: mod_base = OTHER; note = 2'-O-methyladenosine-3'-phosphate
  modified_base 9: mod_base = OTHER; note = 2'-deoxy-2'-fluorocytidine-3'-phosphate
  modified_base 10: mod_base = OTHER; note = 2'-deoxy-2'-fluoroadenosine-3'-phosphate
  modified_base 11: mod_base = OTHER; note = 2'-deoxy-2'-fluoroadenosine-3'-phosphate
  modified_base 12: mod_base = OTHER; note = 2'-O-methylguanosine-3'-phosphate
  modified_base 13: mod_base = OTHER; note = 2'-O-methylcytidine-3'-phosphate
  modified_base 14: mod_base = OTHER; note = 2'-O-methyladenosine-3'-phosphate
  modified_base 15: mod_base = OTHER; note = 2'-O-methylcytidine-3'-phosphate
  modified_base 16: mod_base = OTHER; note = 2'-O-methyluridine-3'-phosphate
  modified_base 17: mod_base = OTHER; note = 2'-O-methylguanosine-3'-phosphate
  modified_base 18: mod_base = OTHER; note = 2'-O-methylcytidine-3'-phosphate
  modified_base 19: mod_base = OTHER; note = 2'-O-methyluridine-3'-phosphorothioate
  modified_base 20: mod_base = OTHER; note = 2'-O-methyladenosine-3'-phosphorothioate
  modified_base 21: mod_base = OTHER; note = 2'-O-methyladenosine
agacctgacaagcactgctaa

SEQ ID NO: 2146 - RNA, 21 nt, synthetic construct
  source 1..21: mol_type = other RNA
  modified_base 1: mod_base = OTHER; note = 2'-O-methyladenosine-3'-phosphorothioate
  modified_base 2: mod_base = OTHER; note = 2'-O-methyluridine-3'-phosphorothioate
  modified_base 3: mod_base = OTHER; note = 2'-O-methyluridine-3'-phosphate
  modified_base 4: mod_base = OTHER; note = 2'-O-methyluridine-3'-phosphate
  modified_base 5: mod_base = OTHER; note = 2'-O-methylcytidine-3'-phosphate
  modified_base 6: mod_base = OTHER; note = 2'-O-docosanyl-adenosine-3'-phosphate
  modified_base 7: mod_base = OTHER; note = 2'-deoxy-2'-fluorocytidine-3'-phosphate
  modified_base 8: mod_base = OTHER; note = 2'-O-methyladenosine-3'-phosphate
  modified_base 9: mod_base = OTHER; note = 2'-deoxy-2'-fluorocytidine-3'-phosphate
  modified_base 10: mod_base = OTHER; note = 2'-deoxy-2'-fluoroadenosine-3'-phosphate
  modified_base 11: mod_base = OTHER; note = 2'-deoxy-2'-fluorocytidine-3'-phosphate
  modified_base 12: mod_base = OTHER; note = 2'-O-methylguanosine-3'-phosphate
  modified_base 13: mod_base = OTHER; note = 2'-O-methylcytidine-3'-phosphate
  modified_base 14: mod_base = OTHER; note = 2'-O-methyladenosine-3'-phosphate
  modified_base 15: mod_base = OTHER; note = 2'-O-methylguanosine-3'-phosphate
  modified_base 16: mod_base = OTHER; note = 2'-O-methyluridine-3'-phosphate
  modified_base 17: mod_base = OTHER; note = 2'-O-methylcytidine-3'-phosphate
  modified_base 18: mod_base = OTHER; note = 2'-O-methyladenosine-3'-phosphate
  modified_base 19: mod_base = OTHER; note = 2'-O-methylguanosine-3'-phosphorothioate
  modified_base 20: mod_base = OTHER; note = 2'-O-methyluridine-3'-phosphorothioate
  modified_base 21: mod_base = OTHER; note = 2'-O-methyladenosine
atttcacacacgcagtcagta

SEQ ID NO: 2147 - RNA, 21 nt, synthetic construct
  source 1..21: mol_type = other RNA
  modified_base 1: mod_base = OTHER; note = 2'-O-methylcytidine-3'-phosphorothioate
  modified_base 2: mod_base = OTHER; note = 2'-O-methyladenosine-3'-phosphorothioate
  modified_base 3: mod_base = OTHER; note = 2'-O-methylguanosine-3'-phosphate
  modified_base 4: mod_base = OTHER; note = 2'-O-methylguanosine-3'-phosphate
  modified_base 5: mod_base = OTHER; note = 2'-O-methyluridine-3'-phosphate
  modified_base 6: mod_base = OTHER; note = 2'-O-docosanyl-adenosine-3'-phosphate
  modified_base 7: mod_base = OTHER; note = 2'-deoxy-2'-fluoroadenosine-3'-phosphate
  modified_base 8: mod_base = OTHER; note = 2'-O-methyluridine-3'-phosphate
  modified_base 9: mod_base = OTHER; note = 2'-deoxy-2'-fluoroguanosine-3'-phosphate
  modified_base 10: mod_base = OTHER; note = 2'-deoxy-2'-fluoroadenosine-3'-phosphate
  modified_base 11: mod_base = OTHER; note = 2'-deoxy-2'-fluoroguanosine-3'-phosphate
  modified_base 12: mod_base = OTHER; note = 2'-O-methylguanosine-3'-phosphate
  modified_base 13: mod_base = OTHER; note = 2'-O-methylguanosine-3'-phosphate
  modified_base 14: mod_base = OTHER; note = 2'-O-methyladenosine-3'-phosphate
  modified_base 15: mod_base = OTHER; note = 2'-O-methylcytidine-3'-phosphate
  modified_base 16: mod_base = OTHER; note = 2'-O-methyluridine-3'-phosphate
  modified_base 17: mod_base = OTHER; note = 2'-O-methylguanosine-3'-phosphate
  modified_base 18: mod_base = OTHER; note = 2'-O-methylguanosine-3'-phosphate
  modified_base 19: mod_base = OTHER; note = 2'-O-methyladenosine-3'-phosphorothioate
  modified_base 20: mod_base = OTHER; note = 2'-O-methyladenosine-3'-phosphorothioate
  modified_base 21: mod_base = OTHER; note = 2'-O-methyladenosine
caggtaatgagggactggaaa

SEQ ID NO: 2148 - RNA, 21 nt, synthetic construct
  source 1..21: mol_type = other RNA
  modified_base 1: mod_base = OTHER; note = 2'-O-methyluridine-3'-phosphorothioate
  modified_base 2: mod_base = OTHER; note = 2'-O-methylguanosine-3'-phosphorothioate
  modified_base 3: mod_base = OTHER; note = 2'-O-methyladenosine-3'-phosphate
  modified_base 4: mod_base = OTHER; note = 2'-O-methylguanosine-3'-phosphate
  modified_base 5: mod_base = OTHER; note = 2'-O-methylguanosine-3'-phosphate
  modified_base 6: mod_base = OTHER; note = 2'-O-docosanyl-guanosine-3'-phosphate
  modified_base 7: mod_base = OTHER; note = 2'-deoxy-2'-fluoroadenosine-3'-phosphate
  modified_base 8: mod_base = OTHER; note = 2'-O-methyluridine-3'-phosphate
  modified_base 9: mod_base = OTHER; note = 2'-deoxy-2'-fluoroguanosine-3'-phosphate
  modified_base 10: mod_base = OTHER; note = 2'-deoxy-2'-fluorouridine-3'-phosphate
  modified_base 11: mod_base = OTHER; note = 2'-deoxy-2'-fluoroguanosine-3'-phosphate
  modified_base 12: mod_base = OTHER; note = 2'-O-methyladenosine-3'-phosphate
  modified_base 13: mod_base = OTHER; note = 2'-O-methyladenosine-3'-phosphate
  modified_base 14: mod_base = OTHER; note = 2'-O-methyluridine-3'-phosphate
  modified_base 15: mod_base = OTHER; note = 2'-O-methyluridine-3'-phosphate
  modified_base 16: mod_base = OTHER; note = 2'-O-methylguanosine-3'-phosphate
  modified_base 17: mod_base = OTHER; note = 2'-O-methylcytidine-3'-phosphate
  modified_base 18: mod_base = OTHER; note = 2'-O-methylcytidine-3'-phosphate
  modified_base 19: mod_base = OTHER; note = 2'-O-methyluridine-3'-phosphorothioate
  modified_base 20: mod_base = OTHER; note = 2'-O-methylguanosine-3'-phosphorothioate
  modified_base 21: mod_base = OTHER; note = 2'-O-methyladenosine
tgagggatgtgaattgcctga

SEQ ID NO: 2149 - RNA, 21 nt, synthetic construct
  source 1..21: mol_type = other RNA
  modified_base 1: mod_base = OTHER; note = 2'-O-methylguanosine-3'-phosphorothioate
  modified_base 2: mod_base = OTHER; note = 2'-O-methyladenosine-3'-phosphorothioate
  modified_base 3: mod_base = OTHER; note = 2'-O-methyluridine-3'-phosphate
  modified_base 4: mod_base = OTHER; note = 2'-O-methylcytidine-3'-phosphate
  modified_base 5: mod_base = OTHER; note = 2'-O-methylcytidine-3'-phosphate
  modified_base 6: mod_base = OTHER; note = 2'-O-docosanyl-uridine-3'-phosphate
  modified_base 7: mod_base = OTHER; note = 2'-deoxy-2'-fluorocytidine-3'-phosphate
  modified_base 8: mod_base = OTHER; note = 2'-O-methyladenosine-3'-phosphate
  modified_base 9: mod_base = OTHER; note = 2'-deoxy-2'-fluorocytidine-3'-phosphate
  modified_base 10: mod_base = OTHER; note = 2'-deoxy-2'-fluorocytidine-3'-phosphate
  modified_base 11: mod_base = OTHER; note = 2'-deoxy-2'-fluoroadenosine-3'-phosphate
  modified_base 12: mod_base = OTHER; note = 2'-O-methylguanosine-3'-phosphate
  modified_base 13: mod_base = OTHER; note = 2'-O-methyluridine-3'-phosphate
  modified_base 14: mod_base = OTHER; note = 2'-O-methyladenosine-3'-phosphate
  modified_base 15: mod_base = OTHER; note = 2'-O-methyluridine-3'-phosphate
  modified_base 16: mod_base = OTHER; note = 2'-O-methylguanosine-3'-phosphate
  modified_base 17: mod_base = OTHER; note = 2'-O-methylcytidine-3'-phosphate
  modified_base 18: mod_base = OTHER; note = 2'-O-methylcytidine-3'-phosphate
  modified_base 19: mod_base = OTHER; note = 2'-O-methyluridine-3'-phosphorothioate
  modified_base 20: mod_base = OTHER; note = 2'-O-methyluridine-3'-phosphorothioate
  modified_base 21: mod_base = OTHER; note = 2'-O-methyladenosine
gatcctcaccagtatgcctta

SEQ ID NO: 2150 - RNA, 21 nt, synthetic construct
  source 1..21: mol_type = other RNA
  modified_base 1: mod_base = OTHER; note = 2'-O-methylcytidine-3'-phosphorothioate
  modified_base 2: mod_base = OTHER; note = 2'-O-methyluridine-3'-phosphorothioate
  modified_base 3: mod_base = OTHER; note = 2'-O-methylguanosine-3'-phosphate
  modified_base 4: mod_base = OTHER; note = 2'-O-methylguanosine-3'-phosphate
  modified_base 5: mod_base = OTHER; note = 2'-O-methylcytidine-3'-phosphate
  modified_base 6: mod_base = OTHER; note = 2'-O-docosanyl-cytidine-3'-phosphate
  modified_base 7: mod_base = OTHER; note = 2'-deoxy-2'-fluorouridine-3'-phosphate
  modified_base 8: mod_base = OTHER; note = 2'-O-methyluridine-3'-phosphate
  modified_base 9: mod_base = OTHER; note = 2'-deoxy-2'-fluorocytidine-3'-phosphate
  modified_base 10: mod_base = OTHER; note = 2'-deoxy-2'-fluorouridine-3'-phosphate
  modified_base 11: mod_base = OTHER; note = 2'-deoxy-2'-fluorocytidine-3'-phosphate
  modified_base 12: mod_base = OTHER; note = 2'-O-methyluridine-3'-phosphate
  modified_base 13: mod_base = OTHER; note = 2'-O-methyladenosine-3'-phosphate
  modified_base 14: mod_base = OTHER; note = 2'-O-methyladenosine-3'-phosphate
  modified_base 15: mod_base = OTHER; note = 2'-O-methylguanosine-3'-phosphate
  modified_base 16: mod_base = OTHER; note = 2'-O-methyladenosine-3'-phosphate
  modified_base 17: mod_base = OTHER; note = 2'-O-methylguanosine-3'-phosphate
  modified_base 18: mod_base = OTHER; note = 2'-O-methylcytidine-3'-phosphate
  modified_base 19: mod_base = OTHER; note = 2'-O-methyluridine-3'-phosphorothioate
  modified_base 20: mod_base = OTHER; note = 2'-O-methylguanosine-3'-phosphorothioate
  modified_base 21: mod_base = OTHER; note = 2'-O-methyladenosine
ctggccttctctaagagctga

SEQ ID NO: 2151 - RNA, 21 nt, synthetic construct
  source 1..21: mol_type = other RNA
  modified_base 1: mod_base = OTHER; note = 2'-O-methylguanosine-3'-phosphorothioate
  modified_base 2: mod_base = OTHER; note = 2'-O-methyladenosine-3'-phosphorothioate
  modified_base 3: mod_base = OTHER; note = 2'-O-methyluridine-3'-phosphate
  modified_base 4: mod_base = OTHER; note = 2'-O-methyluridine-3'-phosphate
  modified_base 5: mod_base = OTHER; note = 2'-O-methylcytidine-3'-phosphate
  modified_base 6: mod_base = OTHER; note = 2'-O-docosanyl-cytidine-3'-phosphate
  modified_base 7: mod_base = OTHER; note = 2'-deoxy-2'-fluorocytidine-3'-phosphate
  modified_base 8: mod_base = OTHER; note = 2'-O-methyladenosine-3'-phosphate
  modified_base 9: mod_base = OTHER; note = 2'-deoxy-2'-fluorocytidine-3'-phosphate
  modified_base 10: mod_base = OTHER; note = 2'-deoxy-2'-fluorocytidine-3'-phosphate
  modified_base 11: mod_base = OTHER; note = 2'-deoxy-2'-fluoroadenosine-3'-phosphate
  modified_base 12: mod_base = OTHER; note = 2'-O-methyladenosine-3'-phosphate
  modified_base 13: mod_base = OTHER; note = 2'-O-methylguanosine-3'-phosphate
  modified_base 14: mod_base = OTHER; note = 2'-O-methylguanosine-3'-phosphate
  modified_base 15: mod_base = OTHER; note = 2'-O-methyluridine-3'-phosphate
  modified_base 16: mod_base = OTHER; note = 2'-O-methylcytidine-3'-phosphate
  modified_base 17: mod_base = OTHER; note = 2'-O-methyluridine-3'-phosphate
  modified_base 18: mod_base = OTHER; note = 2'-O-methyluridine-3'-phosphate
  modified_base 19: mod_base = OTHER; note = 2'-O-methylcytidine-3'-phosphorothioate
  modified_base 20: mod_base = OTHER; note = 2'-O-methyladenosine-3'-phosphorothioate
  modified_base 21: mod_base = OTHER; note = 2'-O-methyladenosine
gattcccaccaaggtcttcaa

SEQ ID NO: 2152 - RNA, 21 nt, synthetic construct
  source 1..21: mol_type = other RNA
  modified_base 1: mod_base = OTHER; note = 2'-O-methyladenosine-3'-phosphorothioate
  modified_base 2: mod_base = OTHER; note = 2'-O-methyluridine-3'-phosphorothioate
  modified_base 3: mod_base = OTHER; note = 2'-O-methyladenosine-3'-phosphate
  modified_base 4: mod_base = OTHER; note = 2'-O-methyluridine-3'-phosphate
  modified_base 5: mod_base = OTHER; note = 2'-O-methylcytidine-3'-phosphate
  modified_base 6: mod_base = OTHER; note = 2'-O-docosanyl-cytidine-3'-phosphate
  modified_base 7: mod_base = OTHER; note = 2'-deoxy-2'-fluoroadenosine-3'-phosphate
  modified_base 8: mod_base = OTHER; note = 2'-O-methyladenosine-3'-phosphate
  modified_base 9: mod_base = OTHER; note = 2'-deoxy-2'-fluorocytidine-3'-phosphate
  modified_base 10: mod_base = OTHER; note = 2'-deoxy-2'-fluoroguanosine-3'-phosphate
  modified_base 11: mod_base = OTHER; note = 2'-deoxy-2'-fluoroadenosine-3'-phosphate
  modified_base 12: mod_base = OTHER; note = 2'-O-methylcytidine-3'-phosphate
  modified_base 13: mod_base = OTHER; note = 2'-O-methylcytidine-3'-phosphate
  modified_base 14: mod_base = OTHER; note = 2'-O-methyluridine-3'-phosphate
  modified_base 15: mod_base = OTHER; note = 2'-O-methylguanosine-3'-phosphate
  modified_base 16: mod_base = OTHER; note = 2'-O-methylguanosine-3'-phosphate
  modified_base 17: mod_base = OTHER; note = 2'-O-methyladenosine-3'-phosphate
  modified_base 18: mod_base = OTHER; note = 2'-O-methylguanosine-3'-phosphate
  modified_base 19: mod_base = OTHER; note = 2'-O-methyladenosine-3'-phosphorothioate
  modified_base 20: mod_base = OTHER; note = 2'-O-methyladenosine-3'-phosphorothioate
  modified_base 21: mod_base = OTHER; note = 2'-O-methyladenosine
atatccaacgacctggagaaa

SEQ ID NO: 2153 - RNA, 21 nt, synthetic construct
  source 1..21: mol_type = other RNA
  modified_base 1: mod_base = OTHER; note = 2'-O-methylcytidine-3'-phosphorothioate
  modified_base 2: mod_base = OTHER; note = 2'-O-methyladenosine-3'-phosphorothioate
  modified_base 3: mod_base = OTHER; note = 2'-O-methyluridine-3'-phosphate
  modified_base 4: mod_base = OTHER; note = 2'-O-methylguanosine-3'-phosphate
  modified_base 5: mod_base = OTHER; note = 2'-O-methylcytidine-3'-phosphate
  modified_base 6: mod_base = OTHER; note = 2'-O-docosanyl-uridine-3'-phosphate
  modified_base 7: mod_base = OTHER; note = 2'-deoxy-2'-fluoroguanosine-3'-phosphate
  modified_base 8: mod_base = OTHER; note = 2'-O-methyladenosine-3'-phosphate
  modified_base 9: mod_base = OTHER; note = 2'-deoxy-2'-fluoroadenosine-3'-phosphate
  modified_base 10: mod_base = OTHER; note = 2'-deoxy-2'-fluoroguanosine-3'-phosphate
  modified_base 11: mod_base = OTHER; note = 2'-deoxy-2'-fluoroguanosine-3'-phosphate
  modified_base 12: mod_base = OTHER; note = 2'-O-methylguanosine-3'-phosphate
  modified_base 13: mod_base = OTHER; note = 2'-O-methyladenosine-3'-phosphate
  modified_base 14: mod_base = OTHER; note = 2'-O-methylcytidine-3'-phosphate
  modified_base 15: mod_base = OTHER; note = 2'-O-methylcytidine-3'-phosphate
  modified_base 16: mod_base = OTHER; note = 2'-O-methyluridine-3'-phosphate
  modified_base 17: mod_base = OTHER; note = 2'-O-methyluridine-3'-phosphate
  modified_base 18: mod_base = OTHER; note = 2'-O-methylguanosine-3'-phosphate
  modified_base 19: mod_base = OTHER; note = 2'-O-methyladenosine-3'-phosphorothioate
  modified_base 20: mod_base = OTHER; note = 2'-O-methyladenosine-3'-phosphorothioate
  modified_base 21: mod_base = OTHER; note = 2'-O-methyladenosine
catgctgaagggaccttgaaa

SEQ ID NO: 2154 - RNA, 21 nt, synthetic construct
  source 1..21: mol_type = other RNA
  modified_base 1: mod_base = OTHER; note = 2'-O-methyluridine-3'-phosphorothioate
  modified_base 2: mod_base = OTHER; note = 2'-O-methylguanosine-3'-phosphorothioate
  modified_base 3: mod_base = OTHER; note = 2'-O-methylguanosine-3'-phosphate
  modified_base 4: mod_base = OTHER; note = 2'-O-methyluridine-3'-phosphate
  modified_base 5: mod_base = OTHER; note = 2'-O-methylguanosine-3'-phosphate
  modified_base 6: mod_base = OTHER; note = 2'-O-docosanyl-cytidine-3'-phosphate
  modified_base 7: mod_base = OTHER; note = 2'-deoxy-2'-fluorouridine-3'-phosphate
  modified_base 8: mod_base = OTHER; note = 2'-O-methyladenosine-3'-phosphate
  modified_base 9: mod_base = OTHER; note = 2'-deoxy-2'-fluorouridine-3'-phosphate
  modified_base 10: mod_base = OTHER; note = 2'-deoxy-2'-fluoroadenosine-3'-phosphate
  modified_base 11: mod_base = OTHER; note = 2'-deoxy-2'-fluoroguanosine-3'-phosphate
  modified_base 12: mod_base = OTHER; note = 2'-O-methylguanosine-3'-phosphate
  modified_base 13: mod_base = OTHER; note = 2'-O-methylcytidine-3'-phosphate
  modified_base 14: mod_base = OTHER; note = 2'-O-methyluridine-3'-phosphate
  modified_base 15: mod_base = OTHER; note = 2'-O-methylguanosine-3'-phosphate
  modified_base 16: mod_base = OTHER; note = 2'-O-methylguanosine-3'-phosphate
  modified_base 17: mod_base = OTHER; note = 2'-O-methyladenosine-3'-phosphate
  modified_base 18: mod_base = OTHER; note = 2'-O-methylguanosine-3'-phosphate
  modified_base 19: mod_base = OTHER; note = 2'-O-methyladenosine-3'-phosphorothioate
  modified_base 20: mod_base = OTHER; note = 2'-O-methyladenosine-3'-phosphorothioate
  modified_base 21: mod_base = OTHER; note = 2'-O-methyladenosine
tggtgctataggctggagaaa

SEQ ID NO: 2155 - RNA, 21 nt, synthetic construct
  source 1..21: mol_type = other RNA
  modified_base 1: mod_base = OTHER; note = 2'-O-methylcytidine-3'-phosphorothioate
  modified_base 2: mod_base = OTHER; note = 2'-O-methyladenosine-3'-phosphorothioate
  modified_base 3: mod_base = OTHER; note = 2'-O-methyluridine-3'-phosphate
  modified_base 4: mod_base = OTHER; note = 2'-O-methylcytidine-3'-phosphate
  modified_base 5: mod_base = OTHER; note = 2'-O-methylcytidine-3'-phosphate
  modified_base 6: mod_base = OTHER; note = 2'-O-docosanyl-adenosine-3'-phosphate
  modified_base 7: mod_base = OTHER; note = 2'-deoxy-2'-fluorocytidine-3'-phosphate
  modified_base 8: mod_base = OTHER; note = 2'-O-methyladenosine-3'-phosphate
  modified_base 9: mod_base = OTHER; note = 2'-deoxy-2'-fluorocytidine-3'-phosphate
  modified_base 10: mod_base = OTHER; note = 2'-deoxy-2'-fluoroadenosine-3'-phosphate
  modified_base 11: mod_base = OTHER; note = 2'-deoxy-2'-fluorocytidine-3'-phosphate
  modified_base 12: mod_base = OTHER; note = 2'-O-methylguanosine-3'-phosphate
  modified_base 13: mod_base = OTHER; note = 2'-O-methylcytidine-3'-phosphate
  modified_base 14: mod_base = OTHER; note = 2'-O-methyladenosine-3'-phosphate
  modified_base 15: mod_base = OTHER; note = 2'-O-methylguanosine-3'-phosphate
  modified_base 16: mod_base = OTHER; note = 2'-O-methylguanosine-3'-phosphate
  modified_base 17: mod_base = OTHER; note = 2'-O-methyladenosine-3'-phosphate
  modified_base 18: mod_base = OTHER; note = 2'-O-methyladenosine-3'-phosphate
  modified_base 19: mod_base = OTHER; note = 2'-O-methylcytidine-3'-phosphorothioate
  modified_base 20: mod_base = OTHER; note = 2'-O-methyluridine-3'-phosphorothioate
  modified_base 21: mod_base = OTHER; note = 2'-O-methyladenosine
catccacacacgcaggaacta

SEQ ID NO: 2156 - RNA, 21 nt, synthetic construct
  source 1..21: mol_type = other RNA
  modified_base 1: mod_base = OTHER; note = 2'-O-methyluridine-3'-phosphorothioate
  modified_base 2: mod_base = OTHER; note = 2'-O-methyluridine-3'-phosphorothioate
  modified_base 3: mod_base = OTHER; note = 2'-O-methylguanosine-3'-phosphate
  modified_base 4: mod_base = OTHER; note = 2'-O-methylcytidine-3'-phosphate
  modified_base 5: mod_base = OTHER; note = 2'-O-methylcytidine-3'-phosphate
  modified_base 6: mod_base = OTHER; note = 2'-O-docosanyl-cytidine-3'-phosphate
  modified_base 7: mod_base = OTHER; note = 2'-deoxy-2'-fluorouridine-3'-phosphate
  modified_base 8: mod_base = OTHER; note = 2'-O-methylguanosine-3'-phosphate
  modified_base 9: mod_base = OTHER; note = 2'-deoxy-2'-fluoroadenosine-3'-phosphate
  modified_base 10: mod_base = OTHER; note = 2'-deoxy-2'-fluoroguanosine-3'-phosphate
  modified_base 11: mod_base = OTHER; note = 2'-deoxy-2'-fluorouridine-3'-phosphate
  modified_base 12: mod_base = OTHER; note = 2'-O-methylguanosine-3'-phosphate
  modified_base 13: mod_base = OTHER; note = 2'-O-methylguanosine-3'-phosphate
  modified_base 14: mod_base = OTHER; note = 2'-O-methyladenosine-3'-phosphate
  modified_base 15: mod_base = OTHER; note = 2'-O-methyluridine-3'-phosphate
  modified_base 16: mod_base = OTHER; note = 2'-O-methylcytidine-3'-phosphate
  modified_base 17: mod_base = OTHER; note = 2'-O-methyluridine-3'-phosphate
  modified_base 18: mod_base = OTHER; note = 2'-O-methylcytidine-3'-phosphate
  modified_base 19: mod_base = OTHER; note = 2'-O-methylcytidine-3'-phosphorothioate
  modified_base 20: mod_base = OTHER; note = 2'-O-methyladenosine-3'-phosphorothioate
  modified_base 21: mod_base = OTHER; note = 2'-O-methyladenosine
ttgccctgagtggatctccaa

SEQ ID NO: 2157 - RNA, 21 nt, synthetic construct
  source 1..21: mol_type = other RNA
  modified_base 1: mod_base = OTHER; note = 2'-O-methylcytidine-3'-phosphorothioate
  modified_base 2: mod_base = OTHER; note = 2'-O-methylguanosine-3'-phosphorothioate
  modified_base 3: mod_base = OTHER; note = 2'-O-methylcytidine-3'-phosphate
  modified_base 4: mod_base = OTHER; note = 2'-O-methyladenosine-3'-phosphate
  modified_base 5: mod_base = OTHER; note = 2'-O-methylcytidine-3'-phosphate
  modified_base 6: mod_base = OTHER; note = 2'-O-docosanyl-uridine-3'-phosphate
  modified_base 7: mod_base = OTHER; note = 2'-deoxy-2'-fluorocytidine-3'-phosphate
  modified_base 8: mod_base = OTHER; note = 2'-O-methyladenosine-3'-phosphate
  modified_base 9: mod_base = OTHER; note = 2'-deoxy-2'-fluorocytidine-3'-phosphate
  modified_base 10: mod_base = OTHER; note = 2'-deoxy-2'-fluorocytidine-3'-phosphate
  modified_base 11: mod_base = OTHER; note = 2'-deoxy-2'-fluorocytidine-3'-phosphate
  modified_base 12: mod_base = OTHER; note = 2'-O-methyladenosine-3'-phosphate
  modified_base 13: mod_base = OTHER; note = 2'-O-methyluridine-3'-phosphate
  modified_base 14: mod_base = OTHER; note = 2'-O-methylguanosine-3'-phosphate
  modified_base 15: mod_base = OTHER; note = 2'-O-methyluridine-3'-phosphate
  modified_base 16: mod_base = OTHER; note = 2'-O-methylguanosine-3'-phosphate
  modified_base 17: mod_base = OTHER; note = 2'-O-methylcytidine-3'-phosphate
  modified_base 18: mod_base = OTHER; note = 2'-O-methylcytidine-3'-phosphate
  modified_base 19: mod_base = OTHER; note = 2'-O-methyladenosine-3'-phosphorothioate
  modified_base 20: mod_base = OTHER; note = 2'-O-methyladenosine-3'-phosphorothioate
  modified_base 21: mod_base = OTHER; note = 2'-O-methyladenosine
cgcactcacccatgtgccaaa

SEQ ID NO: 2158 - RNA, 21 nt, synthetic construct
  source 1..21: mol_type = other RNA
  modified_base 1: mod_base = OTHER; note = 2'-O-methylguanosine-3'-phosphorothioate
  modified_base 2: mod_base = OTHER; note = 2'-O-methylcytidine-3'-phosphorothioate
  modified_base 3: mod_base = OTHER; note = 2'-O-methylguanosine-3'-phosphate
  modified_base 4: mod_base = OTHER; note = 2'-O-methylguanosine-3'-phosphate
  modified_base 5: mod_base = OTHER; note = 2'-O-methyluridine-3'-phosphate
  modified_base 6: mod_base = OTHER; note = 2'-O-docosanyl-uridine-3'-phosphate
  modified_base 7: mod_base = OTHER; note = 2'-deoxy-2'-fluoroguanosine-3'-phosphate
  modified_base 8: mod_base = OTHER; note = 2'-O-methylcytidine-3'-phosphate
  modified_base 9: mod_base = OTHER; note = 2'-deoxy-2'-fluoroadenosine-3'-phosphate
  modified_base 10: mod_base = OTHER; note = 2'-deoxy-2'-fluoroadenosine-3'-phosphate
  modified_base 11: mod_base = OTHER; note = 2'-deoxy-2'-fluoroguanosine-3'-phosphate
  modified_base 12: mod_base = OTHER; note = 2'-O-methylguanosine-3'-phosphate
  modified_base 13: mod_base = OTHER; note = 2'-O-methylcytidine-3'-phosphate
  modified_base 14: mod_base = OTHER; note = 2'-O-methylcytidine-3'-phosphate
  modified_base 15: mod_base = OTHER; note = 2'-O-methylcytidine-3'-phosphate
  modified_base 16: mod_base = OTHER; note = 2'-O-methyladenosine-3'-phosphate
  modified_base 17: mod_base = OTHER; note = 2'-O-methyladenosine-3'-phosphate
  modified_base 18: mod_base = OTHER; note = 2'-O-methylguanosine-3'-phosphate
  modified_base 19: mod_base = OTHER; note = 2'-O-methyladenosine-3'-phosphorothioate
  modified_base 20: mod_base = OTHER; note = 2'-O-methyladenosine-3'-phosphorothioate
  modified_base 21: mod_base = OTHER; note = 2'-O-methyladenosine
gcggttgcaaggcccaagaaa

SEQ ID NO: 2159 - RNA, 21 nt, synthetic construct
  source 1..21: mol_type = other RNA
  modified_base 1: mod_base = OTHER; note = 2'-O-methylcytidine-3'-phosphorothioate
  modified_base 2: mod_base = OTHER; note = 2'-O-methyluridine-3'-phosphorothioate
  modified_base 3: mod_base = OTHER; note = 2'-O-methylguanosine-3'-phosphate
  modified_base 4: mod_base = OTHER; note = 2'-O-methylguanosine-3'-phosphate
  modified_base 5: mod_base = OTHER; note = 2'-O-methyladenosine-3'-phosphate
  modified_base 6: mod_base = OTHER; note = 2'-O-docosanyl-guanosine-3'-phosphate
  modified_base 7: mod_base = OTHER; note = 2'-deoxy-2'-fluoroadenosine-3'-phosphate
  modified_base 8: mod_base = OTHER; note = 2'-O-methylguanosine-3'-phosphate
  modified_base 9: mod_base = OTHER; note = 2'-deoxy-2'-fluoroadenosine-3'-phosphate
  modified_base 10: mod_base = OTHER; note = 2'-deoxy-2'-fluoroadenosine-3'-phosphate
  modified_base 11: mod_base = OTHER; note = 2'-deoxy-2'-fluoroguanosine-3'-phosphate
  modified_base 12: mod_base = OTHER; note = 2'-O-methyluridine-3'-phosphate
  modified_base 13: mod_base = OTHER; note = 2'-O-methyluridine-3'-phosphate
  modified_base 14: mod_base = OTHER; note = 2'-O-methyluridine-3'-phosphate
  modified_base 15: mod_base = OTHER; note = 2'-O-methylcytidine-3'-phosphate
  modified_base 16: mod_base = OTHER; note = 2'-O-methyluridine-3'-phosphate
  modified_base 17: mod_base = OTHER; note = 2'-O-methylguanosine-3'-phosphate
  modified_base 18: mod_base = OTHER; note = 2'-O-methylguanosine-3'-phosphate
  modified_base 19: mod_base = OTHER; note = 2'-O-methylcytidine-3'-phosphorothioate
  modified_base 20: mod_base = OTHER; note = 2'-O-methylcytidine-3'-phosphorothioate
  modified_base 21: mod_base = OTHER; note = 2'-O-methyladenosine
ctggagagaagtttctggcca

SEQ ID NO: 2160 - RNA, 21 nt, synthetic construct
  source 1..21: mol_type = other RNA
  modified_base 1: mod_base = OTHER; note = 2'-O-methylguanosine-3'-phosphorothioate
  modified_base 2: mod_base = OTHER; note = 2'-O-methylcytidine-3'-phosphorothioate
  modified_base 3: mod_base = OTHER; note = 2'-O-methylcytidine-3'-phosphate
  modified_base 4: mod_base = OTHER; note = 2'-O-methyluridine-3'-phosphate
  modified_base 5: mod_base = OTHER; note = 2'-O-methylguanosine-3'-phosphate
  modified_base 6: mod_base = OTHER; note = 2'-O-docosanyl-cytidine-3'-phosphate
  modified_base 7: mod_base = OTHER; note = 2'-deoxy-2'-fluoroadenosine-3'-phosphate
  modified_base 8: mod_base = OTHER; note = 2'-O-methylguanosine-3'-phosphate
  modified_base 9: mod_base = OTHER; note = 2'-deoxy-2'-fluoroadenosine-3'-phosphate
  modified_base 10: mod_base = OTHER; note = 2'-deoxy-2'-fluoroguanosine-3'-phosphate
  modified_base 11: mod_base = OTHER; note = 2'-deoxy-2'-fluoroadenosine-3'-phosphate
  modified_base 12: mod_base = OTHER; note = 2'-O-methylguanosine-3'-phosphate
  modified_base 13: mod_base = OTHER; note = 2'-O-methyladenosine-3'-phosphate
  modified_base 14: mod_base = OTHER; note = 2'-O-methyladenosine-3'-phosphate
  modified_base 15: mod_base = OTHER; note = 2'-O-methylguanosine-3'-phosphate
  modified_base 16: mod_base = OTHER; note = 2'-O-methylcytidine-3'-phosphate
  modified_base 17: mod_base = OTHER; note = 2'-O-methylcytidine-3'-phosphate
  modified_base 18: mod_base = OTHER; note = 2'-O-methyluridine-3'-phosphate
  modified_base 19: mod_base = OTHER; note = 2'-O-methylguanosine-3'-phosphorothioate
  modified_base 20: mod_base = OTHER; note = 2'-O-methyluridine-3'-phosphorothioate
  modified_base 21: mod_base = OTHER; note = 2'-O-methyladenosine
gcctgcagagagaagcctgta

SEQ ID NO: 2161 - RNA, 21 nt, synthetic construct
  source 1..21: mol_type = other RNA
  modified_base 1: mod_base = OTHER; note = 2'-O-methylcytidine-3'-phosphorothioate
  modified_base 2: mod_base = OTHER; note = 2'-O-methylcytidine-3'-phosphorothioate
  modified_base 3: mod_base = OTHER; note = 2'-O-methyluridine-3'-phosphate
  modified_base 4: mod_base = OTHER; note = 2'-O-methylcytidine-3'-phosphate
  modified_base 5: mod_base = OTHER; note = 2'-O-methyluridine-3'-phosphate
  modified_base 6: mod_base = OTHER; note = 2'-O-docosanyl-guanosine-3'-phosphate
  modified_base 7: mod_base = OTHER; note = 2'-deoxy-2'-fluoroadenosine-3'-phosphate
  modified_base 8: mod_base = OTHER; note = 2'-O-methyladenosine-3'-phosphate
  modified_base 9: mod_base = OTHER; note = 2'-deoxy-2'-fluorouridine-3'-phosphate
  modified_base 10: mod_base = OTHER; note = 2'-deoxy-2'-fluoroguanosine-3'-phosphate
  modified_base 11: mod_base = OTHER; note = 2'-deoxy-2'-fluoroguanosine-3'-phosphate
  modified_base 12: mod_base = OTHER; note = 2'-O-methyluridine-3'-phosphate
  modified_base 13: mod_base = OTHER; note = 2'-O-methylcytidine-3'-phosphate
  modified_base 14: mod_base = OTHER; note = 2'-O-methylcytidine-3'-phosphate
  modified_base 15: mod_base = OTHER; note = 2'-O-methyladenosine-3'-phosphate
  modified_base 16: mod_base = OTHER; note = 2'-O-methylguanosine-3'-phosphate
  modified_base 17: mod_base = OTHER; note = 2'-O-methylguanosine-3'-phosphate
  modified_base 18: mod_base = OTHER; note = 2'-O-methylguanosine-3'-phosphate
  modified_base 19: mod_base = OTHER; note = 2'-O-methyluridine-3'-phosphorothioate
  modified_base 20: mod_base = OTHER; note = 2'-O-methyluridine-3'-phosphorothioate
  modified_base 21: mod_base = OTHER; note = 2'-O-methyladenosine
cctctgaatggtccagggtta

SEQ ID NO: 2162 - RNA, 21 nt, synthetic construct
  source 1..21: mol_type = other RNA
  modified_base 1: mod_base = OTHER; note = 2'-O-methylcytidine-3'-phosphorothioate
  modified_base 2: mod_base = OTHER; note = 2'-O-methyladenosine-3'-phosphorothioate
  modified_base 3: mod_base = OTHER; note = 2'-O-methyluridine-3'-phosphate
  modified_base 4: mod_base = OTHER; note = 2'-O-methyluridine-3'-phosphate
  modified_base 5: mod_base = OTHER; note = 2'-O-methyladenosine-3'-phosphate
  modified_base 6: mod_base = OTHER; note = 2'-O-docosanyl-adenosine-3'-phosphate
  modified_base 7: mod_base = OTHER; note = 2'-deoxy-2'-fluoroguanosine-3'-phosphate
  modified_base 8: mod_base = OTHER; note = 2'-O-methyladenosine-3'-phosphate
  modified_base 9: mod_base = OTHER; note = 2'-deoxy-2'-fluorouridine-3'-phosphate
  modified_base 10: mod_base = OTHER; note = 2'-deoxy-2'-fluorouridine-3'-phosphate
  modified_base 11: mod_base = OTHER; note = 2'-deoxy-2'-fluoroguanosine-3'-phosphate
  modified_base 12: mod_base = OTHER; note = 2'-O-methyladenosine-3'-phosphate
  modified_base 13: mod_base = OTHER; note = 2'-O-methylguanosine-3'-phosphate
  modified_base 14: mod_base = OTHER; note = 2'-O-methylguanosine-3'-phosphate
  modified_base 15: mod_base = OTHER; note = 2'-O-methylcytidine-3'-phosphate
  modified_base 16: mod_base = OTHER; note = 2'-O-methylcytidine-3'-phosphate
  modified_base 17: mod_base = OTHER; note = 2'-O-methyluridine-3'-phosphate
  modified_base 18: mod_base = OTHER; note = 2'-O-methylguanosine-3'-phosphate
  modified_base 19: mod_base = OTHER; note = 2'-O-methylcytidine-3'-phosphorothioate
  modified_base 20: mod_base = OTHER; note = 2'-O-methylcytidine-3'-phosphorothioate
  modified_base 21: mod_base = OTHER; note = 2'-O-methyladenosine
cattaagattgaggcctgcca

SEQ ID NO: 2163 - RNA, 21 nt, synthetic construct
  source 1..21: mol_type = other RNA
  modified_base 1: mod_base = OTHER; note = 2'-O-methylguanosine-3'-phosphorothioate
  modified_base 2: mod_base = OTHER; note = 2'-O-methyladenosine-3'-phosphorothioate
  modified_base 3: mod_base = OTHER; note = 2'-O-methylguanosine-3'-phosphate
  modified_base 4: mod_base = OTHER; note = 2'-O-methyladenosine-3'-phosphate
  modified_base 5: mod_base = OTHER; note = 2'-O-methylcytidine-3'-phosphate
  modified_base 6: mod_base = OTHER; note = 2'-O-docosanyl-cytidine-3'-phosphate
  modified_base 7: mod_base = OTHER; note = 2'-deoxy-2'-fluoroguanosine-3'-phosphate
  modified_base 8: mod_base = OTHER; note = 2'-O-methyladenosine-3'-phosphate
  modified_base 9: mod_base = OTHER; note = 2'-deoxy-2'-fluoroguanosine-3'-phosphate
  modified_base 10: mod_base = OTHER; note = 2'-deoxy-2'-fluorocytidine-3'-phosphate
  modified_base 11: mod_base = OTHER; note = 2'-deoxy-2'-fluoroguanosine-3'-phosphate
  modified_base 12: mod_base = OTHER; note = 2'-O-methylcytidine-3'-phosphate
  modified_base 13: mod_base = OTHER; note = 2'-O-methyluridine-3'-phosphate
  modified_base 14: mod_base = OTHER; note = 2'-O-methyluridine-3'-phosphate
  modified_base 15: mod_base = OTHER; note = 2'-O-methyluridine-3'-phosphate
  modified_base 16: mod_base = OTHER; note = 2'-O-methylcytidine-3'-phosphate
  modified_base 17: mod_base = OTHER; note = 2'-O-methyluridine-3'-phosphate
  modified_base 18: mod_base = OTHER; note = 2'-O-methylguanosine-3'-phosphate
  modified_base 19: mod_base = OTHER; note = 2'-O-methylguanosine-3'-phosphorothioate
  modified_base 20: mod_base = OTHER; note = 2'-O-methyladenosine-3'-phosphorothioate
  modified_base 21: mod_base = OTHER; note = 2'-O-methyladenosine
gagaccgagcgctttctggaa

SEQ ID NO: 2164 - RNA, 21 nt, synthetic construct
  source 1..21: mol_type = other RNA
  modified_base 1: mod_base = OTHER; note = 2'-O-methyladenosine-3'-phosphorothioate
  modified_base 2: mod_base = OTHER; note = 2'-O-methylguanosine-3'-phosphorothioate
  modified_base 3: mod_base = OTHER; note = 2'-O-methylcytidine-3'-phosphate
  modified_base 4: mod_base = OTHER; note = 2'-O-methylguanosine-3'-phosphate
  modified_base 5: mod_base = OTHER; note = 2'-O-methyladenosine-3'-phosphate
  modified_base 6: mod_base = OTHER; note = 2'-O-docosanyl-guanosine-3'-phosphate
  modified_base 7: mod_base = OTHER; note = 2'-deoxy-2'-fluoroadenosine-3'-phosphate
  modified_base 8: mod_base = OTHER; note = 2'-O-methylguanosine-3'-phosphate
  modified_base 9: mod_base = OTHER; note = 2'-deoxy-2'-fluoroguanosine-3'-phosphate
  modified_base 10: mod_base = OTHER; note = 2'-deoxy-2'-fluorocytidine-3'-phosphate
  modified_base 11: mod_base = OTHER; note = 2'-deoxy-2'-fluoroadenosine-3'-phosphate
  modified_base 12: mod_base = OTHER; note = 2'-O-methylguanosine-3'-phosphate
  modified_base 13: mod_base = OTHER; note = 2'-O-methyladenosine-3'-phosphate
  modified_base 14: mod_base = OTHER; note = 2'-O-methylguanosine-3'-phosphate
  modified_base 15: mod_base = OTHER; note = 2'-O-methyladenosine-3'-phosphate
  modified_base 16: mod_base = OTHER; note = 2'-O-methyladenosine-3'-phosphate
  modified_base 17: mod_base = OTHER; note = 2'-O-methyladenosine-3'-phosphate
  modified_base 18: mod_base = OTHER; note = 2'-O-methylguanosine-3'-phosphate
  modified_base 19: mod_base = OTHER; note = 2'-O-methyladenosine-3'-phosphorothioate
  modified_base 20: mod_base = OTHER; note = 2'-O-methyladenosine-3'-phosphorothioate
  modified_base 21: mod_base = OTHER; note = 2'-O-methyladenosine
agcgagaggcagagaaagaaa

SEQ ID NO: 2165 - RNA, 21 nt, synthetic construct
  source 1..21: mol_type = other RNA
  modified_base 1: mod_base = OTHER; note = 2'-O-methyluridine-3'-phosphorothioate
  modified_base 2: mod_base = OTHER; note = 2'-O-methylguanosine-3'-phosphorothioate
  modified_base 3: mod_base = OTHER; note = 2'-O-methylcytidine-3'-phosphate
  modified_base 4: mod_base = OTHER; note = 2'-O-methylcytidine-3'-phosphate
  modified_base 5: mod_base = OTHER; note = 2'-O-methyladenosine-3'-phosphate
  modified_base 6: mod_base = OTHER; note = 2'-O-docosanyl-cytidine-3'-phosphate
  modified_base 7: mod_base = OTHER; note = 2'-deoxy-2'-fluorocytidine-3'-phosphate
  modified_base 8: mod_base = OTHER; note = 2'-O-methyladenosine-3'-phosphate
  modified_base 9: mod_base = OTHER; note = 2'-deoxy-2'-fluorouridine-3'-phosphate
  modified_base 10: mod_base = OTHER; note = 2'-deoxy-2'-fluorocytidine-3'-phosphate
  modified_base 11: mod_base = OTHER; note = 2'-deoxy-2'-fluorocytidine-3'-phosphate
  modified_base 12: mod_base = OTHER; note = 2'-O-methyluridine-3'-phosphate
  modified_base 13: mod_base = OTHER; note = 2'-O-methylguanosine-3'-phosphate
  modified_base 14: mod_base = OTHER; note = 2'-O-methylcytidine-3'-phosphate
  modified_base 15: mod_base = OTHER; note = 2'-O-methyluridine-3'-phosphate
  modified_base 16: mod_base = OTHER; note = 2'-O-methylguanosine-3'-phosphate
  modified_base 17: mod_base = OTHER; note = 2'-O-methylcytidine-3'-phosphate
  modified_base 18: mod_base = OTHER; note = 2'-O-methyluridine-3'-phosphate
  modified_base 19: mod_base = OTHER; note = 2'-O-methylguanosine-3'-phosphorothioate
  modified_base 20: mod_base = OTHER; note = 2'-O-methyluridine-3'-phosphorothioate
  modified_base 21: mod_base = OTHER; note = 2'-O-methyladenosine
tgccaccatcctgctgctgta

SEQ ID NO: 2166 - RNA, 21 nt, synthetic construct
  source 1..21: mol_type = other RNA
  modified_base 1: mod_base = OTHER; note = 2'-O-methylcytidine-3'-phosphorothioate
  modified_base 2: mod_base = OTHER; note = 2'-O-methyluridine-3'-phosphorothioate
  modified_base 3: mod_base = OTHER; note = 2'-O-methylguanosine-3'-phosphate
  modified_base 4: mod_base = OTHER; note = 2'-O-methylcytidine-3'-phosphate
  modified_base 5: mod_base = OTHER; note = 2'-O-methylcytidine-3'-phosphate
  modified_base 6: mod_base = OTHER; note = 2'-O-docosanyl-cytidine-3'-phosphate
  modified_base 7: mod_base = OTHER; note = 2'-deoxy-2'-fluorouridine-3'-phosphate
  modified_base 8: mod_base = OTHER; note = 2'-O-methylcytidine-3'-phosphate
  modified_base 9: mod_base = OTHER; note = 2'-deoxy-2'-fluoroadenosine-3'-phosphate
  modified_base 10: mod_base = OTHER; note = 2'-deoxy-2'-fluoroguanosine-3'-phosphate
  modified_base 11: mod_base = OTHER; note = 2'-deoxy-2'-fluoroguanosine-3'-phosphate
  modified_base 12: mod_base = OTHER; note = 2'-O-methylguanosine-3'-phosphate
  modified_base 13: mod_base = OTHER; note = 2'-O-methyladenosine-3'-phosphate
  modified_base 14: mod_base = OTHER; note = 2'-O-methyluridine-3'-phosphate
  modified_base 15: mod_base = OTHER; note = 2'-O-methylcytidine-3'-phosphate
  modified_base 16: mod_base = OTHER; note = 2'-O-methyluridine-3'-phosphate
  modified_base 17: mod_base = OTHER; note = 2'-O-methyluridine-3'-phosphate
  modified_base 18: mod_base = OTHER; note = 2'-O-methylguanosine-3'-phosphate
  modified_base 19: mod_base = OTHER; note = 2'-O-methylcytidine-3'-phosphorothioate
  modified_base 20: mod_base = OTHER; note = 2'-O-methyladenosine-3'-phosphorothioate
  modified_base 21: mod_base = OTHER; note = 2'-O-methyladenosine
ctgccctcagggatcttgcaa

SEQ ID NO: 2167 - RNA, 21 nt, synthetic construct
  source 1..21: mol_type = other RNA
  modified_base 1: mod_base = OTHER; note = 2'-O-methylcytidine-3'-phosphorothioate
  modified_base 2: mod_base = OTHER; note = 2'-O-methylcytidine-3'-phosphorothioate
  modified_base 3: mod_base = OTHER; note = 2'-O-methyladenosine-3'-phosphate
  modified_base 4: mod_base = OTHER; note = 2'-O-methyladenosine-3'-phosphate
  modified_base 5: mod_base = OTHER; note = 2'-O-methylguanosine-3'-phosphate
  modified_base 6: mod_base = OTHER; note = 2'-O-docosanyl-cytidine-3'-phosphate
  modified_base 7: mod_base = OTHER; note = 2'-deoxy-2'-fluorouridine-3'-phosphate
  modified_base 8: mod_base = OTHER; note = 2'-O-methylguanosine-3'-phosphate
  modified_base 9: mod_base = OTHER; note = 2'-deoxy-2'-fluorouridine-3'-phosphate
  modified_base 10: mod_base = OTHER; note = 2'-deoxy-2'-fluoroguanosine-3'-phosphate
  modified_base 11: mod_base = OTHER; note = 2'-deoxy-2'-fluorocytidine-3'-phosphate
  modified_base 12: mod_base = OTHER; note = 2'-O-methylcytidine-3'-phosphate
  modified_base 13: mod_base = OTHER; note = 2'-O-methylcytidine-3'-phosphate
  modified_base 14: mod_base = OTHER; note = 2'-O-methyladenosine-3'-phosphate
  modified_base 15: mod_base = OTHER; note = 2'-O-methyluridine-3'-phosphate
  modified_base 16: mod_base = OTHER; note = 2'-O-methylcytidine-3'-phosphate
  modified_base 17: mod_base = OTHER; note = 2'-O-methylcytidine-3'-phosphate
  modified_base 18: mod_base = OTHER; note = 2'-O-methyladenosine-3'-phosphate
  modified_base 19: mod_base = OTHER; note = 2'-O-methyladenosine-3'-phosphorothioate
  modified_base 20: mod_base = OTHER; note = 2'-O-methyladenosine-3'-phosphorothioate
  modified_base 21: mod_base = OTHER; note = 2'-O-methyladenosine
ccaagctgtgcccatccaaaa

SEQ ID NO: 2168 - RNA, 21 nt, synthetic construct
  source 1..21: mol_type = other RNA
  modified_base 1: mod_base = OTHER; note = 2'-O-methylcytidine-3'-phosphorothioate
  modified_base 2: mod_base = OTHER; note = 2'-O-methyladenosine-3'-phosphorothioate
  modified_base 3: mod_base = OTHER; note = 2'-O-methylcytidine-3'-phosphate
  modified_base 4: mod_base = OTHER; note = 2'-O-methyladenosine-3'-phosphate
  modified_base 5: mod_base = OTHER; note = 2'-O-methylguanosine-3'-phosphate
  modified_base 6: mod_base = OTHER; note = 2'-O-docosanyl-guanosine-3'-phosphate
  modified_base 7: mod_base = OTHER; note = 2'-deoxy-2'-fluoroguanosine-3'-phosphate
  modified_base 8: mod_base = OTHER; note = 2'-O-methyladenosine-3'-phosphate
  modified_base 9: mod_base = OTHER; note = 2'-deoxy-2'-fluoroadenosine-3'-phosphate
  modified_base 10: mod_base = OTHER; note = 2'-deoxy-2'-fluorocytidine-3'-phosphate
  modified_base 11: mod_base = OTHER; note = 2'-deoxy-2'-fluorocytidine-3'-phosphate
  modified_base 12: mod_base = OTHER; note = 2'-O-methylcytidine-3'-phosphate
  modified_base 13: mod_base = OTHER; note = 2'-O-methyluridine-3'-phosphate
  modified_base 14: mod_base = OTHER; note = 2'-O-methylguanosine-3'-phosphate
  modified_base 15: mod_base = OTHER; note = 2'-O-methylcytidine-3'-phosphate
  modified_base 16: mod_base = OTHER; note = 2'-O-methyluridine-3'-phosphate
  modified_base 17: mod_base = OTHER; note = 2'-O-methyluridine-3'-phosphate
  modified_base 18: mod_base = OTHER; note = 2'-O-methylguanosine-3'-phosphate
  modified_base 19: mod_base = OTHER; note = 2'-O-methylcytidine-3'-phosphorothioate
  modified_base 20: mod_base = OTHER; note = 2'-O-methyladenosine-3'-phosphorothioate
  modified_base 21: mod_base = OTHER; note = 2'-O-methyladenosine
cacagggaaccctgcttgcaa

SEQ ID NO: 2169 - RNA, 21 nt, synthetic construct
  source 1..21: mol_type = other RNA
  modified_base 1: mod_base = OTHER; note = 2'-O-methyladenosine-3'-phosphorothioate
  modified_base 2: mod_base = OTHER; note = 2'-O-methyluridine-3'-phosphorothioate
  modified_base 3: mod_base = OTHER; note = 2'-O-methyladenosine-3'-phosphate
  modified_base 4: mod_base = OTHER; note = 2'-O-methylguanosine-3'-phosphate
  modified_base 5: mod_base = OTHER; note = 2'-O-methylcytidine-3'-phosphate
  modified_base 6: mod_base = OTHER; note = 2'-O-docosanyl-cytidine-3'-phosphate
  modified_base 7: mod_base = OTHER; note = 2'-deoxy-2'-fluorocytidine-3'-phosphate
  modified_base 8: mod_base = OTHER; note = 2'-O-methyladenosine-3'-phosphate
  modified_base 9: mod_base = OTHER; note = 2'-deoxy-2'-fluoroguanosine-3'-phosphate
  modified_base 10: mod_base = OTHER; note = 2'-deoxy-2'-fluoroguanosine-3'-phosphate
  modified_base 11: mod_base = OTHER; note = 2'-deoxy-2'-fluorouridine-3'-phosphate
  modified_base 12: mod_base = OTHER; note = 2'-O-methylcytidine-3'-phosphate
  modified_base 13: mod_base = OTHER; note = 2'-O-methylcytidine-3'-phosphate
  modified_base 14: mod_base = OTHER; note = 2'-O-methyluridine-3'-phosphate
  modified_base 15: mod_base = OTHER; note = 2'-O-methylcytidine-3'-phosphate
  modified_base 16: mod_base = OTHER; note = 2'-O-methyluridine-3'-phosphate
  modified_base 17: mod_base = OTHER; note = 2'-O-methylguanosine-3'-phosphate
  modified_base 18: mod_base = OTHER; note = 2'-O-methyladenosine-3'-phosphate
  modified_base 19: mod_base = OTHER; note = 2'-O-methyluridine-3'-phosphorothioate
  modified_base 20: mod_base = OTHER; note = 2'-O-methyladenosine-3'-phosphorothioate
  modified_base 21: mod_base = OTHER; note = 2'-O-methyladenosine
atagcccaggtcctctgataa

SEQ ID NO: 2170 - RNA, 21 nt, synthetic construct
  source 1..21: mol_type = other RNA
  modified_base 1: mod_base = OTHER; note = 2'-O-methylguanosine-3'-phosphorothioate
  modified_base 2: mod_base = OTHER; note = 2'-O-methyluridine-3'-phosphorothioate
  modified_base 3: mod_base = OTHER; note = 2'-O-methylcytidine-3'-phosphate
  modified_base 4: mod_base = OTHER; note = 2'-O-methyluridine-3'-phosphate
  modified_base 5: mod_base = OTHER; note = 2'-O-methylcytidine-3'-phosphate
  modified_base 6: mod_base = OTHER; note = 2'-O-docosanyl-uridine-3'-phosphate
  modified_base 7: mod_base = OTHER; note = 2'-deoxy-2'-fluoroguanosine-3'-phosphate
  modified_base 8: mod_base = OTHER; note = 2'-O-methylcytidine-3'-phosphate
  modified_base 9: mod_base = OTHER; note = 2'-deoxy-2'-fluoroadenosine-3'-phosphate
  modified_base 10: mod_base = OTHER; note = 2'-deoxy-2'-fluoroguanosine-3'-phosphate
  modified_base 11: mod_base = OTHER; note = 2'-deoxy-2'-fluoroguanosine-3'-phosphate
  modified_base 12: mod_base = OTHER; note = 2'-O-methyladenosine-3'-phosphate
  modified_base 13: mod_base = OTHER; note = 2'-O-methylcytidine-3'-phosphate
  modified_base 14: mod_base = OTHER; note = 2'-O-methyladenosine-3'-phosphate
  modified_base 15: mod_base = OTHER; note = 2'-O-methyluridine-3'-phosphate
  modified_base 16: mod_base = OTHER; note = 2'-O-methylguanosine-3'-phosphate
  modified_base 17: mod_base = OTHER; note = 2'-O-methylcytidine-3'-phosphate
  modified_base 18: mod_base = OTHER; note = 2'-O-methyluridine-3'-phosphate
  modified_base 19: mod_base = OTHER; note = 2'-O-methylguanosine-3'-phosphorothioate
  modified_base 20: mod_base = OTHER; note = 2'-O-methyluridine-3'-phosphorothioate
  modified_base 21: mod_base = OTHER; note = 2'-O-methyladenosine
gtctctgcaggacatgctgta

SEQ ID NO: 2171 - RNA, 21 nt, synthetic construct
  source 1..21: mol_type = other RNA
  modified_base 1: mod_base = OTHER; note = 2'-O-methyladenosine-3'-phosphorothioate
  modified_base 2: mod_base = OTHER; note = 2'-O-methylcytidine-3'-phosphorothioate
  modified_base 3: mod_base = OTHER; note = 2'-O-methylguanosine-3'-phosphate
  modified_base 4: mod_base = OTHER; note = 2'-O-methylguanosine-3'-phosphate
  modified_base 5: mod_base = OTHER; note = 2'-O-methyluridine-3'-phosphate
  modified_base 6: mod_base = OTHER; note = 2'-O-docosanyl-cytidine-3'-phosphate
  modified_base 7: mod_base = OTHER; note = 2'-deoxy-2'-fluorocytidine-3'-phosphate
  modified_base 8: mod_base = OTHER; note = 2'-O-methylcytidine-3'-phosphate
  modified_base 9: mod_base = OTHER; note = 2'-deoxy-2'-fluoroadenosine-3'-phosphate
  modified_base 10: mod_base = OTHER; note = 2'-deoxy-2'-fluorocytidine-3'-phosphate
  modified_base 11: mod_base = OTHER; note = 2'-deoxy-2'-fluoroadenosine-3'-phosphate
  modified_base 12: mod_base = OTHER; note = 2'-O-methylcytidine-3'-phosphate
  modified_base 13: mod_base = OTHER; note = 2'-O-methyluridine-3'-phosphate
  modified_base 14: mod_base = OTHER; note = 2'-O-methylguanosine-3'-phosphate
  modified_base 15: mod_base = OTHER; note = 2'-O-methylguanosine-3'-phosphate
  modified_base 16: mod_base = OTHER; note = 2'-O-methyluridine-3'-phosphate
  modified_base 17: mod_base = OTHER; note = 2'-O-methylguanosine-3'-phosphate
  modified_base 18: mod_base = OTHER; note = 2'-O-methyladenosine-3'-phosphate
  modified_base 19: mod_base = OTHER; note = 2'-O-methylcytidine-3'-phosphorothioate
  modified_base 20: mod_base = OTHER; note = 2'-O-methyluridine-3'-phosphorothioate
  modified_base 21: mod_base = OTHER; note = 2'-O-methyladenosine
acggtcccacactggtgacta

SEQ ID NO: 2172 - RNA, 21 nt, synthetic construct
  source 1..21: mol_type = other RNA
  modified_base 1: mod_base = OTHER; note = 2'-O-methyladenosine-3'-phosphorothioate
  modified_base 2: mod_base = OTHER; note = 2'-O-methylguanosine-3'-phosphorothioate
  modified_base 3: mod_base = OTHER; note = 2'-O-methyluridine-3'-phosphate
  modified_base 4: mod_base = OTHER; note = 2'-O-methylguanosine-3'-phosphate
  modified_base 5: mod_base = OTHER; note = 2'-O-methylguanosine-3'-phosphate
  modified_base 6: mod_base = OTHER; note = 2'-O-docosanyl-guanosine-3'-phosphate
  modified_base 7: mod_base = OTHER; note = 2'-deoxy-2'-fluorocytidine-3'-phosphate
  modified_base 8: mod_base = OTHER; note = 2'-O-methyluridine-3'-phosphate
  modified_base 9: mod_base = OTHER; note = 2'-deoxy-2'-fluoroguanosine-3'-phosphate
  modified_base 10: mod_base = OTHER; note = 2'-deoxy-2'-fluorocytidine-3'-phosphate
  modified_base 11: mod_base = OTHER; note = 2'-deoxy-2'-fluoroadenosine-3'-phosphate
  modified_base 12: mod_base = OTHER; note = 2'-O-methyluridine-3'-phosphate
  modified_base 13: mod_base = OTHER; note = 2'-O-methylcytidine-3'-phosphate
  modified_base 14: mod_base = OTHER; note = 2'-O-methyluridine-3'-phosphate
  modified_base 15: mod_base = OTHER; note = 2'-O-methylguanosine-3'-phosphate
  modified_base 16: mod_base = OTHER; note = 2'-O-methylguanosine-3'-phosphate
  modified_base 17: mod_base = OTHER; note = 2'-O-methylguanosine-3'-phosphate
  modified_base 18: mod_base = OTHER; note = 2'-O-methyladenosine-3'-phosphate
  modified_base 19: mod_base = OTHER; note = 2'-O-methyluridine-3'-phosphorothioate
  modified_base 20: mod_base = OTHER; note = 2'-O-methyluridine-3'-phosphorothioate
  modified_base 21: mod_base = OTHER; note = 2'-O-methyladenosine
agtgggctgcatctgggatta

SEQ ID NO: 2173 - RNA, 21 nt, synthetic construct
  source 1..21: mol_type = other RNA
  modified_base 1: mod_base = OTHER; note = 2'-O-methylcytidine-3'-phosphorothioate
  modified_base 2: mod_base = OTHER; note = 2'-O-methylcytidine-3'-phosphorothioate
  modified_base 3: mod_base = OTHER; note = 2'-O-methyluridine-3'-phosphate
  modified_base 4: mod_base = OTHER; note = 2'-O-methyluridine-3'-phosphate
  modified_base 5: mod_base = OTHER; note = 2'-O-methylcytidine-3'-phosphate
  modified_base 6: mod_base = OTHER; note = 2'-O-docosanyl-cytidine-3'-phosphate
  modified_base 7: mod_base = OTHER; note = 2'-deoxy-2'-fluorocytidine-3'-phosphate
  modified_base 8: mod_base = OTHER; note = 2'-O-methyladenosine-3'-phosphate
  modified_base 9: mod_base = OTHER; note = 2'-deoxy-2'-fluorocytidine-3'-phosphate
  modified_base 10: mod_base = OTHER; note = 2'-deoxy-2'-fluorouridine-3'-phosphate
  modified_base 11: mod_base = OTHER; note = 2'-deoxy-2'-fluoroguanosine-3'-phosphate
  modified_base 12: mod_base = OTHER; note = 2'-O-methylguanosine-3'-phosphate
  modified_base 13: mod_base = OTHER; note = 2'-O-methyladenosine-3'-phosphate
  modified_base 14: mod_base = OTHER; note = 2'-O-methylguanosine-3'-phosphate
  modified_base 15: mod_base = OTHER; note = 2'-O-methylguanosine-3'-phosphate
  modified_base 16: mod_base = OTHER; note = 2'-O-methyluridine-3'-phosphate
  modified_base 17: mod_base = OTHER; note = 2'-O-methylcytidine-3'-phosphate
  modified_base 18: mod_base = OTHER; note = 2'-O-methyladenosine-3'-phosphate
  modified_base 19: mod_base = OTHER; note = 2'-O-methylcytidine-3'-phosphorothioate
  modified_base 20: mod_base = OTHER; note = 2'-O-methyladenosine-3'-phosphorothioate
  modified_base 21: mod_base = OTHER; note = 2'-O-methyladenosine
ccttcccactggaggtcacaa

SEQ ID NO: 2174 - RNA, 21 nt, synthetic construct
  source 1..21: mol_type = other RNA
  modified_base 1: mod_base = OTHER; note = 2'-O-methyladenosine-3'-phosphorothioate
  modified_base 2: mod_base = OTHER; note = 2'-O-methylcytidine-3'-phosphorothioate
  modified_base 3: mod_base = OTHER; note = 2'-O-methyluridine-3'-phosphate
  modified_base 4: mod_base = OTHER; note = 2'-O-methylguanosine-3'-phosphate
  modified_base 5: mod_base = OTHER; note = 2'-O-methylcytidine-3'-phosphate
  modified_base 6: mod_base = OTHER; note = 2'-O-docosanyl-adenosine-3'-phosphate
  modified_base 7: mod_base = OTHER; note = 2'-deoxy-2'-fluorocytidine-3'-phosphate
  modified_base 8: mod_base = OTHER; note = 2'-O-methyluridine-3'-phosphate
  modified_base 9: mod_base = OTHER; note = 2'-deoxy-2'-fluorocytidine-3'-phosphate
  modified_base 10: mod_base = OTHER; note = 2'-deoxy-2'-fluorocytidine-3'-phosphate
  modified_base 11: mod_base = OTHER; note = 2'-deoxy-2'-fluoroguanosine-3'-phosphate
  modified_base 12: mod_base = OTHER; note = 2'-O-methylguanosine-3'-phosphate
  modified_base 13: mod_base = OTHER; note = 2'-O-methylcytidine-3'-phosphate
  modified_base 14: mod_base = OTHER; note = 2'-O-methylcytidine-3'-phosphate
  modified_base 15: mod_base = OTHER; note = 2'-O-methyluridine-3'-phosphate
  modified_base 16: mod_base = OTHER; note = 2'-O-methylguanosine-3'-phosphate
  modified_base 17: mod_base = OTHER; note = 2'-O-methyladenosine-3'-phosphate
  modified_base 18: mod_base = OTHER; note = 2'-O-methyluridine-3'-phosphate
  modified_base 19: mod_base = OTHER; note = 2'-O-methylguanosine-3'-phosphorothioate
  modified_base 20: mod_base = OTHER; note = 2'-O-methyladenosine-3'-phosphorothioate
  modified_base 21: mod_base = OTHER; note = 2'-O-methyladenosine
actgcactccggcctgatgaa

SEQ ID NO: 2175 - RNA, 21 nt, synthetic construct
  source 1..21: mol_type = other RNA
  modified_base 1: mod_base = OTHER; note = 2'-O-methyladenosine-3'-phosphorothioate
  modified_base 2: mod_base = OTHER; note = 2'-O-methylguanosine-3'-phosphorothioate
  modified_base 3: mod_base = OTHER; note = 2'-O-methyluridine-3'-phosphate
  modified_base 4: mod_base = OTHER; note = 2'-O-methylguanosine-3'-phosphate
  modified_base 5: mod_base = OTHER; note = 2'-O-methylguanosine-3'-phosphate
  modified_base 6: mod_base = OTHER; note = 2'-O-docosanyl-cytidine-3'-phosphate
  modified_base 7: mod_base = OTHER; note = 2'-deoxy-2'-fluorocytidine-3'-phosphate
  modified_base 8: mod_base = OTHER; note = 2'-O-methyluridine-3'-phosphate
  modified_base 9: mod_base = OTHER; note = 2'-deoxy-2'-fluoroguanosine-3'-phosphate
  modified_base 10: mod_base = OTHER; note = 2'-deoxy-2'-fluoroguanosine-3'-phosphate
  modified_base 11: mod_base = OTHER; note = 2'-deoxy-2'-fluoroadenosine-3'-phosphate
  modified_base 12: mod_base = OTHER; note = 2'-O-methylguanosine-3'-phosphate
  modified_base 13: mod_base = OTHER; note = 2'-O-methyladenosine-3'-phosphate
  modified_base 14: mod_base = OTHER; note = 2'-O-methylcytidine-3'-phosphate
  modified_base 15: mod_base = OTHER; note = 2'-O-methylcytidine-3'-phosphate
  modified_base 16: mod_base = OTHER; note = 2'-O-methyluridine-3'-phosphate
  modified_base 17: mod_base = OTHER; note = 2'-O-methyluridine-3'-phosphate
  modified_base 18: mod_base = OTHER; note = 2'-O-methylguanosine-3'-phosphate
  modified_base 19: mod_base = OTHER; note = 2'-O-methylguanosine-3'-phosphorothioate
  modified_base 20: mod_base = OTHER; note = 2'-O-methyladenosine-3'-phosphorothioate
  modified_base 21: mod_base = OTHER; note = 2'-O-methyladenosine
agtggcctggagaccttggaa

SEQ ID NO: 2176 - RNA, 21 nt, synthetic construct
  source 1..21: mol_type = other RNA
  modified_base 1: mod_base = OTHER; note = 2'-O-methylguanosine-3'-phosphorothioate
  modified_base 2: mod_base = OTHER; note = 2'-O-methyluridine-3'-phosphorothioate
  modified_base 3: mod_base = OTHER; note = 2'-O-methylcytidine-3'-phosphate
  modified_base 4: mod_base = OTHER; note = 2'-O-methylcytidine-3'-phosphate
  modified_base 5: mod_base = OTHER; note = 2'-O-methyladenosine-3'-phosphate
  modified_base 6: mod_base = OTHER; note = 2'-O-docosanyl-cytidine-3'-phosphate
  modified_base 7: mod_base = OTHER; note = 2'-deoxy-2'-fluorocytidine-3'-phosphate
  modified_base 8: mod_base = OTHER; note = 2'-O-methylcytidine-3'-phosphate
  modified_base 9: mod_base = OTHER; note = 2'-deoxy-2'-fluoroadenosine-3'-phosphate
  modified_base 10: mod_base = OTHER; note = 2'-deoxy-2'-fluoroguanosine-3'-phosphate
  modified_base 11: mod_base = OTHER; note = 2'-deoxy-2'-fluorocytidine-3'-phosphate
  modified_base 12: mod_base = OTHER; note = 2'-O-methyladenosine-3'-phosphate
  modified_base 13: mod_base = OTHER; note = 2'-O-methyladenosine-3'-phosphate
  modified_base 14: mod_base = OTHER; note = 2'-O-methyladenosine-3'-phosphate
  modified_base 15: mod_base = OTHER; note = 2'-O-methylguanosine-3'-phosphate
  modified_base 16: mod_base = OTHER; note = 2'-O-methyladenosine-3'-phosphate
  modified_base 17: mod_base = OTHER; note = 2'-O-methylguanosine-3'-phosphate
  modified_base 18: mod_base = OTHER; note = 2'-O-methyluridine-3'-phosphate
  modified_base 19: mod_base = OTHER; note = 2'-O-methylguanosine-3'-phosphorothioate
  modified_base 20: mod_base = OTHER; note = 2'-O-methylguanosine-3'-phosphorothioate
  modified_base 21: mod_base = OTHER; note = 2'-O-methyladenosine
gtccacccagcaaagagtgga

SEQ ID NO: 2177 - RNA, 21 nt, synthetic construct
  source 1..21: mol_type = other RNA
  modified_base 1: mod_base = OTHER; note = 2'-O-methylguanosine-3'-phosphorothioate
  modified_base 2: mod_base = OTHER; note = 2'-O-methylguanosine-3'-phosphorothioate
  modified_base 3: mod_base = OTHER; note = 2'-O-methylcytidine-3'-phosphate
  modified_base 4: mod_base = OTHER; note = 2'-O-methyluridine-3'-phosphate
  modified_base 5: mod_base = OTHER; note = 2'-O-methyladenosine-3'-phosphate
  modified_base 6: mod_base = OTHER; note = 2'-O-docosanyl-cytidine-3'-phosphate
  modified_base 7: mod_base = OTHER; note = 2'-deoxy-2'-fluorouridine-3'-phosphate
  modified_base 8: mod_base = OTHER; note = 2'-O-methylcytidine-3'-phosphate
  modified_base 9: mod_base = OTHER; note = 2'-deoxy-2'-fluorocytidine-3'-phosphate
  modified_base 10: mod_base = OTHER; note = 2'-deoxy-2'-fluoroadenosine-3'-phosphate
  modified_base 11: mod_base = OTHER; note = 2'-deoxy-2'-fluorocytidine-3'-phosphate
  modified_base 12: mod_base = OTHER; note = 2'-O-methyladenosine-3'-phosphate
  modified_base 13: mod_base = OTHER; note = 2'-O-methylguanosine-3'-phosphate
  modified_base 14: mod_base = OTHER; note = 2'-O-methyladenosine-3'-phosphate
  modified_base 15: mod_base = OTHER; note = 2'-O-methylguanosine-3'-phosphate
  modified_base 16: mod_base = OTHER; note = 2'-O-methylguanosine-3'-phosphate
  modified_base 17: mod_base = OTHER; note = 2'-O-methyluridine-3'-phosphate
  modified_base 18: mod_base = OTHER; note = 2'-O-methylguanosine-3'-phosphate
  modified_base 19: mod_base = OTHER; note = 2'-O-methylguanosine-3'-phosphorothioate
  modified_base 20: mod_base = OTHER; note = 2'-O-methyluridine-3'-phosphorothioate
  modified_base 21: mod_base = OTHER; note = 2'-O-methyladenosine
ggctactccacagaggtggta

SEQ ID NO: 2178 - RNA, 21 nt, synthetic construct
  source 1..21: mol_type = other RNA
  modified_base 1: mod_base = OTHER; note = 2'-O-methyluridine-3'-phosphorothioate
  modified_base 2: mod_base = OTHER; note = 2'-O-methylguanosine-3'-phosphorothioate
  modified_base 3: mod_base = OTHER; note = 2'-O-methylguanosine-3'-phosphate
  modified_base 4: mod_base = OTHER; note = 2'-O-methylcytidine-3'-phosphate
  modified_base 5: mod_base = OTHER; note = 2'-O-methyladenosine-3'-phosphate
  modified_base 6: mod_base = OTHER; note = 2'-O-docosanyl-guanosine-3'-phosphate
  modified_base 7: mod_base = OTHER; note = 2'-deoxy-2'-fluoroguanosine-3'-phosphate
  modified_base 8: mod_base = OTHER; note = 2'-O-methyladenosine-3'-phosphate
  modified_base 9: mod_base = OTHER; note = 2'-deoxy-2'-fluorocytidine-3'-phosphate
  modified_base 10: mod_base = OTHER; note = 2'-deoxy-2'-fluorocytidine-3'-phosphate
  modified_base 11: mod_base = OTHER; note = 2'-deoxy-2'-fluoroadenosine-3'-phosphate
  modified_base 12: mod_base = OTHER; note = 2'-O-methylguanosine-3'-phosphate
  modified_base 13: mod_base = OTHER; note = 2'-O-methylguanosine-3'-phosphate
  modified_base 14: mod_base = OTHER; note = 2'-O-methyladenosine-3'-phosphate
  modified_base 15: mod_base = OTHER; note = 2'-O-methylcytidine-3'-phosphate
  modified_base 16: mod_base = OTHER; note = 2'-O-methyluridine-3'-phosphate
  modified_base 17: mod_base = OTHER; note = 2'-O-methyladenosine-3'-phosphate
  modified_base 18: mod_base = OTHER; note = 2'-O-methyluridine-3'-phosphate
  modified_base 19: mod_base = OTHER; note = 2'-O-methyladenosine-3'-phosphorothioate
  modified_base 20: mod_base = OTHER; note = 2'-O-methylguanosine-3'-phosphorothioate
  modified_base 21: mod_base = OTHER; note = 2'-O-methyladenosine
tggcaggaccaggactataga

SEQ ID NO: 2179 - RNA, 21 nt, synthetic construct
  source 1..21: mol_type = other RNA
  modified_base 1: mod_base = OTHER; note = 2'-O-methylguanosine-3'-phosphorothioate
  modified_base 2: mod_base = OTHER; note = 2'-O-methyluridine-3'-phosphorothioate
  modified_base 3: mod_base = OTHER; note = 2'-O-methyluridine-3'-phosphate
  modified_base 4: mod_base = OTHER; note = 2'-O-methyladenosine-3'-phosphate
  modified_base 5: mod_base = OTHER; note = 2'-O-methyladenosine-3'-phosphate
  modified_base 6: mod_base = OTHER; note = 2'-O-docosanyl-guanosine-3'-phosphate
  modified_base 7: mod_base = OTHER; note = 2'-deoxy-2'-fluoroguanosine-3'-phosphate
  modified_base 8: mod_base = OTHER; note = 2'-O-methylguanosine-3'-phosphate
  modified_base 9: mod_base = OTHER; note = 2'-deoxy-2'-fluoroadenosine-3'-phosphate
  modified_base 10: mod_base = OTHER; note = 2'-deoxy-2'-fluoroadenosine-3'-phosphate
  modified_base 11: mod_base = OTHER; note = 2'-deoxy-2'-fluoroguanosine-3'-phosphate
  modified_base 12: mod_base = OTHER; note = 2'-O-methylguanosine-3'-phosphate
  modified_base 13: mod_base = OTHER; note = 2'-O-methyladenosine-3'-phosphate
  modified_base 14: mod_base = OTHER; note = 2'-O-methyladenosine-3'-phosphate
  modified_base 15: mod_base = OTHER; note = 2'-O-methylcytidine-3'-phosphate
  modified_base 16: mod_base = OTHER; note = 2'-O-methyluridine-3'-phosphate
  modified_base 17: mod_base = OTHER; note = 2'-O-methylcytidine-3'-phosphate
  modified_base 18: mod_base = OTHER; note = 2'-O-methyluridine-3'-phosphate
  modified_base 19: mod_base = OTHER; note = 2'-O-methylguanosine-3'-phosphorothioate
  modified_base 20: mod_base = OTHER; note = 2'-O-methylguanosine-3'-phosphorothioate
  modified_base 21: mod_base = OTHER; note = 2'-O-methyladenosine
gttaagggaaggaactctgga

SEQ ID NO: 2180 - RNA, 21 nt, synthetic construct
  source 1..21: mol_type = other RNA
  modified_base 1: mod_base = OTHER; note = 2'-O-methyladenosine-3'-phosphorothioate
  modified_base 2: mod_base = OTHER; note = 2'-O-methylcytidine-3'-phosphorothioate
  modified_base 3: mod_base = OTHER; note = 2'-O-methyladenosine-3'-phosphate
  modified_base 4: mod_base = OTHER; note = 2'-O-methylguanosine-3'-phosphate
  modified_base 5: mod_base = OTHER; note = 2'-O-methyluridine-3'-phosphate
  modified_base 6: mod_base = OTHER; note = 2'-O-docosanyl-guanosine-3'-phosphate
  modified_base 7: mod_base = OTHER; note = 2'-deoxy-2'-fluoroguanosine-3'-phosphate
  modified_base 8: mod_base = OTHER; note = 2'-O-methylguanosine-3'-phosphate
  modified_base 9: mod_base = OTHER; note = 2'-deoxy-2'-fluorouridine-3'-phosphate
  modified_base 10: mod_base = OTHER; note = 2'-deoxy-2'-fluoroguanosine-3'-phosphate
  modified_base 11: mod_base = OTHER; note = 2'-deoxy-2'-fluoroguanosine-3'-phosphate
  modified_base 12: mod_base = OTHER; note = 2'-O-methyluridine-3'-phosphate
  modified_base 13: mod_base = OTHER; note = 2'-O-methylguanosine-3'-phosphate
  modified_base 14: mod_base = OTHER; note = 2'-O-methylguanosine-3'-phosphate
  modified_base 15: mod_base = OTHER; note = 2'-O-methyladenosine-3'-phosphate
  modified_base 16: mod_base = OTHER; note = 2'-O-methyluridine-3'-phosphate
  modified_base 17: mod_base = OTHER; note = 2'-O-methylcytidine-3'-phosphate
  modified_base 18: mod_base = OTHER; note = 2'-O-methyluridine-3'-phosphate
  modified_base 19: mod_base = OTHER; note = 2'-O-methylguanosine-3'-phosphorothioate
  modified_base 20: mod_base = OTHER; note = 2'-O-methyluridine-3'-phosphorothioate
  modified_base 21: mod_base = OTHER; note = 2'-O-methyladenosine
acagtgggtggtggatctgta

SEQ ID NO: 2181 - RNA, 21 nt, synthetic construct
  source 1..21: mol_type = other RNA
  modified_base 1: mod_base = OTHER; note = 2'-O-methylguanosine-3'-phosphorothioate
  modified_base 2: mod_base = OTHER; note = 2'-O-methyladenosine-3'-phosphorothioate
  modified_base 3: mod_base = OTHER; note = 2'-O-methylguanosine-3'-phosphate
  modified_base 4: mod_base = OTHER; note = 2'-O-methylcytidine-3'-phosphate
  modified_base 5: mod_base = OTHER; note = 2'-O-methyluridine-3'-phosphate
  modified_base 6: mod_base = OTHER; note = 2'-O-docosanyl-guanosine-3'-phosphate
  modified_base 7: mod_base = OTHER; note = 2'-deoxy-2'-fluoroguanosine-3'-phosphate
  modified_base 8: mod_base = OTHER; note = 2'-O-methylcytidine-3'-phosphate
  modified_base 9: mod_base = OTHER; note = 2'-deoxy-2'-fluoroadenosine-3'-phosphate
  modified_base 10: mod_base = OTHER; note = 2'-deoxy-2'-fluoroadenosine-3'-phosphate
  modified_base 11: mod_base = OTHER; note = 2'-deoxy-2'-fluoroadenosine-3'-phosphate
  modified_base 12: mod_base = OTHER; note = 2'-O-methylguanosine-3'-phosphate
  modified_base 13: mod_base = OTHER; note = 2'-O-methylguanosine-3'-phosphate
  modified_base 14: mod_base = OTHER; note = 2'-O-methyluridine-3'-phosphate
  modified_base 15: mod_base = OTHER; note = 2'-O-methylguanosine-3'-phosphate
  modified_base 16: mod_base = OTHER; note = 2'-O-methylguanosine-3'-phosphate
  modified_base 17: mod_base = OTHER; note = 2'-O-methylcytidine-3'-phosphate
  modified_base 18: mod_base = OTHER; note = 2'-O-methyluridine-3'-phosphate
  modified_base 19: mod_base = OTHER; note = 2'-O-methylcytidine-3'-phosphorothioate
  modified_base 20: mod_base = OTHER; note = 2'-O-methyluridine-3'-phosphorothioate
  modified_base 21: mod_base = OTHER; note = 2'-O-methyladenosine
gagctggcaaaggtggctcta

SEQ ID NO: 2182 - RNA, 21 nt, synthetic construct
  source 1..21: mol_type = other RNA
  modified_base 1: mod_base = OTHER; note = 2'-O-methylcytidine-3'-phosphorothioate
  modified_base 2: mod_base = OTHER; note = 2'-O-methylcytidine-3'-phosphorothioate
  modified_base 3: mod_base = OTHER; note = 2'-O-methyladenosine-3'-phosphate
  modified_base 4: mod_base = OTHER; note = 2'-O-methylcytidine-3'-phosphate
  modified_base 5: mod_base = OTHER; note = 2'-O-methyluridine-3'-phosphate
  modified_base 6: mod_base = OTHER; note = 2'-O-docosanyl-cytidine-3'-phosphate
  modified_base 7: mod_base = OTHER; note = 2'-deoxy-2'-fluoroguanosine-3'-phosphate
  modified_base 8: mod_base = OTHER; note = 2'-O-methylguanosine-3'-phosphate
  modified_base 9: mod_base = OTHER; note = 2'-deoxy-2'-fluoroguanosine-3'-phosphate
  modified_base 10: mod_base = OTHER; note = 2'-deoxy-2'-fluoroadenosine-3'-phosphate
  modified_base 11: mod_base = OTHER; note = 2'-deoxy-2'-fluoroguanosine-3'-phosphate
  modified_base 12: mod_base = OTHER; note = 2'-O-methylguanosine-3'-phosphate
  modified_base 13: mod_base = OTHER; note = 2'-O-methylcytidine-3'-phosphate
  modified_base 14: mod_base = OTHER; note = 2'-O-methyluridine-3'-phosphate
  modified_base 15: mod_base = OTHER; note = 2'-O-methylguanosine-3'-phosphate
  modified_base 16: mod_base = OTHER; note = 2'-O-methyladenosine-3'-phosphate
  modified_base 17: mod_base = OTHER; note = 2'-O-methylguanosine-3'-phosphate
  modified_base 18: mod_base = OTHER; note = 2'-O-methyladenosine-3'-phosphate
  modified_base 19: mod_base = OTHER; note = 2'-O-methylcytidine-3'-phosphorothioate
  modified_base 20: mod_base = OTHER; note = 2'-O-methyladenosine-3'-phosphorothioate
  modified_base 21: mod_base = OTHER; note = 2'-O-methyladenosine
ccactcgggaggctgagacaa

SEQ ID NO: 2183 - RNA, 23 nt, synthetic construct
  source 1..23: mol_type = other RNA
  modified_base 1: mod_base = OTHER; note = 2'-O-methyluridine-3'-phosphorothioate 5'-(E)-Vinylphosphonate
  modified_base 2: mod_base = OTHER; note = 2'-deoxy-2'-fluorouridine-3'-phosphorothioate
  modified_base 3: mod_base = OTHER; note = 2'-O-methylguanosine-3'-phosphate
  modified_base 4: mod_base = OTHER; note = 2'-O-methyluridine-3'-phosphate
  modified_base 5: mod_base = OTHER; note = 2'-O-methyluridine-3'-phosphate
  modified_base 6: mod_base = OTHER; note = 2'-deoxy-2'-fluoroadenosine-3'-phosphate
  modified_base 7: mod_base = OTHER; note = 2'-O-methyluridine-3'-phosphate
  modified_base 8: mod_base = OTHER; note = 2'-deoxy-2'-fluorouridine-3'-phosphate
  modified_base 9: mod_base = OTHER; note = 2'-deoxy-2'-fluorocytidine-3'-phosphate
  modified_base 10: mod_base = OTHER; note = 2'-O-methyladenosine-3'-phosphate
  modified_base 11: mod_base = OTHER; note = 2'-O-methylguanosine-3'-phosphate
  modified_base 12: mod_base = OTHER; note = 2'-O-methyladenosine-3'-phosphate
  modified_base 13: mod_base = OTHER; note = 2'-O-methyladenosine-3'-phosphate
  modified_base 14: mod_base = OTHER; note = 2'-deoxy-2'-fluoroadenosine-3'-phosphate
  modified_base 15: mod_base = OTHER; note = 2'-O-methyladenosine-3'-phosphate
  modified_base 16: mod_base = OTHER; note = 2'-deoxy-2'-fluorocytidine-3'-phosphate
  modified_base 17: mod_base = OTHER; note = 2'-O-methyladenosine-3'-phosphate
  modified_base 18: mod_base = OTHER; note = 2'-O-methylcytidine-3'-phosphate
  modified_base 19: mod_base = OTHER; note = 2'-O-methyladenosine-3'-phosphate
  modified_base 20: mod_base = OTHER; note = 2'-O-methyluridine-3'-phosphate
  modified_base 21: mod_base = OTHER; note = 2'-O-methyluridine-3'-phosphorothioate
  modified_base 22: mod_base = OTHER; note = 2'-O-methylcytidine-3'-phosphorothioate
  modified_base 23: mod_base = OTHER; note = 2'-O-methyluridine
ttgttattcagaaaacacattct

SEQ ID NO: 2184 - RNA, 23 nt, synthetic construct
  source 1..23: mol_type = other RNA
  modified_base 1: mod_base = OTHER; note = 2'-O-methyluridine-3'-phosphorothioate 5'-(E)-Vinylphosphonate
  modified_base 2: mod_base = OTHER; note = 2'-deoxy-2'-fluoroadenosine-3'-phosphorothioate
  modified_base 3: mod_base = OTHER; note = 2'-O-methyladenosine-3'-phosphate
  modified_base 4: mod_base = OTHER; note = 2'-O-methylguanosine-3'-phosphate
  modified_base 5: mod_base = OTHER; note = 2'-O-methyluridine-3'-phosphate
  modified_base 6: mod_base = OTHER; note = 2'-deoxy-2'-fluorouridine-3'-phosphate
  modified_base 7: mod_base = OTHER; note = 2'-O-methyladenosine-3'-phosphate
  modified_base 8: mod_base = OTHER; note = 2'-deoxy-2'-fluoroadenosine-3'-phosphate
  modified_base 9: mod_base = OTHER; note = 2'-deoxy-2'-fluorocytidine-3'-phosphate
  modified_base 10: mod_base = OTHER; note = 2'-O-methyluridine-3'-phosphate
  modified_base 11: mod_base = OTHER; note = 2'-O-methylguanosine-3'-phosphate
  modified_base 12: mod_base = OTHER; note = 2'-O-methylcytidine-3'-phosphate
  modified_base 13: mod_base = OTHER; note = 2'-O-methyluridine-3'-phosphate
  modified_base 14: mod_base = OTHER; note = 2'-deoxy-2'-fluorouridine-3'-phosphate
  modified_base 15: mod_base = OTHER; note = 2'-O-methyluridine-3'-phosphate
  modified_base 16: mod_base = OTHER; note = 2'-deoxy-2'-fluoroguanosine-3'-phosphate
  modified_base 17: mod_base = OTHER; note = 2'-O-methyladenosine-3'-phosphate
  modified_base 18: mod_base = OTHER; note = 2'-O-methyluridine-3'-phosphate
  modified_base 19: mod_base = OTHER; note = 2'-O-methyluridine-3'-phosphate
  modified_base 20: mod_base = OTHER; note = 2'-O-methylcytidine-3'-phosphate
  modified_base 21: mod_base = OTHER; note = 2'-O-methyladenosine-3'-phosphorothioate
  modified_base 22: mod_base = OTHER; note = 2'-O-methyladenosine-3'-phosphorothioate
  modified_base 23: mod_base = OTHER; note = 2'-O-methylguanosine
taagttaactgctttgattcaag

SEQ ID NO: 2185 - RNA, 23 nt, synthetic construct
  source 1..23: mol_type = other RNA
  modified_base 1: mod_base = OTHER; note = 2'-O-methyluridine-3'-phosphorothioate 5'-(E)-Vinylphosphonate
  modified_base 2: mod_base = OTHER; note = 2'-deoxy-2'-fluorouridine-3'-phosphorothioate
  modified_base 3: mod_base = OTHER; note = 2'-O-methyluridine-3'-phosphate
  modified_base 4: mod_base = OTHER; note = 2'-O-methyladenosine-3'-phosphate
  modified_base 5: mod_base = OTHER; note = 2'-O-methyluridine-3'-phosphate
  modified_base 6: mod_base = OTHER; note = 2'-deoxy-2'-fluoroadenosine-3'-phosphate
  modified_base 7: mod_base = OTHER; note = 2'-O-methylcytidine-3'-phosphate
  modified_base 8: mod_base = OTHER; note = 2'-deoxy-2'-fluorouridine-3'-phosphate
  modified_base 9: mod_base = OTHER; note = 2'-deoxy-2'-fluorouridine-3'-phosphate
  modified_base 10: mod_base = OTHER; note = 2'-O-methyladenosine-3'-phosphate
  modified_base 11: mod_base = OTHER; note = 2'-O-methylguanosine-3'-phosphate
  modified_base 12: mod_base = OTHER; note = 2'-O-methylguanosine-3'-phosphate
  modified_base 13: mod_base = OTHER; note = 2'-O-methyladenosine-3'-phosphate
  modified_base 14: mod_base = OTHER; note = 2'-deoxy-2'-fluoroadenosine-3'-phosphate
  modified_base 15: mod_base = OTHER; note = 2'-O-methylguanosine-3'-phosphate
  modified_base 16: mod_base = OTHER; note = 2'-deoxy-2'-fluorouridine-3'-phosphate
  modified_base 17: mod_base = OTHER; note = 2'-O-methyluridine-3'-phosphate
  modified_base 18: mod_base = OTHER; note = 2'-O-methyluridine-3'-phosphate
  modified_base 19: mod_base = OTHER; note = 2'-O-methylcytidine-3'-phosphate
  modified_base 20: mod_base = OTHER; note = 2'-O-methyladenosine-3'-phosphate
  modified_base 21: mod_base = OTHER; note = 2'-O-methylcytidine-3'-phosphorothioate
  modified_base 22: mod_base = OTHER; note = 2'-O-methyladenosine-3'-phosphorothioate
  modified_base 23: mod_base = OTHER; note = 2'-O-methylcytidine
tttatacttaggaagtttcacac

SEQ ID NO: 2186 - RNA, 23 nt, synthetic construct
  source 1..23: mol_type = other RNA
  modified_base 1: mod_base = OTHER; note = 2'-O-methyluridine-3'-phosphorothioate 5'-(E)-Vinylphosphonate
  modified_base 2: mod_base = OTHER; note = 2'-deoxy-2'-fluoroadenosine-3'-phosphorothioate
  modified_base 3: mod_base = OTHER; note = 2'-O-methyladenosine-3'-phosphate
  modified_base 4: mod_base = OTHER; note = 2'-O-methyladenosine-3'-phosphate
  modified_base 5: mod_base = OTHER; note = 2'-O-methyluridine-3'-phosphate
  modified_base 6: mod_base = OTHER; note = 2'-deoxy-2'-fluoroguanosine-3'-phosphate
  modified_base 7: mod_base = OTHER; note = 2'-O-methyladenosine-3'-phosphate
  modified_base 8: mod_base = OTHER; note = 2'-deoxy-2'-fluoroadenosine-3'-phosphate
  modified_base 9: mod_base = OTHER; note = 2'-deoxy-2'-fluoroadenosine-3'-phosphate
  modified_base 10: mod_base = OTHER; note = 2'-O-methylcytidine-3'-phosphate
  modified_base 11: mod_base = OTHER; note = 2'-O-methylcytidine-3'-phosphate
  modified_base 12: mod_base = OTHER; note = 2'-O-methyladenosine-3'-phosphate
  modified_base 13: mod_base = OTHER; note = 2'-O-methylguanosine-3'-phosphate
  modified_base 14: mod_base = OTHER; note = 2'-deoxy-2'-fluorouridine-3'-phosphate
  modified_base 15: mod_base = OTHER; note = 2'-O-methyluridine-3'-phosphate
  modified_base 16: mod_base = OTHER; note = 2'-deoxy-2'-fluoroadenosine-3'-phosphate
  modified_base 17: mod_base = OTHER; note = 2'-O-methylcytidine-3'-phosphate
  modified_base 18: mod_base = OTHER; note = 2'-O-methylguanosine-3'-phosphate
  modified_base 19: mod_base = OTHER; note = 2'-O-methyladenosine-3'-phosphate
  modified_base 20: mod_base = OTHER; note = 2'-O-methylguanosine-3'-phosphate
  modified_base 21: mod_base = OTHER; note = 2'-O-methyladenosine-3'-phosphorothioate
  modified_base 22: mod_base = OTHER; note = 2'-O-methylguanosine-3'-phosphorothioate
  modified_base 23: mod_base = OTHER; note = 2'-O-methyladenosine
taaatgaaaccagttacgagaga

SEQ ID NO: 2187 - RNA, 23 nt, synthetic construct
  source 1..23: mol_type = other RNA
  modified_base 1: mod_base = OTHER; note = 2'-O-methyluridine-3'-phosphorothioate 5'-(E)-Vinylphosphonate
  modified_base 2: mod_base = OTHER; note = 2'-deoxy-2'-fluorouridine-3'-phosphorothioate
  modified_base 3: mod_base = OTHER; note = 2'-O-methyladenosine-3'-phosphate
  modified_base 4: mod_base = OTHER; note = 2'-O-methyladenosine-3'-phosphate
  modified_base 5: mod_base = OTHER; note = 2'-O-methyladenosine-3'-phosphate
  modified_base 6: mod_base = OTHER; note = 2'-deoxy-2'-fluorocytidine-3'-phosphate
  modified_base 7: mod_base = OTHER; note = 2'-O-methyladenosine-3'-phosphate
  modified_base 8: mod_base = OTHER; note = 2'-deoxy-2'-fluorouridine-3'-phosphate
  modified_base 9: mod_base = OTHER; note = 2'-deoxy-2'-fluoroguanosine-3'-phosphate
  modified_base 10: mod_base = OTHER; note = 2'-O-methyluridine-3'-phosphate
  modified_base 11: mod_base = OTHER; note = 2'-O-methyluridine-3'-phosphate
  modified_base 12: mod_base = OTHER; note = 2'-O-methyladenosine-3'-phosphate
  modified_base 13: mod_base = OTHER; note = 2'-O-methylcytidine-3'-phosphate
  modified_base 14: mod_base = OTHER; note = 2'-deoxy-2'-fluoroadenosine-3'-phosphate
  modified_base 15: mod_base = OTHER; note = 2'-O-methyladenosine-3'-phosphate
  modified_base 16: mod_base = OTHER; note = 2'-deoxy-2'-fluoroadenosine-3'-phosphate
  modified_base 17: mod_base = OTHER; note = 2'-O-methylguanosine-3'-phosphate
  modified_base 18: mod_base = OTHER; note = 2'-O-methyluridine-3'-phosphate
  modified_base 19: mod_base = OTHER; note = 2'-O-methylguanosine-3'-phosphate
  modified_base 20: mod_base = OTHER; note = 2'-O-methylcytidine-3'-phosphate
  modified_base 21: mod_base = OTHER; note = 2'-O-methyladenosine-3'-phosphorothioate
  modified_base 22: mod_base = OTHER; note = 2'-O-methyladenosine-3'-phosphorothioate
  modified_base 23: mod_base = OTHER; note = 2'-O-methylguanosine
ttaaacatgttacaaagtgcaag

SEQ ID NO: 2188 - RNA, 23 nt, synthetic construct
  source 1..23: mol_type = other RNA
  modified_base 1: mod_base = OTHER; note = 2'-O-methyluridine-3'-phosphorothioate 5'-(E)-Vinylphosphonate
  modified_base 2: mod_base = OTHER; note = 2'-deoxy-2'-fluoroadenosine-3'-phosphorothioate
  modified_base 3: mod_base = OTHER; note = 2'-O-methyluridine-3'-phosphate
  modified_base 4: mod_base = OTHER; note = 2'-O-methyluridine-3'-phosphate
  modified_base 5: mod_base = OTHER; note = 2'-O-methylcytidine-3'-phosphate
  modified_base 6: mod_base = OTHER; note = 2'-deoxy-2'-fluoroadenosine-3'-phosphate
  modified_base 7: mod_base = OTHER; note = 2'-O-methyladenosine-3'-phosphate
  modified_base 8: mod_base = OTHER; note = 2'-deoxy-2'-fluoroguanosine-3'-phosphate
  modified_base 9: mod_base = OTHER; note = 2'-deoxy-2'-fluorouridine-3'-phosphate
  modified_base 10: mod_base = OTHER; note = 2'-O-methyluridine-3'-phosphate
  modified_base 11: mod_base = OTHER; note = 2'-O-methyluridine-3'-phosphate
  modified_base 12: mod_base = OTHER; note = 2'-O-methylcytidine-3'-phosphate
  modified_base 13: mod_base = OTHER; note = 2'-O-methylcytidine-3'-phosphate
  modified_base 14: mod_base = OTHER; note = 2'-deoxy-2'-fluorouridine-3'-phosphate
  modified_base 15: mod_base = OTHER; note = 2'-O-methyluridine-3'-phosphate
  modified_base 16: mod_base = OTHER; note = 2'-deoxy-2'-fluoroguanosine-3'-phosphate
  modified_base 17: mod_base = OTHER; note = 2'-O-methylguanosine-3'-phosphate
  modified_base 18: mod_base = OTHER; note = 2'-O-methyladenosine-3'-phosphate
  modified_base 19: mod_base = OTHER; note = 2'-O-methylcytidine-3'-phosphate
  modified_base 20: mod_base = OTHER; note = 2'-O-methyladenosine-3'-phosphate
  modified_base 21: mod_base = OTHER; note = 2'-O-methylguanosine-3'-phosphorothioate
  modified_base 22: mod_base = OTHER; note = 2'-O-methyladenosine-3'-phosphorothioate
  modified_base 23: mod_base = OTHER; note = 2'-O-methyluridine
tattcaagtttccttggacagat

SEQ ID NO: 2189 - RNA, 23 nt, synthetic construct
  source 1..23: mol_type = other RNA
  modified_base 1: mod_base = OTHER; note = 2'-O-methyluridine-3'-phosphorothioate 5'-(E)-Vinylphosphonate
  modified_base 2: mod_base = OTHER; note = 2'-deoxy-2'-fluorouridine-3'-phosphorothioate
  modified_base 3: mod_base = OTHER; note = 2'-O-methylguanosine-3'-phosphate
  modified_base 4: mod_base = OTHER; note = 2'-O-methylcytidine-3'-phosphate
  modified_base 5: mod_base = OTHER; note = 2'-O-methyluridine-3'-phosphate
  modified_base 6: mod_base = OTHER; note = 2'-deoxy-2'-fluoroadenosine-3'-phosphate
  modified_base 7: mod_base = OTHER; note = 2'-O-methyladenosine-3'-phosphate
  modified_base 8: mod_base = OTHER; note = 2'-deoxy-2'-fluoroadenosine-3'-phosphate
  modified_base 9: mod_base = OTHER; note = 2'-deoxy-2'-fluoroguanosine-3'-phosphate
  modified_base 10: mod_base = OTHER; note = 2'-O-methylguanosine-3'-phosphate
  modified_base 11: mod_base = OTHER; note = 2'-O-methyladenosine-3'-phosphate
  modified_base 12: mod_base = OTHER; note = 2'-O-methylguanosine-3'-phosphate
  modified_base 13: mod_base = OTHER; note = 2'-O-methyluridine-3'-phosphate
  modified_base 14: mod_base = OTHER; note = 2'-deoxy-2'-fluorouridine-3'-phosphate
  modified_base 15: mod_base = OTHER; note = 2'-O-methyluridine-3'-phosphate
  modified_base 16: mod_base = OTHER; note = 2'-deoxy-2'-fluorouridine-3'-phosphate
  modified_base 17: mod_base = OTHER; note = 2'-O-methylcytidine-3'-phosphate
  modified_base 18: mod_base = OTHER; note = 2'-O-methyluridine-3'-phosphate
  modified_base 19: mod_base = OTHER; note = 2'-O-methyluridine-3'-phosphate
  modified_base 20: mod_base = OTHER; note = 2'-O-methylcytidine-3'-phosphate
  modified_base 21: mod_base = OTHER; note = 2'-O-methyladenosine-3'-phosphorothioate
  modified_base 22: mod_base = OTHER; note = 2'-O-methylcytidine-3'-phosphorothioate
  modified_base 23: mod_base = OTHER; note = 2'-O-methylcytidine
ttgctaaaggagttttcttcacc

SEQ ID NO: 2190 - RNA, 23 nt, synthetic construct
  source 1..23: mol_type = other RNA
  modified_base 1: mod_base = OTHER; note = 2'-O-methyluridine-3'-phosphorothioate 5'-(E)-Vinylphosphonate
  modified_base 2: mod_base = OTHER; note = 2'-deoxy-2'-fluorouridine-3'-phosphorothioate
  modified_base 3: mod_base = OTHER; note = 2'-O-methyladenosine-3'-phosphate
  modified_base 4: mod_base = OTHER; note = 2'-O-methyladenosine-3'-phosphate
  modified_base 5: mod_base = OTHER; note = 2'-O-methylguanosine-3'-phosphate
  modified_base 6: mod_base = OTHER; note = 2'-deoxy-2'-fluoroadenosine-3'-phosphate
  modified_base 7: mod_base = OTHER; note = 2'-O-methyladenosine-3'-phosphate
  modified_base 8: mod_base = OTHER; note = 2'-deoxy-2'-fluoroadenosine-3'-phosphate
  modified_base 9: mod_base = OTHER; note = 2'-deoxy-2'-fluoroadenosine-3'-phosphate
  modified_base 10: mod_base = OTHER; note = 2'-O-methyluridine-3'-phosphate
  modified_base 11: mod_base = OTHER; note = 2'-O-methylguanosine-3'-phosphate
  modified_base 12: mod_base = OTHER; note = 2'-O-methyladenosine-3'-phosphate
  modified_base 13: mod_base = OTHER; note = 2'-O-methyluridine-3'-phosphate
  modified_base 14: mod_base = OTHER; note = 2'-deoxy-2'-fluorocytidine-3'-phosphate
  modified_base 15: mod_base = OTHER; note = 2'-O-methyluridine-3'-phosphate
  modified_base 16: mod_base = OTHER; note = 2'-deoxy-2'-fluorocytidine-3'-phosphate
  modified_base 17: mod_base = OTHER; note = 2'-O-methyladenosine-3'-phosphate
  modified_base 18: mod_base = OTHER; note = 2'-O-methylcytidine-3'-phosphate
  modified_base 19: mod_base = OTHER; note = 2'-O-methyluridine-3'-phosphate
  modified_base 20: mod_base = OTHER; note = 2'-O-methylcytidine-3'-phosphate
  modified_base 21: mod_base = OTHER; note = 2'-O-methylcytidine-3'-phosphorothioate
  modified_base 22: mod_base = OTHER; note = 2'-O-methyluridine-3'-phosphorothioate
  modified_base 23: mod_base = OTHER; note = 2'-O-methyluridine
ttaagaaaatgatctcactcctt

SEQ ID NO: 2191 - RNA, 23 nt, synthetic construct
  source 1..23: mol_type = other RNA
  modified_base 1: mod_base = OTHER; note = 2'-O-methyluridine-3'-phosphorothioate 5'-(E)-Vinylphosphonate
  modified_base 2: mod_base = OTHER; note = 2'-deoxy-2'-fluorouridine-3'-phosphorothioate
  modified_base 3: mod_base = OTHER; note = 2'-O-methyladenosine-3'-phosphate
  modified_base 4: mod_base = OTHER; note = 2'-O-methyladenosine-3'-phosphate
  modified_base 5: mod_base = OTHER; note = 2'-O-methylguanosine-3'-phosphate
  modified_base 6: mod_base = OTHER; note = 2'-deoxy-2'-fluorouridine-3'-phosphate
  modified_base 7: mod_base = OTHER; note = 2'-O-methyluridine-3'-phosphate
  modified_base 8: mod_base = OTHER; note = 2'-deoxy-2'-fluoroadenosine-3'-phosphate
  modified_base 9: mod_base = OTHER; note = 2'-deoxy-2'-fluorocytidine-3'-phosphate
  modified_base 10: mod_base = OTHER; note = 2'-O-methyladenosine-3'-phosphate
  modified_base 11: mod_base = OTHER; note = 2'-O-methyladenosine-3'-phosphate
  modified_base 12: mod_base = OTHER; note = 2'-O-methyladenosine-3'-phosphate
  modified_base 13: mod_base = OTHER; note = 2'-O-methyladenosine-3'-phosphate
  modified_base 14: mod_base = OTHER; note = 2'-deoxy-2'-fluoroadenosine-3'-phosphate
  modified_base 15: mod_base = OTHER; note = 2'-O-methylcytidine-3'-phosphate
  modified_base 16: mod_base = OTHER; note = 2'-deoxy-2'-fluoroadenosine-3'-phosphate
  modified_base 17: mod_base = OTHER; note = 2'-O-methylguanosine-3'-phosphate
  modified_base 18: mod_base = OTHER; note = 2'-O-methyladenosine-3'-phosphate
  modified_base 19: mod_base = OTHER; note = 2'-O-methylcytidine-3'-phosphate
  modified_base 20: mod_base = OTHER; note = 2'-O-methyladenosine-3'-phosphate
  modified_base 21: mod_base = OTHER; note = 2'-O-methyladenosine-3'-phosphorothioate
  modified_base 22: mod_base = OTHER; note = 2'-O-methylcytidine-3'-phosphorothioate
  modified_base 23: mod_base = OTHER; note = 2'-O-methylcytidine
ttaagttacaaaaacagacaacc

SEQ ID NO: 2192 - RNA, 23 nt, synthetic construct
  source 1..23: mol_type = other RNA
  modified_base 1: mod_base = OTHER; note = 2'-O-methyluridine-3'-phosphorothioate 5'-(E)-Vinylphosphonate
  modified_base 2: mod_base = OTHER; note = 2'-deoxy-2'-fluoroadenosine-3'-phosphorothioate
  modified_base 3: mod_base = OTHER; note = 2'-O-methylguanosine-3'-phosphate
  modified_base 4: mod_base = OTHER; note = 2'-O-methyladenosine-3'-phosphate
  modified_base 5: mod_base = OTHER; note = 2'-O-methyladenosine-3'-phosphate
  modified_base 6: mod_base = OTHER; note = 2'-deoxy-2'-fluorocytidine-3'-phosphate
  modified_base 7: mod_base = OTHER; note = 2'-O-methyluridine-3'-phosphate
  modified_base 8: mod_base = OTHER; note = 2'-deoxy-2'-fluoroadenosine-3'-phosphate
  modified_base 9: mod_base = OTHER; note = 2'-deoxy-2'-fluorocytidine-3'-phosphate
  modified_base 10: mod_base = OTHER; note = 2'-O-methyladenosine-3'-phosphate
  modified_base 11: mod_base = OTHER; note = 2'-O-methyladenosine-3'-phosphate
  modified_base 12: mod_base = OTHER; note = 2'-O-methyluridine-3'-phosphate
  modified_base 13: mod_base = OTHER; note = 2'-O-methyluridine-3'-phosphate
  modified_base 14: mod_base = OTHER; note = 2'-deoxy-2'-fluorouridine-3'-phosphate
  modified_base 15: mod_base = OTHER; note = 2'-O-methylguanosine-3'-phosphate
  modified_base 16: mod_base = OTHER; note = 2'-deoxy-2'-fluoroguanosine-3'-phosphate
  modified_base 17: mod_base = OTHER; note = 2'-O-methylcytidine-3'-phosphate
  modified_base 18: mod_base = OTHER; note = 2'-O-methyladenosine-3'-phosphate
  modified_base 19: mod_base = OTHER; note = 2'-O-methyluridine-3'-phosphate
  modified_base 20: mod_base = OTHER; note = 2'-O-methylguanosine-3'-phosphate
  modified_base 21: mod_base = OTHER; note = 2'-O-methylcytidine-3'-phosphorothioate
  modified_base 22: mod_base = OTHER; note = 2'-O-methyladenosine-3'-phosphorothioate
  modified_base 23: mod_base = OTHER; note = 2'-O-methyladenosine
tagaactacaatttggcatgcaa

SEQ ID NO: 2193 - RNA, 23 nt, synthetic construct
  source 1..23: mol_type = other RNA
  modified_base 1: mod_base = OTHER; note = 2'-O-methyluridine-3'-phosphorothioate 5'-(E)-Vinylphosphonate
  modified_base 2: mod_base = OTHER; note = 2'-deoxy-2'-fluorouridine-3'-phosphorothioate
  modified_base 3: mod_base = OTHER; note = 2'-O-methyladenosine-3'-phosphate
  modified_base 4: mod_base = OTHER; note = 2'-O-methyluridine-3'-phosphate
  modified_base 5: mod_base = OTHER; note = 2'-O-methylcytidine-3'-phosphate
  modified_base 6: mod_base = OTHER; note = 2'-deoxy-2'-fluoroadenosine-3'-phosphate
  modified_base 7: mod_base = OTHER; note = 2'-O-methyladenosine-3'-phosphate
  modified_base 8: mod_base = OTHER; note = 2'-deoxy-2'-fluoroadenosine-3'-phosphate
  modified_base 9: mod_base = OTHER; note = 2'-deoxy-2'-fluorocytidine-3'-phosphate
  modified_base 10: mod_base = OTHER; note = 2'-O-methyluridine-3'-phosphate
  modified_base 11: mod_base = OTHER; note = 2'-O-methyluridine-3'-phosphate
  modified_base 12: mod_base = OTHER; note = 2'-O-methylcytidine-3'-phosphate
  modified_base 13: mod_base = OTHER; note = 2'-O-methyluridine-3'-phosphate
  modified_base 14: mod_base = OTHER; note = 2'-deoxy-2'-fluorouridine-3'-phosphate
  modified_base 15: mod_base = OTHER; note = 2'-O-methyluridine-3'-phosphate
  modified_base 16: mod_base = OTHER; note = 2'-deoxy-2'-fluoroadenosine-3'-phosphate
  modified_base 17: mod_base = OTHER; note = 2'-O-methylcytidine-3'-phosphate
  modified_base 18: mod_base = OTHER; note = 2'-O-methylcytidine-3'-phosphate
  modified_base 19: mod_base = OTHER; note = 2'-O-methylcytidine-3'-phosphate
  modified_base 20: mod_base = OTHER; note = 2'-O-methyluridine-3'-phosphate
  modified_base 21: mod_base = OTHER; note = 2'-O-methyluridine-3'-phosphorothioate
  modified_base 22: mod_base = OTHER; note = 2'-O-methylcytidine-3'-phosphorothioate
  modified_base 23: mod_base = OTHER; note = 2'-O-methyladenosine
ttatcaaacttctttacccttca

SEQ ID NO: 2194 - RNA, 23 nt, synthetic construct
  source 1..23: mol_type = other RNA
  modified_base 1: mod_base = OTHER; note = 2'-O-methyluridine-3'-phosphorothioate 5'-(E)-Vinylphosphonate
  modified_base 2: mod_base = OTHER; note = 2'-deoxy-2'-fluorouridine-3'-phosphorothioate
  modified_base 3: mod_base = OTHER; note = 2'-O-methyluridine-3'-phosphate
  modified_base 4: mod_base = OTHER; note = 2'-O-methyluridine-3'-phosphate
  modified_base 5: mod_base = OTHER; note = 2'-O-methylcytidine-3'-phosphate
  modified_base 6: mod_base = OTHER; note = 2'-deoxy-2'-fluoroadenosine-3'-phosphate
  modified_base 7: mod_base = OTHER; note = 2'-O-methyluridine-3'-phosphate
  modified_base 8: mod_base = OTHER; note = 2'-deoxy-2'-fluoroguanosine-3'-phosphate
  modified_base 9: mod_base = OTHER; note = 2'-deoxy-2'-fluoroadenosine-3'-phosphate
  modified_base 10: mod_base = OTHER; note = 2'-O-methyladenosine-3'-phosphate
  modified_base 11: mod_base = OTHER; note = 2'-O-methyladenosine-3'-phosphate
  modified_base 12: mod_base = OTHER; note = 2'-O-methyladenosine-3'-phosphate
  modified_base 13: mod_base = OTHER; note = 2'-O-methyladenosine-3'-phosphate
  modified_base 14: mod_base = OTHER; note = 2'-deoxy-2'-fluorocytidine-3'-phosphate
  modified_base 15: mod_base = OTHER; note = 2'-O-methyladenosine-3'-phosphate
  modified_base 16: mod_base = OTHER; note = 2'-deoxy-2'-fluorouridine-3'-phosphate
  modified_base 17: mod_base = OTHER; note = 2'-O-methylcytidine-3'-phosphate
  modified_base 18: mod_base = OTHER; note = 2'-O-methylcytidine-3'-phosphate
  modified_base 19: mod_base = OTHER; note = 2'-O-methyluridine-3'-phosphate
  modified_base 20: mod_base = OTHER; note = 2'-O-methyladenosine-3'-phosphate
  modified_base 21: mod_base = OTHER; note = 2'-O-methyladenosine-3'-phosphorothioate
  modified_base 22: mod_base = OTHER; note = 2'-O-methylguanosine-3'-phosphorothioate
  modified_base 23: mod_base = OTHER; note = 2'-O-methylcytidine
ttttcatgaaaaacatcctaagc

SEQ ID NO: 2195 - RNA, 23 nt, synthetic construct
  source 1..23: mol_type = other RNA
  modified_base 1: mod_base = OTHER; note = 2'-O-methyluridine-3'-phosphorothioate 5'-(E)-Vinylphosphonate
  modified_base 2: mod_base = OTHER; note = 2'-deoxy-2'-fluorouridine-3'-phosphorothioate
  modified_base 3: mod_base = OTHER; note = 2'-O-methylguanosine-3'-phosphate
  modified_base 4: mod_base = OTHER; note = 2'-O-methyladenosine-3'-phosphate
  modified_base 5: mod_base = OTHER; note = 2'-O-methylcytidine-3'-phosphate
  modified_base 6: mod_base = OTHER; note = 2'-deoxy-2'-fluoroadenosine-3'-phosphate
  modified_base 7: mod_base = OTHER; note = 2'-O-methyladenosine-3'-phosphate
  modified_base 8: mod_base = OTHER; note = 2'-deoxy-2'-fluorouridine-3'-phosphate
  modified_base 9: mod_base = OTHER; note = 2'-deoxy-2'-fluorouridine-3'-phosphate
  modified_base 10: mod_base = OTHER; note = 2'-O-methylguanosine-3'-phosphate
  modified_base 11: mod_base = OTHER; note = 2'-O-methyluridine-3'-phosphate
  modified_base 12: mod_base = OTHER; note = 2'-O-methylcytidine-3'-phosphate
  modified_base 13: mod_base = OTHER; note = 2'-O-methyluridine-3'-phosphate
  modified_base 14: mod_base = OTHER; note = 2'-deoxy-2'-fluorouridine-3'-phosphate
  modified_base 15: mod_base = OTHER; note = 2'-O-methylguanosine-3'-phosphate
  modified_base 16: mod_base = OTHER; note = 2'-deoxy-2'-fluoroadenosine-3'-phosphate
  modified_base 17: mod_base = OTHER; note = 2'-O-methyluridine-3'-phosphate
  modified_base 18: mod_base = OTHER; note = 2'-O-methylguanosine-3'-phosphate
  modified_base 19: mod_base = OTHER; note = 2'-O-methyladenosine-3'-phosphate
  modified_base 20: mod_base = OTHER; note = 2'-O-methylguanosine-3'-phosphate
  modified_base 21: mod_base = OTHER; note = 2'-O-methylguanosine-3'-phosphorothioate
  modified_base 22: mod_base = OTHER; note = 2'-O-methylguanosine-3'-phosphorothioate
  modified_base 23: mod_base = OTHER; note = 2'-O-methyluridine
ttgacaattgtcttgatgagggt

SEQ ID NO: 2196 - RNA, 23 nt, synthetic construct
  source 1..23: mol_type = other RNA
  modified_base 1: mod_base = OTHER; note = 2'-O-methyluridine-3'-phosphorothioate 5'-(E)-Vinylphosphonate
  modified_base 2: mod_base = OTHER; note = 2'-deoxy-2'-fluorouridine-3'-phosphorothioate
  modified_base 3: mod_base = OTHER; note = 2'-O-methyluridine-3'-phosphate
  modified_base 4: mod_base = OTHER; note = 2'-O-methyluridine-3'-phosphate
  modified_base 5: mod_base = OTHER; note = 2'-O-methylcytidine-3'-phosphate
  modified_base 6: mod_base = OTHER; note = 2'-deoxy-2'-fluoroadenosine-3'-phosphate
  modified_base 7: mod_base = OTHER; note = 2'-O-methyluridine-3'-phosphate
  modified_base 8: mod_base = OTHER; note = 2'-deoxy-2'-fluorocytidine-3'-phosphate
  modified_base 9: mod_base = OTHER; note = 2'-deoxy-2'-fluorouridine-3'-phosphate
  modified_base 10: mod_base = OTHER; note = 2'-O-methyluridine-3'-phosphate
  modified_base 11: mod_base = OTHER; note = 2'-O-methylcytidine-3'-phosphate
  modified_base 12: mod_base = OTHER; note = 2'-O-methylcytidine-3'-phosphate
  modified_base 13: mod_base = OTHER; note = 2'-O-methyluridine-3'-phosphate
  modified_base 14: mod_base = OTHER; note = 2'-deoxy-2'-fluoroguanosine-3'-phosphate
  modified_base 15: mod_base = OTHER; note = 2'-O-methyladenosine-3'-phosphate
  modified_base 16: mod_base = OTHER; note = 2'-deoxy-2'-fluoroadenosine-3'-phosphate
  modified_base 17: mod_base = OTHER; note = 2'-O-methyluridine-3'-phosphate
  modified_base 18: mod_base = OTHER; note = 2'-O-methylguanosine-3'-phosphate
  modified_base 19: mod_base = OTHER; note = 2'-O-methyluridine-3'-phosphate
  modified_base 20: mod_base = OTHER; note = 2'-O-methylguanosine-3'-phosphate
  modified_base 21: mod_base = OTHER; note = 2'-O-methyladenosine-3'-phosphorothioate
  modified_base 22: mod_base = OTHER; note = 2'-O-methylcytidine-3'-phosphorothioate
  modified_base 23: mod_base = OTHER; note = 2'-O-methylcytidine
ttttcatcttcctgaatgtgacc

SEQ ID NO: 2197 - RNA, 23 nt, synthetic construct
  source 1..23: mol_type = other RNA
  modified_base 1: mod_base = OTHER; note = 2'-O-methyluridine-3'-phosphorothioate 5'-(E)-Vinylphosphonate
  modified_base 2: mod_base = OTHER; note = 2'-deoxy-2'-fluorouridine-3'-phosphorothioate
  modified_base 3: mod_base = OTHER; note = 2'-O-methyladenosine-3'-phosphate
  modified_base 4: mod_base = OTHER; note = 2'-O-methylcytidine-3'-phosphate
  modified_base 5: mod_base = OTHER; note = 2'-O-methyladenosine-3'-phosphate
  modified_base 6: mod_base = OTHER; note = 2'-deoxy-2'-fluorouridine-3'-phosphate
  modified_base 7: mod_base = OTHER; note = 2'-O-methyladenosine-3'-phosphate
  modified_base 8: mod_base = OTHER; note = 2'-deoxy-2'-fluorouridine-3'-phosphate
  modified_base 9: mod_base = OTHER; note = 2'-deoxy-2'-fluoroguanosine-3'-phosphate
  modified_base 10: mod_base = OTHER; note = 2'-O-methyladenosine-3'-phosphate
  modified_base 11: mod_base = OTHER; note = 2'-O-methylcytidine-3'-phosphate
  modified_base 12: mod_base = OTHER; note = 2'-O-methyladenosine-3'-phosphate
  modified_base 13: mod_base = OTHER; note = 2'-O-methylcytidine-3'-phosphate
  modified_base 14: mod_base = OTHER; note = 2'-deoxy-2'-fluorouridine-3'-phosphate
  modified_base 15: mod_base = OTHER; note = 2'-O-methyluridine-3'-phosphate
  modified_base 16: mod_base = OTHER; note = 2'-deoxy-2'-fluoroguanosine-3'-phosphate
  modified_base 17: mod_base = OTHER; note = 2'-O-methyladenosine-3'-phosphate
  modified_base 18: mod_base = OTHER; note = 2'-O-methylcytidine-3'-phosphate
  modified_base 19: mod_base = OTHER; note = 2'-O-methyladenosine-3'-phosphate
  modified_base 20: mod_base = OTHER; note = 2'-O-methyladenosine-3'-phosphate
  modified_base 21: mod_base = OTHER; note = 2'-O-methyladenosine-3'-phosphorothioate
  modified_base 22: mod_base = OTHER; note = 2'-O-methyladenosine-3'-phosphorothioate
  modified_base 23: mod_base = OTHER; note = 2'-O-methylcytidine
ttacatatgacacttgacaaaac

SEQ ID NO: 2198 - RNA, 23 nt, synthetic construct
  source 1..23: mol_type = other RNA
  modified_base 1: mod_base = OTHER; note = 2'-O-methyluridine-3'-phosphorothioate 5'-(E)-Vinylphosphonate
  modified_base 2: mod_base = OTHER; note = 2'-deoxy-2'-fluorocytidine-3'-phosphorothioate
  modified_base 3: mod_base = OTHER; note = 2'-O-methyladenosine-3'-phosphate
  modified_base 4: mod_base = OTHER; note = 2'-O-methylguanosine-3'-phosphate
  modified_base 5: mod_base = OTHER; note = 2'-O-methyluridine-3'-phosphate
  modified_base 6: mod_base = OTHER; note = 2'-deoxy-2'-fluorouridine-3'-phosphate
  modified_base 7: mod_base = OTHER; note = 2'-O-methyladenosine-3'-phosphate
  modified_base 8: mod_base = OTHER; note = 2'-deoxy-2'-fluorouridine-3'-phosphate
  modified_base 9: mod_base = OTHER; note = 2'-deoxy-2'-fluorocytidine-3'-phosphate
  modified_base 10: mod_base = OTHER; note = 2'-O-methyluridine-3'-phosphate
  modified_base 11: mod_base = OTHER; note = 2'-O-methyluridine-3'-phosphate
  modified_base 12: mod_base = OTHER; note = 2'-O-methylguanosine-3'-phosphate
  modified_base 13: mod_base = OTHER; note = 2'-O-methyluridine-3'-phosphate
  modified_base 14: mod_base = OTHER; note = 2'-deoxy-2'-fluorouridine-3'-phosphate
  modified_base 15: mod_base = OTHER; note = 2'-O-methyluridine-3'-phosphate
  modified_base 16: mod_base = OTHER; note = 2'-deoxy-2'-fluorocytidine-3'-phosphate
  modified_base 17: mod_base = OTHER; note = 2'-O-methyladenosine-3'-phosphate
  modified_base 18: mod_base = OTHER; note = 2'-O-methyladenosine-3'-phosphate
  modified_base 19: mod_base = OTHER; note = 2'-O-methyladenosine-3'-phosphate
  modified_base 20: mod_base = OTHER; note = 2'-O-methylguanosine-3'-phosphate
  modified_base 21: mod_base = OTHER; note = 2'-O-methylguanosine-3'-phosphorothioate
  modified_base 22: mod_base = OTHER; note = 2'-O-methylguanosine-3'-phosphorothioate
  modified_base 23: mod_base = OTHER; note = 2'-O-methyladenosine
tcagttatcttgtttcaaaggga

SEQ ID NO: 2199 - RNA, 23 nt, synthetic construct
  source 1..23: mol_type = other RNA
  modified_base 1: mod_base = OTHER; note = 2'-O-methyluridine-3'-phosphorothioate 5'-(E)-Vinylphosphonate
  modified_base 2: mod_base = OTHER; note = 2'-deoxy-2'-fluorouridine-3'-phosphorothioate
  modified_base 3: mod_base = OTHER; note = 2'-O-methyluridine-3'-phosphate
  modified_base 4: mod_base = OTHER; note = 2'-O-methylguanosine-3'-phosphate
  modified_base 5: mod_base = OTHER; note = 2'-O-methylguanosine-3'-phosphate
  modified_base 6: mod_base = OTHER; note = 2'-deoxy-2'-fluorouridine-3'-phosphate
  modified_base 7: mod_base = OTHER; note = 2'-O-methyluridine-3'-phosphate
  modified_base 8: mod_base = OTHER; note = 2'-deoxy-2'-fluorouridine-3'-phosphate
  modified_base 9: mod_base = OTHER; note = 2'-deoxy-2'-fluorocytidine-3'-phosphate
  modified_base 10: mod_base = OTHER; note = 2'-O-methyladenosine-3'-phosphate
  modified_base 11: mod_base = OTHER; note = 2'-O-methyladenosine-3'-phosphate
  modified_base 12: mod_base = OTHER; note = 2'-O-methylguanosine-3'-phosphate
  modified_base 13: mod_base = OTHER; note = 2'-O-methylcytidine-3'-phosphate
  modified_base 14: mod_base = OTHER; note = 2'-deoxy-2'-fluoroadenosine-3'-phosphate
  modified_base 15: mod_base = OTHER; note = 2'-O-methyladenosine-3'-phosphate
  modified_base 16: mod_base = OTHER; note = 2'-deoxy-2'-fluoroadenosine-3'-phosphate
  modified_base 17: mod_base = OTHER; note = 2'-O-methyladenosine-3'-phosphate
  modified_base 18: mod_base = OTHER; note = 2'-O-methylguanosine-3'-phosphate
  modified_base 19: mod_base = OTHER; note = 2'-O-methylguanosine-3'-phosphate
  modified_base 20: mod_base = OTHER; note = 2'-O-methyladenosine-3'-phosphate
  modified_base 21: mod_base = OTHER; note = 2'-O-methylguanosine-3'-phosphorothioate
  modified_base 22: mod_base = OTHER; note = 2'-O-methylguanosine-3'-phosphorothioate
  modified_base 23: mod_base = OTHER; note = 2'-O-methylcytidine
tttggtttcaagcaaaaggaggc

SEQ ID NO: 2200 - RNA, 23 nt, synthetic construct
  source 1..23: mol_type = other RNA
  modified_base 1: mod_base = OTHER; note = 2'-O-methyluridine-3'-phosphorothioate 5'-(E)-Vinylphosphonate
  modified_base 2: mod_base = OTHER; note = 2'-deoxy-2'-fluoroadenosine-3'-phosphorothioate
  modified_base 3: mod_base = OTHER; note = 2'-O-methyladenosine-3'-phosphate
  modified_base 4: mod_base = OTHER; note = 2'-O-methyladenosine-3'-phosphate
  modified_base 5: mod_base = OTHER; note = 2'-O-methyluridine-3'-phosphate
  modified_base 6: mod_base = OTHER; note = 2'-deoxy-2'-fluoroguanosine-3'-phosphate
  modified_base 7: mod_base = OTHER; note = 2'-O-methyluridine-3'-phosphate
  modified_base 8: mod_base = OTHER; note = 2'-deoxy-2'-fluorocytidine-3'-phosphate
  modified_base 9: mod_base = OTHER; note = 2'-deoxy-2'-fluoroadenosine-3'-phosphate
  modified_base 10: mod_base = OTHER; note = 2'-O-methyluridine-3'-phosphate
  modified_base 11: mod_base = OTHER; note = 2'-O-methyluridine-3'-phosphate
  modified_base 12: mod_base = OTHER; note = 2'-O-methylguanosine-3'-phosphate
  modified_base 13: mod_base = OTHER; note = 2'-O-methyladenosine-3'-phosphate
  modified_base 14: mod_base = OTHER; note = 2'-deoxy-2'-fluorouridine-3'-phosphate
  modified_base 15: mod_base = OTHER; note = 2'-O-methylcytidine-3'-phosphate
  modified_base 16: mod_base = OTHER; note = 2'-deoxy-2'-fluorocytidine-3'-phosphate
  modified_base 17: mod_base = OTHER; note = 2'-O-methyluridine-3'-phosphate
  modified_base 18: mod_base = OTHER; note = 2'-O-methylguanosine-3'-phosphate
  modified_base 19: mod_base = OTHER; note = 2'-O-methylguanosine-3'-phosphate
  modified_base 20: mod_base = OTHER; note = 2'-O-methyluridine-3'-phosphate
  modified_base 21: mod_base = OTHER; note = 2'-O-methylguanosine-3'-phosphorothioate
  modified_base 22: mod_base = OTHER; note = 2'-O-methyladenosine-3'-phosphorothioate
  modified_base 23: mod_base = OTHER; note = 2'-O-methylcytidine
taaatgtcattgatcctggtgac

SEQ ID NO: 2201 - RNA, 23 nt, synthetic construct
  source 1..23: mol_type = other RNA
  modified_base 1: mod_base = OTHER; note = 2'-O-methyluridine-3'-phosphorothioate 5'-(E)-Vinylphosphonate
  modified_base 2: mod_base = OTHER; note = 2'-deoxy-2'-fluorouridine-3'-phosphorothioate
  modified_base 3: mod_base = OTHER; note = 2'-O-methyladenosine-3'-phosphate
  modified_base 4: mod_base = OTHER; note = 2'-O-methyluridine-3'-phosphate
  modified_base 5: mod_base = OTHER; note = 2'-O-methyluridine-3'-phosphate
  modified_base 6: mod_base = OTHER; note = 2'-deoxy-2'-fluorocytidine-3'-phosphate
  modified_base 7: mod_base = OTHER; note = 2'-O-methyluridine-3'-phosphate
  modified_base 8: mod_base = OTHER; note = 2'-deoxy-2'-fluoroguanosine-3'-phosphate
  modified_base 9: mod_base = OTHER; note = 2'-deoxy-2'-fluoroguanosine-3'-phosphate
  modified_base 10: mod_base = OTHER; note = 2'-O-methyladenosine-3'-phosphate
  modified_base 11: mod_base = OTHER; note = 2'-O-methyluridine-3'-phosphate
  modified_base 12: mod_base = OTHER; note = 2'-O-methylguanosine-3'-phosphate
  modified_base 13: mod_base = OTHER; note = 2'-O-methylguanosine-3'-phosphate
  modified_base 14: mod_base = OTHER; note = 2'-deoxy-2'-fluoroadenosine-3'-phosphate
  modified_base 15: mod_base = OTHER; note = 2'-O-methyluridine-3'-phosphate
  modified_base 16: mod_base = OTHER; note = 2'-deoxy-2'-fluorouridine-3'-phosphate
  modified_base 17: mod_base = OTHER; note = 2'-O-methyluridine-3'-phosphate
  modified_base 18: mod_base = OTHER; note = 2'-O-methylguanosine-3'-phosphate
  modified_base 19: mod_base = OTHER; note = 2'-O-methyladenosine-3'-phosphate
  modified_base 20: mod_base = OTHER; note = 2'-O-methyladenosine-3'-phosphate
  modified_base 21: mod_base = OTHER; note = 2'-O-methylguanosine-3'-phosphorothioate
  modified_base 22: mod_base = OTHER; note = 2'-O-methylcytidine-3'-phosphorothioate
  modified_base 23: mod_base = OTHER; note = 2'-O-methyladenosine
ttattctggatggatttgaagca

SEQ ID NO: 2202 - RNA, 23 nt, synthetic construct
  source 1..23: mol_type = other RNA
  modified_base 1: mod_base = OTHER; note = 2'-O-methyluridine-3'-phosphorothioate 5'-(E)-Vinylphosphonate
  modified_base 2: mod_base = OTHER; note = 2'-deoxy-2'-fluorocytidine-3'-phosphorothioate
  modified_base 3: mod_base = OTHER; note = 2'-O-methyladenosine-3'-phosphate
  modified_base 4: mod_base = OTHER; note = 2'-O-methyladenosine-3'-phosphate
  modified_base 5: mod_base = OTHER; note = 2'-O-methylcytidine-3'-phosphate
  modified_base 6: mod_base = OTHER; note = 2'-deoxy-2'-fluoroadenosine-3'-phosphate
  modified_base 7: mod_base = OTHER; note = 2'-O-methyladenosine-3'-phosphate
  modified_base 8: mod_base = OTHER; note = 2'-deoxy-2'-fluoroadenosine-3'-phosphate
  modified_base 9: mod_base = OTHER; note = 2'-deoxy-2'-fluorouridine-3'-phosphate
  modified_base 10: mod_base = OTHER; note = 2'-O-methylguanosine-3'-phosphate
  modified_base 11: mod_base = OTHER; note = 2'-O-methylguanosine-3'-phosphate
  modified_base 12: mod_base = OTHER; note = 2'-O-methylcytidine-3'-phosphate
  modified_base 13: mod_base = OTHER; note = 2'-O-methyluridine-3'-phosphate
  modified_base 14: mod_base = OTHER; note = 2'-deoxy-2'-fluorouridine-3'-phosphate
  modified_base 15: mod_base = OTHER; note = 2'-O-methyluridine-3'-phosphate
  modified_base 16: mod_base = OTHER; note = 2'-deoxy-2'-fluorocytidine-3'-phosphate
  modified_base 17: mod_base = OTHER; note = 2'-O-methyladenosine-3'-phosphate
  modified_base 18: mod_base = OTHER; note = 2'-O-methylguanosine-3'-phosphate
  modified_base 19: mod_base = OTHER; note = 2'-O-methylcytidine-3'-phosphate
  modified_base 20: mod_base = OTHER; note = 2'-O-methylcytidine-3'-phosphate
  modified_base 21: mod_base = OTHER; note = 2'-O-methylcytidine-3'-phosphorothioate
  modified_base 22: mod_base = OTHER; note = 2'-O-methyluridine-3'-phosphorothioate
  modified_base 23: mod_base = OTHER; note = 2'-O-methyluridine
tcaacaaatggctttcagccctt

SEQ ID NO: 2203 - RNA, 23 nt, synthetic construct
  source 1..23: mol_type = other RNA
  modified_base 1: mod_base = OTHER; note = 2'-O-methyluridine-3'-phosphorothioate 5'-(E)-Vinylphosphonate
  modified_base 2: mod_base = OTHER; note = 2'-deoxy-2'-fluoroadenosine-3'-phosphorothioate
  modified_base 3: mod_base = OTHER; note = 2'-O-methylcytidine-3'-phosphate
  modified_base 4: mod_base = OTHER; note = 2'-O-methyluridine-3'-phosphate
  modified_base 5: mod_base = OTHER; note = 2'-O-methylcytidine-3'-phosphate
  modified_base 6: mod_base = OTHER; note = 2'-deoxy-2'-fluoroadenosine-3'-phosphate
  modified_base 7: mod_base = OTHER; note = 2'-O-methyladenosine-3'-phosphate
  modified_base 8: mod_base = OTHER; note = 2'-deoxy-2'-fluoroadenosine-3'-phosphate
  modified_base 9: mod_base = OTHER; note = 2'-deoxy-2'-fluoroadenosine-3'-phosphate
  modified_base 10: mod_base = OTHER; note = 2'-O-methyluridine-3'-phosphate
  modified_base 11: mod_base = OTHER; note = 2'-O-methylguanosine-3'-phosphate
  modified_base 12: mod_base = OTHER; note = 2'-O-methylguanosine-3'-phosphate
  modified_base 13: mod_base = OTHER; note = 2'-O-methylguanosine-3'-phosphate
  modified_base 14: mod_base = OTHER; note = 2'-deoxy-2'-fluorouridine-3'-phosphate
  modified_base 15: mod_base = OTHER; note = 2'-O-methyluridine-3'-phosphate
  modified_base 16: mod_base = OTHER; note = 2'-deoxy-2'-fluorocytidine-3'-phosphate
  modified_base 17: mod_base = OTHER; note = 2'-O-methyladenosine-3'-phosphate
  modified_base 18: mod_base = OTHER; note = 2'-O-methylguanosine-3'-phosphate
  modified_base 19: mod_base = OTHER; note = 2'-O-methylcytidine-3'-phosphate
  modified_base 20: mod_base = OTHER; note = 2'-O-methyluridine-3'-phosphate
  modified_base 21: mod_base = OTHER; note = 2'-O-methylcytidine-3'-phosphorothioate
  modified_base 22: mod_base = OTHER; note = 2'-O-methyladenosine-3'-phosphorothioate
  modified_base 23: mod_base = OTHER; note = 2'-O-methylguanosine
tactcaaaatgggttcagctcag

SEQ ID NO: 2204 - RNA, 23 nt, synthetic construct
  source 1..23: mol_type = other RNA
  modified_base 1: mod_base = OTHER; note = 2'-O-methyluridine-3'-phosphorothioate 5'-(E)-Vinylphosphonate
  modified_base 2: mod_base = OTHER; note = 2'-deoxy-2'-fluorouridine-3'-phosphorothioate
  modified_base 3: mod_base = OTHER; note = 2'-O-methylguanosine-3'-phosphate
  modified_base 4: mod_base = OTHER; note = 2'-O-methyluridine-3'-phosphate
  modified_base 5: mod_base = OTHER; note = 2'-O-methylguanosine-3'-phosphate
  modified_base 6: mod_base = OTHER; note = 2'-deoxy-2'-fluoroadenosine-3'-phosphate
  modified_base 7: mod_base = OTHER; note = 2'-O-methyluridine-3'-phosphate
  modified_base 8: mod_base = OTHER; note = 2'-deoxy-2'-fluoroadenosine-3'-phosphate
  modified_base 9: mod_base = OTHER; note = 2'-deoxy-2'-fluoroguanosine-3'-phosphate
  modified_base 10: mod_base = OTHER; note = 2'-O-methylcytidine-3'-phosphate
  modified_base 11: mod_base = OTHER; note = 2'-O-methyladenosine-3'-phosphate
  modified_base 12: mod_base = OTHER; note = 2'-O-methyladenosine-3'-phosphate
  modified_base 13: mod_base = OTHER; note = 2'-O-methyladenosine-3'-phosphate
  modified_base 14: mod_base = OTHER; note = 2'-deoxy-2'-fluoroadenosine-3'-phosphate
  modified_base 15: mod_base = OTHER; note = 2'-O-methyladenosine-3'-phosphate
  modified_base 16: mod_base = OTHER; note = 2'-deoxy-2'-fluorocytidine-3'-phosphate
  modified_base 17: mod_base = OTHER; note = 2'-O-methyladenosine-3'-phosphate
  modified_base 18: mod_base = OTHER; note = 2'-O-methylcytidine-3'-phosphate
  modified_base 19: mod_base = OTHER; note = 2'-O-methyladenosine-3'-phosphate
  modified_base 20: mod_base = OTHER; note = 2'-O-methylguanosine-3'-phosphate
  modified_base 21: mod_base = OTHER; note = 2'-O-methylcytidine-3'-phosphorothioate
  modified_base 22: mod_base = OTHER; note = 2'-O-methyladenosine-3'-phosphorothioate
  modified_base 23: mod_base = OTHER; note = 2'-O-methylguanosine
ttgtgatagcaaaaacacagcag

SEQ ID NO: 2205 - RNA, 23 nt, synthetic construct
  source 1..23: mol_type = other RNA
  modified_base 1: mod_base = OTHER; note = 2'-O-methyluridine-3'-phosphorothioate 5'-(E)-Vinylphosphonate
  modified_base 2: mod_base = OTHER; note = 2'-deoxy-2'-fluoroadenosine-3'-phosphorothioate
  modified_base 3: mod_base = OTHER; note = 2'-O-methyladenosine-3'-phosphate
  modified_base 4: mod_base = OTHER; note = 2'-O-methyladenosine-3'-phosphate
  modified_base 5: mod_base = OTHER; note = 2'-O-methyluridine-3'-phosphate
  modified_base 6: mod_base = OTHER; note = 2'-deoxy-2'-fluorouridine-3'-phosphate
  modified_base 7: mod_base = OTHER; note = 2'-O-methylguanosine-3'-phosphate
  modified_base 8: mod_base = OTHER; note = 2'-deoxy-2'-fluoroadenosine-3'-phosphate
  modified_base 9: mod_base = OTHER; note = 2'-deoxy-2'-fluorocytidine-3'-phosphate
  modified_base 10: mod_base = OTHER; note = 2'-O-methyladenosine-3'-phosphate
  modified_base 11: mod_base = OTHER; note = 2'-O-methylguanosine-3'-phosphate
  modified_base 12: mod_base = OTHER; note = 2'-O-methyladenosine-3'-phosphate
  modified_base 13: mod_base = OTHER; note = 2'-O-methylguanosine-3'-phosphate
  modified_base 14: mod_base = OTHER; note = 2'-deoxy-2'-fluorouridine-3'-phosphate
  modified_base 15: mod_base = OTHER; note = 2'-O-methylcytidine-3'-phosphate
  modified_base 16: mod_base = OTHER; note = 2'-deoxy-2'-fluorocytidine-3'-phosphate
  modified_base 17: mod_base = OTHER; note = 2'-O-methyluridine-3'-phosphate
  modified_base 18: mod_base = OTHER; note = 2'-O-methylguanosine-3'-phosphate
  modified_base 19: mod_base = OTHER; note = 2'-O-methylguanosine-3'-phosphate
  modified_base 20: mod_base = OTHER; note = 2'-O-methyladenosine-3'-phosphate
  modified_base 21: mod_base = OTHER; note = 2'-O-methyluridine-3'-phosphorothioate
  modified_base 22: mod_base = OTHER; note = 2'-O-methyladenosine-3'-phosphorothioate
  modified_base 23: mod_base = OTHER; note = 2'-O-methyladenosine
taaattgacagagtcctggataa

SEQ ID NO: 2206 - RNA, 23 nt, synthetic construct
  source 1..23: mol_type = other RNA
  modified_base 1: mod_base = OTHER; note = 2'-O-methyluridine-3'-phosphorothioate 5'-(E)-Vinylphosphonate
  modified_base 2: mod_base = OTHER; note = 2'-deoxy-2'-fluorouridine-3'-phosphorothioate
  modified_base 3: mod_base = OTHER; note = 2'-O-methyluridine-3'-phosphate
  modified_base 4: mod_base = OTHER; note = 2'-O-methyluridine-3'-phosphate
  modified_base 5: mod_base = OTHER; note = 2'-O-methylguanosine-3'-phosphate
  modified_base 6: mod_base = OTHER; note = 2'-deoxy-2'-fluoroguanosine-3'-phosphate
  modified_base 7: mod_base = OTHER; note = 2'-O-methyladenosine-3'-phosphate
  modified_base 8: mod_base = OTHER; note = 2'-deoxy-2'-fluorouridine-3'-phosphate
  modified_base 9: mod_base = OTHER; note = 2'-deoxy-2'-fluorocytidine-3'-phosphate
  modified_base 10: mod_base = OTHER; note = 2'-O-methyladenosine-3'-phosphate
  modified_base 11: mod_base = OTHER; note = 2'-O-methylcytidine-3'-phosphate
  modified_base 12: mod_base = OTHER; note = 2'-O-methylguanosine-3'-phosphate
  modified_base 13: mod_base = OTHER; note = 2'-O-methyluridine-3'-phosphate
  modified_base 14: mod_base = OTHER; note = 2'-deoxy-2'-fluorouridine-3'-phosphate
  modified_base 15: mod_base = OTHER; note = 2'-O-methyluridine-3'-phosphate
  modified_base 16: mod_base = OTHER; note = 2'-deoxy-2'-fluorocytidine-3'-phosphate
  modified_base 17: mod_base = OTHER; note = 2'-O-methyluridine-3'-phosphate
  modified_base 18: mod_base = OTHER; note = 2'-O-methylguanosine-3'-phosphate
  modified_base 19: mod_base = OTHER; note = 2'-O-methylguanosine-3'-phosphate
  modified_base 20: mod_base = OTHER; note = 2'-O-methyladenosine-3'-phosphate
  modified_base 21: mod_base = OTHER; note = 2'-O-methyladenosine-3'-phosphorothioate
  modified_base 22: mod_base = OTHER; note = 2'-O-methylguanosine-3'-phosphorothioate
  modified_base 23: mod_base = OTHER; note = 2'-O-methylguanosine
ttttggatcacgtttctggaagg

SEQ ID NO: 2207 - RNA, 23 nt, synthetic construct
  source 1..23: mol_type = other RNA
  modified_base 1: mod_base = OTHER; note = 2'-O-methyluridine-3'-phosphorothioate 5'-(E)-Vinylphosphonate
  modified_base 2: mod_base = OTHER; note = 2'-deoxy-2'-fluorocytidine-3'-phosphorothioate
  modified_base 3: mod_base = OTHER; note = 2'-O-methyladenosine-3'-phosphate
  modified_base 4: mod_base = OTHER; note = 2'-O-methyladenosine-3'-phosphate
  modified_base 5: mod_base = OTHER; note = 2'-O-methyladenosine-3'-phosphate
  modified_base 6: mod_base = OTHER; note = 2'-deoxy-2'-fluorouridine-3'-phosphate
  modified_base 7: mod_base = OTHER; note = 2'-O-methyladenosine-3'-phosphate
  modified_base 8: mod_base = OTHER; note = 2'-deoxy-2'-fluoroguanosine-3'-phosphate
  modified_base 9: mod_base = OTHER; note = 2'-deoxy-2'-fluoroguanosine-3'-phosphate
  modified_base 10: mod_base = OTHER; note = 2'-O-methyladenosine-3'-phosphate
  modified_base 11: mod_base = OTHER; note = 2'-O-methyladenosine-3'-phosphate
  modified_base 12: mod_base = OTHER; note = 2'-O-methylcytidine-3'-phosphate
  modified_base 13: mod_base = OTHER; note = 2'-O-methyladenosine-3'-phosphate
  modified_base 14: mod_base = OTHER; note = 2'-deoxy-2'-fluorocytidine-3'-phosphate
  modified_base 15: mod_base = OTHER; note = 2'-O-methyluridine-3'-phosphate
  modified_base 16: mod_base = OTHER; note = 2'-deoxy-2'-fluoroguanosine-3'-phosphate
  modified_base 17: mod_base = OTHER; note = 2'-O-methylcytidine-3'-phosphate
  modified_base 18: mod_base = OTHER; note = 2'-O-methylcytidine-3'-phosphate
  modified_base 19: mod_base = OTHER; note = 2'-O-methyladenosine-3'-phosphate
  modified_base 20: mod_base = OTHER; note = 2'-O-methyluridine-3'-phosphate
  modified_base 21: mod_base = OTHER; note = 2'-O-methylguanosine-3'-phosphorothioate
  modified_base 22: mod_base = OTHER; note = 2'-O-methyluridine-3'-phosphorothioate
  modified_base 23: mod_base = OTHER; note = 2'-O-methyladenosine
tcaaataggaacactgccatgta

SEQ ID NO: 2208 - RNA, 23 nt, synthetic construct
  source 1..23: mol_type = other RNA
  modified_base 1: mod_base = OTHER; note = 2'-O-methyluridine-3'-phosphorothioate 5'-(E)-Vinylphosphonate
  modified_base 2: mod_base = OTHER; note = 2'-deoxy-2'-fluoroguanosine-3'-phosphorothioate
  modified_base 3: mod_base = OTHER; note = 2'-O-methyluridine-3'-phosphate
  modified_base 4: mod_base = OTHER; note = 2'-O-methyluridine-3'-phosphate
  modified_base 5: mod_base = OTHER; note = 2'-O-methyluridine-3'-phosphate
  modified_base 6: mod_base = OTHER; note = 2'-deoxy-2'-fluorouridine-3'-phosphate
  modified_base 7: mod_base = OTHER; note = 2'-O-methylguanosine-3'-phosphate
  modified_base 8: mod_base = OTHER; note = 2'-deoxy-2'-fluorouridine-3'-phosphate
  modified_base 9: mod_base = OTHER; note = 2'-deoxy-2'-fluoroguanosine-3'-phosphate
  modified_base 10: mod_base = OTHER; note = 2'-O-methyladenosine-3'-phosphate
  modified_base 11: mod_base = OTHER; note = 2'-O-methylguanosine-3'-phosphate
  modified_base 12: mod_base = OTHER; note = 2'-O-methylcytidine-3'-phosphate
  modified_base 13: mod_base = OTHER; note = 2'-O-methyladenosine-3'-phosphate
  modified_base 14: mod_base = OTHER; note = 2'-deoxy-2'-fluoroadenosine-3'-phosphate
  modified_base 15: mod_base = OTHER; note = 2'-O-methyladenosine-3'-phosphate
  modified_base 16: mod_base = OTHER; note = 2'-deoxy-2'-fluoroadenosine-3'-phosphate
  modified_base 17: mod_base = OTHER; note = 2'-O-methylguanosine-3'-phosphate
  modified_base 18: mod_base = OTHER; note = 2'-O-methylguanosine-3'-phosphate
  modified_base 19: mod_base = OTHER; note = 2'-O-methylcytidine-3'-phosphate
  modified_base 20: mod_base = OTHER; note = 2'-O-methyluridine-3'-phosphate
  modified_base 21: mod_base = OTHER; note = 2'-O-methyluridine-3'-phosphorothioate
  modified_base 22: mod_base = OTHER; note = 2'-O-methyladenosine-3'-phosphorothioate
  modified_base 23: mod_base = OTHER; note = 2'-O-methyladenosine
tgttttgtgagcaaaaggcttaa

SEQ ID NO: 2209 - RNA, 23 nt, synthetic construct
  source 1..23: mol_type = other RNA
  modified_base 1: mod_base = OTHER; note = 2'-O-methyluridine-3'-phosphorothioate 5'-(E)-Vinylphosphonate
  modified_base 2: mod_base = OTHER; note = 2'-deoxy-2'-fluorouridine-3'-phosphorothioate
  modified_base 3: mod_base = OTHER; note = 2'-O-methylguanosine-3'-phosphate
  modified_base 4: mod_base = OTHER; note = 2'-O-methyluridine-3'-phosphate
  modified_base 5: mod_base = OTHER; note = 2'-O-methyladenosine-3'-phosphate
  modified_base 6: mod_base = OTHER; note = 2'-deoxy-2'-fluoroadenosine-3'-phosphate
  modified_base 7: mod_base = OTHER; note = 2'-O-methylcytidine-3'-phosphate
  modified_base 8: mod_base = OTHER; note = 2'-deoxy-2'-fluoroadenosine-3'-phosphate
  modified_base 9: mod_base = OTHER; note = 2'-deoxy-2'-fluorouridine-3'-phosphate
  modified_base 10: mod_base = OTHER; note = 2'-O-methylcytidine-3'-phosphate
  modified_base 11: mod_base = OTHER; note = 2'-O-methyladenosine-3'-phosphate
  modified_base 12: mod_base = OTHER; note = 2'-O-methylguanosine-3'-phosphate
  modified_base 13: mod_base = OTHER; note = 2'-O-methyluridine-3'-phosphate
  modified_base 14: mod_base = OTHER; note = 2'-deoxy-2'-fluorocytidine-3'-phosphate
  modified_base 15: mod_base = OTHER; note = 2'-O-methyladenosine-3'-phosphate
  modified_base 16: mod_base = OTHER; note = 2'-deoxy-2'-fluorocytidine-3'-phosphate
  modified_base 17: mod_base = OTHER; note = 2'-O-methyladenosine-3'-phosphate
  modified_base 18: mod_base = OTHER; note = 2'-O-methylguanosine-3'-phosphate
  modified_base 19: mod_base = OTHER; note = 2'-O-methyluridine-3'-phosphate
  modified_base 20: mod_base = OTHER; note = 2'-O-methyladenosine-3'-phosphate
  modified_base 21: mod_base = OTHER; note = 2'-O-methylguanosine-3'-phosphorothioate
  modified_base 22: mod_base = OTHER; note = 2'-O-methyladenosine-3'-phosphorothioate
  modified_base 23: mod_base = OTHER; note = 2'-O-methyladenosine
ttgtaacatcagtcacagtagaa

SEQ ID NO: 2210 - RNA, 23 nt, synthetic construct
  source 1..23: mol_type = other RNA
  modified_base 1: mod_base = OTHER; note = 2'-O-methyluridine-3'-phosphorothioate 5'-(E)-Vinylphosphonate
  modified_base 2: mod_base = OTHER; note = 2'-deoxy-2'-fluorouridine-3'-phosphorothioate
  modified_base 3: mod_base = OTHER; note = 2'-O-methyladenosine-3'-phosphate
  modified_base 4: mod_base = OTHER; note = 2'-O-methyladenosine-3'-phosphate
  modified_base 5: mod_base = OTHER; note = 2'-O-methyladenosine-3'-phosphate
  modified_base 6: mod_base = OTHER; note = 2'-deoxy-2'-fluorouridine-3'-phosphate
  modified_base 7: mod_base = OTHER; note = 2'-O-methyladenosine-3'-phosphate
  modified_base 8: mod_base = OTHER; note = 2'-deoxy-2'-fluoroadenosine-3'-phosphate
  modified_base 9: mod_base = OTHER; note = 2'-deoxy-2'-fluoroadenosine-3'-phosphate
  modified_base 10: mod_base = OTHER; note = 2'-O-methylcytidine-3'-phosphate
  modified_base 11: mod_base = OTHER; note = 2'-O-methyladenosine-3'-phosphate
  modified_base 12: mod_base = OTHER; note = 2'-O-methyluridine-3'-phosphate
  modified_base 13: mod_base = OTHER; note = 2'-O-methylguanosine-3'-phosphate
  modified_base 14: mod_base = OTHER; note = 2'-deoxy-2'-fluorouridine-3'-phosphate
  modified_base 15: mod_base = OTHER; note = 2'-O-methylguanosine-3'-phosphate
  modified_base 16: mod_base = OTHER; note = 2'-deoxy-2'-fluorocytidine-3'-phosphate
  modified_base 17: mod_base = OTHER; note = 2'-O-methyluridine-3'-phosphate
  modified_base 18: mod_base = OTHER; note = 2'-O-methyluridine-3'-phosphate
  modified_base 19: mod_base = OTHER; note = 2'-O-methylcytidine-3'-phosphate
  modified_base 20: mod_base = OTHER; note = 2'-O-methylcytidine-3'-phosphate
  modified_base 21: mod_base = OTHER; note = 2'-O-methyladenosine-3'-phosphorothioate
  modified_base 22: mod_base = OTHER; note = 2'-O-methylguanosine-3'-phosphorothioate
  modified_base 23: mod_base = OTHER; note = 2'-O-methylcytidine
ttaaataaacatgtgcttccagc

SEQ ID NO: 2211 - RNA, 23 nt, synthetic construct
  source 1..23: mol_type = other RNA
  modified_base 1: mod_base = OTHER; note = 2'-O-methyluridine-3'-phosphorothioate 5'-(E)-Vinylphosphonate
  modified_base 2: mod_base = OTHER; note = 2'-deoxy-2'-fluorouridine-3'-phosphorothioate
  modified_base 3: mod_base = OTHER; note = 2'-O-methyladenosine-3'-phosphate
  modified_base 4: mod_base = OTHER; note = 2'-O-methyluridine-3'-phosphate
  modified_base 5: mod_base = OTHER; note = 2'-O-methyladenosine-3'-phosphate
  modified_base 6: mod_base = OTHER; note = 2'-deoxy-2'-fluoroadenosine-3'-phosphate
  modified_base 7: mod_base = OTHER; note = 2'-O-methyluridine-3'-phosphate
  modified_base 8: mod_base = OTHER; note = 2'-deoxy-2'-fluoroadenosine-3'-phosphate
  modified_base 9: mod_base = OTHER; note = 2'-deoxy-2'-fluoroguanosine-3'-phosphate
  modified_base 10: mod_base = OTHER; note = 2'-O-methyladenosine-3'-phosphate
  modified_base 11: mod_base = OTHER; note = 2'-O-methyladenosine-3'-phosphate
  modified_base 12: mod_base = OTHER; note = 2'-O-methylguanosine-3'-phosphate
  modified_base 13: mod_base = OTHER; note = 2'-O-methylcytidine-3'-phosphate
  modified_base 14: mod_base = OTHER; note = 2'-deoxy-2'-fluorouridine-3'-phosphate
  modified_base 15: mod_base = OTHER; note = 2'-O-methyladenosine-3'-phosphate
  modified_base 16: mod_base = OTHER; note = 2'-deoxy-2'-fluoroadenosine-3'-phosphate
  modified_base 17: mod_base = OTHER; note = 2'-O-methylguanosine-3'-phosphate
  modified_base 18: mod_base = OTHER; note = 2'-O-methyladenosine-3'-phosphate
  modified_base 19: mod_base = OTHER; note = 2'-O-methyluridine-3'-phosphate
  modified_base 20: mod_base = OTHER; note = 2'-O-methylguanosine-3'-phosphate
  modified_base 21: mod_base = OTHER; note = 2'-O-methylcytidine-3'-phosphorothioate
  modified_base 22: mod_base = OTHER; note = 2'-O-methylcytidine-3'-phosphorothioate
  modified_base 23: mod_base = OTHER; note = 2'-O-methylcytidine
ttataatagaagctaagatgccc

SEQ ID NO: 2212 - RNA, 23 nt, synthetic construct
  source 1..23: mol_type = other RNA
  modified_base 1: mod_base = OTHER; note = 2'-O-methyluridine-3'-phosphorothioate 5'-(E)-Vinylphosphonate
  modified_base 2: mod_base = OTHER; note = 2'-deoxy-2'-fluoroadenosine-3'-phosphorothioate
  modified_base 3: mod_base = OTHER; note = 2'-O-methyladenosine-3'-phosphate
  modified_base 4: mod_base = OTHER; note = 2'-O-methylcytidine-3'-phosphate
  modified_base 5: mod_base = OTHER; note = 2'-O-methyluridine-3'-phosphate
  modified_base 6: mod_base = OTHER; note = 2'-deoxy-2'-fluorocytidine-3'-phosphate
  modified_base 7: mod_base = OTHER; note = 2'-O-methyluridine-3'-phosphate
  modified_base 8: mod_base = OTHER; note = 2'-deoxy-2'-fluorouridine-3'-phosphate
  modified_base 9: mod_base = OTHER; note = 2'-deoxy-2'-fluoroguanosine-3'-phosphate
  modified_base 10: mod_base = OTHER; note = 2'-O-methyluridine-3'-phosphate
  modified_base 11: mod_base = OTHER; note = 2'-O-methyluridine-3'-phosphate
  modified_base 12: mod_base = OTHER; note = 2'-O-methylguanosine-3'-phosphate
  modified_base 13: mod_base = OTHER; note = 2'-O-methyladenosine-3'-phosphate
  modified_base 14: mod_base = OTHER; note = 2'-deoxy-2'-fluorouridine-3'-phosphate
  modified_base 15: mod_base = OTHER; note = 2'-O-methylguanosine-3'-phosphate
  modified_base 16: mod_base = OTHER; note = 2'-deoxy-2'-fluoroguanosine-3'-phosphate
  modified_base 17: mod_base = OTHER; note = 2'-O-methylcytidine-3'-phosphate
  modified_base 18: mod_base = OTHER; note = 2'-O-methyluridine-3'-phosphate
  modified_base 19: mod_base = OTHER; note = 2'-O-methylguanosine-3'-phosphate
  modified_base 20: mod_base = OTHER; note = 2'-O-methyladenosine-3'-phosphate
  modified_base 21: mod_base = OTHER; note = 2'-O-methyladenosine-3'-phosphorothioate
  modified_base 22: mod_base = OTHER; note = 2'-O-methylguanosine-3'-phosphorothioate
  modified_base 23: mod_base = OTHER; note = 2'-O-methyladenosine
taactcttgttgatggctgaaga

SEQ ID NO: 2213 - RNA, 23 nt, synthetic construct
  source 1..23: mol_type = other RNA
  modified_base 1: mod_base = OTHER; note = 2'-O-methyluridine-3'-phosphorothioate 5'-(E)-Vinylphosphonate
  modified_base 2: mod_base = OTHER; note = 2'-deoxy-2'-fluorouridine-3'-phosphorothioate
  modified_base 3: mod_base = OTHER; note = 2'-O-methyladenosine-3'-phosphate
  modified_base 4: mod_base = OTHER; note = 2'-O-methyladenosine-3'-phosphate
  modified_base 5: mod_base = OTHER; note = 2'-O-methyluridine-3'-phosphate
  modified_base 6: mod_base = OTHER; note = 2'-deoxy-2'-fluoroguanosine-3'-phosphate
  modified_base 7: mod_base = OTHER; note = 2'-O-methyluridine-3'-phosphate
  modified_base 8: mod_base = OTHER; note = 2'-deoxy-2'-fluorouridine-3'-phosphate
  modified_base 9: mod_base = OTHER; note = 2'-deoxy-2'-fluorouridine-3'-phosphate
  modified_base 10: mod_base = OTHER; note = 2'-O-methyladenosine-3'-phosphate
  modified_base 11: mod_base = OTHER; note = 2'-O-methyluridine-3'-phosphate
  modified_base 12: mod_base = OTHER; note = 2'-O-methyluridine-3'-phosphate
  modified_base 13: mod_base = OTHER; note = 2'-O-methylguanosine-3'-phosphate
  modified_base 14: mod_base = OTHER; note = 2'-deoxy-2'-fluoroguanosine-3'-phosphate
  modified_base 15: mod_base = OTHER; note = 2'-O-methylguanosine-3'-phosphate
  modified_base 16: mod_base = OTHER; note = 2'-deoxy-2'-fluorouridine-3'-phosphate
  modified_base 17: mod_base = OTHER; note = 2'-O-methylguanosine-3'-phosphate
  modified_base 18: mod_base = OTHER; note = 2'-O-methyladenosine-3'-phosphate
  modified_base 19: mod_base = OTHER; note = 2'-O-methylguanosine-3'-phosphate
  modified_base 20: mod_base = OTHER; note = 2'-O-methylcytidine-3'-phosphate
  modified_base 21: mod_base = OTHER; note = 2'-O-methyluridine-3'-phosphorothioate
  modified_base 22: mod_base = OTHER; note = 2'-O-methyluridine-3'-phosphorothioate
  modified_base 23: mod_base = OTHER; note = 2'-O-methylcytidine
ttaatgtttattgggtgagcttc

SEQ ID NO: 2214 - RNA, 23 nt, synthetic construct
  source 1..23: mol_type = other RNA
  modified_base 1: mod_base = OTHER; note = 2'-O-methyluridine-3'-phosphorothioate 5'-(E)-Vinylphosphonate
  modified_base 2: mod_base = OTHER; note = 2'-deoxy-2'-fluoroadenosine-3'-phosphorothioate
  modified_base 3: mod_base = OTHER; note = 2'-O-methylcytidine-3'-phosphate
  modified_base 4: mod_base = OTHER; note = 2'-O-methyladenosine-3'-phosphate
  modified_base 5: mod_base = OTHER; note = 2'-O-methyluridine-3'-phosphate
  modified_base 6: mod_base = OTHER; note = 2'-deoxy-2'-fluoroadenosine-3'-phosphate
  modified_base 7: mod_base = OTHER; note = 2'-O-methylguanosine-3'-phosphate
  modified_base 8: mod_base = OTHER; note = 2'-deoxy-2'-fluoroadenosine-3'-phosphate
  modified_base 9: mod_base = OTHER; note = 2'-deoxy-2'-fluoroadenosine-3'-phosphate
  modified_base 10: mod_base = OTHER; note = 2'-O-methyladenosine-3'-phosphate
  modified_base 11: mod_base = OTHER; note = 2'-O-methyladenosine-3'-phosphate
  modified_base 12: mod_base = OTHER; note = 2'-O-methylguanosine-3'-phosphate
  modified_base 13: mod_base = OTHER; note = 2'-O-methyladenosine-3'-phosphate
  modified_base 14: mod_base = OTHER; note = 2'-deoxy-2'-fluorouridine-3'-phosphate
  modified_base 15: mod_base = OTHER; note = 2'-O-methyladenosine-3'-phosphate
  modified_base 16: mod_base = OTHER; note = 2'-deoxy-2'-fluoroguanosine-3'-phosphate
  modified_base 17: mod_base = OTHER; note = 2'-O-methylguanosine-3'-phosphate
  modified_base 18: mod_base = OTHER; note = 2'-O-methylguanosine-3'-phosphate
  modified_base 19: mod_base = OTHER; note = 2'-O-methylcytidine-3'-phosphate
  modified_base 20: mod_base = OTHER; note = 2'-O-methylcytidine-3'-phosphate
  modified_base 21: mod_base = OTHER; note = 2'-O-methyladenosine-3'-phosphorothioate
  modified_base 22: mod_base = OTHER; note = 2'-O-methyladenosine-3'-phosphorothioate
  modified_base 23: mod_base = OTHER; note = 2'-O-methyladenosine
tacatagaaaagatagggccaaa

SEQ ID NO: 2215 - RNA, 23 nt, synthetic construct
  source 1..23: mol_type = other RNA
  modified_base 1: mod_base = OTHER; note = 2'-O-methyluridine-3'-phosphorothioate 5'-(E)-Vinylphosphonate
  modified_base 2: mod_base = OTHER; note = 2'-deoxy-2'-fluoroadenosine-3'-phosphorothioate
  modified_base 3: mod_base = OTHER; note = 2'-O-methyladenosine-3'-phosphate
  modified_base 4: mod_base = OTHER; note = 2'-O-methyluridine-3'-phosphate
  modified_base 5: mod_base = OTHER; note = 2'-O-methyladenosine-3'-phosphate
  modified_base 6: mod_base = OTHER; note = 2'-deoxy-2'-fluoroadenosine-3'-phosphate
  modified_base 7: mod_base = OTHER; note = 2'-O-methyladenosine-3'-phosphate
  modified_base 8: mod_base = OTHER; note = 2'-deoxy-2'-fluorocytidine-3'-phosphate
  modified_base 9: mod_base = OTHER; note = 2'-deoxy-2'-fluorocytidine-3'-phosphate
  modified_base 10: mod_base = OTHER; note = 2'-O-methylcytidine-3'-phosphate
  modified_base 11: mod_base = OTHER; note = 2'-O-methyladenosine-3'-phosphate
  modified_base 12: mod_base = OTHER; note = 2'-O-methylguanosine-3'-phosphate
  modified_base 13: mod_base = OTHER; note = 2'-O-methyladenosine-3'-phosphate
  modified_base 14: mod_base = OTHER; note = 2'-deoxy-2'-fluoroguanosine-3'-phosphate
  modified_base 15: mod_base = OTHER; note = 2'-O-methyluridine-3'-phosphate
  modified_base 16: mod_base = OTHER; note = 2'-deoxy-2'-fluoroguanosine-3'-phosphate
  modified_base 17: mod_base = OTHER; note = 2'-O-methyluridine-3'-phosphate
  modified_base 18: mod_base = OTHER; note = 2'-O-methylguanosine-3'-phosphate
  modified_base 19: mod_base = OTHER; note = 2'-O-methyladenosine-3'-phosphate
  modified_base 20: mod_base = OTHER; note = 2'-O-methyluridine-3'-phosphate
  modified_base 21: mod_base = OTHER; note = 2'-O-methylcytidine-3'-phosphorothioate
  modified_base 22: mod_base = OTHER; note = 2'-O-methyladenosine-3'-phosphorothioate
  modified_base 23: mod_base = OTHER; note = 2'-O-methyladenosine
taataaacccagagtgtgatcaa

SEQ ID NO: 2216 - RNA, 23 nt, synthetic construct
  source 1..23: mol_type = other RNA
  modified_base 1: mod_base = OTHER; note = 2'-O-methyluridine-3'-phosphorothioate 5'-(E)-Vinylphosphonate
  modified_base 2: mod_base = OTHER; note = 2'-deoxy-2'-fluoroadenosine-3'-phosphorothioate
  modified_base 3: mod_base = OTHER; note = 2'-O-methyladenosine-3'-phosphate
  modified_base 4: mod_base = OTHER; note = 2'-O-methyluridine-3'-phosphate
  modified_base 5: mod_base = OTHER; note = 2'-O-methylguanosine-3'-phosphate
  modified_base 6: mod_base = OTHER; note = 2'-deoxy-2'-fluoroadenosine-3'-phosphate
  modified_base 7: mod_base = OTHER; note = 2'-O-methyladenosine-3'-phosphate
  modified_base 8: mod_base = OTHER; note = 2'-deoxy-2'-fluoroguanosine-3'-phosphate
  modified_base 9: mod_base = OTHER; note = 2'-deoxy-2'-fluorouridine-3'-phosphate
  modified_base 10: mod_base = OTHER; note = 2'-O-methylcytidine-3'-phosphate
  modified_base 11: mod_base = OTHER; note = 2'-O-methylcytidine-3'-phosphate
  modified_base 12: mod_base = OTHER; note = 2'-O-methyladenosine-3'-phosphate
  modified_base 13: mod_base = OTHER; note = 2'-O-methyladenosine-3'-phosphate
  modified_base 14: mod_base = OTHER; note = 2'-deoxy-2'-fluoroadenosine-3'-phosphate
  modified_base 15: mod_base = OTHER; note = 2'-O-methylcytidine-3'-phosphate
  modified_base 16: mod_base = OTHER; note = 2'-deoxy-2'-fluorocytidine-3'-phosphate
  modified_base 17: mod_base = OTHER; note = 2'-O-methylguanosine-3'-phosphate
  modified_base 18: mod_base = OTHER; note = 2'-O-methylguanosine-3'-phosphate
  modified_base 19: mod_base = OTHER; note = 2'-O-methyluridine-3'-phosphate
  modified_base 20: mod_base = OTHER; note = 2'-O-methylguanosine-3'-phosphate
  modified_base 21: mod_base = OTHER; note = 2'-O-methyladenosine-3'-phosphorothioate
  modified_base 22: mod_base = OTHER; note = 2'-O-methylcytidine-3'-phosphorothioate
  modified_base 23: mod_base = OTHER; note = 2'-O-methyluridine
taatgaagtccaaaccggtgact

SEQ ID NO: 2217 - RNA, 23 nt, synthetic construct
  source 1..23: mol_type = other RNA
  modified_base 1: mod_base = OTHER; note = 2'-O-methyluridine-3'-phosphorothioate 5'-(E)-Vinylphosphonate
  modified_base 2: mod_base = OTHER; note = 2'-deoxy-2'-fluorouridine-3'-phosphorothioate
  modified_base 3: mod_base = OTHER; note = 2'-O-methyluridine-3'-phosphate
  modified_base 4: mod_base = OTHER; note = 2'-O-methyluridine-3'-phosphate
  modified_base 5: mod_base = OTHER; note = 2'-O-methyladenosine-3'-phosphate
  modified_base 6: mod_base = OTHER; note = 2'-deoxy-2'-fluoroadenosine-3'-phosphate
  modified_base 7: mod_base = OTHER; note = 2'-O-methylguanosine-3'-phosphate
  modified_base 8: mod_base = OTHER; note = 2'-deoxy-2'-fluoroadenosine-3'-phosphate
  modified_base 9: mod_base = OTHER; note = 2'-deoxy-2'-fluorocytidine-3'-phosphate
  modified_base 10: mod_base = OTHER; note = 2'-O-methylguanosine-3'-phosphate
  modified_base 11: mod_base = OTHER; note = 2'-O-methylguanosine-3'-phosphate
  modified_base 12: mod_base = OTHER; note = 2'-O-methyladenosine-3'-phosphate
  modified_base 13: mod_base = OTHER; note = 2'-O-methyladenosine-3'-phosphate
  modified_base 14: mod_base = OTHER; note = 2'-deoxy-2'-fluorouridine-3'-phosphate
  modified_base 15: mod_base = OTHER; note = 2'-O-methylcytidine-3'-phosphate
  modified_base 16: mod_base = OTHER; note = 2'-deoxy-2'-fluorouridine-3'-phosphate
  modified_base 17: mod_base = OTHER; note = 2'-O-methylcytidine-3'-phosphate
  modified_base 18: mod_base = OTHER; note = 2'-O-methylguanosine-3'-phosphate
  modified_base 19: mod_base = OTHER; note = 2'-O-methylcytidine-3'-phosphate
  modified_base 20: mod_base = OTHER; note = 2'-O-methyluridine-3'-phosphate
  modified_base 21: mod_base = OTHER; note = 2'-O-methylcytidine-3'-phosphorothioate
  modified_base 22: mod_base = OTHER; note = 2'-O-methyluridine-3'-phosphorothioate
  modified_base 23: mod_base = OTHER; note = 2'-O-methylguanosine
ttttaagacggaatctcgctctg

SEQ ID NO: 2218 - RNA, 23 nt, synthetic construct
  source 1..23: mol_type = other RNA
  modified_base 1: mod_base = OTHER; note = 2'-O-methyluridine-3'-phosphorothioate 5'-(E)-Vinylphosphonate
  modified_base 2: mod_base = OTHER; note = 2'-deoxy-2'-fluorouridine-3'-phosphorothioate
  modified_base 3: mod_base = OTHER; note = 2'-O-methyladenosine-3'-phosphate
  modified_base 4: mod_base = OTHER; note = 2'-O-methyladenosine-3'-phosphate
  modified_base 5: mod_base = OTHER; note = 2'-O-methylguanosine-3'-phosphate
  modified_base 6: mod_base = OTHER; note = 2'-deoxy-2'-fluorocytidine-3'-phosphate
  modified_base 7: mod_base = OTHER; note = 2'-O-methyladenosine-3'-phosphate
  modified_base 8: mod_base = OTHER; note = 2'-deoxy-2'-fluoroadenosine-3'-phosphate
  modified_base 9: mod_base = OTHER; note = 2'-deoxy-2'-fluorouridine-3'-phosphate
  modified_base 10: mod_base = OTHER; note = 2'-O-methyluridine-3'-phosphate
  modified_base 11: mod_base = OTHER; note = 2'-O-methylguanosine-3'-phosphate
  modified_base 12: mod_base = OTHER; note = 2'-O-methylcytidine-3'-phosphate
  modified_base 13: mod_base = OTHER; note = 2'-O-methyladenosine-3'-phosphate
  modified_base 14: mod_base = OTHER; note = 2'-deoxy-2'-fluoroguanosine-3'-phosphate
  modified_base 15: mod_base = OTHER; note = 2'-O-methyladenosine-3'-phosphate
  modified_base 16: mod_base = OTHER; note = 2'-deoxy-2'-fluoroadenosine-3'-phosphate
  modified_base 17: mod_base = OTHER; note = 2'-O-methylguanosine-3'-phosphate
  modified_base 18: mod_base = OTHER; note = 2'-O-methyladenosine-3'-phosphate
  modified_base 19: mod_base = OTHER; note = 2'-O-methyluridine-3'-phosphate
  modified_base 20: mod_base = OTHER; note = 2'-O-methyladenosine-3'-phosphate
  modified_base 21: mod_base = OTHER; note = 2'-O-methyladenosine-3'-phosphorothioate
  modified_base 22: mod_base = OTHER; note = 2'-O-methylguanosine-3'-phosphorothioate
  modified_base 23: mod_base = OTHER; note = 2'-O-methyladenosine
ttaagcaattgcagaagataaga

SEQ ID NO: 2219 - RNA, 23 nt, synthetic construct
  source 1..23: mol_type = other RNA
  modified_base 1: mod_base = OTHER; note = 2'-O-methyluridine-3'-phosphorothioate 5'-(E)-Vinylphosphonate
  modified_base 2: mod_base = OTHER; note = 2'-deoxy-2'-fluorouridine-3'-phosphorothioate
  modified_base 3: mod_base = OTHER; note = 2'-O-methyluridine-3'-phosphate
  modified_base 4: mod_base = OTHER; note = 2'-O-methylcytidine-3'-phosphate
  modified_base 5: mod_base = OTHER; note = 2'-O-methyluridine-3'-phosphate
  modified_base 6: mod_base = OTHER; note = 2'-deoxy-2'-fluorocytidine-3'-phosphate
  modified_base 7: mod_base = OTHER; note = 2'-O-methyluridine-3'-phosphate
  modified_base 8: mod_base = OTHER; note = 2'-deoxy-2'-fluoroadenosine-3'-phosphate
  modified_base 9: mod_base = OTHER; note = 2'-deoxy-2'-fluoroguanosine-3'-phosphate
  modified_base 10: mod_base = OTHER; note = 2'-O-methyladenosine-3'-phosphate
  modified_base 11: mod_base = OTHER; note = 2'-O-methyladenosine-3'-phosphate
  modified_base 12: mod_base = OTHER; note = 2'-O-methylcytidine-3'-phosphate
  modified_base 13: mod_base = OTHER; note = 2'-O-methyluridine-3'-phosphate
  modified_base 14: mod_base = OTHER; note = 2'-deoxy-2'-fluorouridine-3'-phosphate
  modified_base 15: mod_base = OTHER; note = 2'-O-methylguanosine-3'-phosphate
  modified_base 16: mod_base = OTHER; note = 2'-deoxy-2'-fluorocytidine-3'-phosphate
  modified_base 17: mod_base = OTHER; note = 2'-O-methyluridine-3'-phosphate
  modified_base 18: mod_base = OTHER; note = 2'-O-methyladenosine-3'-phosphate
  modified_base 19: mod_base = OTHER; note = 2'-O-methylcytidine-3'-phosphate
  modified_base 20: mod_base = OTHER; note = 2'-O-methyluridine-3'-phosphate
  modified_base 21: mod_base = OTHER; note = 2'-O-methylcytidine-3'-phosphorothioate
  modified_base 22: mod_base = OTHER; note = 2'-O-methyluridine-3'-phosphorothioate
  modified_base 23: mod_base = OTHER; note = 2'-O-methyluridine
tttctctagaacttgctactctt

SEQ ID NO: 2220 - RNA, 23 nt, synthetic construct
  source 1..23: mol_type = other RNA
  modified_base 1: mod_base = OTHER; note = 2'-O-methyluridine-3'-phosphorothioate 5'-(E)-Vinylphosphonate
  modified_base 2: mod_base = OTHER; note = 2'-deoxy-2'-fluoroadenosine-3'-phosphorothioate
  modified_base 3: mod_base = OTHER; note = 2'-O-methyladenosine-3'-phosphate
  modified_base 4: mod_base = OTHER; note = 2'-O-methyladenosine-3'-phosphate
  modified_base 5: mod_base = OTHER; note = 2'-O-methylcytidine-3'-phosphate
  modified_base 6: mod_base = OTHER; note = 2'-deoxy-2'-fluorocytidine-3'-phosphate
  modified_base 7: mod_base = OTHER; note = 2'-O-methyluridine-3'-phosphate
  modified_base 8: mod_base = OTHER; note = 2'-deoxy-2'-fluorouridine-3'-phosphate
  modified_base 9: mod_base = OTHER; note = 2'-deoxy-2'-fluorocytidine-3'-phosphate
  modified_base 10: mod_base = OTHER; note = 2'-O-methylcytidine-3'-phosphate
  modified_base 11: mod_base = OTHER; note = 2'-O-methyladenosine-3'-phosphate
  modified_base 12: mod_base = OTHER; note = 2'-O-methyladenosine-3'-phosphate
  modified_base 13: mod_base = OTHER; note = 2'-O-methylcytidine-3'-phosphate
  modified_base 14: mod_base = OTHER; note = 2'-deoxy-2'-fluoroadenosine-3'-phosphate
  modified_base 15: mod_base = OTHER; note = 2'-O-methyladenosine-3'-phosphate
  modified_base 16: mod_base = OTHER; note = 2'-deoxy-2'-fluoroadenosine-3'-phosphate
  modified_base 17: mod_base = OTHER; note = 2'-O-methyladenosine-3'-phosphate
  modified_base 18: mod_base = OTHER; note = 2'-O-methylcytidine-3'-phosphate
  modified_base 19: mod_base = OTHER; note = 2'-O-methyladenosine-3'-phosphate
  modified_base 20: mod_base = OTHER; note = 2'-O-methylguanosine-3'-phosphate
  modified_base 21: mod_base = OTHER; note = 2'-O-methylguanosine-3'-phosphorothioate
  modified_base 22: mod_base = OTHER; note = 2'-O-methylcytidine-3'-phosphorothioate
  modified_base 23: mod_base = OTHER; note = 2'-O-methyluridine
taaaccttccaacaaaacaggct

SEQ ID NO: 2221 - RNA, 23 nt, synthetic construct
  source 1..23: mol_type = other RNA
  modified_base 1: mod_base = OTHER; note = 2'-O-methyluridine-3'-phosphorothioate 5'-(E)-Vinylphosphonate
  modified_base 2: mod_base = OTHER; note = 2'-deoxy-2'-fluoroguanosine-3'-phosphorothioate
  modified_base 3: mod_base = OTHER; note = 2'-O-methylguanosine-3'-phosphate
  modified_base 4: mod_base = OTHER; note = 2'-O-methyluridine-3'-phosphate
  modified_base 5: mod_base = OTHER; note = 2'-O-methyluridine-3'-phosphate
  modified_base 6: mod_base = OTHER; note = 2'-deoxy-2'-fluorouridine-3'-phosphate
  modified_base 7: mod_base = OTHER; note = 2'-O-methyladenosine-3'-phosphate
  modified_base 8: mod_base = OTHER; note = 2'-deoxy-2'-fluoroadenosine-3'-phosphate
  modified_base 9: mod_base = OTHER; note = 2'-deoxy-2'-fluoroguanosine-3'-phosphate
  modified_base 10: mod_base = OTHER; note = 2'-O-methylcytidine-3'-phosphate
  modified_base 11: mod_base = OTHER; note = 2'-O-methylguanosine-3'-phosphate
  modified_base 12: mod_base = OTHER; note = 2'-O-methyladenosine-3'-phosphate
  modified_base 13: mod_base = OTHER; note = 2'-O-methyluridine-3'-phosphate
  modified_base 14: mod_base = OTHER; note = 2'-deoxy-2'-fluorouridine-3'-phosphate
  modified_base 15: mod_base = OTHER; note = 2'-O-methylcytidine-3'-phosphate
  modified_base 16: mod_base = OTHER; note = 2'-deoxy-2'-fluorouridine-3'-phosphate
  modified_base 17: mod_base = OTHER; note = 2'-O-methylcytidine-3'-phosphate
  modified_base 18: mod_base = OTHER; note = 2'-O-methylcytidine-3'-phosphate
  modified_base 19: mod_base = OTHER; note = 2'-O-methyluridine-3'-phosphate
  modified_base 20: mod_base = OTHER; note = 2'-O-methylguanosine-3'-phosphate
  modified_base 21: mod_base = OTHER; note = 2'-O-methyluridine-3'-phosphorothioate
  modified_base 22: mod_base = OTHER; note = 2'-O-methylcytidine-3'-phosphorothioate
  modified_base 23: mod_base = OTHER; note = 2'-O-methyluridine
tggtttaagcgattctcctgtct

SEQ ID NO: 2222 - RNA, 23 nt, synthetic construct
  source 1..23: mol_type = other RNA
  modified_base 1: mod_base = OTHER; note = 2'-O-methyluridine-3'-phosphorothioate 5'-(E)-Vinylphosphonate
  modified_base 2: mod_base = OTHER; note = 2'-deoxy-2'-fluorouridine-3'-phosphorothioate
  modified_base 3: mod_base = OTHER; note = 2'-O-methylcytidine-3'-phosphate
  modified_base 4: mod_base = OTHER; note = 2'-O-methyluridine-3'-phosphate
  modified_base 5: mod_base = OTHER; note = 2'-O-methyluridine-3'-phosphate
  modified_base 6: mod_base = OTHER; note = 2'-deoxy-2'-fluoroadenosine-3'-phosphate
  modified_base 7: mod_base = OTHER; note = 2'-O-methyluridine-3'-phosphate
  modified_base 8: mod_base = OTHER; note = 2'-deoxy-2'-fluoroguanosine-3'-phosphate
  modified_base 9: mod_base = OTHER; note = 2'-deoxy-2'-fluorocytidine-3'-phosphate
  modified_base 10: mod_base = OTHER; note = 2'-O-methylcytidine-3'-phosphate
  modified_base 11: mod_base = OTHER; note = 2'-O-methyluridine-3'-phosphate
  modified_base 12: mod_base = OTHER; note = 2'-O-methyluridine-3'-phosphate
  modified_base 13: mod_base = OTHER; note = 2'-O-methyluridine-3'-phosphate
  modified_base 14: mod_base = OTHER; note = 2'-deoxy-2'-fluoroguanosine-3'-phosphate
  modified_base 15: mod_base = OTHER; note = 2'-O-methylguanosine-3'-phosphate
  modified_base 16: mod_base = OTHER; note = 2'-deoxy-2'-fluoroadenosine-3'-phosphate
  modified_base 17: mod_base = OTHER; note = 2'-O-methyladenosine-3'-phosphate
  modified_base 18: mod_base = OTHER; note = 2'-O-methylguanosine-3'-phosphate
  modified_base 19: mod_base = OTHER; note = 2'-O-methyladenosine-3'-phosphate
  modified_base 20: mod_base = OTHER; note = 2'-O-methylguanosine-3'-phosphate
  modified_base 21: mod_base = OTHER; note = 2'-O-methyluridine-3'-phosphorothioate
  modified_base 22: mod_base = OTHER; note = 2'-O-methylguanosine-3'-phosphorothioate
  modified_base 23: mod_base = OTHER; note = 2'-O-methylguanosine
ttcttatgcctttggaagagtgg

SEQ ID NO: 2223 - RNA, 23 nt, synthetic construct
  source 1..23: mol_type = other RNA
  modified_base 1: mod_base = OTHER; note = 2'-O-methyluridine-3'-phosphorothioate 5'-(E)-Vinylphosphonate
  modified_base 2: mod_base = OTHER; note = 2'-deoxy-2'-fluorouridine-3'-phosphorothioate
  modified_base 3: mod_base = OTHER; note = 2'-O-methylguanosine-3'-phosphate
  modified_base 4: mod_base = OTHER; note = 2'-O-methylcytidine-3'-phosphate
  modified_base 5: mod_base = OTHER; note = 2'-O-methyluridine-3'-phosphate
  modified_base 6: mod_base = OTHER; note = 2'-deoxy-2'-fluorouridine-3'-phosphate
  modified_base 7: mod_base = OTHER; note = 2'-O-methyluridine-3'-phosphate
  modified_base 8: mod_base = OTHER; note = 2'-deoxy-2'-fluoroguanosine-3'-phosphate
  modified_base 9: mod_base = OTHER; note = 2'-deoxy-2'-fluorocytidine-3'-phosphate
  modified_base 10: mod_base = OTHER; note = 2'-O-methyluridine-3'-phosphate
  modified_base 11: mod_base = OTHER; note = 2'-O-methyluridine-3'-phosphate
  modified_base 12: mod_base = OTHER; note = 2'-O-methylcytidine-3'-phosphate
  modified_base 13: mod_base = OTHER; note = 2'-O-methyladenosine-3'-phosphate
  modified_base 14: mod_base = OTHER; note = 2'-deoxy-2'-fluoroadenosine-3'-phosphate
  modified_base 15: mod_base = OTHER; note = 2'-O-methyladenosine-3'-phosphate
  modified_base 16: mod_base = OTHER; note = 2'-deoxy-2'-fluorouridine-3'-phosphate
  modified_base 17: mod_base = OTHER; note = 2'-O-methylcytidine-3'-phosphate
  modified_base 18: mod_base = OTHER; note = 2'-O-methylcytidine-3'-phosphate
  modified_base 19: mod_base = OTHER; note = 2'-O-methyladenosine-3'-phosphate
  modified_base 20: mod_base = OTHER; note = 2'-O-methyluridine-3'-phosphate
  modified_base 21: mod_base = OTHER; note = 2'-O-methylcytidine-3'-phosphorothioate
  modified_base 22: mod_base = OTHER; note = 2'-O-methylcytidine-3'-phosphorothioate
  modified_base 23: mod_base = OTHER; note = 2'-O-methyladenosine
ttgctttgcttcaaatccatcca

SEQ ID NO: 2224 - RNA, 23 nt, synthetic construct
  source 1..23: mol_type = other RNA
  modified_base 1: mod_base = OTHER; note = 2'-O-methyluridine-3'-phosphorothioate 5'-(E)-Vinylphosphonate
  modified_base 2: mod_base = OTHER; note = 2'-deoxy-2'-fluorouridine-3'-phosphorothioate
  modified_base 3: mod_base = OTHER; note = 2'-O-methylguanosine-3'-phosphate
  modified_base 4: mod_base = OTHER; note = 2'-O-methyladenosine-3'-phosphate
  modified_base 5: mod_base = OTHER; note = 2'-O-methylcytidine-3'-phosphate
  modified_base 6: mod_base = OTHER; note = 2'-deoxy-2'-fluorouridine-3'-phosphate
  modified_base 7: mod_base = OTHER; note = 2'-O-methyluridine-3'-phosphate
  modified_base 8: mod_base = OTHER; note = 2'-deoxy-2'-fluorouridine-3'-phosphate
  modified_base 9: mod_base = OTHER; note = 2'-deoxy-2'-fluorocytidine-3'-phosphate
  modified_base 10: mod_base = OTHER; note = 2'-O-methyluridine-3'-phosphate
  modified_base 11: mod_base = OTHER; note = 2'-O-methylguanosine-3'-phosphate
  modified_base 12: mod_base = OTHER; note = 2'-O-methyluridine-3'-phosphate
  modified_base 13: mod_base = OTHER; note = 2'-O-methyluridine-3'-phosphate
  modified_base 14: mod_base = OTHER; note = 2'-deoxy-2'-fluorouridine-3'-phosphate
  modified_base 15: mod_base = OTHER; note = 2'-O-methylguanosine-3'-phosphate
  modified_base 16: mod_base = OTHER; note = 2'-deoxy-2'-fluoroguanosine-3'-phosphate
  modified_base 17: mod_base = OTHER; note = 2'-O-methyladenosine-3'-phosphate
  modified_base 18: mod_base = OTHER; note = 2'-O-methylguanosine-3'-phosphate
  modified_base 19: mod_base = OTHER; note = 2'-O-methylguanosine-3'-phosphate
  modified_base 20: mod_base = OTHER; note = 2'-O-methyladenosine-3'-phosphate
  modified_base 21: mod_base = OTHER; note = 2'-O-methylguanosine-3'-phosphorothioate
  modified_base 22: mod_base = OTHER; note = 2'-O-methyladenosine-3'-phosphorothioate
  modified_base 23: mod_base = OTHER; note = 2'-O-methylcytidine
ttgactttctgtttggaggagac

SEQ ID NO: 2225 - RNA, 23 nt, synthetic construct
  source 1..23: mol_type = other RNA
  modified_base 1: mod_base = OTHER; note = 2'-O-methyluridine-3'-phosphorothioate 5'-(E)-Vinylphosphonate
  modified_base 2: mod_base = OTHER; note = 2'-deoxy-2'-fluorouridine-3'-phosphorothioate
  modified_base 3: mod_base = OTHER; note = 2'-O-methylcytidine-3'-phosphate
  modified_base 4: mod_base = OTHER; note = 2'-O-methylguanosine-3'-phosphate
  modified_base 5: mod_base = OTHER; note = 2'-O-methyladenosine-3'-phosphate
  modified_base 6: mod_base = OTHER; note = 2'-deoxy-2'-fluoroadenosine-3'-phosphate
  modified_base 7: mod_base = OTHER; note = 2'-O-methyladenosine-3'-phosphate
  modified_base 8: mod_base = OTHER; note = 2'-deoxy-2'-fluorocytidine-3'-phosphate
  modified_base 9: mod_base = OTHER; note = 2'-deoxy-2'-fluorouridine-3'-phosphate
  modified_base 10: mod_base = OTHER; note = 2'-O-methylcytidine-3'-phosphate
  modified_base 11: mod_base = OTHER; note = 2'-O-methylcytidine-3'-phosphate
  modified_base 12: mod_base = OTHER; note = 2'-O-methyluridine-3'-phosphate
  modified_base 13: mod_base = OTHER; note = 2'-O-methylcytidine-3'-phosphate
  modified_base 14: mod_base = OTHER; note = 2'-deoxy-2'-fluorouridine-3'-phosphate
  modified_base 15: mod_base = OTHER; note = 2'-O-methyluridine-3'-phosphate
  modified_base 16: mod_base = OTHER; note = 2'-deoxy-2'-fluorouridine-3'-phosphate
  modified_base 17: mod_base = OTHER; note = 2'-O-methyluridine-3'-phosphate
  modified_base 18: mod_base = OTHER; note = 2'-O-methylcytidine-3'-phosphate
  modified_base 19: mod_base = OTHER; note = 2'-O-methylcytidine-3'-phosphate
  modified_base 20: mod_base = OTHER; note = 2'-O-methyladenosine-3'-phosphate
  modified_base 21: mod_base = OTHER; note = 2'-O-methylguanosine-3'-phosphorothioate
  modified_base 22: mod_base = OTHER; note = 2'-O-methyladenosine-3'-phosphorothioate
  modified_base 23: mod_base = OTHER; note = 2'-O-methyladenosine
ttcgaaactcctcttttccagaa

SEQ ID NO: 2226 - RNA, 23 nt, synthetic construct
  source 1..23: mol_type = other RNA
  modified_base 1: mod_base = OTHER; note = 2'-O-methyluridine-3'-phosphorothioate 5'-(E)-Vinylphosphonate
  modified_base 2: mod_base = OTHER; note = 2'-deoxy-2'-fluoroadenosine-3'-phosphorothioate
  modified_base 3: mod_base = OTHER; note = 2'-O-methyluridine-3'-phosphate
  modified_base 4: mod_base = OTHER; note = 2'-O-methylcytidine-3'-phosphate
  modified_base 5: mod_base = OTHER; note = 2'-O-methyluridine-3'-phosphate
  modified_base 6: mod_base = OTHER; note = 2'-deoxy-2'-fluoroadenosine-3'-phosphate
  modified_base 7: mod_base = OTHER; note = 2'-O-methyluridine-3'-phosphate
  modified_base 8: mod_base = OTHER; note = 2'-deoxy-2'-fluoroguanosine-3'-phosphate
  modified_base 9: mod_base = OTHER; note = 2'-deoxy-2'-fluoroguanosine-3'-phosphate
  modified_base 10: mod_base = OTHER; note = 2'-O-methylguanosine-3'-phosphate
  modified_base 11: mod_base = OTHER; note = 2'-O-methyladenosine-3'-phosphate
  modified_base 12: mod_base = OTHER; note = 2'-O-methyluridine-3'-phosphate
  modified_base 13: mod_base = OTHER; note = 2'-O-methyluridine-3'-phosphate
  modified_base 14: mod_base = OTHER; note = 2'-deoxy-2'-fluoroguanosine-3'-phosphate
  modified_base 15: mod_base = OTHER; note = 2'-O-methylguanosine-3'-phosphate
  modified_base 16: mod_base = OTHER; note = 2'-deoxy-2'-fluoroadenosine-3'-phosphate
  modified_base 17: mod_base = OTHER; note = 2'-O-methyladenosine-3'-phosphate
  modified_base 18: mod_base = OTHER; note = 2'-O-methyladenosine-3'-phosphate
  modified_base 19: mod_base = OTHER; note = 2'-O-methylcytidine-3'-phosphate
  modified_base 20: mod_base = OTHER; note = 2'-O-methyluridine-3'-phosphate
  modified_base 21: mod_base = OTHER; note = 2'-O-methylguanosine-3'-phosphorothioate
  modified_base 22: mod_base = OTHER; note = 2'-O-methylcytidine-3'-phosphorothioate
  modified_base 23: mod_base = OTHER; note = 2'-O-methyladenosine
tatctatgggattggaaactgca

SEQ ID NO: 2227 - RNA, 23 nt, synthetic construct
  source 1..23: mol_type = other RNA
  modified_base 1: mod_base = OTHER; note = 2'-O-methyluridine-3'-phosphorothioate 5'-(E)-Vinylphosphonate
  modified_base 2: mod_base = OTHER; note = 2'-deoxy-2'-fluoroadenosine-3'-phosphorothioate
  modified_base 3: mod_base = OTHER; note = 2'-O-methyladenosine-3'-phosphate
  modified_base 4: mod_base = OTHER; note = 2'-O-methyluridine-3'-phosphate
  modified_base 5: mod_base = OTHER; note = 2'-O-methyluridine-3'-phosphate
  modified_base 6: mod_base = OTHER; note = 2'-deoxy-2'-fluoroadenosine-3'-phosphate
  modified_base 7: mod_base = OTHER; note = 2'-O-methylguanosine-3'-phosphate
  modified_base 8: mod_base = OTHER; note = 2'-deoxy-2'-fluorocytidine-3'-phosphate
  modified_base 9: mod_base = OTHER; note = 2'-deoxy-2'-fluorocytidine-3'-phosphate
  modified_base 10: mod_base = OTHER; note = 2'-O-methyladenosine-3'-phosphate
  modified_base 11: mod_base = OTHER; note = 2'-O-methyluridine-3'-phosphate
  modified_base 12: mod_base = OTHER; note = 2'-O-methyluridine-3'-phosphate
  modified_base 13: mod_base = OTHER; note = 2'-O-methylguanosine-3'-phosphate
  modified_base 14: mod_base = OTHER; note = 2'-deoxy-2'-fluorouridine-3'-phosphate
  modified_base 15: mod_base = OTHER; note = 2'-O-methylguanosine-3'-phosphate
  modified_base 16: mod_base = OTHER; note = 2'-deoxy-2'-fluorocytidine-3'-phosphate
  modified_base 17: mod_base = OTHER; note = 2'-O-methylcytidine-3'-phosphate
  modified_base 18: mod_base = OTHER; note = 2'-O-methyladenosine-3'-phosphate
  modified_base 19: mod_base = OTHER; note = 2'-O-methylguanosine-3'-phosphate
  modified_base 20: mod_base = OTHER; note = 2'-O-methylguanosine-3'-phosphate
  modified_base 21: mod_base = OTHER; note = 2'-O-methyluridine-3'-phosphorothioate
  modified_base 22: mod_base = OTHER; note = 2'-O-methyluridine-3'-phosphorothioate
  modified_base 23: mod_base = OTHER; note = 2'-O-methyluridine
taattagccattgtgccaggttt

SEQ ID NO: 2228 - RNA, 23 nt, synthetic construct
  source 1..23: mol_type = other RNA
  modified_base 1: mod_base = OTHER; note = 2'-O-methyluridine-3'-phosphorothioate 5'-(E)-Vinylphosphonate
  modified_base 2: mod_base = OTHER; note = 2'-deoxy-2'-fluoroadenosine-3'-phosphorothioate
  modified_base 3: mod_base = OTHER; note = 2'-O-methyladenosine-3'-phosphate
  modified_base 4: mod_base = OTHER; note = 2'-O-methyladenosine-3'-phosphate
  modified_base 5: mod_base = OTHER; note = 2'-O-methyladenosine-3'-phosphate
  modified_base 6: mod_base = OTHER; note = 2'-deoxy-2'-fluorouridine-3'-phosphate
  modified_base 7: mod_base = OTHER; note = 2'-O-methyladenosine-3'-phosphate
  modified_base 8: mod_base = OTHER; note = 2'-deoxy-2'-fluoroadenosine-3'-phosphate
  modified_base 9: mod_base = OTHER; note = 2'-deoxy-2'-fluorocytidine-3'-phosphate
  modified_base 10: mod_base = OTHER; note = 2'-O-methylcytidine-3'-phosphate
  modified_base 11: mod_base = OTHER; note = 2'-O-methyluridine-3'-phosphate
  modified_base 12: mod_base = OTHER; note = 2'-O-methylguanosine-3'-phosphate
  modified_base 13: mod_base = OTHER; note = 2'-O-methylguanosine-3'-phosphate
  modified_base 14: mod_base = OTHER; note = 2'-deoxy-2'-fluorouridine-3'-phosphate
  modified_base 15: mod_base = OTHER; note = 2'-O-methylcytidine-3'-phosphate
  modified_base 16: mod_base = OTHER; note = 2'-deoxy-2'-fluorocytidine-3'-phosphate
  modified_base 17: mod_base = OTHER; note = 2'-O-methyluridine-3'-phosphate
  modified_base 18: mod_base = OTHER; note = 2'-O-methyluridine-3'-phosphate
  modified_base 19: mod_base = OTHER; note = 2'-O-methylguanosine-3'-phosphate
  modified_base 20: mod_base = OTHER; note = 2'-O-methylguanosine-3'-phosphate
  modified_base 21: mod_base = OTHER; note = 2'-O-methyladenosine-3'-phosphorothioate
  modified_base 22: mod_base = OTHER; note = 2'-O-methylguanosine-3'-phosphorothioate
  modified_base 23: mod_base = OTHER; note = 2'-O-methyladenosine
taaaataacctggtccttggaga

SEQ ID NO: 2229 - RNA, 23 nt, synthetic construct
  source 1..23: mol_type = other RNA
  modified_base 1: mod_base = OTHER; note = 2'-O-methyluridine-3'-phosphorothioate 5'-(E)-Vinylphosphonate
  modified_base 2: mod_base = OTHER; note = 2'-deoxy-2'-fluoroadenosine-3'-phosphorothioate
  modified_base 3: mod_base = OTHER; note = 2'-O-methyladenosine-3'-phosphate
  modified_base 4: mod_base = OTHER; note = 2'-O-methyluridine-3'-phosphate
  modified_base 5: mod_base = OTHER; note = 2'-O-methylguanosine-3'-phosphate
  modified_base 6: mod_base = OTHER; note = 2'-deoxy-2'-fluorocytidine-3'-phosphate
  modified_base 7: mod_base = OTHER; note = 2'-O-methyladenosine-3'-phosphate
  modified_base 8: mod_base = OTHER; note = 2'-deoxy-2'-fluorouridine-3'-phosphate
  modified_base 9: mod_base = OTHER; note = 2'-deoxy-2'-fluorouridine-3'-phosphate
  modified_base 10: mod_base = OTHER; note = 2'-O-methyluridine-3'-phosphate
  modified_base 11: mod_base = OTHER; note = 2'-O-methyluridine-3'-phosphate
  modified_base 12: mod_base = OTHER; note = 2'-O-methylcytidine-3'-phosphate
  modified_base 13: mod_base = OTHER; note = 2'-O-methylcytidine-3'-phosphate
  modified_base 14: mod_base = OTHER; note = 2'-deoxy-2'-fluorouridine-3'-phosphate
  modified_base 15: mod_base = OTHER; note = 2'-O-methyluridine-3'-phosphate
  modified_base 16: mod_base = OTHER; note = 2'-deoxy-2'-fluorocytidine-3'-phosphate
  modified_base 17: mod_base = OTHER; note = 2'-O-methylcytidine-3'-phosphate
  modified_base 18: mod_base = OTHER; note = 2'-O-methylcytidine-3'-phosphate
  modified_base 19: mod_base = OTHER; note = 2'-O-methyladenosine-3'-phosphate
  modified_base 20: mod_base = OTHER; note = 2'-O-methylguanosine-3'-phosphate
  modified_base 21: mod_base = OTHER; note = 2'-O-methylguanosine-3'-phosphorothioate
  modified_base 22: mod_base = OTHER; note = 2'-O-methyladenosine-3'-phosphorothioate
  modified_base 23: mod_base = OTHER; note = 2'-O-methyluridine
taatgcattttccttcccaggat

SEQ ID NO: 2230 - RNA, 23 nt, synthetic construct
  source 1..23: mol_type = other RNA
  modified_base 1: mod_base = OTHER; note = 2'-O-methyluridine-3'-phosphorothioate 5'-(E)-Vinylphosphonate
  modified_base 2: mod_base = OTHER; note = 2'-deoxy-2'-fluorouridine-3'-phosphorothioate
  modified_base 3: mod_base = OTHER; note = 2'-O-methyluridine-3'-phosphate
  modified_base 4: mod_base = OTHER; note = 2'-O-methyluridine-3'-phosphate
  modified_base 5: mod_base = OTHER; note = 2'-O-methyluridine-3'-phosphate
  modified_base 6: mod_base = OTHER; note = 2'-deoxy-2'-fluoroguanosine-3'-phosphate
  modified_base 7: mod_base = OTHER; note = 2'-O-methylguanosine-3'-phosphate
  modified_base 8: mod_base = OTHER; note = 2'-deoxy-2'-fluorouridine-3'-phosphate
  modified_base 9: mod_base = OTHER; note = 2'-deoxy-2'-fluoroguanosine-3'-phosphate
  modified_base 10: mod_base = OTHER; note = 2'-O-methyluridine-3'-phosphate
  modified_base 11: mod_base = OTHER; note = 2'-O-methylcytidine-3'-phosphate
  modified_base 12: mod_base = OTHER; note = 2'-O-methyladenosine-3'-phosphate
  modified_base 13: mod_base = OTHER; note = 2'-O-methyluridine-3'-phosphate
  modified_base 14: mod_base = OTHER; note = 2'-deoxy-2'-fluorocytidine-3'-phosphate
  modified_base 15: mod_base = OTHER; note = 2'-O-methyluridine-3'-phosphate
  modified_base 16: mod_base = OTHER; note = 2'-deoxy-2'-fluorouridine-3'-phosphate
  modified_base 17: mod_base = OTHER; note = 2'-O-methylguanosine-3'-phosphate
  modified_base 18: mod_base = OTHER; note = 2'-O-methylguanosine-3'-phosphate
  modified_base 19: mod_base = OTHER; note = 2'-O-methyladenosine-3'-phosphate
  modified_base 20: mod_base = OTHER; note = 2'-O-methylcytidine-3'-phosphate
  modified_base 21: mod_base = OTHER; note = 2'-O-methyluridine-3'-phosphorothioate
  modified_base 22: mod_base = OTHER; note = 2'-O-methyluridine-3'-phosphorothioate
  modified_base 23: mod_base = OTHER; note = 2'-O-methyluridine
tttttggtgtcatcttggacttt

SEQ ID NO: 2231 - RNA, 23 nt, synthetic construct
  source 1..23: mol_type = other RNA
  modified_base 1: mod_base = OTHER; note = 2'-O-methyluridine-3'-phosphorothioate 5'-(E)-Vinylphosphonate
  modified_base 2: mod_base = OTHER; note = 2'-deoxy-2'-fluorouridine-3'-phosphorothioate
  modified_base 3: mod_base = OTHER; note = 2'-O-methylguanosine-3'-phosphate
  modified_base 4: mod_base = OTHER; note = 2'-O-methyladenosine-3'-phosphate
  modified_base 5: mod_base = OTHER; note = 2'-O-methyluridine-3'-phosphate
  modified_base 6: mod_base = OTHER; note = 2'-deoxy-2'-fluorouridine-3'-phosphate
  modified_base 7: mod_base = OTHER; note = 2'-O-methyladenosine-3'-phosphate
  modified_base 8: mod_base = OTHER; note = 2'-deoxy-2'-fluoroguanosine-3'-phosphate
  modified_base 9: mod_base = OTHER; note = 2'-deoxy-2'-fluoroguanosine-3'-phosphate
  modified_base 10: mod_base = OTHER; note = 2'-O-methyluridine-3'-phosphate
  modified_base 11: mod_base = OTHER; note = 2'-O-methylguanosine-3'-phosphate
  modified_base 12: mod_base = OTHER; note = 2'-O-methylguanosine-3'-phosphate
  modified_base 13: mod_base = OTHER; note = 2'-O-methyluridine-3'-phosphate
  modified_base 14: mod_base = OTHER; note = 2'-deoxy-2'-fluorouridine-3'-phosphate
  modified_base 15: mod_base = OTHER; note = 2'-O-methylguanosine-3'-phosphate
  modified_base 16: mod_base = OTHER; note = 2'-deoxy-2'-fluorouridine-3'-phosphate
  modified_base 17: mod_base = OTHER; note = 2'-O-methylguanosine-3'-phosphate
  modified_base 18: mod_base = OTHER; note = 2'-O-methyladenosine-3'-phosphate
  modified_base 19: mod_base = OTHER; note = 2'-O-methylguanosine-3'-phosphate
  modified_base 20: mod_base = OTHER; note = 2'-O-methylguanosine-3'-phosphate
  modified_base 21: mod_base = OTHER; note = 2'-O-methyladenosine-3'-phosphorothioate
  modified_base 22: mod_base = OTHER; note = 2'-O-methyluridine-3'-phosphorothioate
  modified_base 23: mod_base = OTHER; note = 2'-O-methylcytidine
ttgattaggtggttgtgaggatc

SEQ ID NO: 2232 - RNA, 23 nt, synthetic construct
  source 1..23: mol_type = other RNA
  modified_base 1: mod_base = OTHER; note = 2'-O-methyluridine-3'-phosphorothioate 5'-(E)-Vinylphosphonate
  modified_base 2: mod_base = OTHER; note = 2'-deoxy-2'-fluorouridine-3'-phosphorothioate
  modified_base 3: mod_base = OTHER; note = 2'-O-methyluridine-3'-phosphate
  modified_base 4: mod_base = OTHER; note = 2'-O-methylguanosine-3'-phosphate
  modified_base 5: mod_base = OTHER; note = 2'-O-methylguanosine-3'-phosphate
  modified_base 6: mod_base = OTHER; note = 2'-deoxy-2'-fluorouridine-3'-phosphate
  modified_base 7: mod_base = OTHER; note = 2'-O-methyladenosine-3'-phosphate
  modified_base 8: mod_base = OTHER; note = 2'-deoxy-2'-fluoroadenosine-3'-phosphate
  modified_base 9: mod_base = OTHER; note = 2'-deoxy-2'-fluorouridine-3'-phosphate
  modified_base 10: mod_base = OTHER; note = 2'-O-methyluridine-3'-phosphate
  modified_base 11: mod_base = OTHER; note = 2'-O-methyluridine-3'-phosphate
  modified_base 12: mod_base = OTHER; note = 2'-O-methyluridine-3'-phosphate
  modified_base 13: mod_base = OTHER; note = 2'-O-methylguanosine-3'-phosphate
  modified_base 14: mod_base = OTHER; note = 2'-deoxy-2'-fluoroguanosine-3'-phosphate
  modified_base 15: mod_base = OTHER; note = 2'-O-methylcytidine-3'-phosphate
  modified_base 16: mod_base = OTHER; note = 2'-deoxy-2'-fluorocytidine-3'-phosphate
  modified_base 17: mod_base = OTHER; note = 2'-O-methyluridine-3'-phosphate
  modified_base 18: mod_base = OTHER; note = 2'-O-methyluridine-3'-phosphate
  modified_base 19: mod_base = OTHER; note = 2'-O-methylguanosine-3'-phosphate
  modified_base 20: mod_base = OTHER; note = 2'-O-methylcytidine-3'-phosphate
  modified_base 21: mod_base = OTHER; note = 2'-O-methyluridine-3'-phosphorothioate
  modified_base 22: mod_base = OTHER; note = 2'-O-methyluridine-3'-phosphorothioate
  modified_base 23: mod_base = OTHER; note = 2'-O-methylguanosine
tttggtaattttggccttgcttg

SEQ ID NO: 2233 - RNA, 23 nt, synthetic construct
  source 1..23: mol_type = other RNA
  modified_base 1: mod_base = OTHER; note = 2'-O-methyluridine-3'-phosphorothioate 5'-(E)-Vinylphosphonate
  modified_base 2: mod_base = OTHER; note = 2'-deoxy-2'-fluorouridine-3'-phosphorothioate
  modified_base 3: mod_base = OTHER; note = 2'-O-methylcytidine-3'-phosphate
  modified_base 4: mod_base = OTHER; note = 2'-O-methyladenosine-3'-phosphate
  modified_base 5: mod_base = OTHER; note = 2'-O-methylcytidine-3'-phosphate
  modified_base 6: mod_base = OTHER; note = 2'-deoxy-2'-fluoroadenosine-3'-phosphate
  modified_base 7: mod_base = OTHER; note = 2'-O-methyluridine-3'-phosphate
  modified_base 8: mod_base = OTHER; note = 2'-deoxy-2'-fluorouridine-3'-phosphate
  modified_base 9: mod_base = OTHER; note = 2'-deoxy-2'-fluoroguanosine-3'-phosphate
  modified_base 10: mod_base = OTHER; note = 2'-O-methyladenosine-3'-phosphate
  modified_base 11: mod_base = OTHER; note = 2'-O-methylguanosine-3'-phosphate
  modified_base 12: mod_base = OTHER; note = 2'-O-methylguanosine-3'-phosphate
  modified_base 13: mod_base = OTHER; note = 2'-O-methylcytidine-3'-phosphate
  modified_base 14: mod_base = OTHER; note = 2'-deoxy-2'-fluoroadenosine-3'-phosphate
  modified_base 15: mod_base = OTHER; note = 2'-O-methyluridine-3'-phosphate
  modified_base 16: mod_base = OTHER; note = 2'-deoxy-2'-fluorouridine-3'-phosphate
  modified_base 17: mod_base = OTHER; note = 2'-O-methylcytidine-3'-phosphate
  modified_base 18: mod_base = OTHER; note = 2'-O-methyladenosine-3'-phosphate
  modified_base 19: mod_base = OTHER; note = 2'-O-methylguanosine-3'-phosphate
  modified_base 20: mod_base = OTHER; note = 2'-O-methyluridine-3'-phosphate
  modified_base 21: mod_base = OTHER; note = 2'-O-methylguanosine-3'-phosphorothioate
  modified_base 22: mod_base = OTHER; note = 2'-O-methyladenosine-3'-phosphorothioate
  modified_base 23: mod_base = OTHER; note = 2'-O-methylguanosine
ttcacattgaggcattcagtgag

SEQ ID NO: 2234 - RNA, 23 nt, synthetic construct
  source 1..23: mol_type = other RNA
  modified_base 1: mod_base = OTHER; note = 2'-O-methyluridine-3'-phosphorothioate 5'-(E)-Vinylphosphonate
  modified_base 2: mod_base = OTHER; note = 2'-deoxy-2'-fluorouridine-3'-phosphorothioate
  modified_base 3: mod_base = OTHER; note = 2'-O-methyluridine-3'-phosphate
  modified_base 4: mod_base = OTHER; note = 2'-O-methylguanosine-3'-phosphate
  modified_base 5: mod_base = OTHER; note = 2'-O-methylcytidine-3'-phosphate
  modified_base 6: mod_base = OTHER; note = 2'-deoxy-2'-fluoroadenosine-3'-phosphate
  modified_base 7: mod_base = OTHER; note = 2'-O-methyladenosine-3'-phosphate
  modified_base 8: mod_base = OTHER; note = 2'-deoxy-2'-fluoroadenosine-3'-phosphate
  modified_base 9: mod_base = OTHER; note = 2'-deoxy-2'-fluorocytidine-3'-phosphate
  modified_base 10: mod_base = OTHER; note = 2'-O-methyladenosine-3'-phosphate
  modified_base 11: mod_base = OTHER; note = 2'-O-methylcytidine-3'-phosphate
  modified_base 12: mod_base = OTHER; note = 2'-O-methyluridine-3'-phosphate
  modified_base 13: mod_base = OTHER; note = 2'-O-methylguanosine-3'-phosphate
  modified_base 14: mod_base = OTHER; note = 2'-deoxy-2'-fluorouridine-3'-phosphate
  modified_base 15: mod_base = OTHER; note = 2'-O-methylguanosine-3'-phosphate
  modified_base 16: mod_base = OTHER; note = 2'-deoxy-2'-fluoroadenosine-3'-phosphate
  modified_base 17: mod_base = OTHER; note = 2'-O-methyluridine-3'-phosphate
  modified_base 18: mod_base = OTHER; note = 2'-O-methylguanosine-3'-phosphate
  modified_base 19: mod_base = OTHER; note = 2'-O-methyluridine-3'-phosphate
  modified_base 20: mod_base = OTHER; note = 2'-O-methyladenosine-3'-phosphate
  modified_base 21: mod_base = OTHER; note = 2'-O-methyladenosine-3'-phosphorothioate
  modified_base 22: mod_base = OTHER; note = 2'-O-methylcytidine-3'-phosphorothioate
  modified_base 23: mod_base = OTHER; note = 2'-O-methyladenosine
tttgcaaacactgtgatgtaaca

SEQ ID NO: 2235 - RNA, 23 nt, synthetic construct
  source 1..23: mol_type = other RNA
  modified_base 1: mod_base = OTHER; note = 2'-O-methyluridine-3'-phosphorothioate 5'-(E)-Vinylphosphonate
  modified_base 2: mod_base = OTHER; note = 2'-deoxy-2'-fluorouridine-3'-phosphorothioate
  modified_base 3: mod_base = OTHER; note = 2'-O-methylcytidine-3'-phosphate
  modified_base 4: mod_base = OTHER; note = 2'-O-methyluridine-3'-phosphate
  modified_base 5: mod_base = OTHER; note = 2'-O-methyluridine-3'-phosphate
  modified_base 6: mod_base = OTHER; note = 2'-deoxy-2'-fluorocytidine-3'-phosphate
  modified_base 7: mod_base = OTHER; note = 2'-O-methyladenosine-3'-phosphate
  modified_base 8: mod_base = OTHER; note = 2'-deoxy-2'-fluorouridine-3'-phosphate
  modified_base 9: mod_base = OTHER; note = 2'-deoxy-2'-fluoroguanosine-3'-phosphate
  modified_base 10: mod_base = OTHER; note = 2'-O-methylguanosine-3'-phosphate
  modified_base 11: mod_base = OTHER; note = 2'-O-methyladenosine-3'-phosphate
  modified_base 12: mod_base = OTHER; note = 2'-O-methyladenosine-3'-phosphate
  modified_base 13: mod_base = OTHER; note = 2'-O-methylcytidine-3'-phosphate
  modified_base 14: mod_base = OTHER; note = 2'-deoxy-2'-fluorouridine-3'-phosphate
  modified_base 15: mod_base = OTHER; note = 2'-O-methylcytidine-3'-phosphate
  modified_base 16: mod_base = OTHER; note = 2'-deoxy-2'-fluorocytidine-3'-phosphate
  modified_base 17: mod_base = OTHER; note = 2'-O-methyluridine-3'-phosphate
  modified_base 18: mod_base = OTHER; note = 2'-O-methyluridine-3'-phosphate
  modified_base 19: mod_base = OTHER; note = 2'-O-methylguanosine-3'-phosphate
  modified_base 20: mod_base = OTHER; note = 2'-O-methylguanosine-3'-phosphate
  modified_base 21: mod_base = OTHER; note = 2'-O-methyladenosine-3'-phosphorothioate
  modified_base 22: mod_base = OTHER; note = 2'-O-methyladenosine-3'-phosphorothioate
  modified_base 23: mod_base = OTHER; note = 2'-O-methyluridine
ttcttcatggaactccttggaat

SEQ ID NO: 2236 - RNA, 23 nt, synthetic construct
  source 1..23: mol_type = other RNA
  modified_base 1: mod_base = OTHER; note = 2'-O-methyluridine-3'-phosphorothioate 5'-(E)-Vinylphosphonate
  modified_base 2: mod_base = OTHER; note = 2'-deoxy-2'-fluoroadenosine-3'-phosphorothioate
  modified_base 3: mod_base = OTHER; note = 2'-O-methyluridine-3'-phosphate
  modified_base 4: mod_base = OTHER; note = 2'-O-methylguanosine-3'-phosphate
  modified_base 5: mod_base = OTHER; note = 2'-O-methylcytidine-3'-phosphate
  modified_base 6: mod_base = OTHER; note = 2'-deoxy-2'-fluoroadenosine-3'-phosphate
  modified_base 7: mod_base = OTHER; note = 2'-O-methyladenosine-3'-phosphate
  modified_base 8: mod_base = OTHER; note = 2'-deoxy-2'-fluorouridine-3'-phosphate
  modified_base 9: mod_base = OTHER; note = 2'-deoxy-2'-fluoroguanosine-3'-phosphate
  modified_base 10: mod_base = OTHER; note = 2'-O-methylcytidine-3'-phosphate
  modified_base 11: mod_base = OTHER; note = 2'-O-methyluridine-3'-phosphate
  modified_base 12: mod_base = OTHER; note = 2'-O-methylcytidine-3'-phosphate
  modified_base 13: mod_base = OTHER; note = 2'-O-methyluridine-3'-phosphate
  modified_base 14: mod_base = OTHER; note = 2'-deoxy-2'-fluorouridine-3'-phosphate
  modified_base 15: mod_base = OTHER; note = 2'-O-methylcytidine-3'-phosphate
  modified_base 16: mod_base = OTHER; note = 2'-deoxy-2'-fluoroadenosine-3'-phosphate
  modified_base 17: mod_base = OTHER; note = 2'-O-methyladenosine-3'-phosphate
  modified_base 18: mod_base = OTHER; note = 2'-O-methyluridine-3'-phosphate
  modified_base 19: mod_base = OTHER; note = 2'-O-methylcytidine-3'-phosphate
  modified_base 20: mod_base = OTHER; note = 2'-O-methylcytidine-3'-phosphate
  modified_base 21: mod_base = OTHER; note = 2'-O-methyluridine-3'-phosphorothioate
  modified_base 22: mod_base = OTHER; note = 2'-O-methylguanosine-3'-phosphorothioate
  modified_base 23: mod_base = OTHER; note = 2'-O-methylguanosine
tatgcaatgctcttcaatcctgg

SEQ ID NO: 2237 - RNA, 23 nt, synthetic construct
  source 1..23: mol_type = other RNA
  modified_base 1: mod_base = OTHER; note = 2'-O-methyluridine-3'-phosphorothioate 5'-(E)-Vinylphosphonate
  modified_base 2: mod_base = OTHER; note = 2'-deoxy-2'-fluoroadenosine-3'-phosphorothioate
  modified_base 3: mod_base = OTHER; note = 2'-O-methyluridine-3'-phosphate
  modified_base 4: mod_base = OTHER; note = 2'-O-methyluridine-3'-phosphate
  modified_base 5: mod_base = OTHER; note = 2'-O-methylcytidine-3'-phosphate
  modified_base 6: mod_base = OTHER; note = 2'-deoxy-2'-fluorouridine-3'-phosphate
  modified_base 7: mod_base = OTHER; note = 2'-O-methyladenosine-3'-phosphate
  modified_base 8: mod_base = OTHER; note = 2'-deoxy-2'-fluoroguanosine-3'-phosphate
  modified_base 9: mod_base = OTHER; note = 2'-deoxy-2'-fluoroadenosine-3'-phosphate
  modified_base 10: mod_base = OTHER; note = 2'-O-methyluridine-3'-phosphate
  modified_base 11: mod_base = OTHER; note = 2'-O-methylcytidine-3'-phosphate
  modified_base 12: mod_base = OTHER; note = 2'-O-methylcytidine-3'-phosphate
  modified_base 13: mod_base = OTHER; note = 2'-O-methyluridine-3'-phosphate
  modified_base 14: mod_base = OTHER; note = 2'-deoxy-2'-fluorouridine-3'-phosphate
  modified_base 15: mod_base = OTHER; note = 2'-O-methylcytidine-3'-phosphate
  modified_base 16: mod_base = OTHER; note = 2'-deoxy-2'-fluorouridine-3'-phosphate
  modified_base 17: mod_base = OTHER; note = 2'-O-methylcytidine-3'-phosphate
  modified_base 18: mod_base = OTHER; note = 2'-O-methylcytidine-3'-phosphate
  modified_base 19: mod_base = OTHER; note = 2'-O-methylcytidine-3'-phosphate
  modified_base 20: mod_base = OTHER; note = 2'-O-methyluridine-3'-phosphate
  modified_base 21: mod_base = OTHER; note = 2'-O-methyluridine-3'-phosphorothioate
  modified_base 22: mod_base = OTHER; note = 2'-O-methylcytidine-3'-phosphorothioate
  modified_base 23: mod_base = OTHER; note = 2'-O-methyluridine
tattctagatccttctcccttct

SEQ ID NO: 2238 - RNA, 23 nt, synthetic construct
  source 1..23: mol_type = other RNA
  modified_base 1: mod_base = OTHER; note = 2'-O-methyluridine-3'-phosphorothioate 5'-(E)-Vinylphosphonate
  modified_base 2: mod_base = OTHER; note = 2'-deoxy-2'-fluorouridine-3'-phosphorothioate
  modified_base 3: mod_base = OTHER; note = 2'-O-methyladenosine-3'-phosphate
  modified_base 4: mod_base = OTHER; note = 2'-O-methylcytidine-3'-phosphate
  modified_base 5: mod_base = OTHER; note = 2'-O-methyluridine-3'-phosphate
  modified_base 6: mod_base = OTHER; note = 2'-deoxy-2'-fluorocytidine-3'-phosphate
  modified_base 7: mod_base = OTHER; note = 2'-O-methyluridine-3'-phosphate
  modified_base 8: mod_base = OTHER; note = 2'-deoxy-2'-fluorouridine-3'-phosphate
  modified_base 9: mod_base = OTHER; note = 2'-deoxy-2'-fluoroadenosine-3'-phosphate
  modified_base 10: mod_base = OTHER; note = 2'-O-methyladenosine-3'-phosphate
  modified_base 11: mod_base = OTHER; note = 2'-O-methylcytidine-3'-phosphate
  modified_base 12: mod_base = OTHER; note = 2'-O-methyluridine-3'-phosphate
  modified_base 13: mod_base = OTHER; note = 2'-O-methylcytidine-3'-phosphate
  modified_base 14: mod_base = OTHER; note = 2'-deoxy-2'-fluorocytidine-3'-phosphate
  modified_base 15: mod_base = OTHER; note = 2'-O-methyluridine-3'-phosphate
  modified_base 16: mod_base = OTHER; note = 2'-deoxy-2'-fluorouridine-3'-phosphate
  modified_base 17: mod_base = OTHER; note = 2'-O-methyluridine-3'-phosphate
  modified_base 18: mod_base = OTHER; note = 2'-O-methyladenosine-3'-phosphate
  modified_base 19: mod_base = OTHER; note = 2'-O-methyladenosine-3'-phosphate
  modified_base 20: mod_base = OTHER; note = 2'-O-methyluridine-3'-phosphate
  modified_base 21: mod_base = OTHER; note = 2'-O-methyladenosine-3'-phosphorothioate
  modified_base 22: mod_base = OTHER; note = 2'-O-methyluridine-3'-phosphorothioate
  modified_base 23: mod_base = OTHER; note = 2'-O-methylcytidine
ttactcttaactcctttaatatc

SEQ ID NO: 2239 - RNA, 23 nt, synthetic construct
  source 1..23: mol_type = other RNA
  modified_base 1: mod_base = OTHER; note = 2'-O-methyluridine-3'-phosphorothioate 5'-(E)-Vinylphosphonate
  modified_base 2: mod_base = OTHER; note = 2'-deoxy-2'-fluorouridine-3'-phosphorothioate
  modified_base 3: mod_base = OTHER; note = 2'-O-methylcytidine-3'-phosphate
  modified_base 4: mod_base = OTHER; note = 2'-O-methylcytidine-3'-phosphate
  modified_base 5: mod_base = OTHER; note = 2'-O-methyladenosine-3'-phosphate
  modified_base 6: mod_base = OTHER; note = 2'-deoxy-2'-fluorouridine-3'-phosphate
  modified_base 7: mod_base = OTHER; note = 2'-O-methylguanosine-3'-phosphate
  modified_base 8: mod_base = OTHER; note = 2'-deoxy-2'-fluoroadenosine-3'-phosphate
  modified_base 9: mod_base = OTHER; note = 2'-deoxy-2'-fluorouridine-3'-phosphate
  modified_base 10: mod_base = OTHER; note = 2'-O-methyladenosine-3'-phosphate
  modified_base 11: mod_base = OTHER; note = 2'-O-methylguanosine-3'-phosphate
  modified_base 12: mod_base = OTHER; note = 2'-O-methylguanosine-3'-phosphate
  modified_base 13: mod_base = OTHER; note = 2'-O-methyladenosine-3'-phosphate
  modified_base 14: mod_base = OTHER; note = 2'-deoxy-2'-fluoroadenosine-3'-phosphate
  modified_base 15: mod_base = OTHER; note = 2'-O-methyladenosine-3'-phosphate
  modified_base 16: mod_base = OTHER; note = 2'-deoxy-2'-fluoroguanosine-3'-phosphate
  modified_base 17: mod_base = OTHER; note = 2'-O-methyladenosine-3'-phosphate
  modified_base 18: mod_base = OTHER; note = 2'-O-methylcytidine-3'-phosphate
  modified_base 19: mod_base = OTHER; note = 2'-O-methylcytidine-3'-phosphate
  modified_base 20: mod_base = OTHER; note = 2'-O-methyladenosine-3'-phosphate
  modified_base 21: mod_base = OTHER; note = 2'-O-methylcytidine-3'-phosphorothioate
  modified_base 22: mod_base = OTHER; note = 2'-O-methyluridine-3'-phosphorothioate
  modified_base 23: mod_base = OTHER; note = 2'-O-methylcytidine
ttccatgataggaaagaccactc

SEQ ID NO: 2240 - RNA, 23 nt, synthetic construct
  source 1..23: mol_type = other RNA
  modified_base 1: mod_base = OTHER; note = 2'-O-methyluridine-3'-phosphorothioate 5'-(E)-Vinylphosphonate
  modified_base 2: mod_base = OTHER; note = 2'-deoxy-2'-fluorocytidine-3'-phosphorothioate
  modified_base 3: mod_base = OTHER; note = 2'-O-methyladenosine-3'-phosphate
  modified_base 4: mod_base = OTHER; note = 2'-O-methyluridine-3'-phosphate
  modified_base 5: mod_base = OTHER; note = 2'-O-methylcytidine-3'-phosphate
  modified_base 6: mod_base = OTHER; note = 2'-deoxy-2'-fluorocytidine-3'-phosphate
  modified_base 7: mod_base = OTHER; note = 2'-O-methyladenosine-3'-phosphate
  modified_base 8: mod_base = OTHER; note = 2'-deoxy-2'-fluoroguanosine-3'-phosphate
  modified_base 9: mod_base = OTHER; note = 2'-deoxy-2'-fluoroadenosine-3'-phosphate
  modified_base 10: mod_base = OTHER; note = 2'-O-methyladenosine-3'-phosphate
  modified_base 11: mod_base = OTHER; note = 2'-O-methyluridine-3'-phosphate
  modified_base 12: mod_base = OTHER; note = 2'-O-methyladenosine-3'-phosphate
  modified_base 13: mod_base = OTHER; note = 2'-O-methyladenosine-3'-phosphate
  modified_base 14: mod_base = OTHER; note = 2'-deoxy-2'-fluoroadenosine-3'-phosphate
  modified_base 15: mod_base = OTHER; note = 2'-O-methyladenosine-3'-phosphate
  modified_base 16: mod_base = OTHER; note = 2'-deoxy-2'-fluorouridine-3'-phosphate
  modified_base 17: mod_base = OTHER; note = 2'-O-methylguanosine-3'-phosphate
  modified_base 18: mod_base = OTHER; note = 2'-O-methylcytidine-3'-phosphate
  modified_base 19: mod_base = OTHER; note = 2'-O-methyladenosine-3'-phosphate
  modified_base 20: mod_base = OTHER; note = 2'-O-methylguanosine-3'-phosphate
  modified_base 21: mod_base = OTHER; note = 2'-O-methyladenosine-3'-phosphorothioate
  modified_base 22: mod_base = OTHER; note = 2'-O-methyladenosine-3'-phosphorothioate
  modified_base 23: mod_base = OTHER; note = 2'-O-methyluridine
tcatccagaataaaatgcagaat

SEQ ID NO: 2241 - RNA, 23 nt, synthetic construct
  source 1..23: mol_type = other RNA
  modified_base 1: mod_base = OTHER; note = 2'-O-methyluridine-3'-phosphorothioate 5'-(E)-Vinylphosphonate
  modified_base 2: mod_base = OTHER; note = 2'-deoxy-2'-fluorouridine-3'-phosphorothioate
  modified_base 3: mod_base = OTHER; note = 2'-O-methyluridine-3'-phosphate
  modified_base 4: mod_base = OTHER; note = 2'-O-methyladenosine-3'-phosphate
  modified_base 5: mod_base = OTHER; note = 2'-O-methyladenosine-3'-phosphate
  modified_base 6: mod_base = OTHER; note = 2'-deoxy-2'-fluorocytidine-3'-phosphate
  modified_base 7: mod_base = OTHER; note = 2'-O-methylguanosine-3'-phosphate
  modified_base 8: mod_base = OTHER; note = 2'-deoxy-2'-fluorouridine-3'-phosphate
  modified_base 9: mod_base = OTHER; note = 2'-deoxy-2'-fluoroadenosine-3'-phosphate
  modified_base 10: mod_base = OTHER; note = 2'-O-methylguanosine-3'-phosphate
  modified_base 11: mod_base = OTHER; note = 2'-O-methyluridine-3'-phosphate
  modified_base 12: mod_base = OTHER; note = 2'-O-methylcytidine-3'-phosphate
  modified_base 13: mod_base = OTHER; note = 2'-O-methylcytidine-3'-phosphate
  modified_base 14: mod_base = OTHER; note = 2'-deoxy-2'-fluorouridine-3'-phosphate
  modified_base 15: mod_base = OTHER; note = 2'-O-methyluridine-3'-phosphate
  modified_base 16: mod_base = OTHER; note = 2'-deoxy-2'-fluoroguanosine-3'-phosphate
  modified_base 17: mod_base = OTHER; note = 2'-O-methylcytidine-3'-phosphate
  modified_base 18: mod_base = OTHER; note = 2'-O-methyladenosine-3'-phosphate
  modified_base 19: mod_base = OTHER; note = 2'-O-methylguanosine-3'-phosphate
  modified_base 20: mod_base = OTHER; note = 2'-O-methylguanosine-3'-phosphate
  modified_base 21: mod_base = OTHER; note = 2'-O-methyladenosine-3'-phosphorothioate
  modified_base 22: mod_base = OTHER; note = 2'-O-methyladenosine-3'-phosphorothioate
  modified_base 23: mod_base = OTHER; note = 2'-O-methylguanosine
tttaacgtagtccttgcaggaag

SEQ ID NO: 2242 - RNA, 23 nt, synthetic construct
  source 1..23: mol_type = other RNA
  modified_base 1: mod_base = OTHER; note = 2'-O-methyluridine-3'-phosphorothioate 5'-(E)-Vinylphosphonate
  modified_base 2: mod_base = OTHER; note = 2'-deoxy-2'-fluorouridine-3'-phosphorothioate
  modified_base 3: mod_base = OTHER; note = 2'-O-methyluridine-3'-phosphate
  modified_base 4: mod_base = OTHER; note = 2'-O-methylguanosine-3'-phosphate
  modified_base 5: mod_base = OTHER; note = 2'-O-methylguanosine-3'-phosphate
  modified_base 6: mod_base = OTHER; note = 2'-deoxy-2'-fluoroadenosine-3'-phosphate
  modified_base 7: mod_base = OTHER; note = 2'-O-methyladenosine-3'-phosphate
  modified_base 8: mod_base = OTHER; note = 2'-deoxy-2'-fluorouridine-3'-phosphate
  modified_base 9: mod_base = OTHER; note = 2'-deoxy-2'-fluorouridine-3'-phosphate
  modified_base 10: mod_base = OTHER; note = 2'-O-methylcytidine-3'-phosphate
  modified_base 11: mod_base = OTHER; note = 2'-O-methyluridine-3'-phosphate
  modified_base 12: mod_base = OTHER; note = 2'-O-methylcytidine-3'-phosphate
  modified_base 13: mod_base = OTHER; note = 2'-O-methyladenosine-3'-phosphate
  modified_base 14: mod_base = OTHER; note = 2'-deoxy-2'-fluoroguanosine-3'-phosphate
  modified_base 15: mod_base = OTHER; note = 2'-O-methyladenosine-3'-phosphate
  modified_base 16: mod_base = OTHER; note = 2'-deoxy-2'-fluoroguanosine-3'-phosphate
  modified_base 17: mod_base = OTHER; note = 2'-O-methylguanosine-3'-phosphate
  modified_base 18: mod_base = OTHER; note = 2'-O-methylguanosine-3'-phosphate
  modified_base 19: mod_base = OTHER; note = 2'-O-methyladenosine-3'-phosphate
  modified_base 20: mod_base = OTHER; note = 2'-O-methyladenosine-3'-phosphate
  modified_base 21: mod_base = OTHER; note = 2'-O-methylcytidine-3'-phosphorothioate
  modified_base 22: mod_base = OTHER; note = 2'-O-methylcytidine-3'-phosphorothioate
  modified_base 23: mod_base = OTHER; note = 2'-O-methyluridine
tttggaattctcagagggaacct

SEQ ID NO: 2243 - RNA, 23 nt, synthetic construct
  source 1..23: mol_type = other RNA
  modified_base 1: mod_base = OTHER; note = 2'-O-methyluridine-3'-phosphorothioate 5'-(E)-Vinylphosphonate
  modified_base 2: mod_base = OTHER; note = 2'-deoxy-2'-fluorouridine-3'-phosphorothioate
  modified_base 3: mod_base = OTHER; note = 2'-O-methylguanosine-3'-phosphate
  modified_base 4: mod_base = OTHER; note = 2'-O-methyladenosine-3'-phosphate
  modified_base 5: mod_base = OTHER; note = 2'-O-methyladenosine-3'-phosphate
  modified_base 6: mod_base = OTHER; note = 2'-deoxy-2'-fluoroguanosine-3'-phosphate
  modified_base 7: mod_base = OTHER; note = 2'-O-methylcytidine-3'-phosphate
  modified_base 8: mod_base = OTHER; note = 2'-deoxy-2'-fluoroadenosine-3'-phosphate
  modified_base 9: mod_base = OTHER; note = 2'-deoxy-2'-fluoroadenosine-3'-phosphate
  modified_base 10: mod_base = OTHER; note = 2'-O-methyladenosine-3'-phosphate
  modified_base 11: mod_base = OTHER; note = 2'-O-methylguanosine-3'-phosphate
  modified_base 12: mod_base = OTHER; note = 2'-O-methylcytidine-3'-phosphate
  modified_base 13: mod_base = OTHER; note = 2'-O-methyladenosine-3'-phosphate
  modified_base 14: mod_base = OTHER; note = 2'-deoxy-2'-fluorouridine-3'-phosphate
  modified_base 15: mod_base = OTHER; note = 2'-O-methylcytidine-3'-phosphate
  modified_base 16: mod_base = OTHER; note = 2'-deoxy-2'-fluoroadenosine-3'-phosphate
  modified_base 17: mod_base = OTHER; note = 2'-O-methylguanosine-3'-phosphate
  modified_base 18: mod_base = OTHER; note = 2'-O-methylcytidine-3'-phosphate
  modified_base 19: mod_base = OTHER; note = 2'-O-methyluridine-3'-phosphate
  modified_base 20: mod_base = OTHER; note = 2'-O-methyluridine-3'-phosphate
  modified_base 21: mod_base = OTHER; note = 2'-O-methylcytidine-3'-phosphorothioate
  modified_base 22: mod_base = OTHER; note = 2'-O-methyluridine-3'-phosphorothioate
  modified_base 23: mod_base = OTHER; note = 2'-O-methylcytidine
ttgaagcaaagcatcagcttctc

SEQ ID NO: 2244 - RNA, 23 nt, synthetic construct
  source 1..23: mol_type = other RNA
  modified_base 1: mod_base = OTHER; note = 2'-O-methyluridine-3'-phosphorothioate 5'-(E)-Vinylphosphonate
  modified_base 2: mod_base = OTHER; note = 2'-deoxy-2'-fluorouridine-3'-phosphorothioate
  modified_base 3: mod_base = OTHER; note = 2'-O-methylguanosine-3'-phosphate
  modified_base 4: mod_base = OTHER; note = 2'-O-methyluridine-3'-phosphate
  modified_base 5: mod_base = OTHER; note = 2'-O-methyluridine-3'-phosphate
  modified_base 6: mod_base = OTHER; note = 2'-deoxy-2'-fluoroadenosine-3'-phosphate
  modified_base 7: mod_base = OTHER; note = 2'-O-methyluridine-3'-phosphate
  modified_base 8: mod_base = OTHER; note = 2'-deoxy-2'-fluoroguanosine-3'-phosphate
  modified_base 9: mod_base = OTHER; note = 2'-deoxy-2'-fluoroguanosine-3'-phosphate
  modified_base 10: mod_base = OTHER; note = 2'-O-methyluridine-3'-phosphate
  modified_base 11: mod_base = OTHER; note = 2'-O-methylcytidine-3'-phosphate
  modified_base 12: mod_base = OTHER; note = 2'-O-methyluridine-3'-phosphate
  modified_base 13: mod_base = OTHER; note = 2'-O-methyluridine-3'-phosphate
  modified_base 14: mod_base = OTHER; note = 2'-deoxy-2'-fluoroadenosine-3'-phosphate
  modified_base 15: mod_base = OTHER; note = 2'-O-methyluridine-3'-phosphate
  modified_base 16: mod_base = OTHER; note = 2'-deoxy-2'-fluoroguanosine-3'-phosphate
  modified_base 17: mod_base = OTHER; note = 2'-O-methyluridine-3'-phosphate
  modified_base 18: mod_base = OTHER; note = 2'-O-methyladenosine-3'-phosphate
  modified_base 19: mod_base = OTHER; note = 2'-O-methyluridine-3'-phosphate
  modified_base 20: mod_base = OTHER; note = 2'-O-methyluridine-3'-phosphate
  modified_base 21: mod_base = OTHER; note = 2'-O-methyluridine-3'-phosphorothioate
  modified_base 22: mod_base = OTHER; note = 2'-O-methyluridine-3'-phosphorothioate
  modified_base 23: mod_base = OTHER; note = 2'-O-methylcytidine
ttgttatggtcttatgtattttc

SEQ ID NO: 2245 - RNA, 23 nt, synthetic construct
  source 1..23: mol_type = other RNA
  modified_base 1: mod_base = OTHER; note = 2'-O-methyluridine-3'-phosphorothioate 5'-(E)-Vinylphosphonate
  modified_base 2: mod_base = OTHER; note = 2'-deoxy-2'-fluorouridine-3'-phosphorothioate
  modified_base 3: mod_base = OTHER; note = 2'-O-methyluridine-3'-phosphate
  modified_base 4: mod_base = OTHER; note = 2'-O-methylguanosine-3'-phosphate
  modified_base 5: mod_base = OTHER; note = 2'-O-methyluridine-3'-phosphate
  modified_base 6: mod_base = OTHER; note = 2'-deoxy-2'-fluorouridine-3'-phosphate
  modified_base 7: mod_base = OTHER; note = 2'-O-methylcytidine-3'-phosphate
  modified_base 8: mod_base = OTHER; note = 2'-deoxy-2'-fluorouridine-3'-phosphate
  modified_base 9: mod_base = OTHER; note = 2'-deoxy-2'-fluoroguanosine-3'-phosphate
  modified_base 10: mod_base = OTHER; note = 2'-O-methylguanosine-3'-phosphate
  modified_base 11: mod_base = OTHER; note = 2'-O-methyluridine-3'-phosphate
  modified_base 12: mod_base = OTHER; note = 2'-O-methylcytidine-3'-phosphate
  modified_base 13: mod_base = OTHER; note = 2'-O-methyladenosine-3'-phosphate
  modified_base 14: mod_base = OTHER; note = 2'-deoxy-2'-fluorouridine-3'-phosphate
  modified_base 15: mod_base = OTHER; note = 2'-O-methylcytidine-3'-phosphate
  modified_base 16: mod_base = OTHER; note = 2'-deoxy-2'-fluorocytidine-3'-phosphate
  modified_base 17: mod_base = OTHER; note = 2'-O-methyladenosine-3'-phosphate
  modified_base 18: mod_base = OTHER; note = 2'-O-methyladenosine-3'-phosphate
  modified_base 19: mod_base = OTHER; note = 2'-O-methyladenosine-3'-phosphate
  modified_base 20: mod_base = OTHER; note = 2'-O-methylguanosine-3'-phosphate
  modified_base 21: mod_base = OTHER; note = 2'-O-methylguanosine-3'-phosphorothioate
  modified_base 22: mod_base = OTHER; note = 2'-O-methylcytidine-3'-phosphorothioate
  modified_base 23: mod_base = OTHER; note = 2'-O-methyluridine
tttgttctggtcatccaaaggct

SEQ ID NO: 2246 - RNA, 23 nt, synthetic construct
  source 1..23: mol_type = other RNA
  modified_base 1: mod_base = OTHER; note = 2'-O-methyluridine-3'-phosphorothioate 5'-(E)-Vinylphosphonate
  modified_base 2: mod_base = OTHER; note = 2'-deoxy-2'-fluoroadenosine-3'-phosphorothioate
  modified_base 3: mod_base = OTHER; note = 2'-O-methylcytidine-3'-phosphate
  modified_base 4: mod_base = OTHER; note = 2'-O-methyluridine-3'-phosphate
  modified_base 5: mod_base = OTHER; note = 2'-O-methyluridine-3'-phosphate
  modified_base 6: mod_base = OTHER; note = 2'-deoxy-2'-fluorouridine-3'-phosphate
  modified_base 7: mod_base = OTHER; note = 2'-O-methyluridine-3'-phosphate
  modified_base 8: mod_base = OTHER; note = 2'-deoxy-2'-fluoroadenosine-3'-phosphate
  modified_base 9: mod_base = OTHER; note = 2'-deoxy-2'-fluorocytidine-3'-phosphate
  modified_base 10: mod_base = OTHER; note = 2'-O-methylcytidine-3'-phosphate
  modified_base 11: mod_base = OTHER; note = 2'-O-methyluridine-3'-phosphate
  modified_base 12: mod_base = OTHER; note = 2'-O-methylcytidine-3'-phosphate
  modified_base 13: mod_base = OTHER; note = 2'-O-methyluridine-3'-phosphate
  modified_base 14: mod_base = OTHER; note = 2'-deoxy-2'-fluoroguanosine-3'-phosphate
  modified_base 15: mod_base = OTHER; note = 2'-O-methylcytidine-3'-phosphate
  modified_base 16: mod_base = OTHER; note = 2'-deoxy-2'-fluoroadenosine-3'-phosphate
  modified_base 17: mod_base = OTHER; note = 2'-O-methyluridine-3'-phosphate
  modified_base 18: mod_base = OTHER; note = 2'-O-methylcytidine-3'-phosphate
  modified_base 19: mod_base = OTHER; note = 2'-O-methyluridine-3'-phosphate
  modified_base 20: mod_base = OTHER; note = 2'-O-methylcytidine-3'-phosphate
  modified_base 21: mod_base = OTHER; note = 2'-O-methylcytidine-3'-phosphorothioate
  modified_base 22: mod_base = OTHER; note = 2'-O-methyladenosine-3'-phosphorothioate
  modified_base 23: mod_base = OTHER; note = 2'-O-methylcytidine
tacttttacctctgcatctccac

SEQ ID NO: 2247 - RNA, 23 nt, synthetic construct
  source 1..23: mol_type = other RNA
  modified_base 1: mod_base = OTHER; note = 2'-O-methyluridine-3'-phosphorothioate 5'-(E)-Vinylphosphonate
  modified_base 2: mod_base = OTHER; note = 2'-deoxy-2'-fluorouridine-3'-phosphorothioate
  modified_base 3: mod_base = OTHER; note = 2'-O-methylcytidine-3'-phosphate
  modified_base 4: mod_base = OTHER; note = 2'-O-methyluridine-3'-phosphate
  modified_base 5: mod_base = OTHER; note = 2'-O-methyluridine-3'-phosphate
  modified_base 6: mod_base = OTHER; note = 2'-deoxy-2'-fluoroguanosine-3'-phosphate
  modified_base 7: mod_base = OTHER; note = 2'-O-methylcytidine-3'-phosphate
  modified_base 8: mod_base = OTHER; note = 2'-deoxy-2'-fluorouridine-3'-phosphate
  modified_base 9: mod_base = OTHER; note = 2'-deoxy-2'-fluorocytidine-3'-phosphate
  modified_base 10: mod_base = OTHER; note = 2'-O-methyladenosine-3'-phosphate
  modified_base 11: mod_base = OTHER; note = 2'-O-methylguanosine-3'-phosphate
  modified_base 12: mod_base = OTHER; note = 2'-O-methyladenosine-3'-phosphate
  modified_base 13: mod_base = OTHER; note = 2'-O-methyluridine-3'-phosphate
  modified_base 14: mod_base = OTHER; note = 2'-deoxy-2'-fluoroguanosine-3'-phosphate
  modified_base 15: mod_base = OTHER; note = 2'-O-methyladenosine-3'-phosphate
  modified_base 16: mod_base = OTHER; note = 2'-deoxy-2'-fluoroadenosine-3'-phosphate
  modified_base 17: mod_base = OTHER; note = 2'-O-methylcytidine-3'-phosphate
  modified_base 18: mod_base = OTHER; note = 2'-O-methylcytidine-3'-phosphate
  modified_base 19: mod_base = OTHER; note = 2'-O-methylcytidine-3'-phosphate
  modified_base 20: mod_base = OTHER; note = 2'-O-methyladenosine-3'-phosphate
  modified_base 21: mod_base = OTHER; note = 2'-O-methyladenosine-3'-phosphorothioate
  modified_base 22: mod_base = OTHER; note = 2'-O-methylcytidine-3'-phosphorothioate
  modified_base 23: mod_base = OTHER; note = 2'-O-methylcytidine
ttcttgctcagatgaacccaacc

SEQ ID NO: 2248 - RNA, 23 nt, synthetic construct
  source 1..23: mol_type = other RNA
  modified_base 1: mod_base = OTHER; note = 2'-O-methyluridine-3'-phosphorothioate 5'-(E)-Vinylphosphonate
  modified_base 2: mod_base = OTHER; note = 2'-deoxy-2'-fluoroguanosine-3'-phosphorothioate
  modified_base 3: mod_base = OTHER; note = 2'-O-methyladenosine-3'-phosphate
  modified_base 4: mod_base = OTHER; note = 2'-O-methylguanosine-3'-phosphate
  modified_base 5: mod_base = OTHER; note = 2'-O-methyladenosine-3'-phosphate
  modified_base 6: mod_base = OTHER; note = 2'-deoxy-2'-fluoroguanosine-3'-phosphate
  modified_base 7: mod_base = OTHER; note = 2'-O-methyladenosine-3'-phosphate
  modified_base 8: mod_base = OTHER; note = 2'-deoxy-2'-fluoroadenosine-3'-phosphate
  modified_base 9: mod_base = OTHER; note = 2'-deoxy-2'-fluorocytidine-3'-phosphate
  modified_base 10: mod_base = OTHER; note = 2'-O-methyluridine-3'-phosphate
  modified_base 11: mod_base = OTHER; note = 2'-O-methyladenosine-3'-phosphate
  modified_base 12: mod_base = OTHER; note = 2'-O-methyladenosine-3'-phosphate
  modified_base 13: mod_base = OTHER; note = 2'-O-methylcytidine-3'-phosphate
  modified_base 14: mod_base = OTHER; note = 2'-deoxy-2'-fluorouridine-3'-phosphate
  modified_base 15: mod_base = OTHER; note = 2'-O-methylguanosine-3'-phosphate
  modified_base 16: mod_base = OTHER; note = 2'-deoxy-2'-fluoroguanosine-3'-phosphate
  modified_base 17: mod_base = OTHER; note = 2'-O-methyladenosine-3'-phosphate
  modified_base 18: mod_base = OTHER; note = 2'-O-methylguanosine-3'-phosphate
  modified_base 19: mod_base = OTHER; note = 2'-O-methyladenosine-3'-phosphate
  modified_base 20: mod_base = OTHER; note = 2'-O-methylguanosine-3'-phosphate
  modified_base 21: mod_base = OTHER; note = 2'-O-methylcytidine-3'-phosphorothioate
  modified_base 22: mod_base = OTHER; note = 2'-O-methylcytidine-3'-phosphorothioate
  modified_base 23: mod_base = OTHER; note = 2'-O-methyladenosine
tgagagaactaactggagagcca

SEQ ID NO: 2249 - RNA, 23 nt, synthetic construct
  source 1..23: mol_type = other RNA
  modified_base 1: mod_base = OTHER; note = 2'-O-methyluridine-3'-phosphorothioate 5'-(E)-Vinylphosphonate
  modified_base 2: mod_base = OTHER; note = 2'-deoxy-2'-fluorouridine-3'-phosphorothioate
  modified_base 3: mod_base = OTHER; note = 2'-O-methylguanosine-3'-phosphate
  modified_base 4: mod_base = OTHER; note = 2'-O-methyluridine-3'-phosphate
  modified_base 5: mod_base = OTHER; note = 2'-O-methyladenosine-3'-phosphate
  modified_base 6: mod_base = OTHER; note = 2'-deoxy-2'-fluoroadenosine-3'-phosphate
  modified_base 7: mod_base = OTHER; note = 2'-O-methylcytidine-3'-phosphate
  modified_base 8: mod_base = OTHER; note = 2'-deoxy-2'-fluorouridine-3'-phosphate
  modified_base 9: mod_base = OTHER; note = 2'-deoxy-2'-fluorocytidine-3'-phosphate
  modified_base 10: mod_base = OTHER; note = 2'-O-methyladenosine-3'-phosphate
  modified_base 11: mod_base = OTHER; note = 2'-O-methylcytidine-3'-phosphate
  modified_base 12: mod_base = OTHER; note = 2'-O-methyluridine-3'-phosphate
  modified_base 13: mod_base = OTHER; note = 2'-O-methylguanosine-3'-phosphate
  modified_base 14: mod_base = OTHER; note = 2'-deoxy-2'-fluorocytidine-3'-phosphate
  modified_base 15: mod_base = OTHER; note = 2'-O-methyluridine-3'-phosphate
  modified_base 16: mod_base = OTHER; note = 2'-deoxy-2'-fluorocytidine-3'-phosphate
  modified_base 17: mod_base = OTHER; note = 2'-O-methyladenosine-3'-phosphate
  modified_base 18: mod_base = OTHER; note = 2'-O-methylcytidine-3'-phosphate
  modified_base 19: mod_base = OTHER; note = 2'-O-methyladenosine-3'-phosphate
  modified_base 20: mod_base = OTHER; note = 2'-O-methylcytidine-3'-phosphate
  modified_base 21: mod_base = OTHER; note = 2'-O-methyluridine-3'-phosphorothioate
  modified_base 22: mod_base = OTHER; note = 2'-O-methyluridine-3'-phosphorothioate
  modified_base 23: mod_base = OTHER; note = 2'-O-methyluridine
ttgtaactcactgctcacacttt

SEQ ID NO: 2250 - RNA, 23 nt, synthetic construct
  source 1..23: mol_type = other RNA
  modified_base 1: mod_base = OTHER; note = 2'-O-methyluridine-3'-phosphorothioate 5'-(E)-Vinylphosphonate
  modified_base 2: mod_base = OTHER; note = 2'-deoxy-2'-fluorouridine-3'-phosphorothioate
  modified_base 3: mod_base = OTHER; note = 2'-O-methylguanosine-3'-phosphate
  modified_base 4: mod_base = OTHER; note = 2'-O-methyladenosine-3'-phosphate
  modified_base 5: mod_base = OTHER; note = 2'-O-methylguanosine-3'-phosphate
  modified_base 6: mod_base = OTHER; note = 2'-deoxy-2'-fluoroadenosine-3'-phosphate
  modified_base 7: mod_base = OTHER; note = 2'-O-methyladenosine-3'-phosphate
  modified_base 8: mod_base = OTHER; note = 2'-deoxy-2'-fluorouridine-3'-phosphate
  modified_base 9: mod_base = OTHER; note = 2'-deoxy-2'-fluoroadenosine-3'-phosphate
  modified_base 10: mod_base = OTHER; note = 2'-O-methylguanosine-3'-phosphate
  modified_base 11: mod_base = OTHER; note = 2'-O-methylguanosine-3'-phosphate
  modified_base 12: mod_base = OTHER; note = 2'-O-methyladenosine-3'-phosphate
  modified_base 13: mod_base = OTHER; note = 2'-O-methyluridine-3'-phosphate
  modified_base 14: mod_base = OTHER; note = 2'-deoxy-2'-fluorocytidine-3'-phosphate
  modified_base 15: mod_base = OTHER; note = 2'-O-methylcytidine-3'-phosphate
  modified_base 16: mod_base = OTHER; note = 2'-deoxy-2'-fluorouridine-3'-phosphate
  modified_base 17: mod_base = OTHER; note = 2'-O-methylguanosine-3'-phosphate
  modified_base 18: mod_base = OTHER; note = 2'-O-methyluridine-3'-phosphate
  modified_base 19: mod_base = OTHER; note = 2'-O-methylguanosine-3'-phosphate
  modified_base 20: mod_base = OTHER; note = 2'-O-methyluridine-3'-phosphate
  modified_base 21: mod_base = OTHER; note = 2'-O-methyladenosine-3'-phosphorothioate
  modified_base 22: mod_base = OTHER; note = 2'-O-methyluridine-3'-phosphorothioate
  modified_base 23: mod_base = OTHER; note = 2'-O-methyladenosine
ttgagaataggatcctgtgtata

SEQ ID NO: 2251 - RNA, 23 nt, synthetic construct
  source 1..23: mol_type = other RNA
  modified_base 1: mod_base = OTHER; note = 2'-O-methyluridine-3'-phosphorothioate 5'-(E)-Vinylphosphonate
  modified_base 2: mod_base = OTHER; note = 2'-deoxy-2'-fluoroadenosine-3'-phosphorothioate
  modified_base 3: mod_base = OTHER; note = 2'-O-methyladenosine-3'-phosphate
  modified_base 4: mod_base = OTHER; note = 2'-O-methyladenosine-3'-phosphate
  modified_base 5: mod_base = OTHER; note = 2'-O-methylguanosine-3'-phosphate
  modified_base 6: mod_base = OTHER; note = 2'-deoxy-2'-fluorocytidine-3'-phosphate
  modified_base 7: mod_base = OTHER; note = 2'-O-methylcytidine-3'-phosphate
  modified_base 8: mod_base = OTHER; note = 2'-deoxy-2'-fluoroadenosine-3'-phosphate
  modified_base 9: mod_base = OTHER; note = 2'-deoxy-2'-fluorocytidine-3'-phosphate
  modified_base 10: mod_base = OTHER; note = 2'-O-methyladenosine-3'-phosphate
  modified_base 11: mod_base = OTHER; note = 2'-O-methyladenosine-3'-phosphate
  modified_base 12: mod_base = OTHER; note = 2'-O-methylguanosine-3'-phosphate
  modified_base 13: mod_base = OTHER; note = 2'-O-methyladenosine-3'-phosphate
  modified_base 14: mod_base = OTHER; note = 2'-deoxy-2'-fluoroadenosine-3'-phosphate
  modified_base 15: mod_base = OTHER; note = 2'-O-methyluridine-3'-phosphate
  modified_base 16: mod_base = OTHER; note = 2'-deoxy-2'-fluorocytidine-3'-phosphate
  modified_base 17: mod_base = OTHER; note = 2'-O-methylcytidine-3'-phosphate
  modified_base 18: mod_base = OTHER; note = 2'-O-methylguanosine-3'-phosphate
  modified_base 19: mod_base = OTHER; note = 2'-O-methylcytidine-3'-phosphate
  modified_base 20: mod_base = OTHER; note = 2'-O-methyladenosine-3'-phosphate
  modified_base 21: mod_base = OTHER; note = 2'-O-methylcytidine-3'-phosphorothioate
  modified_base 22: mod_base = OTHER; note = 2'-O-methyladenosine-3'-phosphorothioate
  modified_base 23: mod_base = OTHER; note = 2'-O-methylguanosine
taaagccacaagaatccgcacag

SEQ ID NO: 2252 - RNA, 23 nt, synthetic construct
  source 1..23: mol_type = other RNA
  modified_base 1: mod_base = OTHER; note = 2'-O-methyluridine-3'-phosphorothioate 5'-(E)-Vinylphosphonate
  modified_base 2: mod_base = OTHER; note = 2'-deoxy-2'-fluorouridine-3'-phosphorothioate
  modified_base 3: mod_base = OTHER; note = 2'-O-methyluridine-3'-phosphate
  modified_base 4: mod_base = OTHER; note = 2'-O-methyladenosine-3'-phosphate
  modified_base 5: mod_base = OTHER; note = 2'-O-methyladenosine-3'-phosphate
  modified_base 6: mod_base = OTHER; note = 2'-deoxy-2'-fluoroguanosine-3'-phosphate
  modified_base 7: mod_base = OTHER; note = 2'-O-methyladenosine-3'-phosphate
  modified_base 8: mod_base = OTHER; note = 2'-deoxy-2'-fluorocytidine-3'-phosphate
  modified_base 9: mod_base = OTHER; note = 2'-deoxy-2'-fluoroadenosine-3'-phosphate
  modified_base 10: mod_base = OTHER; note = 2'-O-methylcytidine-3'-phosphate
  modified_base 11: mod_base = OTHER; note = 2'-O-methylcytidine-3'-phosphate
  modified_base 12: mod_base = OTHER; note = 2'-O-methyluridine-3'-phosphate
  modified_base 13: mod_base = OTHER; note = 2'-O-methylcytidine-3'-phosphate
  modified_base 14: mod_base = OTHER; note = 2'-deoxy-2'-fluoroadenosine-3'-phosphate
  modified_base 15: mod_base = OTHER; note = 2'-O-methylguanosine-3'-phosphate
  modified_base 16: mod_base = OTHER; note = 2'-deoxy-2'-fluorocytidine-3'-phosphate
  modified_base 17: mod_base = OTHER; note = 2'-O-methylcytidine-3'-phosphate
  modified_base 18: mod_base = OTHER; note = 2'-O-methyluridine-3'-phosphate
  modified_base 19: mod_base = OTHER; note = 2'-O-methylguanosine-3'-phosphate
  modified_base 20: mod_base = OTHER; note = 2'-O-methyladenosine-3'-phosphate
  modified_base 21: mod_base = OTHER; note = 2'-O-methyluridine-3'-phosphorothioate
  modified_base 22: mod_base = OTHER; note = 2'-O-methyluridine-3'-phosphorothioate
  modified_base 23: mod_base = OTHER; note = 2'-O-methyladenosine
tttaagacacctcagcctgatta

SEQ ID NO: 2253 - RNA, 23 nt, synthetic construct
  source 1..23: mol_type = other RNA
  modified_base 1: mod_base = OTHER; note = 2'-O-methyluridine-3'-phosphorothioate 5'-(E)-Vinylphosphonate
  modified_base 2: mod_base = OTHER; note = 2'-deoxy-2'-fluorocytidine-3'-phosphorothioate
  modified_base 3: mod_base = OTHER; note = 2'-O-methylcytidine-3'-phosphate
  modified_base 4: mod_base = OTHER; note = 2'-O-methyluridine-3'-phosphate
  modified_base 5: mod_base = OTHER; note = 2'-O-methyluridine-3'-phosphate
  modified_base 6: mod_base = OTHER; note = 2'-deoxy-2'-fluorocytidine-3'-phosphate
  modified_base 7: mod_base = OTHER; note = 2'-O-methyladenosine-3'-phosphate
  modified_base 8: mod_base = OTHER; note = 2'-deoxy-2'-fluoroadenosine-3'-phosphate
  modified_base 9: mod_base = OTHER; note = 2'-deoxy-2'-fluoroadenosine-3'-phosphate
  modified_base 10: mod_base = OTHER; note = 2'-O-methylcytidine-3'-phosphate
  modified_base 11: mod_base = OTHER; note = 2'-O-methyluridine-3'-phosphate
  modified_base 12: mod_base = OTHER; note = 2'-O-methylcytidine-3'-phosphate
  modified_base 13: mod_base = OTHER; note = 2'-O-methyluridine-3'-phosphate
  modified_base 14: mod_base = OTHER; note = 2'-deoxy-2'-fluoroadenosine-3'-phosphate
  modified_base 15: mod_base = OTHER; note = 2'-O-methylcytidine-3'-phosphate
  modified_base 16: mod_base = OTHER; note = 2'-deoxy-2'-fluorocytidine-3'-phosphate
  modified_base 17: mod_base = OTHER; note = 2'-O-methyluridine-3'-phosphate
  modified_base 18: mod_base = OTHER; note = 2'-O-methylcytidine-3'-phosphate
  modified_base 19: mod_base = OTHER; note = 2'-O-methylguanosine-3'-phosphate
  modified_base 20: mod_base = OTHER; note = 2'-O-methyladenosine-3'-phosphate
  modified_base 21: mod_base = OTHER; note = 2'-O-methyladenosine-3'-phosphorothioate
  modified_base 22: mod_base = OTHER; note = 2'-O-methyladenosine-3'-phosphorothioate
  modified_base 23: mod_base = OTHER; note = 2'-O-methylcytidine
tccttcaaactctacctcgaaac

SEQ ID NO: 2254 - RNA, 23 nt, synthetic construct
  source 1..23: mol_type = other RNA
  modified_base 1: mod_base = OTHER; note = 2'-O-methyluridine-3'-phosphorothioate 5'-(E)-Vinylphosphonate
  modified_base 2: mod_base = OTHER; note = 2'-deoxy-2'-fluorocytidine-3'-phosphorothioate
  modified_base 3: mod_base = OTHER; note = 2'-O-methyladenosine-3'-phosphate
  modified_base 4: mod_base = OTHER; note = 2'-O-methyluridine-3'-phosphate
  modified_base 5: mod_base = OTHER; note = 2'-O-methylcytidine-3'-phosphate
  modified_base 6: mod_base = OTHER; note = 2'-deoxy-2'-fluorouridine-3'-phosphate
  modified_base 7: mod_base = OTHER; note = 2'-O-methyluridine-3'-phosphate
  modified_base 8: mod_base = OTHER; note = 2'-deoxy-2'-fluoroguanosine-3'-phosphate
  modified_base 9: mod_base = OTHER; note = 2'-deoxy-2'-fluoroguanosine-3'-phosphate
  modified_base 10: mod_base = OTHER; note = 2'-O-methyladenosine-3'-phosphate
  modified_base 11: mod_base = OTHER; note = 2'-O-methyluridine-3'-phosphate
  modified_base 12: mod_base = OTHER; note = 2'-O-methyladenosine-3'-phosphate
  modified_base 13: mod_base = OTHER; note = 2'-O-methyladenosine-3'-phosphate
  modified_base 14: mod_base = OTHER; note = 2'-deoxy-2'-fluoroguanosine-3'-phosphate
  modified_base 15: mod_base = OTHER; note = 2'-O-methylguanosine-3'-phosphate
  modified_base 16: mod_base = OTHER; note = 2'-deoxy-2'-fluorouridine-3'-phosphate
  modified_base 17: mod_base = OTHER; note = 2'-O-methylcytidine-3'-phosphate
  modified_base 18: mod_base = OTHER; note = 2'-O-methyladenosine-3'-phosphate
  modified_base 19: mod_base = OTHER; note = 2'-O-methylguanosine-3'-phosphate
  modified_base 20: mod_base = OTHER; note = 2'-O-methylguanosine-3'-phosphate
  modified_base 21: mod_base = OTHER; note = 2'-O-methyladenosine-3'-phosphorothioate
  modified_base 22: mod_base = OTHER; note = 2'-O-methyluridine-3'-phosphorothioate
  modified_base 23: mod_base = OTHER; note = 2'-O-methylguanosine
tcatcttggataaggtcaggatg

SEQ ID NO: 2255 - RNA, 23 nt, synthetic construct
  source 1..23: mol_type = other RNA
  modified_base 1: mod_base = OTHER; note = 2'-O-methyluridine-3'-phosphorothioate 5'-(E)-Vinylphosphonate
  modified_base 2: mod_base = OTHER; note = 2'-deoxy-2'-fluoroadenosine-3'-phosphorothioate
  modified_base 3: mod_base = OTHER; note = 2'-O-methylguanosine-3'-phosphate
  modified_base 4: mod_base = OTHER; note = 2'-O-methylguanosine-3'-phosphate
  modified_base 5: mod_base = OTHER; note = 2'-O-methyladenosine-3'-phosphate
  modified_base 6: mod_base = OTHER; note = 2'-deoxy-2'-fluoroadenosine-3'-phosphate
  modified_base 7: mod_base = OTHER; note = 2'-O-methylguanosine-3'-phosphate
  modified_base 8: mod_base = OTHER; note = 2'-deoxy-2'-fluoroadenosine-3'-phosphate
  modified_base 9: mod_base = OTHER; note = 2'-deoxy-2'-fluoroguanosine-3'-phosphate
  modified_base 10: mod_base = OTHER; note = 2'-O-methyluridine-3'-phosphate
  modified_base 11: mod_base = OTHER; note = 2'-O-methylguanosine-3'-phosphate
  modified_base 12: mod_base = OTHER; note = 2'-O-methyladenosine-3'-phosphate
  modified_base 13: mod_base = OTHER; note = 2'-O-methylcytidine-3'-phosphate
  modified_base 14: mod_base = OTHER; note = 2'-deoxy-2'-fluorocytidine-3'-phosphate
  modified_base 15: mod_base = OTHER; note = 2'-O-methyluridine-3'-phosphate
  modified_base 16: mod_base = OTHER; note = 2'-deoxy-2'-fluorouridine-3'-phosphate
  modified_base 17: mod_base = OTHER; note = 2'-O-methylcytidine-3'-phosphate
  modified_base 18: mod_base = OTHER; note = 2'-O-methyladenosine-3'-phosphate
  modified_base 19: mod_base = OTHER; note = 2'-O-methyladenosine-3'-phosphate
  modified_base 20: mod_base = OTHER; note = 2'-O-methylguanosine-3'-phosphate
  modified_base 21: mod_base = OTHER; note = 2'-O-methylguanosine-3'-phosphorothioate
  modified_base 22: mod_base = OTHER; note = 2'-O-methylcytidine-3'-phosphorothioate
  modified_base 23: mod_base = OTHER; note = 2'-O-methylcytidine
taggaagagtgaccttcaaggcc

SEQ ID NO: 2256 - RNA, 23 nt, synthetic construct
  source 1..23: mol_type = other RNA
  modified_base 1: mod_base = OTHER; note = 2'-O-methyluridine-3'-phosphorothioate 5'-(E)-Vinylphosphonate
  modified_base 2: mod_base = OTHER; note = 2'-deoxy-2'-fluorouridine-3'-phosphorothioate
  modified_base 3: mod_base = OTHER; note = 2'-O-methyladenosine-3'-phosphate
  modified_base 4: mod_base = OTHER; note = 2'-O-methylguanosine-3'-phosphate
  modified_base 5: mod_base = OTHER; note = 2'-O-methylcytidine-3'-phosphate
  modified_base 6: mod_base = OTHER; note = 2'-deoxy-2'-fluoroadenosine-3'-phosphate
  modified_base 7: mod_base = OTHER; note = 2'-O-methylguanosine-3'-phosphate
  modified_base 8: mod_base = OTHER; note = 2'-deoxy-2'-fluorouridine-3'-phosphate
  modified_base 9: mod_base = OTHER; note = 2'-deoxy-2'-fluorocytidine-3'-phosphate
  modified_base 10: mod_base = OTHER; note = 2'-O-methylguanosine-3'-phosphate
  modified_base 11: mod_base = OTHER; note = 2'-O-methylguanosine-3'-phosphate
  modified_base 12: mod_base = OTHER; note = 2'-O-methyladenosine-3'-phosphate
  modified_base 13: mod_base = OTHER; note = 2'-O-methylguanosine-3'-phosphate
  modified_base 14: mod_base = OTHER; note = 2'-deoxy-2'-fluoroadenosine-3'-phosphate
  modified_base 15: mod_base = OTHER; note = 2'-O-methyladenosine-3'-phosphate
  modified_base 16: mod_base = OTHER; note = 2'-deoxy-2'-fluoroadenosine-3'-phosphate
  modified_base 17: mod_base = OTHER; note = 2'-O-methylguanosine-3'-phosphate
  modified_base 18: mod_base = OTHER; note = 2'-O-methylcytidine-3'-phosphate
  modified_base 19: mod_base = OTHER; note = 2'-O-methylcytidine-3'-phosphate
  modified_base 20: mod_base = OTHER; note = 2'-O-methyladenosine-3'-phosphate
  modified_base 21: mod_base = OTHER; note = 2'-O-methylguanosine-3'-phosphorothioate
  modified_base 22: mod_base = OTHER; note = 2'-O-methyladenosine-3'-phosphorothioate
  modified_base 23: mod_base = OTHER; note = 2'-O-methylguanosine
ttagcagtcggagaaagccagag

SEQ ID NO: 2257 - RNA, 23 nt, synthetic construct
  source 1..23: mol_type = other RNA
  modified_base 1: mod_base = OTHER; note = 2'-O-methyluridine-3'-phosphorothioate 5'-(E)-Vinylphosphonate
  modified_base 2: mod_base = OTHER; note = 2'-deoxy-2'-fluorouridine-3'-phosphorothioate
  modified_base 3: mod_base = OTHER; note = 2'-O-methyluridine-3'-phosphate
  modified_base 4: mod_base = OTHER; note = 2'-O-methyluridine-3'-phosphate
  modified_base 5: mod_base = OTHER; note = 2'-O-methylguanosine-3'-phosphate
  modified_base 6: mod_base = OTHER; note = 2'-deoxy-2'-fluoroadenosine-3'-phosphate
  modified_base 7: mod_base = OTHER; note = 2'-O-methylcytidine-3'-phosphate
  modified_base 8: mod_base = OTHER; note = 2'-deoxy-2'-fluorocytidine-3'-phosphate
  modified_base 9: mod_base = OTHER; note = 2'-deoxy-2'-fluoroadenosine-3'-phosphate
  modified_base 10: mod_base = OTHER; note = 2'-O-methylcytidine-3'-phosphate
  modified_base 11: mod_base = OTHER; note = 2'-O-methyluridine-3'-phosphate
  modified_base 12: mod_base = OTHER; note = 2'-O-methylguanosine-3'-phosphate
  modified_base 13: mod_base = OTHER; note = 2'-O-methylguanosine-3'-phosphate
  modified_base 14: mod_base = OTHER; note = 2'-deoxy-2'-fluoroguanosine-3'-phosphate
  modified_base 15: mod_base = OTHER; note = 2'-O-methyladenosine-3'-phosphate
  modified_base 16: mod_base = OTHER; note = 2'-deoxy-2'-fluoroadenosine-3'-phosphate
  modified_base 17: mod_base = OTHER; note = 2'-O-methyluridine-3'-phosphate
  modified_base 18: mod_base = OTHER; note = 2'-O-methylguanosine-3'-phosphate
  modified_base 19: mod_base = OTHER; note = 2'-O-methylcytidine-3'-phosphate
  modified_base 20: mod_base = OTHER; note = 2'-O-methyladenosine-3'-phosphate
  modified_base 21: mod_base = OTHER; note = 2'-O-methyladenosine-3'-phosphorothioate
  modified_base 22: mod_base = OTHER; note = 2'-O-methylguanosine-3'-phosphorothioate
  modified_base 23: mod_base = OTHER; note = 2'-O-methyladenosine
ttttgaccactgggaatgcaaga

SEQ ID NO: 2258 - RNA, 23 nt, synthetic construct
  source 1..23: mol_type = other RNA
  modified_base 1: mod_base = OTHER; note = 2'-O-methyluridine-3'-phosphorothioate 5'-(E)-Vinylphosphonate
  modified_base 2: mod_base = OTHER; note = 2'-deoxy-2'-fluorouridine-3'-phosphorothioate
  modified_base 3: mod_base = OTHER; note = 2'-O-methylguanosine-3'-phosphate
  modified_base 4: mod_base = OTHER; note = 2'-O-methylcytidine-3'-phosphate
  modified_base 5: mod_base = OTHER; note = 2'-O-methyladenosine-3'-phosphate
  modified_base 6: mod_base = OTHER; note = 2'-deoxy-2'-fluorouridine-3'-phosphate
  modified_base 7: mod_base = OTHER; note = 2'-O-methyluridine-3'-phosphate
  modified_base 8: mod_base = OTHER; note = 2'-deoxy-2'-fluorouridine-3'-phosphate
  modified_base 9: mod_base = OTHER; note = 2'-deoxy-2'-fluoroguanosine-3'-phosphate
  modified_base 10: mod_base = OTHER; note = 2'-O-methylguanosine-3'-phosphate
  modified_base 11: mod_base = OTHER; note = 2'-O-methylcytidine-3'-phosphate
  modified_base 12: mod_base = OTHER; note = 2'-O-methyluridine-3'-phosphate
  modified_base 13: mod_base = OTHER; note = 2'-O-methylguanosine-3'-phosphate
  modified_base 14: mod_base = OTHER; note = 2'-deoxy-2'-fluorouridine-3'-phosphate
  modified_base 15: mod_base = OTHER; note = 2'-O-methyluridine-3'-phosphate
  modified_base 16: mod_base = OTHER; note = 2'-deoxy-2'-fluorocytidine-3'-phosphate
  modified_base 17: mod_base = OTHER; note = 2'-O-methyladenosine-3'-phosphate
  modified_base 18: mod_base = OTHER; note = 2'-O-methylguanosine-3'-phosphate
  modified_base 19: mod_base = OTHER; note = 2'-O-methylcytidine-3'-phosphate
  modified_base 20: mod_base = OTHER; note = 2'-O-methyluridine-3'-phosphate
  modified_base 21: mod_base = OTHER; note = 2'-O-methylguanosine-3'-phosphorothioate
  modified_base 22: mod_base = OTHER; note = 2'-O-methylcytidine-3'-phosphorothioate
  modified_base 23: mod_base = OTHER; note = 2'-O-methyluridine
ttgcatttggctgttcagctgct

SEQ ID NO: 2259 - RNA, 23 nt, synthetic construct
  source 1..23: mol_type = other RNA
  modified_base 1: mod_base = OTHER; note = 2'-O-methyluridine-3'-phosphorothioate 5'-(E)-Vinylphosphonate
  modified_base 2: mod_base = OTHER; note = 2'-deoxy-2'-fluorouridine-3'-phosphorothioate
  modified_base 3: mod_base = OTHER; note = 2'-O-methylcytidine-3'-phosphate
  modified_base 4: mod_base = OTHER; note = 2'-O-methyladenosine-3'-phosphate
  modified_base 5: mod_base = OTHER; note = 2'-O-methylcytidine-3'-phosphate
  modified_base 6: mod_base = OTHER; note = 2'-deoxy-2'-fluoroguanosine-3'-phosphate
  modified_base 7: mod_base = OTHER; note = 2'-O-methyluridine-3'-phosphate
  modified_base 8: mod_base = OTHER; note = 2'-deoxy-2'-fluoroadenosine-3'-phosphate
  modified_base 9: mod_base = OTHER; note = 2'-deoxy-2'-fluoroadenosine-3'-phosphate
  modified_base 10: mod_base = OTHER; note = 2'-O-methyluridine-3'-phosphate
  modified_base 11: mod_base = OTHER; note = 2'-O-methylguanosine-3'-phosphate
  modified_base 12: mod_base = OTHER; note = 2'-O-methylcytidine-3'-phosphate
  modified_base 13: mod_base = OTHER; note = 2'-O-methyluridine-3'-phosphate
  modified_base 14: mod_base = OTHER; note = 2'-deoxy-2'-fluorocytidine-3'-phosphate
  modified_base 15: mod_base = OTHER; note = 2'-O-methyluridine-3'-phosphate
  modified_base 16: mod_base = OTHER; note = 2'-deoxy-2'-fluoroguanosine-3'-phosphate
  modified_base 17: mod_base = OTHER; note = 2'-O-methylguanosine-3'-phosphate
  modified_base 18: mod_base = OTHER; note = 2'-O-methylguanosine-3'-phosphate
  modified_base 19: mod_base = OTHER; note = 2'-O-methyluridine-3'-phosphate
  modified_base 20: mod_base = OTHER; note = 2'-O-methyladenosine-3'-phosphate
  modified_base 21: mod_base = OTHER; note = 2'-O-methyluridine-3'-phosphorothioate
  modified_base 22: mod_base = OTHER; note = 2'-O-methylcytidine-3'-phosphorothioate
  modified_base 23: mod_base = OTHER; note = 2'-O-methyladenosine
ttcacgtaatgctctgggtatca

SEQ ID NO: 2260 - RNA, 23 nt, synthetic construct
  source 1..23: mol_type = other RNA
  modified_base 1: mod_base = OTHER; note = 2'-O-methyluridine-3'-phosphorothioate 5'-(E)-Vinylphosphonate
  modified_base 2: mod_base = OTHER; note = 2'-deoxy-2'-fluoroadenosine-3'-phosphorothioate
  modified_base 3: mod_base = OTHER; note = 2'-O-methyluridine-3'-phosphate
  modified_base 4: mod_base = OTHER; note = 2'-O-methylcytidine-3'-phosphate
  modified_base 5: mod_base = OTHER; note = 2'-O-methyluridine-3'-phosphate
  modified_base 6: mod_base = OTHER; note = 2'-deoxy-2'-fluoroguanosine-3'-phosphate
  modified_base 7: mod_base = OTHER; note = 2'-O-methyluridine-3'-phosphate
  modified_base 8: mod_base = OTHER; note = 2'-deoxy-2'-fluorouridine-3'-phosphate
  modified_base 9: mod_base = OTHER; note = 2'-deoxy-2'-fluoroguanosine-3'-phosphate
  modified_base 10: mod_base = OTHER; note = 2'-O-methylguanosine-3'-phosphate
  modified_base 11: mod_base = OTHER; note = 2'-O-methyluridine-3'-phosphate
  modified_base 12: mod_base = OTHER; note = 2'-O-methyladenosine-3'-phosphate
  modified_base 13: mod_base = OTHER; note = 2'-O-methylguanosine-3'-phosphate
  modified_base 14: mod_base = OTHER; note = 2'-deoxy-2'-fluoroadenosine-3'-phosphate
  modified_base 15: mod_base = OTHER; note = 2'-O-methylcytidine-3'-phosphate
  modified_base 16: mod_base = OTHER; note = 2'-deoxy-2'-fluorouridine-3'-phosphate
  modified_base 17: mod_base = OTHER; note = 2'-O-methylguanosine-3'-phosphate
  modified_base 18: mod_base = OTHER; note = 2'-O-methylcytidine-3'-phosphate
  modified_base 19: mod_base = OTHER; note = 2'-O-methylcytidine-3'-phosphate
  modified_base 20: mod_base = OTHER; note = 2'-O-methyladenosine-3'-phosphate
  modified_base 21: mod_base = OTHER; note = 2'-O-methylguanosine-3'-phosphorothioate
  modified_base 22: mod_base = OTHER; note = 2'-O-methyluridine-3'-phosphorothioate
  modified_base 23: mod_base = OTHER; note = 2'-O-methylguanosine
tatctgttggtagactgccagtg

SEQ ID NO: 2261 - RNA, 23 nt, synthetic construct
  source 1..23: mol_type = other RNA
  modified_base 1: mod_base = OTHER; note = 2'-O-methyluridine-3'-phosphorothioate 5'-(E)-Vinylphosphonate
  modified_base 2: mod_base = OTHER; note = 2'-deoxy-2'-fluoroadenosine-3'-phosphorothioate
  modified_base 3: mod_base = OTHER; note = 2'-O-methylcytidine-3'-phosphate
  modified_base 4: mod_base = OTHER; note = 2'-O-methyladenosine-3'-phosphate
  modified_base 5: mod_base = OTHER; note = 2'-O-methyluridine-3'-phosphate
  modified_base 6: mod_base = OTHER; note = 2'-deoxy-2'-fluorouridine-3'-phosphate
  modified_base 7: mod_base = OTHER; note = 2'-O-methyluridine-3'-phosphate
  modified_base 8: mod_base = OTHER; note = 2'-deoxy-2'-fluorouridine-3'-phosphate
  modified_base 9: mod_base = OTHER; note = 2'-deoxy-2'-fluorocytidine-3'-phosphate
  modified_base 10: mod_base = OTHER; note = 2'-O-methylcytidine-3'-phosphate
  modified_base 11: mod_base = OTHER; note = 2'-O-methyladenosine-3'-phosphate
  modified_base 12: mod_base = OTHER; note = 2'-O-methylguanosine-3'-phosphate
  modified_base 13: mod_base = OTHER; note = 2'-O-methyladenosine-3'-phosphate
  modified_base 14: mod_base = OTHER; note = 2'-deoxy-2'-fluoroguanosine-3'-phosphate
  modified_base 15: mod_base = OTHER; note = 2'-O-methylcytidine-3'-phosphate
  modified_base 16: mod_base = OTHER; note = 2'-deoxy-2'-fluoroadenosine-3'-phosphate
  modified_base 17: mod_base = OTHER; note = 2'-O-methylguanosine-3'-phosphate
  modified_base 18: mod_base = OTHER; note = 2'-O-methylcytidine-3'-phosphate
  modified_base 19: mod_base = OTHER; note = 2'-O-methyluridine-3'-phosphate
  modified_base 20: mod_base = OTHER; note = 2'-O-methylcytidine-3'-phosphate
  modified_base 21: mod_base = OTHER; note = 2'-O-methyluridine-3'-phosphorothioate
  modified_base 22: mod_base = OTHER; note = 2'-O-methylcytidine-3'-phosphorothioate
  modified_base 23: mod_base = OTHER; note = 2'-O-methyladenosine
tacattttccagagcagctctca

SEQ ID NO: 2262 - RNA, 23 nt, synthetic construct
  source 1..23: mol_type = other RNA
  modified_base 1: mod_base = OTHER; note = 2'-O-methyluridine-3'-phosphorothioate 5'-(E)-Vinylphosphonate
  modified_base 2: mod_base = OTHER; note = 2'-deoxy-2'-fluorouridine-3'-phosphorothioate
  modified_base 3: mod_base = OTHER; note = 2'-O-methylguanosine-3'-phosphate
  modified_base 4: mod_base = OTHER; note = 2'-O-methyladenosine-3'-phosphate
  modified_base 5: mod_base = OTHER; note = 2'-O-methylguanosine-3'-phosphate
  modified_base 6: mod_base = OTHER; note = 2'-deoxy-2'-fluorocytidine-3'-phosphate
  modified_base 7: mod_base = OTHER; note = 2'-O-methyladenosine-3'-phosphate
  modified_base 8: mod_base = OTHER; note = 2'-deoxy-2'-fluorouridine-3'-phosphate
  modified_base 9: mod_base = OTHER; note = 2'-deoxy-2'-fluoroguanosine-3'-phosphate
  modified_base 10: mod_base = OTHER; note = 2'-O-methyladenosine-3'-phosphate
  modified_base 11: mod_base = OTHER; note = 2'-O-methyladenosine-3'-phosphate
  modified_base 12: mod_base = OTHER; note = 2'-O-methylguanosine-3'-phosphate
  modified_base 13: mod_base = OTHER; note = 2'-O-methylcytidine-3'-phosphate
  modified_base 14: mod_base = OTHER; note = 2'-deoxy-2'-fluoroadenosine-3'-phosphate
  modified_base 15: mod_base = OTHER; note = 2'-O-methylguanosine-3'-phosphate
  modified_base 16: mod_base = OTHER; note = 2'-deoxy-2'-fluoroguanosine-3'-phosphate
  modified_base 17: mod_base = OTHER; note = 2'-O-methyluridine-3'-phosphate
  modified_base 18: mod_base = OTHER; note = 2'-O-methylguanosine-3'-phosphate
  modified_base 19: mod_base = OTHER; note = 2'-O-methylcytidine-3'-phosphate
  modified_base 20: mod_base = OTHER; note = 2'-O-methyluridine-3'-phosphate
  modified_base 21: mod_base = OTHER; note = 2'-O-methylcytidine-3'-phosphorothioate
  modified_base 22: mod_base = OTHER; note = 2'-O-methyladenosine-3'-phosphorothioate
  modified_base 23: mod_base = OTHER; note = 2'-O-methylguanosine
ttgagcatgaagcaggtgctcag

SEQ ID NO: 2263 - RNA, 23 nt, synthetic construct
  source 1..23: mol_type = other RNA
  modified_base 1: mod_base = OTHER; note = 2'-O-methyluridine-3'-phosphorothioate 5'-(E)-Vinylphosphonate
  modified_base 2: mod_base = OTHER; note = 2'-deoxy-2'-fluoroadenosine-3'-phosphorothioate
  modified_base 3: mod_base = OTHER; note = 2'-O-methylguanosine-3'-phosphate
  modified_base 4: mod_base = OTHER; note = 2'-O-methylcytidine-3'-phosphate
  modified_base 5: mod_base = OTHER; note = 2'-O-methyluridine-3'-phosphate
  modified_base 6: mod_base = OTHER; note = 2'-deoxy-2'-fluorocytidine-3'-phosphate
  modified_base 7: mod_base = OTHER; note = 2'-O-methyladenosine-3'-phosphate
  modified_base 8: mod_base = OTHER; note = 2'-deoxy-2'-fluorouridine-3'-phosphate
  modified_base 9: mod_base = OTHER; note = 2'-deoxy-2'-fluoroadenosine-3'-phosphate
  modified_base 10: mod_base = OTHER; note = 2'-O-methylcytidine-3'-phosphate
  modified_base 11: mod_base = OTHER; note = 2'-O-methylcytidine-3'-phosphate
  modified_base 12: mod_base = OTHER; note = 2'-O-methyladenosine-3'-phosphate
  modified_base 13: mod_base = OTHER; note = 2'-O-methyluridine-3'-phosphate
  modified_base 14: mod_base = OTHER; note = 2'-deoxy-2'-fluorouridine-3'-phosphate
  modified_base 15: mod_base = OTHER; note = 2'-O-methyluridine-3'-phosphate
  modified_base 16: mod_base = OTHER; note = 2'-deoxy-2'-fluorocytidine-3'-phosphate
  modified_base 17: mod_base = OTHER; note = 2'-O-methylcytidine-3'-phosphate
  modified_base 18: mod_base = OTHER; note = 2'-O-methylcytidine-3'-phosphate
  modified_base 19: mod_base = OTHER; note = 2'-O-methyladenosine-3'-phosphate
  modified_base 20: mod_base = OTHER; note = 2'-O-methylcytidine-3'-phosphate
  modified_base 21: mod_base = OTHER; note = 2'-O-methylcytidine-3'-phosphorothioate
  modified_base 22: mod_base = OTHER; note = 2'-O-methyluridine-3'-phosphorothioate
  modified_base 23: mod_base = OTHER; note = 2'-O-methylguanosine
tagctcataccatttcccacctg

SEQ ID NO: 2264 - RNA, 23 nt, synthetic construct
  source 1..23: mol_type = other RNA
  modified_base 1: mod_base = OTHER; note = 2'-O-methyluridine-3'-phosphorothioate 5'-(E)-Vinylphosphonate
  modified_base 2: mod_base = OTHER; note = 2'-deoxy-2'-fluorouridine-3'-phosphorothioate
  modified_base 3: mod_base = OTHER; note = 2'-O-methyluridine-3'-phosphate
  modified_base 4: mod_base = OTHER; note = 2'-O-methylcytidine-3'-phosphate
  modified_base 5: mod_base = OTHER; note = 2'-O-methylcytidine-3'-phosphate
  modified_base 6: mod_base = OTHER; note = 2'-deoxy-2'-fluoroadenosine-3'-phosphate
  modified_base 7: mod_base = OTHER; note = 2'-O-methyladenosine-3'-phosphate
  modified_base 8: mod_base = OTHER; note = 2'-deoxy-2'-fluoroadenosine-3'-phosphate
  modified_base 9: mod_base = OTHER; note = 2'-deoxy-2'-fluoroguanosine-3'-phosphate
  modified_base 10: mod_base = OTHER; note = 2'-O-methyladenosine-3'-phosphate
  modified_base 11: mod_base = OTHER; note = 2'-O-methyladenosine-3'-phosphate
  modified_base 12: mod_base = OTHER; note = 2'-O-methylcytidine-3'-phosphate
  modified_base 13: mod_base = OTHER; note = 2'-O-methylcytidine-3'-phosphate
  modified_base 14: mod_base = OTHER; note = 2'-deoxy-2'-fluorocytidine-3'-phosphate
  modified_base 15: mod_base = OTHER; note = 2'-O-methyladenosine-3'-phosphate
  modified_base 16: mod_base = OTHER; note = 2'-deoxy-2'-fluorocytidine-3'-phosphate
  modified_base 17: mod_base = OTHER; note = 2'-O-methylcytidine-3'-phosphate
  modified_base 18: mod_base = OTHER; note = 2'-O-methyladenosine-3'-phosphate
  modified_base 19: mod_base = OTHER; note = 2'-O-methylcytidine-3'-phosphate
  modified_base 20: mod_base = OTHER; note = 2'-O-methyladenosine-3'-phosphate
  modified_base 21: mod_base = OTHER; note = 2'-O-methylcytidine-3'-phosphorothioate
  modified_base 22: mod_base = OTHER; note = 2'-O-methyladenosine-3'-phosphorothioate
  modified_base 23: mod_base = OTHER; note = 2'-O-methyladenosine
tttccaaagaacccaccacacaa

SEQ ID NO: 2265 - RNA, 23 nt, synthetic construct
  source 1..23: mol_type = other RNA
  modified_base 1: mod_base = OTHER; note = 2'-O-methyluridine-3'-phosphorothioate 5'-(E)-Vinylphosphonate
  modified_base 2: mod_base = OTHER; note = 2'-deoxy-2'-fluorouridine-3'-phosphorothioate
  modified_base 3: mod_base = OTHER; note = 2'-O-methylguanosine-3'-phosphate
  modified_base 4: mod_base = OTHER; note = 2'-O-methyladenosine-3'-phosphate
  modified_base 5: mod_base = OTHER; note = 2'-O-methylguanosine-3'-phosphate
  modified_base 6: mod_base = OTHER; note = 2'-deoxy-2'-fluorocytidine-3'-phosphate
  modified_base 7: mod_base = OTHER; note = 2'-O-methylcytidine-3'-phosphate
  modified_base 8: mod_base = OTHER; note = 2'-deoxy-2'-fluoroadenosine-3'-phosphate
  modified_base 9: mod_base = OTHER; note = 2'-deoxy-2'-fluoroadenosine-3'-phosphate
  modified_base 10: mod_base = OTHER; note = 2'-O-methyluridine-3'-phosphate
  modified_base 11: mod_base = OTHER; note = 2'-O-methylcytidine-3'-phosphate
  modified_base 12: mod_base = OTHER; note = 2'-O-methyladenosine-3'-phosphate
  modified_base 13: mod_base = OTHER; note = 2'-O-methylguanosine-3'-phosphate
  modified_base 14: mod_base = OTHER; note = 2'-deoxy-2'-fluoroadenosine-3'-phosphate
  modified_base 15: mod_base = OTHER; note = 2'-O-methylcytidine-3'-phosphate
  modified_base 16: mod_base = OTHER; note = 2'-deoxy-2'-fluoroadenosine-3'-phosphate
  modified_base 17: mod_base = OTHER; note = 2'-O-methyladenosine-3'-phosphate
  modified_base 18: mod_base = OTHER; note = 2'-O-methylguanosine-3'-phosphate
  modified_base 19: mod_base = OTHER; note = 2'-O-methyladenosine-3'-phosphate
  modified_base 20: mod_base = OTHER; note = 2'-O-methyladenosine-3'-phosphate
  modified_base 21: mod_base = OTHER; note = 2'-O-methylcytidine-3'-phosphorothioate
  modified_base 22: mod_base = OTHER; note = 2'-O-methyluridine-3'-phosphorothioate
  modified_base 23: mod_base = OTHER; note = 2'-O-methyladenosine
ttgagccaatcagacaagaacta

SEQ ID NO: 2266 - RNA, 23 nt, synthetic construct
  source 1..23: mol_type = other RNA
  modified_base 1: mod_base = OTHER; note = 2'-O-methyluridine-3'-phosphorothioate 5'-(E)-Vinylphosphonate
  modified_base 2: mod_base = OTHER; note = 2'-deoxy-2'-fluorocytidine-3'-phosphorothioate
  modified_base 3: mod_base = OTHER; note = 2'-O-methyladenosine-3'-phosphate
  modified_base 4: mod_base = OTHER; note = 2'-O-methyluridine-3'-phosphate
  modified_base 5: mod_base = OTHER; note = 2'-O-methylcytidine-3'-phosphate
  modified_base 6: mod_base = OTHER; note = 2'-deoxy-2'-fluorouridine-3'-phosphate
  modified_base 7: mod_base = OTHER; note = 2'-O-methyladenosine-3'-phosphate
  modified_base 8: mod_base = OTHER; note = 2'-deoxy-2'-fluoroguanosine-3'-phosphate
  modified_base 9: mod_base = OTHER; note = 2'-deoxy-2'-fluorouridine-3'-phosphate
  modified_base 10: mod_base = OTHER; note = 2'-O-methylguanosine-3'-phosphate
  modified_base 11: mod_base = OTHER; note = 2'-O-methyladenosine-3'-phosphate
  modified_base 12: mod_base = OTHER; note = 2'-O-methylcytidine-3'-phosphate
  modified_base 13: mod_base = OTHER; note = 2'-O-methylcytidine-3'-phosphate
  modified_base 14: mod_base = OTHER; note = 2'-deoxy-2'-fluorouridine-3'-phosphate
  modified_base 15: mod_base = OTHER; note = 2'-O-methyluridine-3'-phosphate
  modified_base 16: mod_base = OTHER; note = 2'-deoxy-2'-fluoroguanosine-3'-phosphate
  modified_base 17: mod_base = OTHER; note = 2'-O-methyluridine-3'-phosphate
  modified_base 18: mod_base = OTHER; note = 2'-O-methylguanosine-3'-phosphate
  modified_base 19: mod_base = OTHER; note = 2'-O-methyladenosine-3'-phosphate
  modified_base 20: mod_base = OTHER; note = 2'-O-methyluridine-3'-phosphate
  modified_base 21: mod_base = OTHER; note = 2'-O-methylcytidine-3'-phosphorothioate
  modified_base 22: mod_base = OTHER; note = 2'-O-methylcytidine-3'-phosphorothioate
  modified_base 23: mod_base = OTHER; note = 2'-O-methylcytidine
tcatctagtgaccttgtgatccc

SEQ ID NO: 2267 - RNA, 23 nt, synthetic construct
  source 1..23: mol_type = other RNA
  modified_base 1: mod_base = OTHER; note = 2'-O-methyluridine-3'-phosphorothioate 5'-(E)-Vinylphosphonate
  modified_base 2: mod_base = OTHER; note = 2'-deoxy-2'-fluoroadenosine-3'-phosphorothioate
  modified_base 3: mod_base = OTHER; note = 2'-O-methylcytidine-3'-phosphate
  modified_base 4: mod_base = OTHER; note = 2'-O-methylguanosine-3'-phosphate
  modified_base 5: mod_base = OTHER; note = 2'-O-methyluridine-3'-phosphate
  modified_base 6: mod_base = OTHER; note = 2'-deoxy-2'-fluoroguanosine-3'-phosphate
  modified_base 7: mod_base = OTHER; note = 2'-O-methyladenosine-3'-phosphate
  modified_base 8: mod_base = OTHER; note = 2'-deoxy-2'-fluoroadenosine-3'-phosphate
  modified_base 9: mod_base = OTHER; note = 2'-deoxy-2'-fluoroguanosine-3'-phosphate
  modified_base 10: mod_base = OTHER; note = 2'-O-methyladenosine-3'-phosphate
  modified_base 11: mod_base = OTHER; note = 2'-O-methyladenosine-3'-phosphate
  modified_base 12: mod_base = OTHER; note = 2'-O-methylguanosine-3'-phosphate
  modified_base 13: mod_base = OTHER; note = 2'-O-methyladenosine-3'-phosphate
  modified_base 14: mod_base = OTHER; note = 2'-deoxy-2'-fluorouridine-3'-phosphate
  modified_base 15: mod_base = OTHER; note = 2'-O-methylcytidine-3'-phosphate
  modified_base 16: mod_base = OTHER; note = 2'-deoxy-2'-fluorocytidine-3'-phosphate
  modified_base 17: mod_base = OTHER; note = 2'-O-methylcytidine-3'-phosphate
  modified_base 18: mod_base = OTHER; note = 2'-O-methylguanosine-3'-phosphate
  modified_base 19: mod_base = OTHER; note = 2'-O-methylguanosine-3'-phosphate
  modified_base 20: mod_base = OTHER; note = 2'-O-methyladenosine-3'-phosphate
  modified_base 21: mod_base = OTHER; note = 2'-O-methylguanosine-3'-phosphorothioate
  modified_base 22: mod_base = OTHER; note = 2'-O-methylguanosine-3'-phosphorothioate
  modified_base 23: mod_base = OTHER; note = 2'-O-methyluridine
tacgtgaagaagatcccggaggt

SEQ ID NO: 2268 - RNA, 23 nt, synthetic construct
  source 1..23: mol_type = other RNA
  modified_base 1: mod_base = OTHER; note = 2'-O-methyluridine-3'-phosphorothioate 5'-(E)-Vinylphosphonate
  modified_base 2: mod_base = OTHER; note = 2'-deoxy-2'-fluorouridine-3'-phosphorothioate
  modified_base 3: mod_base = OTHER; note = 2'-O-methyladenosine-3'-phosphate
  modified_base 4: mod_base = OTHER; note = 2'-O-methylguanosine-3'-phosphate
  modified_base 5: mod_base = OTHER; note = 2'-O-methylcytidine-3'-phosphate
  modified_base 6: mod_base = OTHER; note = 2'-deoxy-2'-fluorocytidine-3'-phosphate
  modified_base 7: mod_base = OTHER; note = 2'-O-methyluridine-3'-phosphate
  modified_base 8: mod_base = OTHER; note = 2'-deoxy-2'-fluoroguanosine-3'-phosphate
  modified_base 9: mod_base = OTHER; note = 2'-deoxy-2'-fluoroadenosine-3'-phosphate
  modified_base 10: mod_base = OTHER; note = 2'-O-methyladenosine-3'-phosphate
  modified_base 11: mod_base = OTHER; note = 2'-O-methylguanosine-3'-phosphate
  modified_base 12: mod_base = OTHER; note = 2'-O-methylcytidine-3'-phosphate
  modified_base 13: mod_base = OTHER; note = 2'-O-methyluridine-3'-phosphate
  modified_base 14: mod_base = OTHER; note = 2'-deoxy-2'-fluorouridine-3'-phosphate
  modified_base 15: mod_base = OTHER; note = 2'-O-methylcytidine-3'-phosphate
  modified_base 16: mod_base = OTHER; note = 2'-deoxy-2'-fluorocytidine-3'-phosphate
  modified_base 17: mod_base = OTHER; note = 2'-O-methyladenosine-3'-phosphate
  modified_base 18: mod_base = OTHER; note = 2'-O-methylguanosine-3'-phosphate
  modified_base 19: mod_base = OTHER; note = 2'-O-methylguanosine-3'-phosphate
  modified_base 20: mod_base = OTHER; note = 2'-O-methyladenosine-3'-phosphate
  modified_base 21: mod_base = OTHER; note = 2'-O-methylcytidine-3'-phosphorothioate
  modified_base 22: mod_base = OTHER; note = 2'-O-methyladenosine-3'-phosphorothioate
  modified_base 23: mod_base = OTHER; note = 2'-O-methylcytidine
ttagcctgaagcttccaggacac

SEQ ID NO: 2269 - RNA, 23 nt, synthetic construct
  source 1..23: mol_type = other RNA
  modified_base 1: mod_base = OTHER; note = 2'-O-methyluridine-3'-phosphorothioate 5'-(E)-Vinylphosphonate
  modified_base 2: mod_base = OTHER; note = 2'-deoxy-2'-fluorocytidine-3'-phosphorothioate
  modified_base 3: mod_base = OTHER; note = 2'-O-methyluridine-3'-phosphate
  modified_base 4: mod_base = OTHER; note = 2'-O-methyluridine-3'-phosphate
  modified_base 5: mod_base = OTHER; note = 2'-O-methyladenosine-3'-phosphate
  modified_base 6: mod_base = OTHER; note = 2'-deoxy-2'-fluoroguanosine-3'-phosphate
  modified_base 7: mod_base = OTHER; note = 2'-O-methyladenosine-3'-phosphate
  modified_base 8: mod_base = OTHER; note = 2'-deoxy-2'-fluoroguanosine-3'-phosphate
  modified_base 9: mod_base = OTHER; note = 2'-deoxy-2'-fluoroguanosine-3'-phosphate
  modified_base 10: mod_base = OTHER; note = 2'-O-methyladenosine-3'-phosphate
  modified_base 11: mod_base = OTHER; note = 2'-O-methylguanosine-3'-phosphate
  modified_base 12: mod_base = OTHER; note = 2'-O-methyluridine-3'-phosphate
  modified_base 13: mod_base = OTHER; note = 2'-O-methylcytidine-3'-phosphate
  modified_base 14: mod_base = OTHER; note = 2'-deoxy-2'-fluoroadenosine-3'-phosphate
  modified_base 15: mod_base = OTHER; note = 2'-O-methylguanosine-3'-phosphate
  modified_base 16: mod_base = OTHER; note = 2'-deoxy-2'-fluoroguanosine-3'-phosphate
  modified_base 17: mod_base = OTHER; note = 2'-O-methylguanosine-3'-phosphate
  modified_base 18: mod_base = OTHER; note = 2'-O-methyladenosine-3'-phosphate
  modified_base 19: mod_base = OTHER; note = 2'-O-methyladenosine-3'-phosphate
  modified_base 20: mod_base = OTHER; note = 2'-O-methyladenosine-3'-phosphate
  modified_base 21: mod_base = OTHER; note = 2'-O-methyluridine-3'-phosphorothioate
  modified_base 22: mod_base = OTHER; note = 2'-O-methyluridine-3'-phosphorothioate
  modified_base 23: mod_base = OTHER; note = 2'-O-methylguanosine
tcttagaggagtcagggaaattg

SEQ ID NO: 2270 - RNA, 23 nt, synthetic construct
  source 1..23: mol_type = other RNA
  modified_base 1: mod_base = OTHER; note = 2'-O-methyluridine-3'-phosphorothioate 5'-(E)-Vinylphosphonate
  modified_base 2: mod_base = OTHER; note = 2'-deoxy-2'-fluorouridine-3'-phosphorothioate
  modified_base 3: mod_base = OTHER; note = 2'-O-methylguanosine-3'-phosphate
  modified_base 4: mod_base = OTHER; note = 2'-O-methylcytidine-3'-phosphate
  modified_base 5: mod_base = OTHER; note = 2'-O-methyluridine-3'-phosphate
  modified_base 6: mod_base = OTHER; note = 2'-deoxy-2'-fluorocytidine-3'-phosphate
  modified_base 7: mod_base = OTHER; note = 2'-O-methyluridine-3'-phosphate
  modified_base 8: mod_base = OTHER; note = 2'-deoxy-2'-fluoroguanosine-3'-phosphate
  modified_base 9: mod_base = OTHER; note = 2'-deoxy-2'-fluoroadenosine-3'-phosphate
  modified_base 10: mod_base = OTHER; note = 2'-O-methyladenosine-3'-phosphate
  modified_base 11: mod_base = OTHER; note = 2'-O-methylguanosine-3'-phosphate
  modified_base 12: mod_base = OTHER; note = 2'-O-methyladenosine-3'-phosphate
  modified_base 13: mod_base = OTHER; note = 2'-O-methyluridine-3'-phosphate
  modified_base 14: mod_base = OTHER; note = 2'-deoxy-2'-fluorocytidine-3'-phosphate
  modified_base 15: mod_base = OTHER; note = 2'-O-methylguanosine-3'-phosphate
  modified_base 16: mod_base = OTHER; note = 2'-deoxy-2'-fluorocytidine-3'-phosphate
  modified_base 17: mod_base = OTHER; note = 2'-O-methyladenosine-3'-phosphate
  modified_base 18: mod_base = OTHER; note = 2'-O-methylguanosine-3'-phosphate
  modified_base 19: mod_base = OTHER; note = 2'-O-methyluridine-3'-phosphate
  modified_base 20: mod_base = OTHER; note = 2'-O-methylcytidine-3'-phosphate
  modified_base 21: mod_base = OTHER; note = 2'-O-methyladenosine-3'-phosphorothioate
  modified_base 22: mod_base = OTHER; note = 2'-O-methylcytidine-3'-phosphorothioate
  modified_base 23: mod_base = OTHER; note = 2'-O-methylcytidine
ttgctctgaagatcgcagtcacc

SEQ ID NO: 2271 - RNA, 23 nt, synthetic construct
  source 1..23: mol_type = other RNA
  modified_base 1: mod_base = OTHER; note = 2'-O-methyluridine-3'-phosphorothioate 5'-(E)-Vinylphosphonate
  modified_base 2: mod_base = OTHER; note = 2'-deoxy-2'-fluoroadenosine-3'-phosphorothioate
  modified_base 3: mod_base = OTHER; note = 2'-O-methyladenosine-3'-phosphate
  modified_base 4: mod_base = OTHER; note = 2'-O-methyladenosine-3'-phosphate
  modified_base 5: mod_base = OTHER; note = 2'-O-methylguanosine-3'-phosphate
  modified_base 6: mod_base = OTHER; note = 2'-deoxy-2'-fluoroadenosine-3'-phosphate
  modified_base 7: mod_base = OTHER; note = 2'-O-methylguanosine-3'-phosphate
  modified_base 8: mod_base = OTHER; note = 2'-deoxy-2'-fluorocytidine-3'-phosphate
  modified_base 9: mod_base = OTHER; note = 2'-deoxy-2'-fluorocytidine-3'-phosphate
  modified_base 10: mod_base = OTHER; note = 2'-O-methyluridine-3'-phosphate
  modified_base 11: mod_base = OTHER; note = 2'-O-methylguanosine-3'-phosphate
  modified_base 12: mod_base = OTHER; note = 2'-O-methylguanosine-3'-phosphate
  modified_base 13: mod_base = OTHER; note = 2'-O-methyladenosine-3'-phosphate
  modified_base 14: mod_base = OTHER; note = 2'-deoxy-2'-fluoroguanosine-3'-phosphate
  modified_base 15: mod_base = OTHER; note = 2'-O-methyladenosine-3'-phosphate
  modified_base 16: mod_base = OTHER; note = 2'-deoxy-2'-fluoroadenosine-3'-phosphate
  modified_base 17: mod_base = OTHER; note = 2'-O-methylguanosine-3'-phosphate
  modified_base 18: mod_base = OTHER; note = 2'-O-methylcytidine-3'-phosphate
  modified_base 19: mod_base = OTHER; note = 2'-O-methyluridine-3'-phosphate
  modified_base 20: mod_base = OTHER; note = 2'-O-methylguanosine-3'-phosphate
  modified_base 21: mod_base = OTHER; note = 2'-O-methylguanosine-3'-phosphorothioate
  modified_base 22: mod_base = OTHER; note = 2'-O-methyluridine-3'-phosphorothioate
  modified_base 23: mod_base = OTHER; note = 2'-O-methylguanosine
taaagagcctggagaagctggtg

SEQ ID NO: 2272 - RNA, 23 nt, synthetic construct
  source 1..23: mol_type = other RNA
  modified_base 1: mod_base = OTHER; note = 2'-O-methyluridine-3'-phosphorothioate 5'-(E)-Vinylphosphonate
  modified_base 2: mod_base = OTHER; note = 2'-deoxy-2'-fluoroguanosine-3'-phosphorothioate
  modified_base 3: mod_base = OTHER; note = 2'-O-methylguanosine-3'-phosphate
  modified_base 4: mod_base = OTHER; note = 2'-O-methyladenosine-3'-phosphate
  modified_base 5: mod_base = OTHER; note = 2'-O-methylguanosine-3'-phosphate
  modified_base 6: mod_base = OTHER; note = 2'-deoxy-2'-fluoroadenosine-3'-phosphate
  modified_base 7: mod_base = OTHER; note = 2'-O-methyluridine-3'-phosphate
  modified_base 8: mod_base = OTHER; note = 2'-deoxy-2'-fluoroadenosine-3'-phosphate
  modified_base 9: mod_base = OTHER; note = 2'-deoxy-2'-fluorocytidine-3'-phosphate
  modified_base 10: mod_base = OTHER; note = 2'-O-methylcytidine-3'-phosphate
  modified_base 11: mod_base = OTHER; note = 2'-O-methyluridine-3'-phosphate
  modified_base 12: mod_base = OTHER; note = 2'-O-methylguanosine-3'-phosphate
  modified_base 13: mod_base = OTHER; note = 2'-O-methylguanosine-3'-phosphate
  modified_base 14: mod_base = OTHER; note = 2'-deoxy-2'-fluoroadenosine-3'-phosphate
  modified_base 15: mod_base = OTHER; note = 2'-O-methyladenosine-3'-phosphate
  modified_base 16: mod_base = OTHER; note = 2'-deoxy-2'-fluoroguanosine-3'-phosphate
  modified_base 17: mod_base = OTHER; note = 2'-O-methylcytidine-3'-phosphate
  modified_base 18: mod_base = OTHER; note = 2'-O-methylcytidine-3'-phosphate
  modified_base 19: mod_base = OTHER; note = 2'-O-methyladenosine-3'-phosphate
  modified_base 20: mod_base = OTHER; note = 2'-O-methylguanosine-3'-phosphate
  modified_base 21: mod_base = OTHER; note = 2'-O-methyladenosine-3'-phosphorothioate
  modified_base 22: mod_base = OTHER; note = 2'-O-methylguanosine-3'-phosphorothioate
  modified_base 23: mod_base = OTHER; note = 2'-O-methyluridine
tggagatacctggaagccagagt

SEQ ID NO: 2273 - RNA, 23 nt, synthetic construct
  source 1..23: mol_type = other RNA
  modified_base 1: mod_base = OTHER; note = 2'-O-methyluridine-3'-phosphorothioate 5'-(E)-Vinylphosphonate
  modified_base 2: mod_base = OTHER; note = 2'-deoxy-2'-fluoroguanosine-3'-phosphorothioate
  modified_base 3: mod_base = OTHER; note = 2'-O-methyluridine-3'-phosphate
  modified_base 4: mod_base = OTHER; note = 2'-O-methyluridine-3'-phosphate
  modified_base 5: mod_base = OTHER; note = 2'-O-methyluridine-3'-phosphate
  modified_base 6: mod_base = OTHER; note = 2'-deoxy-2'-fluorocytidine-3'-phosphate
  modified_base 7: mod_base = OTHER; note = 2'-O-methyladenosine-3'-phosphate
  modified_base 8: mod_base = OTHER; note = 2'-deoxy-2'-fluorocytidine-3'-phosphate
  modified_base 9: mod_base = OTHER; note = 2'-deoxy-2'-fluorocytidine-3'-phosphate
  modified_base 10: mod_base = OTHER; note = 2'-O-methyladenosine-3'-phosphate
  modified_base 11: mod_base = OTHER; note = 2'-O-methyluridine-3'-phosphate
  modified_base 12: mod_base = OTHER; note = 2'-O-methylguanosine-3'-phosphate
  modified_base 13: mod_base = OTHER; note = 2'-O-methyluridine-3'-phosphate
  modified_base 14: mod_base = OTHER; note = 2'-deoxy-2'-fluorouridine-3'-phosphate
  modified_base 15: mod_base = OTHER; note = 2'-O-methylguanosine-3'-phosphate
  modified_base 16: mod_base = OTHER; note = 2'-deoxy-2'-fluoroguanosine-3'-phosphate
  modified_base 17: mod_base = OTHER; note = 2'-O-methylcytidine-3'-phosphate
  modified_base 18: mod_base = OTHER; note = 2'-O-methylcytidine-3'-phosphate
  modified_base 19: mod_base = OTHER; note = 2'-O-methyladenosine-3'-phosphate
  modified_base 20: mod_base = OTHER; note = 2'-O-methylguanosine-3'-phosphate
  modified_base 21: mod_base = OTHER; note = 2'-O-methylguanosine-3'-phosphorothioate
  modified_base 22: mod_base = OTHER; note = 2'-O-methyladenosine-3'-phosphorothioate
  modified_base 23: mod_base = OTHER; note = 2'-O-methyluridine
tgtttcaccatgttggccaggat

SEQ ID NO: 2274 - RNA, 23 nt, synthetic construct
  source 1..23: mol_type = other RNA
  modified_base 1: mod_base = OTHER; note = 2'-O-methyluridine-3'-phosphorothioate 5'-(E)-Vinylphosphonate
  modified_base 2: mod_base = OTHER; note = 2'-deoxy-2'-fluorouridine-3'-phosphorothioate
  modified_base 3: mod_base = OTHER; note = 2'-O-methyluridine-3'-phosphate
  modified_base 4: mod_base = OTHER; note = 2'-O-methylcytidine-3'-phosphate
  modified_base 5: mod_base = OTHER; note = 2'-O-methyladenosine-3'-phosphate
  modified_base 6: mod_base = OTHER; note = 2'-deoxy-2'-fluorocytidine-3'-phosphate
  modified_base 7: mod_base = OTHER; note = 2'-O-methylcytidine-3'-phosphate
  modified_base 8: mod_base = OTHER; note = 2'-deoxy-2'-fluoroadenosine-3'-phosphate
  modified_base 9: mod_base = OTHER; note = 2'-deoxy-2'-fluorocytidine-3'-phosphate
  modified_base 10: mod_base = OTHER; note = 2'-O-methyluridine-3'-phosphate
  modified_base 11: mod_base = OTHER; note = 2'-O-methylguanosine-3'-phosphate
  modified_base 12: mod_base = OTHER; note = 2'-O-methylguanosine-3'-phosphate
  modified_base 13: mod_base = OTHER; note = 2'-O-methyladenosine-3'-phosphate
  modified_base 14: mod_base = OTHER; note = 2'-deoxy-2'-fluoroguanosine-3'-phosphate
  modified_base 15: mod_base = OTHER; note = 2'-O-methyluridine-3'-phosphate
  modified_base 16: mod_base = OTHER; note = 2'-deoxy-2'-fluoroadenosine-3'-phosphate
  modified_base 17: mod_base = OTHER; note = 2'-O-methyladenosine-3'-phosphate
  modified_base 18: mod_base = OTHER; note = 2'-O-methyladenosine-3'-phosphate
  modified_base 19: mod_base = OTHER; note = 2'-O-methyladenosine-3'-phosphate
  modified_base 20: mod_base = OTHER; note = 2'-O-methyladenosine-3'-phosphate
  modified_base 21: mod_base = OTHER; note = 2'-O-methylcytidine-3'-phosphorothioate
  modified_base 22: mod_base = OTHER; note = 2'-O-methylcytidine-3'-phosphorothioate
  modified_base 23: mod_base = OTHER; note = 2'-O-methylcytidine
tttcaccactggagtaaaaaccc

SEQ ID NO: 2275 - RNA, 23 nt, synthetic construct
  source 1..23: mol_type = other RNA
  modified_base 1: mod_base = OTHER; note = 2'-O-methyluridine-3'-phosphorothioate 5'-(E)-Vinylphosphonate
  modified_base 2: mod_base = OTHER; note = 2'-deoxy-2'-fluorocytidine-3'-phosphorothioate
  modified_base 3: mod_base = OTHER; note = 2'-O-methyluridine-3'-phosphate
  modified_base 4: mod_base = OTHER; note = 2'-O-methylguanosine-3'-phosphate
  modified_base 5: mod_base = OTHER; note = 2'-O-methyluridine-3'-phosphate
  modified_base 6: mod_base = OTHER; note = 2'-deoxy-2'-fluorocytidine-3'-phosphate
  modified_base 7: mod_base = OTHER; note = 2'-O-methyladenosine-3'-phosphate
  modified_base 8: mod_base = OTHER; note = 2'-deoxy-2'-fluoroadenosine-3'-phosphate
  modified_base 9: mod_base = OTHER; note = 2'-deoxy-2'-fluorocytidine-3'-phosphate
  modified_base 10: mod_base = OTHER; note = 2'-O-methyluridine-3'-phosphate
  modified_base 11: mod_base = OTHER; note = 2'-O-methylguanosine-3'-phosphate
  modified_base 12: mod_base = OTHER; note = 2'-O-methylcytidine-3'-phosphate
  modified_base 13: mod_base = OTHER; note = 2'-O-methyladenosine-3'-phosphate
  modified_base 14: mod_base = OTHER; note = 2'-deoxy-2'-fluorocytidine-3'-phosphate
  modified_base 15: mod_base = OTHER; note = 2'-O-methylcytidine-3'-phosphate
  modified_base 16: mod_base = OTHER; note = 2'-deoxy-2'-fluoroadenosine-3'-phosphate
  modified_base 17: mod_base = OTHER; note = 2'-O-methyluridine-3'-phosphate
  modified_base 18: mod_base = OTHER; note = 2'-O-methylguanosine-3'-phosphate
  modified_base 19: mod_base = OTHER; note = 2'-O-methylcytidine-3'-phosphate
  modified_base 20: mod_base = OTHER; note = 2'-O-methyladenosine-3'-phosphate
  modified_base 21: mod_base = OTHER; note = 2'-O-methyluridine-3'-phosphorothioate
  modified_base 22: mod_base = OTHER; note = 2'-O-methyluridine-3'-phosphorothioate
  modified_base 23: mod_base = OTHER; note = 2'-O-methyluridine
tctgtcaactgcaccatgcattt

SEQ ID NO: 2276 - RNA, 23 nt, synthetic construct
  source 1..23: mol_type = other RNA
  modified_base 1: mod_base = OTHER; note = 2'-O-methyluridine-3'-phosphorothioate 5'-(E)-Vinylphosphonate
  modified_base 2: mod_base = OTHER; note = 2'-deoxy-2'-fluoroadenosine-3'-phosphorothioate
  modified_base 3: mod_base = OTHER; note = 2'-O-methyluridine-3'-phosphate
  modified_base 4: mod_base = OTHER; note = 2'-O-methylcytidine-3'-phosphate
  modified_base 5: mod_base = OTHER; note = 2'-O-methyluridine-3'-phosphate
  modified_base 6: mod_base = OTHER; note = 2'-deoxy-2'-fluorouridine-3'-phosphate
  modified_base 7: mod_base = OTHER; note = 2'-O-methylguanosine-3'-phosphate
  modified_base 8: mod_base = OTHER; note = 2'-deoxy-2'-fluoroguanosine-3'-phosphate
  modified_base 9: mod_base = OTHER; note = 2'-deoxy-2'-fluorocytidine-3'-phosphate
  modified_base 10: mod_base = OTHER; note = 2'-O-methyluridine-3'-phosphate
  modified_base 11: mod_base = OTHER; note = 2'-O-methylcytidine-3'-phosphate
  modified_base 12: mod_base = OTHER; note = 2'-O-methyladenosine-3'-phosphate
  modified_base 13: mod_base = OTHER; note = 2'-O-methylcytidine-3'-phosphate
  modified_base 14: mod_base = OTHER; note = 2'-deoxy-2'-fluorouridine-3'-phosphate
  modified_base 15: mod_base = OTHER; note = 2'-O-methylguanosine-3'-phosphate
  modified_base 16: mod_base = OTHER; note = 2'-deoxy-2'-fluorouridine-3'-phosphate
  modified_base 17: mod_base = OTHER; note = 2'-O-methyladenosine-3'-phosphate
  modified_base 18: mod_base = OTHER; note = 2'-O-methylcytidine-3'-phosphate
  modified_base 19: mod_base = OTHER; note = 2'-O-methyluridine-3'-phosphate
  modified_base 20: mod_base = OTHER; note = 2'-O-methylcytidine-3'-phosphate
  modified_base 21: mod_base = OTHER; note = 2'-O-methyluridine-3'-phosphorothioate
  modified_base 22: mod_base = OTHER; note = 2'-O-methylcytidine-3'-phosphorothioate
  modified_base 23: mod_base = OTHER; note = 2'-O-methylcytidine
tatcttggctcactgtactctcc

SEQ ID NO: 2277 - RNA, 23 nt, synthetic construct
  source 1..23: mol_type = other RNA
  modified_base 1: mod_base = OTHER; note = 2'-O-methyluridine-3'-phosphorothioate 5'-(E)-Vinylphosphonate
  modified_base 2: mod_base = OTHER; note = 2'-deoxy-2'-fluoroguanosine-3'-phosphorothioate
  modified_base 3: mod_base = OTHER; note = 2'-O-methylcytidine-3'-phosphate
  modified_base 4: mod_base = OTHER; note = 2'-O-methyluridine-3'-phosphate
  modified_base 5: mod_base = OTHER; note = 2'-O-methylcytidine-3'-phosphate
  modified_base 6: mod_base = OTHER; note = 2'-deoxy-2'-fluoroadenosine-3'-phosphate
  modified_base 7: mod_base = OTHER; note = 2'-O-methylguanosine-3'-phosphate
  modified_base 8: mod_base = OTHER; note = 2'-deoxy-2'-fluorocytidine-3'-phosphate
  modified_base 9: mod_base = OTHER; note = 2'-deoxy-2'-fluorouridine-3'-phosphate
  modified_base 10: mod_base = OTHER; note = 2'-O-methyladenosine-3'-phosphate
  modified_base 11: mod_base = OTHER; note = 2'-O-methyladenosine-3'-phosphate
  modified_base 12: mod_base = OTHER; note = 2'-O-methylcytidine-3'-phosphate
  modified_base 13: mod_base = OTHER; note = 2'-O-methyluridine-3'-phosphate
  modified_base 14: mod_base = OTHER; note = 2'-deoxy-2'-fluorouridine-3'-phosphate
  modified_base 15: mod_base = OTHER; note = 2'-O-methyluridine-3'-phosphate
  modified_base 16: mod_base = OTHER; note = 2'-deoxy-2'-fluorouridine-3'-phosphate
  modified_base 17: mod_base = OTHER; note = 2'-O-methylguanosine-3'-phosphate
  modified_base 18: mod_base = OTHER; note = 2'-O-methyluridine-3'-phosphate
  modified_base 19: mod_base = OTHER; note = 2'-O-methylguanosine-3'-phosphate
  modified_base 20: mod_base = OTHER; note = 2'-O-methyluridine-3'-phosphate
  modified_base 21: mod_base = OTHER; note = 2'-O-methyluridine-3'-phosphorothioate
  modified_base 22: mod_base = OTHER; note = 2'-O-methyluridine-3'-phosphorothioate
  modified_base 23: mod_base = OTHER; note = 2'-O-methyluridine
tgctcagctaacttttgtgtttt

SEQ ID NO: 2278 - RNA, 23 nt, synthetic construct
  source 1..23: mol_type = other RNA
  modified_base 1: mod_base = OTHER; note = 2'-O-methyluridine-3'-phosphorothioate 5'-(E)-Vinylphosphonate
  modified_base 2: mod_base = OTHER; note = 2'-deoxy-2'-fluorouridine-3'-phosphorothioate
  modified_base 3: mod_base = OTHER; note = 2'-O-methylcytidine-3'-phosphate
  modified_base 4: mod_base = OTHER; note = 2'-O-methylcytidine-3'-phosphate
  modified_base 5: mod_base = OTHER; note = 2'-O-methyladenosine-3'-phosphate
  modified_base 6: mod_base = OTHER; note = 2'-deoxy-2'-fluoroguanosine-3'-phosphate
  modified_base 7: mod_base = OTHER; note = 2'-O-methylcytidine-3'-phosphate
  modified_base 8: mod_base = OTHER; note = 2'-deoxy-2'-fluorouridine-3'-phosphate
  modified_base 9: mod_base = OTHER; note = 2'-deoxy-2'-fluorouridine-3'-phosphate
  modified_base 10: mod_base = OTHER; note = 2'-O-methylguanosine-3'-phosphate
  modified_base 11: mod_base = OTHER; note = 2'-O-methyluridine-3'-phosphate
  modified_base 12: mod_base = OTHER; note = 2'-O-methylguanosine-3'-phosphate
  modified_base 13: mod_base = OTHER; note = 2'-O-methyluridine-3'-phosphate
  modified_base 14: mod_base = OTHER; note = 2'-deoxy-2'-fluorouridine-3'-phosphate
  modified_base 15: mod_base = OTHER; note = 2'-O-methylguanosine-3'-phosphate
  modified_base 16: mod_base = OTHER; note = 2'-deoxy-2'-fluorocytidine-3'-phosphate
  modified_base 17: mod_base = OTHER; note = 2'-O-methyluridine-3'-phosphate
  modified_base 18: mod_base = OTHER; note = 2'-O-methylguanosine-3'-phosphate
  modified_base 19: mod_base = OTHER; note = 2'-O-methylguanosine-3'-phosphate
  modified_base 20: mod_base = OTHER; note = 2'-O-methylguanosine-3'-phosphate
  modified_base 21: mod_base = OTHER; note = 2'-O-methyladenosine-3'-phosphorothioate
  modified_base 22: mod_base = OTHER; note = 2'-O-methylguanosine-3'-phosphorothioate
  modified_base 23: mod_base = OTHER; note = 2'-O-methyluridine
ttccagcttgtgttgctgggagt

SEQ ID NO: 2279 - RNA, 23 nt, synthetic construct
  source 1..23: mol_type = other RNA
  modified_base 1: mod_base = OTHER; note = 2'-O-methyluridine-3'-phosphorothioate 5'-(E)-Vinylphosphonate
  modified_base 2: mod_base = OTHER; note = 2'-deoxy-2'-fluorouridine-3'-phosphorothioate
  modified_base 3: mod_base = OTHER; note = 2'-O-methyladenosine-3'-phosphate
  modified_base 4: mod_base = OTHER; note = 2'-O-methylguanosine-3'-phosphate
  modified_base 5: mod_base = OTHER; note = 2'-O-methylcytidine-3'-phosphate
  modified_base 6: mod_base = OTHER; note = 2'-deoxy-2'-fluoroadenosine-3'-phosphate
  modified_base 7: mod_base = OTHER; note = 2'-O-methylguanosine-3'-phosphate
  modified_base 8: mod_base = OTHER; note = 2'-deoxy-2'-fluorouridine-3'-phosphate
  modified_base 9: mod_base = OTHER; note = 2'-deoxy-2'-fluoroguanosine-3'-phosphate
  modified_base 10: mod_base = OTHER; note = 2'-O-methylcytidine-3'-phosphate
  modified_base 11: mod_base = OTHER; note = 2'-O-methyluridine-3'-phosphate
  modified_base 12: mod_base = OTHER; note = 2'-O-methyluridine-3'-phosphate
  modified_base 13: mod_base = OTHER; note = 2'-O-methylguanosine-3'-phosphate
  modified_base 14: mod_base = OTHER; note = 2'-deoxy-2'-fluorouridine-3'-phosphate
  modified_base 15: mod_base = OTHER; note = 2'-O-methylcytidine-3'-phosphate
  modified_base 16: mod_base = OTHER; note = 2'-deoxy-2'-fluoroadenosine-3'-phosphate
  modified_base 17: mod_base = OTHER; note = 2'-O-methylguanosine-3'-phosphate
  modified_base 18: mod_base = OTHER; note = 2'-O-methylguanosine-3'-phosphate
  modified_base 19: mod_base = OTHER; note = 2'-O-methyluridine-3'-phosphate
  modified_base 20: mod_base = OTHER; note = 2'-O-methylcytidine-3'-phosphate
  modified_base 21: mod_base = OTHER; note = 2'-O-methyluridine-3'-phosphorothioate
  modified_base 22: mod_base = OTHER; note = 2'-O-methylcytidine-3'-phosphorothioate
  modified_base 23: mod_base = OTHER; note = 2'-O-methyladenosine
ttagcagtgcttgtcaggtctca

SEQ ID NO: 2280 - RNA, 23 nt, synthetic construct
  source 1..23: mol_type = other RNA
  modified_base 1: mod_base = OTHER; note = 2'-O-methyluridine-3'-phosphorothioate 5'-(E)-Vinylphosphonate
  modified_base 2: mod_base = OTHER; note = 2'-deoxy-2'-fluoroadenosine-3'-phosphorothioate
  modified_base 3: mod_base = OTHER; note = 2'-O-methylcytidine-3'-phosphate
  modified_base 4: mod_base = OTHER; note = 2'-O-methyluridine-3'-phosphate
  modified_base 5: mod_base = OTHER; note = 2'-O-methylguanosine-3'-phosphate
  modified_base 6: mod_base = OTHER; note = 2'-deoxy-2'-fluoroadenosine-3'-phosphate
  modified_base 7: mod_base = OTHER; note = 2'-O-methylcytidine-3'-phosphate
  modified_base 8: mod_base = OTHER; note = 2'-deoxy-2'-fluorouridine-3'-phosphate
  modified_base 9: mod_base = OTHER; note = 2'-deoxy-2'-fluoroguanosine-3'-phosphate
  modified_base 10: mod_base = OTHER; note = 2'-O-methylcytidine-3'-phosphate
  modified_base 11: mod_base = OTHER; note = 2'-O-methylguanosine-3'-phosphate
  modified_base 12: mod_base = OTHER; note = 2'-O-methyluridine-3'-phosphate
  modified_base 13: mod_base = OTHER; note = 2'-O-methylguanosine-3'-phosphate
  modified_base 14: mod_base = OTHER; note = 2'-deoxy-2'-fluorouridine-3'-phosphate
  modified_base 15: mod_base = OTHER; note = 2'-O-methylguanosine-3'-phosphate
  modified_base 16: mod_base = OTHER; note = 2'-deoxy-2'-fluorouridine-3'-phosphate
  modified_base 17: mod_base = OTHER; note = 2'-O-methylguanosine-3'-phosphate
  modified_base 18: mod_base = OTHER; note = 2'-O-methyladenosine-3'-phosphate
  modified_base 19: mod_base = OTHER; note = 2'-O-methyladenosine-3'-phosphate
  modified_base 20: mod_base = OTHER; note = 2'-O-methyladenosine-3'-phosphate
  modified_base 21: mod_base = OTHER; note = 2'-O-methyluridine-3'-phosphorothioate
  modified_base 22: mod_base = OTHER; note = 2'-O-methylguanosine-3'-phosphorothioate
  modified_base 23: mod_base = OTHER; note = 2'-O-methyluridine
tactgactgcgtgtgtgaaatgt

SEQ ID NO: 2281 - RNA, 23 nt, synthetic construct
  source 1..23: mol_type = other RNA
  modified_base 1: mod_base = OTHER; note = 2'-O-methyluridine-3'-phosphorothioate 5'-(E)-Vinylphosphonate
  modified_base 2: mod_base = OTHER; note = 2'-deoxy-2'-fluorouridine-3'-phosphorothioate
  modified_base 3: mod_base = OTHER; note = 2'-O-methyluridine-3'-phosphate
  modified_base 4: mod_base = OTHER; note = 2'-O-methylcytidine-3'-phosphate
  modified_base 5: mod_base = OTHER; note = 2'-O-methylcytidine-3'-phosphate
  modified_base 6: mod_base = OTHER; note = 2'-deoxy-2'-fluoroadenosine-3'-phosphate
  modified_base 7: mod_base = OTHER; note = 2'-O-methylguanosine-3'-phosphate
  modified_base 8: mod_base = OTHER; note = 2'-deoxy-2'-fluorouridine-3'-phosphate
  modified_base 9: mod_base = OTHER; note = 2'-deoxy-2'-fluorocytidine-3'-phosphate
  modified_base 10: mod_base = OTHER; note = 2'-O-methylcytidine-3'-phosphate
  modified_base 11: mod_base = OTHER; note = 2'-O-methylcytidine-3'-phosphate
  modified_base 12: mod_base = OTHER; note = 2'-O-methyluridine-3'-phosphate
  modified_base 13: mod_base = OTHER; note = 2'-O-methylcytidine-3'-phosphate
  modified_base 14: mod_base = OTHER; note = 2'-deoxy-2'-fluoroadenosine-3'-phosphate
  modified_base 15: mod_base = OTHER; note = 2'-O-methyluridine-3'-phosphate
  modified_base 16: mod_base = OTHER; note = 2'-deoxy-2'-fluorouridine-3'-phosphate
  modified_base 17: mod_base = OTHER; note = 2'-O-methyladenosine-3'-phosphate
  modified_base 18: mod_base = OTHER; note = 2'-O-methylcytidine-3'-phosphate
  modified_base 19: mod_base = OTHER; note = 2'-O-methylcytidine-3'-phosphate
  modified_base 20: mod_base = OTHER; note = 2'-O-methyluridine-3'-phosphate
  modified_base 21: mod_base = OTHER; note = 2'-O-methylguanosine-3'-phosphorothioate
  modified_base 22: mod_base = OTHER; note = 2'-O-methylguanosine-3'-phosphorothioate
  modified_base 23: mod_base = OTHER; note = 2'-O-methylcytidine
tttccagtccctcattacctggc

SEQ ID NO: 2282 - RNA, 23 nt, synthetic construct
  source 1..23: mol_type = other RNA
  modified_base 1: mod_base = OTHER; note = 2'-O-methyluridine-3'-phosphorothioate 5'-(E)-Vinylphosphonate
  modified_base 2: mod_base = OTHER; note = 2'-deoxy-2'-fluorocytidine-3'-phosphorothioate
  modified_base 3: mod_base = OTHER; note = 2'-O-methyladenosine-3'-phosphate
  modified_base 4: mod_base = OTHER; note = 2'-O-methylguanosine-3'-phosphate
  modified_base 5: mod_base = OTHER; note = 2'-O-methylguanosine-3'-phosphate
  modified_base 6: mod_base = OTHER; note = 2'-deoxy-2'-fluorocytidine-3'-phosphate
  modified_base 7: mod_base = OTHER; note = 2'-O-methyladenosine-3'-phosphate
  modified_base 8: mod_base = OTHER; note = 2'-deoxy-2'-fluoroadenosine-3'-phosphate
  modified_base 9: mod_base = OTHER; note = 2'-deoxy-2'-fluorouridine-3'-phosphate
  modified_base 10: mod_base = OTHER; note = 2'-O-methyluridine-3'-phosphate
  modified_base 11: mod_base = OTHER; note = 2'-O-methylcytidine-3'-phosphate
  modified_base 12: mod_base = OTHER; note = 2'-O-methyladenosine-3'-phosphate
  modified_base 13: mod_base = OTHER; note = 2'-O-methylcytidine-3'-phosphate
  modified_base 14: mod_base = OTHER; note = 2'-deoxy-2'-fluoroadenosine-3'-phosphate
  modified_base 15: mod_base = OTHER; note = 2'-O-methyluridine-3'-phosphate
  modified_base 16: mod_base = OTHER; note = 2'-deoxy-2'-fluorocytidine-3'-phosphate
  modified_base 17: mod_base = OTHER; note = 2'-O-methylcytidine-3'-phosphate
  modified_base 18: mod_base = OTHER; note = 2'-O-methylcytidine-3'-phosphate
  modified_base 19: mod_base = OTHER; note = 2'-O-methyluridine-3'-phosphate
  modified_base 20: mod_base = OTHER; note = 2'-O-methylcytidine-3'-phosphate
  modified_base 21: mod_base = OTHER; note = 2'-O-methyladenosine-3'-phosphorothioate
  modified_base 22: mod_base = OTHER; note = 2'-O-methylcytidine-3'-phosphorothioate
  modified_base 23: mod_base = OTHER; note = 2'-O-methylcytidine
tcaggcaattcacatccctcacc

SEQ ID NO: 2283 - RNA, 23 nt, synthetic construct
  source 1..23: mol_type = other RNA
  modified_base 1: mod_base = OTHER; note = 2'-O-methyluridine-3'-phosphorothioate 5'-(E)-Vinylphosphonate
  modified_base 2: mod_base = OTHER; note = 2'-deoxy-2'-fluoroadenosine-3'-phosphorothioate
  modified_base 3: mod_base = OTHER; note = 2'-O-methyladenosine-3'-phosphate
  modified_base 4: mod_base = OTHER; note = 2'-O-methylguanosine-3'-phosphate
  modified_base 5: mod_base = OTHER; note = 2'-O-methylguanosine-3'-phosphate
  modified_base 6: mod_base = OTHER; note = 2'-deoxy-2'-fluorocytidine-3'-phosphate
  modified_base 7: mod_base = OTHER; note = 2'-O-methyladenosine-3'-phosphate
  modified_base 8: mod_base = OTHER; note = 2'-deoxy-2'-fluorouridine-3'-phosphate
  modified_base 9: mod_base = OTHER; note = 2'-deoxy-2'-fluoroadenosine-3'-phosphate
  modified_base 10: mod_base = OTHER; note = 2'-O-methylcytidine-3'-phosphate
  modified_base 11: mod_base = OTHER; note = 2'-O-methyluridine-3'-phosphate
  modified_base 12: mod_base = OTHER; note = 2'-O-methylguanosine-3'-phosphate
  modified_base 13: mod_base = OTHER; note = 2'-O-methylguanosine-3'-phosphate
  modified_base 14: mod_base = OTHER; note = 2'-deoxy-2'-fluorouridine-3'-phosphate
  modified_base 15: mod_base = OTHER; note = 2'-O-methylguanosine-3'-phosphate
  modified_base 16: mod_base = OTHER; note = 2'-deoxy-2'-fluoroadenosine-3'-phosphate
  modified_base 17: mod_base = OTHER; note = 2'-O-methylguanosine-3'-phosphate
  modified_base 18: mod_base = OTHER; note = 2'-O-methylguanosine-3'-phosphate
  modified_base 19: mod_base = OTHER; note = 2'-O-methyladenosine-3'-phosphate
  modified_base 20: mod_base = OTHER; note = 2'-O-methyluridine-3'-phosphate
  modified_base 21: mod_base = OTHER; note = 2'-O-methylcytidine-3'-phosphorothioate
  modified_base 22: mod_base = OTHER; note = 2'-O-methyluridine-3'-phosphorothioate
  modified_base 23: mod_base = OTHER; note = 2'-O-methylguanosine
taaggcatactggtgaggatctg

SEQ ID NO: 2284 - RNA, 23 nt, synthetic construct
  source 1..23: mol_type = other RNA
  modified_base 1: mod_base = OTHER; note = 2'-O-methyluridine-3'-phosphorothioate 5'-(E)-Vinylphosphonate
  modified_base 2: mod_base = OTHER; note = 2'-deoxy-2'-fluorocytidine-3'-phosphorothioate
  modified_base 3: mod_base = OTHER; note = 2'-O-methyladenosine-3'-phosphate
  modified_base 4: mod_base = OTHER; note = 2'-O-methylguanosine-3'-phosphate
  modified_base 5: mod_base = OTHER; note = 2'-O-methylcytidine-3'-phosphate
  modified_base 6: mod_base = OTHER; note = 2'-deoxy-2'-fluorouridine-3'-phosphate
  modified_base 7: mod_base = OTHER; note = 2'-O-methylcytidine-3'-phosphate
  modified_base 8: mod_base = OTHER; note = 2'-deoxy-2'-fluorouridine-3'-phosphate
  modified_base 9: mod_base = OTHER; note = 2'-deoxy-2'-fluorouridine-3'-phosphate
  modified_base 10: mod_base = OTHER; note = 2'-O-methyladenosine-3'-phosphate
  modified_base 11: mod_base = OTHER; note = 2'-O-methylguanosine-3'-phosphate
  modified_base 12: mod_base = OTHER; note = 2'-O-methyladenosine-3'-phosphate
  modified_base 13: mod_base = OTHER; note = 2'-O-methylguanosine-3'-phosphate
  modified_base 14: mod_base = OTHER; note = 2'-deoxy-2'-fluoroadenosine-3'-phosphate
  modified_base 15: mod_base = OTHER; note = 2'-O-methyladenosine-3'-phosphate
  modified_base 16: mod_base = OTHER; note = 2'-deoxy-2'-fluoroguanosine-3'-phosphate
  modified_base 17: mod_base = OTHER; note = 2'-O-methylguanosine-3'-phosphate
  modified_base 18: mod_base = OTHER; note = 2'-O-methylcytidine-3'-phosphate
  modified_base 19: mod_base = OTHER; note = 2'-O-methylcytidine-3'-phosphate
  modified_base 20: mod_base = OTHER; note = 2'-O-methyladenosine-3'-phosphate
  modified_base 21: mod_base = OTHER; note = 2'-O-methylguanosine-3'-phosphorothioate
  modified_base 22: mod_base = OTHER; note = 2'-O-methylcytidine-3'-phosphorothioate
  modified_base 23: mod_base = OTHER; note = 2'-O-methyladenosine
tcagctcttagagaaggccagca

SEQ ID NO: 2285 - RNA, 23 nt, synthetic construct
  source 1..23: mol_type = other RNA
  modified_base 1: mod_base = OTHER; note = 2'-O-methyluridine-3'-phosphorothioate 5'-(E)-Vinylphosphonate
  modified_base 2: mod_base = OTHER; note = 2'-deoxy-2'-fluorouridine-3'-phosphorothioate
  modified_base 3: mod_base = OTHER; note = 2'-O-methylguanosine-3'-phosphate
  modified_base 4: mod_base = OTHER; note = 2'-O-methyladenosine-3'-phosphate
  modified_base 5: mod_base = OTHER; note = 2'-O-methyladenosine-3'-phosphate
  modified_base 6: mod_base = OTHER; note = 2'-deoxy-2'-fluoroguanosine-3'-phosphate
  modified_base 7: mod_base = OTHER; note = 2'-O-methyladenosine-3'-phosphate
  modified_base 8: mod_base = OTHER; note = 2'-deoxy-2'-fluorocytidine-3'-phosphate
  modified_base 9: mod_base = OTHER; note = 2'-deoxy-2'-fluorocytidine-3'-phosphate
  modified_base 10: mod_base = OTHER; note = 2'-O-methyluridine-3'-phosphate
  modified_base 11: mod_base = OTHER; note = 2'-O-methyluridine-3'-phosphate
  modified_base 12: mod_base = OTHER; note = 2'-O-methylguanosine-3'-phosphate
  modified_base 13: mod_base = OTHER; note = 2'-O-methylguanosine-3'-phosphate
  modified_base 14: mod_base = OTHER; note = 2'-deoxy-2'-fluorouridine-3'-phosphate
  modified_base 15: mod_base = OTHER; note = 2'-O-methylguanosine-3'-phosphate
  modified_base 16: mod_base = OTHER; note = 2'-deoxy-2'-fluoroguanosine-3'-phosphate
  modified_base 17: mod_base = OTHER; note = 2'-O-methylguanosine-3'-phosphate
  modified_base 18: mod_base = OTHER; note = 2'-O-methyladenosine-3'-phosphate
  modified_base 19: mod_base = OTHER; note = 2'-O-methyladenosine-3'-phosphate
  modified_base 20: mod_base = OTHER; note = 2'-O-methyluridine-3'-phosphate
  modified_base 21: mod_base = OTHER; note = 2'-O-methylcytidine-3'-phosphorothioate
  modified_base 22: mod_base = OTHER; note = 2'-O-methylcytidine-3'-phosphorothioate
  modified_base 23: mod_base = OTHER; note = 2'-O-methylcytidine
ttgaagaccttggtgggaatccc

SEQ ID NO: 2286 - RNA, 23 nt, synthetic construct
  source 1..23: mol_type = other RNA
  modified_base 1: mod_base = OTHER; note = 2'-O-methyluridine-3'-phosphorothioate 5'-(E)-Vinylphosphonate
  modified_base 2: mod_base = OTHER; note = 2'-deoxy-2'-fluorouridine-3'-phosphorothioate
  modified_base 3: mod_base = OTHER; note = 2'-O-methyluridine-3'-phosphate
  modified_base 4: mod_base = OTHER; note = 2'-O-methylcytidine-3'-phosphate
  modified_base 5: mod_base = OTHER; note = 2'-O-methyluridine-3'-phosphate
  modified_base 6: mod_base = OTHER; note = 2'-deoxy-2'-fluorocytidine-3'-phosphate
  modified_base 7: mod_base = OTHER; note = 2'-O-methylcytidine-3'-phosphate
  modified_base 8: mod_base = OTHER; note = 2'-deoxy-2'-fluoroadenosine-3'-phosphate
  modified_base 9: mod_base = OTHER; note = 2'-deoxy-2'-fluoroguanosine-3'-phosphate
  modified_base 10: mod_base = OTHER; note = 2'-O-methylguanosine-3'-phosphate
  modified_base 11: mod_base = OTHER; note = 2'-O-methyluridine-3'-phosphate
  modified_base 12: mod_base = OTHER; note = 2'-O-methylcytidine-3'-phosphate
  modified_base 13: mod_base = OTHER; note = 2'-O-methylguanosine-3'-phosphate
  modified_base 14: mod_base = OTHER; note = 2'-deoxy-2'-fluorouridine-3'-phosphate
  modified_base 15: mod_base = OTHER; note = 2'-O-methyluridine-3'-phosphate
  modified_base 16: mod_base = OTHER; note = 2'-deoxy-2'-fluoroguanosine-3'-phosphate
  modified_base 17: mod_base = OTHER; note = 2'-O-methylguanosine-3'-phosphate
  modified_base 18: mod_base = OTHER; note = 2'-O-methyladenosine-3'-phosphate
  modified_base 19: mod_base = OTHER; note = 2'-O-methyluridine-3'-phosphate
  modified_base 20: mod_base = OTHER; note = 2'-O-methyladenosine-3'-phosphate
  modified_base 21: mod_base = OTHER; note = 2'-O-methyluridine-3'-phosphorothioate
  modified_base 22: mod_base = OTHER; note = 2'-O-methyluridine-3'-phosphorothioate
  modified_base 23: mod_base = OTHER; note = 2'-O-methyluridine
tttctccaggtcgttggatattt

SEQ ID NO: 2287 - RNA, 23 nt, synthetic construct
  source 1..23: mol_type = other RNA
  modified_base 1: mod_base = OTHER; note = 2'-O-methyluridine-3'-phosphorothioate 5'-(E)-Vinylphosphonate
  modified_base 2: mod_base = OTHER; note = 2'-deoxy-2'-fluorouridine-3'-phosphorothioate
  modified_base 3: mod_base = OTHER; note = 2'-O-methyluridine-3'-phosphate
  modified_base 4: mod_base = OTHER; note = 2'-O-methylcytidine-3'-phosphate
  modified_base 5: mod_base = OTHER; note = 2'-O-methyladenosine-3'-phosphate
  modified_base 6: mod_base = OTHER; note = 2'-deoxy-2'-fluoroadenosine-3'-phosphate
  modified_base 7: mod_base = OTHER; note = 2'-O-methylguanosine-3'-phosphate
  modified_base 8: mod_base = OTHER; note = 2'-deoxy-2'-fluoroguanosine-3'-phosphate
  modified_base 9: mod_base = OTHER; note = 2'-deoxy-2'-fluorouridine-3'-phosphate
  modified_base 10: mod_base = OTHER; note = 2'-O-methylcytidine-3'-phosphate
  modified_base 11: mod_base = OTHER; note = 2'-O-methylcytidine-3'-phosphate
  modified_base 12: mod_base = OTHER; note = 2'-O-methylcytidine-3'-phosphate
  modified_base 13: mod_base = OTHER; note = 2'-O-methyluridine-3'-phosphate
  modified_base 14: mod_base = OTHER; note = 2'-deoxy-2'-fluorouridine-3'-phosphate
  modified_base 15: mod_base = OTHER; note = 2'-O-methylcytidine-3'-phosphate
  modified_base 16: mod_base = OTHER; note = 2'-deoxy-2'-fluoroadenosine-3'-phosphate
  modified_base 17: mod_base = OTHER; note = 2'-O-methylguanosine-3'-phosphate
  modified_base 18: mod_base = OTHER; note = 2'-O-methylcytidine-3'-phosphate
  modified_base 19: mod_base = OTHER; note = 2'-O-methyladenosine-3'-phosphate
  modified_base 20: mod_base = OTHER; note = 2'-O-methyluridine-3'-phosphate
  modified_base 21: mod_base = OTHER; note = 2'-O-methylguanosine-3'-phosphorothioate
  modified_base 22: mod_base = OTHER; note = 2'-O-methylguanosine-3'-phosphorothioate
  modified_base 23: mod_base = OTHER; note = 2'-O-methylcytidine
tttcaaggtcccttcagcatggc

SEQ ID NO: 2288 - RNA, 23 nt, synthetic construct
  source 1..23: mol_type = other RNA
  modified_base 1: mod_base = OTHER; note = 2'-O-methyluridine-3'-phosphorothioate 5'-(E)-Vinylphosphonate
  modified_base 2: mod_base = OTHER; note = 2'-deoxy-2'-fluorouridine-3'-phosphorothioate
  modified_base 3: mod_base = OTHER; note = 2'-O-methyluridine-3'-phosphate
  modified_base 4: mod_base = OTHER; note = 2'-O-methylcytidine-3'-phosphate
  modified_base 5: mod_base = OTHER; note = 2'-O-methyluridine-3'-phosphate
  modified_base 6: mod_base = OTHER; note = 2'-deoxy-2'-fluorocytidine-3'-phosphate
  modified_base 7: mod_base = OTHER; note = 2'-O-methylcytidine-3'-phosphate
  modified_base 8: mod_base = OTHER; note = 2'-deoxy-2'-fluoroadenosine-3'-phosphate
  modified_base 9: mod_base = OTHER; note = 2'-deoxy-2'-fluoroguanosine-3'-phosphate
  modified_base 10: mod_base = OTHER; note = 2'-O-methylcytidine-3'-phosphate
  modified_base 11: mod_base = OTHER; note = 2'-O-methylcytidine-3'-phosphate
  modified_base 12: mod_base = OTHER; note = 2'-O-methyluridine-3'-phosphate
  modified_base 13: mod_base = OTHER; note = 2'-O-methyladenosine-3'-phosphate
  modified_base 14: mod_base = OTHER; note = 2'-deoxy-2'-fluorouridine-3'-phosphate
  modified_base 15: mod_base = OTHER; note = 2'-O-methyladenosine-3'-phosphate
  modified_base 16: mod_base = OTHER; note = 2'-deoxy-2'-fluoroguanosine-3'-phosphate
  modified_base 17: mod_base = OTHER; note = 2'-O-methylcytidine-3'-phosphate
  modified_base 18: mod_base = OTHER; note = 2'-O-methyladenosine-3'-phosphate
  modified_base 19: mod_base = OTHER; note = 2'-O-methylcytidine-3'-phosphate
  modified_base 20: mod_base = OTHER; note = 2'-O-methylcytidine-3'-phosphate
  modified_base 21: mod_base = OTHER; note = 2'-O-methyladenosine-3'-phosphorothioate
  modified_base 22: mod_base = OTHER; note = 2'-O-methylguanosine-3'-phosphorothioate
  modified_base 23: mod_base = OTHER; note = 2'-O-methyluridine
tttctccagcctatagcaccagt

SEQ ID NO: 2289 - RNA, 23 nt, synthetic construct
  source 1..23: mol_type = other RNA
  modified_base 1: mod_base = OTHER; note = 2'-O-methyluridine-3'-phosphorothioate 5'-(E)-Vinylphosphonate
  modified_base 2: mod_base = OTHER; note = 2'-deoxy-2'-fluoroadenosine-3'-phosphorothioate
  modified_base 3: mod_base = OTHER; note = 2'-O-methylguanosine-3'-phosphate
  modified_base 4: mod_base = OTHER; note = 2'-O-methyluridine-3'-phosphate
  modified_base 5: mod_base = OTHER; note = 2'-O-methyluridine-3'-phosphate
  modified_base 6: mod_base = OTHER; note = 2'-deoxy-2'-fluorocytidine-3'-phosphate
  modified_base 7: mod_base = OTHER; note = 2'-O-methylcytidine-3'-phosphate
  modified_base 8: mod_base = OTHER; note = 2'-deoxy-2'-fluorouridine-3'-phosphate
  modified_base 9: mod_base = OTHER; note = 2'-deoxy-2'-fluoroguanosine-3'-phosphate
  modified_base 10: mod_base = OTHER; note = 2'-O-methylcytidine-3'-phosphate
  modified_base 11: mod_base = OTHER; note = 2'-O-methylguanosine-3'-phosphate
  modified_base 12: mod_base = OTHER; note = 2'-O-methyluridine-3'-phosphate
  modified_base 13: mod_base = OTHER; note = 2'-O-methylguanosine-3'-phosphate
  modified_base 14: mod_base = OTHER; note = 2'-deoxy-2'-fluorouridine-3'-phosphate
  modified_base 15: mod_base = OTHER; note = 2'-O-methylguanosine-3'-phosphate
  modified_base 16: mod_base = OTHER; note = 2'-deoxy-2'-fluorouridine-3'-phosphate
  modified_base 17: mod_base = OTHER; note = 2'-O-methylguanosine-3'-phosphate
  modified_base 18: mod_base = OTHER; note = 2'-O-methylguanosine-3'-phosphate
  modified_base 19: mod_base = OTHER; note = 2'-O-methyladenosine-3'-phosphate
  modified_base 20: mod_base = OTHER; note = 2'-O-methyluridine-3'-phosphate
  modified_base 21: mod_base = OTHER; note = 2'-O-methylguanosine-3'-phosphorothioate
  modified_base 22: mod_base = OTHER; note = 2'-O-methyluridine-3'-phosphorothioate
  modified_base 23: mod_base = OTHER; note = 2'-O-methylguanosine
tagttcctgcgtgtgtggatgtg

SEQ ID NO: 2290 - RNA, 23 nt, synthetic construct
  source 1..23: mol_type = other RNA
  modified_base 1: mod_base = OTHER; note = 2'-O-methyluridine-3'-phosphorothioate 5'-(E)-Vinylphosphonate
  modified_base 2: mod_base = OTHER; note = 2'-deoxy-2'-fluorouridine-3'-phosphorothioate
  modified_base 3: mod_base = OTHER; note = 2'-O-methylguanosine-3'-phosphate
  modified_base 4: mod_base = OTHER; note = 2'-O-methylguanosine-3'-phosphate
  modified_base 5: mod_base = OTHER; note = 2'-O-methyladenosine-3'-phosphate
  modified_base 6: mod_base = OTHER; note = 2'-deoxy-2'-fluoroguanosine-3'-phosphate
  modified_base 7: mod_base = OTHER; note = 2'-O-methyladenosine-3'-phosphate
  modified_base 8: mod_base = OTHER; note = 2'-deoxy-2'-fluorouridine-3'-phosphate
  modified_base 9: mod_base = OTHER; note = 2'-deoxy-2'-fluorocytidine-3'-phosphate
  modified_base 10: mod_base = OTHER; note = 2'-O-methylcytidine-3'-phosphate
  modified_base 11: mod_base = OTHER; note = 2'-O-methyladenosine-3'-phosphate
  modified_base 12: mod_base = OTHER; note = 2'-O-methylcytidine-3'-phosphate
  modified_base 13: mod_base = OTHER; note = 2'-O-methyluridine-3'-phosphate
  modified_base 14: mod_base = OTHER; note = 2'-deoxy-2'-fluorocytidine-3'-phosphate
  modified_base 15: mod_base = OTHER; note = 2'-O-methyladenosine-3'-phosphate
  modified_base 16: mod_base = OTHER; note = 2'-deoxy-2'-fluoroguanosine-3'-phosphate
  modified_base 17: mod_base = OTHER; note = 2'-O-methylguanosine-3'-phosphate
  modified_base 18: mod_base = OTHER; note = 2'-O-methylguanosine-3'-phosphate
  modified_base 19: mod_base = OTHER; note = 2'-O-methylcytidine-3'-phosphate
  modified_base 20: mod_base = OTHER; note = 2'-O-methyladenosine-3'-phosphate
  modified_base 21: mod_base = OTHER; note = 2'-O-methyladenosine-3'-phosphorothioate
  modified_base 22: mod_base = OTHER; note = 2'-O-methylcytidine-3'-phosphorothioate
  modified_base 23: mod_base = OTHER; note = 2'-O-methyladenosine
ttggagatccactcagggcaaca

SEQ ID NO: 2291 - RNA, 23 nt, synthetic construct
  source 1..23: mol_type = other RNA
  modified_base 1: mod_base = OTHER; note = 2'-O-methyluridine-3'-phosphorothioate 5'-(E)-Vinylphosphonate
  modified_base 2: mod_base = OTHER; note = 2'-deoxy-2'-fluorouridine-3'-phosphorothioate
  modified_base 3: mod_base = OTHER; note = 2'-O-methyluridine-3'-phosphate
  modified_base 4: mod_base = OTHER; note = 2'-O-methylguanosine-3'-phosphate
  modified_base 5: mod_base = OTHER; note = 2'-O-methylguanosine-3'-phosphate
  modified_base 6: mod_base = OTHER; note = 2'-deoxy-2'-fluorocytidine-3'-phosphate
  modified_base 7: mod_base = OTHER; note = 2'-O-methyladenosine-3'-phosphate
  modified_base 8: mod_base = OTHER; note = 2'-deoxy-2'-fluorocytidine-3'-phosphate
  modified_base 9: mod_base = OTHER; note = 2'-deoxy-2'-fluoroadenosine-3'-phosphate
  modified_base 10: mod_base = OTHER; note = 2'-O-methyluridine-3'-phosphate
  modified_base 11: mod_base = OTHER; note = 2'-O-methylguanosine-3'-phosphate
  modified_base 12: mod_base = OTHER; note = 2'-O-methylguanosine-3'-phosphate
  modified_base 13: mod_base = OTHER; note = 2'-O-methylguanosine-3'-phosphate
  modified_base 14: mod_base = OTHER; note = 2'-deoxy-2'-fluorouridine-3'-phosphate
  modified_base 15: mod_base = OTHER; note = 2'-O-methylguanosine-3'-phosphate
  modified_base 16: mod_base = OTHER; note = 2'-deoxy-2'-fluoroadenosine-3'-phosphate
  modified_base 17: mod_base = OTHER; note = 2'-O-methylguanosine-3'-phosphate
  modified_base 18: mod_base = OTHER; note = 2'-O-methyluridine-3'-phosphate
  modified_base 19: mod_base = OTHER; note = 2'-O-methylguanosine-3'-phosphate
  modified_base 20: mod_base = OTHER; note = 2'-O-methylcytidine-3'-phosphate
  modified_base 21: mod_base = OTHER; note = 2'-O-methylguanosine-3'-phosphorothioate
  modified_base 22: mod_base = OTHER; note = 2'-O-methylguanosine-3'-phosphorothioate
  modified_base 23: mod_base = OTHER; note = 2'-O-methyluridine
tttggcacatgggtgagtgcggt

SEQ ID NO: 2292 - RNA, 23 nt, synthetic construct
  source 1..23: mol_type = other RNA
  modified_base 1: mod_base = OTHER; note = 2'-O-methyluridine-3'-phosphorothioate 5'-(E)-Vinylphosphonate
  modified_base 2: mod_base = OTHER; note = 2'-deoxy-2'-fluorouridine-3'-phosphorothioate
  modified_base 3: mod_base = OTHER; note = 2'-O-methyluridine-3'-phosphate
  modified_base 4: mod_base = OTHER; note = 2'-O-methylcytidine-3'-phosphate
  modified_base 5: mod_base = OTHER; note = 2'-O-methyluridine-3'-phosphate
  modified_base 6: mod_base = OTHER; note = 2'-deoxy-2'-fluorouridine-3'-phosphate
  modified_base 7: mod_base = OTHER; note = 2'-O-methylguanosine-3'-phosphate
  modified_base 8: mod_base = OTHER; note = 2'-deoxy-2'-fluoroguanosine-3'-phosphate
  modified_base 9: mod_base = OTHER; note = 2'-deoxy-2'-fluoroguanosine-3'-phosphate
  modified_base 10: mod_base = OTHER; note = 2'-O-methylcytidine-3'-phosphate
  modified_base 11: mod_base = OTHER; note = 2'-O-methylcytidine-3'-phosphate
  modified_base 12: mod_base = OTHER; note = 2'-O-methyluridine-3'-phosphate
  modified_base 13: mod_base = OTHER; note = 2'-O-methyluridine-3'-phosphate
  modified_base 14: mod_base = OTHER; note = 2'-deoxy-2'-fluoroguanosine-3'-phosphate
  modified_base 15: mod_base = OTHER; note = 2'-O-methylcytidine-3'-phosphate
  modified_base 16: mod_base = OTHER; note = 2'-deoxy-2'-fluoroadenosine-3'-phosphate
  modified_base 17: mod_base = OTHER; note = 2'-O-methyladenosine-3'-phosphate
  modified_base 18: mod_base = OTHER; note = 2'-O-methylcytidine-3'-phosphate
  modified_base 19: mod_base = OTHER; note = 2'-O-methylcytidine-3'-phosphate
  modified_base 20: mod_base = OTHER; note = 2'-O-methylguanosine-3'-phosphate
  modified_base 21: mod_base = OTHER; note = 2'-O-methylcytidine-3'-phosphorothioate
  modified_base 22: mod_base = OTHER; note = 2'-O-methyluridine-3'-phosphorothioate
  modified_base 23: mod_base = OTHER; note = 2'-O-methylguanosine
tttcttgggccttgcaaccgctg

SEQ ID NO: 2293 - RNA, 23 nt, synthetic construct
  source 1..23: mol_type = other RNA
  modified_base 1: mod_base = OTHER; note = 2'-O-methyluridine-3'-phosphorothioate 5'-(E)-Vinylphosphonate
  modified_base 2: mod_base = OTHER; note = 2'-deoxy-2'-fluoroguanosine-3'-phosphorothioate
  modified_base 3: mod_base = OTHER; note = 2'-O-methylguanosine-3'-phosphate
  modified_base 4: mod_base = OTHER; note = 2'-O-methylcytidine-3'-phosphate
  modified_base 5: mod_base = OTHER; note = 2'-O-methylcytidine-3'-phosphate
  modified_base 6: mod_base = OTHER; note = 2'-deoxy-2'-fluoroadenosine-3'-phosphate
  modified_base 7: mod_base = OTHER; note = 2'-O-methylguanosine-3'-phosphate
  modified_base 8: mod_base = OTHER; note = 2'-deoxy-2'-fluoroadenosine-3'-phosphate
  modified_base 9: mod_base = OTHER; note = 2'-deoxy-2'-fluoroadenosine-3'-phosphate
  modified_base 10: mod_base = OTHER; note = 2'-O-methyladenosine-3'-phosphate
  modified_base 11: mod_base = OTHER; note = 2'-O-methylcytidine-3'-phosphate
  modified_base 12: mod_base = OTHER; note = 2'-O-methyluridine-3'-phosphate
  modified_base 13: mod_base = OTHER; note = 2'-O-methyluridine-3'-phosphate
  modified_base 14: mod_base = OTHER; note = 2'-deoxy-2'-fluorocytidine-3'-phosphate
  modified_base 15: mod_base = OTHER; note = 2'-O-methyluridine-3'-phosphate
  modified_base 16: mod_base = OTHER; note = 2'-deoxy-2'-fluorocytidine-3'-phosphate
  modified_base 17: mod_base = OTHER; note = 2'-O-methyluridine-3'-phosphate
  modified_base 18: mod_base = OTHER; note = 2'-O-methylcytidine-3'-phosphate
  modified_base 19: mod_base = OTHER; note = 2'-O-methylcytidine-3'-phosphate
  modified_base 20: mod_base = OTHER; note = 2'-O-methyladenosine-3'-phosphate
  modified_base 21: mod_base = OTHER; note = 2'-O-methylguanosine-3'-phosphorothioate
  modified_base 22: mod_base = OTHER; note = 2'-O-methylguanosine-3'-phosphorothioate
  modified_base 23: mod_base = OTHER; note = 2'-O-methylguanosine
tggccagaaacttctctccaggg

SEQ ID NO: 2294 - RNA, 23 nt, synthetic construct
  source 1..23: mol_type = other RNA
  modified_base 1: mod_base = OTHER; note = 2'-O-methyluridine-3'-phosphorothioate 5'-(E)-Vinylphosphonate
  modified_base 2: mod_base = OTHER; note = 2'-deoxy-2'-fluoroadenosine-3'-phosphorothioate
  modified_base 3: mod_base = OTHER; note = 2'-O-methylcytidine-3'-phosphate
  modified_base 4: mod_base = OTHER; note = 2'-O-methyladenosine-3'-phosphate
  modified_base 5: mod_base = OTHER; note = 2'-O-methylguanosine-3'-phosphate
  modified_base 6: mod_base = OTHER; note = 2'-deoxy-2'-fluoroguanosine-3'-phosphate
  modified_base 7: mod_base = OTHER; note = 2'-O-methylcytidine-3'-phosphate
  modified_base 8: mod_base = OTHER; note = 2'-deoxy-2'-fluorouridine-3'-phosphate
  modified_base 9: mod_base = OTHER; note = 2'-deoxy-2'-fluorouridine-3'-phosphate
  modified_base 10: mod_base = OTHER; note = 2'-O-methylcytidine-3'-phosphate
  modified_base 11: mod_base = OTHER; note = 2'-O-methyluridine-3'-phosphate
  modified_base 12: mod_base = OTHER; note = 2'-O-methylcytidine-3'-phosphate
  modified_base 13: mod_base = OTHER; note = 2'-O-methyluridine-3'-phosphate
  modified_base 14: mod_base = OTHER; note = 2'-deoxy-2'-fluorocytidine-3'-phosphate
  modified_base 15: mod_base = OTHER; note = 2'-O-methyluridine-3'-phosphate
  modified_base 16: mod_base = OTHER; note = 2'-deoxy-2'-fluoroguanosine-3'-phosphate
  modified_base 17: mod_base = OTHER; note = 2'-O-methylcytidine-3'-phosphate
  modified_base 18: mod_base = OTHER; note = 2'-O-methyladenosine-3'-phosphate
  modified_base 19: mod_base = OTHER; note = 2'-O-methylguanosine-3'-phosphate
  modified_base 20: mod_base = OTHER; note = 2'-O-methylguanosine-3'-phosphate
  modified_base 21: mod_base = OTHER; note = 2'-O-methylcytidine-3'-phosphorothioate
  modified_base 22: mod_base = OTHER; note = 2'-O-methyladenosine-3'-phosphorothioate
  modified_base 23: mod_base = OTHER; note = 2'-O-methyladenosine
tacaggcttctctctgcaggcaa

SEQ ID NO: 2295 - RNA, 23 nt, synthetic construct
  source 1..23: mol_type = other RNA
  modified_base 1: mod_base = OTHER; note = 2'-O-methyluridine-3'-phosphorothioate 5'-(E)-Vinylphosphonate
  modified_base 2: mod_base = OTHER; note = 2'-deoxy-2'-fluoroadenosine-3'-phosphorothioate
  modified_base 3: mod_base = OTHER; note = 2'-O-methyladenosine-3'-phosphate
  modified_base 4: mod_base = OTHER; note = 2'-O-methylcytidine-3'-phosphate
  modified_base 5: mod_base = OTHER; note = 2'-O-methylcytidine-3'-phosphate
  modified_base 6: mod_base = OTHER; note = 2'-deoxy-2'-fluorocytidine-3'-phosphate
  modified_base 7: mod_base = OTHER; note = 2'-O-methyluridine-3'-phosphate
  modified_base 8: mod_base = OTHER; note = 2'-deoxy-2'-fluoroguanosine-3'-phosphate
  modified_base 9: mod_base = OTHER; note = 2'-deoxy-2'-fluoroguanosine-3'-phosphate
  modified_base 10: mod_base = OTHER; note = 2'-O-methyladenosine-3'-phosphate
  modified_base 11: mod_base = OTHER; note = 2'-O-methylcytidine-3'-phosphate
  modified_base 12: mod_base = OTHER; note = 2'-O-methylcytidine-3'-phosphate
  modified_base 13: mod_base = OTHER; note = 2'-O-methyladenosine-3'-phosphate
  modified_base 14: mod_base = OTHER; note = 2'-deoxy-2'-fluorouridine-3'-phosphate
  modified_base 15: mod_base = OTHER; note = 2'-O-methyluridine-3'-phosphate
  modified_base 16: mod_base = OTHER; note = 2'-deoxy-2'-fluorocytidine-3'-phosphate
  modified_base 17: mod_base = OTHER; note = 2'-O-methyladenosine-3'-phosphate
  modified_base 18: mod_base = OTHER; note = 2'-O-methylguanosine-3'-phosphate
  modified_base 19: mod_base = OTHER; note = 2'-O-methyladenosine-3'-phosphate
  modified_base 20: mod_base = OTHER; note = 2'-O-methylguanosine-3'-phosphate
  modified_base 21: mod_base = OTHER; note = 2'-O-methylguanosine-3'-phosphorothioate
  modified_base 22: mod_base = OTHER; note = 2'-O-methylguanosine-3'-phosphorothioate
  modified_base 23: mod_base = OTHER; note = 2'-O-methyluridine
taaccctggaccattcagagggt

SEQ ID NO: 2296 - RNA, 23 nt, synthetic construct
  source 1..23: mol_type = other RNA
  modified_base 1: mod_base = OTHER; note = 2'-O-methyluridine-3'-phosphorothioate 5'-(E)-Vinylphosphonate
  modified_base 2: mod_base = OTHER; note = 2'-deoxy-2'-fluoroguanosine-3'-phosphorothioate
  modified_base 3: mod_base = OTHER; note = 2'-O-methylguanosine-3'-phosphate
  modified_base 4: mod_base = OTHER; note = 2'-O-methylcytidine-3'-phosphate
  modified_base 5: mod_base = OTHER; note = 2'-O-methyladenosine-3'-phosphate
  modified_base 6: mod_base = OTHER; note = 2'-deoxy-2'-fluoroguanosine-3'-phosphate
  modified_base 7: mod_base = OTHER; note = 2'-O-methylguanosine-3'-phosphate
  modified_base 8: mod_base = OTHER; note = 2'-deoxy-2'-fluorocytidine-3'-phosphate
  modified_base 9: mod_base = OTHER; note = 2'-deoxy-2'-fluorocytidine-3'-phosphate
  modified_base 10: mod_base = OTHER; note = 2'-O-methyluridine-3'-phosphate
  modified_base 11: mod_base = OTHER; note = 2'-O-methylcytidine-3'-phosphate
  modified_base 12: mod_base = OTHER; note = 2'-O-methyladenosine-3'-phosphate
  modified_base 13: mod_base = OTHER; note = 2'-O-methyladenosine-3'-phosphate
  modified_base 14: mod_base = OTHER; note = 2'-deoxy-2'-fluorouridine-3'-phosphate
  modified_base 15: mod_base = OTHER; note = 2'-O-methylcytidine-3'-phosphate
  modified_base 16: mod_base = OTHER; note = 2'-deoxy-2'-fluorouridine-3'-phosphate
  modified_base 17: mod_base = OTHER; note = 2'-O-methyluridine-3'-phosphate
  modified_base 18: mod_base = OTHER; note = 2'-O-methyladenosine-3'-phosphate
  modified_base 19: mod_base = OTHER; note = 2'-O-methyladenosine-3'-phosphate
  modified_base 20: mod_base = OTHER; note = 2'-O-methyluridine-3'-phosphate
  modified_base 21: mod_base = OTHER; note = 2'-O-methylguanosine-3'-phosphorothioate
  modified_base 22: mod_base = OTHER; note = 2'-O-methyluridine-3'-phosphorothioate
  modified_base 23: mod_base = OTHER; note = 2'-O-methyluridine
tggcaggcctcaatcttaatgtt

SEQ ID NO: 2297 - RNA, 23 nt, synthetic construct
  source 1..23: mol_type = other RNA
  modified_base 1: mod_base = OTHER; note = 2'-O-methyluridine-3'-phosphorothioate 5'-(E)-Vinylphosphonate
  modified_base 2: mod_base = OTHER; note = 2'-deoxy-2'-fluorouridine-3'-phosphorothioate
  modified_base 3: mod_base = OTHER; note = 2'-O-methylcytidine-3'-phosphate
  modified_base 4: mod_base = OTHER; note = 2'-O-methylcytidine-3'-phosphate
  modified_base 5: mod_base = OTHER; note = 2'-O-methyladenosine-3'-phosphate
  modified_base 6: mod_base = OTHER; note = 2'-deoxy-2'-fluoroguanosine-3'-phosphate
  modified_base 7: mod_base = OTHER; note = 2'-O-methyladenosine-3'-phosphate
  modified_base 8: mod_base = OTHER; note = 2'-deoxy-2'-fluoroadenosine-3'-phosphate
  modified_base 9: mod_base = OTHER; note = 2'-deoxy-2'-fluoroadenosine-3'-phosphate
  modified_base 10: mod_base = OTHER; note = 2'-O-methylguanosine-3'-phosphate
  modified_base 11: mod_base = OTHER; note = 2'-O-methylcytidine-3'-phosphate
  modified_base 12: mod_base = OTHER; note = 2'-O-methylguanosine-3'-phosphate
  modified_base 13: mod_base = OTHER; note = 2'-O-methylcytidine-3'-phosphate
  modified_base 14: mod_base = OTHER; note = 2'-deoxy-2'-fluorouridine-3'-phosphate
  modified_base 15: mod_base = OTHER; note = 2'-O-methylcytidine-3'-phosphate
  modified_base 16: mod_base = OTHER; note = 2'-deoxy-2'-fluoroguanosine-3'-phosphate
  modified_base 17: mod_base = OTHER; note = 2'-O-methylguanosine-3'-phosphate
  modified_base 18: mod_base = OTHER; note = 2'-O-methyluridine-3'-phosphate
  modified_base 19: mod_base = OTHER; note = 2'-O-methylcytidine-3'-phosphate
  modified_base 20: mod_base = OTHER; note = 2'-O-methyluridine-3'-phosphate
  modified_base 21: mod_base = OTHER; note = 2'-O-methylcytidine-3'-phosphorothioate
  modified_base 22: mod_base = OTHER; note = 2'-O-methylcytidine-3'-phosphorothioate
  modified_base 23: mod_base = OTHER; note = 2'-O-methylcytidine
ttccagaaagcgctcggtctccc

SEQ ID NO: 2298 - RNA, 23 nt, synthetic construct
  source 1..23: mol_type = other RNA
  modified_base 1: mod_base = OTHER; note = 2'-O-methyluridine-3'-phosphorothioate 5'-(E)-Vinylphosphonate
  modified_base 2: mod_base = OTHER; note = 2'-deoxy-2'-fluorouridine-3'-phosphorothioate
  modified_base 3: mod_base = OTHER; note = 2'-O-methyluridine-3'-phosphate
  modified_base 4: mod_base = OTHER; note = 2'-O-methylcytidine-3'-phosphate
  modified_base 5: mod_base = OTHER; note = 2'-O-methyluridine-3'-phosphate
  modified_base 6: mod_base = OTHER; note = 2'-deoxy-2'-fluorouridine-3'-phosphate
  modified_base 7: mod_base = OTHER; note = 2'-O-methyluridine-3'-phosphate
  modified_base 8: mod_base = OTHER; note = 2'-deoxy-2'-fluorocytidine-3'-phosphate
  modified_base 9: mod_base = OTHER; note = 2'-deoxy-2'-fluorouridine-3'-phosphate
  modified_base 10: mod_base = OTHER; note = 2'-O-methylcytidine-3'-phosphate
  modified_base 11: mod_base = OTHER; note = 2'-O-methyluridine-3'-phosphate
  modified_base 12: mod_base = OTHER; note = 2'-O-methylguanosine-3'-phosphate
  modified_base 13: mod_base = OTHER; note = 2'-O-methylcytidine-3'-phosphate
  modified_base 14: mod_base = OTHER; note = 2'-deoxy-2'-fluorocytidine-3'-phosphate
  modified_base 15: mod_base = OTHER; note = 2'-O-methyluridine-3'-phosphate
  modified_base 16: mod_base = OTHER; note = 2'-deoxy-2'-fluorocytidine-3'-phosphate
  modified_base 17: mod_base = OTHER; note = 2'-O-methyluridine-3'-phosphate
  modified_base 18: mod_base = OTHER; note = 2'-O-methylcytidine-3'-phosphate
  modified_base 19: mod_base = OTHER; note = 2'-O-methylguanosine-3'-phosphate
  modified_base 20: mod_base = OTHER; note = 2'-O-methylcytidine-3'-phosphate
  modified_base 21: mod_base = OTHER; note = 2'-O-methyluridine-3'-phosphorothioate
  modified_base 22: mod_base = OTHER; note = 2'-O-methylguanosine-3'-phosphorothioate
  modified_base 23: mod_base = OTHER; note = 2'-O-methyluridine
tttctttctctgcctctcgctgt

SEQ ID NO: 2299 - RNA, 23 nt, synthetic construct
  source 1..23: mol_type = other RNA
  modified_base 1: mod_base = OTHER; note = 2'-O-methyluridine-3'-phosphorothioate 5'-(E)-Vinylphosphonate
  modified_base 2: mod_base = OTHER; note = 2'-deoxy-2'-fluoroadenosine-3'-phosphorothioate
  modified_base 3: mod_base = OTHER; note = 2'-O-methylcytidine-3'-phosphate
  modified_base 4: mod_base = OTHER; note = 2'-O-methyladenosine-3'-phosphate
  modified_base 5: mod_base = OTHER; note = 2'-O-methylguanosine-3'-phosphate
  modified_base 6: mod_base = OTHER; note = 2'-deoxy-2'-fluorocytidine-3'-phosphate
  modified_base 7: mod_base = OTHER; note = 2'-O-methyladenosine-3'-phosphate
  modified_base 8: mod_base = OTHER; note = 2'-deoxy-2'-fluoroguanosine-3'-phosphate
  modified_base 9: mod_base = OTHER; note = 2'-deoxy-2'-fluorocytidine-3'-phosphate
  modified_base 10: mod_base = OTHER; note = 2'-O-methyladenosine-3'-phosphate
  modified_base 11: mod_base = OTHER; note = 2'-O-methylguanosine-3'-phosphate
  modified_base 12: mod_base = OTHER; note = 2'-O-methylguanosine-3'-phosphate
  modified_base 13: mod_base = OTHER; note = 2'-O-methyladenosine-3'-phosphate
  modified_base 14: mod_base = OTHER; note = 2'-deoxy-2'-fluorouridine-3'-phosphate
  modified_base 15: mod_base = OTHER; note = 2'-O-methylguanosine-3'-phosphate
  modified_base 16: mod_base = OTHER; note = 2'-deoxy-2'-fluoroguanosine-3'-phosphate
  modified_base 17: mod_base = OTHER; note = 2'-O-methyluridine-3'-phosphate
  modified_base 18: mod_base = OTHER; note = 2'-O-methylguanosine-3'-phosphate
  modified_base 19: mod_base = OTHER; note = 2'-O-methylguanosine-3'-phosphate
  modified_base 20: mod_base = OTHER; note = 2'-O-methylcytidine-3'-phosphate
  modified_base 21: mod_base = OTHER; note = 2'-O-methyladenosine-3'-phosphorothioate
  modified_base 22: mod_base = OTHER; note = 2'-O-methylguanosine-3'-phosphorothioate
  modified_base 23: mod_base = OTHER; note = 2'-O-methyladenosine
tacagcagcaggatggtggcaga

SEQ ID NO: 2300 - RNA, 23 nt, synthetic construct
  source 1..23: mol_type = other RNA
  modified_base 1: mod_base = OTHER; note = 2'-O-methyluridine-3'-phosphorothioate 5'-(E)-Vinylphosphonate
  modified_base 2: mod_base = OTHER; note = 2'-deoxy-2'-fluorouridine-3'-phosphorothioate
  modified_base 3: mod_base = OTHER; note = 2'-O-methylguanosine-3'-phosphate
  modified_base 4: mod_base = OTHER; note = 2'-O-methylcytidine-3'-phosphate
  modified_base 5: mod_base = OTHER; note = 2'-O-methyladenosine-3'-phosphate
  modified_base 6: mod_base = OTHER; note = 2'-deoxy-2'-fluoroadenosine-3'-phosphate
  modified_base 7: mod_base = OTHER; note = 2'-O-methylguanosine-3'-phosphate
  modified_base 8: mod_base = OTHER; note = 2'-deoxy-2'-fluoroadenosine-3'-phosphate
  modified_base 9: mod_base = OTHER; note = 2'-deoxy-2'-fluorouridine-3'-phosphate
  modified_base 10: mod_base = OTHER; note = 2'-O-methylcytidine-3'-phosphate
  modified_base 11: mod_base = OTHER; note = 2'-O-methylcytidine-3'-phosphate
  modified_base 12: mod_base = OTHER; note = 2'-O-methylcytidine-3'-phosphate
  modified_base 13: mod_base = OTHER; note = 2'-O-methyluridine-3'-phosphate
  modified_base 14: mod_base = OTHER; note = 2'-deoxy-2'-fluoroguanosine-3'-phosphate
  modified_base 15: mod_base = OTHER; note = 2'-O-methyladenosine-3'-phosphate
  modified_base 16: mod_base = OTHER; note = 2'-deoxy-2'-fluoroguanosine-3'-phosphate
  modified_base 17: mod_base = OTHER; note = 2'-O-methylguanosine-3'-phosphate
  modified_base 18: mod_base = OTHER; note = 2'-O-methylguanosine-3'-phosphate
  modified_base 19: mod_base = OTHER; note = 2'-O-methylcytidine-3'-phosphate
  modified_base 20: mod_base = OTHER; note = 2'-O-methyladenosine-3'-phosphate
  modified_base 21: mod_base = OTHER; note = 2'-O-methylguanosine-3'-phosphorothioate
  modified_base 22: mod_base = OTHER; note = 2'-O-methylguanosine-3'-phosphorothioate
  modified_base 23: mod_base = OTHER; note = 2'-O-methylcytidine
ttgcaagatccctgagggcaggc

SEQ ID NO: 2301 - RNA, 23 nt, synthetic construct
  source 1..23: mol_type = other RNA
  modified_base 1: mod_base = OTHER; note = 2'-O-methyluridine-3'-phosphorothioate 5'-(E)-Vinylphosphonate
  modified_base 2: mod_base = OTHER; note = 2'-deoxy-2'-fluorouridine-3'-phosphorothioate
  modified_base 3: mod_base = OTHER; note = 2'-O-methyluridine-3'-phosphate
  modified_base 4: mod_base = OTHER; note = 2'-O-methyluridine-3'-phosphate
  modified_base 5: mod_base = OTHER; note = 2'-O-methylguanosine-3'-phosphate
  modified_base 6: mod_base = OTHER; note = 2'-deoxy-2'-fluoroguanosine-3'-phosphate
  modified_base 7: mod_base = OTHER; note = 2'-O-methyladenosine-3'-phosphate
  modified_base 8: mod_base = OTHER; note = 2'-deoxy-2'-fluorouridine-3'-phosphate
  modified_base 9: mod_base = OTHER; note = 2'-deoxy-2'-fluoroguanosine-3'-phosphate
  modified_base 10: mod_base = OTHER; note = 2'-O-methylguanosine-3'-phosphate
  modified_base 11: mod_base = OTHER; note = 2'-O-methylguanosine-3'-phosphate
  modified_base 12: mod_base = OTHER; note = 2'-O-methylcytidine-3'-phosphate
  modified_base 13: mod_base = OTHER; note = 2'-O-methyladenosine-3'-phosphate
  modified_base 14: mod_base = OTHER; note = 2'-deoxy-2'-fluorocytidine-3'-phosphate
  modified_base 15: mod_base = OTHER; note = 2'-O-methyladenosine-3'-phosphate
  modified_base 16: mod_base = OTHER; note = 2'-deoxy-2'-fluoroguanosine-3'-phosphate
  modified_base 17: mod_base = OTHER; note = 2'-O-methylcytidine-3'-phosphate
  modified_base 18: mod_base = OTHER; note = 2'-O-methyluridine-3'-phosphate
  modified_base 19: mod_base = OTHER; note = 2'-O-methyluridine-3'-phosphate
  modified_base 20: mod_base = OTHER; note = 2'-O-methylguanosine-3'-phosphate
  modified_base 21: mod_base = OTHER; note = 2'-O-methylguanosine-3'-phosphorothioate
  modified_base 22: mod_base = OTHER; note = 2'-O-methyladenosine-3'-phosphorothioate
  modified_base 23: mod_base = OTHER; note = 2'-O-methylcytidine
ttttggatgggcacagcttggac

SEQ ID NO: 2302 - RNA, 23 nt, synthetic construct
  source 1..23: mol_type = other RNA
  modified_base 1: mod_base = OTHER; note = 2'-O-methyluridine-3'-phosphorothioate 5'-(E)-Vinylphosphonate
  modified_base 2: mod_base = OTHER; note = 2'-deoxy-2'-fluorouridine-3'-phosphorothioate
  modified_base 3: mod_base = OTHER; note = 2'-O-methylguanosine-3'-phosphate
  modified_base 4: mod_base = OTHER; note = 2'-O-methylcytidine-3'-phosphate
  modified_base 5: mod_base = OTHER; note = 2'-O-methyladenosine-3'-phosphate
  modified_base 6: mod_base = OTHER; note = 2'-deoxy-2'-fluoroadenosine-3'-phosphate
  modified_base 7: mod_base = OTHER; note = 2'-O-methylguanosine-3'-phosphate
  modified_base 8: mod_base = OTHER; note = 2'-deoxy-2'-fluorocytidine-3'-phosphate
  modified_base 9: mod_base = OTHER; note = 2'-deoxy-2'-fluoroadenosine-3'-phosphate
  modified_base 10: mod_base = OTHER; note = 2'-O-methylguanosine-3'-phosphate
  modified_base 11: mod_base = OTHER; note = 2'-O-methylguanosine-3'-phosphate
  modified_base 12: mod_base = OTHER; note = 2'-O-methylguanosine-3'-phosphate
  modified_base 13: mod_base = OTHER; note = 2'-O-methyluridine-3'-phosphate
  modified_base 14: mod_base = OTHER; note = 2'-deoxy-2'-fluorouridine-3'-phosphate
  modified_base 15: mod_base = OTHER; note = 2'-O-methylcytidine-3'-phosphate
  modified_base 16: mod_base = OTHER; note = 2'-deoxy-2'-fluorocytidine-3'-phosphate
  modified_base 17: mod_base = OTHER; note = 2'-O-methylcytidine-3'-phosphate
  modified_base 18: mod_base = OTHER; note = 2'-O-methyluridine-3'-phosphate
  modified_base 19: mod_base = OTHER; note = 2'-O-methylguanosine-3'-phosphate
  modified_base 20: mod_base = OTHER; note = 2'-O-methyluridine-3'-phosphate
  modified_base 21: mod_base = OTHER; note = 2'-O-methylguanosine-3'-phosphorothioate
  modified_base 22: mod_base = OTHER; note = 2'-O-methylguanosine-3'-phosphorothioate
  modified_base 23: mod_base = OTHER; note = 2'-O-methylguanosine
ttgcaagcagggttccctgtggg

SEQ ID NO: 2303 - RNA, 23 nt, synthetic construct
  source 1..23: mol_type = other RNA
  modified_base 1: mod_base = OTHER; note = 2'-O-methyluridine-3'-phosphorothioate 5'-(E)-Vinylphosphonate
  modified_base 2: mod_base = OTHER; note = 2'-deoxy-2'-fluorouridine-3'-phosphorothioate
  modified_base 3: mod_base = OTHER; note = 2'-O-methyladenosine-3'-phosphate
  modified_base 4: mod_base = OTHER; note = 2'-O-methyluridine-3'-phosphate
  modified_base 5: mod_base = OTHER; note = 2'-O-methylcytidine-3'-phosphate
  modified_base 6: mod_base = OTHER; note = 2'-deoxy-2'-fluoroadenosine-3'-phosphate
  modified_base 7: mod_base = OTHER; note = 2'-O-methylguanosine-3'-phosphate
  modified_base 8: mod_base = OTHER; note = 2'-deoxy-2'-fluoroadenosine-3'-phosphate
  modified_base 9: mod_base = OTHER; note = 2'-deoxy-2'-fluoroguanosine-3'-phosphate
  modified_base 10: mod_base = OTHER; note = 2'-O-methylguanosine-3'-phosphate
  modified_base 11: mod_base = OTHER; note = 2'-O-methyladenosine-3'-phosphate
  modified_base 12: mod_base = OTHER; note = 2'-O-methylcytidine-3'-phosphate
  modified_base 13: mod_base = OTHER; note = 2'-O-methylcytidine-3'-phosphate
  modified_base 14: mod_base = OTHER; note = 2'-deoxy-2'-fluorouridine-3'-phosphate
  modified_base 15: mod_base = OTHER; note = 2'-O-methylguanosine-3'-phosphate
  modified_base 16: mod_base = OTHER; note = 2'-deoxy-2'-fluoroguanosine-3'-phosphate
  modified_base 17: mod_base = OTHER; note = 2'-O-methylguanosine-3'-phosphate
  modified_base 18: mod_base = OTHER; note = 2'-O-methylcytidine-3'-phosphate
  modified_base 19: mod_base = OTHER; note = 2'-O-methyluridine-3'-phosphate
  modified_base 20: mod_base = OTHER; note = 2'-O-methyladenosine-3'-phosphate
  modified_base 21: mod_base = OTHER; note = 2'-O-methyluridine-3'-phosphorothioate
  modified_base 22: mod_base = OTHER; note = 2'-O-methyladenosine-3'-phosphorothioate
  modified_base 23: mod_base = OTHER; note = 2'-O-methylguanosine
ttatcagaggacctgggctatag

SEQ ID NO: 2304 - RNA, 23 nt, synthetic construct
  source 1..23: mol_type = other RNA
  modified_base 1: mod_base = OTHER; note = 2'-O-methyluridine-3'-phosphorothioate 5'-(E)-Vinylphosphonate
  modified_base 2: mod_base = OTHER; note = 2'-deoxy-2'-fluoroadenosine-3'-phosphorothioate
  modified_base 3: mod_base = OTHER; note = 2'-O-methylcytidine-3'-phosphate
  modified_base 4: mod_base = OTHER; note = 2'-O-methyladenosine-3'-phosphate
  modified_base 5: mod_base = OTHER; note = 2'-O-methylguanosine-3'-phosphate
  modified_base 6: mod_base = OTHER; note = 2'-deoxy-2'-fluorocytidine-3'-phosphate
  modified_base 7: mod_base = OTHER; note = 2'-O-methyladenosine-3'-phosphate
  modified_base 8: mod_base = OTHER; note = 2'-deoxy-2'-fluorouridine-3'-phosphate
  modified_base 9: mod_base = OTHER; note = 2'-deoxy-2'-fluoroguanosine-3'-phosphate
  modified_base 10: mod_base = OTHER; note = 2'-O-methyluridine-3'-phosphate
  modified_base 11: mod_base = OTHER; note = 2'-O-methylcytidine-3'-phosphate
  modified_base 12: mod_base = OTHER; note = 2'-O-methylcytidine-3'-phosphate
  modified_base 13: mod_base = OTHER; note = 2'-O-methyluridine-3'-phosphate
  modified_base 14: mod_base = OTHER; note = 2'-deoxy-2'-fluoroguanosine-3'-phosphate
  modified_base 15: mod_base = OTHER; note = 2'-O-methylcytidine-3'-phosphate
  modified_base 16: mod_base = OTHER; note = 2'-deoxy-2'-fluoroadenosine-3'-phosphate
  modified_base 17: mod_base = OTHER; note = 2'-O-methylguanosine-3'-phosphate
  modified_base 18: mod_base = OTHER; note = 2'-O-methyladenosine-3'-phosphate
  modified_base 19: mod_base = OTHER; note = 2'-O-methylguanosine-3'-phosphate
  modified_base 20: mod_base = OTHER; note = 2'-O-methyladenosine-3'-phosphate
  modified_base 21: mod_base = OTHER; note = 2'-O-methylcytidine-3'-phosphorothioate
  modified_base 22: mod_base = OTHER; note = 2'-O-methylcytidine-3'-phosphorothioate
  modified_base 23: mod_base = OTHER; note = 2'-O-methylcytidine
tacagcatgtcctgcagagaccc

SEQ ID NO: 2305 - RNA, 23 nt, synthetic construct
  source 1..23: mol_type = other RNA
  modified_base 1: mod_base = OTHER; note = 2'-O-methyluridine-3'-phosphorothioate 5'-(E)-Vinylphosphonate
  modified_base 2: mod_base = OTHER; note = 2'-deoxy-2'-fluoroadenosine-3'-phosphorothioate
  modified_base 3: mod_base = OTHER; note = 2'-O-methylguanosine-3'-phosphate
  modified_base 4: mod_base = OTHER; note = 2'-O-methyluridine-3'-phosphate
  modified_base 5: mod_base = OTHER; note = 2'-O-methylcytidine-3'-phosphate
  modified_base 6: mod_base = OTHER; note = 2'-deoxy-2'-fluoroadenosine-3'-phosphate
  modified_base 7: mod_base = OTHER; note = 2'-O-methylcytidine-3'-phosphate
  modified_base 8: mod_base = OTHER; note = 2'-deoxy-2'-fluorocytidine-3'-phosphate
  modified_base 9: mod_base = OTHER; note = 2'-deoxy-2'-fluoroadenosine-3'-phosphate
  modified_base 10: mod_base = OTHER; note = 2'-O-methylguanosine-3'-phosphate
  modified_base 11: mod_base = OTHER; note = 2'-O-methyluridine-3'-phosphate
  modified_base 12: mod_base = OTHER; note = 2'-O-methylguanosine-3'-phosphate
  modified_base 13: mod_base = OTHER; note = 2'-O-methyluridine-3'-phosphate
  modified_base 14: mod_base = OTHER; note = 2'-deoxy-2'-fluoroguanosine-3'-phosphate
  modified_base 15: mod_base = OTHER; note = 2'-O-methylguanosine-3'-phosphate
  modified_base 16: mod_base = OTHER; note = 2'-deoxy-2'-fluoroguanosine-3'-phosphate
  modified_base 17: mod_base = OTHER; note = 2'-O-methyladenosine-3'-phosphate
  modified_base 18: mod_base = OTHER; note = 2'-O-methylcytidine-3'-phosphate
  modified_base 19: mod_base = OTHER; note = 2'-O-methylcytidine-3'-phosphate
  modified_base 20: mod_base = OTHER; note = 2'-O-methylguanosine-3'-phosphate
  modified_base 21: mod_base = OTHER; note = 2'-O-methyluridine-3'-phosphorothioate
  modified_base 22: mod_base = OTHER; note = 2'-O-methylcytidine-3'-phosphorothioate
  modified_base 23: mod_base = OTHER; note = 2'-O-methyladenosine
tagtcaccagtgtgggaccgtca

SEQ ID NO: 2306 - RNA, 23 nt, synthetic construct
  source 1..23: mol_type = other RNA
  modified_base 1: mod_base = OTHER; note = 2'-O-methyluridine-3'-phosphorothioate 5'-(E)-Vinylphosphonate
  modified_base 2: mod_base = OTHER; note = 2'-deoxy-2'-fluoroadenosine-3'-phosphorothioate
  modified_base 3: mod_base = OTHER; note = 2'-O-methyladenosine-3'-phosphate
  modified_base 4: mod_base = OTHER; note = 2'-O-methyluridine-3'-phosphate
  modified_base 5: mod_base = OTHER; note = 2'-O-methylcytidine-3'-phosphate
  modified_base 6: mod_base = OTHER; note = 2'-deoxy-2'-fluorocytidine-3'-phosphate
  modified_base 7: mod_base = OTHER; note = 2'-O-methylcytidine-3'-phosphate
  modified_base 8: mod_base = OTHER; note = 2'-deoxy-2'-fluoroadenosine-3'-phosphate
  modified_base 9: mod_base = OTHER; note = 2'-deoxy-2'-fluoroguanosine-3'-phosphate
  modified_base 10: mod_base = OTHER; note = 2'-O-methyladenosine-3'-phosphate
  modified_base 11: mod_base = OTHER; note = 2'-O-methyluridine-3'-phosphate
  modified_base 12: mod_base = OTHER; note = 2'-O-methylguanosine-3'-phosphate
  modified_base 13: mod_base = OTHER; note = 2'-O-methylcytidine-3'-phosphate
  modified_base 14: mod_base = OTHER; note = 2'-deoxy-2'-fluoroadenosine-3'-phosphate
  modified_base 15: mod_base = OTHER; note = 2'-O-methylguanosine-3'-phosphate
  modified_base 16: mod_base = OTHER; note = 2'-deoxy-2'-fluorocytidine-3'-phosphate
  modified_base 17: mod_base = OTHER; note = 2'-O-methylcytidine-3'-phosphate
  modified_base 18: mod_base = OTHER; note = 2'-O-methylcytidine-3'-phosphate
  modified_base 19: mod_base = OTHER; note = 2'-O-methyladenosine-3'-phosphate
  modified_base 20: mod_base = OTHER; note = 2'-O-methylcytidine-3'-phosphate
  modified_base 21: mod_base = OTHER; note = 2'-O-methyluridine-3'-phosphorothioate
  modified_base 22: mod_base = OTHER; note = 2'-O-methylcytidine-3'-phosphorothioate
  modified_base 23: mod_base = OTHER; note = 2'-O-methyluridine
taatcccagatgcagcccactct

SEQ ID NO: 2307 - RNA, 23 nt, synthetic construct
  source 1..23: mol_type = other RNA
  modified_base 1: mod_base = OTHER; note = 2'-O-methyluridine-3'-phosphorothioate 5'-(E)-Vinylphosphonate
  modified_base 2: mod_base = OTHER; note = 2'-deoxy-2'-fluorouridine-3'-phosphorothioate
  modified_base 3: mod_base = OTHER; note = 2'-O-methylguanosine-3'-phosphate
  modified_base 4: mod_base = OTHER; note = 2'-O-methyluridine-3'-phosphate
  modified_base 5: mod_base = OTHER; note = 2'-O-methylguanosine-3'-phosphate
  modified_base 6: mod_base = OTHER; note = 2'-deoxy-2'-fluoroadenosine-3'-phosphate
  modified_base 7: mod_base = OTHER; note = 2'-O-methylcytidine-3'-phosphate
  modified_base 8: mod_base = OTHER; note = 2'-deoxy-2'-fluorocytidine-3'-phosphate
  modified_base 9: mod_base = OTHER; note = 2'-deoxy-2'-fluorouridine-3'-phosphate
  modified_base 10: mod_base = OTHER; note = 2'-O-methylcytidine-3'-phosphate
  modified_base 11: mod_base = OTHER; note = 2'-O-methylcytidine-3'-phosphate
  modified_base 12: mod_base = OTHER; note = 2'-O-methyladenosine-3'-phosphate
  modified_base 13: mod_base = OTHER; note = 2'-O-methylguanosine-3'-phosphate
  modified_base 14: mod_base = OTHER; note = 2'-deoxy-2'-fluorouridine-3'-phosphate
  modified_base 15: mod_base = OTHER; note = 2'-O-methylguanosine-3'-phosphate
  modified_base 16: mod_base = OTHER; note = 2'-deoxy-2'-fluoroguanosine-3'-phosphate
  modified_base 17: mod_base = OTHER; note = 2'-O-methylguanosine-3'-phosphate
  modified_base 18: mod_base = OTHER; note = 2'-O-methyladenosine-3'-phosphate
  modified_base 19: mod_base = OTHER; note = 2'-O-methyladenosine-3'-phosphate
  modified_base 20: mod_base = OTHER; note = 2'-O-methylguanosine-3'-phosphate
  modified_base 21: mod_base = OTHER; note = 2'-O-methylguanosine-3'-phosphorothioate
  modified_base 22: mod_base = OTHER; note = 2'-O-methylguanosine-3'-phosphorothioate
  modified_base 23: mod_base = OTHER; note = 2'-O-methylcytidine
ttgtgacctccagtgggaagggc

SEQ ID NO: 2308 - RNA, 23 nt, synthetic construct
  source 1..23: mol_type = other RNA
  modified_base 1: mod_base = OTHER; note = 2'-O-methyluridine-3'-phosphorothioate 5'-(E)-Vinylphosphonate
  modified_base 2: mod_base = OTHER; note = 2'-deoxy-2'-fluorouridine-3'-phosphorothioate
  modified_base 3: mod_base = OTHER; note = 2'-O-methylcytidine-3'-phosphate
  modified_base 4: mod_base = OTHER; note = 2'-O-methyladenosine-3'-phosphate
  modified_base 5: mod_base = OTHER; note = 2'-O-methyluridine-3'-phosphate
  modified_base 6: mod_base = OTHER; note = 2'-deoxy-2'-fluorocytidine-3'-phosphate
  modified_base 7: mod_base = OTHER; note = 2'-O-methyladenosine-3'-phosphate
  modified_base 8: mod_base = OTHER; note = 2'-deoxy-2'-fluoroguanosine-3'-phosphate
  modified_base 9: mod_base = OTHER; note = 2'-deoxy-2'-fluoroguanosine-3'-phosphate
  modified_base 10: mod_base = OTHER; note = 2'-O-methylcytidine-3'-phosphate
  modified_base 11: mod_base = OTHER; note = 2'-O-methylcytidine-3'-phosphate
  modified_base 12: mod_base = OTHER; note = 2'-O-methylguanosine-3'-phosphate
  modified_base 13: mod_base = OTHER; note = 2'-O-methylguanosine-3'-phosphate
  modified_base 14: mod_base = OTHER; note = 2'-deoxy-2'-fluoroadenosine-3'-phosphate
  modified_base 15: mod_base = OTHER; note = 2'-O-methylguanosine-3'-phosphate
  modified_base 16: mod_base = OTHER; note = 2'-deoxy-2'-fluorouridine-3'-phosphate
  modified_base 17: mod_base = OTHER; note = 2'-O-methylguanosine-3'-phosphate
  modified_base 18: mod_base = OTHER; note = 2'-O-methylcytidine-3'-phosphate
  modified_base 19: mod_base = OTHER; note = 2'-O-methyladenosine-3'-phosphate
  modified_base 20: mod_base = OTHER; note = 2'-O-methylguanosine-3'-phosphate
  modified_base 21: mod_base = OTHER; note = 2'-O-methyluridine-3'-phosphorothioate
  modified_base 22: mod_base = OTHER; note = 2'-O-methylguanosine-3'-phosphorothioate
  modified_base 23: mod_base = OTHER; note = 2'-O-methylguanosine
ttcatcaggccggagtgcagtgg

SEQ ID NO: 2309 - RNA, 23 nt, synthetic construct
  source 1..23: mol_type = other RNA
  modified_base 1: mod_base = OTHER; note = 2'-O-methyluridine-3'-phosphorothioate 5'-(E)-Vinylphosphonate
  modified_base 2: mod_base = OTHER; note = 2'-deoxy-2'-fluorouridine-3'-phosphorothioate
  modified_base 3: mod_base = OTHER; note = 2'-O-methylcytidine-3'-phosphate
  modified_base 4: mod_base = OTHER; note = 2'-O-methylcytidine-3'-phosphate
  modified_base 5: mod_base = OTHER; note = 2'-O-methyladenosine-3'-phosphate
  modified_base 6: mod_base = OTHER; note = 2'-deoxy-2'-fluoroadenosine-3'-phosphate
  modified_base 7: mod_base = OTHER; note = 2'-O-methylguanosine-3'-phosphate
  modified_base 8: mod_base = OTHER; note = 2'-deoxy-2'-fluoroguanosine-3'-phosphate
  modified_base 9: mod_base = OTHER; note = 2'-deoxy-2'-fluorouridine-3'-phosphate
  modified_base 10: mod_base = OTHER; note = 2'-O-methylcytidine-3'-phosphate
  modified_base 11: mod_base = OTHER; note = 2'-O-methyluridine-3'-phosphate
  modified_base 12: mod_base = OTHER; note = 2'-O-methylcytidine-3'-phosphate
  modified_base 13: mod_base = OTHER; note = 2'-O-methylcytidine-3'-phosphate
  modified_base 14: mod_base = OTHER; note = 2'-deoxy-2'-fluoroadenosine-3'-phosphate
  modified_base 15: mod_base = OTHER; note = 2'-O-methylguanosine-3'-phosphate
  modified_base 16: mod_base = OTHER; note = 2'-deoxy-2'-fluoroguanosine-3'-phosphate
  modified_base 17: mod_base = OTHER; note = 2'-O-methylcytidine-3'-phosphate
  modified_base 18: mod_base = OTHER; note = 2'-O-methylcytidine-3'-phosphate
  modified_base 19: mod_base = OTHER; note = 2'-O-methyladenosine-3'-phosphate
  modified_base 20: mod_base = OTHER; note = 2'-O-methylcytidine-3'-phosphate
  modified_base 21: mod_base = OTHER; note = 2'-O-methyluridine-3'-phosphorothioate
  modified_base 22: mod_base = OTHER; note = 2'-O-methylguanosine-3'-phosphorothioate
  modified_base 23: mod_base = OTHER; note = 2'-O-methylguanosine
ttccaaggtctccaggccactgg

SEQ ID NO: 2310 - RNA, 23 nt, synthetic construct
  source 1..23: mol_type = other RNA
  modified_base 1: mod_base = OTHER; note = 2'-O-methyluridine-3'-phosphorothioate 5'-(E)-Vinylphosphonate
  modified_base 2: mod_base = OTHER; note = 2'-deoxy-2'-fluorocytidine-3'-phosphorothioate
  modified_base 3: mod_base = OTHER; note = 2'-O-methylcytidine-3'-phosphate
  modified_base 4: mod_base = OTHER; note = 2'-O-methyladenosine-3'-phosphate
  modified_base 5: mod_base = OTHER; note = 2'-O-methylcytidine-3'-phosphate
  modified_base 6: mod_base = OTHER; note = 2'-deoxy-2'-fluorouridine-3'-phosphate
  modified_base 7: mod_base = OTHER; note = 2'-O-methylcytidine-3'-phosphate
  modified_base 8: mod_base = OTHER; note = 2'-deoxy-2'-fluorouridine-3'-phosphate
  modified_base 9: mod_base = OTHER; note = 2'-deoxy-2'-fluorouridine-3'-phosphate
  modified_base 10: mod_base = OTHER; note = 2'-O-methyluridine-3'-phosphate
  modified_base 11: mod_base = OTHER; note = 2'-O-methylguanosine-3'-phosphate
  modified_base 12: mod_base = OTHER; note = 2'-O-methylcytidine-3'-phosphate
  modified_base 13: mod_base = OTHER; note = 2'-O-methyluridine-3'-phosphate
  modified_base 14: mod_base = OTHER; note = 2'-deoxy-2'-fluoroguanosine-3'-phosphate
  modified_base 15: mod_base = OTHER; note = 2'-O-methylguanosine-3'-phosphate
  modified_base 16: mod_base = OTHER; note = 2'-deoxy-2'-fluoroguanosine-3'-phosphate
  modified_base 17: mod_base = OTHER; note = 2'-O-methyluridine-3'-phosphate
  modified_base 18: mod_base = OTHER; note = 2'-O-methylguanosine-3'-phosphate
  modified_base 19: mod_base = OTHER; note = 2'-O-methylguanosine-3'-phosphate
  modified_base 20: mod_base = OTHER; note = 2'-O-methyladenosine-3'-phosphate
  modified_base 21: mod_base = OTHER; note = 2'-O-methylcytidine-3'-phosphorothioate
  modified_base 22: mod_base = OTHER; note = 2'-O-methylcytidine-3'-phosphorothioate
  modified_base 23: mod_base = OTHER; note = 2'-O-methylcytidine
tccactctttgctgggtggaccc

SEQ ID NO: 2311 - RNA, 23 nt, synthetic construct
  source 1..23: mol_type = other RNA
  modified_base 1: mod_base = OTHER; note = 2'-O-methyluridine-3'-phosphorothioate 5'-(E)-Vinylphosphonate
  modified_base 2: mod_base = OTHER; note = 2'-deoxy-2'-fluoroadenosine-3'-phosphorothioate
  modified_base 3: mod_base = OTHER; note = 2'-O-methylcytidine-3'-phosphate
  modified_base 4: mod_base = OTHER; note = 2'-O-methylcytidine-3'-phosphate
  modified_base 5: mod_base = OTHER; note = 2'-O-methyladenosine-3'-phosphate
  modified_base 6: mod_base = OTHER; note = 2'-deoxy-2'-fluorocytidine-3'-phosphate
  modified_base 7: mod_base = OTHER; note = 2'-O-methylcytidine-3'-phosphate
  modified_base 8: mod_base = OTHER; note = 2'-deoxy-2'-fluorouridine-3'-phosphate
  modified_base 9: mod_base = OTHER; note = 2'-deoxy-2'-fluorocytidine-3'-phosphate
  modified_base 10: mod_base = OTHER; note = 2'-O-methyluridine-3'-phosphate
  modified_base 11: mod_base = OTHER; note = 2'-O-methylguanosine-3'-phosphate
  modified_base 12: mod_base = OTHER; note = 2'-O-methyluridine-3'-phosphate
  modified_base 13: mod_base = OTHER; note = 2'-O-methylguanosine-3'-phosphate
  modified_base 14: mod_base = OTHER; note = 2'-deoxy-2'-fluoroguanosine-3'-phosphate
  modified_base 15: mod_base = OTHER; note = 2'-O-methyladenosine-3'-phosphate
  modified_base 16: mod_base = OTHER; note = 2'-deoxy-2'-fluoroguanosine-3'-phosphate
  modified_base 17: mod_base = OTHER; note = 2'-O-methyluridine-3'-phosphate
  modified_base 18: mod_base = OTHER; note = 2'-O-methyladenosine-3'-phosphate
  modified_base 19: mod_base = OTHER; note = 2'-O-methylguanosine-3'-phosphate
  modified_base 20: mod_base = OTHER; note = 2'-O-methylcytidine-3'-phosphate
  modified_base 21: mod_base = OTHER; note = 2'-O-methylcytidine-3'-phosphorothioate
  modified_base 22: mod_base = OTHER; note = 2'-O-methyluridine-3'-phosphorothioate
  modified_base 23: mod_base = OTHER; note = 2'-O-methylguanosine
taccacctctgtggagtagcctg

SEQ ID NO: 2312 - RNA, 23 nt, synthetic construct
  source 1..23: mol_type = other RNA
  modified_base 1: mod_base = OTHER; note = 2'-O-methyluridine-3'-phosphorothioate 5'-(E)-Vinylphosphonate
  modified_base 2: mod_base = OTHER; note = 2'-deoxy-2'-fluorocytidine-3'-phosphorothioate
  modified_base 3: mod_base = OTHER; note = 2'-O-methyluridine-3'-phosphate
  modified_base 4: mod_base = OTHER; note = 2'-O-methyladenosine-3'-phosphate
  modified_base 5: mod_base = OTHER; note = 2'-O-methyluridine-3'-phosphate
  modified_base 6: mod_base = OTHER; note = 2'-deoxy-2'-fluoroadenosine-3'-phosphate
  modified_base 7: mod_base = OTHER; note = 2'-O-methylguanosine-3'-phosphate
  modified_base 8: mod_base = OTHER; note = 2'-deoxy-2'-fluorouridine-3'-phosphate
  modified_base 9: mod_base = OTHER; note = 2'-deoxy-2'-fluorocytidine-3'-phosphate
  modified_base 10: mod_base = OTHER; note = 2'-O-methylcytidine-3'-phosphate
  modified_base 11: mod_base = OTHER; note = 2'-O-methyluridine-3'-phosphate
  modified_base 12: mod_base = OTHER; note = 2'-O-methylguanosine-3'-phosphate
  modified_base 13: mod_base = OTHER; note = 2'-O-methylguanosine-3'-phosphate
  modified_base 14: mod_base = OTHER; note = 2'-deoxy-2'-fluorouridine-3'-phosphate
  modified_base 15: mod_base = OTHER; note = 2'-O-methylcytidine-3'-phosphate
  modified_base 16: mod_base = OTHER; note = 2'-deoxy-2'-fluorocytidine-3'-phosphate
  modified_base 17: mod_base = OTHER; note = 2'-O-methyluridine-3'-phosphate
  modified_base 18: mod_base = OTHER; note = 2'-O-methylguanosine-3'-phosphate
  modified_base 19: mod_base = OTHER; note = 2'-O-methylcytidine-3'-phosphate
  modified_base 20: mod_base = OTHER; note = 2'-O-methylcytidine-3'-phosphate
  modified_base 21: mod_base = OTHER; note = 2'-O-methyladenosine-3'-phosphorothioate
  modified_base 22: mod_base = OTHER; note = 2'-O-methylcytidine-3'-phosphorothioate
  modified_base 23: mod_base = OTHER; note = 2'-O-methylcytidine
tctatagtcctggtcctgccacc

SEQ ID NO: 2313 - RNA, 23 nt, synthetic construct
  source 1..23: mol_type = other RNA
  modified_base 1: mod_base = OTHER; note = 2'-O-methyluridine-3'-phosphorothioate 5'-(E)-Vinylphosphonate
  modified_base 2: mod_base = OTHER; note = 2'-deoxy-2'-fluorocytidine-3'-phosphorothioate
  modified_base 3: mod_base = OTHER; note = 2'-O-methylcytidine-3'-phosphate
  modified_base 4: mod_base = OTHER; note = 2'-O-methyladenosine-3'-phosphate
  modified_base 5: mod_base = OTHER; note = 2'-O-methylguanosine-3'-phosphate
  modified_base 6: mod_base = OTHER; note = 2'-deoxy-2'-fluoroadenosine-3'-phosphate
  modified_base 7: mod_base = OTHER; note = 2'-O-methylguanosine-3'-phosphate
  modified_base 8: mod_base = OTHER; note = 2'-deoxy-2'-fluorouridine-3'-phosphate
  modified_base 9: mod_base = OTHER; note = 2'-deoxy-2'-fluorouridine-3'-phosphate
  modified_base 10: mod_base = OTHER; note = 2'-O-methylcytidine-3'-phosphate
  modified_base 11: mod_base = OTHER; note = 2'-O-methylcytidine-3'-phosphate
  modified_base 12: mod_base = OTHER; note = 2'-O-methyluridine-3'-phosphate
  modified_base 13: mod_base = OTHER; note = 2'-O-methyluridine-3'-phosphate
  modified_base 14: mod_base = OTHER; note = 2'-deoxy-2'-fluorocytidine-3'-phosphate
  modified_base 15: mod_base = OTHER; note = 2'-O-methylcytidine-3'-phosphate
  modified_base 16: mod_base = OTHER; note = 2'-deoxy-2'-fluorocytidine-3'-phosphate
  modified_base 17: mod_base = OTHER; note = 2'-O-methyluridine-3'-phosphate
  modified_base 18: mod_base = OTHER; note = 2'-O-methyluridine-3'-phosphate
  modified_base 19: mod_base = OTHER; note = 2'-O-methyladenosine-3'-phosphate
  modified_base 20: mod_base = OTHER; note = 2'-O-methyladenosine-3'-phosphate
  modified_base 21: mod_base = OTHER; note = 2'-O-methylcytidine-3'-phosphorothioate
  modified_base 22: mod_base = OTHER; note = 2'-O-methylguanosine-3'-phosphorothioate
  modified_base 23: mod_base = OTHER; note = 2'-O-methyluridine
tccagagttccttcccttaacgt

SEQ ID NO: 2314 - RNA, 23 nt, synthetic construct
  source 1..23: mol_type = other RNA
  modified_base 1: mod_base = OTHER; note = 2'-O-methyluridine-3'-phosphorothioate 5'-(E)-Vinylphosphonate
  modified_base 2: mod_base = OTHER; note = 2'-deoxy-2'-fluoroadenosine-3'-phosphorothioate
  modified_base 3: mod_base = OTHER; note = 2'-O-methylcytidine-3'-phosphate
  modified_base 4: mod_base = OTHER; note = 2'-O-methyladenosine-3'-phosphate
  modified_base 5: mod_base = OTHER; note = 2'-O-methylguanosine-3'-phosphate
  modified_base 6: mod_base = OTHER; note = 2'-deoxy-2'-fluoroadenosine-3'-phosphate
  modified_base 7: mod_base = OTHER; note = 2'-O-methyluridine-3'-phosphate
  modified_base 8: mod_base = OTHER; note = 2'-deoxy-2'-fluorocytidine-3'-phosphate
  modified_base 9: mod_base = OTHER; note = 2'-deoxy-2'-fluorocytidine-3'-phosphate
  modified_base 10: mod_base = OTHER; note = 2'-O-methyladenosine-3'-phosphate
  modified_base 11: mod_base = OTHER; note = 2'-O-methylcytidine-3'-phosphate
  modified_base 12: mod_base = OTHER; note = 2'-O-methylcytidine-3'-phosphate
  modified_base 13: mod_base = OTHER; note = 2'-O-methyladenosine-3'-phosphate
  modified_base 14: mod_base = OTHER; note = 2'-deoxy-2'-fluorocytidine-3'-phosphate
  modified_base 15: mod_base = OTHER; note = 2'-O-methylcytidine-3'-phosphate
  modified_base 16: mod_base = OTHER; note = 2'-deoxy-2'-fluorocytidine-3'-phosphate
  modified_base 17: mod_base = OTHER; note = 2'-O-methyladenosine-3'-phosphate
  modified_base 18: mod_base = OTHER; note = 2'-O-methylcytidine-3'-phosphate
  modified_base 19: mod_base = OTHER; note = 2'-O-methyluridine-3'-phosphate
  modified_base 20: mod_base = OTHER; note = 2'-O-methylguanosine-3'-phosphate
  modified_base 21: mod_base = OTHER; note = 2'-O-methyluridine-3'-phosphorothioate
  modified_base 22: mod_base = OTHER; note = 2'-O-methylguanosine-3'-phosphorothioate
  modified_base 23: mod_base = OTHER; note = 2'-O-methyluridine
tacagatccaccacccactgtgt

SEQ ID NO: 2315 - RNA, 23 nt, synthetic construct
  source 1..23: mol_type = other RNA
  modified_base 1: mod_base = OTHER; note = 2'-O-methyluridine-3'-phosphorothioate 5'-(E)-Vinylphosphonate
  modified_base 2: mod_base = OTHER; note = 2'-deoxy-2'-fluoroadenosine-3'-phosphorothioate
  modified_base 3: mod_base = OTHER; note = 2'-O-methylguanosine-3'-phosphate
  modified_base 4: mod_base = OTHER; note = 2'-O-methyladenosine-3'-phosphate
  modified_base 5: mod_base = OTHER; note = 2'-O-methylguanosine-3'-phosphate
  modified_base 6: mod_base = OTHER; note = 2'-deoxy-2'-fluorocytidine-3'-phosphate
  modified_base 7: mod_base = OTHER; note = 2'-O-methylcytidine-3'-phosphate
  modified_base 8: mod_base = OTHER; note = 2'-deoxy-2'-fluoroadenosine-3'-phosphate
  modified_base 9: mod_base = OTHER; note = 2'-deoxy-2'-fluorocytidine-3'-phosphate
  modified_base 10: mod_base = OTHER; note = 2'-O-methylcytidine-3'-phosphate
  modified_base 11: mod_base = OTHER; note = 2'-O-methyluridine-3'-phosphate
  modified_base 12: mod_base = OTHER; note = 2'-O-methyluridine-3'-phosphate
  modified_base 13: mod_base = OTHER; note = 2'-O-methyluridine-3'-phosphate
  modified_base 14: mod_base = OTHER; note = 2'-deoxy-2'-fluoroguanosine-3'-phosphate
  modified_base 15: mod_base = OTHER; note = 2'-O-methylcytidine-3'-phosphate
  modified_base 16: mod_base = OTHER; note = 2'-deoxy-2'-fluorocytidine-3'-phosphate
  modified_base 17: mod_base = OTHER; note = 2'-O-methyladenosine-3'-phosphate
  modified_base 18: mod_base = OTHER; note = 2'-O-methylguanosine-3'-phosphate
  modified_base 19: mod_base = OTHER; note = 2'-O-methylcytidine-3'-phosphate
  modified_base 20: mod_base = OTHER; note = 2'-O-methyluridine-3'-phosphate
  modified_base 21: mod_base = OTHER; note = 2'-O-methylcytidine-3'-phosphorothioate
  modified_base 22: mod_base = OTHER; note = 2'-O-methyluridine-3'-phosphorothioate
  modified_base 23: mod_base = OTHER; note = 2'-O-methyluridine
tagagccacctttgccagctctt

SEQ ID NO: 2316 - RNA, 23 nt, synthetic construct
  source 1..23: mol_type = other RNA
  modified_base 1: mod_base = OTHER; note = 2'-O-methyluridine-3'-phosphorothioate 5'-(E)-Vinylphosphonate
  modified_base 2: mod_base = OTHER; note = 2'-deoxy-2'-fluorouridine-3'-phosphorothioate
  modified_base 3: mod_base = OTHER; note = 2'-O-methylguanosine-3'-phosphate
  modified_base 4: mod_base = OTHER; note = 2'-O-methyluridine-3'-phosphate
  modified_base 5: mod_base = OTHER; note = 2'-O-methylcytidine-3'-phosphate
  modified_base 6: mod_base = OTHER; note = 2'-deoxy-2'-fluorouridine-3'-phosphate
  modified_base 7: mod_base = OTHER; note = 2'-O-methylcytidine-3'-phosphate
  modified_base 8: mod_base = OTHER; note = 2'-deoxy-2'-fluoroadenosine-3'-phosphate
  modified_base 9: mod_base = OTHER; note = 2'-deoxy-2'-fluoroguanosine-3'-phosphate
  modified_base 10: mod_base = OTHER; note = 2'-O-methylcytidine-3'-phosphate
  modified_base 11: mod_base = OTHER; note = 2'-O-methylcytidine-3'-phosphate
  modified_base 12: mod_base = OTHER; note = 2'-O-methyluridine-3'-phosphate
  modified_base 13: mod_base = OTHER; note = 2'-O-methylcytidine-3'-phosphate
  modified_base 14: mod_base = OTHER; note = 2'-deoxy-2'-fluorocytidine-3'-phosphate
  modified_base 15: mod_base = OTHER; note = 2'-O-methylcytidine-3'-phosphate
  modified_base 16: mod_base = OTHER; note = 2'-deoxy-2'-fluoroguanosine-3'-phosphate
  modified_base 17: mod_base = OTHER; note = 2'-O-methyladenosine-3'-phosphate
  modified_base 18: mod_base = OTHER; note = 2'-O-methylguanosine-3'-phosphate
  modified_base 19: mod_base = OTHER; note = 2'-O-methyluridine-3'-phosphate
  modified_base 20: mod_base = OTHER; note = 2'-O-methylguanosine-3'-phosphate
  modified_base 21: mod_base = OTHER; note = 2'-O-methylguanosine-3'-phosphorothioate
  modified_base 22: mod_base = OTHER; note = 2'-O-methylcytidine-3'-phosphorothioate
  modified_base 23: mod_base = OTHER; note = 2'-O-methyluridine
ttgtctcagcctcccgagtggct

SEQ ID NO: 2317 - RNA, 23 nt, synthetic construct
  source 1..23: mol_type = other RNA
agaatgtgttttctgaataacat

SEQ ID NO: 2318 - RNA, 23 nt, synthetic construct
  source 1..23: mol_type = other RNA
cttgaatcaaagcagttaacttt

SEQ ID NO: 2319 - RNA, 23 nt, synthetic construct
  source 1..23: mol_type = other RNA
gtgtgaaacttcctaagtataaa

SEQ ID NO: 2320 - RNA, 23 nt, synthetic construct
  source 1..23: mol_type = other RNA
tctctcgtaactggtttcatttc

SEQ ID NO: 2321 - RNA, 23 nt, synthetic construct
  source 1..23: mol_type = other RNA
cttgcactttgtaacatgtttac

SEQ ID NO: 2322 - RNA, 23 nt, synthetic construct
  source 1..23: mol_type = other RNA
atctgtccaaggaaacttgaatc

SEQ ID NO: 2323 - RNA, 23 nt, synthetic construct
  source 1..23: mol_type = other RNA
ggtgaagaaaactcctttagcag

SEQ ID NO: 2324 - RNA, 23 nt, synthetic construct
  source 1..23: mol_type = other RNA
aaggagtgagatcattttcttat

SEQ ID NO: 2325 - RNA, 23 nt, synthetic construct
  source 1..23: mol_type = other RNA
ggttgtctgtttttgtaacttaa

SEQ ID NO: 2326 - RNA, 23 nt, synthetic construct
  source 1..23: mol_type = other RNA
ttgcatgccaaattgtagttctt

SEQ ID NO: 2327 - RNA, 23 nt, synthetic construct
  source 1..23: mol_type = other RNA
tgaagggtaaagaagtttgatat

SEQ ID NO: 2328 - RNA, 23 nt, synthetic construct
  source 1..23: mol_type = other RNA
gcttaggatgtttttcatgaaaa

SEQ ID NO: 2329 - RNA, 23 nt, synthetic construct
  source 1..23: mol_type = other RNA
accctcatcaagacaattgtcac

SEQ ID NO: 2330 - RNA, 23 nt, synthetic construct
  source 1..23: mol_type = other RNA
ggtcacattcaggaagatgaaag

SEQ ID NO: 2331 - RNA, 23 nt, synthetic construct
  source 1..23: mol_type = other RNA
gttttgtcaagtgtcatatgtag

SEQ ID NO: 2332 - RNA, 23 nt, synthetic construct
  source 1..23: mol_type = other RNA
tccctttgaaacaagataactga

SEQ ID NO: 2333 - RNA, 23 nt, synthetic construct
  source 1..23: mol_type = other RNA
gcctccttttgcttgaaaccaaa

SEQ ID NO: 2334 - RNA, 23 nt, synthetic construct
  source 1..23: mol_type = other RNA
gtcaccaggatcaatgacatttc

SEQ ID NO: 2335 - RNA, 23 nt, synthetic construct
  source 1..23: mol_type = other RNA
tgcttcaaatccatccagaataa

SEQ ID NO: 2336 - RNA, 23 nt, synthetic construct
  source 1..23: mol_type = other RNA
aagggctgaaagccatttgttgg

SEQ ID NO: 2337 - RNA, 23 nt, synthetic construct
  source 1..23: mol_type = other RNA
ctgagctgaacccattttgagtg

SEQ ID NO: 2338 - RNA, 23 nt, synthetic construct
  source 1..23: mol_type = other RNA
ctgctgtgtttttgctatcacac

SEQ ID NO: 2339 - RNA, 23 nt, synthetic construct
  source 1..23: mol_type = other RNA
ttatccaggactctgtcaatttc

SEQ ID NO: 2340 - RNA, 23 nt, synthetic construct
  source 1..23: mol_type = other RNA
ccttccagaaacgtgatccaaat

SEQ ID NO: 2341 - RNA, 23 nt, synthetic construct
  source 1..23: mol_type = other RNA
tacatggcagtgttcctatttgg

SEQ ID NO: 2342 - RNA, 23 nt, synthetic construct
  source 1..23: mol_type = other RNA
ttaagccttttgctcacaaaacc

SEQ ID NO: 2343 - RNA, 23 nt, synthetic construct
  source 1..23: mol_type = other RNA
ttctactgtgactgatgttacat

SEQ ID NO: 2344 - RNA, 23 nt, synthetic construct
  source 1..23: mol_type = other RNA
gctggaagcacatgtttatttat

SEQ ID NO: 2345 - RNA, 23 nt, synthetic construct
  source 1..23: mol_type = other RNA
gggcatcttagcttctattatag

SEQ ID NO: 2346 - RNA, 23 nt, synthetic construct
  source 1..23: mol_type = other RNA
tcttcagccatcaacaagagttg

SEQ ID NO: 2347 - RNA, 23 nt, synthetic construct
  source 1..23: mol_type = other RNA
gaagctcacccaataaacattaa

SEQ ID NO: 2348 - RNA, 23 nt, synthetic construct
  source 1..23: mol_type = other RNA
tttggccctatcttttctatgtc

SEQ ID NO: 2349 - RNA, 23 nt, synthetic construct
  source 1..23: mol_type = other RNA
ttgatcacactctgggtttatta

SEQ ID NO: 2350 - RNA, 23 nt, synthetic construct
  source 1..23: mol_type = other RNA
agtcaccggtttggacttcattc

SEQ ID NO: 2351 - RNA, 23 nt, synthetic construct
  source 1..23: mol_type = other RNA
cagagcgagattccgtcttaaaa

SEQ ID NO: 2352 - RNA, 23 nt, synthetic construct
  source 1..23: mol_type = other RNA
tcttatcttctgcaattgcttag

SEQ ID NO: 2353 - RNA, 23 nt, synthetic construct
  source 1..23: mol_type = other RNA
aagagtagcaagttctagagaag

SEQ ID NO: 2354 - RNA, 23 nt, synthetic construct
  source 1..23: mol_type = other RNA
agcctgttttgttggaaggtttg

SEQ ID NO: 2355 - RNA, 23 nt, synthetic construct
  source 1..23: mol_type = other RNA
agacaggagaatcgcttaaacct

SEQ ID NO: 2356 - RNA, 23 nt, synthetic construct
  source 1..23: mol_type = other RNA
ccactcttccaaaggcataagac

SEQ ID NO: 2357 - RNA, 23 nt, synthetic construct
  source 1..23: mol_type = other RNA
tggatggatttgaagcaaagcac

SEQ ID NO: 2358 - RNA, 23 nt, synthetic construct
  source 1..23: mol_type = other RNA
gtctcctccaaacagaaagtcac

SEQ ID NO: 2359 - RNA, 23 nt, synthetic construct
  source 1..23: mol_type = other RNA
ttctggaaaagaggagtttcgag

SEQ ID NO: 2360 - RNA, 23 nt, synthetic construct
  source 1..23: mol_type = other RNA
tgcagtttccaatcccatagatg

SEQ ID NO: 2361 - RNA, 23 nt, synthetic construct
  source 1..23: mol_type = other RNA
aaacctggcacaatggctaattc

SEQ ID NO: 2362 - RNA, 23 nt, synthetic construct
  source 1..23: mol_type = other RNA
tctccaaggaccaggttatttta

SEQ ID NO: 2363 - RNA, 23 nt, synthetic construct
  source 1..23: mol_type = other RNA
atcctgggaaggaaaatgcattg

SEQ ID NO: 2364 - RNA, 23 nt, synthetic construct
  source 1..23: mol_type = other RNA
aaagtccaagatgacaccaaaac

SEQ ID NO: 2365 - RNA, 23 nt, synthetic construct
  source 1..23: mol_type = other RNA
gatcctcacaaccacctaatcag

SEQ ID NO: 2366 - RNA, 23 nt, synthetic construct
  source 1..23: mol_type = other RNA
caagcaaggccaaaattaccaaa

SEQ ID NO: 2367 - RNA, 23 nt, synthetic construct
  source 1..23: mol_type = other RNA
ctcactgaatgcctcaatgtgac

SEQ ID NO: 2368 - RNA, 23 nt, synthetic construct
  source 1..23: mol_type = other RNA
tgttacatcacagtgtttgcaat

SEQ ID NO: 2369 - RNA, 23 nt, synthetic construct
  source 1..23: mol_type = other RNA
attccaaggagttccatgaagac

SEQ ID NO: 2370 - RNA, 23 nt, synthetic construct
  source 1..23: mol_type = other RNA
ccaggattgaagagcattgcatg

SEQ ID NO: 2371 - RNA, 23 nt, synthetic construct
  source 1..23: mol_type = other RNA
agaagggagaaggatctagaatg

SEQ ID NO: 2372 - RNA, 23 nt, synthetic construct
  source 1..23: mol_type = other RNA
gatattaaaggagttaagagtag

SEQ ID NO: 2373 - RNA, 23 nt, synthetic construct
  source 1..23: mol_type = other RNA
gagtggtctttcctatcatggag

SEQ ID NO: 2374 - RNA, 23 nt, synthetic construct
  source 1..23: mol_type = other RNA
attctgcattttattctggatgg

SEQ ID NO: 2375 - RNA, 23 nt, synthetic construct
  source 1..23: mol_type = other RNA
cttcctgcaaggactacgttaag

SEQ ID NO: 2376 - RNA, 23 nt, synthetic construct
  source 1..23: mol_type = other RNA
aggttccctctgagaattccaag

SEQ ID NO: 2377 - RNA, 23 nt, synthetic construct
  source 1..23: mol_type = other RNA
gagaagctgatgctttgcttcaa

SEQ ID NO: 2378 - RNA, 23 nt, synthetic construct
  source 1..23: mol_type = other RNA
gaaaatacataagaccataacag

SEQ ID NO: 2379 - RNA, 23 nt, synthetic construct
  source 1..23: mol_type = other RNA
agcctttggatgaccagaacaag

SEQ ID NO: 2380 - RNA, 23 nt, synthetic construct
  source 1..23: mol_type = other RNA
gtggagatgcagaggtaaaagtg

SEQ ID NO: 2381 - RNA, 23 nt, synthetic construct
  source 1..23: mol_type = other RNA
ggttgggttcatctgagcaagag

SEQ ID NO: 2382 - RNA, 23 nt, synthetic construct
  source 1..23: mol_type = other RNA
tggctctccagttagttctctcg

SEQ ID NO: 2383 - RNA, 23 nt, synthetic construct
  source 1..23: mol_type = other RNA
aaagtgtgagcagtgagttacag

SEQ ID NO: 2384 - RNA, 23 nt, synthetic construct
  source 1..23: mol_type = other RNA
tatacacaggatcctattctcac

SEQ ID NO: 2385 - RNA, 23 nt, synthetic construct
  source 1..23: mol_type = other RNA
ctgtgcggattcttgtggctttg

SEQ ID NO: 2386 - RNA, 23 nt, synthetic construct
  source 1..23: mol_type = other RNA
taatcaggctgaggtgtcttaag

SEQ ID NO: 2387 - RNA, 23 nt, synthetic construct
  source 1..23: mol_type = other RNA
gtttcgaggtagagtttgaagga

SEQ ID NO: 2388 - RNA, 23 nt, synthetic construct
  source 1..23: mol_type = other RNA
catcctgaccttatccaagatgg

SEQ ID NO: 2389 - RNA, 23 nt, synthetic construct
  source 1..23: mol_type = other RNA
ggccttgaaggtcactcttcctg

SEQ ID NO: 2390 - RNA, 23 nt, synthetic construct
  source 1..23: mol_type = other RNA
ctctggctttctccgactgctag

SEQ ID NO: 2391 - RNA, 23 nt, synthetic construct
  source 1..23: mol_type = other RNA
tcttgcattcccagtggtcaaac

SEQ ID NO: 2392 - RNA, 23 nt, synthetic construct
  source 1..23: mol_type = other RNA
agcagctgaacagccaaatgcat

SEQ ID NO: 2393 - RNA, 23 nt, synthetic construct
  source 1..23: mol_type = other RNA
tgatacccagagcattacgtgag

SEQ ID NO: 2394 - RNA, 23 nt, synthetic construct
  source 1..23: mol_type = other RNA
cactggcagtctaccaacagatc

SEQ ID NO: 2395 - RNA, 23 nt, synthetic construct
  source 1..23: mol_type = other RNA
tgagagctgctctggaaaatgtg

SEQ ID NO: 2396 - RNA, 23 nt, synthetic construct
  source 1..23: mol_type = other RNA
ctgagcacctgcttcatgctcag

SEQ ID NO: 2397 - RNA, 23 nt, synthetic construct
  source 1..23: mol_type = other RNA
caggtgggaaatggtatgagctg

SEQ ID NO: 2398 - RNA, 23 nt, synthetic construct
  source 1..23: mol_type = other RNA
ttgtgtggtgggttctttggaag

SEQ ID NO: 2399 - RNA, 23 nt, synthetic construct
  source 1..23: mol_type = other RNA
tagttcttgtctgattggctcac

SEQ ID NO: 2400 - RNA, 23 nt, synthetic construct
  source 1..23: mol_type = other RNA
gggatcacaaggtcactagatgg

SEQ ID NO: 2401 - RNA, 23 nt, synthetic construct
  source 1..23: mol_type = other RNA
acctccgggatcttcttcacgtg

SEQ ID NO: 2402 - RNA, 23 nt, synthetic construct
  source 1..23: mol_type = other RNA
gtgtcctggaagcttcaggctac

SEQ ID NO: 2403 - RNA, 23 nt, synthetic construct
  source 1..23: mol_type = other RNA
caatttccctgactcctctaagc

SEQ ID NO: 2404 - RNA, 23 nt, synthetic construct
  source 1..23: mol_type = other RNA
ggtgactgcgatcttcagagcag

SEQ ID NO: 2405 - RNA, 23 nt, synthetic construct
  source 1..23: mol_type = other RNA
caccagcttctccaggctctttg

SEQ ID NO: 2406 - RNA, 23 nt, synthetic construct
  source 1..23: mol_type = other RNA
actctggcttccaggtatctcca

SEQ ID NO: 2407 - RNA, 23 nt, synthetic construct
  source 1..23: mol_type = other RNA
atcctggccaacatggtgaaacc

SEQ ID NO: 2408 - RNA, 23 nt, synthetic construct
  source 1..23: mol_type = other RNA
gggtttttactccagtggtgaag

SEQ ID NO: 2409 - RNA, 23 nt, synthetic construct
  source 1..23: mol_type = other RNA
aaatgcatggtgcagttgacagc

SEQ ID NO: 2410 - RNA, 23 nt, synthetic construct
  source 1..23: mol_type = other RNA
ggagagtacagtgagccaagatc

SEQ ID NO: 2411 - RNA, 23 nt, synthetic construct
  source 1..23: mol_type = other RNA
aaaacacaaaagttagctgagcg

SEQ ID NO: 2412 - RNA, 23 nt, synthetic construct
  source 1..23: mol_type = other RNA
actcccagcaacacaagctggaa

SEQ ID NO: 2413 - RNA, 23 nt, synthetic construct
  source 1..23: mol_type = other RNA
tgagacctgacaagcactgctag

SEQ ID NO: 2414 - RNA, 23 nt, synthetic construct
  source 1..23: mol_type = other RNA
acatttcacacacgcagtcagtc

SEQ ID NO: 2415 - RNA, 23 nt, synthetic construct
  source 1..23: mol_type = other RNA
gccaggtaatgagggactggaac

SEQ ID NO: 2416 - RNA, 23 nt, synthetic construct
  source 1..23: mol_type = other RNA
ggtgagggatgtgaattgcctgc

SEQ ID NO: 2417 - RNA, 23 nt, synthetic construct
  source 1..23: mol_type = other RNA
cagatcctcaccagtatgccttc

SEQ ID NO: 2418 - RNA, 23 nt, synthetic construct
  source 1..23: mol_type = other RNA
tgctggccttctctaagagctgc

SEQ ID NO: 2419 - RNA, 23 nt, synthetic construct
  source 1..23: mol_type = other RNA
gggattcccaccaaggtcttcag

SEQ ID NO: 2420 - RNA, 23 nt, synthetic construct
  source 1..23: mol_type = other RNA
aaatatccaacgacctggagaac

SEQ ID NO: 2421 - RNA, 23 nt, synthetic construct
  source 1..23: mol_type = other RNA
gccatgctgaagggaccttgaag

SEQ ID NO: 2422 - RNA, 23 nt, synthetic construct
  source 1..23: mol_type = other RNA
actggtgctataggctggagaag

SEQ ID NO: 2423 - RNA, 23 nt, synthetic construct
  source 1..23: mol_type = other RNA
cacatccacacacgcaggaactc

SEQ ID NO: 2424 - RNA, 23 nt, synthetic construct
  source 1..23: mol_type = other RNA
tgttgccctgagtggatctccaa

SEQ ID NO: 2425 - RNA, 23 nt, synthetic construct
  source 1..23: mol_type = other RNA
accgcactcacccatgtgccaag

SEQ ID NO: 2426 - RNA, 23 nt, synthetic construct
  source 1..23: mol_type = other RNA
cagcggttgcaaggcccaagaag

SEQ ID NO: 2427 - RNA, 23 nt, synthetic construct
  source 1..23: mol_type = other RNA
ccctggagagaagtttctggccc

SEQ ID NO: 2428 - RNA, 23 nt, synthetic construct
  source 1..23: mol_type = other RNA
ttgcctgcagagagaagcctgtt

SEQ ID NO: 2429 - RNA, 23 nt, synthetic construct
  source 1..23: mol_type = other RNA
accctctgaatggtccagggttg

SEQ ID NO: 2430 - RNA, 23 nt, synthetic construct
  source 1..23: mol_type = other RNA
aacattaagattgaggcctgccc

SEQ ID NO: 2431 - RNA, 23 nt, synthetic construct
  source 1..23: mol_type = other RNA
gggagaccgagcgctttctggaa

SEQ ID NO: 2432 - RNA, 23 nt, synthetic construct
  source 1..23: mol_type = other RNA
acagcgagaggcagagaaagaag

SEQ ID NO: 2433 - RNA, 23 nt, synthetic construct
  source 1..23: mol_type = other RNA
tctgccaccatcctgctgctgtg

SEQ ID NO: 2434 - RNA, 23 nt, synthetic construct
  source 1..23: mol_type = other RNA
gcctgccctcagggatcttgcat

SEQ ID NO: 2435 - RNA, 23 nt, synthetic construct
  source 1..23: mol_type = other RNA
gtccaagctgtgcccatccaaaa

SEQ ID NO: 2436 - RNA, 23 nt, synthetic construct
  source 1..23: mol_type = other RNA
cccacagggaaccctgcttgcac

SEQ ID NO: 2437 - RNA, 23 nt, synthetic construct
  source 1..23: mol_type = other RNA
ctatagcccaggtcctctgatac

SEQ ID NO: 2438 - RNA, 23 nt, synthetic construct
  source 1..23: mol_type = other RNA
gggtctctgcaggacatgctgtg

SEQ ID NO: 2439 - RNA, 23 nt, synthetic construct
  source 1..23: mol_type = other RNA
tgacggtcccacactggtgactg

SEQ ID NO: 2440 - RNA, 23 nt, synthetic construct
  source 1..23: mol_type = other RNA
agagtgggctgcatctgggattc

SEQ ID NO: 2441 - RNA, 23 nt, synthetic construct
  source 1..23: mol_type = other RNA
gcccttcccactggaggtcacat

SEQ ID NO: 2442 - RNA, 23 nt, synthetic construct
  source 1..23: mol_type = other RNA
ccactgcactccggcctgatgac

SEQ ID NO: 2443 - RNA, 23 nt, synthetic construct
  source 1..23: mol_type = other RNA
ccagtggcctggagaccttggac

SEQ ID NO: 2444 - RNA, 23 nt, synthetic construct
  source 1..23: mol_type = other RNA
gggtccacccagcaaagagtggg

SEQ ID NO: 2445 - RNA, 23 nt, synthetic construct
  source 1..23: mol_type = other RNA
caggctactccacagaggtggtg

SEQ ID NO: 2446 - RNA, 23 nt, synthetic construct
  source 1..23: mol_type = other RNA
ggtggcaggaccaggactatagc

SEQ ID NO: 2447 - RNA, 23 nt, synthetic construct
  source 1..23: mol_type = other RNA
acgttaagggaaggaactctggc

SEQ ID NO: 2448 - RNA, 23 nt, synthetic construct
  source 1..23: mol_type = other RNA
acacagtgggtggtggatctgtc

SEQ ID NO: 2449 - RNA, 23 nt, synthetic construct
  source 1..23: mol_type = other RNA
aagagctggcaaaggtggctctc

SEQ ID NO: 2450 - RNA, 23 nt, synthetic construct
  source 1..23: mol_type = other RNA
agccactcgggaggctgagacag

SEQ ID NO: 2451 - RNA, 21 nt, synthetic construct
  source 1..21: mol_type = other RNA
gcggttgcaaggcccaagaaa

SEQ ID NO: 2452 - RNA, 21 nt, synthetic construct
  source 1..21: mol_type = other RNA
cctgggaaggaaaatgcatta

SEQ ID NO: 2453 - RNA, 21 nt, synthetic construct
  source 1..21: mol_type = other RNA
gtgcggattcttgtggcttta

SEQ ID NO: 2454 - RNA, 21 nt, synthetic construct
  source 1..21: mol_type = other RNA
tggccctatcttttctatgta

SEQ ID NO: 2455 - RNA, 21 nt, synthetic construct
  source 1..21: mol_type = other RNA
ccaagctgtgcccatccaaaa

SEQ ID NO: 2456 - RNA, 21 nt, synthetic construct
  source 1..21: mol_type = other RNA
agtccaagatgacaccaaaaa

SEQ ID NO: 2457 - RNA, 21 nt, synthetic construct
  source 1..21: mol_type = other RNA
cctcatcaagacaattgtcaa

SEQ ID NO: 2458 - RNA, 21 nt, synthetic construct
  source 1..21: mol_type = other RNA
atttcacacacgcagtcagta

SEQ ID NO: 2459 - RNA, 21 nt, synthetic construct
  source 1..21: mol_type = other RNA
ctcctccaaacagaaagtcaa

SEQ ID NO: 2460 - RNA, 21 nt, synthetic construct
  source 1..21: mol_type = other RNA
tcaccggtttggacttcatta

SEQ ID NO: 2461 - RNA, 21 nt, synthetic construct
  source 1..21: mol_type = other RNA
tcctgaccttatccaagatga

SEQ ID NO: 2462 - RNA, 21 nt, synthetic construct
  source 1..21: mol_type = other RNA
ctggcagtctaccaacagata

SEQ ID NO: 2463 - RNA, 21 nt, synthetic construct
  source 1..21: mol_type = other RNA
gatcctcaccagtatgcctta

SEQ ID NO: 2464 - RNA, 21 nt, synthetic construct
  source 1..21: mol_type = other RNA
ttccagaaacgtgatccaaaa

SEQ ID NO: 2465 - RNA, 21 nt, synthetic construct
  source 1..21: mol_type = other RNA
atatccaacgacctggagaaa

SEQ ID NO: 2466 - RNA, 21 nt, synthetic construct
  source 1..21: mol_type = other RNA
ctccgggatcttcttcacgta

SEQ ID NO: 2467 - RNA, 21 nt, synthetic construct
  source 1..21: mol_type = other RNA
ctggccttctctaagagctga

SEQ ID NO: 2468 - RNA, 21 nt, synthetic construct
  source 1..21: mol_type = other RNA
agtggcctggagaccttggaa

SEQ ID NO: 2469 - RNA, 21 nt, synthetic construct
  source 1..21: mol_type = other RNA
gtcctggaagcttcaggctaa

SEQ ID NO: 2470 - RNA, 21 nt, synthetic construct
  source 1..21: mol_type = other RNA
ggctactccacagaggtggta

SEQ ID NO: 2471 - RNA, 21 nt, synthetic construct
  source 1..21: mol_type = other RNA
gtctctgcaggacatgctgta

SEQ ID NO: 2472 - RNA, 21 nt, synthetic construct
  source 1..21: mol_type = other RNA
ccttgaaggtcactcttccta

SEQ ID NO: 2473 - RNA, 21 nt, synthetic construct
  source 1..21: mol_type = other RNA
tcctgcaaggactacgttaaa

SEQ ID NO: 2474 - RNA, 21 nt, synthetic construct
  source 1..21: mol_type = other RNA
gttaagggaaggaactctgga

SEQ ID NO: 2475 - RNA, 21 nt, synthetic construct
  source 1..21: mol_type = other RNA
tctggcttccaggtatctcca

SEQ ID NO: 2476 - RNA, 21 nt, synthetic construct
  source 1..21: mol_type = other RNA
aggattgaagagcattgcata

SEQ ID NO: 2477 - RNA, 21 nt, synthetic construct
  source 1..21: mol_type = other RNA
atccaggactctgtcaattta

SEQ ID NO: 2478 - RNA, 21 nt, synthetic construct
  source 1..21: mol_type = other RNA
atttccctgactcctctaaga

SEQ ID NO: 2479 - RNA, 21 nt, synthetic construct
  source 1..21: mol_type = other RNA
actcttccaaaggcataagaa

SEQ ID NO: 2480 - RNA, 21 nt, synthetic construct
  source 1..21: mol_type = other RNA
ctccttttgcttgaaaccaaa

SEQ ID NO: 2481 - RNA, 21 nt, synthetic construct
  source 1..21: mol_type = other RNA
tacacaggatcctattctcaa

SEQ ID NO: 2482 - RNA, 21 nt, synthetic construct
  source 1..21: mol_type = other RNA
gtccacccagcaaagagtgga

SEQ ID NO: 2483 - RNA, 21 nt, synthetic construct
  source 1..21: mol_type = other RNA
agtgggctgcatctgggatta

SEQ ID NO: 2484 - RNA, 21 nt, synthetic construct
  source 1..21: mol_type = other RNA
gattcccaccaaggtcttcaa

SEQ ID NO: 2485 - RNA, 21 nt, synthetic construct
  source 1..21: mol_type = other RNA
ttcagccatcaacaagagtta

SEQ ID NO: 2486 - RNA, 21 nt, synthetic construct
  source 1..21: mol_type = other RNA
cactgaatgcctcaatgtgaa

SEQ ID NO: 2487 - RNA, 21 nt, synthetic construct
  source 1..21: mol_type = other RNA
cctttggatgaccagaacaaa

SEQ ID NO: 2488 - RNA, 21 nt, synthetic construct
  source 1..21: mol_type = other RNA
gttccctctgagaattccaaa

SEQ ID NO: 2489 - RNA, 21 nt, synthetic construct
  source 1..21: mol_type = other RNA
tccaaggagttccatgaagaa

SEQ ID NO: 2490 - RNA, 21 nt, synthetic construct
  source 1..21: mol_type = other RNA
catccacacacgcaggaacta

SEQ ID NO: 2491 - RNA, 21 nt, synthetic construct
  source 1..21: mol_type = other RNA
tcccagcaacacaagctggaa

SEQ ID NO: 2492 - RNA, 21 nt, synthetic construct
  source 1..21: mol_type = other RNA
tggaagcacatgtttatttaa

SEQ ID NO: 2493 - RNA, 21 nt, synthetic construct
  source 1..21: mol_type = other RNA
tctgcattttattctggatga

SEQ ID NO: 2494 - RNA, 21 nt, synthetic construct
  source 1..21: mol_type = other RNA
gatggatttgaagcaaagcaa

SEQ ID NO: 2495 - RNA, 21 nt, synthetic construct
  source 1..21: mol_type = other RNA
ccagcttctccaggctcttta

SEQ ID NO: 2496 - RNA, 21 nt, synthetic construct
  source 1..21: mol_type = other RNA
cagtttccaatcccatagata

SEQ ID NO: 2497 - RNA, 21 nt, synthetic construct
  source 1..21: mol_type = other RNA
gagctgaacccattttgagta

SEQ ID NO: 2498 - RNA, 21 nt, synthetic construct
  source 1..21: mol_type = other RNA
ttgggttcatctgagcaagaa

SEQ ID NO: 2499 - RNA, 21 nt, synthetic construct
  source 1..21: mol_type = other RNA
gagctggcaaaggtggctcta

SEQ ID NO: 2500 - RNA, 21 nt, synthetic construct
  source 1..21: mol_type = other RNA
gctctccagttagttctctca

SEQ ID NO: 2501 - RNA, 21 nt, synthetic construct
  source 1..21: mol_type = other RNA
tctcgtaactggtttcattta

SEQ ID NO: 2502 - RNA, 21 nt, synthetic construct
  source 1..21: mol_type = other RNA
ctactgtgactgatgttacaa

SEQ ID NO: 2503 - RNA, 21 nt, synthetic construct
  source 1..21: mol_type = other RNA
ttacatcacagtgtttgcaaa

SEQ ID NO: 2504 - RNA, 21 nt, synthetic construct
  source 1..21: mol_type = other RNA
ttgccctgagtggatctccaa

SEQ ID NO: 2505 - RNA, 21 nt, synthetic construct
  source 1..21: mol_type = other RNA
tccaaggaccaggttatttta

SEQ ID NO: 2506 - RNA, 21 nt, synthetic construct
  source 1..21: mol_type = other RNA
tttgtcaagtgtcatatgtaa

SEQ ID NO: 2507 - RNA, 21 nt, synthetic construct
  source 1..21: mol_type = other RNA
aagggagaaggatctagaata

SEQ ID NO: 2508 - RNA, 21 nt, synthetic construct
  source 1..21: mol_type = other RNA
aatgtgttttctgaataacaa

SEQ ID NO: 2509 - RNA, 21 nt, synthetic construct
  source 1..21: mol_type = other RNA
gtgtggtgggttctttggaaa

SEQ ID NO: 2510 - RNA, 21 nt, synthetic construct
  source 1..21: mol_type = other RNA
ggagtgagatcattttcttaa

SEQ ID NO: 2511 - RNA, 21 nt, synthetic construct
  source 1..21: mol_type = other RNA
ttatcttctgcaattgcttaa

SEQ ID NO: 2512 - RNA, 21 nt, synthetic construct
  source 1..21: mol_type = other RNA
ttaggatgtttttcatgaaaa

SEQ ID NO: 2513 - RNA, 21 nt, synthetic construct
  source 1..21: mol_type = other RNA
ctggagagaagtttctggcca

SEQ ID NO: 2514 - RNA, 21 nt, synthetic construct
  source 1..21: mol_type = other RNA
gaagctgatgctttgcttcaa

SEQ ID NO: 2515 - RNA, 21 nt, synthetic construct
  source 1..21: mol_type = other RNA
cttcaaatccatccagaataa

SEQ ID NO: 2516 - RNA, 21 nt, synthetic construct
  source 1..21: mol_type = other RNA
gggctgaaagccatttgttga

SEQ ID NO: 2517 - RNA, 21 nt, synthetic construct
  source 1..21: mol_type = other RNA
ctggctttctccgactgctaa

SEQ ID NO: 2518 - RNA, 21 nt, synthetic construct
  source 1..21: mol_type = other RNA
gtggtctttcctatcatggaa

SEQ ID NO: 2519 - RNA, 21 nt, synthetic construct
  source 1..21: mol_type = other RNA
acggtcccacactggtgacta

SEQ ID NO: 2520 - RNA, 21 nt, synthetic construct
  source 1..21: mol_type = other RNA
tgactgcgatcttcagagcaa

SEQ ID NO: 2521 - RNA, 21 nt, synthetic construct
  source 1..21: mol_type = other RNA
cctctgaatggtccagggtta

SEQ ID NO: 2522 - RNA, 21 nt, synthetic construct
  source 1..21: mol_type = other RNA
gatcacactctgggtttatta

SEQ ID NO: 2523 - RNA, 21 nt, synthetic construct
  source 1..21: mol_type = other RNA
catggcagtgttcctatttga

SEQ ID NO: 2524 - RNA, 21 nt, synthetic construct
  source 1..21: mol_type = other RNA
gcatgccaaattgtagttcta

SEQ ID NO: 2525 - RNA, 21 nt, synthetic construct
  source 1..21: mol_type = other RNA
gttcttgtctgattggctcaa

SEQ ID NO: 2526 - RNA, 21 nt, synthetic construct
  source 1..21: mol_type = other RNA
agcaaggccaaaattaccaaa

SEQ ID NO: 2527 - RNA, 21 nt, synthetic construct
  source 1..21: mol_type = other RNA
gtttttactccagtggtgaaa

SEQ ID NO: 2528 - RNA, 21 nt, synthetic construct
  source 1..21: mol_type = other RNA
tgaagaaaactcctttagcaa

SEQ ID NO: 2529 - RNA, 21 nt, synthetic construct
  source 1..21: mol_type = other RNA
agacctgacaagcactgctaa

SEQ ID NO: 2530 - RNA, 21 nt, synthetic construct
  source 1..21: mol_type = other RNA
ccttcccactggaggtcacaa

SEQ ID NO: 2531 - RNA, 21 nt, synthetic construct
  source 1..21: mol_type = other RNA
tcacattcaggaagatgaaaa

SEQ ID NO: 2532 - RNA, 21 nt, synthetic construct
  source 1..21: mol_type = other RNA
tgccaccatcctgctgctgta

SEQ ID NO: 2533 - RNA, 21 nt, synthetic construct
  source 1..21: mol_type = other RNA
gctgtgtttttgctatcacaa

SEQ ID NO: 2534 - RNA, 21 nt, synthetic construct
  source 1..21: mol_type = other RNA
acagtgggtggtggatctgta

SEQ ID NO: 2535 - RNA, 21 nt, synthetic construct
  source 1..21: mol_type = other RNA
ctgtccaaggaaacttgaata

SEQ ID NO: 2536 - RNA, 21 nt, synthetic construct
  source 1..21: mol_type = other RNA
tgaatcaaagcagttaactta

SEQ ID NO: 2537 - RNA, 21 nt, synthetic construct
  source 1..21: mol_type = other RNA
gagcacctgcttcatgctcaa

SEQ ID NO: 2538 - RNA, 21 nt, synthetic construct
  source 1..21: mol_type = other RNA
tggtgctataggctggagaaa

SEQ ID NO: 2539 - RNA, 21 nt, synthetic construct
  source 1..21: mol_type = other RNA
agctcacccaataaacattaa

SEQ ID NO: 2540 - RNA, 21 nt, synthetic construct
  source 1..21: mol_type = other RNA
cattaagattgaggcctgcca

SEQ ID NO: 2541 - RNA, 21 nt, synthetic construct
  source 1..21: mol_type = other RNA
ctgccctcagggatcttgcaa

SEQ ID NO: 2542 - RNA, 21 nt, synthetic construct
  source 1..21: mol_type = other RNA
ttgcattcccagtggtcaaaa

SEQ ID NO: 2543 - RNA, 21 nt, synthetic construct
  source 1..21: mol_type = other RNA
cgcactcacccatgtgccaaa

SEQ ID NO: 2544 - RNA, 21 nt, synthetic construct
  source 1..21: mol_type = other RNA
cagctgaacagccaaatgcaa

SEQ ID NO: 2545 - RNA, 21 nt, synthetic construct
  source 1..21: mol_type = other RNA
atgcatggtgcagttgacaga

SEQ ID NO: 2546 - RNA, 21 nt, synthetic construct
  source 1..21: mol_type = other RNA
ggtgggaaatggtatgagcta

SEQ ID NO: 2547 - RNA, 21 nt, synthetic construct
  source 1..21: mol_type = other RNA
cacagggaaccctgcttgcaa

SEQ ID NO: 2548 - RNA, 21 nt, synthetic construct
  source 1..21: mol_type = other RNA
tgcactttgtaacatgtttaa

SEQ ID NO: 2549 - RNA, 21 nt, synthetic construct
  source 1..21: mol_type = other RNA
gcatcttagcttctattataa

SEQ ID NO: 2550 - RNA, 21 nt, synthetic construct
  source 1..21: mol_type = other RNA
cctttgaaacaagataactga

SEQ ID NO: 2551 - RNA, 21 nt, synthetic construct
  source 1..21: mol_type = other RNA
aaatacataagaccataacaa

SEQ ID NO: 2552 - RNA, 21 nt, synthetic construct
  source 1..21: mol_type = other RNA
tggcaggaccaggactataga

SEQ ID NO: 2553 - RNA, 21 nt, synthetic construct
  source 1..21: mol_type = other RNA
atagcccaggtcctctgataa

SEQ ID NO: 2554 - RNA, 21 nt, synthetic construct
  source 1..21: mol_type = other RNA
atacccagagcattacgtgaa

SEQ ID NO: 2555 - RNA, 21 nt, synthetic construct
  source 1..21: mol_type = other RNA
caggtaatgagggactggaaa

SEQ ID NO: 2556 - RNA, 21 nt, synthetic construct
  source 1..21: mol_type = other RNA
gagaccgagcgctttctggaa

SEQ ID NO: 2557 - RNA, 21 nt, synthetic construct
  source 1..21: mol_type = other RNA
ctggaaaagaggagtttcgaa

SEQ ID NO: 2558 - RNA, 21 nt, synthetic construct
  source 1..21: mol_type = other RNA
ttcgaggtagagtttgaagga

SEQ ID NO: 2559 - RNA, 21 nt, synthetic construct
  source 1..21: mol_type = other RNA
tgagggatgtgaattgcctga

SEQ ID NO: 2560 - RNA, 21 nt, synthetic construct
  source 1..21: mol_type = other RNA
gcctgcagagagaagcctgta

SEQ ID NO: 2561 - RNA, 21 nt, synthetic construct
  source 1..21: mol_type = other RNA
cctgttttgttggaaggttta

SEQ ID NO: 2562 - RNA, 21 nt, synthetic construct
  source 1..21: mol_type = other RNA
ggagatgcagaggtaaaagta

SEQ ID NO: 2563 - RNA, 21 nt, synthetic construct
  source 1..21: mol_type = other RNA
agtgtgagcagtgagttacaa

SEQ ID NO: 2564 - RNA, 21 nt, synthetic construct
  source 1..21: mol_type = other RNA
agcgagaggcagagaaagaaa

SEQ ID NO: 2565 - RNA, 21 nt, synthetic construct
  source 1..21: mol_type = other RNA
catgctgaagggaccttgaaa

SEQ ID NO: 2566 - RNA, 21 nt, synthetic construct
  source 1..21: mol_type = other RNA
aagggtaaagaagtttgataa

SEQ ID NO: 2567 - RNA, 21 nt, synthetic construct
  source 1..21: mol_type = other RNA
tattaaaggagttaagagtaa

SEQ ID NO: 2568 - RNA, 21 nt, synthetic construct
  source 1..21: mol_type = other RNA
gagtagcaagttctagagaaa

SEQ ID NO: 2569 - RNA, 21 nt, synthetic construct
  source 1..21: mol_type = other RNA
agagctgctctggaaaatgta

SEQ ID NO: 2570 - RNA, 21 nt, synthetic construct
  source 1..21: mol_type = other RNA
tcctcacaaccacctaatcaa

SEQ ID NO: 2571 - RNA, 21 nt, synthetic construct
  source 1..21: mol_type = other RNA
atcaggctgaggtgtcttaaa

SEQ ID NO: 2572 - RNA, 21 nt, synthetic construct
  source 1..21: mol_type = other RNA
aagccttttgctcacaaaaca

SEQ ID NO: 2573 - RNA, 21 nt, synthetic construct
  source 1..21: mol_type = other RNA
acctggcacaatggctaatta

SEQ ID NO: 2574 - RNA, 21 nt, synthetic construct
  source 1..21: mol_type = other RNA
gtgaaacttcctaagtataaa

SEQ ID NO: 2575 - RNA, 21 nt, synthetic construct
  source 1..21: mol_type = other RNA
ttgtctgtttttgtaacttaa

SEQ ID NO: 2576 - RNA, 21 nt, synthetic construct
  source 1..21: mol_type = other RNA
cctggccaacatggtgaaaca

SEQ ID NO: 2577 - RNA, 21 nt, synthetic construct
  source 1..21: mol_type = other RNA
gatcacaaggtcactagatga

SEQ ID NO: 2578 - RNA, 21 nt, synthetic construct
  source 1..21: mol_type = other RNA
aacacaaaagttagctgagca

SEQ ID NO: 2579 - RNA, 21 nt, synthetic construct
  source 1..21: mol_type = other RNA
ccactcgggaggctgagacaa

SEQ ID NO: 2580 - RNA, 21 nt, synthetic construct
  source 1..21: mol_type = other RNA
acaggagaatcgcttaaacca

SEQ ID NO: 2581 - RNA, 21 nt, synthetic construct
  source 1..21: mol_type = other RNA
agagtacagtgagccaagata

SEQ ID NO: 2582 - RNA, 21 nt, synthetic construct
  source 1..21: mol_type = other RNA
actgcactccggcctgatgaa

SEQ ID NO: 2583 - RNA, 21 nt, synthetic construct
  source 1..21: mol_type = other RNA
gagcgagattccgtcttaaaa

SEQ ID NO: 2584 - RNA, 23 nt, synthetic construct
  source 1..23: mol_type = other RNA
tttcttgggccttgcaaccgctg

SEQ ID NO: 2585 - RNA, 23 nt, synthetic construct
  source 1..23: mol_type = other RNA
taatgcattttccttcccaggat

SEQ ID NO: 2586 - RNA, 23 nt, synthetic construct
  source 1..23: mol_type = other RNA
taaagccacaagaatccgcacag

SEQ ID NO: 2587 - RNA, 23 nt, synthetic construct
  source 1..23: mol_type = other RNA
tacatagaaaagatagggccaaa

SEQ ID NO: 2588 - RNA, 23 nt, synthetic construct
  source 1..23: mol_type = other RNA
ttttggatgggcacagcttggac

SEQ ID NO: 2589 - RNA, 23 nt, synthetic construct
  source 1..23: mol_type = other RNA
tttttggtgtcatcttggacttt

SEQ ID NO: 2590 - RNA, 23 nt, synthetic construct
  source 1..23: mol_type = other RNA
ttgacaattgtcttgatgagggt

SEQ ID NO: 2591 - RNA, 23 nt, synthetic construct
  source 1..23: mol_type = other RNA
tactgactgcgtgtgtgaaatgt

SEQ ID NO: 2592 - RNA, 23 nt, synthetic construct
  source 1..23: mol_type = other RNA
ttgactttctgtttggaggagac

SEQ ID NO: 2593 - RNA, 23 nt, synthetic construct
  source 1..23: mol_type = other RNA
taatgaagtccaaaccggtgact

SEQ ID NO: 2594 - RNA, 23 nt, synthetic construct
  source 1..23: mol_type = other RNA
tcatcttggataaggtcaggatg

SEQ ID NO: 2595 - RNA, 23 nt, synthetic construct
  source 1..23: mol_type = other RNA
tatctgttggtagactgccagtg

SEQ ID NO: 2596 - RNA, 23 nt, synthetic construct
  source 1..23: mol_type = other RNA
taaggcatactggtgaggatctg

SEQ ID NO: 2597 - RNA, 23 nt, synthetic construct
  source 1..23: mol_type = other RNA
ttttggatcacgtttctggaagg

SEQ ID NO: 2598 - RNA, 23 nt, synthetic construct
  source 1..23: mol_type = other RNA
tttctccaggtcgttggatattt

SEQ ID NO: 2599 - RNA, 23 nt, synthetic construct
  source 1..23: mol_type = other RNA
tacgtgaagaagatcccggaggt

SEQ ID NO: 2600 - RNA, 23 nt, synthetic construct
  source 1..23: mol_type = other RNA
tcagctcttagagaaggccagca

SEQ ID NO: 2601 - RNA, 23 nt, synthetic construct
  source 1..23: mol_type = other RNA
ttccaaggtctccaggccactgg

SEQ ID NO: 2602 - RNA, 23 nt, synthetic construct
  source 1..23: mol_type = other RNA
ttagcctgaagcttccaggacac

SEQ ID NO: 2603 - RNA, 23 nt, synthetic construct
  source 1..23: mol_type = other RNA
taccacctctgtggagtagcctg

SEQ ID NO: 2604 - RNA, 23 nt, synthetic construct
  source 1..23: mol_type = other RNA
tacagcatgtcctgcagagaccc

SEQ ID NO: 2605 - RNA, 23 nt, synthetic construct
  source 1..23: mol_type = other RNA
taggaagagtgaccttcaaggcc

SEQ ID NO: 2606 - RNA, 23 nt, synthetic construct
  source 1..23: mol_type = other RNA
tttaacgtagtccttgcaggaag

SEQ ID NO: 2607 - RNA, 23 nt, synthetic construct
  source 1..23: mol_type = other RNA
tccagagttccttcccttaacgt

SEQ ID NO: 2608 - RNA, 23 nt, synthetic construct
  source 1..23: mol_type = other RNA
tggagatacctggaagccagagt

SEQ ID NO: 2609 - RNA, 23 nt, synthetic construct
  source 1..23: mol_type = other RNA
tatgcaatgctcttcaatcctgg

SEQ ID NO: 2610 - RNA, 23 nt, synthetic construct
  source 1..23: mol_type = other RNA
taaattgacagagtcctggataa

SEQ ID NO: 2611 - RNA, 23 nt, synthetic construct
  source 1..23: mol_type = other RNA
tcttagaggagtcagggaaattg

SEQ ID NO: 2612 - RNA, 23 nt, synthetic construct
  source 1..23: mol_type = other RNA
ttcttatgcctttggaagagtgg

SEQ ID NO: 2613 - RNA, 23 nt, synthetic construct
  source 1..23: mol_type = other RNA
tttggtttcaagcaaaaggaggc

SEQ ID NO: 2614 - RNA, 23 nt, synthetic construct
  source 1..23: mol_type = other RNA
ttgagaataggatcctgtgtata

SEQ ID NO: 2615 - RNA, 23 nt, synthetic construct
  source 1..23: mol_type = other RNA
tccactctttgctgggtggaccc

SEQ ID NO: 2616 - RNA, 23 nt, synthetic construct
  source 1..23: mol_type = other RNA
taatcccagatgcagcccactct

SEQ ID NO: 2617 - RNA, 23 nt, synthetic construct
  source 1..23: mol_type = other RNA
ttgaagaccttggtgggaatccc

SEQ ID NO: 2618 - RNA, 23 nt, synthetic construct
  source 1..23: mol_type = other RNA
taactcttgttgatggctgaaga

SEQ ID NO: 2619 - RNA, 23 nt, synthetic construct
  source 1..23: mol_type = other RNA
ttcacattgaggcattcagtgag

SEQ ID NO: 2620 - RNA, 23 nt, synthetic construct
  source 1..23: mol_type = other RNA
tttgttctggtcatccaaaggct

SEQ ID NO: 2621 - RNA, 23 nt, synthetic construct
  source 1..23: mol_type = other RNA
tttggaattctcagagggaacct

SEQ ID NO: 2622 - RNA, 23 nt, synthetic construct
  source 1..23: mol_type = other RNA
ttcttcatggaactccttggaat

SEQ ID NO: 2623 - RNA, 23 nt, synthetic construct
  source 1..23: mol_type = other RNA
tagttcctgcgtgtgtggatgtg

SEQ ID NO: 2624 - RNA, 23 nt, synthetic construct
  source 1..23: mol_type = other RNA
ttccagcttgtgttgctgggagt

SEQ ID NO: 2625 - RNA, 23 nt, synthetic construct
  source 1..23: mol_type = other RNA
ttaaataaacatgtgcttccagc

SEQ ID NO: 2626 - RNA, 23 nt, synthetic construct
  source 1..23: mol_type = other RNA
tcatccagaataaaatgcagaat

SEQ ID NO: 2627 - RNA, 23 nt, synthetic construct
  source 1..23: mol_type = other RNA
ttgctttgcttcaaatccatcca

SEQ ID NO: 2628 - RNA, 23 nt, synthetic construct
  source 1..23: mol_type = other RNA
taaagagcctggagaagctggtg

SEQ ID NO: 2629 - RNA, 23 nt, synthetic construct
  source 1..23: mol_type = other RNA
tatctatgggattggaaactgca

SEQ ID NO: 2630 - RNA, 23 nt, synthetic construct
  source 1..23: mol_type = other RNA
tactcaaaatgggttcagctcag

SEQ ID NO: 2631 - RNA, 23 nt, synthetic construct
  source 1..23: mol_type = other RNA
ttcttgctcagatgaacccaacc

SEQ ID NO: 2632 - RNA, 23 nt, synthetic construct
  source 1..23: mol_type = other RNA
tagagccacctttgccagctctt

SEQ ID NO: 2633 - RNA, 23 nt, synthetic construct
  source 1..23: mol_type = other RNA
tgagagaactaactggagagcca

SEQ ID NO: 2634 - RNA, 23 nt, synthetic construct
  source 1..23: mol_type = other RNA
taaatgaaaccagttacgagaga

SEQ ID NO: 2635 - RNA, 23 nt, synthetic construct
  source 1..23: mol_type = other RNA
ttgtaacatcagtcacagtagaa

SEQ ID NO: 2636 - RNA, 23 nt, synthetic construct
  source 1..23: mol_type = other RNA
tttgcaaacactgtgatgtaaca

SEQ ID NO: 2637 - RNA, 23 nt, synthetic construct
  source 1..23: mol_type = other RNA
ttggagatccactcagggcaaca

SEQ ID NO: 2638 - RNA, 23 nt, synthetic construct
  source 1..23: mol_type = other RNA
taaaataacctggtccttggaga

SEQ ID NO: 2639 - RNA, 23 nt, synthetic construct
  source 1..23: mol_type = other RNA
ttacatatgacacttgacaaaac

SEQ ID NO: 2640 - RNA, 23 nt, synthetic construct
  source 1..23: mol_type = other RNA
tattctagatccttctcccttct

SEQ ID NO: 2641 - RNA, 23 nt, synthetic construct
  source 1..23: mol_type = other RNA
ttgttattcagaaaacacattct

SEQ ID NO: 2642 - RNA, 23 nt, synthetic construct
  source 1..23: mol_type = other RNA
tttccaaagaacccaccacacaa

SEQ ID NO: 2643 - RNA, 23 nt, synthetic construct
  source 1..23: mol_type = other RNA
ttaagaaaatgatctcactcctt

SEQ ID NO: 2644 - RNA, 23 nt, synthetic construct
  source 1..23: mol_type = other RNA
ttaagcaattgcagaagataaga

SEQ ID NO: 2645 - RNA, 23 nt, synthetic construct
  source 1..23: mol_type = other RNA
ttttcatgaaaaacatcctaagc

SEQ ID NO: 2646 - RNA, 23 nt, synthetic construct
  source 1..23: mol_type = other RNA
tggccagaaacttctctccaggg

SEQ ID NO: 2647 - RNA, 23 nt, synthetic construct
  source 1..23: mol_type = other RNA
ttgaagcaaagcatcagcttctc

SEQ ID NO: 2648 - RNA, 23 nt, synthetic construct
  source 1..23: mol_type = other RNA
ttattctggatggatttgaagca

SEQ ID NO: 2649 - RNA, 23 nt, synthetic construct
  source 1..23: mol_type = other RNA
tcaacaaatggctttcagccctt

SEQ ID NO: 2650 - RNA, 23 nt, synthetic construct
  source 1..23: mol_type = other RNA
ttagcagtcggagaaagccagag

SEQ ID NO: 2651 - RNA, 23 nt, synthetic construct
  source 1..23: mol_type = other RNA
ttccatgataggaaagaccactc

SEQ ID NO: 2652 - RNA, 23 nt, synthetic construct
  source 1..23: mol_type = other RNA
tagtcaccagtgtgggaccgtca

SEQ ID NO: 2653 - RNA, 23 nt, synthetic construct
  source 1..23: mol_type = other RNA
ttgctctgaagatcgcagtcacc

SEQ ID NO: 2654 - RNA, 23 nt, synthetic construct
  source 1..23: mol_type = other RNA
taaccctggaccattcagagggt

SEQ ID NO: 2655 - RNA, 23 nt, synthetic construct
  source 1..23: mol_type = other RNA
taataaacccagagtgtgatcaa

SEQ ID NO: 2656 - RNA, 23 nt, synthetic construct
  source 1..23: mol_type = other RNA
tcaaataggaacactgccatgta

SEQ ID NO: 2657 - RNA, 23 nt, synthetic construct
  source 1..23: mol_type = other RNA
tagaactacaatttggcatgcaa

SEQ ID NO: 2658 - RNA, 23 nt, synthetic construct
  source 1..23: mol_type = other RNA
ttgagccaatcagacaagaacta

SEQ ID NO: 2659 - RNA, 23 nt, synthetic construct
  source 1..23: mol_type = other RNA
tttggtaattttggccttgcttg

SEQ ID NO: 2660 - RNA, 23 nt, synthetic construct
  source 1..23: mol_type = other RNA
tttcaccactggagtaaaaaccc

SEQ ID NO: 2661 - RNA, 23 nt, synthetic construct
  source 1..23: mol_type = other RNA
ttgctaaaggagttttcttcacc

SEQ ID NO: 2662 - RNA, 23 nt, synthetic construct
  source 1..23: mol_type = other RNA
ttagcagtgcttgtcaggtctca

SEQ ID NO: 2663 - RNA, 23 nt, synthetic construct
  source 1..23: mol_type = other RNA
ttgtgacctccagtgggaagggc

SEQ ID NO: 2664 - RNA, 23 nt, synthetic construct
  source 1..23: mol_type = other RNA
ttttcatcttcctgaatgtgacc

SEQ ID NO: 2665 - RNA, 23 nt, synthetic construct
  source 1..23: mol_type = other RNA
tacagcagcaggatggtggcaga

SEQ ID NO: 2666 - RNA, 23 nt, synthetic construct
  source 1..23: mol_type = other RNA
ttgtgatagcaaaaacacagcag

SEQ ID NO: 2667 - RNA, 23 nt, synthetic construct
  source 1..23: mol_type = other RNA
tacagatccaccacccactgtgt

SEQ ID NO: 2668 - RNA, 23 nt, synthetic construct
  source 1..23: mol_type = other RNA
tattcaagtttccttggacagat

SEQ ID NO: 2669 - RNA, 23 nt, synthetic construct
  source 1..23: mol_type = other RNA
taagttaactgctttgattcaag

SEQ ID NO: 2670 - RNA, 23 nt, synthetic construct
  source 1..23: mol_type = other RNA
ttgagcatgaagcaggtgctcag

SEQ ID NO: 2671 - RNA, 23 nt, synthetic construct
  source 1..23: mol_type = other RNA
tttctccagcctatagcaccagt

SEQ ID NO: 2672 - RNA, 23 nt, synthetic construct
  source 1..23: mol_type = other RNA
ttaatgtttattgggtgagcttc

SEQ ID NO: 2673 - RNA, 23 nt, synthetic construct
  source 1..23: mol_type = other RNA
tggcaggcctcaatcttaatgtt

SEQ ID NO: 2674 - RNA, 23 nt, synthetic construct
  source 1..23: mol_type = other RNA
ttgcaagatccctgagggcaggc

SEQ ID NO: 2675 - RNA, 23 nt, synthetic construct
  source 1..23: mol_type = other RNA
ttttgaccactgggaatgcaaga

SEQ ID NO: 2676 - RNA, 23 nt, synthetic construct
  source 1..23: mol_type = other RNA
tttggcacatgggtgagtgcggt

SEQ ID NO: 2677 - RNA, 23 nt, synthetic construct
  source 1..23: mol_type = other RNA
ttgcatttggctgttcagctgct

SEQ ID NO: 2678 - RNA, 23 nt, synthetic construct
  source 1..23: mol_type = other RNA
tctgtcaactgcaccatgcattt

SEQ ID NO: 2679 - RNA, 23 nt, synthetic construct
  source 1..23: mol_type = other RNA
tagctcataccatttcccacctg

SEQ ID NO: 2680 - RNA, 23 nt, synthetic construct
  source 1..23: mol_type = other RNA
ttgcaagcagggttccctgtggg

SEQ ID NO: 2681 - RNA, 23 nt, synthetic construct
  source 1..23: mol_type = other RNA
ttaaacatgttacaaagtgcaag

SEQ ID NO: 2682 - RNA, 23 nt, synthetic construct
  source 1..23: mol_type = other RNA
ttataatagaagctaagatgccc

SEQ ID NO: 2683 - RNA, 23 nt, synthetic construct
  source 1..23: mol_type = other RNA
tcagttatcttgtttcaaaggga

SEQ ID NO: 2684 - RNA, 23 nt, synthetic construct
  source 1..23: mol_type = other RNA
ttgttatggtcttatgtattttc

SEQ ID NO: 2685 - RNA, 23 nt, synthetic construct
  source 1..23: mol_type = other RNA
tctatagtcctggtcctgccacc

SEQ ID NO: 2686 - RNA, 23 nt, synthetic construct
  source 1..23: mol_type = other RNA
ttatcagaggacctgggctatag

SEQ ID NO: 2687 - RNA, 23 nt, synthetic construct
  source 1..23: mol_type = other RNA
ttcacgtaatgctctgggtatca

SEQ ID NO: 2688 - RNA, 23 nt, synthetic construct
  source 1..23: mol_type = other RNA
tttccagtccctcattacctggc

SEQ ID NO: 2689 - RNA, 23 nt, synthetic construct
  source 1..23: mol_type = other RNA
ttccagaaagcgctcggtctccc

SEQ ID NO: 2690 - RNA, 23 nt, synthetic construct
  source 1..23: mol_type = other RNA
ttcgaaactcctcttttccagaa

SEQ ID NO: 2691 - RNA, 23 nt, synthetic construct
  source 1..23: mol_type = other RNA
tccttcaaactctacctcgaaac

SEQ ID NO: 2692 - RNA, 23 nt, synthetic construct
  source 1..23: mol_type = other RNA
tcaggcaattcacatccctcacc

SEQ ID NO: 2693 - RNA, 23 nt, synthetic construct
  source 1..23: mol_type = other RNA
tacaggcttctctctgcaggcaa

SEQ ID NO: 2694 - RNA, 23 nt, synthetic construct
  source 1..23: mol_type = other RNA
taaaccttccaacaaaacaggct

SEQ ID NO: 2695 - RNA, 23 nt, synthetic construct
  source 1..23: mol_type = other RNA
tacttttacctctgcatctccac

SEQ ID NO: 2696 - RNA, 23 nt, synthetic construct
  source 1..23: mol_type = other RNA
ttgtaactcactgctcacacttt

SEQ ID NO: 2697 - RNA, 23 nt, synthetic construct
  source 1..23: mol_type = other RNA
tttctttctctgcctctcgctgt

SEQ ID NO: 2698 - RNA, 23 nt, synthetic construct
  source 1..23: mol_type = other RNA
tttcaaggtcccttcagcatggc

SEQ ID NO: 2699 - RNA, 23 nt, synthetic construct
  source 1..23: mol_type = other RNA
ttatcaaacttctttacccttca

SEQ ID NO: 2700 - RNA, 23 nt, synthetic construct
  source 1..23: mol_type = other RNA
ttactcttaactcctttaatatc

SEQ ID NO: 2701 - RNA, 23 nt, synthetic construct
  source 1..23: mol_type = other RNA
tttctctagaacttgctactctt

SEQ ID NO: 2702 - RNA, 23 nt, synthetic construct
  source 1..23: mol_type = other RNA
tacattttccagagcagctctca

SEQ ID NO: 2703 - RNA, 23 nt, synthetic construct
  source 1..23: mol_type = other RNA
ttgattaggtggttgtgaggatc

SEQ ID NO: 2704 - RNA, 23 nt, synthetic construct
  source 1..23: mol_type = other RNA
tttaagacacctcagcctgatta

SEQ ID NO: 2705 - RNA, 23 nt, synthetic construct
  source 1..23: mol_type = other RNA
tgttttgtgagcaaaaggcttaa

SEQ ID NO: 2706 - RNA, 23 nt, synthetic construct
  source 1..23: mol_type = other RNA
taattagccattgtgccaggttt

SEQ ID NO: 2707 - RNA, 23 nt, synthetic construct
  source 1..23: mol_type = other RNA
tttatacttaggaagtttcacac

SEQ ID NO: 2708 - RNA, 23 nt, synthetic construct
  source 1..23: mol_type = other RNA
ttaagttacaaaaacagacaacc

SEQ ID NO: 2709 - RNA, 23 nt, synthetic construct
  source 1..23: mol_type = other RNA
tgtttcaccatgttggccaggat

SEQ ID NO: 2710 - RNA, 23 nt, synthetic construct
  source 1..23: mol_type = other RNA
tcatctagtgaccttgtgatccc

SEQ ID NO: 2711 - RNA, 23 nt, synthetic construct
  source 1..23: mol_type = other RNA
tgctcagctaacttttgtgtttt

SEQ ID NO: 2712 - RNA, 23 nt, synthetic construct
  source 1..23: mol_type = other RNA
ttgtctcagcctcccgagtggct

SEQ ID NO: 2713 - RNA, 23 nt, synthetic construct
  source 1..23: mol_type = other RNA
tggtttaagcgattctcctgtct

SEQ ID NO: 2714 - RNA, 23 nt, synthetic construct
  source 1..23: mol_type = other RNA
tatcttggctcactgtactctcc

SEQ ID NO: 2715 - RNA, 23 nt, synthetic construct
  source 1..23: mol_type = other RNA
ttcatcaggccggagtgcagtgg

SEQ ID NO: 2716 - RNA, 23 nt, synthetic construct
  source 1..23: mol_type = other RNA
ttttaagacggaatctcgctctg

SEQ ID NO: 2717 - RNA, 21 nt, synthetic construct
  source 1..21: mol_type = other RNA
  modified_base 1: mod_base = OTHER; note = 2'-O-methylguanosine-3'-phosphorothioate
  modified_base 2: mod_base = OTHER; note = 2'-O-methylcytidine-3'-phosphorothioate
  modified_base 3: mod_base = OTHER; note = 2'-O-methylguanosine-3'-phosphate
  modified_base 4: mod_base = OTHER; note = 2'-O-methylguanosine-3'-phosphate
  modified_base 5: mod_base = OTHER; note = 2'-O-methyluridine-3'-phosphate
  modified_base 6: mod_base = OTHER; note = 2'-O-methyluridine-3'-phosphate
  modified_base 7: mod_base = OTHER; note = 2'-deoxy-2'-fluoroguanosine-3'-phosphate
  modified_base 8: mod_base = OTHER; note = 2'-O-methylcytidine-3'-phosphate
  modified_base 9: mod_base = OTHER; note = 2'-deoxy-2'-fluoroadenosine-3'-phosphate
  modified_base 10: mod_base = OTHER; note = 2'-deoxy-2'-fluoroadenosine-3'-phosphate
  modified_base 11: mod_base = OTHER; note = 2'-deoxy-2'-fluoroguanosine-3'-phosphate
  modified_base 12: mod_base = OTHER; note = 2'-O-methylguanosine-3'-phosphate
  modified_base 13: mod_base = OTHER; note = 2'-O-methylcytidine-3'-phosphate
  modified_base 14: mod_base = OTHER; note = 2'-O-methylcytidine-3'-phosphate
  modified_base 15: mod_base = OTHER; note = 2'-O-methylcytidine-3'-phosphate
  modified_base 16: mod_base = OTHER; note = 2'-O-methyladenosine-3'-phosphate
  modified_base 17: mod_base = OTHER; note = 2'-O-methyladenosine-3'-phosphate
  modified_base 18: mod_base = OTHER; note = 2'-O-methylguanosine-3'-phosphate
  modified_base 19: mod_base = OTHER; note = 2'-O-methyladenosine-3'-phosphate
  modified_base 20: mod_base = OTHER; note = 2'-O-methyladenosine-3'-phosphate
  modified_base 21: mod_base = OTHER; note = 2'-O-methyladenosine-3'-phosphate ((2S,4R)-1-[29-[[2-(acetylamino)-2-deoxy-beta-D-galactopyra nosyl]oxy]-14,14-bis[[3-[[3-[[5-[[2-(acetylamino)-2-deoxy-b eta-D-galactopyranosyl]oxy]-1-oxopentyl]amino]propyl]amino] -3-oxopropoxy]methyl]-1,12,19,25-tetraoxo-16-oxa-13,20,24-t riazanonacos-1-yl]-4-hydroxy-2-pyrrolidinyl)methyl ester
gcggttgcaaggcccaagaaa

SEQ ID NO: 2718 - RNA, 21 nt, synthetic construct
  source 1..21: mol_type = other RNA
  modified_base 1: mod_base = OTHER; note = 2'-O-methylcytidine-3'-phosphorothioate
  modified_base 2: mod_base = OTHER; note = 2'-O-methylcytidine-3'-phosphorothioate
  modified_base 3: mod_base = OTHER; note = 2'-O-methyluridine-3'-phosphate
  modified_base 4: mod_base = OTHER; note = 2'-O-methylguanosine-3'-phosphate
  modified_base 5: mod_base = OTHER; note = 2'-O-methylguanosine-3'-phosphate
  modified_base 6: mod_base = OTHER; note = 2'-O-methylguanosine-3'-phosphate
  modified_base 7: mod_base = OTHER; note = 2'-deoxy-2'-fluoroadenosine-3'-phosphate
  modified_base 8: mod_base = OTHER; note = 2'-O-methyladenosine-3'-phosphate
  modified_base 9: mod_base = OTHER; note = 2'-deoxy-2'-fluoroguanosine-3'-phosphate
  modified_base 10: mod_base = OTHER; note = 2'-deoxy-2'-fluoroguanosine-3'-phosphate
  modified_base 11: mod_base = OTHER; note = 2'-deoxy-2'-fluoroadenosine-3'-phosphate
  modified_base 12: mod_base = OTHER; note = 2'-O-methyladenosine-3'-phosphate
  modified_base 13: mod_base = OTHER; note = 2'-O-methyladenosine-3'-phosphate
  modified_base 14: mod_base = OTHER; note = 2'-O-methyladenosine-3'-phosphate
  modified_base 15: mod_base = OTHER; note = 2'-O-methyluridine-3'-phosphate
  modified_base 16: mod_base = OTHER; note = 2'-O-methylguanosine-3'-phosphate
  modified_base 17: mod_base = OTHER; note = 2'-O-methylcytidine-3'-phosphate
  modified_base 18: mod_base = OTHER; note = 2'-O-methyladenosine-3'-phosphate
  modified_base 19: mod_base = OTHER; note = 2'-O-methyluridine-3'-phosphate
  modified_base 20: mod_base = OTHER; note = 2'-O-methyluridine-3'-phosphate
  modified_base 21: mod_base = OTHER; note = 2'-O-methyladenosine-3'-phosphate ((2S,4R)-1-[29-[[2-(acetylamino)-2-deoxy-beta-D-galactopyra nosyl]oxy]-14,14-bis[[3-[[3-[[5-[[2-(acetylamino)-2-deoxy-b eta-D-galactopyranosyl]oxy]-1-oxopentyl]amino]propyl]amino] -3-oxopropoxy]methyl]-1,12,19,25-tetraoxo-16-oxa-13,20,24-t riazanonacos-1-yl]-4-hydroxy-2-pyrrolidinyl)methyl ester
cctgggaaggaaaatgcatta

SEQ ID NO: 2719 - RNA, 21 nt, synthetic construct
  source 1..21: mol_type = other RNA
  modified_base 1: mod_base = OTHER; note = 2'-O-methylguanosine-3'-phosphorothioate
  modified_base 2: mod_base = OTHER; note = 2'-O-methyluridine-3'-phosphorothioate
  modified_base 3: mod_base = OTHER; note = 2'-O-methylguanosine-3'-phosphate
  modified_base 4: mod_base = OTHER; note = 2'-O-methylcytidine-3'-phosphate
  modified_base 5: mod_base = OTHER; note = 2'-O-methylguanosine-3'-phosphate
  modified_base 6: mod_base = OTHER; note = 2'-O-methylguanosine-3'-phosphate
  modified_base 7: mod_base = OTHER; note = 2'-deoxy-2'-fluoroadenosine-3'-phosphate
  modified_base 8: mod_base = OTHER; note = 2'-O-methyluridine-3'-phosphate
  modified_base 9: mod_base = OTHER; note = 2'-deoxy-2'-fluorouridine-3'-phosphate
  modified_base 10: mod_base = OTHER; note = 2'-deoxy-2'-fluorocytidine-3'-phosphate
  modified_base 11: mod_base = OTHER; note = 2'-deoxy-2'-fluorouridine-3'-phosphate
  modified_base 12: mod_base = OTHER; note = 2'-O-methyluridine-3'-phosphate
  modified_base 13: mod_base = OTHER; note = 2'-O-methylguanosine-3'-phosphate
  modified_base 14: mod_base = OTHER; note = 2'-O-methyluridine-3'-phosphate
  modified_base 15: mod_base = OTHER; note = 2'-O-methylguanosine-3'-phosphate
  modified_base 16: mod_base = OTHER; note = 2'-O-methylguanosine-3'-phosphate
  modified_base 17: mod_base = OTHER; note = 2'-O-methylcytidine-3'-phosphate
  modified_base 18: mod_base = OTHER; note = 2'-O-methyluridine-3'-phosphate
  modified_base 19: mod_base = OTHER; note = 2'-O-methyluridine-3'-phosphate
  modified_base 20: mod_base = OTHER; note = 2'-O-methyluridine-3'-phosphate
  modified_base 21: mod_base = OTHER; note = 2'-O-methyladenosine-3'-phosphate ((2S,4R)-1-[29-[[2-(acetylamino)-2-deoxy-beta-D-galactopyra nosyl]oxy]-14,14-bis[[3-[[3-[[5-[[2-(acetylamino)-2-deoxy-b eta-D-galactopyranosyl]oxy]-1-oxopentyl]amino]propyl]amino] -3-oxopropoxy]methyl]-1,12,19,25-tetraoxo-16-oxa-13,20,24-t riazanonacos-1-yl]-4-hydroxy-2-pyrrolidinyl)methyl ester
gtgcggattcttgtggcttta

SEQ ID NO: 2720 - RNA, 21 nt, synthetic construct
  source 1..21: mol_type = other RNA
  modified_base 1: mod_base = OTHER; note = 2'-O-methyluridine-3'-phosphorothioate
  modified_base 2: mod_base = OTHER; note = 2'-O-methylguanosine-3'-phosphorothioate
  modified_base 3: mod_base = OTHER; note = 2'-O-methylguanosine-3'-phosphate
  modified_base 4: mod_base = OTHER; note = 2'-O-methylcytidine-3'-phosphate
  modified_base 5: mod_base = OTHER; note = 2'-O-methylcytidine-3'-phosphate
  modified_base 6: mod_base = OTHER; note = 2'-O-methylcytidine-3'-phosphate
  modified_base 7: mod_base = OTHER; note = 2'-deoxy-2'-fluorouridine-3'-phosphate
  modified_base 8: mod_base = OTHER; note = 2'-O-methyladenosine-3'-phosphate
  modified_base 9: mod_base = OTHER; note = 2'-deoxy-2'-fluorouridine-3'-phosphate
  modified_base 10: mod_base = OTHER; note = 2'-deoxy-2'-fluorocytidine-3'-phosphate
  modified_base 11: mod_base = OTHER; note = 2'-deoxy-2'-fluorouridine-3'-phosphate
  modified_base 12: mod_base = OTHER; note = 2'-O-methyluridine-3'-phosphate
  modified_base 13: mod_base = OTHER; note = 2'-O-methyluridine-3'-phosphate
  modified_base 14: mod_base = OTHER; note = 2'-O-methyluridine-3'-phosphate
  modified_base 15: mod_base = OTHER; note = 2'-O-methylcytidine-3'-phosphate
  modified_base 16: mod_base = OTHER; note = 2'-O-methyluridine-3'-phosphate
  modified_base 17: mod_base = OTHER; note = 2'-O-methyladenosine-3'-phosphate
  modified_base 18: mod_base = OTHER; note = 2'-O-methyluridine-3'-phosphate
  modified_base 19: mod_base = OTHER; note = 2'-O-methylguanosine-3'-phosphate
  modified_base 20: mod_base = OTHER; note = 2'-O-methyluridine-3'-phosphate
  modified_base 21: mod_base = OTHER; note = 2'-O-methyladenosine-3'-phosphate ((2S,4R)-1-[29-[[2-(acetylamino)-2-deoxy-beta-D-galactopyra nosyl]oxy]-14,14-bis[[3-[[3-[[5-[[2-(acetylamino)-2-deoxy-b eta-D-galactopyranosyl]oxy]-1-oxopentyl]amino]propyl]amino] -3-oxopropoxy]methyl]-1,12,19,25-tetraoxo-16-oxa-13,20,24-t riazanonacos-1-yl]-4-hydroxy-2-pyrrolidinyl)methyl ester
tggccctatcttttctatgta

SEQ ID NO: 2721 - RNA, 21 nt, synthetic construct
  source 1..21: mol_type = other RNA
  modified_base 1: mod_base = OTHER; note = 2'-O-methylcytidine-3'-phosphorothioate
  modified_base 2: mod_base = OTHER; note = 2'-O-methylcytidine-3'-phosphorothioate
  modified_base 3: mod_base = OTHER; note = 2'-O-methyladenosine-3'-phosphate
  modified_base 4: mod_base = OTHER; note = 2'-O-methyladenosine-3'-phosphate
  modified_base 5: mod_base = OTHER; note = 2'-O-methylguanosine-3'-phosphate
  modified_base 6: mod_base = OTHER; note = 2'-O-methylcytidine-3'-phosphate
  modified_base 7: mod_base = OTHER; note = 2'-deoxy-2'-fluorouridine-3'-phosphate
  modified_base 8: mod_base = OTHER; note = 2'-O-methylguanosine-3'-phosphate
  modified_base 9: mod_base = OTHER; note = 2'-deoxy-2'-fluorouridine-3'-phosphate
  modified_base 10: mod_base = OTHER; note = 2'-deoxy-2'-fluoroguanosine-3'-phosphate
  modified_base 11: mod_base = OTHER; note = 2'-deoxy-2'-fluorocytidine-3'-phosphate
  modified_base 12: mod_base = OTHER; note = 2'-O-methylcytidine-3'-phosphate
  modified_base 13: mod_base = OTHER; note = 2'-O-methylcytidine-3'-phosphate
  modified_base 14: mod_base = OTHER; note = 2'-O-methyladenosine-3'-phosphate
  modified_base 15: mod_base = OTHER; note = 2'-O-methyluridine-3'-phosphate
  modified_base 16: mod_base = OTHER; note = 2'-O-methylcytidine-3'-phosphate
  modified_base 17: mod_base = OTHER; note = 2'-O-methylcytidine-3'-phosphate
  modified_base 18: mod_base = OTHER; note = 2'-O-methyladenosine-3'-phosphate
  modified_base 19: mod_base = OTHER; note = 2'-O-methyladenosine-3'-phosphate
  modified_base 20: mod_base = OTHER; note = 2'-O-methyladenosine-3'-phosphate
  modified_base 21: mod_base = OTHER; note = 2'-O-methyladenosine-3'-phosphate ((2S,4R)-1-[29-[[2-(acetylamino)-2-deoxy-beta-D-galactopyra nosyl]oxy]-14,14-bis[[3-[[3-[[5-[[2-(acetylamino)-2-deoxy-b eta-D-galactopyranosyl]oxy]-1-oxopentyl]amino]propyl]amino] -3-oxopropoxy]methyl]-1,12,19,25-tetraoxo-16-oxa-13,20,24-t riazanonacos-1-yl]-4-hydroxy-2-pyrrolidinyl)methyl ester
ccaagctgtgcccatccaaaa

SEQ ID NO: 2722 - RNA, 21 nt, synthetic construct
  source 1..21: mol_type = other RNA
  modified_base 1: mod_base = OTHER; note = 2'-O-methyladenosine-3'-phosphorothioate
  modified_base 2: mod_base = OTHER; note = 2'-O-methylguanosine-3'-phosphorothioate
  modified_base 3: mod_base = OTHER; note = 2'-O-methyluridine-3'-phosphate
  modified_base 4: mod_base = OTHER; note = 2'-O-methylcytidine-3'-phosphate
  modified_base 5: mod_base = OTHER; note = 2'-O-methylcytidine-3'-phosphate
  modified_base 6: mod_base = OTHER; note = 2'-O-methyladenosine-3'-phosphate
  modified_base 7: mod_base = OTHER; note = 2'-deoxy-2'-fluoroadenosine-3'-phosphate
  modified_base 8: mod_base = OTHER; note = 2'-O-methylguanosine-3'-phosphate
  modified_base 9: mod_base = OTHER; note = 2'-deoxy-2'-fluoroadenosine-3'-phosphate
  modified_base 10: mod_base = OTHER; note = 2'-deoxy-2'-fluorouridine-3'-phosphate
  modified_base 11: mod_base = OTHER; note = 2'-deoxy-2'-fluoroguanosine-3'-phosphate
  modified_base 12: mod_base = OTHER; note = 2'-O-methyladenosine-3'-phosphate
  modified_base 13: mod_base = OTHER; note = 2'-O-methylcytidine-3'-phosphate
  modified_base 14: mod_base = OTHER; note = 2'-O-methyladenosine-3'-phosphate
  modified_base 15: mod_base = OTHER; note = 2'-O-methylcytidine-3'-phosphate
  modified_base 16: mod_base = OTHER; note = 2'-O-methylcytidine-3'-phosphate
  modified_base 17: mod_base = OTHER; note = 2'-O-methyladenosine-3'-phosphate
  modified_base 18: mod_base = OTHER; note = 2'-O-methyladenosine-3'-phosphate
  modified_base 19: mod_base = OTHER; note = 2'-O-methyladenosine-3'-phosphate
  modified_base 20: mod_base = OTHER; note = 2'-O-methyladenosine-3'-phosphate
  modified_base 21: mod_base = OTHER; note = 2'-O-methyladenosine-3'-phosphate ((2S,4R)-1-[29-[[2-(acetylamino)-2-deoxy-beta-D-galactopyra nosyl]oxy]-14,14-bis[[3-[[3-[[5-[[2-(acetylamino)-2-deoxy-b eta-D-galactopyranosyl]oxy]-1-oxopentyl]amino]propyl]amino] -3-oxopropoxy]methyl]-1,12,19,25-tetraoxo-16-oxa-13,20,24-t riazanonacos-1-yl]-4-hydroxy-2-pyrrolidinyl)methyl ester
agtccaagatgacaccaaaaa

SEQ ID NO: 2723 - RNA, 21 nt, synthetic construct
  source 1..21: mol_type = other RNA
  modified_base 1: mod_base = OTHER; note = 2'-O-methylcytidine-3'-phosphorothioate
  modified_base 2: mod_base = OTHER; note = 2'-O-methylcytidine-3'-phosphorothioate
  modified_base 3: mod_base = OTHER; note = 2'-O-methyluridine-3'-phosphate
  modified_base 4: mod_base = OTHER; note = 2'-O-methylcytidine-3'-phosphate
  modified_base 5: mod_base = OTHER; note = 2'-O-methyladenosine-3'-phosphate
  modified_base 6: mod_base = OTHER; note = 2'-O-methyluridine-3'-phosphate
  modified_base 7: mod_base = OTHER; note = 2'-deoxy-2'-fluorocytidine-3'-phosphate
  modified_base 8: mod_base = OTHER; note = 2'-O-methyladenosine-3'-phosphate
  modified_base 9: mod_base = OTHER; note = 2'-deoxy-2'-fluoroadenosine-3'-phosphate
  modified_base 10: mod_base = OTHER; note = 2'-deoxy-2'-fluoroguanosine-3'-phosphate
  modified_base 11: mod_base = OTHER; note = 2'-deoxy-2'-fluoroadenosine-3'-phosphate
  modified_base 12: mod_base = OTHER; note = 2'-O-methylcytidine-3'-phosphate
  modified_base 13: mod_base = OTHER; note = 2'-O-methyladenosine-3'-phosphate
  modified_base 14: mod_base = OTHER; note = 2'-O-methyladenosine-3'-phosphate
  modified_base 15: mod_base = OTHER; note = 2'-O-methyluridine-3'-phosphate
  modified_base 16: mod_base = OTHER; note = 2'-O-methyluridine-3'-phosphate
  modified_base 17: mod_base = OTHER; note = 2'-O-methylguanosine-3'-phosphate
  modified_base 18: mod_base = OTHER; note = 2'-O-methyluridine-3'-phosphate
  modified_base 19: mod_base = OTHER; note = 2'-O-methylcytidine-3'-phosphate
  modified_base 20: mod_base = OTHER; note = 2'-O-methyladenosine-3'-phosphate
  modified_base 21: mod_base = OTHER; note = 2'-O-methyladenosine-3'-phosphate ((2S,4R)-1-[29-[[2-(acetylamino)-2-deoxy-beta-D-galactopyra nosyl]oxy]-14,14-bis[[3-[[3-[[5-[[2-(acetylamino)-2-deoxy-b eta-D-galactopyranosyl]oxy]-1-oxopentyl]amino]propyl]amino] -3-oxopropoxy]methyl]-1,12,19,25-tetraoxo-16-oxa-13,20,24-t riazanonacos-1-yl]-4-hydroxy-2-pyrrolidinyl)methyl ester
cctcatcaagacaattgtcaa

SEQ ID NO: 2724 - RNA, 21 nt, synthetic construct
  source 1..21: mol_type = other RNA
  modified_base 1: mod_base = OTHER; note = 2'-O-methyladenosine-3'-phosphorothioate
  modified_base 2: mod_base = OTHER; note = 2'-O-methyluridine-3'-phosphorothioate
  modified_base 3: mod_base = OTHER; note = 2'-O-methyluridine-3'-phosphate
  modified_base 4: mod_base = OTHER; note = 2'-O-methyluridine-3'-phosphate
  modified_base 5: mod_base = OTHER; note = 2'-O-methylcytidine-3'-phosphate
  modified_base 6: mod_base = OTHER; note = 2'-O-methyladenosine-3'-phosphate
  modified_base 7: mod_base = OTHER; note = 2'-deoxy-2'-fluorocytidine-3'-phosphate
  modified_base 8: mod_base = OTHER; note = 2'-O-methyladenosine-3'-phosphate
  modified_base 9: mod_base = OTHER; note = 2'-deoxy-2'-fluorocytidine-3'-phosphate
  modified_base 10: mod_base = OTHER; note = 2'-deoxy-2'-fluoroadenosine-3'-phosphate
  modified_base 11: mod_base = OTHER; note = 2'-deoxy-2'-fluorocytidine-3'-phosphate
  modified_base 12: mod_base = OTHER; note = 2'-O-methylguanosine-3'-phosphate
  modified_base 13: mod_base = OTHER; note = 2'-O-methylcytidine-3'-phosphate
  modified_base 14: mod_base = OTHER; note = 2'-O-methyladenosine-3'-phosphate
  modified_base 15: mod_base = OTHER; note = 2'-O-methylguanosine-3'-phosphate
  modified_base 16: mod_base = OTHER; note = 2'-O-methyluridine-3'-phosphate
  modified_base 17: mod_base = OTHER; note = 2'-O-methylcytidine-3'-phosphate
  modified_base 18: mod_base = OTHER; note = 2'-O-methyladenosine-3'-phosphate
  modified_base 19: mod_base = OTHER; note = 2'-O-methylguanosine-3'-phosphate
  modified_base 20: mod_base = OTHER; note = 2'-O-methyluridine-3'-phosphate
  modified_base 21: mod_base = OTHER; note = 2'-O-methyladenosine-3'-phosphate ((2S,4R)-1-[29-[[2-(acetylamino)-2-deoxy-beta-D-galactopyra nosyl]oxy]-14,14-bis[[3-[[3-[[5-[[2-(acetylamino)-2-deoxy-b eta-D-galactopyranosyl]oxy]-1-oxopentyl]amino]propyl]amino] -3-oxopropoxy]methyl]-1,12,19,25-tetraoxo-16-oxa-13,20,24-t riazanonacos-1-yl]-4-hydroxy-2-pyrrolidinyl)methyl ester
atttcacacacgcagtcagta

SEQ ID NO: 2725 - RNA, 21 nt, synthetic construct
  source 1..21: mol_type = other RNA
  modified_base 1: mod_base = OTHER; note = 2'-O-methylcytidine-3'-phosphorothioate
  modified_base 2: mod_base = OTHER; note = 2'-O-methyluridine-3'-phosphorothioate
  modified_base 3: mod_base = OTHER; note = 2'-O-methylcytidine-3'-phosphate
  modified_base 4: mod_base = OTHER; note = 2'-O-methylcytidine-3'-phosphate
  modified_base 5: mod_base = OTHER; note = 2'-O-methyluridine-3'-phosphate
  modified_base 6: mod_base = OTHER; note = 2'-O-methylcytidine-3'-phosphate
  modified_base 7: mod_base = OTHER; note = 2'-deoxy-2'-fluorocytidine-3'-phosphate
  modified_base 8: mod_base = OTHER; note = 2'-O-methyladenosine-3'-phosphate
  modified_base 9: mod_base = OTHER; note = 2'-deoxy-2'-fluoroadenosine-3'-phosphate
  modified_base 10: mod_base = OTHER; note = 2'-deoxy-2'-fluoroadenosine-3'-phosphate
  modified_base 11: mod_base = OTHER; note = 2'-deoxy-2'-fluorocytidine-3'-phosphate
  modified_base 12: mod_base = OTHER; note = 2'-O-methyladenosine-3'-phosphate
  modified_base 13: mod_base = OTHER; note = 2'-O-methylguanosine-3'-phosphate
  modified_base 14: mod_base = OTHER; note = 2'-O-methyladenosine-3'-phosphate
  modified_base 15: mod_base = OTHER; note = 2'-O-methyladenosine-3'-phosphate
  modified_base 16: mod_base = OTHER; note = 2'-O-methyladenosine-3'-phosphate
  modified_base 17: mod_base = OTHER; note = 2'-O-methylguanosine-3'-phosphate
  modified_base 18: mod_base = OTHER; note = 2'-O-methyluridine-3'-phosphate
  modified_base 19: mod_base = OTHER; note = 2'-O-methylcytidine-3'-phosphate
  modified_base 20: mod_base = OTHER; note = 2'-O-methyladenosine-3'-phosphate
  modified_base 21: mod_base = OTHER; note = 2'-O-methyladenosine-3'-phosphate ((2S,4R)-1-[29-[[2-(acetylamino)-2-deoxy-beta-D-galactopyra nosyl]oxy]-14,14-bis[[3-[[3-[[5-[[2-(acetylamino)-2-deoxy-b eta-D-galactopyranosyl]oxy]-1-oxopentyl]amino]propyl]amino] -3-oxopropoxy]methyl]-1,12,19,25-tetraoxo-16-oxa-13,20,24-t riazanonacos-1-yl]-4-hydroxy-2-pyrrolidinyl)methyl ester
ctcctccaaacagaaagtcaa

SEQ ID NO: 2726 - RNA, 21 nt, synthetic construct
  source 1..21: mol_type = other RNA
  modified_base 1: mod_base = OTHER; note = 2'-O-methyluridine-3'-phosphorothioate
  modified_base 2: mod_base = OTHER; note = 2'-O-methylcytidine-3'-phosphorothioate
  modified_base 3: mod_base = OTHER; note = 2'-O-methyladenosine-3'-phosphate
  modified_base 4: mod_base = OTHER; note = 2'-O-methylcytidine-3'-phosphate
  modified_base 5: mod_base = OTHER; note = 2'-O-methylcytidine-3'-phosphate
  modified_base 6: mod_base = OTHER; note = 2'-O-methylguanosine-3'-phosphate
  modified_base 7: mod_base = OTHER; note = 2'-deoxy-2'-fluoroguanosine-3'-phosphate
  modified_base 8: mod_base = OTHER; note = 2'-O-methyluridine-3'-phosphate
  modified_base 9: mod_base = OTHER; note = 2'-deoxy-2'-fluorouridine-3'-phosphate
  modified_base 10: mod_base = OTHER; note = 2'-deoxy-2'-fluorouridine-3'-phosphate
  modified_base 11: mod_base = OTHER; note = 2'-deoxy-2'-fluoroguanosine-3'-phosphate
  modified_base 12: mod_base = OTHER; note = 2'-O-methylguanosine-3'-phosphate
  modified_base 13: mod_base = OTHER; note = 2'-O-methyladenosine-3'-phosphate
  modified_base 14: mod_base = OTHER; note = 2'-O-methylcytidine-3'-phosphate
  modified_base 15: mod_base = OTHER; note = 2'-O-methyluridine-3'-phosphate
  modified_base 16: mod_base = OTHER; note = 2'-O-methyluridine-3'-phosphate
  modified_base 17: mod_base = OTHER; note = 2'-O-methylcytidine-3'-phosphate
  modified_base 18: mod_base = OTHER; note = 2'-O-methyladenosine-3'-phosphate
  modified_base 19: mod_base = OTHER; note = 2'-O-methyluridine-3'-phosphate
  modified_base 20: mod_base = OTHER; note = 2'-O-methyluridine-3'-phosphate
  modified_base 21: mod_base = OTHER; note = 2'-O-methyladenosine-3'-phosphate ((2S,4R)-1-[29-[[2-(acetylamino)-2-deoxy-beta-D-galactopyra nosyl]oxy]-14,14-bis[[3-[[3-[[5-[[2-(acetylamino)-2-deoxy-b eta-D-galactopyranosyl]oxy]-1-oxopentyl]amino]propyl]amino] -3-oxopropoxy]methyl]-1,12,19,25-tetraoxo-16-oxa-13,20,24-t riazanonacos-1-yl]-4-hydroxy-2-pyrrolidinyl)methyl ester
tcaccggtttggacttcatta

SEQ ID NO: 2727 - RNA, 21 nt, synthetic construct
  source 1..21: mol_type = other RNA
  modified_base 1: mod_base = OTHER; note = 2'-O-methyluridine-3'-phosphorothioate
  modified_base 2: mod_base = OTHER; note = 2'-O-methylcytidine-3'-phosphorothioate
  modified_base 3: mod_base = OTHER; note = 2'-O-methylcytidine-3'-phosphate
  modified_base 4: mod_base = OTHER; note = 2'-O-methyluridine-3'-phosphate
  modified_base 5: mod_base = OTHER; note = 2'-O-methylguanosine-3'-phosphate
  modified_base 6: mod_base = OTHER; note = 2'-O-methyladenosine-3'-phosphate
  modified_base 7: mod_base = OTHER; note = 2'-deoxy-2'-fluorocytidine-3'-phosphate
  modified_base 8: mod_base = OTHER; note = 2'-O-methylcytidine-3'-phosphate
  modified_base 9: mod_base = OTHER; note = 2'-deoxy-2'-fluorouridine-3'-phosphate
  modified_base 10: mod_base = OTHER; note = 2'-deoxy-2'-fluorouridine-3'-phosphate
  modified_base 11: mod_base = OTHER; note = 2'-deoxy-2'-fluoroadenosine-3'-phosphate
  modified_base 12: mod_base = OTHER; note = 2'-O-methyluridine-3'-phosphate
  modified_base 13: mod_base = OTHER; note = 2'-O-methylcytidine-3'-phosphate
  modified_base 14: mod_base = OTHER; note = 2'-O-methylcytidine-3'-phosphate
  modified_base 15: mod_base = OTHER; note = 2'-O-methyladenosine-3'-phosphate
  modified_base 16: mod_base = OTHER; note = 2'-O-methyladenosine-3'-phosphate
  modified_base 17: mod_base = OTHER; note = 2'-O-methylguanosine-3'-phosphate
  modified_base 18: mod_base = OTHER; note = 2'-O-methyladenosine-3'-phosphate
  modified_base 19: mod_base = OTHER; note = 2'-O-methyluridine-3'-phosphate
  modified_base 20: mod_base = OTHER; note = 2'-O-methylguanosine-3'-phosphate
  modified_base 21: mod_base = OTHER; note = 2'-O-methyladenosine-3'-phosphate ((2S,4R)-1-[29-[[2-(acetylamino)-2-deoxy-beta-D-galactopyra nosyl]oxy]-14,14-bis[[3-[[3-[[5-[[2-(acetylamino)-2-deoxy-b eta-D-galactopyranosyl]oxy]-1-oxopentyl]amino]propyl]amino] -3-oxopropoxy]methyl]-1,12,19,25-tetraoxo-16-oxa-13,20,24-t riazanonacos-1-yl]-4-hydroxy-2-pyrrolidinyl)methyl ester
tcctgaccttatccaagatga

SEQ ID NO: 2728 - RNA, 21 nt, synthetic construct
  source 1..21: mol_type = other RNA
  modified_base 1: mod_base = OTHER; note = 2'-O-methylcytidine-3'-phosphorothioate
  modified_base 2: mod_base = OTHER; note = 2'-O-methyluridine-3'-phosphorothioate
  modified_base 3: mod_base = OTHER; note = 2'-O-methylguanosine-3'-phosphate
  modified_base 4: mod_base = OTHER; note = 2'-O-methylguanosine-3'-phosphate
  modified_base 5: mod_base = OTHER; note = 2'-O-methylcytidine-3'-phosphate
  modified_base 6: mod_base = OTHER; note = 2'-O-methyladenosine-3'-phosphate
  modified_base 7: mod_base = OTHER; note = 2'-deoxy-2'-fluoroguanosine-3'-phosphate
  modified_base 8: mod_base = OTHER; note = 2'-O-methyluridine-3'-phosphate
  modified_base 9: mod_base = OTHER; note = 2'-deoxy-2'-fluorocytidine-3'-phosphate
  modified_base 10: mod_base = OTHER; note = 2'-deoxy-2'-fluorouridine-3'-phosphate
  modified_base 11: mod_base = OTHER; note = 2'-deoxy-2'-fluoroadenosine-3'-phosphate
  modified_base 12: mod_base = OTHER; note = 2'-O-methylcytidine-3'-phosphate
  modified_base 13: mod_base = OTHER; note = 2'-O-methylcytidine-3'-phosphate
  modified_base 14: mod_base = OTHER; note = 2'-O-methyladenosine-3'-phosphate
  modified_base 15: mod_base = OTHER; note = 2'-O-methyladenosine-3'-phosphate
  modified_base 16: mod_base = OTHER; note = 2'-O-methylcytidine-3'-phosphate
  modified_base 17: mod_base = OTHER; note = 2'-O-methyladenosine-3'-phosphate
  modified_base 18: mod_base = OTHER; note = 2'-O-methylguanosine-3'-phosphate
  modified_base 19: mod_base = OTHER; note = 2'-O-methyladenosine-3'-phosphate
  modified_base 20: mod_base = OTHER; note = 2'-O-methyluridine-3'-phosphate
  modified_base 21: mod_base = OTHER; note = 2'-O-methyladenosine-3'-phosphate ((2S,4R)-1-[29-[[2-(acetylamino)-2-deoxy-beta-D-galactopyra nosyl]oxy]-14,14-bis[[3-[[3-[[5-[[2-(acetylamino)-2-deoxy-b eta-D-galactopyranosyl]oxy]-1-oxopentyl]amino]propyl]amino] -3-oxopropoxy]methyl]-1,12,19,25-tetraoxo-16-oxa-13,20,24-t riazanonacos-1-yl]-4-hydroxy-2-pyrrolidinyl)methyl ester
ctggcagtctaccaacagata

SEQ ID NO: 2729 - RNA, 21 nt, synthetic construct
  source 1..21: mol_type = other RNA
  modified_base 1: mod_base = OTHER; note = 2'-O-methylguanosine-3'-phosphorothioate
  modified_base 2: mod_base = OTHER; note = 2'-O-methyladenosine-3'-phosphorothioate
  modified_base 3: mod_base = OTHER; note = 2'-O-methyluridine-3'-phosphate
  modified_base 4: mod_base = OTHER; note = 2'-O-methylcytidine-3'-phosphate
  modified_base 5: mod_base = OTHER; note = 2'-O-methylcytidine-3'-phosphate
  modified_base 6: mod_base = OTHER; note = 2'-O-methyluridine-3'-phosphate
  modified_base 7: mod_base = OTHER; note = 2'-deoxy-2'-fluorocytidine-3'-phosphate
  modified_base 8: mod_base = OTHER; note = 2'-O-methyladenosine-3'-phosphate
  modified_base 9: mod_base = OTHER; note = 2'-deoxy-2'-fluorocytidine-3'-phosphate
  modified_base 10: mod_base = OTHER; note = 2'-deoxy-2'-fluorocytidine-3'-phosphate
  modified_base 11: mod_base = OTHER; note = 2'-deoxy-2'-fluoroadenosine-3'-phosphate
  modified_base 12: mod_base = OTHER; note = 2'-O-methylguanosine-3'-phosphate
  modified_base 13: mod_base = OTHER; note = 2'-O-methyluridine-3'-phosphate
  modified_base 14: mod_base = OTHER; note = 2'-O-methyladenosine-3'-phosphate
  modified_base 15: mod_base = OTHER; note = 2'-O-methyluridine-3'-phosphate
  modified_base 16: mod_base = OTHER; note = 2'-O-methylguanosine-3'-phosphate
  modified_base 17: mod_base = OTHER; note = 2'-O-methylcytidine-3'-phosphate
  modified_base 18: mod_base = OTHER; note = 2'-O-methylcytidine-3'-phosphate
  modified_base 19: mod_base = OTHER; note = 2'-O-methyluridine-3'-phosphate
  modified_base 20: mod_base = OTHER; note = 2'-O-methyluridine-3'-phosphate
  modified_base 21: mod_base = OTHER; note = 2'-O-methyladenosine-3'-phosphate ((2S,4R)-1-[29-[[2-(acetylamino)-2-deoxy-beta-D-galactopyra nosyl]oxy]-14,14-bis[[3-[[3-[[5-[[2-(acetylamino)-2-deoxy-b eta-D-galactopyranosyl]oxy]-1-oxopentyl]amino]propyl]amino] -3-oxopropoxy]methyl]-1,12,19,25-tetraoxo-16-oxa-13,20,24-t riazanonacos-1-yl]-4-hydroxy-2-pyrrolidinyl)methyl ester
gatcctcaccagtatgcctta

SEQ ID NO: 2730 - RNA, 21 nt, synthetic construct
  source 1..21: mol_type = other RNA
  modified_base 1: mod_base = OTHER; note = 2'-O-methyluridine-3'-phosphorothioate
  modified_base 2: mod_base = OTHER; note = 2'-O-methyluridine-3'-phosphorothioate
  modified_base 3: mod_base = OTHER; note = 2'-O-methylcytidine-3'-phosphate
  modified_base 4: mod_base = OTHER; note = 2'-O-methylcytidine-3'-phosphate
  modified_base 5: mod_base = OTHER; note = 2'-O-methyladenosine-3'-phosphate
  modified_base 6: mod_base = OTHER; note = 2'-O-methylguanosine-3'-phosphate
  modified_base 7: mod_base = OTHER; note = 2'-deoxy-2'-fluoroadenosine-3'-phosphate
  modified_base 8: mod_base = OTHER; note = 2'-O-methyladenosine-3'-phosphate
  modified_base 9: mod_base = OTHER; note = 2'-deoxy-2'-fluoroadenosine-3'-phosphate
  modified_base 10: mod_base = OTHER; note = 2'-deoxy-2'-fluorocytidine-3'-phosphate
  modified_base 11: mod_base = OTHER; note = 2'-deoxy-2'-fluoroguanosine-3'-phosphate
  modified_base 12: mod_base = OTHER; note = 2'-O-methyluridine-3'-phosphate
  modified_base 13: mod_base = OTHER; note = 2'-O-methylguanosine-3'-phosphate
  modified_base 14: mod_base = OTHER; note = 2'-O-methyladenosine-3'-phosphate
  modified_base 15: mod_base = OTHER; note = 2'-O-methyluridine-3'-phosphate
  modified_base 16: mod_base = OTHER; note = 2'-O-methylcytidine-3'-phosphate
  modified_base 17: mod_base = OTHER; note = 2'-O-methylcytidine-3'-phosphate
  modified_base 18: mod_base = OTHER; note = 2'-O-methyladenosine-3'-phosphate
  modified_base 19: mod_base = OTHER; note = 2'-O-methyladenosine-3'-phosphate
  modified_base 20: mod_base = OTHER; note = 2'-O-methyladenosine-3'-phosphate
  modified_base 21: mod_base = OTHER; note = 2'-O-methyladenosine-3'-phosphate ((2S,4R)-1-[29-[[2-(acetylamino)-2-deoxy-beta-D-galactopyra nosyl]oxy]-14,14-bis[[3-[[3-[[5-[[2-(acetylamino)-2-deoxy-b eta-D-galactopyranosyl]oxy]-1-oxopentyl]amino]propyl]amino] -3-oxopropoxy]methyl]-1,12,19,25-tetraoxo-16-oxa-13,20,24-t riazanonacos-1-yl]-4-hydroxy-2-pyrrolidinyl)methyl ester
ttccagaaacgtgatccaaaa

SEQ ID NO: 2731 - RNA, 21 nt, synthetic construct
  source 1..21: mol_type = other RNA
  modified_base 1: mod_base = OTHER; note = 2'-O-methyladenosine-3'-phosphorothioate
  modified_base 2: mod_base = OTHER; note = 2'-O-methyluridine-3'-phosphorothioate
  modified_base 3: mod_base = OTHER; note = 2'-O-methyladenosine-3'-phosphate
  modified_base 4: mod_base = OTHER; note = 2'-O-methyluridine-3'-phosphate
  modified_base 5: mod_base = OTHER; note = 2'-O-methylcytidine-3'-phosphate
  modified_base 6: mod_base = OTHER; note = 2'-O-methylcytidine-3'-phosphate
  modified_base 7: mod_base = OTHER; note = 2'-deoxy-2'-fluoroadenosine-3'-phosphate
  modified_base 8: mod_base = OTHER; note = 2'-O-methyladenosine-3'-phosphate
  modified_base 9: mod_base = OTHER; note = 2'-deoxy-2'-fluorocytidine-3'-phosphate
  modified_base 10: mod_base = OTHER; note = 2'-deoxy-2'-fluoroguanosine-3'-phosphate
  modified_base 11: mod_base = OTHER; note = 2'-deoxy-2'-fluoroadenosine-3'-phosphate
  modified_base 12: mod_base = OTHER; note = 2'-O-methylcytidine-3'-phosphate
  modified_base 13: mod_base = OTHER; note = 2'-O-methylcytidine-3'-phosphate
  modified_base 14: mod_base = OTHER; note = 2'-O-methyluridine-3'-phosphate
  modified_base 15: mod_base = OTHER; note = 2'-O-methylguanosine-3'-phosphate
  modified_base 16: mod_base = OTHER; note = 2'-O-methylguanosine-3'-phosphate
  modified_base 17: mod_base = OTHER; note = 2'-O-methyladenosine-3'-phosphate
  modified_base 18: mod_base = OTHER; note = 2'-O-methylguanosine-3'-phosphate
  modified_base 19: mod_base = OTHER; note = 2'-O-methyladenosine-3'-phosphate
  modified_base 20: mod_base = OTHER; note = 2'-O-methyladenosine-3'-phosphate
  modified_base 21: mod_base = OTHER; note = 2'-O-methyladenosine-3'-phosphate ((2S,4R)-1-[29-[[2-(acetylamino)-2-deoxy-beta-D-galactopyra nosyl]oxy]-14,14-bis[[3-[[3-[[5-[[2-(acetylamino)-2-deoxy-b eta-D-galactopyranosyl]oxy]-1-oxopentyl]amino]propyl]amino] -3-oxopropoxy]methyl]-1,12,19,25-tetraoxo-16-oxa-13,20,24-t riazanonacos-1-yl]-4-hydroxy-2-pyrrolidinyl)methyl ester
atatccaacgacctggagaaa

SEQ ID NO: 2732 - RNA, 21 nt, synthetic construct
  source 1..21: mol_type = other RNA
  modified_base 1: mod_base = OTHER; note = 2'-O-methylcytidine-3'-phosphorothioate
  modified_base 2: mod_base = OTHER; note = 2'-O-methyluridine-3'-phosphorothioate
  modified_base 3: mod_base = OTHER; note = 2'-O-methylcytidine-3'-phosphate
  modified_base 4: mod_base = OTHER; note = 2'-O-methylcytidine-3'-phosphate
  modified_base 5: mod_base = OTHER; note = 2'-O-methylguanosine-3'-phosphate
  modified_base 6: mod_base = OTHER; note = 2'-O-methylguanosine-3'-phosphate
  modified_base 7: mod_base = OTHER; note = 2'-deoxy-2'-fluoroguanosine-3'-phosphate
  modified_base 8: mod_base = OTHER; note = 2'-O-methyladenosine-3'-phosphate
  modified_base 9: mod_base = OTHER; note = 2'-deoxy-2'-fluorouridine-3'-phosphate
  modified_base 10: mod_base = OTHER; note = 2'-deoxy-2'-fluorocytidine-3'-phosphate
  modified_base 11: mod_base = OTHER; note = 2'-deoxy-2'-fluorouridine-3'-phosphate
  modified_base 12: mod_base = OTHER; note = 2'-O-methyluridine-3'-phosphate
  modified_base 13: mod_base = OTHER; note = 2'-O-methylcytidine-3'-phosphate
  modified_base 14: mod_base = OTHER; note = 2'-O-methyluridine-3'-phosphate
  modified_base 15: mod_base = OTHER; note = 2'-O-methyluridine-3'-phosphate
  modified_base 16: mod_base = OTHER; note = 2'-O-methylcytidine-3'-phosphate
  modified_base 17: mod_base = OTHER; note = 2'-O-methyladenosine-3'-phosphate
  modified_base 18: mod_base = OTHER; note = 2'-O-methylcytidine-3'-phosphate
  modified_base 19: mod_base = OTHER; note = 2'-O-methylguanosine-3'-phosphate
  modified_base 20: mod_base = OTHER; note = 2'-O-methyluridine-3'-phosphate
  modified_base 21: mod_base = OTHER; note = 2'-O-methyladenosine-3'-phosphate ((2S,4R)-1-[29-[[2-(acetylamino)-2-deoxy-beta-D-galactopyra nosyl]oxy]-14,14-bis[[3-[[3-[[5-[[2-(acetylamino)-2-deoxy-b eta-D-galactopyranosyl]oxy]-1-oxopentyl]amino]propyl]amino] -3-oxopropoxy]methyl]-1,12,19,25-tetraoxo-16-oxa-13,20,24-t riazanonacos-1-yl]-4-hydroxy-2-pyrrolidinyl)methyl ester
ctccgggatcttcttcacgta

SEQ ID NO: 2733 - RNA, 21 nt, synthetic construct
  source 1..21: mol_type = other RNA
  modified_base 1: mod_base = OTHER; note = 2'-O-methylcytidine-3'-phosphorothioate
  modified_base 2: mod_base = OTHER; note = 2'-O-methyluridine-3'-phosphorothioate
  modified_base 3: mod_base = OTHER; note = 2'-O-methylguanosine-3'-phosphate
  modified_base 4: mod_base = OTHER; note = 2'-O-methylguanosine-3'-phosphate
  modified_base 5: mod_base = OTHER; note = 2'-O-methylcytidine-3'-phosphate
  modified_base 6: mod_base = OTHER; note = 2'-O-methylcytidine-3'-phosphate
  modified_base 7: mod_base = OTHER; note = 2'-deoxy-2'-fluorouridine-3'-phosphate
  modified_base 8: mod_base = OTHER; note = 2'-O-methyluridine-3'-phosphate
  modified_base 9: mod_base = OTHER; note = 2'-deoxy-2'-fluorocytidine-3'-phosphate
  modified_base 10: mod_base = OTHER; note = 2'-deoxy-2'-fluorouridine-3'-phosphate
  modified_base 11: mod_base = OTHER; note = 2'-deoxy-2'-fluorocytidine-3'-phosphate
  modified_base 12: mod_base = OTHER; note = 2'-O-methyluridine-3'-phosphate
  modified_base 13: mod_base = OTHER; note = 2'-O-methyladenosine-3'-phosphate
  modified_base 14: mod_base = OTHER; note = 2'-O-methyladenosine-3'-phosphate
  modified_base 15: mod_base = OTHER; note = 2'-O-methylguanosine-3'-phosphate
  modified_base 16: mod_base = OTHER; note = 2'-O-methyladenosine-3'-phosphate
  modified_base 17: mod_base = OTHER; note = 2'-O-methylguanosine-3'-phosphate
  modified_base 18: mod_base = OTHER; note = 2'-O-methylcytidine-3'-phosphate
  modified_base 19: mod_base = OTHER; note = 2'-O-methyluridine-3'-phosphate
  modified_base 20: mod_base = OTHER; note = 2'-O-methylguanosine-3'-phosphate
  modified_base 21: mod_base = OTHER; note = 2'-O-methyladenosine-3'-phosphate ((2S,4R)-1-[29-[[2-(acetylamino)-2-deoxy-beta-D-galactopyra nosyl]oxy]-14,14-bis[[3-[[3-[[5-[[2-(acetylamino)-2-deoxy-b eta-D-galactopyranosyl]oxy]-1-oxopentyl]amino]propyl]amino] -3-oxopropoxy]methyl]-1,12,19,25-tetraoxo-16-oxa-13,20,24-t riazanonacos-1-yl]-4-hydroxy-2-pyrrolidinyl)methyl ester
ctggccttctctaagagctga

SEQ ID NO: 2734 - RNA, 21 nt, synthetic construct
  source 1..21: mol_type = other RNA
  modified_base 1: mod_base = OTHER; note = 2'-O-methyladenosine-3'-phosphorothioate
  modified_base 2: mod_base = OTHER; note = 2'-O-methylguanosine-3'-phosphorothioate
  modified_base 3: mod_base = OTHER; note = 2'-O-methyluridine-3'-phosphate
  modified_base 4: mod_base = OTHER; note = 2'-O-methylguanosine-3'-phosphate
  modified_base 5: mod_base = OTHER; note = 2'-O-methylguanosine-3'-phosphate
  modified_base 6: mod_base = OTHER; note = 2'-O-methylcytidine-3'-phosphate
  modified_base 7: mod_base = OTHER; note = 2'-deoxy-2'-fluorocytidine-3'-phosphate
  modified_base 8: mod_base = OTHER; note = 2'-O-methyluridine-3'-phosphate
  modified_base 9: mod_base = OTHER; note = 2'-deoxy-2'-fluoroguanosine-3'-phosphate
  modified_base 10: mod_base = OTHER; note = 2'-deoxy-2'-fluoroguanosine-3'-phosphate
  modified_base 11: mod_base = OTHER; note = 2'-deoxy-2'-fluoroadenosine-3'-phosphate
  modified_base 12: mod_base = OTHER; note = 2'-O-methylguanosine-3'-phosphate
  modified_base 13: mod_base = OTHER; note = 2'-O-methyladenosine-3'-phosphate
  modified_base 14: mod_base = OTHER; note = 2'-O-methylcytidine-3'-phosphate
  modified_base 15: mod_base = OTHER; note = 2'-O-methylcytidine-3'-phosphate
  modified_base 16: mod_base = OTHER; note = 2'-O-methyluridine-3'-phosphate
  modified_base 17: mod_base = OTHER; note = 2'-O-methyluridine-3'-phosphate
  modified_base 18: mod_base = OTHER; note = 2'-O-methylguanosine-3'-phosphate
  modified_base 19: mod_base = OTHER; note = 2'-O-methylguanosine-3'-phosphate
  modified_base 20: mod_base = OTHER; note = 2'-O-methyladenosine-3'-phosphate
  modified_base 21: mod_base = OTHER; note = 2'-O-methyladenosine-3'-phosphate ((2S,4R)-1-[29-[[2-(acetylamino)-2-deoxy-beta-D-galactopyra nosyl]oxy]-14,14-bis[[3-[[3-[[5-[[2-(acetylamino)-2-deoxy-b eta-D-galactopyranosyl]oxy]-1-oxopentyl]amino]propyl]amino] -3-oxopropoxy]methyl]-1,12,19,25-tetraoxo-16-oxa-13,20,24-t riazanonacos-1-yl]-4-hydroxy-2-pyrrolidinyl)methyl ester
agtggcctggagaccttggaa

SEQ ID NO: 2735 - RNA, 21 nt, synthetic construct
  source 1..21: mol_type = other RNA
  modified_base 1: mod_base = OTHER; note = 2'-O-methylguanosine-3'-phosphorothioate
  modified_base 2: mod_base = OTHER; note = 2'-O-methyluridine-3'-phosphorothioate
  modified_base 3: mod_base = OTHER; note = 2'-O-methylcytidine-3'-phosphate
  modified_base 4: mod_base = OTHER; note = 2'-O-methylcytidine-3'-phosphate
  modified_base 5: mod_base = OTHER; note = 2'-O-methyluridine-3'-phosphate
  modified_base 6: mod_base = OTHER; note = 2'-O-methylguanosine-3'-phosphate
  modified_base 7: mod_base = OTHER; note = 2'-deoxy-2'-fluoroguanosine-3'-phosphate
  modified_base 8: mod_base = OTHER; note = 2'-O-methyladenosine-3'-phosphate
  modified_base 9: mod_base = OTHER; note = 2'-deoxy-2'-fluoroadenosine-3'-phosphate
  modified_base 10: mod_base = OTHER; note = 2'-deoxy-2'-fluoroguanosine-3'-phosphate
  modified_base 11: mod_base = OTHER; note = 2'-deoxy-2'-fluorocytidine-3'-phosphate
  modified_base 12: mod_base = OTHER; note = 2'-O-methyluridine-3'-phosphate
  modified_base 13: mod_base = OTHER; note = 2'-O-methyluridine-3'-phosphate
  modified_base 14: mod_base = OTHER; note = 2'-O-methylcytidine-3'-phosphate
  modified_base 15: mod_base = OTHER; note = 2'-O-methyladenosine-3'-phosphate
  modified_base 16: mod_base = OTHER; note = 2'-O-methylguanosine-3'-phosphate
  modified_base 17: mod_base = OTHER; note = 2'-O-methylguanosine-3'-phosphate
  modified_base 18: mod_base = OTHER; note = 2'-O-methylcytidine-3'-phosphate
  modified_base 19: mod_base = OTHER; note = 2'-O-methyluridine-3'-phosphate
  modified_base 20: mod_base = OTHER; note = 2'-O-methyladenosine-3'-phosphate
  modified_base 21: mod_base = OTHER; note = 2'-O-methyladenosine-3'-phosphate ((2S,4R)-1-[29-[[2-(acetylamino)-2-deoxy-beta-D-galactopyra nosyl]oxy]-14,14-bis[[3-[[3-[[5-[[2-(acetylamino)-2-deoxy-b eta-D-galactopyranosyl]oxy]-1-oxopentyl]amino]propyl]amino] -3-oxopropoxy]methyl]-1,12,19,25-tetraoxo-16-oxa-13,20,24-t riazanonacos-1-yl]-4-hydroxy-2-pyrrolidinyl)methyl ester
gtcctggaagcttcaggctaa

SEQ ID NO: 2736 - RNA, 21 nt, synthetic construct
  source 1..21: mol_type = other RNA
  modified_base 1: mod_base = OTHER; note = 2'-O-methylguanosine-3'-phosphorothioate
  modified_base 2: mod_base = OTHER; note = 2'-O-methylguanosine-3'-phosphorothioate
  modified_base 3: mod_base = OTHER; note = 2'-O-methylcytidine-3'-phosphate
  modified_base 4: mod_base = OTHER; note = 2'-O-methyluridine-3'-phosphate
  modified_base 5: mod_base = OTHER; note = 2'-O-methyladenosine-3'-phosphate
  modified_base 6: mod_base = OTHER; note = 2'-O-methylcytidine-3'-phosphate
  modified_base 7: mod_base = OTHER; note = 2'-deoxy-2'-fluorouridine-3'-phosphate
  modified_base 8: mod_base = OTHER; note = 2'-O-methylcytidine-3'-phosphate
  modified_base 9: mod_base = OTHER; note = 2'-deoxy-2'-fluorocytidine-3'-phosphate
  modified_base 10: mod_base = OTHER; note = 2'-deoxy-2'-fluoroadenosine-3'-phosphate
  modified_base 11: mod_base = OTHER; note = 2'-deoxy-2'-fluorocytidine-3'-phosphate
  modified_base 12: mod_base = OTHER; note = 2'-O-methyladenosine-3'-phosphate
  modified_base 13: mod_base = OTHER; note = 2'-O-methylguanosine-3'-phosphate
  modified_base 14: mod_base = OTHER; note = 2'-O-methyladenosine-3'-phosphate
  modified_base 15: mod_base = OTHER; note = 2'-O-methylguanosine-3'-phosphate
  modified_base 16: mod_base = OTHER; note = 2'-O-methylguanosine-3'-phosphate
  modified_base 17: mod_base = OTHER; note = 2'-O-methyluridine-3'-phosphate
  modified_base 18: mod_base = OTHER; note = 2'-O-methylguanosine-3'-phosphate
  modified_base 19: mod_base = OTHER; note = 2'-O-methylguanosine-3'-phosphate
  modified_base 20: mod_base = OTHER; note = 2'-O-methyluridine-3'-phosphate
  modified_base 21: mod_base = OTHER; note = 2'-O-methyladenosine-3'-phosphate ((2S,4R)-1-[29-[[2-(acetylamino)-2-deoxy-beta-D-galactopyra nosyl]oxy]-14,14-bis[[3-[[3-[[5-[[2-(acetylamino)-2-deoxy-b eta-D-galactopyranosyl]oxy]-1-oxopentyl]amino]propyl]amino] -3-oxopropoxy]methyl]-1,12,19,25-tetraoxo-16-oxa-13,20,24-t riazanonacos-1-yl]-4-hydroxy-2-pyrrolidinyl)methyl ester
ggctactccacagaggtggta

SEQ ID NO: 2737 - RNA, 21 nt, synthetic construct
  source 1..21: mol_type = other RNA
  modified_base 1: mod_base = OTHER; note = 2'-O-methylguanosine-3'-phosphorothioate
  modified_base 2: mod_base = OTHER; note = 2'-O-methyluridine-3'-phosphorothioate
  modified_base 3: mod_base = OTHER; note = 2'-O-methylcytidine-3'-phosphate
  modified_base 4: mod_base = OTHER; note = 2'-O-methyluridine-3'-phosphate
  modified_base 5: mod_base = OTHER; note = 2'-O-methylcytidine-3'-phosphate
  modified_base 6: mod_base = OTHER; note = 2'-O-methyluridine-3'-phosphate
  modified_base 7: mod_base = OTHER; note = 2'-deoxy-2'-fluoroguanosine-3'-phosphate
  modified_base 8: mod_base = OTHER; note = 2'-O-methylcytidine-3'-phosphate
  modified_base 9: mod_base = OTHER; note = 2'-deoxy-2'-fluoroadenosine-3'-phosphate
  modified_base 10: mod_base = OTHER; note = 2'-deoxy-2'-fluoroguanosine-3'-phosphate
  modified_base 11: mod_base = OTHER; note = 2'-deoxy-2'-fluoroguanosine-3'-phosphate
  modified_base 12: mod_base = OTHER; note = 2'-O-methyladenosine-3'-phosphate
  modified_base 13: mod_base = OTHER; note = 2'-O-methylcytidine-3'-phosphate
  modified_base 14: mod_base = OTHER; note = 2'-O-methyladenosine-3'-phosphate
  modified_base 15: mod_base = OTHER; note = 2'-O-methyluridine-3'-phosphate
  modified_base 16: mod_base = OTHER; note = 2'-O-methylguanosine-3'-phosphate
  modified_base 17: mod_base = OTHER; note = 2'-O-methylcytidine-3'-phosphate
  modified_base 18: mod_base = OTHER; note = 2'-O-methyluridine-3'-phosphate
  modified_base 19: mod_base = OTHER; note = 2'-O-methylguanosine-3'-phosphate
  modified_base 20: mod_base = OTHER; note = 2'-O-methyluridine-3'-phosphate
  modified_base 21: mod_base = OTHER; note = 2'-O-methyladenosine-3'-phosphate ((2S,4R)-1-[29-[[2-(acetylamino)-2-deoxy-beta-D-galactopyra nosyl]oxy]-14,14-bis[[3-[[3-[[5-[[2-(acetylamino)-2-deoxy-b eta-D-galactopyranosyl]oxy]-1-oxopentyl]amino]propyl]amino] -3-oxopropoxy]methyl]-1,12,19,25-tetraoxo-16-oxa-13,20,24-t riazanonacos-1-yl]-4-hydroxy-2-pyrrolidinyl)methyl ester
gtctctgcaggacatgctgta

SEQ ID NO: 2738 - RNA, 21 nt, synthetic construct
  source 1..21: mol_type = other RNA
  modified_base 1: mod_base = OTHER; note = 2'-O-methylcytidine-3'-phosphorothioate
  modified_base 2: mod_base = OTHER; note = 2'-O-methylcytidine-3'-phosphorothioate
  modified_base 3: mod_base = OTHER; note = 2'-O-methyluridine-3'-phosphate
  modified_base 4: mod_base = OTHER; note = 2'-O-methyluridine-3'-phosphate
  modified_base 5: mod_base = OTHER; note = 2'-O-methylguanosine-3'-phosphate
  modified_base 6: mod_base = OTHER; note = 2'-O-methyladenosine-3'-phosphate
  modified_base 7: mod_base = OTHER; note = 2'-deoxy-2'-fluoroadenosine-3'-phosphate
  modified_base 8: mod_base = OTHER; note = 2'-O-methylguanosine-3'-phosphate
  modified_base 9: mod_base = OTHER; note = 2'-deoxy-2'-fluoroguanosine-3'-phosphate
  modified_base 10: mod_base = OTHER; note = 2'-deoxy-2'-fluorouridine-3'-phosphate
  modified_base 11: mod_base = OTHER; note = 2'-deoxy-2'-fluorocytidine-3'-phosphate
  modified_base 12: mod_base = OTHER; note = 2'-O-methyladenosine-3'-phosphate
  modified_base 13: mod_base = OTHER; note = 2'-O-methylcytidine-3'-phosphate
  modified_base 14: mod_base = OTHER; note = 2'-O-methyluridine-3'-phosphate
  modified_base 15: mod_base = OTHER; note = 2'-O-methylcytidine-3'-phosphate
  modified_base 16: mod_base = OTHER; note = 2'-O-methyluridine-3'-phosphate
  modified_base 17: mod_base = OTHER; note = 2'-O-methyluridine-3'-phosphate
  modified_base 18: mod_base = OTHER; note = 2'-O-methylcytidine-3'-phosphate
  modified_base 19: mod_base = OTHER; note = 2'-O-methylcytidine-3'-phosphate
  modified_base 20: mod_base = OTHER; note = 2'-O-methyluridine-3'-phosphate
  modified_base 21: mod_base = OTHER; note = 2'-O-methyladenosine-3'-phosphate ((2S,4R)-1-[29-[[2-(acetylamino)-2-deoxy-beta-D-galactopyra nosyl]oxy]-14,14-bis[[3-[[3-[[5-[[2-(acetylamino)-2-deoxy-b eta-D-galactopyranosyl]oxy]-1-oxopentyl]amino]propyl]amino] -3-oxopropoxy]methyl]-1,12,19,25-tetraoxo-16-oxa-13,20,24-t riazanonacos-1-yl]-4-hydroxy-2-pyrrolidinyl)methyl ester
ccttgaaggtcactcttccta

SEQ ID NO: 2739 - RNA, 21 nt, synthetic construct
  source 1..21: mol_type = other RNA
  modified_base 1: mod_base = OTHER; note = 2'-O-methyluridine-3'-phosphorothioate
  modified_base 2: mod_base = OTHER; note = 2'-O-methylcytidine-3'-phosphorothioate
  modified_base 3: mod_base = OTHER; note = 2'-O-methylcytidine-3'-phosphate
  modified_base 4: mod_base = OTHER; note = 2'-O-methyluridine-3'-phosphate
  modified_base 5: mod_base = OTHER; note = 2'-O-methylguanosine-3'-phosphate
  modified_base 6: mod_base = OTHER; note = 2'-O-methylcytidine-3'-phosphate
  modified_base 7: mod_base = OTHER; note = 2'-deoxy-2'-fluoroadenosine-3'-phosphate
  modified_base 8: mod_base = OTHER; note = 2'-O-methyladenosine-3'-phosphate
  modified_base 9: mod_base = OTHER; note = 2'-deoxy-2'-fluoroguanosine-3'-phosphate
  modified_base 10: mod_base = OTHER; note = 2'-deoxy-2'-fluoroguanosine-3'-phosphate
  modified_base 11: mod_base = OTHER; note = 2'-deoxy-2'-fluoroadenosine-3'-phosphate
  modified_base 12: mod_base = OTHER; note = 2'-O-methylcytidine-3'-phosphate
  modified_base 13: mod_base = OTHER; note = 2'-O-methyluridine-3'-phosphate
  modified_base 14: mod_base = OTHER; note = 2'-O-methyladenosine-3'-phosphate
  modified_base 15: mod_base = OTHER; note = 2'-O-methylcytidine-3'-phosphate
  modified_base 16: mod_base = OTHER; note = 2'-O-methylguanosine-3'-phosphate
  modified_base 17: mod_base = OTHER; note = 2'-O-methyluridine-3'-phosphate
  modified_base 18: mod_base = OTHER; note = 2'-O-methyluridine-3'-phosphate
  modified_base 19: mod_base = OTHER; note = 2'-O-methyladenosine-3'-phosphate
  modified_base 20: mod_base = OTHER; note = 2'-O-methyladenosine-3'-phosphate
  modified_base 21: mod_base = OTHER; note = 2'-O-methyladenosine-3'-phosphate ((2S,4R)-1-[29-[[2-(acetylamino)-2-deoxy-beta-D-galactopyra nosyl]oxy]-14,14-bis[[3-[[3-[[5-[[2-(acetylamino)-2-deoxy-b eta-D-galactopyranosyl]oxy]-1-oxopentyl]amino]propyl]amino] -3-oxopropoxy]methyl]-1,12,19,25-tetraoxo-16-oxa-13,20,24-t riazanonacos-1-yl]-4-hydroxy-2-pyrrolidinyl)methyl ester
tcctgcaaggactacgttaaa

SEQ ID NO: 2740 - RNA, 21 nt, synthetic construct
  source 1..21: mol_type = other RNA
  modified_base 1: mod_base = OTHER; note = 2'-O-methylguanosine-3'-phosphorothioate
  modified_base 2: mod_base = OTHER; note = 2'-O-methyluridine-3'-phosphorothioate
  modified_base 3: mod_base = OTHER; note = 2'-O-methyluridine-3'-phosphate
  modified_base 4: mod_base = OTHER; note = 2'-O-methyladenosine-3'-phosphate
  modified_base 5: mod_base = OTHER; note = 2'-O-methyladenosine-3'-phosphate
  modified_base 6: mod_base = OTHER; note = 2'-O-methylguanosine-3'-phosphate
  modified_base 7: mod_base = OTHER; note = 2'-deoxy-2'-fluoroguanosine-3'-phosphate
  modified_base 8: mod_base = OTHER; note = 2'-O-methylguanosine-3'-phosphate
  modified_base 9: mod_base = OTHER; note = 2'-deoxy-2'-fluoroadenosine-3'-phosphate
  modified_base 10: mod_base = OTHER; note = 2'-deoxy-2'-fluoroadenosine-3'-phosphate
  modified_base 11: mod_base = OTHER; note = 2'-deoxy-2'-fluoroguanosine-3'-phosphate
  modified_base 12: mod_base = OTHER; note = 2'-O-methylguanosine-3'-phosphate
  modified_base 13: mod_base = OTHER; note = 2'-O-methyladenosine-3'-phosphate
  modified_base 14: mod_base = OTHER; note = 2'-O-methyladenosine-3'-phosphate
  modified_base 15: mod_base = OTHER; note = 2'-O-methylcytidine-3'-phosphate
  modified_base 16: mod_base = OTHER; note = 2'-O-methyluridine-3'-phosphate
  modified_base 17: mod_base = OTHER; note = 2'-O-methylcytidine-3'-phosphate
  modified_base 18: mod_base = OTHER; note = 2'-O-methyluridine-3'-phosphate
  modified_base 19: mod_base = OTHER; note = 2'-O-methylguanosine-3'-phosphate
  modified_base 20: mod_base = OTHER; note = 2'-O-methylguanosine-3'-phosphate
  modified_base 21: mod_base = OTHER; note = 2'-O-methyladenosine-3'-phosphate ((2S,4R)-1-[29-[[2-(acetylamino)-2-deoxy-beta-D-galactopyra nosyl]oxy]-14,14-bis[[3-[[3-[[5-[[2-(acetylamino)-2-deoxy-b eta-D-galactopyranosyl]oxy]-1-oxopentyl]amino]propyl]amino] -3-oxopropoxy]methyl]-1,12,19,25-tetraoxo-16-oxa-13,20,24-t riazanonacos-1-yl]-4-hydroxy-2-pyrrolidinyl)methyl ester
gttaagggaaggaactctgga

SEQ ID NO: 2741 - RNA, 21 nt, synthetic construct
  source 1..21: mol_type = other RNA
  modified_base 1: mod_base = OTHER; note = 2'-O-methyluridine-3'-phosphorothioate
  modified_base 2: mod_base = OTHER; note = 2'-O-methylcytidine-3'-phosphorothioate
  modified_base 3: mod_base = OTHER; note = 2'-O-methyluridine-3'-phosphate
  modified_base 4: mod_base = OTHER; note = 2'-O-methylguanosine-3'-phosphate
  modified_base 5: mod_base = OTHER; note = 2'-O-methylguanosine-3'-phosphate
  modified_base 6: mod_base = OTHER; note = 2'-O-methylcytidine-3'-phosphate
  modified_base 7: mod_base = OTHER; note = 2'-deoxy-2'-fluorouridine-3'-phosphate
  modified_base 8: mod_base = OTHER; note = 2'-O-methyluridine-3'-phosphate
  modified_base 9: mod_base = OTHER; note = 2'-deoxy-2'-fluorocytidine-3'-phosphate
  modified_base 10: mod_base = OTHER; note = 2'-deoxy-2'-fluorocytidine-3'-phosphate
  modified_base 11: mod_base = OTHER; note = 2'-deoxy-2'-fluoroadenosine-3'-phosphate
  modified_base 12: mod_base = OTHER; note = 2'-O-methylguanosine-3'-phosphate
  modified_base 13: mod_base = OTHER; note = 2'-O-methylguanosine-3'-phosphate
  modified_base 14: mod_base = OTHER; note = 2'-O-methyluridine-3'-phosphate
  modified_base 15: mod_base = OTHER; note = 2'-O-methyladenosine-3'-phosphate
  modified_base 16: mod_base = OTHER; note = 2'-O-methyluridine-3'-phosphate
  modified_base 17: mod_base = OTHER; note = 2'-O-methylcytidine-3'-phosphate
  modified_base 18: mod_base = OTHER; note = 2'-O-methyluridine-3'-phosphate
  modified_base 19: mod_base = OTHER; note = 2'-O-methylcytidine-3'-phosphate
  modified_base 20: mod_base = OTHER; note = 2'-O-methylcytidine-3'-phosphate
  modified_base 21: mod_base = OTHER; note = 2'-O-methyladenosine-3'-phosphate ((2S,4R)-1-[29-[[2-(acetylamino)-2-deoxy-beta-D-galactopyra nosyl]oxy]-14,14-bis[[3-[[3-[[5-[[2-(acetylamino)-2-deoxy-b eta-D-galactopyranosyl]oxy]-1-oxopentyl]amino]propyl]amino] -3-oxopropoxy]methyl]-1,12,19,25-tetraoxo-16-oxa-13,20,24-t riazanonacos-1-yl]-4-hydroxy-2-pyrrolidinyl)methyl ester
tctggcttccaggtatctcca

SEQ ID NO: 2742 - RNA, 21 nt, synthetic construct
  source 1..21: mol_type = other RNA
  modified_base 1: mod_base = OTHER; note = 2'-O-methyladenosine-3'-phosphorothioate
  modified_base 2: mod_base = OTHER; note = 2'-O-methylguanosine-3'-phosphorothioate
  modified_base 3: mod_base = OTHER; note = 2'-O-methylguanosine-3'-phosphate
  modified_base 4: mod_base = OTHER; note = 2'-O-methyladenosine-3'-phosphate
  modified_base 5: mod_base = OTHER; note = 2'-O-methyluridine-3'-phosphate
  modified_base 6: mod_base = OTHER; note = 2'-O-methyluridine-3'-phosphate
  modified_base 7: mod_base = OTHER; note = 2'-deoxy-2'-fluoroguanosine-3'-phosphate
  modified_base 8: mod_base = OTHER; note = 2'-O-methyladenosine-3'-phosphate
  modified_base 9: mod_base = OTHER; note = 2'-deoxy-2'-fluoroadenosine-3'-phosphate
  modified_base 10: mod_base = OTHER; note = 2'-deoxy-2'-fluoroguanosine-3'-phosphate
  modified_base 11: mod_base = OTHER; note = 2'-deoxy-2'-fluoroadenosine-3'-phosphate
  modified_base 12: mod_base = OTHER; note = 2'-O-methylguanosine-3'-phosphate
  modified_base 13: mod_base = OTHER; note = 2'-O-methylcytidine-3'-phosphate
  modified_base 14: mod_base = OTHER; note = 2'-O-methyladenosine-3'-phosphate
  modified_base 15: mod_base = OTHER; note = 2'-O-methyluridine-3'-phosphate
  modified_base 16: mod_base = OTHER; note = 2'-O-methyluridine-3'-phosphate
  modified_base 17: mod_base = OTHER; note = 2'-O-methylguanosine-3'-phosphate
  modified_base 18: mod_base = OTHER; note = 2'-O-methylcytidine-3'-phosphate
  modified_base 19: mod_base = OTHER; note = 2'-O-methyladenosine-3'-phosphate
  modified_base 20: mod_base = OTHER; note = 2'-O-methyluridine-3'-phosphate
  modified_base 21: mod_base = OTHER; note = 2'-O-methyladenosine-3'-phosphate ((2S,4R)-1-[29-[[2-(acetylamino)-2-deoxy-beta-D-galactopyra nosyl]oxy]-14,14-bis[[3-[[3-[[5-[[2-(acetylamino)-2-deoxy-b eta-D-galactopyranosyl]oxy]-1-oxopentyl]amino]propyl]amino] -3-oxopropoxy]methyl]-1,12,19,25-tetraoxo-16-oxa-13,20,24-t riazanonacos-1-yl]-4-hydroxy-2-pyrrolidinyl)methyl ester
aggattgaagagcattgcata

SEQ ID NO: 2743 - RNA, 21 nt, synthetic construct
  source 1..21: mol_type = other RNA
  modified_base 1: mod_base = OTHER; note = 2'-O-methyladenosine-3'-phosphorothioate
  modified_base 2: mod_base = OTHER; note = 2'-O-methyluridine-3'-phosphorothioate
  modified_base 3: mod_base = OTHER; note = 2'-O-methylcytidine-3'-phosphate
  modified_base 4: mod_base = OTHER; note = 2'-O-methylcytidine-3'-phosphate
  modified_base 5: mod_base = OTHER; note = 2'-O-methyladenosine-3'-phosphate
  modified_base 6: mod_base = OTHER; note = 2'-O-methylguanosine-3'-phosphate
  modified_base 7: mod_base = OTHER; note = 2'-deoxy-2'-fluoroguanosine-3'-phosphate
  modified_base 8: mod_base = OTHER; note = 2'-O-methyladenosine-3'-phosphate
  modified_base 9: mod_base = OTHER; note = 2'-deoxy-2'-fluorocytidine-3'-phosphate
  modified_base 10: mod_base = OTHER; note = 2'-deoxy-2'-fluorouridine-3'-phosphate
  modified_base 11: mod_base = OTHER; note = 2'-deoxy-2'-fluorocytidine-3'-phosphate
  modified_base 12: mod_base = OTHER; note = 2'-O-methyluridine-3'-phosphate
  modified_base 13: mod_base = OTHER; note = 2'-O-methylguanosine-3'-phosphate
  modified_base 14: mod_base = OTHER; note = 2'-O-methyluridine-3'-phosphate
  modified_base 15: mod_base = OTHER; note = 2'-O-methylcytidine-3'-phosphate
  modified_base 16: mod_base = OTHER; note = 2'-O-methyladenosine-3'-phosphate
  modified_base 17: mod_base = OTHER; note = 2'-O-methyladenosine-3'-phosphate
  modified_base 18: mod_base = OTHER; note = 2'-O-methyluridine-3'-phosphate
  modified_base 19: mod_base = OTHER; note = 2'-O-methyluridine-3'-phosphate
  modified_base 20: mod_base = OTHER; note = 2'-O-methyluridine-3'-phosphate
  modified_base 21: mod_base = OTHER; note = 2'-O-methyladenosine-3'-phosphate ((2S,4R)-1-[29-[[2-(acetylamino)-2-deoxy-beta-D-galactopyra nosyl]oxy]-14,14-bis[[3-[[3-[[5-[[2-(acetylamino)-2-deoxy-b eta-D-galactopyranosyl]oxy]-1-oxopentyl]amino]propyl]amino] -3-oxopropoxy]methyl]-1,12,19,25-tetraoxo-16-oxa-13,20,24-t riazanonacos-1-yl]-4-hydroxy-2-pyrrolidinyl)methyl ester
atccaggactctgtcaattta

SEQ ID NO: 2744 - RNA, 21 nt, synthetic construct
  source 1..21: mol_type = other RNA
  modified_base 1: mod_base = OTHER; note = 2'-O-methyladenosine-3'-phosphorothioate
  modified_base 2: mod_base = OTHER; note = 2'-O-methyluridine-3'-phosphorothioate
  modified_base 3: mod_base = OTHER; note = 2'-O-methyluridine-3'-phosphate
  modified_base 4: mod_base = OTHER; note = 2'-O-methyluridine-3'-phosphate
  modified_base 5: mod_base = OTHER; note = 2'-O-methylcytidine-3'-phosphate
  modified_base 6: mod_base = OTHER; note = 2'-O-methylcytidine-3'-phosphate
  modified_base 7: mod_base = OTHER; note = 2'-deoxy-2'-fluorocytidine-3'-phosphate
  modified_base 8: mod_base = OTHER; note = 2'-O-methyluridine-3'-phosphate
  modified_base 9: mod_base = OTHER; note = 2'-deoxy-2'-fluoroguanosine-3'-phosphate
  modified_base 10: mod_base = OTHER; note = 2'-deoxy-2'-fluoroadenosine-3'-phosphate
  modified_base 11: mod_base = OTHER; note = 2'-deoxy-2'-fluorocytidine-3'-phosphate
  modified_base 12: mod_base = OTHER; note = 2'-O-methyluridine-3'-phosphate
  modified_base 13: mod_base = OTHER; note = 2'-O-methylcytidine-3'-phosphate
  modified_base 14: mod_base = OTHER; note = 2'-O-methylcytidine-3'-phosphate
  modified_base 15: mod_base = OTHER; note = 2'-O-methyluridine-3'-phosphate
  modified_base 16: mod_base = OTHER; note = 2'-O-methylcytidine-3'-phosphate
  modified_base 17: mod_base = OTHER; note = 2'-O-methyluridine-3'-phosphate
  modified_base 18: mod_base = OTHER; note = 2'-O-methyladenosine-3'-phosphate
  modified_base 19: mod_base = OTHER; note = 2'-O-methyladenosine-3'-phosphate
  modified_base 20: mod_base = OTHER; note = 2'-O-methylguanosine-3'-phosphate
  modified_base 21: mod_base = OTHER; note = 2'-O-methyladenosine-3'-phosphate ((2S,4R)-1-[29-[[2-(acetylamino)-2-deoxy-beta-D-galactopyra nosyl]oxy]-14,14-bis[[3-[[3-[[5-[[2-(acetylamino)-2-deoxy-b eta-D-galactopyranosyl]oxy]-1-oxopentyl]amino]propyl]amino] -3-oxopropoxy]methyl]-1,12,19,25-tetraoxo-16-oxa-13,20,24-t riazanonacos-1-yl]-4-hydroxy-2-pyrrolidinyl)methyl ester
atttccctgactcctctaaga

SEQ ID NO: 2745 - RNA, 21 nt, synthetic construct
  source 1..21: mol_type = other RNA
  modified_base 1: mod_base = OTHER; note = 2'-O-methyladenosine-3'-phosphorothioate
  modified_base 2: mod_base = OTHER; note = 2'-O-methylcytidine-3'-phosphorothioate
  modified_base 3: mod_base = OTHER; note = 2'-O-methyluridine-3'-phosphate
  modified_base 4: mod_base = OTHER; note = 2'-O-methylcytidine-3'-phosphate
  modified_base 5: mod_base = OTHER; note = 2'-O-methyluridine-3'-phosphate
  modified_base 6: mod_base = OTHER; note = 2'-O-methyluridine-3'-phosphate
  modified_base 7: mod_base = OTHER; note = 2'-deoxy-2'-fluorocytidine-3'-phosphate
  modified_base 8: mod_base = OTHER; note = 2'-O-methylcytidine-3'-phosphate
  modified_base 9: mod_base = OTHER; note = 2'-deoxy-2'-fluoroadenosine-3'-phosphate
  modified_base 10: mod_base = OTHER; note = 2'-deoxy-2'-fluoroadenosine-3'-phosphate
  modified_base 11: mod_base = OTHER; note = 2'-deoxy-2'-fluoroadenosine-3'-phosphate
  modified_base 12: mod_base = OTHER; note = 2'-O-methylguanosine-3'-phosphate
  modified_base 13: mod_base = OTHER; note = 2'-O-methylguanosine-3'-phosphate
  modified_base 14: mod_base = OTHER; note = 2'-O-methylcytidine-3'-phosphate
  modified_base 15: mod_base = OTHER; note = 2'-O-methyladenosine-3'-phosphate
  modified_base 16: mod_base = OTHER; note = 2'-O-methyluridine-3'-phosphate
  modified_base 17: mod_base = OTHER; note = 2'-O-methyladenosine-3'-phosphate
  modified_base 18: mod_base = OTHER; note = 2'-O-methyladenosine-3'-phosphate
  modified_base 19: mod_base = OTHER; note = 2'-O-methylguanosine-3'-phosphate
  modified_base 20: mod_base = OTHER; note = 2'-O-methyladenosine-3'-phosphate
  modified_base 21: mod_base = OTHER; note = 2'-O-methyladenosine-3'-phosphate ((2S,4R)-1-[29-[[2-(acetylamino)-2-deoxy-beta-D-galactopyra nosyl]oxy]-14,14-bis[[3-[[3-[[5-[[2-(acetylamino)-2-deoxy-b eta-D-galactopyranosyl]oxy]-1-oxopentyl]amino]propyl]amino] -3-oxopropoxy]methyl]-1,12,19,25-tetraoxo-16-oxa-13,20,24-t riazanonacos-1-yl]-4-hydroxy-2-pyrrolidinyl)methyl ester
actcttccaaaggcataagaa

SEQ ID NO: 2746 - RNA, 21 nt, synthetic construct
  source 1..21: mol_type = other RNA
  modified_base 1: mod_base = OTHER; note = 2'-O-methylcytidine-3'-phosphorothioate
  modified_base 2: mod_base = OTHER; note = 2'-O-methyluridine-3'-phosphorothioate
  modified_base 3: mod_base = OTHER; note = 2'-O-methylcytidine-3'-phosphate
  modified_base 4: mod_base = OTHER; note = 2'-O-methylcytidine-3'-phosphate
  modified_base 5: mod_base = OTHER; note = 2'-O-methyluridine-3'-phosphate
  modified_base 6: mod_base = OTHER; note = 2'-O-methyluridine-3'-phosphate
  modified_base 7: mod_base = OTHER; note = 2'-deoxy-2'-fluorouridine-3'-phosphate
  modified_base 8: mod_base = OTHER; note = 2'-O-methyluridine-3'-phosphate
  modified_base 9: mod_base = OTHER; note = 2'-deoxy-2'-fluoroguanosine-3'-phosphate
  modified_base 10: mod_base = OTHER; note = 2'-deoxy-2'-fluorocytidine-3'-phosphate
  modified_base 11: mod_base = OTHER; note = 2'-deoxy-2'-fluorouridine-3'-phosphate
  modified_base 12: mod_base = OTHER; note = 2'-O-methyluridine-3'-phosphate
  modified_base 13: mod_base = OTHER; note = 2'-O-methylguanosine-3'-phosphate
  modified_base 14: mod_base = OTHER; note = 2'-O-methyladenosine-3'-phosphate
  modified_base 15: mod_base = OTHER; note = 2'-O-methyladenosine-3'-phosphate
  modified_base 16: mod_base = OTHER; note = 2'-O-methyladenosine-3'-phosphate
  modified_base 17: mod_base = OTHER; note = 2'-O-methylcytidine-3'-phosphate
  modified_base 18: mod_base = OTHER; note = 2'-O-methylcytidine-3'-phosphate
  modified_base 19: mod_base = OTHER; note = 2'-O-methyladenosine-3'-phosphate
  modified_base 20: mod_base = OTHER; note = 2'-O-methyladenosine-3'-phosphate
  modified_base 21: mod_base = OTHER; note = 2'-O-methyladenosine-3'-phosphate ((2S,4R)-1-[29-[[2-(acetylamino)-2-deoxy-beta-D-galactopyra nosyl]oxy]-14,14-bis[[3-[[3-[[5-[[2-(acetylamino)-2-deoxy-b eta-D-galactopyranosyl]oxy]-1-oxopentyl]amino]propyl]amino] -3-oxopropoxy]methyl]-1,12,19,25-tetraoxo-16-oxa-13,20,24-t riazanonacos-1-yl]-4-hydroxy-2-pyrrolidinyl)methyl ester
ctccttttgcttgaaaccaaa

SEQ ID NO: 2747 - RNA, 21 nt, synthetic construct
  source 1..21: mol_type = other RNA
  modified_base 1: mod_base = OTHER; note = 2'-O-methyluridine-3'-phosphorothioate
  modified_base 2: mod_base = OTHER; note = 2'-O-methyladenosine-3'-phosphorothioate
  modified_base 3: mod_base = OTHER; note = 2'-O-methylcytidine-3'-phosphate
  modified_base 4: mod_base = OTHER; note = 2'-O-methyladenosine-3'-phosphate
  modified_base 5: mod_base = OTHER; note = 2'-O-methylcytidine-3'-phosphate
  modified_base 6: mod_base = OTHER; note = 2'-O-methyladenosine-3'-phosphate
  modified_base 7: mod_base = OTHER; note = 2'-deoxy-2'-fluoroguanosine-3'-phosphate
  modified_base 8: mod_base = OTHER; note = 2'-O-methylguanosine-3'-phosphate
  modified_base 9: mod_base = OTHER; note = 2'-deoxy-2'-fluoroadenosine-3'-phosphate
  modified_base 10: mod_base = OTHER; note = 2'-deoxy-2'-fluorouridine-3'-phosphate
  modified_base 11: mod_base = OTHER; note = 2'-deoxy-2'-fluorocytidine-3'-phosphate
  modified_base 12: mod_base = OTHER; note = 2'-O-methylcytidine-3'-phosphate
  modified_base 13: mod_base = OTHER; note = 2'-O-methyluridine-3'-phosphate
  modified_base 14: mod_base = OTHER; note = 2'-O-methyladenosine-3'-phosphate
  modified_base 15: mod_base = OTHER; note = 2'-O-methyluridine-3'-phosphate
  modified_base 16: mod_base = OTHER; note = 2'-O-methyluridine-3'-phosphate
  modified_base 17: mod_base = OTHER; note = 2'-O-methylcytidine-3'-phosphate
  modified_base 18: mod_base = OTHER; note = 2'-O-methyluridine-3'-phosphate
  modified_base 19: mod_base = OTHER; note = 2'-O-methylcytidine-3'-phosphate
  modified_base 20: mod_base = OTHER; note = 2'-O-methyladenosine-3'-phosphate
  modified_base 21: mod_base = OTHER; note = 2'-O-methyladenosine-3'-phosphate ((2S,4R)-1-[29-[[2-(acetylamino)-2-deoxy-beta-D-galactopyra nosyl]oxy]-14,14-bis[[3-[[3-[[5-[[2-(acetylamino)-2-deoxy-b eta-D-galactopyranosyl]oxy]-1-oxopentyl]amino]propyl]amino] -3-oxopropoxy]methyl]-1,12,19,25-tetraoxo-16-oxa-13,20,24-t riazanonacos-1-yl]-4-hydroxy-2-pyrrolidinyl)methyl ester
tacacaggatcctattctcaa

SEQ ID NO: 2748 - RNA, 21 nt, synthetic construct
  source 1..21: mol_type = other RNA
  modified_base 1: mod_base = OTHER; note = 2'-O-methylguanosine-3'-phosphorothioate
  modified_base 2: mod_base = OTHER; note = 2'-O-methyluridine-3'-phosphorothioate
  modified_base 3: mod_base = OTHER; note = 2'-O-methylcytidine-3'-phosphate
  modified_base 4: mod_base = OTHER; note = 2'-O-methylcytidine-3'-phosphate
  modified_base 5: mod_base = OTHER; note = 2'-O-methyladenosine-3'-phosphate
  modified_base 6: mod_base = OTHER; note = 2'-O-methylcytidine-3'-phosphate
  modified_base 7: mod_base = OTHER; note = 2'-deoxy-2'-fluorocytidine-3'-phosphate
  modified_base 8: mod_base = OTHER; note = 2'-O-methylcytidine-3'-phosphate
  modified_base 9: mod_base = OTHER; note = 2'-deoxy-2'-fluoroadenosine-3'-phosphate
  modified_base 10: mod_base = OTHER; note = 2'-deoxy-2'-fluoroguanosine-3'-phosphate
  modified_base 11: mod_base = OTHER; note = 2'-deoxy-2'-fluorocytidine-3'-phosphate
  modified_base 12: mod_base = OTHER; note = 2'-O-methyladenosine-3'-phosphate
  modified_base 13: mod_base = OTHER; note = 2'-O-methyladenosine-3'-phosphate
  modified_base 14: mod_base = OTHER; note = 2'-O-methyladenosine-3'-phosphate
  modified_base 15: mod_base = OTHER; note = 2'-O-methylguanosine-3'-phosphate
  modified_base 16: mod_base = OTHER; note = 2'-O-methyladenosine-3'-phosphate
  modified_base 17: mod_base = OTHER; note = 2'-O-methylguanosine-3'-phosphate
  modified_base 18: mod_base = OTHER; note = 2'-O-methyluridine-3'-phosphate
  modified_base 19: mod_base = OTHER; note = 2'-O-methylguanosine-3'-phosphate
  modified_base 20: mod_base = OTHER; note = 2'-O-methylguanosine-3'-phosphate
  modified_base 21: mod_base = OTHER; note = 2'-O-methyladenosine-3'-phosphate ((2S,4R)-1-[29-[[2-(acetylamino)-2-deoxy-beta-D-galactopyra nosyl]oxy]-14,14-bis[[3-[[3-[[5-[[2-(acetylamino)-2-deoxy-b eta-D-galactopyranosyl]oxy]-1-oxopentyl]amino]propyl]amino] -3-oxopropoxy]methyl]-1,12,19,25-tetraoxo-16-oxa-13,20,24-t riazanonacos-1-yl]-4-hydroxy-2-pyrrolidinyl)methyl ester
gtccacccagcaaagagtgga

SEQ ID NO: 2749 - RNA, 21 nt, synthetic construct
  source 1..21: mol_type = other RNA
  modified_base 1: mod_base = OTHER; note = 2'-O-methyladenosine-3'-phosphorothioate
  modified_base 2: mod_base = OTHER; note = 2'-O-methylguanosine-3'-phosphorothioate
  modified_base 3: mod_base = OTHER; note = 2'-O-methyluridine-3'-phosphate
  modified_base 4: mod_base = OTHER; note = 2'-O-methylguanosine-3'-phosphate
  modified_base 5: mod_base = OTHER; note = 2'-O-methylguanosine-3'-phosphate
  modified_base 6: mod_base = OTHER; note = 2'-O-methylguanosine-3'-phosphate
  modified_base 7: mod_base = OTHER; note = 2'-deoxy-2'-fluorocytidine-3'-phosphate
  modified_base 8: mod_base = OTHER; note = 2'-O-methyluridine-3'-phosphate
  modified_base 9: mod_base = OTHER; note = 2'-deoxy-2'-fluoroguanosine-3'-phosphate
  modified_base 10: mod_base = OTHER; note = 2'-deoxy-2'-fluorocytidine-3'-phosphate
  modified_base 11: mod_base = OTHER; note = 2'-deoxy-2'-fluoroadenosine-3'-phosphate
  modified_base 12: mod_base = OTHER; note = 2'-O-methyluridine-3'-phosphate
  modified_base 13: mod_base = OTHER; note = 2'-O-methylcytidine-3'-phosphate
  modified_base 14: mod_base = OTHER; note = 2'-O-methyluridine-3'-phosphate
  modified_base 15: mod_base = OTHER; note = 2'-O-methylguanosine-3'-phosphate
  modified_base 16: mod_base = OTHER; note = 2'-O-methylguanosine-3'-phosphate
  modified_base 17: mod_base = OTHER; note = 2'-O-methylguanosine-3'-phosphate
  modified_base 18: mod_base = OTHER; note = 2'-O-methyladenosine-3'-phosphate
  modified_base 19: mod_base = OTHER; note = 2'-O-methyluridine-3'-phosphate
  modified_base 20: mod_base = OTHER; note = 2'-O-methyluridine-3'-phosphate
  modified_base 21: mod_base = OTHER; note = 2'-O-methyladenosine-3'-phosphate ((2S,4R)-1-[29-[[2-(acetylamino)-2-deoxy-beta-D-galactopyra nosyl]oxy]-14,14-bis[[3-[[3-[[5-[[2-(acetylamino)-2-deoxy-b eta-D-galactopyranosyl]oxy]-1-oxopentyl]amino]propyl]amino] -3-oxopropoxy]methyl]-1,12,19,25-tetraoxo-16-oxa-13,20,24-t riazanonacos-1-yl]-4-hydroxy-2-pyrrolidinyl)methyl ester
agtgggctgcatctgggatta

SEQ ID NO: 2750 - RNA, 21 nt, synthetic construct
  source 1..21: mol_type = other RNA
  modified_base 1: mod_base = OTHER; note = 2'-O-methylguanosine-3'-phosphorothioate
  modified_base 2: mod_base = OTHER; note = 2'-O-methyladenosine-3'-phosphorothioate
  modified_base 3: mod_base = OTHER; note = 2'-O-methyluridine-3'-phosphate
  modified_base 4: mod_base = OTHER; note = 2'-O-methyluridine-3'-phosphate
  modified_base 5: mod_base = OTHER; note = 2'-O-methylcytidine-3'-phosphate
  modified_base 6: mod_base = OTHER; note = 2'-O-methylcytidine-3'-phosphate
  modified_base 7: mod_base = OTHER; note = 2'-deoxy-2'-fluorocytidine-3'-phosphate
  modified_base 8: mod_base = OTHER; note = 2'-O-methyladenosine-3'-phosphate
  modified_base 9: mod_base = OTHER; note = 2'-deoxy-2'-fluorocytidine-3'-phosphate
  modified_base 10: mod_base = OTHER; note = 2'-deoxy-2'-fluorocytidine-3'-phosphate
  modified_base 11: mod_base = OTHER; note = 2'-deoxy-2'-fluoroadenosine-3'-phosphate
  modified_base 12: mod_base = OTHER; note = 2'-O-methyladenosine-3'-phosphate
  modified_base 13: mod_base = OTHER; note = 2'-O-methylguanosine-3'-phosphate
  modified_base 14: mod_base = OTHER; note = 2'-O-methylguanosine-3'-phosphate
  modified_base 15: mod_base = OTHER; note = 2'-O-methyluridine-3'-phosphate
  modified_base 16: mod_base = OTHER; note = 2'-O-methylcytidine-3'-phosphate
  modified_base 17: mod_base = OTHER; note = 2'-O-methyluridine-3'-phosphate
  modified_base 18: mod_base = OTHER; note = 2'-O-methyluridine-3'-phosphate
  modified_base 19: mod_base = OTHER; note = 2'-O-methylcytidine-3'-phosphate
  modified_base 20: mod_base = OTHER; note = 2'-O-methyladenosine-3'-phosphate
  modified_base 21: mod_base = OTHER; note = 2'-O-methyladenosine-3'-phosphate ((2S,4R)-1-[29-[[2-(acetylamino)-2-deoxy-beta-D-galactopyra nosyl]oxy]-14,14-bis[[3-[[3-[[5-[[2-(acetylamino)-2-deoxy-b eta-D-galactopyranosyl]oxy]-1-oxopentyl]amino]propyl]amino] -3-oxopropoxy]methyl]-1,12,19,25-tetraoxo-16-oxa-13,20,24-t riazanonacos-1-yl]-4-hydroxy-2-pyrrolidinyl)methyl ester
gattcccaccaaggtcttcaa

SEQ ID NO: 2751 - RNA, 21 nt, synthetic construct
  source 1..21: mol_type = other RNA
  modified_base 1: mod_base = OTHER; note = 2'-O-methyluridine-3'-phosphorothioate
  modified_base 2: mod_base = OTHER; note = 2'-O-methyluridine-3'-phosphorothioate
  modified_base 3: mod_base = OTHER; note = 2'-O-methylcytidine-3'-phosphate
  modified_base 4: mod_base = OTHER; note = 2'-O-methyladenosine-3'-phosphate
  modified_base 5: mod_base = OTHER; note = 2'-O-methylguanosine-3'-phosphate
  modified_base 6: mod_base = OTHER; note = 2'-O-methylcytidine-3'-phosphate
  modified_base 7: mod_base = OTHER; note = 2'-deoxy-2'-fluorocytidine-3'-phosphate
  modified_base 8: mod_base = OTHER; note = 2'-O-methyladenosine-3'-phosphate
  modified_base 9: mod_base = OTHER; note = 2'-deoxy-2'-fluorouridine-3'-phosphate
  modified_base 10: mod_base = OTHER; note = 2'-deoxy-2'-fluorocytidine-3'-phosphate
  modified_base 11: mod_base = OTHER; note = 2'-deoxy-2'-fluoroadenosine-3'-phosphate
  modified_base 12: mod_base = OTHER; note = 2'-O-methyladenosine-3'-phosphate
  modified_base 13: mod_base = OTHER; note = 2'-O-methylcytidine-3'-phosphate
  modified_base 14: mod_base = OTHER; note = 2'-O-methyladenosine-3'-phosphate
  modified_base 15: mod_base = OTHER; note = 2'-O-methyladenosine-3'-phosphate
  modified_base 16: mod_base = OTHER; note = 2'-O-methylguanosine-3'-phosphate
  modified_base 17: mod_base = OTHER; note = 2'-O-methyladenosine-3'-phosphate
  modified_base 18: mod_base = OTHER; note = 2'-O-methylguanosine-3'-phosphate
  modified_base 19: mod_base = OTHER; note = 2'-O-methyluridine-3'-phosphate
  modified_base 20: mod_base = OTHER; note = 2'-O-methyluridine-3'-phosphate
  modified_base 21: mod_base = OTHER; note = 2'-O-methyladenosine-3'-phosphate ((2S,4R)-1-[29-[[2-(acetylamino)-2-deoxy-beta-D-galactopyra nosyl]oxy]-14,14-bis[[3-[[3-[[5-[[2-(acetylamino)-2-deoxy-b eta-D-galactopyranosyl]oxy]-1-oxopentyl]amino]propyl]amino] -3-oxopropoxy]methyl]-1,12,19,25-tetraoxo-16-oxa-13,20,24-t riazanonacos-1-yl]-4-hydroxy-2-pyrrolidinyl)methyl ester
ttcagccatcaacaagagtta

SEQ ID NO: 2752 - RNA, 21 nt, synthetic construct
  source 1..21: mol_type = other RNA
  modified_base 1: mod_base = OTHER; note = 2'-O-methylcytidine-3'-phosphorothioate
  modified_base 2: mod_base = OTHER; note = 2'-O-methyladenosine-3'-phosphorothioate
  modified_base 3: mod_base = OTHER; note = 2'-O-methylcytidine-3'-phosphate
  modified_base 4: mod_base = OTHER; note = 2'-O-methyluridine-3'-phosphate
  modified_base 5: mod_base = OTHER; note = 2'-O-methylguanosine-3'-phosphate
  modified_base 6: mod_base = OTHER; note = 2'-O-methyladenosine-3'-phosphate
  modified_base 7: mod_base = OTHER; note = 2'-deoxy-2'-fluoroadenosine-3'-phosphate
  modified_base 8: mod_base = OTHER; note = 2'-O-methyluridine-3'-phosphate
  modified_base 9: mod_base = OTHER; note = 2'-deoxy-2'-fluoroguanosine-3'-phosphate
  modified_base 10: mod_base = OTHER; note = 2'-deoxy-2'-fluorocytidine-3'-phosphate
  modified_base 11: mod_base = OTHER; note = 2'-deoxy-2'-fluorocytidine-3'-phosphate
  modified_base 12: mod_base = OTHER; note = 2'-O-methyluridine-3'-phosphate
  modified_base 13: mod_base = OTHER; note = 2'-O-methylcytidine-3'-phosphate
  modified_base 14: mod_base = OTHER; note = 2'-O-methyladenosine-3'-phosphate
  modified_base 15: mod_base = OTHER; note = 2'-O-methyladenosine-3'-phosphate
  modified_base 16: mod_base = OTHER; note = 2'-O-methyluridine-3'-phosphate
  modified_base 17: mod_base = OTHER; note = 2'-O-methylguanosine-3'-phosphate
  modified_base 18: mod_base = OTHER; note = 2'-O-methyluridine-3'-phosphate
  modified_base 19: mod_base = OTHER; note = 2'-O-methylguanosine-3'-phosphate
  modified_base 20: mod_base = OTHER; note = 2'-O-methyladenosine-3'-phosphate
  modified_base 21: mod_base = OTHER; note = 2'-O-methyladenosine-3'-phosphate ((2S,4R)-1-[29-[[2-(acetylamino)-2-deoxy-beta-D-galactopyra nosyl]oxy]-14,14-bis[[3-[[3-[[5-[[2-(acetylamino)-2-deoxy-b eta-D-galactopyranosyl]oxy]-1-oxopentyl]amino]propyl]amino] -3-oxopropoxy]methyl]-1,12,19,25-tetraoxo-16-oxa-13,20,24-t riazanonacos-1-yl]-4-hydroxy-2-pyrrolidinyl)methyl ester
cactgaatgcctcaatgtgaa

SEQ ID NO: 2753 - RNA, 21 nt, synthetic construct
  source 1..21: mol_type = other RNA
  modified_base 1: mod_base = OTHER; note = 2'-O-methylcytidine-3'-phosphorothioate
  modified_base 2: mod_base = OTHER; note = 2'-O-methylcytidine-3'-phosphorothioate
  modified_base 3: mod_base = OTHER; note = 2'-O-methyluridine-3'-phosphate
  modified_base 4: mod_base = OTHER; note = 2'-O-methyluridine-3'-phosphate
  modified_base 5: mod_base = OTHER; note = 2'-O-methyluridine-3'-phosphate
  modified_base 6: mod_base = OTHER; note = 2'-O-methylguanosine-3'-phosphate
  modified_base 7: mod_base = OTHER; note = 2'-deoxy-2'-fluoroguanosine-3'-phosphate
  modified_base 8: mod_base = OTHER; note = 2'-O-methyladenosine-3'-phosphate
  modified_base 9: mod_base = OTHER; note = 2'-deoxy-2'-fluorouridine-3'-phosphate
  modified_base 10: mod_base = OTHER; note = 2'-deoxy-2'-fluoroguanosine-3'-phosphate
  modified_base 11: mod_base = OTHER; note = 2'-deoxy-2'-fluoroadenosine-3'-phosphate
  modified_base 12: mod_base = OTHER; note = 2'-O-methylcytidine-3'-phosphate
  modified_base 13: mod_base = OTHER; note = 2'-O-methylcytidine-3'-phosphate
  modified_base 14: mod_base = OTHER; note = 2'-O-methyladenosine-3'-phosphate
  modified_base 15: mod_base = OTHER; note = 2'-O-methylguanosine-3'-phosphate
  modified_base 16: mod_base = OTHER; note = 2'-O-methyladenosine-3'-phosphate
  modified_base 17: mod_base = OTHER; note = 2'-O-methyladenosine-3'-phosphate
  modified_base 18: mod_base = OTHER; note = 2'-O-methylcytidine-3'-phosphate
  modified_base 19: mod_base = OTHER; note = 2'-O-methyladenosine-3'-phosphate
  modified_base 20: mod_base = OTHER; note = 2'-O-methyladenosine-3'-phosphate
  modified_base 21: mod_base = OTHER; note = 2'-O-methyladenosine-3'-phosphate ((2S,4R)-1-[29-[[2-(acetylamino)-2-deoxy-beta-D-galactopyra nosyl]oxy]-14,14-bis[[3-[[3-[[5-[[2-(acetylamino)-2-deoxy-b eta-D-galactopyranosyl]oxy]-1-oxopentyl]amino]propyl]amino] -3-oxopropoxy]methyl]-1,12,19,25-tetraoxo-16-oxa-13,20,24-t riazanonacos-1-yl]-4-hydroxy-2-pyrrolidinyl)methyl ester
cctttggatgaccagaacaaa

SEQ ID NO: 2754 - RNA, 21 nt, synthetic construct
  source 1..21: mol_type = other RNA
  modified_base 1: mod_base = OTHER; note = 2'-O-methylguanosine-3'-phosphorothioate
  modified_base 2: mod_base = OTHER; note = 2'-O-methyluridine-3'-phosphorothioate
  modified_base 3: mod_base = OTHER; note = 2'-O-methyluridine-3'-phosphate
  modified_base 4: mod_base = OTHER; note = 2'-O-methylcytidine-3'-phosphate
  modified_base 5: mod_base = OTHER; note = 2'-O-methylcytidine-3'-phosphate
  modified_base 6: mod_base = OTHER; note = 2'-O-methylcytidine-3'-phosphate
  modified_base 7: mod_base = OTHER; note = 2'-deoxy-2'-fluorouridine-3'-phosphate
  modified_base 8: mod_base = OTHER; note = 2'-O-methylcytidine-3'-phosphate
  modified_base 9: mod_base = OTHER; note = 2'-deoxy-2'-fluorouridine-3'-phosphate
  modified_base 10: mod_base = OTHER; note = 2'-deoxy-2'-fluoroguanosine-3'-phosphate
  modified_base 11: mod_base = OTHER; note = 2'-deoxy-2'-fluoroadenosine-3'-phosphate
  modified_base 12: mod_base = OTHER; note = 2'-O-methylguanosine-3'-phosphate
  modified_base 13: mod_base = OTHER; note = 2'-O-methyladenosine-3'-phosphate
  modified_base 14: mod_base = OTHER; note = 2'-O-methyladenosine-3'-phosphate
  modified_base 15: mod_base = OTHER; note = 2'-O-methyluridine-3'-phosphate
  modified_base 16: mod_base = OTHER; note = 2'-O-methyluridine-3'-phosphate
  modified_base 17: mod_base = OTHER; note = 2'-O-methylcytidine-3'-phosphate
  modified_base 18: mod_base = OTHER; note = 2'-O-methylcytidine-3'-phosphate
  modified_base 19: mod_base = OTHER; note = 2'-O-methyladenosine-3'-phosphate
  modified_base 20: mod_base = OTHER; note = 2'-O-methyladenosine-3'-phosphate
  modified_base 21: mod_base = OTHER; note = 2'-O-methyladenosine-3'-phosphate ((2S,4R)-1-[29-[[2-(acetylamino)-2-deoxy-beta-D-galactopyra nosyl]oxy]-14,14-bis[[3-[[3-[[5-[[2-(acetylamino)-2-deoxy-b eta-D-galactopyranosyl]oxy]-1-oxopentyl]amino]propyl]amino] -3-oxopropoxy]methyl]-1,12,19,25-tetraoxo-16-oxa-13,20,24-t riazanonacos-1-yl]-4-hydroxy-2-pyrrolidinyl)methyl ester
gttccctctgagaattccaaa

SEQ ID NO: 2755 - RNA, 21 nt, synthetic construct
  source 1..21: mol_type = other RNA
  modified_base 1: mod_base = OTHER; note = 2'-O-methyluridine-3'-phosphorothioate
  modified_base 2: mod_base = OTHER; note = 2'-O-methylcytidine-3'-phosphorothioate
  modified_base 3: mod_base = OTHER; note = 2'-O-methylcytidine-3'-phosphate
  modified_base 4: mod_base = OTHER; note = 2'-O-methyladenosine-3'-phosphate
  modified_base 5: mod_base = OTHER; note = 2'-O-methyladenosine-3'-phosphate
  modified_base 6: mod_base = OTHER; note = 2'-O-methylguanosine-3'-phosphate
  modified_base 7: mod_base = OTHER; note = 2'-deoxy-2'-fluoroguanosine-3'-phosphate
  modified_base 8: mod_base = OTHER; note = 2'-O-methyladenosine-3'-phosphate
  modified_base 9: mod_base = OTHER; note = 2'-deoxy-2'-fluoroguanosine-3'-phosphate
  modified_base 10: mod_base = OTHER; note = 2'-deoxy-2'-fluorouridine-3'-phosphate
  modified_base 11: mod_base = OTHER; note = 2'-deoxy-2'-fluorouridine-3'-phosphate
  modified_base 12: mod_base = OTHER; note = 2'-O-methylcytidine-3'-phosphate
  modified_base 13: mod_base = OTHER; note = 2'-O-methylcytidine-3'-phosphate
  modified_base 14: mod_base = OTHER; note = 2'-O-methyladenosine-3'-phosphate
  modified_base 15: mod_base = OTHER; note = 2'-O-methyluridine-3'-phosphate
  modified_base 16: mod_base = OTHER; note = 2'-O-methylguanosine-3'-phosphate
  modified_base 17: mod_base = OTHER; note = 2'-O-methyladenosine-3'-phosphate
  modified_base 18: mod_base = OTHER; note = 2'-O-methyladenosine-3'-phosphate
  modified_base 19: mod_base = OTHER; note = 2'-O-methylguanosine-3'-phosphate
  modified_base 20: mod_base = OTHER; note = 2'-O-methyladenosine-3'-phosphate
  modified_base 21: mod_base = OTHER; note = 2'-O-methyladenosine-3'-phosphate ((2S,4R)-1-[29-[[2-(acetylamino)-2-deoxy-beta-D-galactopyra nosyl]oxy]-14,14-bis[[3-[[3-[[5-[[2-(acetylamino)-2-deoxy-b eta-D-galactopyranosyl]oxy]-1-oxopentyl]amino]propyl]amino] -3-oxopropoxy]methyl]-1,12,19,25-tetraoxo-16-oxa-13,20,24-t riazanonacos-1-yl]-4-hydroxy-2-pyrrolidinyl)methyl ester
tccaaggagttccatgaagaa

SEQ ID NO: 2756 - RNA, 21 nt, synthetic construct
  source 1..21: mol_type = other RNA
  modified_base 1: mod_base = OTHER; note = 2'-O-methylcytidine-3'-phosphorothioate
  modified_base 2: mod_base = OTHER; note = 2'-O-methyladenosine-3'-phosphorothioate
  modified_base 3: mod_base = OTHER; note = 2'-O-methyluridine-3'-phosphate
  modified_base 4: mod_base = OTHER; note = 2'-O-methylcytidine-3'-phosphate
  modified_base 5: mod_base = OTHER; note = 2'-O-methylcytidine-3'-phosphate
  modified_base 6: mod_base = OTHER; note = 2'-O-methyladenosine-3'-phosphate
  modified_base 7: mod_base = OTHER; note = 2'-deoxy-2'-fluorocytidine-3'-phosphate
  modified_base 8: mod_base = OTHER; note = 2'-O-methyladenosine-3'-phosphate
  modified_base 9: mod_base = OTHER; note = 2'-deoxy-2'-fluorocytidine-3'-phosphate
  modified_base 10: mod_base = OTHER; note = 2'-deoxy-2'-fluoroadenosine-3'-phosphate
  modified_base 11: mod_base = OTHER; note = 2'-deoxy-2'-fluorocytidine-3'-phosphate
  modified_base 12: mod_base = OTHER; note = 2'-O-methylguanosine-3'-phosphate
  modified_base 13: mod_base = OTHER; note = 2'-O-methylcytidine-3'-phosphate
  modified_base 14: mod_base = OTHER; note = 2'-O-methyladenosine-3'-phosphate
  modified_base 15: mod_base = OTHER; note = 2'-O-methylguanosine-3'-phosphate
  modified_base 16: mod_base = OTHER; note = 2'-O-methylguanosine-3'-phosphate
  modified_base 17: mod_base = OTHER; note = 2'-O-methyladenosine-3'-phosphate
  modified_base 18: mod_base = OTHER; note = 2'-O-methyladenosine-3'-phosphate
  modified_base 19: mod_base = OTHER; note = 2'-O-methylcytidine-3'-phosphate
  modified_base 20: mod_base = OTHER; note = 2'-O-methyluridine-3'-phosphate
  modified_base 21: mod_base = OTHER; note = 2'-O-methyladenosine-3'-phosphate ((2S,4R)-1-[29-[[2-(acetylamino)-2-deoxy-beta-D-galactopyra nosyl]oxy]-14,14-bis[[3-[[3-[[5-[[2-(acetylamino)-2-deoxy-b eta-D-galactopyranosyl]oxy]-1-oxopentyl]amino]propyl]amino] -3-oxopropoxy]methyl]-1,12,19,25-tetraoxo-16-oxa-13,20,24-t riazanonacos-1-yl]-4-hydroxy-2-pyrrolidinyl)methyl ester
catccacacacgcaggaacta

SEQ ID NO: 2757 - RNA, 21 nt, synthetic construct
  source 1..21: mol_type = other RNA
  modified_base 1: mod_base = OTHER; note = 2'-O-methyluridine-3'-phosphorothioate
  modified_base 2: mod_base = OTHER; note = 2'-O-methylcytidine-3'-phosphorothioate
  modified_base 3: mod_base = OTHER; note = 2'-O-methylcytidine-3'-phosphate
  modified_base 4: mod_base = OTHER; note = 2'-O-methylcytidine-3'-phosphate
  modified_base 5: mod_base = OTHER; note = 2'-O-methyladenosine-3'-phosphate
  modified_base 6: mod_base = OTHER; note = 2'-O-methylguanosine-3'-phosphate
  modified_base 7: mod_base = OTHER; note = 2'-deoxy-2'-fluorocytidine-3'-phosphate
  modified_base 8: mod_base = OTHER; note = 2'-O-methyladenosine-3'-phosphate
  modified_base 9: mod_base = OTHER; note = 2'-deoxy-2'-fluoroadenosine-3'-phosphate
  modified_base 10: mod_base = OTHER; note = 2'-deoxy-2'-fluorocytidine-3'-phosphate
  modified_base 11: mod_base = OTHER; note = 2'-deoxy-2'-fluoroadenosine-3'-phosphate
  modified_base 12: mod_base = OTHER; note = 2'-O-methylcytidine-3'-phosphate
  modified_base 13: mod_base = OTHER; note = 2'-O-methyladenosine-3'-phosphate
  modified_base 14: mod_base = OTHER; note = 2'-O-methyladenosine-3'-phosphate
  modified_base 15: mod_base = OTHER; note = 2'-O-methylguanosine-3'-phosphate
  modified_base 16: mod_base = OTHER; note = 2'-O-methylcytidine-3'-phosphate
  modified_base 17: mod_base = OTHER; note = 2'-O-methyluridine-3'-phosphate
  modified_base 18: mod_base = OTHER; note = 2'-O-methylguanosine-3'-phosphate
  modified_base 19: mod_base = OTHER; note = 2'-O-methylguanosine-3'-phosphate
  modified_base 20: mod_base = OTHER; note = 2'-O-methyladenosine-3'-phosphate
  modified_base 21: mod_base = OTHER; note = 2'-O-methyladenosine-3'-phosphate ((2S,4R)-1-[29-[[2-(acetylamino)-2-deoxy-beta-D-galactopyra nosyl]oxy]-14,14-bis[[3-[[3-[[5-[[2-(acetylamino)-2-deoxy-b eta-D-galactopyranosyl]oxy]-1-oxopentyl]amino]propyl]amino] -3-oxopropoxy]methyl]-1,12,19,25-tetraoxo-16-oxa-13,20,24-t riazanonacos-1-yl]-4-hydroxy-2-pyrrolidinyl)methyl ester
tcccagcaacacaagctggaa

SEQ ID NO: 2758 - RNA, 21 nt, synthetic construct
  source 1..21: mol_type = other RNA
  modified_base 1: mod_base = OTHER; note = 2'-O-methyluridine-3'-phosphorothioate
  modified_base 2: mod_base = OTHER; note = 2'-O-methylguanosine-3'-phosphorothioate
  modified_base 3: mod_base = OTHER; note = 2'-O-methylguanosine-3'-phosphate
  modified_base 4: mod_base = OTHER; note = 2'-O-methyladenosine-3'-phosphate
  modified_base 5: mod_base = OTHER; note = 2'-O-methyladenosine-3'-phosphate
  modified_base 6: mod_base = OTHER; note = 2'-O-methylguanosine-3'-phosphate
  modified_base 7: mod_base = OTHER; note = 2'-deoxy-2'-fluorocytidine-3'-phosphate
  modified_base 8: mod_base = OTHER; note = 2'-O-methyladenosine-3'-phosphate
  modified_base 9: mod_base = OTHER; note = 2'-deoxy-2'-fluorocytidine-3'-phosphate
  modified_base 10: mod_base = OTHER; note = 2'-deoxy-2'-fluoroadenosine-3'-phosphate
  modified_base 11: mod_base = OTHER; note = 2'-deoxy-2'-fluorouridine-3'-phosphate
  modified_base 12: mod_base = OTHER; note = 2'-O-methylguanosine-3'-phosphate
  modified_base 13: mod_base = OTHER; note = 2'-O-methyluridine-3'-phosphate
  modified_base 14: mod_base = OTHER; note = 2'-O-methyluridine-3'-phosphate
  modified_base 15: mod_base = OTHER; note = 2'-O-methyluridine-3'-phosphate
  modified_base 16: mod_base = OTHER; note = 2'-O-methyladenosine-3'-phosphate
  modified_base 17: mod_base = OTHER; note = 2'-O-methyluridine-3'-phosphate
  modified_base 18: mod_base = OTHER; note = 2'-O-methyluridine-3'-phosphate
  modified_base 19: mod_base = OTHER; note = 2'-O-methyluridine-3'-phosphate
  modified_base 20: mod_base = OTHER; note = 2'-O-methyladenosine-3'-phosphate
  modified_base 21: mod_base = OTHER; note = 2'-O-methyladenosine-3'-phosphate ((2S,4R)-1-[29-[[2-(acetylamino)-2-deoxy-beta-D-galactopyra nosyl]oxy]-14,14-bis[[3-[[3-[[5-[[2-(acetylamino)-2-deoxy-b eta-D-galactopyranosyl]oxy]-1-oxopentyl]amino]propyl]amino] -3-oxopropoxy]methyl]-1,12,19,25-tetraoxo-16-oxa-13,20,24-t riazanonacos-1-yl]-4-hydroxy-2-pyrrolidinyl)methyl ester
tggaagcacatgtttatttaa

SEQ ID NO: 2759 - RNA, 21 nt, synthetic construct
  source 1..21: mol_type = other RNA
  modified_base 1: mod_base = OTHER; note = 2'-O-methyluridine-3'-phosphorothioate
  modified_base 2: mod_base = OTHER; note = 2'-O-methylcytidine-3'-phosphorothioate
  modified_base 3: mod_base = OTHER; note = 2'-O-methyluridine-3'-phosphate
  modified_base 4: mod_base = OTHER; note = 2'-O-methylguanosine-3'-phosphate
  modified_base 5: mod_base = OTHER; note = 2'-O-methylcytidine-3'-phosphate
  modified_base 6: mod_base = OTHER; note = 2'-O-methyladenosine-3'-phosphate
  modified_base 7: mod_base = OTHER; note = 2'-deoxy-2'-fluorouridine-3'-phosphate
  modified_base 8: mod_base = OTHER; note = 2'-O-methyluridine-3'-phosphate
  modified_base 9: mod_base = OTHER; note = 2'-deoxy-2'-fluorouridine-3'-phosphate
  modified_base 10: mod_base = OTHER; note = 2'-deoxy-2'-fluorouridine-3'-phosphate
  modified_base 11: mod_base = OTHER; note = 2'-deoxy-2'-fluoroadenosine-3'-phosphate
  modified_base 12: mod_base = OTHER; note = 2'-O-methyluridine-3'-phosphate
  modified_base 13: mod_base = OTHER; note = 2'-O-methyluridine-3'-phosphate
  modified_base 14: mod_base = OTHER; note = 2'-O-methylcytidine-3'-phosphate
  modified_base 15: mod_base = OTHER; note = 2'-O-methyluridine-3'-phosphate
  modified_base 16: mod_base = OTHER; note = 2'-O-methylguanosine-3'-phosphate
  modified_base 17: mod_base = OTHER; note = 2'-O-methylguanosine-3'-phosphate
  modified_base 18: mod_base = OTHER; note = 2'-O-methyladenosine-3'-phosphate
  modified_base 19: mod_base = OTHER; note = 2'-O-methyluridine-3'-phosphate
  modified_base 20: mod_base = OTHER; note = 2'-O-methylguanosine-3'-phosphate
  modified_base 21: mod_base = OTHER; note = 2'-O-methyladenosine-3'-phosphate ((2S,4R)-1-[29-[[2-(acetylamino)-2-deoxy-beta-D-galactopyra nosyl]oxy]-14,14-bis[[3-[[3-[[5-[[2-(acetylamino)-2-deoxy-b eta-D-galactopyranosyl]oxy]-1-oxopentyl]amino]propyl]amino] -3-oxopropoxy]methyl]-1,12,19,25-tetraoxo-16-oxa-13,20,24-t riazanonacos-1-yl]-4-hydroxy-2-pyrrolidinyl)methyl ester
tctgcattttattctggatga

SEQ ID NO: 2760 - RNA, 21 nt, synthetic construct
  source 1..21: mol_type = other RNA
  modified_base 1: mod_base = OTHER; note = 2'-O-methylguanosine-3'-phosphorothioate
  modified_base 2: mod_base = OTHER; note = 2'-O-methyladenosine-3'-phosphorothioate
  modified_base 3: mod_base = OTHER; note = 2'-O-methyluridine-3'-phosphate
  modified_base 4: mod_base = OTHER; note = 2'-O-methylguanosine-3'-phosphate
  modified_base 5: mod_base = OTHER; note = 2'-O-methylguanosine-3'-phosphate
  modified_base 6: mod_base = OTHER; note = 2'-O-methyladenosine-3'-phosphate
  modified_base 7: mod_base = OTHER; note = 2'-deoxy-2'-fluorouridine-3'-phosphate
  modified_base 8: mod_base = OTHER; note = 2'-O-methyluridine-3'-phosphate
  modified_base 9: mod_base = OTHER; note = 2'-deoxy-2'-fluorouridine-3'-phosphate
  modified_base 10: mod_base = OTHER; note = 2'-deoxy-2'-fluoroguanosine-3'-phosphate
  modified_base 11: mod_base = OTHER; note = 2'-deoxy-2'-fluoroadenosine-3'-phosphate
  modified_base 12: mod_base = OTHER; note = 2'-O-methyladenosine-3'-phosphate
  modified_base 13: mod_base = OTHER; note = 2'-O-methylguanosine-3'-phosphate
  modified_base 14: mod_base = OTHER; note = 2'-O-methylcytidine-3'-phosphate
  modified_base 15: mod_base = OTHER; note = 2'-O-methyladenosine-3'-phosphate
  modified_base 16: mod_base = OTHER; note = 2'-O-methyladenosine-3'-phosphate
  modified_base 17: mod_base = OTHER; note = 2'-O-methyladenosine-3'-phosphate
  modified_base 18: mod_base = OTHER; note = 2'-O-methylguanosine-3'-phosphate
  modified_base 19: mod_base = OTHER; note = 2'-O-methylcytidine-3'-phosphate
  modified_base 20: mod_base = OTHER; note = 2'-O-methyladenosine-3'-phosphate
  modified_base 21: mod_base = OTHER; note = 2'-O-methyladenosine-3'-phosphate ((2S,4R)-1-[29-[[2-(acetylamino)-2-deoxy-beta-D-galactopyra nosyl]oxy]-14,14-bis[[3-[[3-[[5-[[2-(acetylamino)-2-deoxy-b eta-D-galactopyranosyl]oxy]-1-oxopentyl]amino]propyl]amino] -3-oxopropoxy]methyl]-1,12,19,25-tetraoxo-16-oxa-13,20,24-t riazanonacos-1-yl]-4-hydroxy-2-pyrrolidinyl)methyl ester
gatggatttgaagcaaagcaa

SEQ ID NO: 2761 - RNA, 21 nt, synthetic construct
  source 1..21: mol_type = other RNA
  modified_base 1: mod_base = OTHER; note = 2'-O-methylcytidine-3'-phosphorothioate
  modified_base 2: mod_base = OTHER; note = 2'-O-methylcytidine-3'-phosphorothioate
  modified_base 3: mod_base = OTHER; note = 2'-O-methyladenosine-3'-phosphate
  modified_base 4: mod_base = OTHER; note = 2'-O-methylguanosine-3'-phosphate
  modified_base 5: mod_base = OTHER; note = 2'-O-methylcytidine-3'-phosphate
  modified_base 6: mod_base = OTHER; note = 2'-O-methyluridine-3'-phosphate
  modified_base 7: mod_base = OTHER; note = 2'-deoxy-2'-fluorouridine-3'-phosphate
  modified_base 8: mod_base = OTHER; note = 2'-O-methylcytidine-3'-phosphate
  modified_base 9: mod_base = OTHER; note = 2'-deoxy-2'-fluorouridine-3'-phosphate
  modified_base 10: mod_base = OTHER; note = 2'-deoxy-2'-fluorocytidine-3'-phosphate
  modified_base 11: mod_base = OTHER; note = 2'-deoxy-2'-fluorocytidine-3'-phosphate
  modified_base 12: mod_base = OTHER; note = 2'-O-methyladenosine-3'-phosphate
  modified_base 13: mod_base = OTHER; note = 2'-O-methylguanosine-3'-phosphate
  modified_base 14: mod_base = OTHER; note = 2'-O-methylguanosine-3'-phosphate
  modified_base 15: mod_base = OTHER; note = 2'-O-methylcytidine-3'-phosphate
  modified_base 16: mod_base = OTHER; note = 2'-O-methyluridine-3'-phosphate
  modified_base 17: mod_base = OTHER; note = 2'-O-methylcytidine-3'-phosphate
  modified_base 18: mod_base = OTHER; note = 2'-O-methyluridine-3'-phosphate
  modified_base 19: mod_base = OTHER; note = 2'-O-methyluridine-3'-phosphate
  modified_base 20: mod_base = OTHER; note = 2'-O-methyluridine-3'-phosphate
  modified_base 21: mod_base = OTHER; note = 2'-O-methyladenosine-3'-phosphate ((2S,4R)-1-[29-[[2-(acetylamino)-2-deoxy-beta-D-galactopyra nosyl]oxy]-14,14-bis[[3-[[3-[[5-[[2-(acetylamino)-2-deoxy-b eta-D-galactopyranosyl]oxy]-1-oxopentyl]amino]propyl]amino] -3-oxopropoxy]methyl]-1,12,19,25-tetraoxo-16-oxa-13,20,24-t riazanonacos-1-yl]-4-hydroxy-2-pyrrolidinyl)methyl ester
ccagcttctccaggctcttta

SEQ ID NO: 2762 - RNA, 21 nt, synthetic construct
  source 1..21: mol_type = other RNA
  modified_base 1: mod_base = OTHER; note = 2'-O-methylcytidine-3'-phosphorothioate
  modified_base 2: mod_base = OTHER; note = 2'-O-methyladenosine-3'-phosphorothioate
  modified_base 3: mod_base = OTHER; note = 2'-O-methylguanosine-3'-phosphate
  modified_base 4: mod_base = OTHER; note = 2'-O-methyluridine-3'-phosphate
  modified_base 5: mod_base = OTHER; note = 2'-O-methyluridine-3'-phosphate
  modified_base 6: mod_base = OTHER; note = 2'-O-methyluridine-3'-phosphate
  modified_base 7: mod_base = OTHER; note = 2'-deoxy-2'-fluorocytidine-3'-phosphate
  modified_base 8: mod_base = OTHER; note = 2'-O-methylcytidine-3'-phosphate
  modified_base 9: mod_base = OTHER; note = 2'-deoxy-2'-fluoroadenosine-3'-phosphate
  modified_base 10: mod_base = OTHER; note = 2'-deoxy-2'-fluoroadenosine-3'-phosphate
  modified_base 11: mod_base = OTHER; note = 2'-deoxy-2'-fluorouridine-3'-phosphate
  modified_base 12: mod_base = OTHER; note = 2'-O-methylcytidine-3'-phosphate
  modified_base 13: mod_base = OTHER; note = 2'-O-methylcytidine-3'-phosphate
  modified_base 14: mod_base = OTHER; note = 2'-O-methylcytidine-3'-phosphate
  modified_base 15: mod_base = OTHER; note = 2'-O-methyladenosine-3'-phosphate
  modified_base 16: mod_base = OTHER; note = 2'-O-methyluridine-3'-phosphate
  modified_base 17: mod_base = OTHER; note = 2'-O-methyladenosine-3'-phosphate
  modified_base 18: mod_base = OTHER; note = 2'-O-methylguanosine-3'-phosphate
  modified_base 19: mod_base = OTHER; note = 2'-O-methyladenosine-3'-phosphate
  modified_base 20: mod_base = OTHER; note = 2'-O-methyluridine-3'-phosphate
  modified_base 21: mod_base = OTHER; note = 2'-O-methyladenosine-3'-phosphate ((2S,4R)-1-[29-[[2-(acetylamino)-2-deoxy-beta-D-galactopyra nosyl]oxy]-14,14-bis[[3-[[3-[[5-[[2-(acetylamino)-2-deoxy-b eta-D-galactopyranosyl]oxy]-1-oxopentyl]amino]propyl]amino] -3-oxopropoxy]methyl]-1,12,19,25-tetraoxo-16-oxa-13,20,24-t riazanonacos-1-yl]-4-hydroxy-2-pyrrolidinyl)methyl ester
cagtttccaatcccatagata

SEQ ID NO: 2763 - RNA, 21 nt, synthetic construct
  source 1..21: mol_type = other RNA
  modified_base 1: mod_base = OTHER; note = 2'-O-methylguanosine-3'-phosphorothioate
  modified_base 2: mod_base = OTHER; note = 2'-O-methyladenosine-3'-phosphorothioate
  modified_base 3: mod_base = OTHER; note = 2'-O-methylguanosine-3'-phosphate
  modified_base 4: mod_base = OTHER; note = 2'-O-methylcytidine-3'-phosphate
  modified_base 5: mod_base = OTHER; note = 2'-O-methyluridine-3'-phosphate
  modified_base 6: mod_base = OTHER; note = 2'-O-methylguanosine-3'-phosphate
  modified_base 7: mod_base = OTHER; note = 2'-deoxy-2'-fluoroadenosine-3'-phosphate
  modified_base 8: mod_base = OTHER; note = 2'-O-methyladenosine-3'-phosphate
  modified_base 9: mod_base = OTHER; note = 2'-deoxy-2'-fluorocytidine-3'-phosphate
  modified_base 10: mod_base = OTHER; note = 2'-deoxy-2'-fluorocytidine-3'-phosphate
  modified_base 11: mod_base = OTHER; note = 2'-deoxy-2'-fluorocytidine-3'-phosphate
  modified_base 12: mod_base = OTHER; note = 2'-O-methyladenosine-3'-phosphate
  modified_base 13: mod_base = OTHER; note = 2'-O-methyluridine-3'-phosphate
  modified_base 14: mod_base = OTHER; note = 2'-O-methyluridine-3'-phosphate
  modified_base 15: mod_base = OTHER; note = 2'-O-methyluridine-3'-phosphate
  modified_base 16: mod_base = OTHER; note = 2'-O-methyluridine-3'-phosphate
  modified_base 17: mod_base = OTHER; note = 2'-O-methylguanosine-3'-phosphate
  modified_base 18: mod_base = OTHER; note = 2'-O-methyladenosine-3'-phosphate
  modified_base 19: mod_base = OTHER; note = 2'-O-methylguanosine-3'-phosphate
  modified_base 20: mod_base = OTHER; note = 2'-O-methyluridine-3'-phosphate
  modified_base 21: mod_base = OTHER; note = 2'-O-methyladenosine-3'-phosphate ((2S,4R)-1-[29-[[2-(acetylamino)-2-deoxy-beta-D-galactopyra nosyl]oxy]-14,14-bis[[3-[[3-[[5-[[2-(acetylamino)-2-deoxy-b eta-D-galactopyranosyl]oxy]-1-oxopentyl]amino]propyl]amino] -3-oxopropoxy]methyl]-1,12,19,25-tetraoxo-16-oxa-13,20,24-t riazanonacos-1-yl]-4-hydroxy-2-pyrrolidinyl)methyl ester
gagctgaacccattttgagta

SEQ ID NO: 2764 - RNA, 21 nt, synthetic construct
  source 1..21: mol_type = other RNA
  modified_base 1: mod_base = OTHER; note = 2'-O-methyluridine-3'-phosphorothioate
  modified_base 2: mod_base = OTHER; note = 2'-O-methyluridine-3'-phosphorothioate
  modified_base 3: mod_base = OTHER; note = 2'-O-methylguanosine-3'-phosphate
  modified_base 4: mod_base = OTHER; note = 2'-O-methylguanosine-3'-phosphate
  modified_base 5: mod_base = OTHER; note = 2'-O-methylguanosine-3'-phosphate
  modified_base 6: mod_base = OTHER; note = 2'-O-methyluridine-3'-phosphate
  modified_base 7: mod_base = OTHER; note = 2'-deoxy-2'-fluorouridine-3'-phosphate
  modified_base 8: mod_base = OTHER; note = 2'-O-methylcytidine-3'-phosphate
  modified_base 9: mod_base = OTHER; note = 2'-deoxy-2'-fluoroadenosine-3'-phosphate
  modified_base 10: mod_base = OTHER; note = 2'-deoxy-2'-fluorouridine-3'-phosphate
  modified_base 11: mod_base = OTHER; note = 2'-deoxy-2'-fluorocytidine-3'-phosphate
  modified_base 12: mod_base = OTHER; note = 2'-O-methyluridine-3'-phosphate
  modified_base 13: mod_base = OTHER; note = 2'-O-methylguanosine-3'-phosphate
  modified_base 14: mod_base = OTHER; note = 2'-O-methyladenosine-3'-phosphate
  modified_base 15: mod_base = OTHER; note = 2'-O-methylguanosine-3'-phosphate
  modified_base 16: mod_base = OTHER; note = 2'-O-methylcytidine-3'-phosphate
  modified_base 17: mod_base = OTHER; note = 2'-O-methyladenosine-3'-phosphate
  modified_base 18: mod_base = OTHER; note = 2'-O-methyladenosine-3'-phosphate
  modified_base 19: mod_base = OTHER; note = 2'-O-methylguanosine-3'-phosphate
  modified_base 20: mod_base = OTHER; note = 2'-O-methyladenosine-3'-phosphate
  modified_base 21: mod_base = OTHER; note = 2'-O-methyladenosine-3'-phosphate ((2S,4R)-1-[29-[[2-(acetylamino)-2-deoxy-beta-D-galactopyra nosyl]oxy]-14,14-bis[[3-[[3-[[5-[[2-(acetylamino)-2-deoxy-b eta-D-galactopyranosyl]oxy]-1-oxopentyl]amino]propyl]amino] -3-oxopropoxy]methyl]-1,12,19,25-tetraoxo-16-oxa-13,20,24-t riazanonacos-1-yl]-4-hydroxy-2-pyrrolidinyl)methyl ester
ttgggttcatctgagcaagaa

SEQ ID NO: 2765 - RNA, 21 nt, synthetic construct
  source 1..21: mol_type = other RNA
  modified_base 1: mod_base = OTHER; note = 2'-O-methylguanosine-3'-phosphorothioate
  modified_base 2: mod_base = OTHER; note = 2'-O-methyladenosine-3'-phosphorothioate
  modified_base 3: mod_base = OTHER; note = 2'-O-methylguanosine-3'-phosphate
  modified_base 4: mod_base = OTHER; note = 2'-O-methylcytidine-3'-phosphate
  modified_base 5: mod_base = OTHER; note = 2'-O-methyluridine-3'-phosphate
  modified_base 6: mod_base = OTHER; note = 2'-O-methylguanosine-3'-phosphate
  modified_base 7: mod_base = OTHER; note = 2'-deoxy-2'-fluoroguanosine-3'-phosphate
  modified_base 8: mod_base = OTHER; note = 2'-O-methylcytidine-3'-phosphate
  modified_base 9: mod_base = OTHER; note = 2'-deoxy-2'-fluoroadenosine-3'-phosphate
  modified_base 10: mod_base = OTHER; note = 2'-deoxy-2'-fluoroadenosine-3'-phosphate
  modified_base 11: mod_base = OTHER; note = 2'-deoxy-2'-fluoroadenosine-3'-phosphate
  modified_base 12: mod_base = OTHER; note = 2'-O-methylguanosine-3'-phosphate
  modified_base 13: mod_base = OTHER; note = 2'-O-methylguanosine-3'-phosphate
  modified_base 14: mod_base = OTHER; note = 2'-O-methyluridine-3'-phosphate
  modified_base 15: mod_base = OTHER; note = 2'-O-methylguanosine-3'-phosphate
  modified_base 16: mod_base = OTHER; note = 2'-O-methylguanosine-3'-phosphate
  modified_base 17: mod_base = OTHER; note = 2'-O-methylcytidine-3'-phosphate
  modified_base 18: mod_base = OTHER; note = 2'-O-methyluridine-3'-phosphate
  modified_base 19: mod_base = OTHER; note = 2'-O-methylcytidine-3'-phosphate
  modified_base 20: mod_base = OTHER; note = 2'-O-methyluridine-3'-phosphate
  modified_base 21: mod_base = OTHER; note = 2'-O-methyladenosine-3'-phosphate ((2S,4R)-1-[29-[[2-(acetylamino)-2-deoxy-beta-D-galactopyra nosyl]oxy]-14,14-bis[[3-[[3-[[5-[[2-(acetylamino)-2-deoxy-b eta-D-galactopyranosyl]oxy]-1-oxopentyl]amino]propyl]amino] -3-oxopropoxy]methyl]-1,12,19,25-tetraoxo-16-oxa-13,20,24-t riazanonacos-1-yl]-4-hydroxy-2-pyrrolidinyl)methyl ester
gagctggcaaaggtggctcta

SEQ ID NO: 2766 - RNA, 21 nt, synthetic construct
  source 1..21: mol_type = other RNA
  modified_base 1: mod_base = OTHER; note = 2'-O-methylguanosine-3'-phosphorothioate
  modified_base 2: mod_base = OTHER; note = 2'-O-methylcytidine-3'-phosphorothioate
  modified_base 3: mod_base = OTHER; note = 2'-O-methyluridine-3'-phosphate
  modified_base 4: mod_base = OTHER; note = 2'-O-methylcytidine-3'-phosphate
  modified_base 5: mod_base = OTHER; note = 2'-O-methyluridine-3'-phosphate
  modified_base 6: mod_base = OTHER; note = 2'-O-methylcytidine-3'-phosphate
  modified_base 7: mod_base = OTHER; note = 2'-deoxy-2'-fluorocytidine-3'-phosphate
  modified_base 8: mod_base = OTHER; note = 2'-O-methyladenosine-3'-phosphate
  modified_base 9: mod_base = OTHER; note = 2'-deoxy-2'-fluoroguanosine-3'-phosphate
  modified_base 10: mod_base = OTHER; note = 2'-deoxy-2'-fluorouridine-3'-phosphate
  modified_base 11: mod_base = OTHER; note = 2'-deoxy-2'-fluorouridine-3'-phosphate
  modified_base 12: mod_base = OTHER; note = 2'-O-methyladenosine-3'-phosphate
  modified_base 13: mod_base = OTHER; note = 2'-O-methylguanosine-3'-phosphate
  modified_base 14: mod_base = OTHER; note = 2'-O-methyluridine-3'-phosphate
  modified_base 15: mod_base = OTHER; note = 2'-O-methyluridine-3'-phosphate
  modified_base 16: mod_base = OTHER; note = 2'-O-methylcytidine-3'-phosphate
  modified_base 17: mod_base = OTHER; note = 2'-O-methyluridine-3'-phosphate
  modified_base 18: mod_base = OTHER; note = 2'-O-methylcytidine-3'-phosphate
  modified_base 19: mod_base = OTHER; note = 2'-O-methyluridine-3'-phosphate
  modified_base 20: mod_base = OTHER; note = 2'-O-methylcytidine-3'-phosphate
  modified_base 21: mod_base = OTHER; note = 2'-O-methyladenosine-3'-phosphate ((2S,4R)-1-[29-[[2-(acetylamino)-2-deoxy-beta-D-galactopyra nosyl]oxy]-14,14-bis[[3-[[3-[[5-[[2-(acetylamino)-2-deoxy-b eta-D-galactopyranosyl]oxy]-1-oxopentyl]amino]propyl]amino] -3-oxopropoxy]methyl]-1,12,19,25-tetraoxo-16-oxa-13,20,24-t riazanonacos-1-yl]-4-hydroxy-2-pyrrolidinyl)methyl ester
gctctccagttagttctctca

SEQ ID NO: 2767 - RNA, 21 nt, synthetic construct
  source 1..21: mol_type = other RNA
  modified_base 1: mod_base = OTHER; note = 2'-O-methyluridine-3'-phosphorothioate
  modified_base 2: mod_base = OTHER; note = 2'-O-methylcytidine-3'-phosphorothioate
  modified_base 3: mod_base = OTHER; note = 2'-O-methyluridine-3'-phosphate
  modified_base 4: mod_base = OTHER; note = 2'-O-methylcytidine-3'-phosphate
  modified_base 5: mod_base = OTHER; note = 2'-O-methylguanosine-3'-phosphate
  modified_base 6: mod_base = OTHER; note = 2'-O-methyluridine-3'-phosphate
  modified_base 7: mod_base = OTHER; note = 2'-deoxy-2'-fluoroadenosine-3'-phosphate
  modified_base 8: mod_base = OTHER; note = 2'-O-methyladenosine-3'-phosphate
  modified_base 9: mod_base = OTHER; note = 2'-deoxy-2'-fluorocytidine-3'-phosphate
  modified_base 10: mod_base = OTHER; note = 2'-deoxy-2'-fluorouridine-3'-phosphate
  modified_base 11: mod_base = OTHER; note = 2'-deoxy-2'-fluoroguanosine-3'-phosphate
  modified_base 12: mod_base = OTHER; note = 2'-O-methylguanosine-3'-phosphate
  modified_base 13: mod_base = OTHER; note = 2'-O-methyluridine-3'-phosphate
  modified_base 14: mod_base = OTHER; note = 2'-O-methyluridine-3'-phosphate
  modified_base 15: mod_base = OTHER; note = 2'-O-methyluridine-3'-phosphate
  modified_base 16: mod_base = OTHER; note = 2'-O-methylcytidine-3'-phosphate
  modified_base 17: mod_base = OTHER; note = 2'-O-methyladenosine-3'-phosphate
  modified_base 18: mod_base = OTHER; note = 2'-O-methyluridine-3'-phosphate
  modified_base 19: mod_base = OTHER; note = 2'-O-methyluridine-3'-phosphate
  modified_base 20: mod_base = OTHER; note = 2'-O-methyluridine-3'-phosphate
  modified_base 21: mod_base = OTHER; note = 2'-O-methyladenosine-3'-phosphate ((2S,4R)-1-[29-[[2-(acetylamino)-2-deoxy-beta-D-galactopyra nosyl]oxy]-14,14-bis[[3-[[3-[[5-[[2-(acetylamino)-2-deoxy-b eta-D-galactopyranosyl]oxy]-1-oxopentyl]amino]propyl]amino] -3-oxopropoxy]methyl]-1,12,19,25-tetraoxo-16-oxa-13,20,24-t riazanonacos-1-yl]-4-hydroxy-2-pyrrolidinyl)methyl ester
tctcgtaactggtttcattta

SEQ ID NO: 2768 - RNA, 21 nt, synthetic construct
  source 1..21: mol_type = other RNA
  modified_base 1: mod_base = OTHER; note = 2'-O-methylcytidine-3'-phosphorothioate
  modified_base 2: mod_base = OTHER; note = 2'-O-methyluridine-3'-phosphorothioate
  modified_base 3: mod_base = OTHER; note = 2'-O-methyladenosine-3'-phosphate
  modified_base 4: mod_base = OTHER; note = 2'-O-methylcytidine-3'-phosphate
  modified_base 5: mod_base = OTHER; note = 2'-O-methyluridine-3'-phosphate
  modified_base 6: mod_base = OTHER; note = 2'-O-methylguanosine-3'-phosphate
  modified_base 7: mod_base = OTHER; note = 2'-deoxy-2'-fluorouridine-3'-phosphate
  modified_base 8: mod_base = OTHER; note = 2'-O-methylguanosine-3'-phosphate
  modified_base 9: mod_base = OTHER; note = 2'-deoxy-2'-fluoroadenosine-3'-phosphate
  modified_base 10: mod_base = OTHER; note = 2'-deoxy-2'-fluorocytidine-3'-phosphate
  modified_base 11: mod_base = OTHER; note = 2'-deoxy-2'-fluorouridine-3'-phosphate
  modified_base 12: mod_base = OTHER; note = 2'-O-methylguanosine-3'-phosphate
  modified_base 13: mod_base = OTHER; note = 2'-O-methyladenosine-3'-phosphate
  modified_base 14: mod_base = OTHER; note = 2'-O-methyluridine-3'-phosphate
  modified_base 15: mod_base = OTHER; note = 2'-O-methylguanosine-3'-phosphate
  modified_base 16: mod_base = OTHER; note = 2'-O-methyluridine-3'-phosphate
  modified_base 17: mod_base = OTHER; note = 2'-O-methyluridine-3'-phosphate
  modified_base 18: mod_base = OTHER; note = 2'-O-methyladenosine-3'-phosphate
  modified_base 19: mod_base = OTHER; note = 2'-O-methylcytidine-3'-phosphate
  modified_base 20: mod_base = OTHER; note = 2'-O-methyladenosine-3'-phosphate
  modified_base 21: mod_base = OTHER; note = 2'-O-methyladenosine-3'-phosphate ((2S,4R)-1-[29-[[2-(acetylamino)-2-deoxy-beta-D-galactopyra nosyl]oxy]-14,14-bis[[3-[[3-[[5-[[2-(acetylamino)-2-deoxy-b eta-D-galactopyranosyl]oxy]-1-oxopentyl]amino]propyl]amino] -3-oxopropoxy]methyl]-1,12,19,25-tetraoxo-16-oxa-13,20,24-t riazanonacos-1-yl]-4-hydroxy-2-pyrrolidinyl)methyl ester
ctactgtgactgatgttacaa

SEQ ID NO: 2769 - RNA, 21 nt, synthetic construct
  source 1..21: mol_type = other RNA
  modified_base 1: mod_base = OTHER; note = 2'-O-methyluridine-3'-phosphorothioate
  modified_base 2: mod_base = OTHER; note = 2'-O-methyluridine-3'-phosphorothioate
  modified_base 3: mod_base = OTHER; note = 2'-O-methyladenosine-3'-phosphate
  modified_base 4: mod_base = OTHER; note = 2'-O-methylcytidine-3'-phosphate
  modified_base 5: mod_base = OTHER; note = 2'-O-methyladenosine-3'-phosphate
  modified_base 6: mod_base = OTHER; note = 2'-O-methyluridine-3'-phosphate
  modified_base 7: mod_base = OTHER; note = 2'-deoxy-2'-fluorocytidine-3'-phosphate
  modified_base 8: mod_base = OTHER; note = 2'-O-methyladenosine-3'-phosphate
  modified_base 9: mod_base = OTHER; note = 2'-deoxy-2'-fluorocytidine-3'-phosphate
  modified_base 10: mod_base = OTHER; note = 2'-deoxy-2'-fluoroadenosine-3'-phosphate
  modified_base 11: mod_base = OTHER; note = 2'-deoxy-2'-fluoroguanosine-3'-phosphate
  modified_base 12: mod_base = OTHER; note = 2'-O-methyluridine-3'-phosphate
  modified_base 13: mod_base = OTHER; note = 2'-O-methylguanosine-3'-phosphate
  modified_base 14: mod_base = OTHER; note = 2'-O-methyluridine-3'-phosphate
  modified_base 15: mod_base = OTHER; note = 2'-O-methyluridine-3'-phosphate
  modified_base 16: mod_base = OTHER; note = 2'-O-methyluridine-3'-phosphate
  modified_base 17: mod_base = OTHER; note = 2'-O-methylguanosine-3'-phosphate
  modified_base 18: mod_base = OTHER; note = 2'-O-methylcytidine-3'-phosphate
  modified_base 19: mod_base = OTHER; note = 2'-O-methyladenosine-3'-phosphate
  modified_base 20: mod_base = OTHER; note = 2'-O-methyladenosine-3'-phosphate
  modified_base 21: mod_base = OTHER; note = 2'-O-methyladenosine-3'-phosphate ((2S,4R)-1-[29-[[2-(acetylamino)-2-deoxy-beta-D-galactopyra nosyl]oxy]-14,14-bis[[3-[[3-[[5-[[2-(acetylamino)-2-deoxy-b eta-D-galactopyranosyl]oxy]-1-oxopentyl]amino]propyl]amino] -3-oxopropoxy]methyl]-1,12,19,25-tetraoxo-16-oxa-13,20,24-t riazanonacos-1-yl]-4-hydroxy-2-pyrrolidinyl)methyl ester
ttacatcacagtgtttgcaaa

SEQ ID NO: 2770 - RNA, 21 nt, synthetic construct
  source 1..21: mol_type = other RNA
  modified_base 1: mod_base = OTHER; note = 2'-O-methyluridine-3'-phosphorothioate
  modified_base 2: mod_base = OTHER; note = 2'-O-methyluridine-3'-phosphorothioate
  modified_base 3: mod_base = OTHER; note = 2'-O-methylguanosine-3'-phosphate
  modified_base 4: mod_base = OTHER; note = 2'-O-methylcytidine-3'-phosphate
  modified_base 5: mod_base = OTHER; note = 2'-O-methylcytidine-3'-phosphate
  modified_base 6: mod_base = OTHER; note = 2'-O-methylcytidine-3'-phosphate
  modified_base 7: mod_base = OTHER; note = 2'-deoxy-2'-fluorouridine-3'-phosphate
  modified_base 8: mod_base = OTHER; note = 2'-O-methylguanosine-3'-phosphate
  modified_base 9: mod_base = OTHER; note = 2'-deoxy-2'-fluoroadenosine-3'-phosphate
  modified_base 10: mod_base = OTHER; note = 2'-deoxy-2'-fluoroguanosine-3'-phosphate
  modified_base 11: mod_base = OTHER; note = 2'-deoxy-2'-fluorouridine-3'-phosphate
  modified_base 12: mod_base = OTHER; note = 2'-O-methylguanosine-3'-phosphate
  modified_base 13: mod_base = OTHER; note = 2'-O-methylguanosine-3'-phosphate
  modified_base 14: mod_base = OTHER; note = 2'-O-methyladenosine-3'-phosphate
  modified_base 15: mod_base = OTHER; note = 2'-O-methyluridine-3'-phosphate
  modified_base 16: mod_base = OTHER; note = 2'-O-methylcytidine-3'-phosphate
  modified_base 17: mod_base = OTHER; note = 2'-O-methyluridine-3'-phosphate
  modified_base 18: mod_base = OTHER; note = 2'-O-methylcytidine-3'-phosphate
  modified_base 19: mod_base = OTHER; note = 2'-O-methylcytidine-3'-phosphate
  modified_base 20: mod_base = OTHER; note = 2'-O-methyladenosine-3'-phosphate
  modified_base 21: mod_base = OTHER; note = 2'-O-methyladenosine-3'-phosphate ((2S,4R)-1-[29-[[2-(acetylamino)-2-deoxy-beta-D-galactopyra nosyl]oxy]-14,14-bis[[3-[[3-[[5-[[2-(acetylamino)-2-deoxy-b eta-D-galactopyranosyl]oxy]-1-oxopentyl]amino]propyl]amino] -3-oxopropoxy]methyl]-1,12,19,25-tetraoxo-16-oxa-13,20,24-t riazanonacos-1-yl]-4-hydroxy-2-pyrrolidinyl)methyl ester
ttgccctgagtggatctccaa

SEQ ID NO: 2771 - RNA, 21 nt, synthetic construct
  source 1..21: mol_type = other RNA
  modified_base 1: mod_base = OTHER; note = 2'-O-methyluridine-3'-phosphorothioate
  modified_base 2: mod_base = OTHER; note = 2'-O-methylcytidine-3'-phosphorothioate
  modified_base 3: mod_base = OTHER; note = 2'-O-methylcytidine-3'-phosphate
  modified_base 4: mod_base = OTHER; note = 2'-O-methyladenosine-3'-phosphate
  modified_base 5: mod_base = OTHER; note = 2'-O-methyladenosine-3'-phosphate
  modified_base 6: mod_base = OTHER; note = 2'-O-methylguanosine-3'-phosphate
  modified_base 7: mod_base = OTHER; note = 2'-deoxy-2'-fluoroguanosine-3'-phosphate
  modified_base 8: mod_base = OTHER; note = 2'-O-methyladenosine-3'-phosphate
  modified_base 9: mod_base = OTHER; note = 2'-deoxy-2'-fluorocytidine-3'-phosphate
  modified_base 10: mod_base = OTHER; note = 2'-deoxy-2'-fluorocytidine-3'-phosphate
  modified_base 11: mod_base = OTHER; note = 2'-deoxy-2'-fluoroadenosine-3'-phosphate
  modified_base 12: mod_base = OTHER; note = 2'-O-methylguanosine-3'-phosphate
  modified_base 13: mod_base = OTHER; note = 2'-O-methylguanosine-3'-phosphate
  modified_base 14: mod_base = OTHER; note = 2'-O-methyluridine-3'-phosphate
  modified_base 15: mod_base = OTHER; note = 2'-O-methyluridine-3'-phosphate
  modified_base 16: mod_base = OTHER; note = 2'-O-methyladenosine-3'-phosphate
  modified_base 17: mod_base = OTHER; note = 2'-O-methyluridine-3'-phosphate
  modified_base 18: mod_base = OTHER; note = 2'-O-methyluridine-3'-phosphate
  modified_base 19: mod_base = OTHER; note = 2'-O-methyluridine-3'-phosphate
  modified_base 20: mod_base = OTHER; note = 2'-O-methyluridine-3'-phosphate
  modified_base 21: mod_base = OTHER; note = 2'-O-methyladenosine-3'-phosphate ((2S,4R)-1-[29-[[2-(acetylamino)-2-deoxy-beta-D-galactopyra nosyl]oxy]-14,14-bis[[3-[[3-[[5-[[2-(acetylamino)-2-deoxy-b eta-D-galactopyranosyl]oxy]-1-oxopentyl]amino]propyl]amino] -3-oxopropoxy]methyl]-1,12,19,25-tetraoxo-16-oxa-13,20,24-t riazanonacos-1-yl]-4-hydroxy-2-pyrrolidinyl)methyl ester
tccaaggaccaggttatttta

SEQ ID NO: 2772 - RNA, 21 nt, synthetic construct
  source 1..21: mol_type = other RNA
  modified_base 1: mod_base = OTHER; note = 2'-O-methyluridine-3'-phosphorothioate
  modified_base 2: mod_base = OTHER; note = 2'-O-methyluridine-3'-phosphorothioate
  modified_base 3: mod_base = OTHER; note = 2'-O-methyluridine-3'-phosphate
  modified_base 4: mod_base = OTHER; note = 2'-O-methylguanosine-3'-phosphate
  modified_base 5: mod_base = OTHER; note = 2'-O-methyluridine-3'-phosphate
  modified_base 6: mod_base = OTHER; note = 2'-O-methylcytidine-3'-phosphate
  modified_base 7: mod_base = OTHER; note = 2'-deoxy-2'-fluoroadenosine-3'-phosphate
  modified_base 8: mod_base = OTHER; note = 2'-O-methyladenosine-3'-phosphate
  modified_base 9: mod_base = OTHER; note = 2'-deoxy-2'-fluoroguanosine-3'-phosphate
  modified_base 10: mod_base = OTHER; note = 2'-deoxy-2'-fluorouridine-3'-phosphate
  modified_base 11: mod_base = OTHER; note = 2'-deoxy-2'-fluoroguanosine-3'-phosphate
  modified_base 12: mod_base = OTHER; note = 2'-O-methyluridine-3'-phosphate
  modified_base 13: mod_base = OTHER; note = 2'-O-methylcytidine-3'-phosphate
  modified_base 14: mod_base = OTHER; note = 2'-O-methyladenosine-3'-phosphate
  modified_base 15: mod_base = OTHER; note = 2'-O-methyluridine-3'-phosphate
  modified_base 16: mod_base = OTHER; note = 2'-O-methyladenosine-3'-phosphate
  modified_base 17: mod_base = OTHER; note = 2'-O-methyluridine-3'-phosphate
  modified_base 18: mod_base = OTHER; note = 2'-O-methylguanosine-3'-phosphate
  modified_base 19: mod_base = OTHER; note = 2'-O-methyluridine-3'-phosphate
  modified_base 20: mod_base = OTHER; note = 2'-O-methyladenosine-3'-phosphate
  modified_base 21: mod_base = OTHER; note = 2'-O-methyladenosine-3'-phosphate ((2S,4R)-1-[29-[[2-(acetylamino)-2-deoxy-beta-D-galactopyra nosyl]oxy]-14,14-bis[[3-[[3-[[5-[[2-(acetylamino)-2-deoxy-b eta-D-galactopyranosyl]oxy]-1-oxopentyl]amino]propyl]amino] -3-oxopropoxy]methyl]-1,12,19,25-tetraoxo-16-oxa-13,20,24-t riazanonacos-1-yl]-4-hydroxy-2-pyrrolidinyl)methyl ester
tttgtcaagtgtcatatgtaa

SEQ ID NO: 2773 - RNA, 21 nt, synthetic construct
  source 1..21: mol_type = other RNA
  modified_base 1: mod_base = OTHER; note = 2'-O-methyladenosine-3'-phosphorothioate
  modified_base 2: mod_base = OTHER; note = 2'-O-methyladenosine-3'-phosphorothioate
  modified_base 3: mod_base = OTHER; note = 2'-O-methylguanosine-3'-phosphate
  modified_base 4: mod_base = OTHER; note = 2'-O-methylguanosine-3'-phosphate
  modified_base 5: mod_base = OTHER; note = 2'-O-methylguanosine-3'-phosphate
  modified_base 6: mod_base = OTHER; note = 2'-O-methyladenosine-3'-phosphate
  modified_base 7: mod_base = OTHER; note = 2'-deoxy-2'-fluoroguanosine-3'-phosphate
  modified_base 8: mod_base = OTHER; note = 2'-O-methyladenosine-3'-phosphate
  modified_base 9: mod_base = OTHER; note = 2'-deoxy-2'-fluoroadenosine-3'-phosphate
  modified_base 10: mod_base = OTHER; note = 2'-deoxy-2'-fluoroguanosine-3'-phosphate
  modified_base 11: mod_base = OTHER; note = 2'-deoxy-2'-fluoroguanosine-3'-phosphate
  modified_base 12: mod_base = OTHER; note = 2'-O-methyladenosine-3'-phosphate
  modified_base 13: mod_base = OTHER; note = 2'-O-methyluridine-3'-phosphate
  modified_base 14: mod_base = OTHER; note = 2'-O-methylcytidine-3'-phosphate
  modified_base 15: mod_base = OTHER; note = 2'-O-methyluridine-3'-phosphate
  modified_base 16: mod_base = OTHER; note = 2'-O-methyladenosine-3'-phosphate
  modified_base 17: mod_base = OTHER; note = 2'-O-methylguanosine-3'-phosphate
  modified_base 18: mod_base = OTHER; note = 2'-O-methyladenosine-3'-phosphate
  modified_base 19: mod_base = OTHER; note = 2'-O-methyladenosine-3'-phosphate
  modified_base 20: mod_base = OTHER; note = 2'-O-methyluridine-3'-phosphate
  modified_base 21: mod_base = OTHER; note = 2'-O-methyladenosine-3'-phosphate ((2S,4R)-1-[29-[[2-(acetylamino)-2-deoxy-beta-D-galactopyra nosyl]oxy]-14,14-bis[[3-[[3-[[5-[[2-(acetylamino)-2-deoxy-b eta-D-galactopyranosyl]oxy]-1-oxopentyl]amino]propyl]amino] -3-oxopropoxy]methyl]-1,12,19,25-tetraoxo-16-oxa-13,20,24-t riazanonacos-1-yl]-4-hydroxy-2-pyrrolidinyl)methyl ester
aagggagaaggatctagaata

SEQ ID NO: 2774 - RNA, 21 nt, synthetic construct
  source 1..21: mol_type = other RNA
  modified_base 1: mod_base = OTHER; note = 2'-O-methyladenosine-3'-phosphorothioate
  modified_base 2: mod_base = OTHER; note = 2'-O-methyladenosine-3'-phosphorothioate
  modified_base 3: mod_base = OTHER; note = 2'-O-methyluridine-3'-phosphate
  modified_base 4: mod_base = OTHER; note = 2'-O-methylguanosine-3'-phosphate
  modified_base 5: mod_base = OTHER; note = 2'-O-methyluridine-3'-phosphate
  modified_base 6: mod_base = OTHER; note = 2'-O-methylguanosine-3'-phosphate
  modified_base 7: mod_base = OTHER; note = 2'-deoxy-2'-fluorouridine-3'-phosphate
  modified_base 8: mod_base = OTHER; note = 2'-O-methyluridine-3'-phosphate
  modified_base 9: mod_base = OTHER; note = 2'-deoxy-2'-fluorouridine-3'-phosphate
  modified_base 10: mod_base = OTHER; note = 2'-deoxy-2'-fluorouridine-3'-phosphate
  modified_base 11: mod_base = OTHER; note = 2'-deoxy-2'-fluorocytidine-3'-phosphate
  modified_base 12: mod_base = OTHER; note = 2'-O-methyluridine-3'-phosphate
  modified_base 13: mod_base = OTHER; note = 2'-O-methylguanosine-3'-phosphate
  modified_base 14: mod_base = OTHER; note = 2'-O-methyladenosine-3'-phosphate
  modified_base 15: mod_base = OTHER; note = 2'-O-methyladenosine-3'-phosphate
  modified_base 16: mod_base = OTHER; note = 2'-O-methyluridine-3'-phosphate
  modified_base 17: mod_base = OTHER; note = 2'-O-methyladenosine-3'-phosphate
  modified_base 18: mod_base = OTHER; note = 2'-O-methyladenosine-3'-phosphate
  modified_base 19: mod_base = OTHER; note = 2'-O-methylcytidine-3'-phosphate
  modified_base 20: mod_base = OTHER; note = 2'-O-methyladenosine-3'-phosphate
  modified_base 21: mod_base = OTHER; note = 2'-O-methyladenosine-3'-phosphate ((2S,4R)-1-[29-[[2-(acetylamino)-2-deoxy-beta-D-galactopyra nosyl]oxy]-14,14-bis[[3-[[3-[[5-[[2-(acetylamino)-2-deoxy-b eta-D-galactopyranosyl]oxy]-1-oxopentyl]amino]propyl]amino] -3-oxopropoxy]methyl]-1,12,19,25-tetraoxo-16-oxa-13,20,24-t riazanonacos-1-yl]-4-hydroxy-2-pyrrolidinyl)methyl ester
aatgtgttttctgaataacaa

SEQ ID NO: 2775 - RNA, 21 nt, synthetic construct
  source 1..21: mol_type = other RNA
  modified_base 1: mod_base = OTHER; note = 2'-O-methylguanosine-3'-phosphorothioate
  modified_base 2: mod_base = OTHER; note = 2'-O-methyluridine-3'-phosphorothioate
  modified_base 3: mod_base = OTHER; note = 2'-O-methylguanosine-3'-phosphate
  modified_base 4: mod_base = OTHER; note = 2'-O-methyluridine-3'-phosphate
  modified_base 5: mod_base = OTHER; note = 2'-O-methylguanosine-3'-phosphate
  modified_base 6: mod_base = OTHER; note = 2'-O-methylguanosine-3'-phosphate
  modified_base 7: mod_base = OTHER; note = 2'-deoxy-2'-fluorouridine-3'-phosphate
  modified_base 8: mod_base = OTHER; note = 2'-O-methylguanosine-3'-phosphate
  modified_base 9: mod_base = OTHER; note = 2'-deoxy-2'-fluoroguanosine-3'-phosphate
  modified_base 10: mod_base = OTHER; note = 2'-deoxy-2'-fluoroguanosine-3'-phosphate
  modified_base 11: mod_base = OTHER; note = 2'-deoxy-2'-fluorouridine-3'-phosphate
  modified_base 12: mod_base = OTHER; note = 2'-O-methyluridine-3'-phosphate
  modified_base 13: mod_base = OTHER; note = 2'-O-methylcytidine-3'-phosphate
  modified_base 14: mod_base = OTHER; note = 2'-O-methyluridine-3'-phosphate
  modified_base 15: mod_base = OTHER; note = 2'-O-methyluridine-3'-phosphate
  modified_base 16: mod_base = OTHER; note = 2'-O-methyluridine-3'-phosphate
  modified_base 17: mod_base = OTHER; note = 2'-O-methylguanosine-3'-phosphate
  modified_base 18: mod_base = OTHER; note = 2'-O-methylguanosine-3'-phosphate
  modified_base 19: mod_base = OTHER; note = 2'-O-methyladenosine-3'-phosphate
  modified_base 20: mod_base = OTHER; note = 2'-O-methyladenosine-3'-phosphate
  modified_base 21: mod_base = OTHER; note = 2'-O-methyladenosine-3'-phosphate ((2S,4R)-1-[29-[[2-(acetylamino)-2-deoxy-beta-D-galactopyra nosyl]oxy]-14,14-bis[[3-[[3-[[5-[[2-(acetylamino)-2-deoxy-b eta-D-galactopyranosyl]oxy]-1-oxopentyl]amino]propyl]amino] -3-oxopropoxy]methyl]-1,12,19,25-tetraoxo-16-oxa-13,20,24-t riazanonacos-1-yl]-4-hydroxy-2-pyrrolidinyl)methyl ester
gtgtggtgggttctttggaaa

SEQ ID NO: 2776 - RNA, 21 nt, synthetic construct
  source 1..21: mol_type = other RNA
  modified_base 1: mod_base = OTHER; note = 2'-O-methylguanosine-3'-phosphorothioate
  modified_base 2: mod_base = OTHER; note = 2'-O-methylguanosine-3'-phosphorothioate
  modified_base 3: mod_base = OTHER; note = 2'-O-methyladenosine-3'-phosphate
  modified_base 4: mod_base = OTHER; note = 2'-O-methylguanosine-3'-phosphate
  modified_base 5: mod_base = OTHER; note = 2'-O-methyluridine-3'-phosphate
  modified_base 6: mod_base = OTHER; note = 2'-O-methylguanosine-3'-phosphate
  modified_base 7: mod_base = OTHER; note = 2'-deoxy-2'-fluoroadenosine-3'-phosphate
  modified_base 8: mod_base = OTHER; note = 2'-O-methylguanosine-3'-phosphate
  modified_base 9: mod_base = OTHER; note = 2'-deoxy-2'-fluoroadenosine-3'-phosphate
  modified_base 10: mod_base = OTHER; note = 2'-deoxy-2'-fluorouridine-3'-phosphate
  modified_base 11: mod_base = OTHER; note = 2'-deoxy-2'-fluorocytidine-3'-phosphate
  modified_base 12: mod_base = OTHER; note = 2'-O-methyladenosine-3'-phosphate
  modified_base 13: mod_base = OTHER; note = 2'-O-methyluridine-3'-phosphate
  modified_base 14: mod_base = OTHER; note = 2'-O-methyluridine-3'-phosphate
  modified_base 15: mod_base = OTHER; note = 2'-O-methyluridine-3'-phosphate
  modified_base 16: mod_base = OTHER; note = 2'-O-methyluridine-3'-phosphate
  modified_base 17: mod_base = OTHER; note = 2'-O-methylcytidine-3'-phosphate
  modified_base 18: mod_base = OTHER; note = 2'-O-methyluridine-3'-phosphate
  modified_base 19: mod_base = OTHER; note = 2'-O-methyluridine-3'-phosphate
  modified_base 20: mod_base = OTHER; note = 2'-O-methyladenosine-3'-phosphate
  modified_base 21: mod_base = OTHER; note = 2'-O-methyladenosine-3'-phosphate ((2S,4R)-1-[29-[[2-(acetylamino)-2-deoxy-beta-D-galactopyra nosyl]oxy]-14,14-bis[[3-[[3-[[5-[[2-(acetylamino)-2-deoxy-b eta-D-galactopyranosyl]oxy]-1-oxopentyl]amino]propyl]amino] -3-oxopropoxy]methyl]-1,12,19,25-tetraoxo-16-oxa-13,20,24-t riazanonacos-1-yl]-4-hydroxy-2-pyrrolidinyl)methyl ester
ggagtgagatcattttcttaa

SEQ ID NO: 2777 - RNA, 21 nt, synthetic construct
  source 1..21: mol_type = other RNA
  modified_base 1: mod_base = OTHER; note = 2'-O-methyluridine-3'-phosphorothioate
  modified_base 2: mod_base = OTHER; note = 2'-O-methyluridine-3'-phosphorothioate
  modified_base 3: mod_base = OTHER; note = 2'-O-methyladenosine-3'-phosphate
  modified_base 4: mod_base = OTHER; note = 2'-O-methyluridine-3'-phosphate
  modified_base 5: mod_base = OTHER; note = 2'-O-methylcytidine-3'-phosphate
  modified_base 6: mod_base = OTHER; note = 2'-O-methyluridine-3'-phosphate
  modified_base 7: mod_base = OTHER; note = 2'-deoxy-2'-fluorouridine-3'-phosphate
  modified_base 8: mod_base = OTHER; note = 2'-O-methylcytidine-3'-phosphate
  modified_base 9: mod_base = OTHER; note = 2'-deoxy-2'-fluorouridine-3'-phosphate
  modified_base 10: mod_base = OTHER; note = 2'-deoxy-2'-fluoroguanosine-3'-phosphate
  modified_base 11: mod_base = OTHER; note = 2'-deoxy-2'-fluorocytidine-3'-phosphate
  modified_base 12: mod_base = OTHER; note = 2'-O-methyladenosine-3'-phosphate
  modified_base 13: mod_base = OTHER; note = 2'-O-methyladenosine-3'-phosphate
  modified_base 14: mod_base = OTHER; note = 2'-O-methyluridine-3'-phosphate
  modified_base 15: mod_base = OTHER; note = 2'-O-methyluridine-3'-phosphate
  modified_base 16: mod_base = OTHER; note = 2'-O-methylguanosine-3'-phosphate
  modified_base 17: mod_base = OTHER; note = 2'-O-methylcytidine-3'-phosphate
  modified_base 18: mod_base = OTHER; note = 2'-O-methyluridine-3'-phosphate
  modified_base 19: mod_base = OTHER; note = 2'-O-methyluridine-3'-phosphate
  modified_base 20: mod_base = OTHER; note = 2'-O-methyladenosine-3'-phosphate
  modified_base 21: mod_base = OTHER; note = 2'-O-methyladenosine-3'-phosphate ((2S,4R)-1-[29-[[2-(acetylamino)-2-deoxy-beta-D-galactopyra nosyl]oxy]-14,14-bis[[3-[[3-[[5-[[2-(acetylamino)-2-deoxy-b eta-D-galactopyranosyl]oxy]-1-oxopentyl]amino]propyl]amino] -3-oxopropoxy]methyl]-1,12,19,25-tetraoxo-16-oxa-13,20,24-t riazanonacos-1-yl]-4-hydroxy-2-pyrrolidinyl)methyl ester
ttatcttctgcaattgcttaa

SEQ ID NO: 2778 - RNA, 21 nt, synthetic construct
  source 1..21: mol_type = other RNA
  modified_base 1: mod_base = OTHER; note = 2'-O-methyluridine-3'-phosphorothioate
  modified_base 2: mod_base = OTHER; note = 2'-O-methyluridine-3'-phosphorothioate
  modified_base 3: mod_base = OTHER; note = 2'-O-methyladenosine-3'-phosphate
  modified_base 4: mod_base = OTHER; note = 2'-O-methylguanosine-3'-phosphate
  modified_base 5: mod_base = OTHER; note = 2'-O-methylguanosine-3'-phosphate
  modified_base 6: mod_base = OTHER; note = 2'-O-methyladenosine-3'-phosphate
  modified_base 7: mod_base = OTHER; note = 2'-deoxy-2'-fluorouridine-3'-phosphate
  modified_base 8: mod_base = OTHER; note = 2'-O-methylguanosine-3'-phosphate
  modified_base 9: mod_base = OTHER; note = 2'-deoxy-2'-fluorouridine-3'-phosphate
  modified_base 10: mod_base = OTHER; note = 2'-deoxy-2'-fluorouridine-3'-phosphate
  modified_base 11: mod_base = OTHER; note = 2'-deoxy-2'-fluorouridine-3'-phosphate
  modified_base 12: mod_base = OTHER; note = 2'-O-methyluridine-3'-phosphate
  modified_base 13: mod_base = OTHER; note = 2'-O-methyluridine-3'-phosphate
  modified_base 14: mod_base = OTHER; note = 2'-O-methylcytidine-3'-phosphate
  modified_base 15: mod_base = OTHER; note = 2'-O-methyladenosine-3'-phosphate
  modified_base 16: mod_base = OTHER; note = 2'-O-methyluridine-3'-phosphate
  modified_base 17: mod_base = OTHER; note = 2'-O-methylguanosine-3'-phosphate
  modified_base 18: mod_base = OTHER; note = 2'-O-methyladenosine-3'-phosphate
  modified_base 19: mod_base = OTHER; note = 2'-O-methyladenosine-3'-phosphate
  modified_base 20: mod_base = OTHER; note = 2'-O-methyladenosine-3'-phosphate
  modified_base 21: mod_base = OTHER; note = 2'-O-methyladenosine-3'-phosphate ((2S,4R)-1-[29-[[2-(acetylamino)-2-deoxy-beta-D-galactopyra nosyl]oxy]-14,14-bis[[3-[[3-[[5-[[2-(acetylamino)-2-deoxy-b eta-D-galactopyranosyl]oxy]-1-oxopentyl]amino]propyl]amino] -3-oxopropoxy]methyl]-1,12,19,25-tetraoxo-16-oxa-13,20,24-t riazanonacos-1-yl]-4-hydroxy-2-pyrrolidinyl)methyl ester
ttaggatgtttttcatgaaaa

SEQ ID NO: 2779 - RNA, 21 nt, synthetic construct
  source 1..21: mol_type = other RNA
  modified_base 1: mod_base = OTHER; note = 2'-O-methylcytidine-3'-phosphorothioate
  modified_base 2: mod_base = OTHER; note = 2'-O-methyluridine-3'-phosphorothioate
  modified_base 3: mod_base = OTHER; note = 2'-O-methylguanosine-3'-phosphate
  modified_base 4: mod_base = OTHER; note = 2'-O-methylguanosine-3'-phosphate
  modified_base 5: mod_base = OTHER; note = 2'-O-methyladenosine-3'-phosphate
  modified_base 6: mod_base = OTHER; note = 2'-O-methylguanosine-3'-phosphate
  modified_base 7: mod_base = OTHER; note = 2'-deoxy-2'-fluoroadenosine-3'-phosphate
  modified_base 8: mod_base = OTHER; note = 2'-O-methylguanosine-3'-phosphate
  modified_base 9: mod_base = OTHER; note = 2'-deoxy-2'-fluoroadenosine-3'-phosphate
  modified_base 10: mod_base = OTHER; note = 2'-deoxy-2'-fluoroadenosine-3'-phosphate
  modified_base 11: mod_base = OTHER; note = 2'-deoxy-2'-fluoroguanosine-3'-phosphate
  modified_base 12: mod_base = OTHER; note = 2'-O-methyluridine-3'-phosphate
  modified_base 13: mod_base = OTHER; note = 2'-O-methyluridine-3'-phosphate
  modified_base 14: mod_base = OTHER; note = 2'-O-methyluridine-3'-phosphate
  modified_base 15: mod_base = OTHER; note = 2'-O-methylcytidine-3'-phosphate
  modified_base 16: mod_base = OTHER; note = 2'-O-methyluridine-3'-phosphate
  modified_base 17: mod_base = OTHER; note = 2'-O-methylguanosine-3'-phosphate
  modified_base 18: mod_base = OTHER; note = 2'-O-methylguanosine-3'-phosphate
  modified_base 19: mod_base = OTHER; note = 2'-O-methylcytidine-3'-phosphate
  modified_base 20: mod_base = OTHER; note = 2'-O-methylcytidine-3'-phosphate
  modified_base 21: mod_base = OTHER; note = 2'-O-methyladenosine-3'-phosphate ((2S,4R)-1-[29-[[2-(acetylamino)-2-deoxy-beta-D-galactopyra nosyl]oxy]-14,14-bis[[3-[[3-[[5-[[2-(acetylamino)-2-deoxy-b eta-D-galactopyranosyl]oxy]-1-oxopentyl]amino]propyl]amino] -3-oxopropoxy]methyl]-1,12,19,25-tetraoxo-16-oxa-13,20,24-t riazanonacos-1-yl]-4-hydroxy-2-pyrrolidinyl)methyl ester
ctggagagaagtttctggcca

SEQ ID NO: 2780 - RNA, 21 nt, synthetic construct
  source 1..21: mol_type = other RNA
  modified_base 1: mod_base = OTHER; note = 2'-O-methylguanosine-3'-phosphorothioate
  modified_base 2: mod_base = OTHER; note = 2'-O-methyladenosine-3'-phosphorothioate
  modified_base 3: mod_base = OTHER; note = 2'-O-methyladenosine-3'-phosphate
  modified_base 4: mod_base = OTHER; note = 2'-O-methylguanosine-3'-phosphate
  modified_base 5: mod_base = OTHER; note = 2'-O-methylcytidine-3'-phosphate
  modified_base 6: mod_base = OTHER; note = 2'-O-methyluridine-3'-phosphate
  modified_base 7: mod_base = OTHER; note = 2'-deoxy-2'-fluoroguanosine-3'-phosphate
  modified_base 8: mod_base = OTHER; note = 2'-O-methyladenosine-3'-phosphate
  modified_base 9: mod_base = OTHER; note = 2'-deoxy-2'-fluorouridine-3'-phosphate
  modified_base 10: mod_base = OTHER; note = 2'-deoxy-2'-fluoroguanosine-3'-phosphate
  modified_base 11: mod_base = OTHER; note = 2'-deoxy-2'-fluorocytidine-3'-phosphate
  modified_base 12: mod_base = OTHER; note = 2'-O-methyluridine-3'-phosphate
  modified_base 13: mod_base = OTHER; note = 2'-O-methyluridine-3'-phosphate
  modified_base 14: mod_base = OTHER; note = 2'-O-methyluridine-3'-phosphate
  modified_base 15: mod_base = OTHER; note = 2'-O-methylguanosine-3'-phosphate
  modified_base 16: mod_base = OTHER; note = 2'-O-methylcytidine-3'-phosphate
  modified_base 17: mod_base = OTHER; note = 2'-O-methyluridine-3'-phosphate
  modified_base 18: mod_base = OTHER; note = 2'-O-methyluridine-3'-phosphate
  modified_base 19: mod_base = OTHER; note = 2'-O-methylcytidine-3'-phosphate
  modified_base 20: mod_base = OTHER; note = 2'-O-methyladenosine-3'-phosphate
  modified_base 21: mod_base = OTHER; note = 2'-O-methyladenosine-3'-phosphate ((2S,4R)-1-[29-[[2-(acetylamino)-2-deoxy-beta-D-galactopyra nosyl]oxy]-14,14-bis[[3-[[3-[[5-[[2-(acetylamino)-2-deoxy-b eta-D-galactopyranosyl]oxy]-1-oxopentyl]amino]propyl]amino] -3-oxopropoxy]methyl]-1,12,19,25-tetraoxo-16-oxa-13,20,24-t riazanonacos-1-yl]-4-hydroxy-2-pyrrolidinyl)methyl ester
gaagctgatgctttgcttcaa

SEQ ID NO: 2781 - RNA, 21 nt, synthetic construct
  source 1..21: mol_type = other RNA
  modified_base 1: mod_base = OTHER; note = 2'-O-methylcytidine-3'-phosphorothioate
  modified_base 2: mod_base = OTHER; note = 2'-O-methyluridine-3'-phosphorothioate
  modified_base 3: mod_base = OTHER; note = 2'-O-methyluridine-3'-phosphate
  modified_base 4: mod_base = OTHER; note = 2'-O-methylcytidine-3'-phosphate
  modified_base 5: mod_base = OTHER; note = 2'-O-methyladenosine-3'-phosphate
  modified_base 6: mod_base = OTHER; note = 2'-O-methyladenosine-3'-phosphate
  modified_base 7: mod_base = OTHER; note = 2'-deoxy-2'-fluoroadenosine-3'-phosphate
  modified_base 8: mod_base = OTHER; note = 2'-O-methyluridine-3'-phosphate
  modified_base 9: mod_base = OTHER; note = 2'-deoxy-2'-fluorocytidine-3'-phosphate
  modified_base 10: mod_base = OTHER; note = 2'-deoxy-2'-fluorocytidine-3'-phosphate
  modified_base 11: mod_base = OTHER; note = 2'-deoxy-2'-fluoroadenosine-3'-phosphate
  modified_base 12: mod_base = OTHER; note = 2'-O-methyluridine-3'-phosphate
  modified_base 13: mod_base = OTHER; note = 2'-O-methylcytidine-3'-phosphate
  modified_base 14: mod_base = OTHER; note = 2'-O-methylcytidine-3'-phosphate
  modified_base 15: mod_base = OTHER; note = 2'-O-methyladenosine-3'-phosphate
  modified_base 16: mod_base = OTHER; note = 2'-O-methylguanosine-3'-phosphate
  modified_base 17: mod_base = OTHER; note = 2'-O-methyladenosine-3'-phosphate
  modified_base 18: mod_base = OTHER; note = 2'-O-methyladenosine-3'-phosphate
  modified_base 19: mod_base = OTHER; note = 2'-O-methyluridine-3'-phosphate
  modified_base 20: mod_base = OTHER; note = 2'-O-methyladenosine-3'-phosphate
  modified_base 21: mod_base = OTHER; note = 2'-O-methyladenosine-3'-phosphate ((2S,4R)-1-[29-[[2-(acetylamino)-2-deoxy-beta-D-galactopyra nosyl]oxy]-14,14-bis[[3-[[3-[[5-[[2-(acetylamino)-2-deoxy-b eta-D-galactopyranosyl]oxy]-1-oxopentyl]amino]propyl]amino] -3-oxopropoxy]methyl]-1,12,19,25-tetraoxo-16-oxa-13,20,24-t riazanonacos-1-yl]-4-hydroxy-2-pyrrolidinyl)methyl ester
cttcaaatccatccagaataa

SEQ ID NO: 2782 - RNA, 21 nt, synthetic construct
  source 1..21: mol_type = other RNA
  modified_base 1: mod_base = OTHER; note = 2'-O-methylguanosine-3'-phosphorothioate
  modified_base 2: mod_base = OTHER; note = 2'-O-methylguanosine-3'-phosphorothioate
  modified_base 3: mod_base = OTHER; note = 2'-O-methylguanosine-3'-phosphate
  modified_base 4: mod_base = OTHER; note = 2'-O-methylcytidine-3'-phosphate
  modified_base 5: mod_base = OTHER; note = 2'-O-methyluridine-3'-phosphate
  modified_base 6: mod_base = OTHER; note = 2'-O-methylguanosine-3'-phosphate
  modified_base 7: mod_base = OTHER; note = 2'-deoxy-2'-fluoroadenosine-3'-phosphate
  modified_base 8: mod_base = OTHER; note = 2'-O-methyladenosine-3'-phosphate
  modified_base 9: mod_base = OTHER; note = 2'-deoxy-2'-fluoroadenosine-3'-phosphate
  modified_base 10: mod_base = OTHER; note = 2'-deoxy-2'-fluoroguanosine-3'-phosphate
  modified_base 11: mod_base = OTHER; note = 2'-deoxy-2'-fluorocytidine-3'-phosphate
  modified_base 12: mod_base = OTHER; note = 2'-O-methylcytidine-3'-phosphate
  modified_base 13: mod_base = OTHER; note = 2'-O-methyladenosine-3'-phosphate
  modified_base 14: mod_base = OTHER; note = 2'-O-methyluridine-3'-phosphate
  modified_base 15: mod_base = OTHER; note = 2'-O-methyluridine-3'-phosphate
  modified_base 16: mod_base = OTHER; note = 2'-O-methyluridine-3'-phosphate
  modified_base 17: mod_base = OTHER; note = 2'-O-methylguanosine-3'-phosphate
  modified_base 18: mod_base = OTHER; note = 2'-O-methyluridine-3'-phosphate
  modified_base 19: mod_base = OTHER; note = 2'-O-methyluridine-3'-phosphate
  modified_base 20: mod_base = OTHER; note = 2'-O-methylguanosine-3'-phosphate
  modified_base 21: mod_base = OTHER; note = 2'-O-methyladenosine-3'-phosphate ((2S,4R)-1-[29-[[2-(acetylamino)-2-deoxy-beta-D-galactopyra nosyl]oxy]-14,14-bis[[3-[[3-[[5-[[2-(acetylamino)-2-deoxy-b eta-D-galactopyranosyl]oxy]-1-oxopentyl]amino]propyl]amino] -3-oxopropoxy]methyl]-1,12,19,25-tetraoxo-16-oxa-13,20,24-t riazanonacos-1-yl]-4-hydroxy-2-pyrrolidinyl)methyl ester
gggctgaaagccatttgttga

SEQ ID NO: 2783 - RNA, 21 nt, synthetic construct
  source 1..21: mol_type = other RNA
  modified_base 1: mod_base = OTHER; note = 2'-O-methylcytidine-3'-phosphorothioate
  modified_base 2: mod_base = OTHER; note = 2'-O-methyluridine-3'-phosphorothioate
  modified_base 3: mod_base = OTHER; note = 2'-O-methylguanosine-3'-phosphate
  modified_base 4: mod_base = OTHER; note = 2'-O-methylguanosine-3'-phosphate
  modified_base 5: mod_base = OTHER; note = 2'-O-methylcytidine-3'-phosphate
  modified_base 6: mod_base = OTHER; note = 2'-O-methyluridine-3'-phosphate
  modified_base 7: mod_base = OTHER; note = 2'-deoxy-2'-fluorouridine-3'-phosphate
  modified_base 8: mod_base = OTHER; note = 2'-O-methyluridine-3'-phosphate
  modified_base 9: mod_base = OTHER; note = 2'-deoxy-2'-fluorocytidine-3'-phosphate
  modified_base 10: mod_base = OTHER; note = 2'-deoxy-2'-fluorouridine-3'-phosphate
  modified_base 11: mod_base = OTHER; note = 2'-deoxy-2'-fluorocytidine-3'-phosphate
  modified_base 12: mod_base = OTHER; note = 2'-O-methylcytidine-3'-phosphate
  modified_base 13: mod_base = OTHER; note = 2'-O-methylguanosine-3'-phosphate
  modified_base 14: mod_base = OTHER; note = 2'-O-methyladenosine-3'-phosphate
  modified_base 15: mod_base = OTHER; note = 2'-O-methylcytidine-3'-phosphate
  modified_base 16: mod_base = OTHER; note = 2'-O-methyluridine-3'-phosphate
  modified_base 17: mod_base = OTHER; note = 2'-O-methylguanosine-3'-phosphate
  modified_base 18: mod_base = OTHER; note = 2'-O-methylcytidine-3'-phosphate
  modified_base 19: mod_base = OTHER; note = 2'-O-methyluridine-3'-phosphate
  modified_base 20: mod_base = OTHER; note = 2'-O-methyladenosine-3'-phosphate
  modified_base 21: mod_base = OTHER; note = 2'-O-methyladenosine-3'-phosphate ((2S,4R)-1-[29-[[2-(acetylamino)-2-deoxy-beta-D-galactopyra nosyl]oxy]-14,14-bis[[3-[[3-[[5-[[2-(acetylamino)-2-deoxy-b eta-D-galactopyranosyl]oxy]-1-oxopentyl]amino]propyl]amino] -3-oxopropoxy]methyl]-1,12,19,25-tetraoxo-16-oxa-13,20,24-t riazanonacos-1-yl]-4-hydroxy-2-pyrrolidinyl)methyl ester
ctggctttctccgactgctaa

SEQ ID NO: 2784 - RNA, 21 nt, synthetic construct
  source 1..21: mol_type = other RNA
  modified_base 1: mod_base = OTHER; note = 2'-O-methylguanosine-3'-phosphorothioate
  modified_base 2: mod_base = OTHER; note = 2'-O-methyluridine-3'-phosphorothioate
  modified_base 3: mod_base = OTHER; note = 2'-O-methylguanosine-3'-phosphate
  modified_base 4: mod_base = OTHER; note = 2'-O-methylguanosine-3'-phosphate
  modified_base 5: mod_base = OTHER; note = 2'-O-methyluridine-3'-phosphate
  modified_base 6: mod_base = OTHER; note = 2'-O-methylcytidine-3'-phosphate
  modified_base 7: mod_base = OTHER; note = 2'-deoxy-2'-fluorouridine-3'-phosphate
  modified_base 8: mod_base = OTHER; note = 2'-O-methyluridine-3'-phosphate
  modified_base 9: mod_base = OTHER; note = 2'-deoxy-2'-fluorouridine-3'-phosphate
  modified_base 10: mod_base = OTHER; note = 2'-deoxy-2'-fluorocytidine-3'-phosphate
  modified_base 11: mod_base = OTHER; note = 2'-deoxy-2'-fluorocytidine-3'-phosphate
  modified_base 12: mod_base = OTHER; note = 2'-O-methyluridine-3'-phosphate
  modified_base 13: mod_base = OTHER; note = 2'-O-methyladenosine-3'-phosphate
  modified_base 14: mod_base = OTHER; note = 2'-O-methyluridine-3'-phosphate
  modified_base 15: mod_base = OTHER; note = 2'-O-methylcytidine-3'-phosphate
  modified_base 16: mod_base = OTHER; note = 2'-O-methyladenosine-3'-phosphate
  modified_base 17: mod_base = OTHER; note = 2'-O-methyluridine-3'-phosphate
  modified_base 18: mod_base = OTHER; note = 2'-O-methylguanosine-3'-phosphate
  modified_base 19: mod_base = OTHER; note = 2'-O-methylguanosine-3'-phosphate
  modified_base 20: mod_base = OTHER; note = 2'-O-methyladenosine-3'-phosphate
  modified_base 21: mod_base = OTHER; note = 2'-O-methyladenosine-3'-phosphate ((2S,4R)-1-[29-[[2-(acetylamino)-2-deoxy-beta-D-galactopyra nosyl]oxy]-14,14-bis[[3-[[3-[[5-[[2-(acetylamino)-2-deoxy-b eta-D-galactopyranosyl]oxy]-1-oxopentyl]amino]propyl]amino] -3-oxopropoxy]methyl]-1,12,19,25-tetraoxo-16-oxa-13,20,24-t riazanonacos-1-yl]-4-hydroxy-2-pyrrolidinyl)methyl ester
gtggtctttcctatcatggaa

SEQ ID NO: 2785 - RNA, 21 nt, synthetic construct
  source 1..21: mol_type = other RNA
  modified_base 1: mod_base = OTHER; note = 2'-O-methyladenosine-3'-phosphorothioate
  modified_base 2: mod_base = OTHER; note = 2'-O-methylcytidine-3'-phosphorothioate
  modified_base 3: mod_base = OTHER; note = 2'-O-methylguanosine-3'-phosphate
  modified_base 4: mod_base = OTHER; note = 2'-O-methylguanosine-3'-phosphate
  modified_base 5: mod_base = OTHER; note = 2'-O-methyluridine-3'-phosphate
  modified_base 6: mod_base = OTHER; note = 2'-O-methylcytidine-3'-phosphate
  modified_base 7: mod_base = OTHER; note = 2'-deoxy-2'-fluorocytidine-3'-phosphate
  modified_base 8: mod_base = OTHER; note = 2'-O-methylcytidine-3'-phosphate
  modified_base 9: mod_base = OTHER; note = 2'-deoxy-2'-fluoroadenosine-3'-phosphate
  modified_base 10: mod_base = OTHER; note = 2'-deoxy-2'-fluorocytidine-3'-phosphate
  modified_base 11: mod_base = OTHER; note = 2'-deoxy-2'-fluoroadenosine-3'-phosphate
  modified_base 12: mod_base = OTHER; note = 2'-O-methylcytidine-3'-phosphate
  modified_base 13: mod_base = OTHER; note = 2'-O-methyluridine-3'-phosphate
  modified_base 14: mod_base = OTHER; note = 2'-O-methylguanosine-3'-phosphate
  modified_base 15: mod_base = OTHER; note = 2'-O-methylguanosine-3'-phosphate
  modified_base 16: mod_base = OTHER; note = 2'-O-methyluridine-3'-phosphate
  modified_base 17: mod_base = OTHER; note = 2'-O-methylguanosine-3'-phosphate
  modified_base 18: mod_base = OTHER; note = 2'-O-methyladenosine-3'-phosphate
  modified_base 19: mod_base = OTHER; note = 2'-O-methylcytidine-3'-phosphate
  modified_base 20: mod_base = OTHER; note = 2'-O-methyluridine-3'-phosphate
  modified_base 21: mod_base = OTHER; note = 2'-O-methyladenosine-3'-phosphate ((2S,4R)-1-[29-[[2-(acetylamino)-2-deoxy-beta-D-galactopyra nosyl]oxy]-14,14-bis[[3-[[3-[[5-[[2-(acetylamino)-2-deoxy-b eta-D-galactopyranosyl]oxy]-1-oxopentyl]amino]propyl]amino] -3-oxopropoxy]methyl]-1,12,19,25-tetraoxo-16-oxa-13,20,24-t riazanonacos-1-yl]-4-hydroxy-2-pyrrolidinyl)methyl ester
acggtcccacactggtgacta

SEQ ID NO: 2786 - RNA, 21 nt, synthetic construct
  source 1..21: mol_type = other RNA
  modified_base 1: mod_base = OTHER; note = 2'-O-methyluridine-3'-phosphorothioate
  modified_base 2: mod_base = OTHER; note = 2'-O-methylguanosine-3'-phosphorothioate
  modified_base 3: mod_base = OTHER; note = 2'-O-methyladenosine-3'-phosphate
  modified_base 4: mod_base = OTHER; note = 2'-O-methylcytidine-3'-phosphate
  modified_base 5: mod_base = OTHER; note = 2'-O-methyluridine-3'-phosphate
  modified_base 6: mod_base = OTHER; note = 2'-O-methylguanosine-3'-phosphate
  modified_base 7: mod_base = OTHER; note = 2'-deoxy-2'-fluorocytidine-3'-phosphate
  modified_base 8: mod_base = OTHER; note = 2'-O-methylguanosine-3'-phosphate
  modified_base 9: mod_base = OTHER; note = 2'-deoxy-2'-fluoroadenosine-3'-phosphate
  modified_base 10: mod_base = OTHER; note = 2'-deoxy-2'-fluorouridine-3'-phosphate
  modified_base 11: mod_base = OTHER; note = 2'-deoxy-2'-fluorocytidine-3'-phosphate
  modified_base 12: mod_base = OTHER; note = 2'-O-methyluridine-3'-phosphate
  modified_base 13: mod_base = OTHER; note = 2'-O-methyluridine-3'-phosphate
  modified_base 14: mod_base = OTHER; note = 2'-O-methylcytidine-3'-phosphate
  modified_base 15: mod_base = OTHER; note = 2'-O-methyladenosine-3'-phosphate
  modified_base 16: mod_base = OTHER; note = 2'-O-methylguanosine-3'-phosphate
  modified_base 17: mod_base = OTHER; note = 2'-O-methyladenosine-3'-phosphate
  modified_base 18: mod_base = OTHER; note = 2'-O-methylguanosine-3'-phosphate
  modified_base 19: mod_base = OTHER; note = 2'-O-methylcytidine-3'-phosphate
  modified_base 20: mod_base = OTHER; note = 2'-O-methyladenosine-3'-phosphate
  modified_base 21: mod_base = OTHER; note = 2'-O-methyladenosine-3'-phosphate ((2S,4R)-1-[29-[[2-(acetylamino)-2-deoxy-beta-D-galactopyra nosyl]oxy]-14,14-bis[[3-[[3-[[5-[[2-(acetylamino)-2-deoxy-b eta-D-galactopyranosyl]oxy]-1-oxopentyl]amino]propyl]amino] -3-oxopropoxy]methyl]-1,12,19,25-tetraoxo-16-oxa-13,20,24-t riazanonacos-1-yl]-4-hydroxy-2-pyrrolidinyl)methyl ester
tgactgcgatcttcagagcaa

SEQ ID NO: 2787 - RNA, 21 nt, synthetic construct
  source 1..21: mol_type = other RNA
  modified_base 1: mod_base = OTHER; note = 2'-O-methylcytidine-3'-phosphorothioate
  modified_base 2: mod_base = OTHER; note = 2'-O-methylcytidine-3'-phosphorothioate
  modified_base 3: mod_base = OTHER; note = 2'-O-methyluridine-3'-phosphate
  modified_base 4: mod_base = OTHER; note = 2'-O-methylcytidine-3'-phosphate
  modified_base 5: mod_base = OTHER; note = 2'-O-methyluridine-3'-phosphate
  modified_base 6: mod_base = OTHER; note = 2'-O-methylguanosine-3'-phosphate
  modified_base 7: mod_base = OTHER; note = 2'-deoxy-2'-fluoroadenosine-3'-phosphate
  modified_base 8: mod_base = OTHER; note = 2'-O-methyladenosine-3'-phosphate
  modified_base 9: mod_base = OTHER; note = 2'-deoxy-2'-fluorouridine-3'-phosphate
  modified_base 10: mod_base = OTHER; note = 2'-deoxy-2'-fluoroguanosine-3'-phosphate
  modified_base 11: mod_base = OTHER; note = 2'-deoxy-2'-fluoroguanosine-3'-phosphate
  modified_base 12: mod_base = OTHER; note = 2'-O-methyluridine-3'-phosphate
  modified_base 13: mod_base = OTHER; note = 2'-O-methylcytidine-3'-phosphate
  modified_base 14: mod_base = OTHER; note = 2'-O-methylcytidine-3'-phosphate
  modified_base 15: mod_base = OTHER; note = 2'-O-methyladenosine-3'-phosphate
  modified_base 16: mod_base = OTHER; note = 2'-O-methylguanosine-3'-phosphate
  modified_base 17: mod_base = OTHER; note = 2'-O-methylguanosine-3'-phosphate
  modified_base 18: mod_base = OTHER; note = 2'-O-methylguanosine-3'-phosphate
  modified_base 19: mod_base = OTHER; note = 2'-O-methyluridine-3'-phosphate
  modified_base 20: mod_base = OTHER; note = 2'-O-methyluridine-3'-phosphate
  modified_base 21: mod_base = OTHER; note = 2'-O-methyladenosine-3'-phosphate ((2S,4R)-1-[29-[[2-(acetylamino)-2-deoxy-beta-D-galactopyra nosyl]oxy]-14,14-bis[[3-[[3-[[5-[[2-(acetylamino)-2-deoxy-b eta-D-galactopyranosyl]oxy]-1-oxopentyl]amino]propyl]amino] -3-oxopropoxy]methyl]-1,12,19,25-tetraoxo-16-oxa-13,20,24-t riazanonacos-1-yl]-4-hydroxy-2-pyrrolidinyl)methyl ester
cctctgaatggtccagggtta

SEQ ID NO: 2788 - RNA, 21 nt, synthetic construct
  source 1..21: mol_type = other RNA
  modified_base 1: mod_base = OTHER; note = 2'-O-methylguanosine-3'-phosphorothioate
  modified_base 2: mod_base = OTHER; note = 2'-O-methyladenosine-3'-phosphorothioate
  modified_base 3: mod_base = OTHER; note = 2'-O-methyluridine-3'-phosphate
  modified_base 4: mod_base = OTHER; note = 2'-O-methylcytidine-3'-phosphate
  modified_base 5: mod_base = OTHER; note = 2'-O-methyladenosine-3'-phosphate
  modified_base 6: mod_base = OTHER; note = 2'-O-methylcytidine-3'-phosphate
  modified_base 7: mod_base = OTHER; note = 2'-deoxy-2'-fluoroadenosine-3'-phosphate
  modified_base 8: mod_base = OTHER; note = 2'-O-methylcytidine-3'-phosphate
  modified_base 9: mod_base = OTHER; note = 2'-deoxy-2'-fluorouridine-3'-phosphate
  modified_base 10: mod_base = OTHER; note = 2'-deoxy-2'-fluorocytidine-3'-phosphate
  modified_base 11: mod_base = OTHER; note = 2'-deoxy-2'-fluorouridine-3'-phosphate
  modified_base 12: mod_base = OTHER; note = 2'-O-methylguanosine-3'-phosphate
  modified_base 13: mod_base = OTHER; note = 2'-O-methylguanosine-3'-phosphate
  modified_base 14: mod_base = OTHER; note = 2'-O-methylguanosine-3'-phosphate
  modified_base 15: mod_base = OTHER; note = 2'-O-methyluridine-3'-phosphate
  modified_base 16: mod_base = OTHER; note = 2'-O-methyluridine-3'-phosphate
  modified_base 17: mod_base = OTHER; note = 2'-O-methyluridine-3'-phosphate
  modified_base 18: mod_base = OTHER; note = 2'-O-methyladenosine-3'-phosphate
  modified_base 19: mod_base = OTHER; note = 2'-O-methyluridine-3'-phosphate
  modified_base 20: mod_base = OTHER; note = 2'-O-methyluridine-3'-phosphate
  modified_base 21: mod_base = OTHER; note = 2'-O-methyladenosine-3'-phosphate ((2S,4R)-1-[29-[[2-(acetylamino)-2-deoxy-beta-D-galactopyra nosyl]oxy]-14,14-bis[[3-[[3-[[5-[[2-(acetylamino)-2-deoxy-b eta-D-galactopyranosyl]oxy]-1-oxopentyl]amino]propyl]amino] -3-oxopropoxy]methyl]-1,12,19,25-tetraoxo-16-oxa-13,20,24-t riazanonacos-1-yl]-4-hydroxy-2-pyrrolidinyl)methyl ester
gatcacactctgggtttatta

SEQ ID NO: 2789 - RNA, 21 nt, synthetic construct
  source 1..21: mol_type = other RNA
  modified_base 1: mod_base = OTHER; note = 2'-O-methylcytidine-3'-phosphorothioate
  modified_base 2: mod_base = OTHER; note = 2'-O-methyladenosine-3'-phosphorothioate
  modified_base 3: mod_base = OTHER; note = 2'-O-methyluridine-3'-phosphate
  modified_base 4: mod_base = OTHER; note = 2'-O-methylguanosine-3'-phosphate
  modified_base 5: mod_base = OTHER; note = 2'-O-methylguanosine-3'-phosphate
  modified_base 6: mod_base = OTHER; note = 2'-O-methylcytidine-3'-phosphate
  modified_base 7: mod_base = OTHER; note = 2'-deoxy-2'-fluoroadenosine-3'-phosphate
  modified_base 8: mod_base = OTHER; note = 2'-O-methylguanosine-3'-phosphate
  modified_base 9: mod_base = OTHER; note = 2'-deoxy-2'-fluorouridine-3'-phosphate
  modified_base 10: mod_base = OTHER; note = 2'-deoxy-2'-fluoroguanosine-3'-phosphate
  modified_base 11: mod_base = OTHER; note = 2'-deoxy-2'-fluorouridine-3'-phosphate
  modified_base 12: mod_base = OTHER; note = 2'-O-methyluridine-3'-phosphate
  modified_base 13: mod_base = OTHER; note = 2'-O-methylcytidine-3'-phosphate
  modified_base 14: mod_base = OTHER; note = 2'-O-methylcytidine-3'-phosphate
  modified_base 15: mod_base = OTHER; note = 2'-O-methyluridine-3'-phosphate
  modified_base 16: mod_base = OTHER; note = 2'-O-methyladenosine-3'-phosphate
  modified_base 17: mod_base = OTHER; note = 2'-O-methyluridine-3'-phosphate
  modified_base 18: mod_base = OTHER; note = 2'-O-methyluridine-3'-phosphate
  modified_base 19: mod_base = OTHER; note = 2'-O-methyluridine-3'-phosphate
  modified_base 20: mod_base = OTHER; note = 2'-O-methylguanosine-3'-phosphate
  modified_base 21: mod_base = OTHER; note = 2'-O-methyladenosine-3'-phosphate ((2S,4R)-1-[29-[[2-(acetylamino)-2-deoxy-beta-D-galactopyra nosyl]oxy]-14,14-bis[[3-[[3-[[5-[[2-(acetylamino)-2-deoxy-b eta-D-galactopyranosyl]oxy]-1-oxopentyl]amino]propyl]amino] -3-oxopropoxy]methyl]-1,12,19,25-tetraoxo-16-oxa-13,20,24-t riazanonacos-1-yl]-4-hydroxy-2-pyrrolidinyl)methyl ester
catggcagtgttcctatttga

SEQ ID NO: 2790 - RNA, 21 nt, synthetic construct
  source 1..21: mol_type = other RNA
  modified_base 1: mod_base = OTHER; note = 2'-O-methylguanosine-3'-phosphorothioate
  modified_base 2: mod_base = OTHER; note = 2'-O-methylcytidine-3'-phosphorothioate
  modified_base 3: mod_base = OTHER; note = 2'-O-methyladenosine-3'-phosphate
  modified_base 4: mod_base = OTHER; note = 2'-O-methyluridine-3'-phosphate
  modified_base 5: mod_base = OTHER; note = 2'-O-methylguanosine-3'-phosphate
  modified_base 6: mod_base = OTHER; note = 2'-O-methylcytidine-3'-phosphate
  modified_base 7: mod_base = OTHER; note = 2'-deoxy-2'-fluorocytidine-3'-phosphate
  modified_base 8: mod_base = OTHER; note = 2'-O-methyladenosine-3'-phosphate
  modified_base 9: mod_base = OTHER; note = 2'-deoxy-2'-fluoroadenosine-3'-phosphate
  modified_base 10: mod_base = OTHER; note = 2'-deoxy-2'-fluoroadenosine-3'-phosphate
  modified_base 11: mod_base = OTHER; note = 2'-deoxy-2'-fluorouridine-3'-phosphate
  modified_base 12: mod_base = OTHER; note = 2'-O-methyluridine-3'-phosphate
  modified_base 13: mod_base = OTHER; note = 2'-O-methylguanosine-3'-phosphate
  modified_base 14: mod_base = OTHER; note = 2'-O-methyluridine-3'-phosphate
  modified_base 15: mod_base = OTHER; note = 2'-O-methyladenosine-3'-phosphate
  modified_base 16: mod_base = OTHER; note = 2'-O-methylguanosine-3'-phosphate
  modified_base 17: mod_base = OTHER; note = 2'-O-methyluridine-3'-phosphate
  modified_base 18: mod_base = OTHER; note = 2'-O-methyluridine-3'-phosphate
  modified_base 19: mod_base = OTHER; note = 2'-O-methylcytidine-3'-phosphate
  modified_base 20: mod_base = OTHER; note = 2'-O-methyluridine-3'-phosphate
  modified_base 21: mod_base = OTHER; note = 2'-O-methyladenosine-3'-phosphate ((2S,4R)-1-[29-[[2-(acetylamino)-2-deoxy-beta-D-galactopyra nosyl]oxy]-14,14-bis[[3-[[3-[[5-[[2-(acetylamino)-2-deoxy-b eta-D-galactopyranosyl]oxy]-1-oxopentyl]amino]propyl]amino] -3-oxopropoxy]methyl]-1,12,19,25-tetraoxo-16-oxa-13,20,24-t riazanonacos-1-yl]-4-hydroxy-2-pyrrolidinyl)methyl ester
gcatgccaaattgtagttcta

SEQ ID NO: 2791 - RNA, 21 nt, synthetic construct
  source 1..21: mol_type = other RNA
  modified_base 1: mod_base = OTHER; note = 2'-O-methylguanosine-3'-phosphorothioate
  modified_base 2: mod_base = OTHER; note = 2'-O-methyluridine-3'-phosphorothioate
  modified_base 3: mod_base = OTHER; note = 2'-O-methyluridine-3'-phosphate
  modified_base 4: mod_base = OTHER; note = 2'-O-methylcytidine-3'-phosphate
  modified_base 5: mod_base = OTHER; note = 2'-O-methyluridine-3'-phosphate
  modified_base 6: mod_base = OTHER; note = 2'-O-methyluridine-3'-phosphate
  modified_base 7: mod_base = OTHER; note = 2'-deoxy-2'-fluoroguanosine-3'-phosphate
  modified_base 8: mod_base = OTHER; note = 2'-O-methyluridine-3'-phosphate
  modified_base 9: mod_base = OTHER; note = 2'-deoxy-2'-fluorocytidine-3'-phosphate
  modified_base 10: mod_base = OTHER; note = 2'-deoxy-2'-fluorouridine-3'-phosphate
  modified_base 11: mod_base = OTHER; note = 2'-deoxy-2'-fluoroguanosine-3'-phosphate
  modified_base 12: mod_base = OTHER; note = 2'-O-methyladenosine-3'-phosphate
  modified_base 13: mod_base = OTHER; note = 2'-O-methyluridine-3'-phosphate
  modified_base 14: mod_base = OTHER; note = 2'-O-methyluridine-3'-phosphate
  modified_base 15: mod_base = OTHER; note = 2'-O-methylguanosine-3'-phosphate
  modified_base 16: mod_base = OTHER; note = 2'-O-methylguanosine-3'-phosphate
  modified_base 17: mod_base = OTHER; note = 2'-O-methylcytidine-3'-phosphate
  modified_base 18: mod_base = OTHER; note = 2'-O-methyluridine-3'-phosphate
  modified_base 19: mod_base = OTHER; note = 2'-O-methylcytidine-3'-phosphate
  modified_base 20: mod_base = OTHER; note = 2'-O-methyladenosine-3'-phosphate
  modified_base 21: mod_base = OTHER; note = 2'-O-methyladenosine-3'-phosphate ((2S,4R)-1-[29-[[2-(acetylamino)-2-deoxy-beta-D-galactopyra nosyl]oxy]-14,14-bis[[3-[[3-[[5-[[2-(acetylamino)-2-deoxy-b eta-D-galactopyranosyl]oxy]-1-oxopentyl]amino]propyl]amino] -3-oxopropoxy]methyl]-1,12,19,25-tetraoxo-16-oxa-13,20,24-t riazanonacos-1-yl]-4-hydroxy-2-pyrrolidinyl)methyl ester
gttcttgtctgattggctcaa

SEQ ID NO: 2792 - RNA, 21 nt, synthetic construct
  source 1..21: mol_type = other RNA
  modified_base 1: mod_base = OTHER; note = 2'-O-methyladenosine-3'-phosphorothioate
  modified_base 2: mod_base = OTHER; note = 2'-O-methylguanosine-3'-phosphorothioate
  modified_base 3: mod_base = OTHER; note = 2'-O-methylcytidine-3'-phosphate
  modified_base 4: mod_base = OTHER; note = 2'-O-methyladenosine-3'-phosphate
  modified_base 5: mod_base = OTHER; note = 2'-O-methyladenosine-3'-phosphate
  modified_base 6: mod_base = OTHER; note = 2'-O-methylguanosine-3'-phosphate
  modified_base 7: mod_base = OTHER; note = 2'-deoxy-2'-fluoroguanosine-3'-phosphate
  modified_base 8: mod_base = OTHER; note = 2'-O-methylcytidine-3'-phosphate
  modified_base 9: mod_base = OTHER; note = 2'-deoxy-2'-fluorocytidine-3'-phosphate
  modified_base 10: mod_base = OTHER; note = 2'-deoxy-2'-fluoroadenosine-3'-phosphate
  modified_base 11: mod_base = OTHER; note = 2'-deoxy-2'-fluoroadenosine-3'-phosphate
  modified_base 12: mod_base = OTHER; note = 2'-O-methyladenosine-3'-phosphate
  modified_base 13: mod_base = OTHER; note = 2'-O-methyladenosine-3'-phosphate
  modified_base 14: mod_base = OTHER; note = 2'-O-methyluridine-3'-phosphate
  modified_base 15: mod_base = OTHER; note = 2'-O-methyluridine-3'-phosphate
  modified_base 16: mod_base = OTHER; note = 2'-O-methyladenosine-3'-phosphate
  modified_base 17: mod_base = OTHER; note = 2'-O-methylcytidine-3'-phosphate
  modified_base 18: mod_base = OTHER; note = 2'-O-methylcytidine-3'-phosphate
  modified_base 19: mod_base = OTHER; note = 2'-O-methyladenosine-3'-phosphate
  modified_base 20: mod_base = OTHER; note = 2'-O-methyladenosine-3'-phosphate
  modified_base 21: mod_base = OTHER; note = 2'-O-methyladenosine-3'-phosphate ((2S,4R)-1-[29-[[2-(acetylamino)-2-deoxy-beta-D-galactopyra nosyl]oxy]-14,14-bis[[3-[[3-[[5-[[2-(acetylamino)-2-deoxy-b eta-D-galactopyranosyl]oxy]-1-oxopentyl]amino]propyl]amino] -3-oxopropoxy]methyl]-1,12,19,25-tetraoxo-16-oxa-13,20,24-t riazanonacos-1-yl]-4-hydroxy-2-pyrrolidinyl)methyl ester
agcaaggccaaaattaccaaa

SEQ ID NO: 2793 - RNA, 21 nt, synthetic construct
  source 1..21: mol_type = other RNA
  modified_base 1: mod_base = OTHER; note = 2'-O-methylguanosine-3'-phosphorothioate
  modified_base 2: mod_base = OTHER; note = 2'-O-methyluridine-3'-phosphorothioate
  modified_base 3: mod_base = OTHER; note = 2'-O-methyluridine-3'-phosphate
  modified_base 4: mod_base = OTHER; note = 2'-O-methyluridine-3'-phosphate
  modified_base 5: mod_base = OTHER; note = 2'-O-methyluridine-3'-phosphate
  modified_base 6: mod_base = OTHER; note = 2'-O-methyluridine-3'-phosphate
  modified_base 7: mod_base = OTHER; note = 2'-deoxy-2'-fluoroadenosine-3'-phosphate
  modified_base 8: mod_base = OTHER; note = 2'-O-methylcytidine-3'-phosphate
  modified_base 9: mod_base = OTHER; note = 2'-deoxy-2'-fluorouridine-3'-phosphate
  modified_base 10: mod_base = OTHER; note = 2'-deoxy-2'-fluorocytidine-3'-phosphate
  modified_base 11: mod_base = OTHER; note = 2'-deoxy-2'-fluorocytidine-3'-phosphate
  modified_base 12: mod_base = OTHER; note = 2'-O-methyladenosine-3'-phosphate
  modified_base 13: mod_base = OTHER; note = 2'-O-methylguanosine-3'-phosphate
  modified_base 14: mod_base = OTHER; note = 2'-O-methyluridine-3'-phosphate
  modified_base 15: mod_base = OTHER; note = 2'-O-methylguanosine-3'-phosphate
  modified_base 16: mod_base = OTHER; note = 2'-O-methylguanosine-3'-phosphate
  modified_base 17: mod_base = OTHER; note = 2'-O-methyluridine-3'-phosphate
  modified_base 18: mod_base = OTHER; note = 2'-O-methylguanosine-3'-phosphate
  modified_base 19: mod_base = OTHER; note = 2'-O-methyladenosine-3'-phosphate
  modified_base 20: mod_base = OTHER; note = 2'-O-methyladenosine-3'-phosphate
  modified_base 21: mod_base = OTHER; note = 2'-O-methyladenosine-3'-phosphate ((2S,4R)-1-[29-[[2-(acetylamino)-2-deoxy-beta-D-galactopyra nosyl]oxy]-14,14-bis[[3-[[3-[[5-[[2-(acetylamino)-2-deoxy-b eta-D-galactopyranosyl]oxy]-1-oxopentyl]amino]propyl]amino] -3-oxopropoxy]methyl]-1,12,19,25-tetraoxo-16-oxa-13,20,24-t riazanonacos-1-yl]-4-hydroxy-2-pyrrolidinyl)methyl ester
gtttttactccagtggtgaaa

SEQ ID NO: 2794 - RNA, 21 nt, synthetic construct
  source 1..21: mol_type = other RNA
  modified_base 1: mod_base = OTHER; note = 2'-O-methyluridine-3'-phosphorothioate
  modified_base 2: mod_base = OTHER; note = 2'-O-methylguanosine-3'-phosphorothioate
  modified_base 3: mod_base = OTHER; note = 2'-O-methyladenosine-3'-phosphate
  modified_base 4: mod_base = OTHER; note = 2'-O-methyladenosine-3'-phosphate
  modified_base 5: mod_base = OTHER; note = 2'-O-methylguanosine-3'-phosphate
  modified_base 6: mod_base = OTHER; note = 2'-O-methyladenosine-3'-phosphate
  modified_base 7: mod_base = OTHER; note = 2'-deoxy-2'-fluoroadenosine-3'-phosphate
  modified_base 8: mod_base = OTHER; note = 2'-O-methyladenosine-3'-phosphate
  modified_base 9: mod_base = OTHER; note = 2'-deoxy-2'-fluoroadenosine-3'-phosphate
  modified_base 10: mod_base = OTHER; note = 2'-deoxy-2'-fluorocytidine-3'-phosphate
  modified_base 11: mod_base = OTHER; note = 2'-deoxy-2'-fluorouridine-3'-phosphate
  modified_base 12: mod_base = OTHER; note = 2'-O-methylcytidine-3'-phosphate
  modified_base 13: mod_base = OTHER; note = 2'-O-methylcytidine-3'-phosphate
  modified_base 14: mod_base = OTHER; note = 2'-O-methyluridine-3'-phosphate
  modified_base 15: mod_base = OTHER; note = 2'-O-methyluridine-3'-phosphate
  modified_base 16: mod_base = OTHER; note = 2'-O-methyluridine-3'-phosphate
  modified_base 17: mod_base = OTHER; note = 2'-O-methyladenosine-3'-phosphate
  modified_base 18: mod_base = OTHER; note = 2'-O-methylguanosine-3'-phosphate
  modified_base 19: mod_base = OTHER; note = 2'-O-methylcytidine-3'-phosphate
  modified_base 20: mod_base = OTHER; note = 2'-O-methyladenosine-3'-phosphate
  modified_base 21: mod_base = OTHER; note = 2'-O-methyladenosine-3'-phosphate ((2S,4R)-1-[29-[[2-(acetylamino)-2-deoxy-beta-D-galactopyra nosyl]oxy]-14,14-bis[[3-[[3-[[5-[[2-(acetylamino)-2-deoxy-b eta-D-galactopyranosyl]oxy]-1-oxopentyl]amino]propyl]amino] -3-oxopropoxy]methyl]-1,12,19,25-tetraoxo-16-oxa-13,20,24-t riazanonacos-1-yl]-4-hydroxy-2-pyrrolidinyl)methyl ester
tgaagaaaactcctttagcaa

SEQ ID NO: 2795 - RNA, 21 nt, synthetic construct
  source 1..21: mol_type = other RNA
  modified_base 1: mod_base = OTHER; note = 2'-O-methyladenosine-3'-phosphorothioate
  modified_base 2: mod_base = OTHER; note = 2'-O-methylguanosine-3'-phosphorothioate
  modified_base 3: mod_base = OTHER; note = 2'-O-methyladenosine-3'-phosphate
  modified_base 4: mod_base = OTHER; note = 2'-O-methylcytidine-3'-phosphate
  modified_base 5: mod_base = OTHER; note = 2'-O-methylcytidine-3'-phosphate
  modified_base 6: mod_base = OTHER; note = 2'-O-methyluridine-3'-phosphate
  modified_base 7: mod_base = OTHER; note = 2'-deoxy-2'-fluoroguanosine-3'-phosphate
  modified_base 8: mod_base = OTHER; note = 2'-O-methyladenosine-3'-phosphate
  modified_base 9: mod_base = OTHER; note = 2'-deoxy-2'-fluorocytidine-3'-phosphate
  modified_base 10: mod_base = OTHER; note = 2'-deoxy-2'-fluoroadenosine-3'-phosphate
  modified_base 11: mod_base = OTHER; note = 2'-deoxy-2'-fluoroadenosine-3'-phosphate
  modified_base 12: mod_base = OTHER; note = 2'-O-methylguanosine-3'-phosphate
  modified_base 13: mod_base = OTHER; note = 2'-O-methylcytidine-3'-phosphate
  modified_base 14: mod_base = OTHER; note = 2'-O-methyladenosine-3'-phosphate
  modified_base 15: mod_base = OTHER; note = 2'-O-methylcytidine-3'-phosphate
  modified_base 16: mod_base = OTHER; note = 2'-O-methyluridine-3'-phosphate
  modified_base 17: mod_base = OTHER; note = 2'-O-methylguanosine-3'-phosphate
  modified_base 18: mod_base = OTHER; note = 2'-O-methylcytidine-3'-phosphate
  modified_base 19: mod_base = OTHER; note = 2'-O-methyluridine-3'-phosphate
  modified_base 20: mod_base = OTHER; note = 2'-O-methyladenosine-3'-phosphate
  modified_base 21: mod_base = OTHER; note = 2'-O-methyladenosine-3'-phosphate ((2S,4R)-1-[29-[[2-(acetylamino)-2-deoxy-beta-D-galactopyra nosyl]oxy]-14,14-bis[[3-[[3-[[5-[[2-(acetylamino)-2-deoxy-b eta-D-galactopyranosyl]oxy]-1-oxopentyl]amino]propyl]amino] -3-oxopropoxy]methyl]-1,12,19,25-tetraoxo-16-oxa-13,20,24-t riazanonacos-1-yl]-4-hydroxy-2-pyrrolidinyl)methyl ester
agacctgacaagcactgctaa

SEQ ID NO: 2796 - RNA, 21 nt, synthetic construct
  source 1..21: mol_type = other RNA
  modified_base 1: mod_base = OTHER; note = 2'-O-methylcytidine-3'-phosphorothioate
  modified_base 2: mod_base = OTHER; note = 2'-O-methylcytidine-3'-phosphorothioate
  modified_base 3: mod_base = OTHER; note = 2'-O-methyluridine-3'-phosphate
  modified_base 4: mod_base = OTHER; note = 2'-O-methyluridine-3'-phosphate
  modified_base 5: mod_base = OTHER; note = 2'-O-methylcytidine-3'-phosphate
  modified_base 6: mod_base = OTHER; note = 2'-O-methylcytidine-3'-phosphate
  modified_base 7: mod_base = OTHER; note = 2'-deoxy-2'-fluorocytidine-3'-phosphate
  modified_base 8: mod_base = OTHER; note = 2'-O-methyladenosine-3'-phosphate
  modified_base 9: mod_base = OTHER; note = 2'-deoxy-2'-fluorocytidine-3'-phosphate
  modified_base 10: mod_base = OTHER; note = 2'-deoxy-2'-fluorouridine-3'-phosphate
  modified_base 11: mod_base = OTHER; note = 2'-deoxy-2'-fluoroguanosine-3'-phosphate
  modified_base 12: mod_base = OTHER; note = 2'-O-methylguanosine-3'-phosphate
  modified_base 13: mod_base = OTHER; note = 2'-O-methyladenosine-3'-phosphate
  modified_base 14: mod_base = OTHER; note = 2'-O-methylguanosine-3'-phosphate
  modified_base 15: mod_base = OTHER; note = 2'-O-methylguanosine-3'-phosphate
  modified_base 16: mod_base = OTHER; note = 2'-O-methyluridine-3'-phosphate
  modified_base 17: mod_base = OTHER; note = 2'-O-methylcytidine-3'-phosphate
  modified_base 18: mod_base = OTHER; note = 2'-O-methyladenosine-3'-phosphate
  modified_base 19: mod_base = OTHER; note = 2'-O-methylcytidine-3'-phosphate
  modified_base 20: mod_base = OTHER; note = 2'-O-methyladenosine-3'-phosphate
  modified_base 21: mod_base = OTHER; note = 2'-O-methyladenosine-3'-phosphate ((2S,4R)-1-[29-[[2-(acetylamino)-2-deoxy-beta-D-galactopyra nosyl]oxy]-14,14-bis[[3-[[3-[[5-[[2-(acetylamino)-2-deoxy-b eta-D-galactopyranosyl]oxy]-1-oxopentyl]amino]propyl]amino] -3-oxopropoxy]methyl]-1,12,19,25-tetraoxo-16-oxa-13,20,24-t riazanonacos-1-yl]-4-hydroxy-2-pyrrolidinyl)methyl ester
ccttcccactggaggtcacaa

SEQ ID NO: 2797 - RNA, 21 nt, synthetic construct
  source 1..21: mol_type = other RNA
  modified_base 1: mod_base = OTHER; note = 2'-O-methyluridine-3'-phosphorothioate
  modified_base 2: mod_base = OTHER; note = 2'-O-methylcytidine-3'-phosphorothioate
  modified_base 3: mod_base = OTHER; note = 2'-O-methyladenosine-3'-phosphate
  modified_base 4: mod_base = OTHER; note = 2'-O-methylcytidine-3'-phosphate
  modified_base 5: mod_base = OTHER; note = 2'-O-methyladenosine-3'-phosphate
  modified_base 6: mod_base = OTHER; note = 2'-O-methyluridine-3'-phosphate
  modified_base 7: mod_base = OTHER; note = 2'-deoxy-2'-fluorouridine-3'-phosphate
  modified_base 8: mod_base = OTHER; note = 2'-O-methylcytidine-3'-phosphate
  modified_base 9: mod_base = OTHER; note = 2'-deoxy-2'-fluoroadenosine-3'-phosphate
  modified_base 10: mod_base = OTHER; note = 2'-deoxy-2'-fluoroguanosine-3'-phosphate
  modified_base 11: mod_base = OTHER; note = 2'-deoxy-2'-fluoroguanosine-3'-phosphate
  modified_base 12: mod_base = OTHER; note = 2'-O-methyladenosine-3'-phosphate
  modified_base 13: mod_base = OTHER; note = 2'-O-methyladenosine-3'-phosphate
  modified_base 14: mod_base = OTHER; note = 2'-O-methylguanosine-3'-phosphate
  modified_base 15: mod_base = OTHER; note = 2'-O-methyladenosine-3'-phosphate
  modified_base 16: mod_base = OTHER; note = 2'-O-methyluridine-3'-phosphate
  modified_base 17: mod_base = OTHER; note = 2'-O-methylguanosine-3'-phosphate
  modified_base 18: mod_base = OTHER; note = 2'-O-methyladenosine-3'-phosphate
  modified_base 19: mod_base = OTHER; note = 2'-O-methyladenosine-3'-phosphate
  modified_base 20: mod_base = OTHER; note = 2'-O-methyladenosine-3'-phosphate
  modified_base 21: mod_base = OTHER; note = 2'-O-methyladenosine-3'-phosphate ((2S,4R)-1-[29-[[2-(acetylamino)-2-deoxy-beta-D-galactopyra nosyl]oxy]-14,14-bis[[3-[[3-[[5-[[2-(acetylamino)-2-deoxy-b eta-D-galactopyranosyl]oxy]-1-oxopentyl]amino]propyl]amino] -3-oxopropoxy]methyl]-1,12,19,25-tetraoxo-16-oxa-13,20,24-t riazanonacos-1-yl]-4-hydroxy-2-pyrrolidinyl)methyl ester
tcacattcaggaagatgaaaa

SEQ ID NO: 2798 - RNA, 21 nt, synthetic construct
  source 1..21: mol_type = other RNA
  modified_base 1: mod_base = OTHER; note = 2'-O-methyluridine-3'-phosphorothioate
  modified_base 2: mod_base = OTHER; note = 2'-O-methylguanosine-3'-phosphorothioate
  modified_base 3: mod_base = OTHER; note = 2'-O-methylcytidine-3'-phosphate
  modified_base 4: mod_base = OTHER; note = 2'-O-methylcytidine-3'-phosphate
  modified_base 5: mod_base = OTHER; note = 2'-O-methyladenosine-3'-phosphate
  modified_base 6: mod_base = OTHER; note = 2'-O-methylcytidine-3'-phosphate
  modified_base 7: mod_base = OTHER; note = 2'-deoxy-2'-fluorocytidine-3'-phosphate
  modified_base 8: mod_base = OTHER; note = 2'-O-methyladenosine-3'-phosphate
  modified_base 9: mod_base = OTHER; note = 2'-deoxy-2'-fluorouridine-3'-phosphate
  modified_base 10: mod_base = OTHER; note = 2'-deoxy-2'-fluorocytidine-3'-phosphate
  modified_base 11: mod_base = OTHER; note = 2'-deoxy-2'-fluorocytidine-3'-phosphate
  modified_base 12: mod_base = OTHER; note = 2'-O-methyluridine-3'-phosphate
  modified_base 13: mod_base = OTHER; note = 2'-O-methylguanosine-3'-phosphate
  modified_base 14: mod_base = OTHER; note = 2'-O-methylcytidine-3'-phosphate
  modified_base 15: mod_base = OTHER; note = 2'-O-methyluridine-3'-phosphate
  modified_base 16: mod_base = OTHER; note = 2'-O-methylguanosine-3'-phosphate
  modified_base 17: mod_base = OTHER; note = 2'-O-methylcytidine-3'-phosphate
  modified_base 18: mod_base = OTHER; note = 2'-O-methyluridine-3'-phosphate
  modified_base 19: mod_base = OTHER; note = 2'-O-methylguanosine-3'-phosphate
  modified_base 20: mod_base = OTHER; note = 2'-O-methyluridine-3'-phosphate
  modified_base 21: mod_base = OTHER; note = 2'-O-methyladenosine-3'-phosphate ((2S,4R)-1-[29-[[2-(acetylamino)-2-deoxy-beta-D-galactopyra nosyl]oxy]-14,14-bis[[3-[[3-[[5-[[2-(acetylamino)-2-deoxy-b eta-D-galactopyranosyl]oxy]-1-oxopentyl]amino]propyl]amino] -3-oxopropoxy]methyl]-1,12,19,25-tetraoxo-16-oxa-13,20,24-t riazanonacos-1-yl]-4-hydroxy-2-pyrrolidinyl)methyl ester
tgccaccatcctgctgctgta

SEQ ID NO: 2799 - RNA, 21 nt, synthetic construct
  source 1..21: mol_type = other RNA
  modified_base 1: mod_base = OTHER; note = 2'-O-methylguanosine-3'-phosphorothioate
  modified_base 2: mod_base = OTHER; note = 2'-O-methylcytidine-3'-phosphorothioate
  modified_base 3: mod_base = OTHER; note = 2'-O-methyluridine-3'-phosphate
  modified_base 4: mod_base = OTHER; note = 2'-O-methylguanosine-3'-phosphate
  modified_base 5: mod_base = OTHER; note = 2'-O-methyluridine-3'-phosphate
  modified_base 6: mod_base = OTHER; note = 2'-O-methylguanosine-3'-phosphate
  modified_base 7: mod_base = OTHER; note = 2'-deoxy-2'-fluorouridine-3'-phosphate
  modified_base 8: mod_base = OTHER; note = 2'-O-methyluridine-3'-phosphate
  modified_base 9: mod_base = OTHER; note = 2'-deoxy-2'-fluorouridine-3'-phosphate
  modified_base 10: mod_base = OTHER; note = 2'-deoxy-2'-fluorouridine-3'-phosphate
  modified_base 11: mod_base = OTHER; note = 2'-deoxy-2'-fluorouridine-3'-phosphate
  modified_base 12: mod_base = OTHER; note = 2'-O-methylguanosine-3'-phosphate
  modified_base 13: mod_base = OTHER; note = 2'-O-methylcytidine-3'-phosphate
  modified_base 14: mod_base = OTHER; note = 2'-O-methyluridine-3'-phosphate
  modified_base 15: mod_base = OTHER; note = 2'-O-methyladenosine-3'-phosphate
  modified_base 16: mod_base = OTHER; note = 2'-O-methyluridine-3'-phosphate
  modified_base 17: mod_base = OTHER; note = 2'-O-methylcytidine-3'-phosphate
  modified_base 18: mod_base = OTHER; note = 2'-O-methyladenosine-3'-phosphate
  modified_base 19: mod_base = OTHER; note = 2'-O-methylcytidine-3'-phosphate
  modified_base 20: mod_base = OTHER; note = 2'-O-methyladenosine-3'-phosphate
  modified_base 21: mod_base = OTHER; note = 2'-O-methyladenosine-3'-phosphate ((2S,4R)-1-[29-[[2-(acetylamino)-2-deoxy-beta-D-galactopyra nosyl]oxy]-14,14-bis[[3-[[3-[[5-[[2-(acetylamino)-2-deoxy-b eta-D-galactopyranosyl]oxy]-1-oxopentyl]amino]propyl]amino] -3-oxopropoxy]methyl]-1,12,19,25-tetraoxo-16-oxa-13,20,24-t riazanonacos-1-yl]-4-hydroxy-2-pyrrolidinyl)methyl ester
gctgtgtttttgctatcacaa

SEQ ID NO: 2800 - RNA, 21 nt, synthetic construct
  source 1..21: mol_type = other RNA
  modified_base 1: mod_base = OTHER; note = 2'-O-methyladenosine-3'-phosphorothioate
  modified_base 2: mod_base = OTHER; note = 2'-O-methylcytidine-3'-phosphorothioate
  modified_base 3: mod_base = OTHER; note = 2'-O-methyladenosine-3'-phosphate
  modified_base 4: mod_base = OTHER; note = 2'-O-methylguanosine-3'-phosphate
  modified_base 5: mod_base = OTHER; note = 2'-O-methyluridine-3'-phosphate
  modified_base 6: mod_base = OTHER; note = 2'-O-methylguanosine-3'-phosphate
  modified_base 7: mod_base = OTHER; note = 2'-deoxy-2'-fluoroguanosine-3'-phosphate
  modified_base 8: mod_base = OTHER; note = 2'-O-methylguanosine-3'-phosphate
  modified_base 9: mod_base = OTHER; note = 2'-deoxy-2'-fluorouridine-3'-phosphate
  modified_base 10: mod_base = OTHER; note = 2'-deoxy-2'-fluoroguanosine-3'-phosphate
  modified_base 11: mod_base = OTHER; note = 2'-deoxy-2'-fluoroguanosine-3'-phosphate
  modified_base 12: mod_base = OTHER; note = 2'-O-methyluridine-3'-phosphate
  modified_base 13: mod_base = OTHER; note = 2'-O-methylguanosine-3'-phosphate
  modified_base 14: mod_base = OTHER; note = 2'-O-methylguanosine-3'-phosphate
  modified_base 15: mod_base = OTHER; note = 2'-O-methyladenosine-3'-phosphate
  modified_base 16: mod_base = OTHER; note = 2'-O-methyluridine-3'-phosphate
  modified_base 17: mod_base = OTHER; note = 2'-O-methylcytidine-3'-phosphate
  modified_base 18: mod_base = OTHER; note = 2'-O-methyluridine-3'-phosphate
  modified_base 19: mod_base = OTHER; note = 2'-O-methylguanosine-3'-phosphate
  modified_base 20: mod_base = OTHER; note = 2'-O-methyluridine-3'-phosphate
  modified_base 21: mod_base = OTHER; note = 2'-O-methyladenosine-3'-phosphate ((2S,4R)-1-[29-[[2-(acetylamino)-2-deoxy-beta-D-galactopyra nosyl]oxy]-14,14-bis[[3-[[3-[[5-[[2-(acetylamino)-2-deoxy-b eta-D-galactopyranosyl]oxy]-1-oxopentyl]amino]propyl]amino] -3-oxopropoxy]methyl]-1,12,19,25-tetraoxo-16-oxa-13,20,24-t riazanonacos-1-yl]-4-hydroxy-2-pyrrolidinyl)methyl ester
acagtgggtggtggatctgta

SEQ ID NO: 2801 - RNA, 21 nt, synthetic construct
  source 1..21: mol_type = other RNA
  modified_base 1: mod_base = OTHER; note = 2'-O-methylcytidine-3'-phosphorothioate
  modified_base 2: mod_base = OTHER; note = 2'-O-methyluridine-3'-phosphorothioate
  modified_base 3: mod_base = OTHER; note = 2'-O-methylguanosine-3'-phosphate
  modified_base 4: mod_base = OTHER; note = 2'-O-methyluridine-3'-phosphate
  modified_base 5: mod_base = OTHER; note = 2'-O-methylcytidine-3'-phosphate
  modified_base 6: mod_base = OTHER; note = 2'-O-methylcytidine-3'-phosphate
  modified_base 7: mod_base = OTHER; note = 2'-deoxy-2'-fluoroadenosine-3'-phosphate
  modified_base 8: mod_base = OTHER; note = 2'-O-methyladenosine-3'-phosphate
  modified_base 9: mod_base = OTHER; note = 2'-deoxy-2'-fluoroguanosine-3'-phosphate
  modified_base 10: mod_base = OTHER; note = 2'-deoxy-2'-fluoroguanosine-3'-phosphate
  modified_base 11: mod_base = OTHER; note = 2'-deoxy-2'-fluoroadenosine-3'-phosphate
  modified_base 12: mod_base = OTHER; note = 2'-O-methyladenosine-3'-phosphate
  modified_base 13: mod_base = OTHER; note = 2'-O-methyladenosine-3'-phosphate
  modified_base 14: mod_base = OTHER; note = 2'-O-methylcytidine-3'-phosphate
  modified_base 15: mod_base = OTHER; note = 2'-O-methyluridine-3'-phosphate
  modified_base 16: mod_base = OTHER; note = 2'-O-methyluridine-3'-phosphate
  modified_base 17: mod_base = OTHER; note = 2'-O-methylguanosine-3'-phosphate
  modified_base 18: mod_base = OTHER; note = 2'-O-methyladenosine-3'-phosphate
  modified_base 19: mod_base = OTHER; note = 2'-O-methyladenosine-3'-phosphate
  modified_base 20: mod_base = OTHER; note = 2'-O-methyluridine-3'-phosphate
  modified_base 21: mod_base = OTHER; note = 2'-O-methyladenosine-3'-phosphate ((2S,4R)-1-[29-[[2-(acetylamino)-2-deoxy-beta-D-galactopyra nosyl]oxy]-14,14-bis[[3-[[3-[[5-[[2-(acetylamino)-2-deoxy-b eta-D-galactopyranosyl]oxy]-1-oxopentyl]amino]propyl]amino] -3-oxopropoxy]methyl]-1,12,19,25-tetraoxo-16-oxa-13,20,24-t riazanonacos-1-yl]-4-hydroxy-2-pyrrolidinyl)methyl ester
ctgtccaaggaaacttgaata

SEQ ID NO: 2802 - RNA, 21 nt, synthetic construct
  source 1..21: mol_type = other RNA
  modified_base 1: mod_base = OTHER; note = 2'-O-methyluridine-3'-phosphorothioate
  modified_base 2: mod_base = OTHER; note = 2'-O-methylguanosine-3'-phosphorothioate
  modified_base 3: mod_base = OTHER; note = 2'-O-methyladenosine-3'-phosphate
  modified_base 4: mod_base = OTHER; note = 2'-O-methyladenosine-3'-phosphate
  modified_base 5: mod_base = OTHER; note = 2'-O-methyluridine-3'-phosphate
  modified_base 6: mod_base = OTHER; note = 2'-O-methylcytidine-3'-phosphate
  modified_base 7: mod_base = OTHER; note = 2'-deoxy-2'-fluoroadenosine-3'-phosphate
  modified_base 8: mod_base = OTHER; note = 2'-O-methyladenosine-3'-phosphate
  modified_base 9: mod_base = OTHER; note = 2'-deoxy-2'-fluoroadenosine-3'-phosphate
  modified_base 10: mod_base = OTHER; note = 2'-deoxy-2'-fluoroguanosine-3'-phosphate
  modified_base 11: mod_base = OTHER; note = 2'-deoxy-2'-fluorocytidine-3'-phosphate
  modified_base 12: mod_base = OTHER; note = 2'-O-methyladenosine-3'-phosphate
  modified_base 13: mod_base = OTHER; note = 2'-O-methylguanosine-3'-phosphate
  modified_base 14: mod_base = OTHER; note = 2'-O-methyluridine-3'-phosphate
  modified_base 15: mod_base = OTHER; note = 2'-O-methyluridine-3'-phosphate
  modified_base 16: mod_base = OTHER; note = 2'-O-methyladenosine-3'-phosphate
  modified_base 17: mod_base = OTHER; note = 2'-O-methyladenosine-3'-phosphate
  modified_base 18: mod_base = OTHER; note = 2'-O-methylcytidine-3'-phosphate
  modified_base 19: mod_base = OTHER; note = 2'-O-methyluridine-3'-phosphate
  modified_base 20: mod_base = OTHER; note = 2'-O-methyluridine-3'-phosphate
  modified_base 21: mod_base = OTHER; note = 2'-O-methyladenosine-3'-phosphate ((2S,4R)-1-[29-[[2-(acetylamino)-2-deoxy-beta-D-galactopyra nosyl]oxy]-14,14-bis[[3-[[3-[[5-[[2-(acetylamino)-2-deoxy-b eta-D-galactopyranosyl]oxy]-1-oxopentyl]amino]propyl]amino] -3-oxopropoxy]methyl]-1,12,19,25-tetraoxo-16-oxa-13,20,24-t riazanonacos-1-yl]-4-hydroxy-2-pyrrolidinyl)methyl ester
tgaatcaaagcagttaactta

SEQ ID NO: 2803 - RNA, 21 nt, synthetic construct
  source 1..21: mol_type = other RNA
  modified_base 1: mod_base = OTHER; note = 2'-O-methylguanosine-3'-phosphorothioate
  modified_base 2: mod_base = OTHER; note = 2'-O-methyladenosine-3'-phosphorothioate
  modified_base 3: mod_base = OTHER; note = 2'-O-methylguanosine-3'-phosphate
  modified_base 4: mod_base = OTHER; note = 2'-O-methylcytidine-3'-phosphate
  modified_base 5: mod_base = OTHER; note = 2'-O-methyladenosine-3'-phosphate
  modified_base 6: mod_base = OTHER; note = 2'-O-methylcytidine-3'-phosphate
  modified_base 7: mod_base = OTHER; note = 2'-deoxy-2'-fluorocytidine-3'-phosphate
  modified_base 8: mod_base = OTHER; note = 2'-O-methyluridine-3'-phosphate
  modified_base 9: mod_base = OTHER; note = 2'-deoxy-2'-fluoroguanosine-3'-phosphate
  modified_base 10: mod_base = OTHER; note = 2'-deoxy-2'-fluorocytidine-3'-phosphate
  modified_base 11: mod_base = OTHER; note = 2'-deoxy-2'-fluorouridine-3'-phosphate
  modified_base 12: mod_base = OTHER; note = 2'-O-methyluridine-3'-phosphate
  modified_base 13: mod_base = OTHER; note = 2'-O-methylcytidine-3'-phosphate
  modified_base 14: mod_base = OTHER; note = 2'-O-methyladenosine-3'-phosphate
  modified_base 15: mod_base = OTHER; note = 2'-O-methyluridine-3'-phosphate
  modified_base 16: mod_base = OTHER; note = 2'-O-methylguanosine-3'-phosphate
  modified_base 17: mod_base = OTHER; note = 2'-O-methylcytidine-3'-phosphate
  modified_base 18: mod_base = OTHER; note = 2'-O-methyluridine-3'-phosphate
  modified_base 19: mod_base = OTHER; note = 2'-O-methylcytidine-3'-phosphate
  modified_base 20: mod_base = OTHER; note = 2'-O-methyladenosine-3'-phosphate
  modified_base 21: mod_base = OTHER; note = 2'-O-methyladenosine-3'-phosphate ((2S,4R)-1-[29-[[2-(acetylamino)-2-deoxy-beta-D-galactopyra nosyl]oxy]-14,14-bis[[3-[[3-[[5-[[2-(acetylamino)-2-deoxy-b eta-D-galactopyranosyl]oxy]-1-oxopentyl]amino]propyl]amino] -3-oxopropoxy]methyl]-1,12,19,25-tetraoxo-16-oxa-13,20,24-t riazanonacos-1-yl]-4-hydroxy-2-pyrrolidinyl)methyl ester
gagcacctgcttcatgctcaa

SEQ ID NO: 2804 - RNA, 21 nt, synthetic construct
  source 1..21: mol_type = other RNA
  modified_base 1: mod_base = OTHER; note = 2'-O-methyluridine-3'-phosphorothioate
  modified_base 2: mod_base = OTHER; note = 2'-O-methylguanosine-3'-phosphorothioate
  modified_base 3: mod_base = OTHER; note = 2'-O-methylguanosine-3'-phosphate
  modified_base 4: mod_base = OTHER; note = 2'-O-methyluridine-3'-phosphate
  modified_base 5: mod_base = OTHER; note = 2'-O-methylguanosine-3'-phosphate
  modified_base 6: mod_base = OTHER; note = 2'-O-methylcytidine-3'-phosphate
  modified_base 7: mod_base = OTHER; note = 2'-deoxy-2'-fluorouridine-3'-phosphate
  modified_base 8: mod_base = OTHER; note = 2'-O-methyladenosine-3'-phosphate
  modified_base 9: mod_base = OTHER; note = 2'-deoxy-2'-fluorouridine-3'-phosphate
  modified_base 10: mod_base = OTHER; note = 2'-deoxy-2'-fluoroadenosine-3'-phosphate
  modified_base 11: mod_base = OTHER; note = 2'-deoxy-2'-fluoroguanosine-3'-phosphate
  modified_base 12: mod_base = OTHER; note = 2'-O-methylguanosine-3'-phosphate
  modified_base 13: mod_base = OTHER; note = 2'-O-methylcytidine-3'-phosphate
  modified_base 14: mod_base = OTHER; note = 2'-O-methyluridine-3'-phosphate
  modified_base 15: mod_base = OTHER; note = 2'-O-methylguanosine-3'-phosphate
  modified_base 16: mod_base = OTHER; note = 2'-O-methylguanosine-3'-phosphate
  modified_base 17: mod_base = OTHER; note = 2'-O-methyladenosine-3'-phosphate
  modified_base 18: mod_base = OTHER; note = 2'-O-methylguanosine-3'-phosphate
  modified_base 19: mod_base = OTHER; note = 2'-O-methyladenosine-3'-phosphate
  modified_base 20: mod_base = OTHER; note = 2'-O-methyladenosine-3'-phosphate
  modified_base 21: mod_base = OTHER; note = 2'-O-methyladenosine-3'-phosphate ((2S,4R)-1-[29-[[2-(acetylamino)-2-deoxy-beta-D-galactopyra nosyl]oxy]-14,14-bis[[3-[[3-[[5-[[2-(acetylamino)-2-deoxy-b eta-D-galactopyranosyl]oxy]-1-oxopentyl]amino]propyl]amino] -3-oxopropoxy]methyl]-1,12,19,25-tetraoxo-16-oxa-13,20,24-t riazanonacos-1-yl]-4-hydroxy-2-pyrrolidinyl)methyl ester
tggtgctataggctggagaaa

SEQ ID NO: 2805 - RNA, 21 nt, synthetic construct
  source 1..21: mol_type = other RNA
  modified_base 1: mod_base = OTHER; note = 2'-O-methyladenosine-3'-phosphorothioate
  modified_base 2: mod_base = OTHER; note = 2'-O-methylguanosine-3'-phosphorothioate
  modified_base 3: mod_base = OTHER; note = 2'-O-methylcytidine-3'-phosphate
  modified_base 4: mod_base = OTHER; note = 2'-O-methyluridine-3'-phosphate
  modified_base 5: mod_base = OTHER; note = 2'-O-methylcytidine-3'-phosphate
  modified_base 6: mod_base = OTHER; note = 2'-O-methyladenosine-3'-phosphate
  modified_base 7: mod_base = OTHER; note = 2'-deoxy-2'-fluorocytidine-3'-phosphate
  modified_base 8: mod_base = OTHER; note = 2'-O-methylcytidine-3'-phosphate
  modified_base 9: mod_base = OTHER; note = 2'-deoxy-2'-fluorocytidine-3'-phosphate
  modified_base 10: mod_base = OTHER; note = 2'-deoxy-2'-fluoroadenosine-3'-phosphate
  modified_base 11: mod_base = OTHER; note = 2'-deoxy-2'-fluoroadenosine-3'-phosphate
  modified_base 12: mod_base = OTHER; note = 2'-O-methyluridine-3'-phosphate
  modified_base 13: mod_base = OTHER; note = 2'-O-methyladenosine-3'-phosphate
  modified_base 14: mod_base = OTHER; note = 2'-O-methyladenosine-3'-phosphate
  modified_base 15: mod_base = OTHER; note = 2'-O-methyladenosine-3'-phosphate
  modified_base 16: mod_base = OTHER; note = 2'-O-methylcytidine-3'-phosphate
  modified_base 17: mod_base = OTHER; note = 2'-O-methyladenosine-3'-phosphate
  modified_base 18: mod_base = OTHER; note = 2'-O-methyluridine-3'-phosphate
  modified_base 19: mod_base = OTHER; note = 2'-O-methyluridine-3'-phosphate
  modified_base 20: mod_base = OTHER; note = 2'-O-methyladenosine-3'-phosphate
  modified_base 21: mod_base = OTHER; note = 2'-O-methyladenosine-3'-phosphate ((2S,4R)-1-[29-[[2-(acetylamino)-2-deoxy-beta-D-galactopyra nosyl]oxy]-14,14-bis[[3-[[3-[[5-[[2-(acetylamino)-2-deoxy-b eta-D-galactopyranosyl]oxy]-1-oxopentyl]amino]propyl]amino] -3-oxopropoxy]methyl]-1,12,19,25-tetraoxo-16-oxa-13,20,24-t riazanonacos-1-yl]-4-hydroxy-2-pyrrolidinyl)methyl ester
agctcacccaataaacattaa

SEQ ID NO: 2806 - RNA, 21 nt, synthetic construct
  source 1..21: mol_type = other RNA
  modified_base 1: mod_base = OTHER; note = 2'-O-methylcytidine-3'-phosphorothioate
  modified_base 2: mod_base = OTHER; note = 2'-O-methyladenosine-3'-phosphorothioate
  modified_base 3: mod_base = OTHER; note = 2'-O-methyluridine-3'-phosphate
  modified_base 4: mod_base = OTHER; note = 2'-O-methyluridine-3'-phosphate
  modified_base 5: mod_base = OTHER; note = 2'-O-methyladenosine-3'-phosphate
  modified_base 6: mod_base = OTHER; note = 2'-O-methyladenosine-3'-phosphate
  modified_base 7: mod_base = OTHER; note = 2'-deoxy-2'-fluoroguanosine-3'-phosphate
  modified_base 8: mod_base = OTHER; note = 2'-O-methyladenosine-3'-phosphate
  modified_base 9: mod_base = OTHER; note = 2'-deoxy-2'-fluorouridine-3'-phosphate
  modified_base 10: mod_base = OTHER; note = 2'-deoxy-2'-fluorouridine-3'-phosphate
  modified_base 11: mod_base = OTHER; note = 2'-deoxy-2'-fluoroguanosine-3'-phosphate
  modified_base 12: mod_base = OTHER; note = 2'-O-methyladenosine-3'-phosphate
  modified_base 13: mod_base = OTHER; note = 2'-O-methylguanosine-3'-phosphate
  modified_base 14: mod_base = OTHER; note = 2'-O-methylguanosine-3'-phosphate
  modified_base 15: mod_base = OTHER; note = 2'-O-methylcytidine-3'-phosphate
  modified_base 16: mod_base = OTHER; note = 2'-O-methylcytidine-3'-phosphate
  modified_base 17: mod_base = OTHER; note = 2'-O-methyluridine-3'-phosphate
  modified_base 18: mod_base = OTHER; note = 2'-O-methylguanosine-3'-phosphate
  modified_base 19: mod_base = OTHER; note = 2'-O-methylcytidine-3'-phosphate
  modified_base 20: mod_base = OTHER; note = 2'-O-methylcytidine-3'-phosphate
  modified_base 21: mod_base = OTHER; note = 2'-O-methyladenosine-3'-phosphate ((2S,4R)-1-[29-[[2-(acetylamino)-2-deoxy-beta-D-galactopyra nosyl]oxy]-14,14-bis[[3-[[3-[[5-[[2-(acetylamino)-2-deoxy-b eta-D-galactopyranosyl]oxy]-1-oxopentyl]amino]propyl]amino] -3-oxopropoxy]methyl]-1,12,19,25-tetraoxo-16-oxa-13,20,24-t riazanonacos-1-yl]-4-hydroxy-2-pyrrolidinyl)methyl ester
cattaagattgaggcctgcca

SEQ ID NO: 2807 - RNA, 21 nt, synthetic construct
  source 1..21: mol_type = other RNA
  modified_base 1: mod_base = OTHER; note = 2'-O-methylcytidine-3'-phosphorothioate
  modified_base 2: mod_base = OTHER; note = 2'-O-methyluridine-3'-phosphorothioate
  modified_base 3: mod_base = OTHER; note = 2'-O-methylguanosine-3'-phosphate
  modified_base 4: mod_base = OTHER; note = 2'-O-methylcytidine-3'-phosphate
  modified_base 5: mod_base = OTHER; note = 2'-O-methylcytidine-3'-phosphate
  modified_base 6: mod_base = OTHER; note = 2'-O-methylcytidine-3'-phosphate
  modified_base 7: mod_base = OTHER; note = 2'-deoxy-2'-fluorouridine-3'-phosphate
  modified_base 8: mod_base = OTHER; note = 2'-O-methylcytidine-3'-phosphate
  modified_base 9: mod_base = OTHER; note = 2'-deoxy-2'-fluoroadenosine-3'-phosphate
  modified_base 10: mod_base = OTHER; note = 2'-deoxy-2'-fluoroguanosine-3'-phosphate
  modified_base 11: mod_base = OTHER; note = 2'-deoxy-2'-fluoroguanosine-3'-phosphate
  modified_base 12: mod_base = OTHER; note = 2'-O-methylguanosine-3'-phosphate
  modified_base 13: mod_base = OTHER; note = 2'-O-methyladenosine-3'-phosphate
  modified_base 14: mod_base = OTHER; note = 2'-O-methyluridine-3'-phosphate
  modified_base 15: mod_base = OTHER; note = 2'-O-methylcytidine-3'-phosphate
  modified_base 16: mod_base = OTHER; note = 2'-O-methyluridine-3'-phosphate
  modified_base 17: mod_base = OTHER; note = 2'-O-methyluridine-3'-phosphate
  modified_base 18: mod_base = OTHER; note = 2'-O-methylguanosine-3'-phosphate
  modified_base 19: mod_base = OTHER; note = 2'-O-methylcytidine-3'-phosphate
  modified_base 20: mod_base = OTHER; note = 2'-O-methyladenosine-3'-phosphate
  modified_base 21: mod_base = OTHER; note = 2'-O-methyladenosine-3'-phosphate ((2S,4R)-1-[29-[[2-(acetylamino)-2-deoxy-beta-D-galactopyra nosyl]oxy]-14,14-bis[[3-[[3-[[5-[[2-(acetylamino)-2-deoxy-b eta-D-galactopyranosyl]oxy]-1-oxopentyl]amino]propyl]amino] -3-oxopropoxy]methyl]-1,12,19,25-tetraoxo-16-oxa-13,20,24-t riazanonacos-1-yl]-4-hydroxy-2-pyrrolidinyl)methyl ester
ctgccctcagggatcttgcaa

SEQ ID NO: 2808 - RNA, 21 nt, synthetic construct
  source 1..21: mol_type = other RNA
  modified_base 1: mod_base = OTHER; note = 2'-O-methyluridine-3'-phosphorothioate
  modified_base 2: mod_base = OTHER; note = 2'-O-methyluridine-3'-phosphorothioate
  modified_base 3: mod_base = OTHER; note = 2'-O-methylguanosine-3'-phosphate
  modified_base 4: mod_base = OTHER; note = 2'-O-methylcytidine-3'-phosphate
  modified_base 5: mod_base = OTHER; note = 2'-O-methyladenosine-3'-phosphate
  modified_base 6: mod_base = OTHER; note = 2'-O-methyluridine-3'-phosphate
  modified_base 7: mod_base = OTHER; note = 2'-deoxy-2'-fluorouridine-3'-phosphate
  modified_base 8: mod_base = OTHER; note = 2'-O-methylcytidine-3'-phosphate
  modified_base 9: mod_base = OTHER; note = 2'-deoxy-2'-fluorocytidine-3'-phosphate
  modified_base 10: mod_base = OTHER; note = 2'-deoxy-2'-fluorocytidine-3'-phosphate
  modified_base 11: mod_base = OTHER; note = 2'-deoxy-2'-fluoroadenosine-3'-phosphate
  modified_base 12: mod_base = OTHER; note = 2'-O-methylguanosine-3'-phosphate
  modified_base 13: mod_base = OTHER; note = 2'-O-methyluridine-3'-phosphate
  modified_base 14: mod_base = OTHER; note = 2'-O-methylguanosine-3'-phosphate
  modified_base 15: mod_base = OTHER; note = 2'-O-methylguanosine-3'-phosphate
  modified_base 16: mod_base = OTHER; note = 2'-O-methyluridine-3'-phosphate
  modified_base 17: mod_base = OTHER; note = 2'-O-methylcytidine-3'-phosphate
  modified_base 18: mod_base = OTHER; note = 2'-O-methyladenosine-3'-phosphate
  modified_base 19: mod_base = OTHER; note = 2'-O-methyladenosine-3'-phosphate
  modified_base 20: mod_base = OTHER; note = 2'-O-methyladenosine-3'-phosphate
  modified_base 21: mod_base = OTHER; note = 2'-O-methyladenosine-3'-phosphate ((2S,4R)-1-[29-[[2-(acetylamino)-2-deoxy-beta-D-galactopyra nosyl]oxy]-14,14-bis[[3-[[3-[[5-[[2-(acetylamino)-2-deoxy-b eta-D-galactopyranosyl]oxy]-1-oxopentyl]amino]propyl]amino] -3-oxopropoxy]methyl]-1,12,19,25-tetraoxo-16-oxa-13,20,24-t riazanonacos-1-yl]-4-hydroxy-2-pyrrolidinyl)methyl ester
ttgcattcccagtggtcaaaa

SEQ ID NO: 2809 - RNA, 21 nt, synthetic construct
  source 1..21: mol_type = other RNA
  modified_base 1: mod_base = OTHER; note = 2'-O-methylcytidine-3'-phosphorothioate
  modified_base 2: mod_base = OTHER; note = 2'-O-methylguanosine-3'-phosphorothioate
  modified_base 3: mod_base = OTHER; note = 2'-O-methylcytidine-3'-phosphate
  modified_base 4: mod_base = OTHER; note = 2'-O-methyladenosine-3'-phosphate
  modified_base 5: mod_base = OTHER; note = 2'-O-methylcytidine-3'-phosphate
  modified_base 6: mod_base = OTHER; note = 2'-O-methyluridine-3'-phosphate
  modified_base 7: mod_base = OTHER; note = 2'-deoxy-2'-fluorocytidine-3'-phosphate
  modified_base 8: mod_base = OTHER; note = 2'-O-methyladenosine-3'-phosphate
  modified_base 9: mod_base = OTHER; note = 2'-deoxy-2'-fluorocytidine-3'-phosphate
  modified_base 10: mod_base = OTHER; note = 2'-deoxy-2'-fluorocytidine-3'-phosphate
  modified_base 11: mod_base = OTHER; note = 2'-deoxy-2'-fluorocytidine-3'-phosphate
  modified_base 12: mod_base = OTHER; note = 2'-O-methyladenosine-3'-phosphate
  modified_base 13: mod_base = OTHER; note = 2'-O-methyluridine-3'-phosphate
  modified_base 14: mod_base = OTHER; note = 2'-O-methylguanosine-3'-phosphate
  modified_base 15: mod_base = OTHER; note = 2'-O-methyluridine-3'-phosphate
  modified_base 16: mod_base = OTHER; note = 2'-O-methylguanosine-3'-phosphate
  modified_base 17: mod_base = OTHER; note = 2'-O-methylcytidine-3'-phosphate
  modified_base 18: mod_base = OTHER; note = 2'-O-methylcytidine-3'-phosphate
  modified_base 19: mod_base = OTHER; note = 2'-O-methyladenosine-3'-phosphate
  modified_base 20: mod_base = OTHER; note = 2'-O-methyladenosine-3'-phosphate
  modified_base 21: mod_base = OTHER; note = 2'-O-methyladenosine-3'-phosphate ((2S,4R)-1-[29-[[2-(acetylamino)-2-deoxy-beta-D-galactopyra nosyl]oxy]-14,14-bis[[3-[[3-[[5-[[2-(acetylamino)-2-deoxy-b eta-D-galactopyranosyl]oxy]-1-oxopentyl]amino]propyl]amino] -3-oxopropoxy]methyl]-1,12,19,25-tetraoxo-16-oxa-13,20,24-t riazanonacos-1-yl]-4-hydroxy-2-pyrrolidinyl)methyl ester
cgcactcacccatgtgccaaa

SEQ ID NO: 2810 - RNA, 21 nt, synthetic construct
  source 1..21: mol_type = other RNA
  modified_base 1: mod_base = OTHER; note = 2'-O-methylcytidine-3'-phosphorothioate
  modified_base 2: mod_base = OTHER; note = 2'-O-methyladenosine-3'-phosphorothioate
  modified_base 3: mod_base = OTHER; note = 2'-O-methylguanosine-3'-phosphate
  modified_base 4: mod_base = OTHER; note = 2'-O-methylcytidine-3'-phosphate
  modified_base 5: mod_base = OTHER; note = 2'-O-methyluridine-3'-phosphate
  modified_base 6: mod_base = OTHER; note = 2'-O-methylguanosine-3'-phosphate
  modified_base 7: mod_base = OTHER; note = 2'-deoxy-2'-fluoroadenosine-3'-phosphate
  modified_base 8: mod_base = OTHER; note = 2'-O-methyladenosine-3'-phosphate
  modified_base 9: mod_base = OTHER; note = 2'-deoxy-2'-fluorocytidine-3'-phosphate
  modified_base 10: mod_base = OTHER; note = 2'-deoxy-2'-fluoroadenosine-3'-phosphate
  modified_base 11: mod_base = OTHER; note = 2'-deoxy-2'-fluoroguanosine-3'-phosphate
  modified_base 12: mod_base = OTHER; note = 2'-O-methylcytidine-3'-phosphate
  modified_base 13: mod_base = OTHER; note = 2'-O-methylcytidine-3'-phosphate
  modified_base 14: mod_base = OTHER; note = 2'-O-methyladenosine-3'-phosphate
  modified_base 15: mod_base = OTHER; note = 2'-O-methyladenosine-3'-phosphate
  modified_base 16: mod_base = OTHER; note = 2'-O-methyladenosine-3'-phosphate
  modified_base 17: mod_base = OTHER; note = 2'-O-methyluridine-3'-phosphate
  modified_base 18: mod_base = OTHER; note = 2'-O-methylguanosine-3'-phosphate
  modified_base 19: mod_base = OTHER; note = 2'-O-methylcytidine-3'-phosphate
  modified_base 20: mod_base = OTHER; note = 2'-O-methyladenosine-3'-phosphate
  modified_base 21: mod_base = OTHER; note = 2'-O-methyladenosine-3'-phosphate ((2S,4R)-1-[29-[[2-(acetylamino)-2-deoxy-beta-D-galactopyra nosyl]oxy]-14,14-bis[[3-[[3-[[5-[[2-(acetylamino)-2-deoxy-b eta-D-galactopyranosyl]oxy]-1-oxopentyl]amino]propyl]amino] -3-oxopropoxy]methyl]-1,12,19,25-tetraoxo-16-oxa-13,20,24-t riazanonacos-1-yl]-4-hydroxy-2-pyrrolidinyl)methyl ester
cagctgaacagccaaatgcaa

SEQ ID NO: 2811 - RNA, 21 nt, synthetic construct
  source 1..21: mol_type = other RNA
  modified_base 1: mod_base = OTHER; note = 2'-O-methyladenosine-3'-phosphorothioate
  modified_base 2: mod_base = OTHER; note = 2'-O-methyluridine-3'-phosphorothioate
  modified_base 3: mod_base = OTHER; note = 2'-O-methylguanosine-3'-phosphate
  modified_base 4: mod_base = OTHER; note = 2'-O-methylcytidine-3'-phosphate
  modified_base 5: mod_base = OTHER; note = 2'-O-methyladenosine-3'-phosphate
  modified_base 6: mod_base = OTHER; note = 2'-O-methyluridine-3'-phosphate
  modified_base 7: mod_base = OTHER; note = 2'-deoxy-2'-fluoroguanosine-3'-phosphate
  modified_base 8: mod_base = OTHER; note = 2'-O-methylguanosine-3'-phosphate
  modified_base 9: mod_base = OTHER; note = 2'-deoxy-2'-fluorouridine-3'-phosphate
  modified_base 10: mod_base = OTHER; note = 2'-deoxy-2'-fluoroguanosine-3'-phosphate
  modified_base 11: mod_base = OTHER; note = 2'-deoxy-2'-fluorocytidine-3'-phosphate
  modified_base 12: mod_base = OTHER; note = 2'-O-methyladenosine-3'-phosphate
  modified_base 13: mod_base = OTHER; note = 2'-O-methylguanosine-3'-phosphate
  modified_base 14: mod_base = OTHER; note = 2'-O-methyluridine-3'-phosphate
  modified_base 15: mod_base = OTHER; note = 2'-O-methyluridine-3'-phosphate
  modified_base 16: mod_base = OTHER; note = 2'-O-methylguanosine-3'-phosphate
  modified_base 17: mod_base = OTHER; note = 2'-O-methyladenosine-3'-phosphate
  modified_base 18: mod_base = OTHER; note = 2'-O-methylcytidine-3'-phosphate
  modified_base 19: mod_base = OTHER; note = 2'-O-methyladenosine-3'-phosphate
  modified_base 20: mod_base = OTHER; note = 2'-O-methylguanosine-3'-phosphate
  modified_base 21: mod_base = OTHER; note = 2'-O-methyladenosine-3'-phosphate ((2S,4R)-1-[29-[[2-(acetylamino)-2-deoxy-beta-D-galactopyra nosyl]oxy]-14,14-bis[[3-[[3-[[5-[[2-(acetylamino)-2-deoxy-b eta-D-galactopyranosyl]oxy]-1-oxopentyl]amino]propyl]amino] -3-oxopropoxy]methyl]-1,12,19,25-tetraoxo-16-oxa-13,20,24-t riazanonacos-1-yl]-4-hydroxy-2-pyrrolidinyl)methyl ester
atgcatggtgcagttgacaga

SEQ ID NO: 2812 - RNA, 21 nt, synthetic construct
  source 1..21: mol_type = other RNA
  modified_base 1: mod_base = OTHER; note = 2'-O-methylguanosine-3'-phosphorothioate
  modified_base 2: mod_base = OTHER; note = 2'-O-methylguanosine-3'-phosphorothioate
  modified_base 3: mod_base = OTHER; note = 2'-O-methyluridine-3'-phosphate
  modified_base 4: mod_base = OTHER; note = 2'-O-methylguanosine-3'-phosphate
  modified_base 5: mod_base = OTHER; note = 2'-O-methylguanosine-3'-phosphate
  modified_base 6: mod_base = OTHER; note = 2'-O-methylguanosine-3'-phosphate
  modified_base 7: mod_base = OTHER; note = 2'-deoxy-2'-fluoroadenosine-3'-phosphate
  modified_base 8: mod_base = OTHER; note = 2'-O-methyladenosine-3'-phosphate
  modified_base 9: mod_base = OTHER; note = 2'-deoxy-2'-fluoroadenosine-3'-phosphate
  modified_base 10: mod_base = OTHER; note = 2'-deoxy-2'-fluorouridine-3'-phosphate
  modified_base 11: mod_base = OTHER; note = 2'-deoxy-2'-fluoroguanosine-3'-phosphate
  modified_base 12: mod_base = OTHER; note = 2'-O-methylguanosine-3'-phosphate
  modified_base 13: mod_base = OTHER; note = 2'-O-methyluridine-3'-phosphate
  modified_base 14: mod_base = OTHER; note = 2'-O-methyladenosine-3'-phosphate
  modified_base 15: mod_base = OTHER; note = 2'-O-methyluridine-3'-phosphate
  modified_base 16: mod_base = OTHER; note = 2'-O-methylguanosine-3'-phosphate
  modified_base 17: mod_base = OTHER; note = 2'-O-methyladenosine-3'-phosphate
  modified_base 18: mod_base = OTHER; note = 2'-O-methylguanosine-3'-phosphate
  modified_base 19: mod_base = OTHER; note = 2'-O-methylcytidine-3'-phosphate
  modified_base 20: mod_base = OTHER; note = 2'-O-methyluridine-3'-phosphate
  modified_base 21: mod_base = OTHER; note = 2'-O-methyladenosine-3'-phosphate ((2S,4R)-1-[29-[[2-(acetylamino)-2-deoxy-beta-D-galactopyra nosyl]oxy]-14,14-bis[[3-[[3-[[5-[[2-(acetylamino)-2-deoxy-b eta-D-galactopyranosyl]oxy]-1-oxopentyl]amino]propyl]amino] -3-oxopropoxy]methyl]-1,12,19,25-tetraoxo-16-oxa-13,20,24-t riazanonacos-1-yl]-4-hydroxy-2-pyrrolidinyl)methyl ester
ggtgggaaatggtatgagcta

SEQ ID NO: 2813 - RNA, 21 nt, synthetic construct
  source 1..21: mol_type = other RNA
  modified_base 1: mod_base = OTHER; note = 2'-O-methylcytidine-3'-phosphorothioate
  modified_base 2: mod_base = OTHER; note = 2'-O-methyladenosine-3'-phosphorothioate
  modified_base 3: mod_base = OTHER; note = 2'-O-methylcytidine-3'-phosphate
  modified_base 4: mod_base = OTHER; note = 2'-O-methyladenosine-3'-phosphate
  modified_base 5: mod_base = OTHER; note = 2'-O-methylguanosine-3'-phosphate
  modified_base 6: mod_base = OTHER; note = 2'-O-methylguanosine-3'-phosphate
  modified_base 7: mod_base = OTHER; note = 2'-deoxy-2'-fluoroguanosine-3'-phosphate
  modified_base 8: mod_base = OTHER; note = 2'-O-methyladenosine-3'-phosphate
  modified_base 9: mod_base = OTHER; note = 2'-deoxy-2'-fluoroadenosine-3'-phosphate
  modified_base 10: mod_base = OTHER; note = 2'-deoxy-2'-fluorocytidine-3'-phosphate
  modified_base 11: mod_base = OTHER; note = 2'-deoxy-2'-fluorocytidine-3'-phosphate
  modified_base 12: mod_base = OTHER; note = 2'-O-methylcytidine-3'-phosphate
  modified_base 13: mod_base = OTHER; note = 2'-O-methyluridine-3'-phosphate
  modified_base 14: mod_base = OTHER; note = 2'-O-methylguanosine-3'-phosphate
  modified_base 15: mod_base = OTHER; note = 2'-O-methylcytidine-3'-phosphate
  modified_base 16: mod_base = OTHER; note = 2'-O-methyluridine-3'-phosphate
  modified_base 17: mod_base = OTHER; note = 2'-O-methyluridine-3'-phosphate
  modified_base 18: mod_base = OTHER; note = 2'-O-methylguanosine-3'-phosphate
  modified_base 19: mod_base = OTHER; note = 2'-O-methylcytidine-3'-phosphate
  modified_base 20: mod_base = OTHER; note = 2'-O-methyladenosine-3'-phosphate
  modified_base 21: mod_base = OTHER; note = 2'-O-methyladenosine-3'-phosphate ((2S,4R)-1-[29-[[2-(acetylamino)-2-deoxy-beta-D-galactopyra nosyl]oxy]-14,14-bis[[3-[[3-[[5-[[2-(acetylamino)-2-deoxy-b eta-D-galactopyranosyl]oxy]-1-oxopentyl]amino]propyl]amino] -3-oxopropoxy]methyl]-1,12,19,25-tetraoxo-16-oxa-13,20,24-t riazanonacos-1-yl]-4-hydroxy-2-pyrrolidinyl)methyl ester
cacagggaaccctgcttgcaa

SEQ ID NO: 2814 - RNA, 21 nt, synthetic construct
  source 1..21: mol_type = other RNA
  modified_base 1: mod_base = OTHER; note = 2'-O-methyluridine-3'-phosphorothioate
  modified_base 2: mod_base = OTHER; note = 2'-O-methylguanosine-3'-phosphorothioate
  modified_base 3: mod_base = OTHER; note = 2'-O-methylcytidine-3'-phosphate
  modified_base 4: mod_base = OTHER; note = 2'-O-methyladenosine-3'-phosphate
  modified_base 5: mod_base = OTHER; note = 2'-O-methylcytidine-3'-phosphate
  modified_base 6: mod_base = OTHER; note = 2'-O-methyluridine-3'-phosphate
  modified_base 7: mod_base = OTHER; note = 2'-deoxy-2'-fluorouridine-3'-phosphate
  modified_base 8: mod_base = OTHER; note = 2'-O-methyluridine-3'-phosphate
  modified_base 9: mod_base = OTHER; note = 2'-deoxy-2'-fluoroguanosine-3'-phosphate
  modified_base 10: mod_base = OTHER; note = 2'-deoxy-2'-fluorouridine-3'-phosphate
  modified_base 11: mod_base = OTHER; note = 2'-deoxy-2'-fluoroadenosine-3'-phosphate
  modified_base 12: mod_base = OTHER; note = 2'-O-methyladenosine-3'-phosphate
  modified_base 13: mod_base = OTHER; note = 2'-O-methylcytidine-3'-phosphate
  modified_base 14: mod_base = OTHER; note = 2'-O-methyladenosine-3'-phosphate
  modified_base 15: mod_base = OTHER; note = 2'-O-methyluridine-3'-phosphate
  modified_base 16: mod_base = OTHER; note = 2'-O-methylguanosine-3'-phosphate
  modified_base 17: mod_base = OTHER; note = 2'-O-methyluridine-3'-phosphate
  modified_base 18: mod_base = OTHER; note = 2'-O-methyluridine-3'-phosphate
  modified_base 19: mod_base = OTHER; note = 2'-O-methyluridine-3'-phosphate
  modified_base 20: mod_base = OTHER; note = 2'-O-methyladenosine-3'-phosphate
  modified_base 21: mod_base = OTHER; note = 2'-O-methyladenosine-3'-phosphate ((2S,4R)-1-[29-[[2-(acetylamino)-2-deoxy-beta-D-galactopyra nosyl]oxy]-14,14-bis[[3-[[3-[[5-[[2-(acetylamino)-2-deoxy-b eta-D-galactopyranosyl]oxy]-1-oxopentyl]amino]propyl]amino] -3-oxopropoxy]methyl]-1,12,19,25-tetraoxo-16-oxa-13,20,24-t riazanonacos-1-yl]-4-hydroxy-2-pyrrolidinyl)methyl ester
tgcactttgtaacatgtttaa

SEQ ID NO: 2815 - RNA, 21 nt, synthetic construct
  source 1..21: mol_type = other RNA
  modified_base 1: mod_base = OTHER; note = 2'-O-methylguanosine-3'-phosphorothioate
  modified_base 2: mod_base = OTHER; note = 2'-O-methylcytidine-3'-phosphorothioate
  modified_base 3: mod_base = OTHER; note = 2'-O-methyladenosine-3'-phosphate
  modified_base 4: mod_base = OTHER; note = 2'-O-methyluridine-3'-phosphate
  modified_base 5: mod_base = OTHER; note = 2'-O-methylcytidine-3'-phosphate
  modified_base 6: mod_base = OTHER; note = 2'-O-methyluridine-3'-phosphate
  modified_base 7: mod_base = OTHER; note = 2'-deoxy-2'-fluorouridine-3'-phosphate
  modified_base 8: mod_base = OTHER; note = 2'-O-methyladenosine-3'-phosphate
  modified_base 9: mod_base = OTHER; note = 2'-deoxy-2'-fluoroguanosine-3'-phosphate
  modified_base 10: mod_base = OTHER; note = 2'-deoxy-2'-fluorocytidine-3'-phosphate
  modified_base 11: mod_base = OTHER; note = 2'-deoxy-2'-fluorouridine-3'-phosphate
  modified_base 12: mod_base = OTHER; note = 2'-O-methyluridine-3'-phosphate
  modified_base 13: mod_base = OTHER; note = 2'-O-methylcytidine-3'-phosphate
  modified_base 14: mod_base = OTHER; note = 2'-O-methyluridine-3'-phosphate
  modified_base 15: mod_base = OTHER; note = 2'-O-methyladenosine-3'-phosphate
  modified_base 16: mod_base = OTHER; note = 2'-O-methyluridine-3'-phosphate
  modified_base 17: mod_base = OTHER; note = 2'-O-methyluridine-3'-phosphate
  modified_base 18: mod_base = OTHER; note = 2'-O-methyladenosine-3'-phosphate
  modified_base 19: mod_base = OTHER; note = 2'-O-methyluridine-3'-phosphate
  modified_base 20: mod_base = OTHER; note = 2'-O-methyladenosine-3'-phosphate
  modified_base 21: mod_base = OTHER; note = 2'-O-methyladenosine-3'-phosphate ((2S,4R)-1-[29-[[2-(acetylamino)-2-deoxy-beta-D-galactopyra nosyl]oxy]-14,14-bis[[3-[[3-[[5-[[2-(acetylamino)-2-deoxy-b eta-D-galactopyranosyl]oxy]-1-oxopentyl]amino]propyl]amino] -3-oxopropoxy]methyl]-1,12,19,25-tetraoxo-16-oxa-13,20,24-t riazanonacos-1-yl]-4-hydroxy-2-pyrrolidinyl)methyl ester
gcatcttagcttctattataa

SEQ ID NO: 2816 - RNA, 21 nt, synthetic construct
  source 1..21: mol_type = other RNA
  modified_base 1: mod_base = OTHER; note = 2'-O-methylcytidine-3'-phosphorothioate
  modified_base 2: mod_base = OTHER; note = 2'-O-methylcytidine-3'-phosphorothioate
  modified_base 3: mod_base = OTHER; note = 2'-O-methyluridine-3'-phosphate
  modified_base 4: mod_base = OTHER; note = 2'-O-methyluridine-3'-phosphate
  modified_base 5: mod_base = OTHER; note = 2'-O-methyluridine-3'-phosphate
  modified_base 6: mod_base = OTHER; note = 2'-O-methylguanosine-3'-phosphate
  modified_base 7: mod_base = OTHER; note = 2'-deoxy-2'-fluoroadenosine-3'-phosphate
  modified_base 8: mod_base = OTHER; note = 2'-O-methyladenosine-3'-phosphate
  modified_base 9: mod_base = OTHER; note = 2'-deoxy-2'-fluoroadenosine-3'-phosphate
  modified_base 10: mod_base = OTHER; note = 2'-deoxy-2'-fluorocytidine-3'-phosphate
  modified_base 11: mod_base = OTHER; note = 2'-deoxy-2'-fluoroadenosine-3'-phosphate
  modified_base 12: mod_base = OTHER; note = 2'-O-methyladenosine-3'-phosphate
  modified_base 13: mod_base = OTHER; note = 2'-O-methylguanosine-3'-phosphate
  modified_base 14: mod_base = OTHER; note = 2'-O-methyladenosine-3'-phosphate
  modified_base 15: mod_base = OTHER; note = 2'-O-methyluridine-3'-phosphate
  modified_base 16: mod_base = OTHER; note = 2'-O-methyladenosine-3'-phosphate
  modified_base 17: mod_base = OTHER; note = 2'-O-methyladenosine-3'-phosphate
  modified_base 18: mod_base = OTHER; note = 2'-O-methylcytidine-3'-phosphate
  modified_base 19: mod_base = OTHER; note = 2'-O-methyluridine-3'-phosphate
  modified_base 20: mod_base = OTHER; note = 2'-O-methylguanosine-3'-phosphate
  modified_base 21: mod_base = OTHER; note = 2'-O-methyladenosine-3'-phosphate ((2S,4R)-1-[29-[[2-(acetylamino)-2-deoxy-beta-D-galactopyra nosyl]oxy]-14,14-bis[[3-[[3-[[5-[[2-(acetylamino)-2-deoxy-b eta-D-galactopyranosyl]oxy]-1-oxopentyl]amino]propyl]amino] -3-oxopropoxy]methyl]-1,12,19,25-tetraoxo-16-oxa-13,20,24-t riazanonacos-1-yl]-4-hydroxy-2-pyrrolidinyl)methyl ester
cctttgaaacaagataactga

SEQ ID NO: 2817 - RNA, 21 nt, synthetic construct
  source 1..21: mol_type = other RNA
  modified_base 1: mod_base = OTHER; note = 2'-O-methyladenosine-3'-phosphorothioate
  modified_base 2: mod_base = OTHER; note = 2'-O-methyladenosine-3'-phosphorothioate
  modified_base 3: mod_base = OTHER; note = 2'-O-methyladenosine-3'-phosphate
  modified_base 4: mod_base = OTHER; note = 2'-O-methyluridine-3'-phosphate
  modified_base 5: mod_base = OTHER; note = 2'-O-methyladenosine-3'-phosphate
  modified_base 6: mod_base = OTHER; note = 2'-O-methylcytidine-3'-phosphate
  modified_base 7: mod_base = OTHER; note = 2'-deoxy-2'-fluoroadenosine-3'-phosphate
  modified_base 8: mod_base = OTHER; note = 2'-O-methyluridine-3'-phosphate
  modified_base 9: mod_base = OTHER; note = 2'-deoxy-2'-fluoroadenosine-3'-phosphate
  modified_base 10: mod_base = OTHER; note = 2'-deoxy-2'-fluoroadenosine-3'-phosphate
  modified_base 11: mod_base = OTHER; note = 2'-deoxy-2'-fluoroguanosine-3'-phosphate
  modified_base 12: mod_base = OTHER; note = 2'-O-methyladenosine-3'-phosphate
  modified_base 13: mod_base = OTHER; note = 2'-O-methylcytidine-3'-phosphate
  modified_base 14: mod_base = OTHER; note = 2'-O-methylcytidine-3'-phosphate
  modified_base 15: mod_base = OTHER; note = 2'-O-methyladenosine-3'-phosphate
  modified_base 16: mod_base = OTHER; note = 2'-O-methyluridine-3'-phosphate
  modified_base 17: mod_base = OTHER; note = 2'-O-methyladenosine-3'-phosphate
  modified_base 18: mod_base = OTHER; note = 2'-O-methyladenosine-3'-phosphate
  modified_base 19: mod_base = OTHER; note = 2'-O-methylcytidine-3'-phosphate
  modified_base 20: mod_base = OTHER; note = 2'-O-methyladenosine-3'-phosphate
  modified_base 21: mod_base = OTHER; note = 2'-O-methyladenosine-3'-phosphate ((2S,4R)-1-[29-[[2-(acetylamino)-2-deoxy-beta-D-galactopyra nosyl]oxy]-14,14-bis[[3-[[3-[[5-[[2-(acetylamino)-2-deoxy-b eta-D-galactopyranosyl]oxy]-1-oxopentyl]amino]propyl]amino] -3-oxopropoxy]methyl]-1,12,19,25-tetraoxo-16-oxa-13,20,24-t riazanonacos-1-yl]-4-hydroxy-2-pyrrolidinyl)methyl ester
aaatacataagaccataacaa

SEQ ID NO: 2818 - RNA, 21 nt, synthetic construct
  source 1..21: mol_type = other RNA
  modified_base 1: mod_base = OTHER; note = 2'-O-methyluridine-3'-phosphorothioate
  modified_base 2: mod_base = OTHER; note = 2'-O-methylguanosine-3'-phosphorothioate
  modified_base 3: mod_base = OTHER; note = 2'-O-methylguanosine-3'-phosphate
  modified_base 4: mod_base = OTHER; note = 2'-O-methylcytidine-3'-phosphate
  modified_base 5: mod_base = OTHER; note = 2'-O-methyladenosine-3'-phosphate
  modified_base 6: mod_base = OTHER; note = 2'-O-methylguanosine-3'-phosphate
  modified_base 7: mod_base = OTHER; note = 2'-deoxy-2'-fluoroguanosine-3'-phosphate
  modified_base 8: mod_base = OTHER; note = 2'-O-methyladenosine-3'-phosphate
  modified_base 9: mod_base = OTHER; note = 2'-deoxy-2'-fluorocytidine-3'-phosphate
  modified_base 10: mod_base = OTHER; note = 2'-deoxy-2'-fluorocytidine-3'-phosphate
  modified_base 11: mod_base = OTHER; note = 2'-deoxy-2'-fluoroadenosine-3'-phosphate
  modified_base 12: mod_base = OTHER; note = 2'-O-methylguanosine-3'-phosphate
  modified_base 13: mod_base = OTHER; note = 2'-O-methylguanosine-3'-phosphate
  modified_base 14: mod_base = OTHER; note = 2'-O-methyladenosine-3'-phosphate
  modified_base 15: mod_base = OTHER; note = 2'-O-methylcytidine-3'-phosphate
  modified_base 16: mod_base = OTHER; note = 2'-O-methyluridine-3'-phosphate
  modified_base 17: mod_base = OTHER; note = 2'-O-methyladenosine-3'-phosphate
  modified_base 18: mod_base = OTHER; note = 2'-O-methyluridine-3'-phosphate
  modified_base 19: mod_base = OTHER; note = 2'-O-methyladenosine-3'-phosphate
  modified_base 20: mod_base = OTHER; note = 2'-O-methylguanosine-3'-phosphate
  modified_base 21: mod_base = OTHER; note = 2'-O-methyladenosine-3'-phosphate ((2S,4R)-1-[29-[[2-(acetylamino)-2-deoxy-beta-D-galactopyra nosyl]oxy]-14,14-bis[[3-[[3-[[5-[[2-(acetylamino)-2-deoxy-b eta-D-galactopyranosyl]oxy]-1-oxopentyl]amino]propyl]amino] -3-oxopropoxy]methyl]-1,12,19,25-tetraoxo-16-oxa-13,20,24-t riazanonacos-1-yl]-4-hydroxy-2-pyrrolidinyl)methyl ester
tggcaggaccaggactataga

SEQ ID NO: 2819 - RNA, 21 nt, synthetic construct
  source 1..21: mol_type = other RNA
  modified_base 1: mod_base = OTHER; note = 2'-O-methyladenosine-3'-phosphorothioate
  modified_base 2: mod_base = OTHER; note = 2'-O-methyluridine-3'-phosphorothioate
  modified_base 3: mod_base = OTHER; note = 2'-O-methyladenosine-3'-phosphate
  modified_base 4: mod_base = OTHER; note = 2'-O-methylguanosine-3'-phosphate
  modified_base 5: mod_base = OTHER; note = 2'-O-methylcytidine-3'-phosphate
  modified_base 6: mod_base = OTHER; note = 2'-O-methylcytidine-3'-phosphate
  modified_base 7: mod_base = OTHER; note = 2'-deoxy-2'-fluorocytidine-3'-phosphate
  modified_base 8: mod_base = OTHER; note = 2'-O-methyladenosine-3'-phosphate
  modified_base 9: mod_base = OTHER; note = 2'-deoxy-2'-fluoroguanosine-3'-phosphate
  modified_base 10: mod_base = OTHER; note = 2'-deoxy-2'-fluoroguanosine-3'-phosphate
  modified_base 11: mod_base = OTHER; note = 2'-deoxy-2'-fluorouridine-3'-phosphate
  modified_base 12: mod_base = OTHER; note = 2'-O-methylcytidine-3'-phosphate
  modified_base 13: mod_base = OTHER; note = 2'-O-methylcytidine-3'-phosphate
  modified_base 14: mod_base = OTHER; note = 2'-O-methyluridine-3'-phosphate
  modified_base 15: mod_base = OTHER; note = 2'-O-methylcytidine-3'-phosphate
  modified_base 16: mod_base = OTHER; note = 2'-O-methyluridine-3'-phosphate
  modified_base 17: mod_base = OTHER; note = 2'-O-methylguanosine-3'-phosphate
  modified_base 18: mod_base = OTHER; note = 2'-O-methyladenosine-3'-phosphate
  modified_base 19: mod_base = OTHER; note = 2'-O-methyluridine-3'-phosphate
  modified_base 20: mod_base = OTHER; note = 2'-O-methyladenosine-3'-phosphate
  modified_base 21: mod_base = OTHER; note = 2'-O-methyladenosine-3'-phosphate ((2S,4R)-1-[29-[[2-(acetylamino)-2-deoxy-beta-D-galactopyra nosyl]oxy]-14,14-bis[[3-[[3-[[5-[[2-(acetylamino)-2-deoxy-b eta-D-galactopyranosyl]oxy]-1-oxopentyl]amino]propyl]amino] -3-oxopropoxy]methyl]-1,12,19,25-tetraoxo-16-oxa-13,20,24-t riazanonacos-1-yl]-4-hydroxy-2-pyrrolidinyl)methyl ester
atagcccaggtcctctgataa

SEQ ID NO: 2820 - RNA, 21 nt, synthetic construct
  source 1..21: mol_type = other RNA
  modified_base 1: mod_base = OTHER; note = 2'-O-methyladenosine-3'-phosphorothioate
  modified_base 2: mod_base = OTHER; note = 2'-O-methyluridine-3'-phosphorothioate
  modified_base 3: mod_base = OTHER; note = 2'-O-methyladenosine-3'-phosphate
  modified_base 4: mod_base = OTHER; note = 2'-O-methylcytidine-3'-phosphate
  modified_base 5: mod_base = OTHER; note = 2'-O-methylcytidine-3'-phosphate
  modified_base 6: mod_base = OTHER; note = 2'-O-methylcytidine-3'-phosphate
  modified_base 7: mod_base = OTHER; note = 2'-deoxy-2'-fluoroadenosine-3'-phosphate
  modified_base 8: mod_base = OTHER; note = 2'-O-methylguanosine-3'-phosphate
  modified_base 9: mod_base = OTHER; note = 2'-deoxy-2'-fluoroadenosine-3'-phosphate
  modified_base 10: mod_base = OTHER; note = 2'-deoxy-2'-fluoroguanosine-3'-phosphate
  modified_base 11: mod_base = OTHER; note = 2'-deoxy-2'-fluorocytidine-3'-phosphate
  modified_base 12: mod_base = OTHER; note = 2'-O-methyladenosine-3'-phosphate
  modified_base 13: mod_base = OTHER; note = 2'-O-methyluridine-3'-phosphate
  modified_base 14: mod_base = OTHER; note = 2'-O-methyluridine-3'-phosphate
  modified_base 15: mod_base = OTHER; note = 2'-O-methyladenosine-3'-phosphate
  modified_base 16: mod_base = OTHER; note = 2'-O-methylcytidine-3'-phosphate
  modified_base 17: mod_base = OTHER; note = 2'-O-methylguanosine-3'-phosphate
  modified_base 18: mod_base = OTHER; note = 2'-O-methyluridine-3'-phosphate
  modified_base 19: mod_base = OTHER; note = 2'-O-methylguanosine-3'-phosphate
  modified_base 20: mod_base = OTHER; note = 2'-O-methyladenosine-3'-phosphate
  modified_base 21: mod_base = OTHER; note = 2'-O-methyladenosine-3'-phosphate ((2S,4R)-1-[29-[[2-(acetylamino)-2-deoxy-beta-D-galactopyra nosyl]oxy]-14,14-bis[[3-[[3-[[5-[[2-(acetylamino)-2-deoxy-b eta-D-galactopyranosyl]oxy]-1-oxopentyl]amino]propyl]amino] -3-oxopropoxy]methyl]-1,12,19,25-tetraoxo-16-oxa-13,20,24-t riazanonacos-1-yl]-4-hydroxy-2-pyrrolidinyl)methyl ester
atacccagagcattacgtgaa

SEQ ID NO: 2821 - RNA, 21 nt, synthetic construct
  source 1..21: mol_type = other RNA
  modified_base 1: mod_base = OTHER; note = 2'-O-methylcytidine-3'-phosphorothioate
  modified_base 2: mod_base = OTHER; note = 2'-O-methyladenosine-3'-phosphorothioate
  modified_base 3: mod_base = OTHER; note = 2'-O-methylguanosine-3'-phosphate
  modified_base 4: mod_base = OTHER; note = 2'-O-methylguanosine-3'-phosphate
  modified_base 5: mod_base = OTHER; note = 2'-O-methyluridine-3'-phosphate
  modified_base 6: mod_base = OTHER; note = 2'-O-methyladenosine-3'-phosphate
  modified_base 7: mod_base = OTHER; note = 2'-deoxy-2'-fluoroadenosine-3'-phosphate
  modified_base 8: mod_base = OTHER; note = 2'-O-methyluridine-3'-phosphate
  modified_base 9: mod_base = OTHER; note = 2'-deoxy-2'-fluoroguanosine-3'-phosphate
  modified_base 10: mod_base = OTHER; note = 2'-deoxy-2'-fluoroadenosine-3'-phosphate
  modified_base 11: mod_base = OTHER; note = 2'-deoxy-2'-fluoroguanosine-3'-phosphate
  modified_base 12: mod_base = OTHER; note = 2'-O-methylguanosine-3'-phosphate
  modified_base 13: mod_base = OTHER; note = 2'-O-methylguanosine-3'-phosphate
  modified_base 14: mod_base = OTHER; note = 2'-O-methyladenosine-3'-phosphate
  modified_base 15: mod_base = OTHER; note = 2'-O-methylcytidine-3'-phosphate
  modified_base 16: mod_base = OTHER; note = 2'-O-methyluridine-3'-phosphate
  modified_base 17: mod_base = OTHER; note = 2'-O-methylguanosine-3'-phosphate
  modified_base 18: mod_base = OTHER; note = 2'-O-methylguanosine-3'-phosphate
  modified_base 19: mod_base = OTHER; note = 2'-O-methyladenosine-3'-phosphate
  modified_base 20: mod_base = OTHER; note = 2'-O-methyladenosine-3'-phosphate
  modified_base 21: mod_base = OTHER; note = 2'-O-methyladenosine-3'-phosphate ((2S,4R)-1-[29-[[2-(acetylamino)-2-deoxy-beta-D-galactopyra nosyl]oxy]-14,14-bis[[3-[[3-[[5-[[2-(acetylamino)-2-deoxy-b eta-D-galactopyranosyl]oxy]-1-oxopentyl]amino]propyl]amino] -3-oxopropoxy]methyl]-1,12,19,25-tetraoxo-16-oxa-13,20,24-t riazanonacos-1-yl]-4-hydroxy-2-pyrrolidinyl)methyl ester
caggtaatgagggactggaaa

SEQ ID NO: 2822 - RNA, 21 nt, synthetic construct
  source 1..21: mol_type = other RNA
  modified_base 1: mod_base = OTHER; note = 2'-O-methylguanosine-3'-phosphorothioate
  modified_base 2: mod_base = OTHER; note = 2'-O-methyladenosine-3'-phosphorothioate
  modified_base 3: mod_base = OTHER; note = 2'-O-methylguanosine-3'-phosphate
  modified_base 4: mod_base = OTHER; note = 2'-O-methyladenosine-3'-phosphate
  modified_base 5: mod_base = OTHER; note = 2'-O-methylcytidine-3'-phosphate
  modified_base 6: mod_base = OTHER; note = 2'-O-methylcytidine-3'-phosphate
  modified_base 7: mod_base = OTHER; note = 2'-deoxy-2'-fluoroguanosine-3'-phosphate
  modified_base 8: mod_base = OTHER; note = 2'-O-methyladenosine-3'-phosphate
  modified_base 9: mod_base = OTHER; note = 2'-deoxy-2'-fluoroguanosine-3'-phosphate
  modified_base 10: mod_base = OTHER; note = 2'-deoxy-2'-fluorocytidine-3'-phosphate
  modified_base 11: mod_base = OTHER; note = 2'-deoxy-2'-fluoroguanosine-3'-phosphate
  modified_base 12: mod_base = OTHER; note = 2'-O-methylcytidine-3'-phosphate
  modified_base 13: mod_base = OTHER; note = 2'-O-methyluridine-3'-phosphate
  modified_base 14: mod_base = OTHER; note = 2'-O-methyluridine-3'-phosphate
  modified_base 15: mod_base = OTHER; note = 2'-O-methyluridine-3'-phosphate
  modified_base 16: mod_base = OTHER; note = 2'-O-methylcytidine-3'-phosphate
  modified_base 17: mod_base = OTHER; note = 2'-O-methyluridine-3'-phosphate
  modified_base 18: mod_base = OTHER; note = 2'-O-methylguanosine-3'-phosphate
  modified_base 19: mod_base = OTHER; note = 2'-O-methylguanosine-3'-phosphate
  modified_base 20: mod_base = OTHER; note = 2'-O-methyladenosine-3'-phosphate
  modified_base 21: mod_base = OTHER; note = 2'-O-methyladenosine-3'-phosphate ((2S,4R)-1-[29-[[2-(acetylamino)-2-deoxy-beta-D-galactopyra nosyl]oxy]-14,14-bis[[3-[[3-[[5-[[2-(acetylamino)-2-deoxy-b eta-D-galactopyranosyl]oxy]-1-oxopentyl]amino]propyl]amino] -3-oxopropoxy]methyl]-1,12,19,25-tetraoxo-16-oxa-13,20,24-t riazanonacos-1-yl]-4-hydroxy-2-pyrrolidinyl)methyl ester
gagaccgagcgctttctggaa

SEQ ID NO: 2823 - RNA, 21 nt, synthetic construct
  source 1..21: mol_type = other RNA
  modified_base 1: mod_base = OTHER; note = 2'-O-methylcytidine-3'-phosphorothioate
  modified_base 2: mod_base = OTHER; note = 2'-O-methyluridine-3'-phosphorothioate
  modified_base 3: mod_base = OTHER; note = 2'-O-methylguanosine-3'-phosphate
  modified_base 4: mod_base = OTHER; note = 2'-O-methylguanosine-3'-phosphate
  modified_base 5: mod_base = OTHER; note = 2'-O-methyladenosine-3'-phosphate
  modified_base 6: mod_base = OTHER; note = 2'-O-methyladenosine-3'-phosphate
  modified_base 7: mod_base = OTHER; note = 2'-deoxy-2'-fluoroadenosine-3'-phosphate
  modified_base 8: mod_base = OTHER; note = 2'-O-methyladenosine-3'-phosphate
  modified_base 9: mod_base = OTHER; note = 2'-deoxy-2'-fluoroguanosine-3'-phosphate
  modified_base 10: mod_base = OTHER; note = 2'-deoxy-2'-fluoroadenosine-3'-phosphate
  modified_base 11: mod_base = OTHER; note = 2'-deoxy-2'-fluoroguanosine-3'-phosphate
  modified_base 12: mod_base = OTHER; note = 2'-O-methylguanosine-3'-phosphate
  modified_base 13: mod_base = OTHER; note = 2'-O-methyladenosine-3'-phosphate
  modified_base 14: mod_base = OTHER; note = 2'-O-methylguanosine-3'-phosphate
  modified_base 15: mod_base = OTHER; note = 2'-O-methyluridine-3'-phosphate
  modified_base 16: mod_base = OTHER; note = 2'-O-methyluridine-3'-phosphate
  modified_base 17: mod_base = OTHER; note = 2'-O-methyluridine-3'-phosphate
  modified_base 18: mod_base = OTHER; note = 2'-O-methylcytidine-3'-phosphate
  modified_base 19: mod_base = OTHER; note = 2'-O-methylguanosine-3'-phosphate
  modified_base 20: mod_base = OTHER; note = 2'-O-methyladenosine-3'-phosphate
  modified_base 21: mod_base = OTHER; note = 2'-O-methyladenosine-3'-phosphate ((2S,4R)-1-[29-[[2-(acetylamino)-2-deoxy-beta-D-galactopyra nosyl]oxy]-14,14-bis[[3-[[3-[[5-[[2-(acetylamino)-2-deoxy-b eta-D-galactopyranosyl]oxy]-1-oxopentyl]amino]propyl]amino] -3-oxopropoxy]methyl]-1,12,19,25-tetraoxo-16-oxa-13,20,24-t riazanonacos-1-yl]-4-hydroxy-2-pyrrolidinyl)methyl ester
ctggaaaagaggagtttcgaa

SEQ ID NO: 2824 - RNA, 21 nt, synthetic construct
  source 1..21: mol_type = other RNA
  modified_base 1: mod_base = OTHER; note = 2'-O-methyluridine-3'-phosphorothioate
  modified_base 2: mod_base = OTHER; note = 2'-O-methyluridine-3'-phosphorothioate
  modified_base 3: mod_base = OTHER; note = 2'-O-methylcytidine-3'-phosphate
  modified_base 4: mod_base = OTHER; note = 2'-O-methylguanosine-3'-phosphate
  modified_base 5: mod_base = OTHER; note = 2'-O-methyladenosine-3'-phosphate
  modified_base 6: mod_base = OTHER; note = 2'-O-methylguanosine-3'-phosphate
  modified_base 7: mod_base = OTHER; note = 2'-deoxy-2'-fluoroguanosine-3'-phosphate
  modified_base 8: mod_base = OTHER; note = 2'-O-methyluridine-3'-phosphate
  modified_base 9: mod_base = OTHER; note = 2'-deoxy-2'-fluoroadenosine-3'-phosphate
  modified_base 10: mod_base = OTHER; note = 2'-deoxy-2'-fluoroguanosine-3'-phosphate
  modified_base 11: mod_base = OTHER; note = 2'-deoxy-2'-fluoroadenosine-3'-phosphate
  modified_base 12: mod_base = OTHER; note = 2'-O-methylguanosine-3'-phosphate
  modified_base 13: mod_base = OTHER; note = 2'-O-methyluridine-3'-phosphate
  modified_base 14: mod_base = OTHER; note = 2'-O-methyluridine-3'-phosphate
  modified_base 15: mod_base = OTHER; note = 2'-O-methyluridine-3'-phosphate
  modified_base 16: mod_base = OTHER; note = 2'-O-methylguanosine-3'-phosphate
  modified_base 17: mod_base = OTHER; note = 2'-O-methyladenosine-3'-phosphate
  modified_base 18: mod_base = OTHER; note = 2'-O-methyladenosine-3'-phosphate
  modified_base 19: mod_base = OTHER; note = 2'-O-methylguanosine-3'-phosphate
  modified_base 20: mod_base = OTHER; note = 2'-O-methylguanosine-3'-phosphate
  modified_base 21: mod_base = OTHER; note = 2'-O-methyladenosine-3'-phosphate ((2S,4R)-1-[29-[[2-(acetylamino)-2-deoxy-beta-D-galactopyra nosyl]oxy]-14,14-bis[[3-[[3-[[5-[[2-(acetylamino)-2-deoxy-b eta-D-galactopyranosyl]oxy]-1-oxopentyl]amino]propyl]amino] -3-oxopropoxy]methyl]-1,12,19,25-tetraoxo-16-oxa-13,20,24-t riazanonacos-1-yl]-4-hydroxy-2-pyrrolidinyl)methyl ester
ttcgaggtagagtttgaagga

SEQ ID NO: 2825 - RNA, 21 nt, synthetic construct
  source 1..21: mol_type = other RNA
  modified_base 1: mod_base = OTHER; note = 2'-O-methyluridine-3'-phosphorothioate
  modified_base 2: mod_base = OTHER; note = 2'-O-methylguanosine-3'-phosphorothioate
  modified_base 3: mod_base = OTHER; note = 2'-O-methyladenosine-3'-phosphate
  modified_base 4: mod_base = OTHER; note = 2'-O-methylguanosine-3'-phosphate
  modified_base 5: mod_base = OTHER; note = 2'-O-methylguanosine-3'-phosphate
  modified_base 6: mod_base = OTHER; note = 2'-O-methylguanosine-3'-phosphate
  modified_base 7: mod_base = OTHER; note = 2'-deoxy-2'-fluoroadenosine-3'-phosphate
  modified_base 8: mod_base = OTHER; note = 2'-O-methyluridine-3'-phosphate
  modified_base 9: mod_base = OTHER; note = 2'-deoxy-2'-fluoroguanosine-3'-phosphate
  modified_base 10: mod_base = OTHER; note = 2'-deoxy-2'-fluorouridine-3'-phosphate
  modified_base 11: mod_base = OTHER; note = 2'-deoxy-2'-fluoroguanosine-3'-phosphate
  modified_base 12: mod_base = OTHER; note = 2'-O-methyladenosine-3'-phosphate
  modified_base 13: mod_base = OTHER; note = 2'-O-methyladenosine-3'-phosphate
  modified_base 14: mod_base = OTHER; note = 2'-O-methyluridine-3'-phosphate
  modified_base 15: mod_base = OTHER; note = 2'-O-methyluridine-3'-phosphate
  modified_base 16: mod_base = OTHER; note = 2'-O-methylguanosine-3'-phosphate
  modified_base 17: mod_base = OTHER; note = 2'-O-methylcytidine-3'-phosphate
  modified_base 18: mod_base = OTHER; note = 2'-O-methylcytidine-3'-phosphate
  modified_base 19: mod_base = OTHER; note = 2'-O-methyluridine-3'-phosphate
  modified_base 20: mod_base = OTHER; note = 2'-O-methylguanosine-3'-phosphate
  modified_base 21: mod_base = OTHER; note = 2'-O-methyladenosine-3'-phosphate ((2S,4R)-1-[29-[[2-(acetylamino)-2-deoxy-beta-D-galactopyra nosyl]oxy]-14,14-bis[[3-[[3-[[5-[[2-(acetylamino)-2-deoxy-b eta-D-galactopyranosyl]oxy]-1-oxopentyl]amino]propyl]amino] -3-oxopropoxy]methyl]-1,12,19,25-tetraoxo-16-oxa-13,20,24-t riazanonacos-1-yl]-4-hydroxy-2-pyrrolidinyl)methyl ester
tgagggatgtgaattgcctga

SEQ ID NO: 2826 - RNA, 21 nt, synthetic construct
  source 1..21: mol_type = other RNA
  modified_base 1: mod_base = OTHER; note = 2'-O-methylguanosine-3'-phosphorothioate
  modified_base 2: mod_base = OTHER; note = 2'-O-methylcytidine-3'-phosphorothioate
  modified_base 3: mod_base = OTHER; note = 2'-O-methylcytidine-3'-phosphate
  modified_base 4: mod_base = OTHER; note = 2'-O-methyluridine-3'-phosphate
  modified_base 5: mod_base = OTHER; note = 2'-O-methylguanosine-3'-phosphate
  modified_base 6: mod_base = OTHER; note = 2'-O-methylcytidine-3'-phosphate
  modified_base 7: mod_base = OTHER; note = 2'-deoxy-2'-fluoroadenosine-3'-phosphate
  modified_base 8: mod_base = OTHER; note = 2'-O-methylguanosine-3'-phosphate
  modified_base 9: mod_base = OTHER; note = 2'-deoxy-2'-fluoroadenosine-3'-phosphate
  modified_base 10: mod_base = OTHER; note = 2'-deoxy-2'-fluoroguanosine-3'-phosphate
  modified_base 11: mod_base = OTHER; note = 2'-deoxy-2'-fluoroadenosine-3'-phosphate
  modified_base 12: mod_base = OTHER; note = 2'-O-methylguanosine-3'-phosphate
  modified_base 13: mod_base = OTHER; note = 2'-O-methyladenosine-3'-phosphate
  modified_base 14: mod_base = OTHER; note = 2'-O-methyladenosine-3'-phosphate
  modified_base 15: mod_base = OTHER; note = 2'-O-methylguanosine-3'-phosphate
  modified_base 16: mod_base = OTHER; note = 2'-O-methylcytidine-3'-phosphate
  modified_base 17: mod_base = OTHER; note = 2'-O-methylcytidine-3'-phosphate
  modified_base 18: mod_base = OTHER; note = 2'-O-methyluridine-3'-phosphate
  modified_base 19: mod_base = OTHER; note = 2'-O-methylguanosine-3'-phosphate
  modified_base 20: mod_base = OTHER; note = 2'-O-methyluridine-3'-phosphate
  modified_base 21: mod_base = OTHER; note = 2'-O-methyladenosine-3'-phosphate ((2S,4R)-1-[29-[[2-(acetylamino)-2-deoxy-beta-D-galactopyra nosyl]oxy]-14,14-bis[[3-[[3-[[5-[[2-(acetylamino)-2-deoxy-b eta-D-galactopyranosyl]oxy]-1-oxopentyl]amino]propyl]amino] -3-oxopropoxy]methyl]-1,12,19,25-tetraoxo-16-oxa-13,20,24-t riazanonacos-1-yl]-4-hydroxy-2-pyrrolidinyl)methyl ester
gcctgcagagagaagcctgta

SEQ ID NO: 2827 - RNA, 21 nt, synthetic construct
  source 1..21: mol_type = other RNA
  modified_base 1: mod_base = OTHER; note = 2'-O-methylcytidine-3'-phosphorothioate
  modified_base 2: mod_base = OTHER; note = 2'-O-methylcytidine-3'-phosphorothioate
  modified_base 3: mod_base = OTHER; note = 2'-O-methyluridine-3'-phosphate
  modified_base 4: mod_base = OTHER; note = 2'-O-methylguanosine-3'-phosphate
  modified_base 5: mod_base = OTHER; note = 2'-O-methyluridine-3'-phosphate
  modified_base 6: mod_base = OTHER; note = 2'-O-methyluridine-3'-phosphate
  modified_base 7: mod_base = OTHER; note = 2'-deoxy-2'-fluorouridine-3'-phosphate
  modified_base 8: mod_base = OTHER; note = 2'-O-methyluridine-3'-phosphate
  modified_base 9: mod_base = OTHER; note = 2'-deoxy-2'-fluoroguanosine-3'-phosphate
  modified_base 10: mod_base = OTHER; note = 2'-deoxy-2'-fluorouridine-3'-phosphate
  modified_base 11: mod_base = OTHER; note = 2'-deoxy-2'-fluorouridine-3'-phosphate
  modified_base 12: mod_base = OTHER; note = 2'-O-methylguanosine-3'-phosphate
  modified_base 13: mod_base = OTHER; note = 2'-O-methylguanosine-3'-phosphate
  modified_base 14: mod_base = OTHER; note = 2'-O-methyladenosine-3'-phosphate
  modified_base 15: mod_base = OTHER; note = 2'-O-methyladenosine-3'-phosphate
  modified_base 16: mod_base = OTHER; note = 2'-O-methylguanosine-3'-phosphate
  modified_base 17: mod_base = OTHER; note = 2'-O-methylguanosine-3'-phosphate
  modified_base 18: mod_base = OTHER; note = 2'-O-methyluridine-3'-phosphate
  modified_base 19: mod_base = OTHER; note = 2'-O-methyluridine-3'-phosphate
  modified_base 20: mod_base = OTHER; note = 2'-O-methyluridine-3'-phosphate
  modified_base 21: mod_base = OTHER; note = 2'-O-methyladenosine-3'-phosphate ((2S,4R)-1-[29-[[2-(acetylamino)-2-deoxy-beta-D-galactopyra nosyl]oxy]-14,14-bis[[3-[[3-[[5-[[2-(acetylamino)-2-deoxy-b eta-D-galactopyranosyl]oxy]-1-oxopentyl]amino]propyl]amino] -3-oxopropoxy]methyl]-1,12,19,25-tetraoxo-16-oxa-13,20,24-t riazanonacos-1-yl]-4-hydroxy-2-pyrrolidinyl)methyl ester
cctgttttgttggaaggttta

SEQ ID NO: 2828 - RNA, 21 nt, synthetic construct
  source 1..21: mol_type = other RNA
  modified_base 1: mod_base = OTHER; note = 2'-O-methylguanosine-3'-phosphorothioate
  modified_base 2: mod_base = OTHER; note = 2'-O-methylguanosine-3'-phosphorothioate
  modified_base 3: mod_base = OTHER; note = 2'-O-methyladenosine-3'-phosphate
  modified_base 4: mod_base = OTHER; note = 2'-O-methylguanosine-3'-phosphate
  modified_base 5: mod_base = OTHER; note = 2'-O-methyladenosine-3'-phosphate
  modified_base 6: mod_base = OTHER; note = 2'-O-methyluridine-3'-phosphate
  modified_base 7: mod_base = OTHER; note = 2'-deoxy-2'-fluoroguanosine-3'-phosphate
  modified_base 8: mod_base = OTHER; note = 2'-O-methylcytidine-3'-phosphate
  modified_base 9: mod_base = OTHER; note = 2'-deoxy-2'-fluoroadenosine-3'-phosphate
  modified_base 10: mod_base = OTHER; note = 2'-deoxy-2'-fluoroguanosine-3'-phosphate
  modified_base 11: mod_base = OTHER; note = 2'-deoxy-2'-fluoroadenosine-3'-phosphate
  modified_base 12: mod_base = OTHER; note = 2'-O-methylguanosine-3'-phosphate
  modified_base 13: mod_base = OTHER; note = 2'-O-methylguanosine-3'-phosphate
  modified_base 14: mod_base = OTHER; note = 2'-O-methyluridine-3'-phosphate
  modified_base 15: mod_base = OTHER; note = 2'-O-methyladenosine-3'-phosphate
  modified_base 16: mod_base = OTHER; note = 2'-O-methyladenosine-3'-phosphate
  modified_base 17: mod_base = OTHER; note = 2'-O-methyladenosine-3'-phosphate
  modified_base 18: mod_base = OTHER; note = 2'-O-methyladenosine-3'-phosphate
  modified_base 19: mod_base = OTHER; note = 2'-O-methylguanosine-3'-phosphate
  modified_base 20: mod_base = OTHER; note = 2'-O-methyluridine-3'-phosphate
  modified_base 21: mod_base = OTHER; note = 2'-O-methyladenosine-3'-phosphate ((2S,4R)-1-[29-[[2-(acetylamino)-2-deoxy-beta-D-galactopyra nosyl]oxy]-14,14-bis[[3-[[3-[[5-[[2-(acetylamino)-2-deoxy-b eta-D-galactopyranosyl]oxy]-1-oxopentyl]amino]propyl]amino] -3-oxopropoxy]methyl]-1,12,19,25-tetraoxo-16-oxa-13,20,24-t riazanonacos-1-yl]-4-hydroxy-2-pyrrolidinyl)methyl ester
ggagatgcagaggtaaaagta

SEQ ID NO: 2829 - RNA, 21 nt, synthetic construct
  source 1..21: mol_type = other RNA
  modified_base 1: mod_base = OTHER; note = 2'-O-methyladenosine-3'-phosphorothioate
  modified_base 2: mod_base = OTHER; note = 2'-O-methylguanosine-3'-phosphorothioate
  modified_base 3: mod_base = OTHER; note = 2'-O-methyluridine-3'-phosphate
  modified_base 4: mod_base = OTHER; note = 2'-O-methylguanosine-3'-phosphate
  modified_base 5: mod_base = OTHER; note = 2'-O-methyluridine-3'-phosphate
  modified_base 6: mod_base = OTHER; note = 2'-O-methylguanosine-3'-phosphate
  modified_base 7: mod_base = OTHER; note = 2'-deoxy-2'-fluoroadenosine-3'-phosphate
  modified_base 8: mod_base = OTHER; note = 2'-O-methylguanosine-3'-phosphate
  modified_base 9: mod_base = OTHER; note = 2'-deoxy-2'-fluorocytidine-3'-phosphate
  modified_base 10: mod_base = OTHER; note = 2'-deoxy-2'-fluoroadenosine-3'-phosphate
  modified_base 11: mod_base = OTHER; note = 2'-deoxy-2'-fluoroguanosine-3'-phosphate
  modified_base 12: mod_base = OTHER; note = 2'-O-methyluridine-3'-phosphate
  modified_base 13: mod_base = OTHER; note = 2'-O-methylguanosine-3'-phosphate
  modified_base 14: mod_base = OTHER; note = 2'-O-methyladenosine-3'-phosphate
  modified_base 15: mod_base = OTHER; note = 2'-O-methylguanosine-3'-phosphate
  modified_base 16: mod_base = OTHER; note = 2'-O-methyluridine-3'-phosphate
  modified_base 17: mod_base = OTHER; note = 2'-O-methyluridine-3'-phosphate
  modified_base 18: mod_base = OTHER; note = 2'-O-methyladenosine-3'-phosphate
  modified_base 19: mod_base = OTHER; note = 2'-O-methylcytidine-3'-phosphate
  modified_base 20: mod_base = OTHER; note = 2'-O-methyladenosine-3'-phosphate
  modified_base 21: mod_base = OTHER; note = 2'-O-methyladenosine-3'-phosphate ((2S,4R)-1-[29-[[2-(acetylamino)-2-deoxy-beta-D-galactopyra nosyl]oxy]-14,14-bis[[3-[[3-[[5-[[2-(acetylamino)-2-deoxy-b eta-D-galactopyranosyl]oxy]-1-oxopentyl]amino]propyl]amino] -3-oxopropoxy]methyl]-1,12,19,25-tetraoxo-16-oxa-13,20,24-t riazanonacos-1-yl]-4-hydroxy-2-pyrrolidinyl)methyl ester
agtgtgagcagtgagttacaa

SEQ ID NO: 2830 - RNA, 21 nt, synthetic construct
  source 1..21: mol_type = other RNA
  modified_base 1: mod_base = OTHER; note = 2'-O-methyladenosine-3'-phosphorothioate
  modified_base 2: mod_base = OTHER; note = 2'-O-methylguanosine-3'-phosphorothioate
  modified_base 3: mod_base = OTHER; note = 2'-O-methylcytidine-3'-phosphate
  modified_base 4: mod_base = OTHER; note = 2'-O-methylguanosine-3'-phosphate
  modified_base 5: mod_base = OTHER; note = 2'-O-methyladenosine-3'-phosphate
  modified_base 6: mod_base = OTHER; note = 2'-O-methylguanosine-3'-phosphate
  modified_base 7: mod_base = OTHER; note = 2'-deoxy-2'-fluoroadenosine-3'-phosphate
  modified_base 8: mod_base = OTHER; note = 2'-O-methylguanosine-3'-phosphate
  modified_base 9: mod_base = OTHER; note = 2'-deoxy-2'-fluoroguanosine-3'-phosphate
  modified_base 10: mod_base = OTHER; note = 2'-deoxy-2'-fluorocytidine-3'-phosphate
  modified_base 11: mod_base = OTHER; note = 2'-deoxy-2'-fluoroadenosine-3'-phosphate
  modified_base 12: mod_base = OTHER; note = 2'-O-methylguanosine-3'-phosphate
  modified_base 13: mod_base = OTHER; note = 2'-O-methyladenosine-3'-phosphate
  modified_base 14: mod_base = OTHER; note = 2'-O-methylguanosine-3'-phosphate
  modified_base 15: mod_base = OTHER; note = 2'-O-methyladenosine-3'-phosphate
  modified_base 16: mod_base = OTHER; note = 2'-O-methyladenosine-3'-phosphate
  modified_base 17: mod_base = OTHER; note = 2'-O-methyladenosine-3'-phosphate
  modified_base 18: mod_base = OTHER; note = 2'-O-methylguanosine-3'-phosphate
  modified_base 19: mod_base = OTHER; note = 2'-O-methyladenosine-3'-phosphate
  modified_base 20: mod_base = OTHER; note = 2'-O-methyladenosine-3'-phosphate
  modified_base 21: mod_base = OTHER; note = 2'-O-methyladenosine-3'-phosphate ((2S,4R)-1-[29-[[2-(acetylamino)-2-deoxy-beta-D-galactopyra nosyl]oxy]-14,14-bis[[3-[[3-[[5-[[2-(acetylamino)-2-deoxy-b eta-D-galactopyranosyl]oxy]-1-oxopentyl]amino]propyl]amino] -3-oxopropoxy]methyl]-1,12,19,25-tetraoxo-16-oxa-13,20,24-t riazanonacos-1-yl]-4-hydroxy-2-pyrrolidinyl)methyl ester
agcgagaggcagagaaagaaa

SEQ ID NO: 2831 - RNA, 21 nt, synthetic construct
  source 1..21: mol_type = other RNA
  modified_base 1: mod_base = OTHER; note = 2'-O-methylcytidine-3'-phosphorothioate
  modified_base 2: mod_base = OTHER; note = 2'-O-methyladenosine-3'-phosphorothioate
  modified_base 3: mod_base = OTHER; note = 2'-O-methyluridine-3'-phosphate
  modified_base 4: mod_base = OTHER; note = 2'-O-methylguanosine-3'-phosphate
  modified_base 5: mod_base = OTHER; note = 2'-O-methylcytidine-3'-phosphate
  modified_base 6: mod_base = OTHER; note = 2'-O-methyluridine-3'-phosphate
  modified_base 7: mod_base = OTHER; note = 2'-deoxy-2'-fluoroguanosine-3'-phosphate
  modified_base 8: mod_base = OTHER; note = 2'-O-methyladenosine-3'-phosphate
  modified_base 9: mod_base = OTHER; note = 2'-deoxy-2'-fluoroadenosine-3'-phosphate
  modified_base 10: mod_base = OTHER; note = 2'-deoxy-2'-fluoroguanosine-3'-phosphate
  modified_base 11: mod_base = OTHER; note = 2'-deoxy-2'-fluoroguanosine-3'-phosphate
  modified_base 12: mod_base = OTHER; note = 2'-O-methylguanosine-3'-phosphate
  modified_base 13: mod_base = OTHER; note = 2'-O-methyladenosine-3'-phosphate
  modified_base 14: mod_base = OTHER; note = 2'-O-methylcytidine-3'-phosphate
  modified_base 15: mod_base = OTHER; note = 2'-O-methylcytidine-3'-phosphate
  modified_base 16: mod_base = OTHER; note = 2'-O-methyluridine-3'-phosphate
  modified_base 17: mod_base = OTHER; note = 2'-O-methyluridine-3'-phosphate
  modified_base 18: mod_base = OTHER; note = 2'-O-methylguanosine-3'-phosphate
  modified_base 19: mod_base = OTHER; note = 2'-O-methyladenosine-3'-phosphate
  modified_base 20: mod_base = OTHER; note = 2'-O-methyladenosine-3'-phosphate
  modified_base 21: mod_base = OTHER; note = 2'-O-methyladenosine-3'-phosphate ((2S,4R)-1-[29-[[2-(acetylamino)-2-deoxy-beta-D-galactopyra nosyl]oxy]-14,14-bis[[3-[[3-[[5-[[2-(acetylamino)-2-deoxy-b eta-D-galactopyranosyl]oxy]-1-oxopentyl]amino]propyl]amino] -3-oxopropoxy]methyl]-1,12,19,25-tetraoxo-16-oxa-13,20,24-t riazanonacos-1-yl]-4-hydroxy-2-pyrrolidinyl)methyl ester
catgctgaagggaccttgaaa

SEQ ID NO: 2832 - RNA, 21 nt, synthetic construct
  source 1..21: mol_type = other RNA
  modified_base 1: mod_base = OTHER; note = 2'-O-methyladenosine-3'-phosphorothioate
  modified_base 2: mod_base = OTHER; note = 2'-O-methyladenosine-3'-phosphorothioate
  modified_base 3: mod_base = OTHER; note = 2'-O-methylguanosine-3'-phosphate
  modified_base 4: mod_base = OTHER; note = 2'-O-methylguanosine-3'-phosphate
  modified_base 5: mod_base = OTHER; note = 2'-O-methylguanosine-3'-phosphate
  modified_base 6: mod_base = OTHER; note = 2'-O-methyluridine-3'-phosphate
  modified_base 7: mod_base = OTHER; note = 2'-deoxy-2'-fluoroadenosine-3'-phosphate
  modified_base 8: mod_base = OTHER; note = 2'-O-methyladenosine-3'-phosphate
  modified_base 9: mod_base = OTHER; note = 2'-deoxy-2'-fluoroadenosine-3'-phosphate
  modified_base 10: mod_base = OTHER; note = 2'-deoxy-2'-fluoroguanosine-3'-phosphate
  modified_base 11: mod_base = OTHER; note = 2'-deoxy-2'-fluoroadenosine-3'-phosphate
  modified_base 12: mod_base = OTHER; note = 2'-O-methyladenosine-3'-phosphate
  modified_base 13: mod_base = OTHER; note = 2'-O-methylguanosine-3'-phosphate
  modified_base 14: mod_base = OTHER; note = 2'-O-methyluridine-3'-phosphate
  modified_base 15: mod_base = OTHER; note = 2'-O-methyluridine-3'-phosphate
  modified_base 16: mod_base = OTHER; note = 2'-O-methyluridine-3'-phosphate
  modified_base 17: mod_base = OTHER; note = 2'-O-methylguanosine-3'-phosphate
  modified_base 18: mod_base = OTHER; note = 2'-O-methyladenosine-3'-phosphate
  modified_base 19: mod_base = OTHER; note = 2'-O-methyluridine-3'-phosphate
  modified_base 20: mod_base = OTHER; note = 2'-O-methyladenosine-3'-phosphate
  modified_base 21: mod_base = OTHER; note = 2'-O-methyladenosine-3'-phosphate ((2S,4R)-1-[29-[[2-(acetylamino)-2-deoxy-beta-D-galactopyra nosyl]oxy]-14,14-bis[[3-[[3-[[5-[[2-(acetylamino)-2-deoxy-b eta-D-galactopyranosyl]oxy]-1-oxopentyl]amino]propyl]amino] -3-oxopropoxy]methyl]-1,12,19,25-tetraoxo-16-oxa-13,20,24-t riazanonacos-1-yl]-4-hydroxy-2-pyrrolidinyl)methyl ester
aagggtaaagaagtttgataa

SEQ ID NO: 2833 - RNA, 21 nt, synthetic construct
  source 1..21: mol_type = other RNA
  modified_base 1: mod_base = OTHER; note = 2'-O-methyluridine-3'-phosphorothioate
  modified_base 2: mod_base = OTHER; note = 2'-O-methyladenosine-3'-phosphorothioate
  modified_base 3: mod_base = OTHER; note = 2'-O-methyluridine-3'-phosphate
  modified_base 4: mod_base = OTHER; note = 2'-O-methyluridine-3'-phosphate
  modified_base 5: mod_base = OTHER; note = 2'-O-methyladenosine-3'-phosphate
  modified_base 6: mod_base = OTHER; note = 2'-O-methyladenosine-3'-phosphate
  modified_base 7: mod_base = OTHER; note = 2'-deoxy-2'-fluoroadenosine-3'-phosphate
  modified_base 8: mod_base = OTHER; note = 2'-O-methylguanosine-3'-phosphate
  modified_base 9: mod_base = OTHER; note = 2'-deoxy-2'-fluoroguanosine-3'-phosphate
  modified_base 10: mod_base = OTHER; note = 2'-deoxy-2'-fluoroadenosine-3'-phosphate
  modified_base 11: mod_base = OTHER; note = 2'-deoxy-2'-fluoroguanosine-3'-phosphate
  modified_base 12: mod_base = OTHER; note = 2'-O-methyluridine-3'-phosphate
  modified_base 13: mod_base = OTHER; note = 2'-O-methyluridine-3'-phosphate
  modified_base 14: mod_base = OTHER; note = 2'-O-methyladenosine-3'-phosphate
  modified_base 15: mod_base = OTHER; note = 2'-O-methyladenosine-3'-phosphate
  modified_base 16: mod_base = OTHER; note = 2'-O-methylguanosine-3'-phosphate
  modified_base 17: mod_base = OTHER; note = 2'-O-methyladenosine-3'-phosphate
  modified_base 18: mod_base = OTHER; note = 2'-O-methylguanosine-3'-phosphate
  modified_base 19: mod_base = OTHER; note = 2'-O-methyluridine-3'-phosphate
  modified_base 20: mod_base = OTHER; note = 2'-O-methyladenosine-3'-phosphate
  modified_base 21: mod_base = OTHER; note = 2'-O-methyladenosine-3'-phosphate ((2S,4R)-1-[29-[[2-(acetylamino)-2-deoxy-beta-D-galactopyra nosyl]oxy]-14,14-bis[[3-[[3-[[5-[[2-(acetylamino)-2-deoxy-b eta-D-galactopyranosyl]oxy]-1-oxopentyl]amino]propyl]amino] -3-oxopropoxy]methyl]-1,12,19,25-tetraoxo-16-oxa-13,20,24-t riazanonacos-1-yl]-4-hydroxy-2-pyrrolidinyl)methyl ester
tattaaaggagttaagagtaa

SEQ ID NO: 2834 - RNA, 21 nt, synthetic construct
  source 1..21: mol_type = other RNA
  modified_base 1: mod_base = OTHER; note = 2'-O-methylguanosine-3'-phosphorothioate
  modified_base 2: mod_base = OTHER; note = 2'-O-methyladenosine-3'-phosphorothioate
  modified_base 3: mod_base = OTHER; note = 2'-O-methylguanosine-3'-phosphate
  modified_base 4: mod_base = OTHER; note = 2'-O-methyluridine-3'-phosphate
  modified_base 5: mod_base = OTHER; note = 2'-O-methyladenosine-3'-phosphate
  modified_base 6: mod_base = OTHER; note = 2'-O-methylguanosine-3'-phosphate
  modified_base 7: mod_base = OTHER; note = 2'-deoxy-2'-fluorocytidine-3'-phosphate
  modified_base 8: mod_base = OTHER; note = 2'-O-methyladenosine-3'-phosphate
  modified_base 9: mod_base = OTHER; note = 2'-deoxy-2'-fluoroadenosine-3'-phosphate
  modified_base 10: mod_base = OTHER; note = 2'-deoxy-2'-fluoroguanosine-3'-phosphate
  modified_base 11: mod_base = OTHER; note = 2'-deoxy-2'-fluorouridine-3'-phosphate
  modified_base 12: mod_base = OTHER; note = 2'-O-methyluridine-3'-phosphate
  modified_base 13: mod_base = OTHER; note = 2'-O-methylcytidine-3'-phosphate
  modified_base 14: mod_base = OTHER; note = 2'-O-methyluridine-3'-phosphate
  modified_base 15: mod_base = OTHER; note = 2'-O-methyladenosine-3'-phosphate
  modified_base 16: mod_base = OTHER; note = 2'-O-methylguanosine-3'-phosphate
  modified_base 17: mod_base = OTHER; note = 2'-O-methyladenosine-3'-phosphate
  modified_base 18: mod_base = OTHER; note = 2'-O-methylguanosine-3'-phosphate
  modified_base 19: mod_base = OTHER; note = 2'-O-methyladenosine-3'-phosphate
  modified_base 20: mod_base = OTHER; note = 2'-O-methyladenosine-3'-phosphate
  modified_base 21: mod_base = OTHER; note = 2'-O-methyladenosine-3'-phosphate ((2S,4R)-1-[29-[[2-(acetylamino)-2-deoxy-beta-D-galactopyra nosyl]oxy]-14,14-bis[[3-[[3-[[5-[[2-(acetylamino)-2-deoxy-b eta-D-galactopyranosyl]oxy]-1-oxopentyl]amino]propyl]amino] -3-oxopropoxy]methyl]-1,12,19,25-tetraoxo-16-oxa-13,20,24-t riazanonacos-1-yl]-4-hydroxy-2-pyrrolidinyl)methyl ester
gagtagcaagttctagagaaa

SEQ ID NO: 2835 - RNA, 21 nt, synthetic construct
  source 1..21: mol_type = other RNA
  modified_base 1: mod_base = OTHER; note = 2'-O-methyladenosine-3'-phosphorothioate
  modified_base 2: mod_base = OTHER; note = 2'-O-methylguanosine-3'-phosphorothioate
  modified_base 3: mod_base = OTHER; note = 2'-O-methyladenosine-3'-phosphate
  modified_base 4: mod_base = OTHER; note = 2'-O-methylguanosine-3'-phosphate
  modified_base 5: mod_base = OTHER; note = 2'-O-methylcytidine-3'-phosphate
  modified_base 6: mod_base = OTHER; note = 2'-O-methyluridine-3'-phosphate
  modified_base 7: mod_base = OTHER; note = 2'-deoxy-2'-fluoroguanosine-3'-phosphate
  modified_base 8: mod_base = OTHER; note = 2'-O-methylcytidine-3'-phosphate
  modified_base 9: mod_base = OTHER; note = 2'-deoxy-2'-fluorouridine-3'-phosphate
  modified_base 10: mod_base = OTHER; note = 2'-deoxy-2'-fluorocytidine-3'-phosphate
  modified_base 11: mod_base = OTHER; note = 2'-deoxy-2'-fluorouridine-3'-phosphate
  modified_base 12: mod_base = OTHER; note = 2'-O-methylguanosine-3'-phosphate
  modified_base 13: mod_base = OTHER; note = 2'-O-methylguanosine-3'-phosphate
  modified_base 14: mod_base = OTHER; note = 2'-O-methyladenosine-3'-phosphate
  modified_base 15: mod_base = OTHER; note = 2'-O-methyladenosine-3'-phosphate
  modified_base 16: mod_base = OTHER; note = 2'-O-methyladenosine-3'-phosphate
  modified_base 17: mod_base = OTHER; note = 2'-O-methyladenosine-3'-phosphate
  modified_base 18: mod_base = OTHER; note = 2'-O-methyluridine-3'-phosphate
  modified_base 19: mod_base = OTHER; note = 2'-O-methylguanosine-3'-phosphate
  modified_base 20: mod_base = OTHER; note = 2'-O-methyluridine-3'-phosphate
  modified_base 21: mod_base = OTHER; note = 2'-O-methyladenosine-3'-phosphate ((2S,4R)-1-[29-[[2-(acetylamino)-2-deoxy-beta-D-galactopyra nosyl]oxy]-14,14-bis[[3-[[3-[[5-[[2-(acetylamino)-2-deoxy-b eta-D-galactopyranosyl]oxy]-1-oxopentyl]amino]propyl]amino] -3-oxopropoxy]methyl]-1,12,19,25-tetraoxo-16-oxa-13,20,24-t riazanonacos-1-yl]-4-hydroxy-2-pyrrolidinyl)methyl ester
agagctgctctggaaaatgta

SEQ ID NO: 2836 - RNA, 21 nt, synthetic construct
  source 1..21: mol_type = other RNA
  modified_base 1: mod_base = OTHER; note = 2'-O-methyluridine-3'-phosphorothioate
  modified_base 2: mod_base = OTHER; note = 2'-O-methylcytidine-3'-phosphorothioate
  modified_base 3: mod_base = OTHER; note = 2'-O-methylcytidine-3'-phosphate
  modified_base 4: mod_base = OTHER; note = 2'-O-methyluridine-3'-phosphate
  modified_base 5: mod_base = OTHER; note = 2'-O-methylcytidine-3'-phosphate
  modified_base 6: mod_base = OTHER; note = 2'-O-methyladenosine-3'-phosphate
  modified_base 7: mod_base = OTHER; note = 2'-deoxy-2'-fluorocytidine-3'-phosphate
  modified_base 8: mod_base = OTHER; note = 2'-O-methyladenosine-3'-phosphate
  modified_base 9: mod_base = OTHER; note = 2'-deoxy-2'-fluoroadenosine-3'-phosphate
  modified_base 10: mod_base = OTHER; note = 2'-deoxy-2'-fluorocytidine-3'-phosphate
  modified_base 11: mod_base = OTHER; note = 2'-deoxy-2'-fluorocytidine-3'-phosphate
  modified_base 12: mod_base = OTHER; note = 2'-O-methyladenosine-3'-phosphate
  modified_base 13: mod_base = OTHER; note = 2'-O-methylcytidine-3'-phosphate
  modified_base 14: mod_base = OTHER; note = 2'-O-methylcytidine-3'-phosphate
  modified_base 15: mod_base = OTHER; note = 2'-O-methyluridine-3'-phosphate
  modified_base 16: mod_base = OTHER; note = 2'-O-methyladenosine-3'-phosphate
  modified_base 17: mod_base = OTHER; note = 2'-O-methyladenosine-3'-phosphate
  modified_base 18: mod_base = OTHER; note = 2'-O-methyluridine-3'-phosphate
  modified_base 19: mod_base = OTHER; note = 2'-O-methylcytidine-3'-phosphate
  modified_base 20: mod_base = OTHER; note = 2'-O-methyladenosine-3'-phosphate
  modified_base 21: mod_base = OTHER; note = 2'-O-methyladenosine-3'-phosphate ((2S,4R)-1-[29-[[2-(acetylamino)-2-deoxy-beta-D-galactopyra nosyl]oxy]-14,14-bis[[3-[[3-[[5-[[2-(acetylamino)-2-deoxy-b eta-D-galactopyranosyl]oxy]-1-oxopentyl]amino]propyl]amino] -3-oxopropoxy]methyl]-1,12,19,25-tetraoxo-16-oxa-13,20,24-t riazanonacos-1-yl]-4-hydroxy-2-pyrrolidinyl)methyl ester
tcctcacaaccacctaatcaa

SEQ ID NO: 2837 - RNA, 21 nt, synthetic construct
  source 1..21: mol_type = other RNA
  modified_base 1: mod_base = OTHER; note = 2'-O-methyladenosine-3'-phosphorothioate
  modified_base 2: mod_base = OTHER; note = 2'-O-methyluridine-3'-phosphorothioate
  modified_base 3: mod_base = OTHER; note = 2'-O-methylcytidine-3'-phosphate
  modified_base 4: mod_base = OTHER; note = 2'-O-methyladenosine-3'-phosphate
  modified_base 5: mod_base = OTHER; note = 2'-O-methylguanosine-3'-phosphate
  modified_base 6: mod_base = OTHER; note = 2'-O-methylguanosine-3'-phosphate
  modified_base 7: mod_base = OTHER; note = 2'-deoxy-2'-fluorocytidine-3'-phosphate
  modified_base 8: mod_base = OTHER; note = 2'-O-methyluridine-3'-phosphate
  modified_base 9: mod_base = OTHER; note = 2'-deoxy-2'-fluoroguanosine-3'-phosphate
  modified_base 10: mod_base = OTHER; note = 2'-deoxy-2'-fluoroadenosine-3'-phosphate
  modified_base 11: mod_base = OTHER; note = 2'-deoxy-2'-fluoroguanosine-3'-phosphate
  modified_base 12: mod_base = OTHER; note = 2'-O-methylguanosine-3'-phosphate
  modified_base 13: mod_base = OTHER; note = 2'-O-methyluridine-3'-phosphate
  modified_base 14: mod_base = OTHER; note = 2'-O-methylguanosine-3'-phosphate
  modified_base 15: mod_base = OTHER; note = 2'-O-methyluridine-3'-phosphate
  modified_base 16: mod_base = OTHER; note = 2'-O-methylcytidine-3'-phosphate
  modified_base 17: mod_base = OTHER; note = 2'-O-methyluridine-3'-phosphate
  modified_base 18: mod_base = OTHER; note = 2'-O-methyluridine-3'-phosphate
  modified_base 19: mod_base = OTHER; note = 2'-O-methyladenosine-3'-phosphate
  modified_base 20: mod_base = OTHER; note = 2'-O-methyladenosine-3'-phosphate
  modified_base 21: mod_base = OTHER; note = 2'-O-methyladenosine-3'-phosphate ((2S,4R)-1-[29-[[2-(acetylamino)-2-deoxy-beta-D-galactopyra nosyl]oxy]-14,14-bis[[3-[[3-[[5-[[2-(acetylamino)-2-deoxy-b eta-D-galactopyranosyl]oxy]-1-oxopentyl]amino]propyl]amino] -3-oxopropoxy]methyl]-1,12,19,25-tetraoxo-16-oxa-13,20,24-t riazanonacos-1-yl]-4-hydroxy-2-pyrrolidinyl)methyl ester
atcaggctgaggtgtcttaaa

SEQ ID NO: 2838 - RNA, 21 nt, synthetic construct
  source 1..21: mol_type = other RNA
  modified_base 1: mod_base = OTHER; note = 2'-O-methyladenosine-3'-phosphorothioate
  modified_base 2: mod_base = OTHER; note = 2'-O-methyladenosine-3'-phosphorothioate
  modified_base 3: mod_base = OTHER; note = 2'-O-methylguanosine-3'-phosphate
  modified_base 4: mod_base = OTHER; note = 2'-O-methylcytidine-3'-phosphate
  modified_base 5: mod_base = OTHER; note = 2'-O-methylcytidine-3'-phosphate
  modified_base 6: mod_base = OTHER; note = 2'-O-methyluridine-3'-phosphate
  modified_base 7: mod_base = OTHER; note = 2'-deoxy-2'-fluorouridine-3'-phosphate
  modified_base 8: mod_base = OTHER; note = 2'-O-methyluridine-3'-phosphate
  modified_base 9: mod_base = OTHER; note = 2'-deoxy-2'-fluorouridine-3'-phosphate
  modified_base 10: mod_base = OTHER; note = 2'-deoxy-2'-fluoroguanosine-3'-phosphate
  modified_base 11: mod_base = OTHER; note = 2'-deoxy-2'-fluorocytidine-3'-phosphate
  modified_base 12: mod_base = OTHER; note = 2'-O-methyluridine-3'-phosphate
  modified_base 13: mod_base = OTHER; note = 2'-O-methylcytidine-3'-phosphate
  modified_base 14: mod_base = OTHER; note = 2'-O-methyladenosine-3'-phosphate
  modified_base 15: mod_base = OTHER; note = 2'-O-methylcytidine-3'-phosphate
  modified_base 16: mod_base = OTHER; note = 2'-O-methyladenosine-3'-phosphate
  modified_base 17: mod_base = OTHER; note = 2'-O-methyladenosine-3'-phosphate
  modified_base 18: mod_base = OTHER; note = 2'-O-methyladenosine-3'-phosphate
  modified_base 19: mod_base = OTHER; note = 2'-O-methyladenosine-3'-phosphate
  modified_base 20: mod_base = OTHER; note = 2'-O-methylcytidine-3'-phosphate
  modified_base 21: mod_base = OTHER; note = 2'-O-methyladenosine-3'-phosphate ((2S,4R)-1-[29-[[2-(acetylamino)-2-deoxy-beta-D-galactopyra nosyl]oxy]-14,14-bis[[3-[[3-[[5-[[2-(acetylamino)-2-deoxy-b eta-D-galactopyranosyl]oxy]-1-oxopentyl]amino]propyl]amino] -3-oxopropoxy]methyl]-1,12,19,25-tetraoxo-16-oxa-13,20,24-t riazanonacos-1-yl]-4-hydroxy-2-pyrrolidinyl)methyl ester
aagccttttgctcacaaaaca

SEQ ID NO: 2839 - RNA, 21 nt, synthetic construct
  source 1..21: mol_type = other RNA
  modified_base 1: mod_base = OTHER; note = 2'-O-methyladenosine-3'-phosphorothioate
  modified_base 2: mod_base = OTHER; note = 2'-O-methylcytidine-3'-phosphorothioate
  modified_base 3: mod_base = OTHER; note = 2'-O-methylcytidine-3'-phosphate
  modified_base 4: mod_base = OTHER; note = 2'-O-methyluridine-3'-phosphate
  modified_base 5: mod_base = OTHER; note = 2'-O-methylguanosine-3'-phosphate
  modified_base 6: mod_base = OTHER; note = 2'-O-methylguanosine-3'-phosphate
  modified_base 7: mod_base = OTHER; note = 2'-deoxy-2'-fluorocytidine-3'-phosphate
  modified_base 8: mod_base = OTHER; note = 2'-O-methyladenosine-3'-phosphate
  modified_base 9: mod_base = OTHER; note = 2'-deoxy-2'-fluorocytidine-3'-phosphate
  modified_base 10: mod_base = OTHER; note = 2'-deoxy-2'-fluoroadenosine-3'-phosphate
  modified_base 11: mod_base = OTHER; note = 2'-deoxy-2'-fluoroadenosine-3'-phosphate
  modified_base 12: mod_base = OTHER; note = 2'-O-methyluridine-3'-phosphate
  modified_base 13: mod_base = OTHER; note = 2'-O-methylguanosine-3'-phosphate
  modified_base 14: mod_base = OTHER; note = 2'-O-methylguanosine-3'-phosphate
  modified_base 15: mod_base = OTHER; note = 2'-O-methylcytidine-3'-phosphate
  modified_base 16: mod_base = OTHER; note = 2'-O-methyluridine-3'-phosphate
  modified_base 17: mod_base = OTHER; note = 2'-O-methyladenosine-3'-phosphate
  modified_base 18: mod_base = OTHER; note = 2'-O-methyladenosine-3'-phosphate
  modified_base 19: mod_base = OTHER; note = 2'-O-methyluridine-3'-phosphate
  modified_base 20: mod_base = OTHER; note = 2'-O-methyluridine-3'-phosphate
  modified_base 21: mod_base = OTHER; note = 2'-O-methyladenosine-3'-phosphate ((2S,4R)-1-[29-[[2-(acetylamino)-2-deoxy-beta-D-galactopyra nosyl]oxy]-14,14-bis[[3-[[3-[[5-[[2-(acetylamino)-2-deoxy-b eta-D-galactopyranosyl]oxy]-1-oxopentyl]amino]propyl]amino] -3-oxopropoxy]methyl]-1,12,19,25-tetraoxo-16-oxa-13,20,24-t riazanonacos-1-yl]-4-hydroxy-2-pyrrolidinyl)methyl ester
acctggcacaatggctaatta

SEQ ID NO: 2840 - RNA, 21 nt, synthetic construct
  source 1..21: mol_type = other RNA
  modified_base 1: mod_base = OTHER; note = 2'-O-methylguanosine-3'-phosphorothioate
  modified_base 2: mod_base = OTHER; note = 2'-O-methyluridine-3'-phosphorothioate
  modified_base 3: mod_base = OTHER; note = 2'-O-methylguanosine-3'-phosphate
  modified_base 4: mod_base = OTHER; note = 2'-O-methyladenosine-3'-phosphate
  modified_base 5: mod_base = OTHER; note = 2'-O-methyladenosine-3'-phosphate
  modified_base 6: mod_base = OTHER; note = 2'-O-methyladenosine-3'-phosphate
  modified_base 7: mod_base = OTHER; note = 2'-deoxy-2'-fluorocytidine-3'-phosphate
  modified_base 8: mod_base = OTHER; note = 2'-O-methyluridine-3'-phosphate
  modified_base 9: mod_base = OTHER; note = 2'-deoxy-2'-fluorouridine-3'-phosphate
  modified_base 10: mod_base = OTHER; note = 2'-deoxy-2'-fluorocytidine-3'-phosphate
  modified_base 11: mod_base = OTHER; note = 2'-deoxy-2'-fluorocytidine-3'-phosphate
  modified_base 12: mod_base = OTHER; note = 2'-O-methyluridine-3'-phosphate
  modified_base 13: mod_base = OTHER; note = 2'-O-methyladenosine-3'-phosphate
  modified_base 14: mod_base = OTHER; note = 2'-O-methyladenosine-3'-phosphate
  modified_base 15: mod_base = OTHER; note = 2'-O-methylguanosine-3'-phosphate
  modified_base 16: mod_base = OTHER; note = 2'-O-methyluridine-3'-phosphate
  modified_base 17: mod_base = OTHER; note = 2'-O-methyladenosine-3'-phosphate
  modified_base 18: mod_base = OTHER; note = 2'-O-methyluridine-3'-phosphate
  modified_base 19: mod_base = OTHER; note = 2'-O-methyladenosine-3'-phosphate
  modified_base 20: mod_base = OTHER; note = 2'-O-methyladenosine-3'-phosphate
  modified_base 21: mod_base = OTHER; note = 2'-O-methyladenosine-3'-phosphate ((2S,4R)-1-[29-[[2-(acetylamino)-2-deoxy-beta-D-galactopyra nosyl]oxy]-14,14-bis[[3-[[3-[[5-[[2-(acetylamino)-2-deoxy-b eta-D-galactopyranosyl]oxy]-1-oxopentyl]amino]propyl]amino] -3-oxopropoxy]methyl]-1,12,19,25-tetraoxo-16-oxa-13,20,24-t riazanonacos-1-yl]-4-hydroxy-2-pyrrolidinyl)methyl ester
gtgaaacttcctaagtataaa

SEQ ID NO: 2841 - RNA, 21 nt, synthetic construct
  source 1..21: mol_type = other RNA
  modified_base 1: mod_base = OTHER; note = 2'-O-methyluridine-3'-phosphorothioate
  modified_base 2: mod_base = OTHER; note = 2'-O-methyluridine-3'-phosphorothioate
  modified_base 3: mod_base = OTHER; note = 2'-O-methylguanosine-3'-phosphate
  modified_base 4: mod_base = OTHER; note = 2'-O-methyluridine-3'-phosphate
  modified_base 5: mod_base = OTHER; note = 2'-O-methylcytidine-3'-phosphate
  modified_base 6: mod_base = OTHER; note = 2'-O-methyluridine-3'-phosphate
  modified_base 7: mod_base = OTHER; note = 2'-deoxy-2'-fluoroguanosine-3'-phosphate
  modified_base 8: mod_base = OTHER; note = 2'-O-methyluridine-3'-phosphate
  modified_base 9: mod_base = OTHER; note = 2'-deoxy-2'-fluorouridine-3'-phosphate
  modified_base 10: mod_base = OTHER; note = 2'-deoxy-2'-fluorouridine-3'-phosphate
  modified_base 11: mod_base = OTHER; note = 2'-deoxy-2'-fluorouridine-3'-phosphate
  modified_base 12: mod_base = OTHER; note = 2'-O-methyluridine-3'-phosphate
  modified_base 13: mod_base = OTHER; note = 2'-O-methylguanosine-3'-phosphate
  modified_base 14: mod_base = OTHER; note = 2'-O-methyluridine-3'-phosphate
  modified_base 15: mod_base = OTHER; note = 2'-O-methyladenosine-3'-phosphate
  modified_base 16: mod_base = OTHER; note = 2'-O-methyladenosine-3'-phosphate
  modified_base 17: mod_base = OTHER; note = 2'-O-methylcytidine-3'-phosphate
  modified_base 18: mod_base = OTHER; note = 2'-O-methyluridine-3'-phosphate
  modified_base 19: mod_base = OTHER; note = 2'-O-methyluridine-3'-phosphate
  modified_base 20: mod_base = OTHER; note = 2'-O-methyladenosine-3'-phosphate
  modified_base 21: mod_base = OTHER; note = 2'-O-methyladenosine-3'-phosphate ((2S,4R)-1-[29-[[2-(acetylamino)-2-deoxy-beta-D-galactopyra nosyl]oxy]-14,14-bis[[3-[[3-[[5-[[2-(acetylamino)-2-deoxy-b eta-D-galactopyranosyl]oxy]-1-oxopentyl]amino]propyl]amino] -3-oxopropoxy]methyl]-1,12,19,25-tetraoxo-16-oxa-13,20,24-t riazanonacos-1-yl]-4-hydroxy-2-pyrrolidinyl)methyl ester
ttgtctgtttttgtaacttaa

SEQ ID NO: 2842 - RNA, 21 nt, synthetic construct
  source 1..21: mol_type = other RNA
  modified_base 1: mod_base = OTHER; note = 2'-O-methylcytidine-3'-phosphorothioate
  modified_base 2: mod_base = OTHER; note = 2'-O-methylcytidine-3'-phosphorothioate
  modified_base 3: mod_base = OTHER; note = 2'-O-methyluridine-3'-phosphate
  modified_base 4: mod_base = OTHER; note = 2'-O-methylguanosine-3'-phosphate
  modified_base 5: mod_base = OTHER; note = 2'-O-methylguanosine-3'-phosphate
  modified_base 6: mod_base = OTHER; note = 2'-O-methylcytidine-3'-phosphate
  modified_base 7: mod_base = OTHER; note = 2'-deoxy-2'-fluorocytidine-3'-phosphate
  modified_base 8: mod_base = OTHER; note = 2'-O-methyladenosine-3'-phosphate
  modified_base 9: mod_base = OTHER; note = 2'-deoxy-2'-fluoroadenosine-3'-phosphate
  modified_base 10: mod_base = OTHER; note = 2'-deoxy-2'-fluorocytidine-3'-phosphate
  modified_base 11: mod_base = OTHER; note = 2'-deoxy-2'-fluoroadenosine-3'-phosphate
  modified_base 12: mod_base = OTHER; note = 2'-O-methyluridine-3'-phosphate
  modified_base 13: mod_base = OTHER; note = 2'-O-methylguanosine-3'-phosphate
  modified_base 14: mod_base = OTHER; note = 2'-O-methylguanosine-3'-phosphate
  modified_base 15: mod_base = OTHER; note = 2'-O-methyluridine-3'-phosphate
  modified_base 16: mod_base = OTHER; note = 2'-O-methylguanosine-3'-phosphate
  modified_base 17: mod_base = OTHER; note = 2'-O-methyladenosine-3'-phosphate
  modified_base 18: mod_base = OTHER; note = 2'-O-methyladenosine-3'-phosphate
  modified_base 19: mod_base = OTHER; note = 2'-O-methyladenosine-3'-phosphate
  modified_base 20: mod_base = OTHER; note = 2'-O-methylcytidine-3'-phosphate
  modified_base 21: mod_base = OTHER; note = 2'-O-methyladenosine-3'-phosphate ((2S,4R)-1-[29-[[2-(acetylamino)-2-deoxy-beta-D-galactopyra nosyl]oxy]-14,14-bis[[3-[[3-[[5-[[2-(acetylamino)-2-deoxy-b eta-D-galactopyranosyl]oxy]-1-oxopentyl]amino]propyl]amino] -3-oxopropoxy]methyl]-1,12,19,25-tetraoxo-16-oxa-13,20,24-t riazanonacos-1-yl]-4-hydroxy-2-pyrrolidinyl)methyl ester
cctggccaacatggtgaaaca

SEQ ID NO: 2843 - RNA, 21 nt, synthetic construct
  source 1..21: mol_type = other RNA
  modified_base 1: mod_base = OTHER; note = 2'-O-methylguanosine-3'-phosphorothioate
  modified_base 2: mod_base = OTHER; note = 2'-O-methyladenosine-3'-phosphorothioate
  modified_base 3: mod_base = OTHER; note = 2'-O-methyluridine-3'-phosphate
  modified_base 4: mod_base = OTHER; note = 2'-O-methylcytidine-3'-phosphate
  modified_base 5: mod_base = OTHER; note = 2'-O-methyladenosine-3'-phosphate
  modified_base 6: mod_base = OTHER; note = 2'-O-methylcytidine-3'-phosphate
  modified_base 7: mod_base = OTHER; note = 2'-deoxy-2'-fluoroadenosine-3'-phosphate
  modified_base 8: mod_base = OTHER; note = 2'-O-methyladenosine-3'-phosphate
  modified_base 9: mod_base = OTHER; note = 2'-deoxy-2'-fluoroguanosine-3'-phosphate
  modified_base 10: mod_base = OTHER; note = 2'-deoxy-2'-fluoroguanosine-3'-phosphate
  modified_base 11: mod_base = OTHER; note = 2'-deoxy-2'-fluorouridine-3'-phosphate
  modified_base 12: mod_base = OTHER; note = 2'-O-methylcytidine-3'-phosphate
  modified_base 13: mod_base = OTHER; note = 2'-O-methyladenosine-3'-phosphate
  modified_base 14: mod_base = OTHER; note = 2'-O-methylcytidine-3'-phosphate
  modified_base 15: mod_base = OTHER; note = 2'-O-methyluridine-3'-phosphate
  modified_base 16: mod_base = OTHER; note = 2'-O-methyladenosine-3'-phosphate
  modified_base 17: mod_base = OTHER; note = 2'-O-methylguanosine-3'-phosphate
  modified_base 18: mod_base = OTHER; note = 2'-O-methyladenosine-3'-phosphate
  modified_base 19: mod_base = OTHER; note = 2'-O-methyluridine-3'-phosphate
  modified_base 20: mod_base = OTHER; note = 2'-O-methylguanosine-3'-phosphate
  modified_base 21: mod_base = OTHER; note = 2'-O-methyladenosine-3'-phosphate ((2S,4R)-1-[29-[[2-(acetylamino)-2-deoxy-beta-D-galactopyra nosyl]oxy]-14,14-bis[[3-[[3-[[5-[[2-(acetylamino)-2-deoxy-b eta-D-galactopyranosyl]oxy]-1-oxopentyl]amino]propyl]amino] -3-oxopropoxy]methyl]-1,12,19,25-tetraoxo-16-oxa-13,20,24-t riazanonacos-1-yl]-4-hydroxy-2-pyrrolidinyl)methyl ester
gatcacaaggtcactagatga

SEQ ID NO: 2844 - RNA, 21 nt, synthetic construct
  source 1..21: mol_type = other RNA
  modified_base 1: mod_base = OTHER; note = 2'-O-methyladenosine-3'-phosphorothioate
  modified_base 2: mod_base = OTHER; note = 2'-O-methyladenosine-3'-phosphorothioate
  modified_base 3: mod_base = OTHER; note = 2'-O-methylcytidine-3'-phosphate
  modified_base 4: mod_base = OTHER; note = 2'-O-methyladenosine-3'-phosphate
  modified_base 5: mod_base = OTHER; note = 2'-O-methylcytidine-3'-phosphate
  modified_base 6: mod_base = OTHER; note = 2'-O-methyladenosine-3'-phosphate
  modified_base 7: mod_base = OTHER; note = 2'-deoxy-2'-fluoroadenosine-3'-phosphate
  modified_base 8: mod_base = OTHER; note = 2'-O-methyladenosine-3'-phosphate
  modified_base 9: mod_base = OTHER; note = 2'-deoxy-2'-fluoroadenosine-3'-phosphate
  modified_base 10: mod_base = OTHER; note = 2'-deoxy-2'-fluoroguanosine-3'-phosphate
  modified_base 11: mod_base = OTHER; note = 2'-deoxy-2'-fluorouridine-3'-phosphate
  modified_base 12: mod_base = OTHER; note = 2'-O-methyluridine-3'-phosphate
  modified_base 13: mod_base = OTHER; note = 2'-O-methyladenosine-3'-phosphate
  modified_base 14: mod_base = OTHER; note = 2'-O-methylguanosine-3'-phosphate
  modified_base 15: mod_base = OTHER; note = 2'-O-methylcytidine-3'-phosphate
  modified_base 16: mod_base = OTHER; note = 2'-O-methyluridine-3'-phosphate
  modified_base 17: mod_base = OTHER; note = 2'-O-methylguanosine-3'-phosphate
  modified_base 18: mod_base = OTHER; note = 2'-O-methyladenosine-3'-phosphate
  modified_base 19: mod_base = OTHER; note = 2'-O-methylguanosine-3'-phosphate
  modified_base 20: mod_base = OTHER; note = 2'-O-methylcytidine-3'-phosphate
  modified_base 21: mod_base = OTHER; note = 2'-O-methyladenosine-3'-phosphate ((2S,4R)-1-[29-[[2-(acetylamino)-2-deoxy-beta-D-galactopyra nosyl]oxy]-14,14-bis[[3-[[3-[[5-[[2-(acetylamino)-2-deoxy-b eta-D-galactopyranosyl]oxy]-1-oxopentyl]amino]propyl]amino] -3-oxopropoxy]methyl]-1,12,19,25-tetraoxo-16-oxa-13,20,24-t riazanonacos-1-yl]-4-hydroxy-2-pyrrolidinyl)methyl ester
aacacaaaagttagctgagca

SEQ ID NO: 2845 - RNA, 21 nt, synthetic construct
  source 1..21: mol_type = other RNA
  modified_base 1: mod_base = OTHER; note = 2'-O-methylcytidine-3'-phosphorothioate
  modified_base 2: mod_base = OTHER; note = 2'-O-methylcytidine-3'-phosphorothioate
  modified_base 3: mod_base = OTHER; note = 2'-O-methyladenosine-3'-phosphate
  modified_base 4: mod_base = OTHER; note = 2'-O-methylcytidine-3'-phosphate
  modified_base 5: mod_base = OTHER; note = 2'-O-methyluridine-3'-phosphate
  modified_base 6: mod_base = OTHER; note = 2'-O-methylcytidine-3'-phosphate
  modified_base 7: mod_base = OTHER; note = 2'-deoxy-2'-fluoroguanosine-3'-phosphate
  modified_base 8: mod_base = OTHER; note = 2'-O-methylguanosine-3'-phosphate
  modified_base 9: mod_base = OTHER; note = 2'-deoxy-2'-fluoroguanosine-3'-phosphate
  modified_base 10: mod_base = OTHER; note = 2'-deoxy-2'-fluoroadenosine-3'-phosphate
  modified_base 11: mod_base = OTHER; note = 2'-deoxy-2'-fluoroguanosine-3'-phosphate
  modified_base 12: mod_base = OTHER; note = 2'-O-methylguanosine-3'-phosphate
  modified_base 13: mod_base = OTHER; note = 2'-O-methylcytidine-3'-phosphate
  modified_base 14: mod_base = OTHER; note = 2'-O-methyluridine-3'-phosphate
  modified_base 15: mod_base = OTHER; note = 2'-O-methylguanosine-3'-phosphate
  modified_base 16: mod_base = OTHER; note = 2'-O-methyladenosine-3'-phosphate
  modified_base 17: mod_base = OTHER; note = 2'-O-methylguanosine-3'-phosphate
  modified_base 18: mod_base = OTHER; note = 2'-O-methyladenosine-3'-phosphate
  modified_base 19: mod_base = OTHER; note = 2'-O-methylcytidine-3'-phosphate
  modified_base 20: mod_base = OTHER; note = 2'-O-methyladenosine-3'-phosphate
  modified_base 21: mod_base = OTHER; note = 2'-O-methyladenosine-3'-phosphate ((2S,4R)-1-[29-[[2-(acetylamino)-2-deoxy-beta-D-galactopyra nosyl]oxy]-14,14-bis[[3-[[3-[[5-[[2-(acetylamino)-2-deoxy-b eta-D-galactopyranosyl]oxy]-1-oxopentyl]amino]propyl]amino] -3-oxopropoxy]methyl]-1,12,19,25-tetraoxo-16-oxa-13,20,24-t riazanonacos-1-yl]-4-hydroxy-2-pyrrolidinyl)methyl ester
ccactcgggaggctgagacaa

SEQ ID NO: 2846 - RNA, 21 nt, synthetic construct
  source 1..21: mol_type = other RNA
  modified_base 1: mod_base = OTHER; note = 2'-O-methyladenosine-3'-phosphorothioate
  modified_base 2: mod_base = OTHER; note = 2'-O-methylcytidine-3'-phosphorothioate
  modified_base 3: mod_base = OTHER; note = 2'-O-methyladenosine-3'-phosphate
  modified_base 4: mod_base = OTHER; note = 2'-O-methylguanosine-3'-phosphate
  modified_base 5: mod_base = OTHER; note = 2'-O-methylguanosine-3'-phosphate
  modified_base 6: mod_base = OTHER; note = 2'-O-methyladenosine-3'-phosphate
  modified_base 7: mod_base = OTHER; note = 2'-deoxy-2'-fluoroguanosine-3'-phosphate
  modified_base 8: mod_base = OTHER; note = 2'-O-methyladenosine-3'-phosphate
  modified_base 9: mod_base = OTHER; note = 2'-deoxy-2'-fluoroadenosine-3'-phosphate
  modified_base 10: mod_base = OTHER; note = 2'-deoxy-2'-fluorouridine-3'-phosphate
  modified_base 11: mod_base = OTHER; note = 2'-deoxy-2'-fluorocytidine-3'-phosphate
  modified_base 12: mod_base = OTHER; note = 2'-O-methylguanosine-3'-phosphate
  modified_base 13: mod_base = OTHER; note = 2'-O-methylcytidine-3'-phosphate
  modified_base 14: mod_base = OTHER; note = 2'-O-methyluridine-3'-phosphate
  modified_base 15: mod_base = OTHER; note = 2'-O-methyluridine-3'-phosphate
  modified_base 16: mod_base = OTHER; note = 2'-O-methyladenosine-3'-phosphate
  modified_base 17: mod_base = OTHER; note = 2'-O-methyladenosine-3'-phosphate
  modified_base 18: mod_base = OTHER; note = 2'-O-methyladenosine-3'-phosphate
  modified_base 19: mod_base = OTHER; note = 2'-O-methylcytidine-3'-phosphate
  modified_base 20: mod_base = OTHER; note = 2'-O-methylcytidine-3'-phosphate
  modified_base 21: mod_base = OTHER; note = 2'-O-methyladenosine-3'-phosphate ((2S,4R)-1-[29-[[2-(acetylamino)-2-deoxy-beta-D-galactopyra nosyl]oxy]-14,14-bis[[3-[[3-[[5-[[2-(acetylamino)-2-deoxy-b eta-D-galactopyranosyl]oxy]-1-oxopentyl]amino]propyl]amino] -3-oxopropoxy]methyl]-1,12,19,25-tetraoxo-16-oxa-13,20,24-t riazanonacos-1-yl]-4-hydroxy-2-pyrrolidinyl)methyl ester
acaggagaatcgcttaaacca

SEQ ID NO: 2847 - RNA, 21 nt, synthetic construct
  source 1..21: mol_type = other RNA
  modified_base 1: mod_base = OTHER; note = 2'-O-methyladenosine-3'-phosphorothioate
  modified_base 2: mod_base = OTHER; note = 2'-O-methylguanosine-3'-phosphorothioate
  modified_base 3: mod_base = OTHER; note = 2'-O-methyladenosine-3'-phosphate
  modified_base 4: mod_base = OTHER; note = 2'-O-methylguanosine-3'-phosphate
  modified_base 5: mod_base = OTHER; note = 2'-O-methyluridine-3'-phosphate
  modified_base 6: mod_base = OTHER; note = 2'-O-methyladenosine-3'-phosphate
  modified_base 7: mod_base = OTHER; note = 2'-deoxy-2'-fluorocytidine-3'-phosphate
  modified_base 8: mod_base = OTHER; note = 2'-O-methyladenosine-3'-phosphate
  modified_base 9: mod_base = OTHER; note = 2'-deoxy-2'-fluoroguanosine-3'-phosphate
  modified_base 10: mod_base = OTHER; note = 2'-deoxy-2'-fluorouridine-3'-phosphate
  modified_base 11: mod_base = OTHER; note = 2'-deoxy-2'-fluoroguanosine-3'-phosphate
  modified_base 12: mod_base = OTHER; note = 2'-O-methyladenosine-3'-phosphate
  modified_base 13: mod_base = OTHER; note = 2'-O-methylguanosine-3'-phosphate
  modified_base 14: mod_base = OTHER; note = 2'-O-methylcytidine-3'-phosphate
  modified_base 15: mod_base = OTHER; note = 2'-O-methylcytidine-3'-phosphate
  modified_base 16: mod_base = OTHER; note = 2'-O-methyladenosine-3'-phosphate
  modified_base 17: mod_base = OTHER; note = 2'-O-methyladenosine-3'-phosphate
  modified_base 18: mod_base = OTHER; note = 2'-O-methylguanosine-3'-phosphate
  modified_base 19: mod_base = OTHER; note = 2'-O-methyladenosine-3'-phosphate
  modified_base 20: mod_base = OTHER; note = 2'-O-methyluridine-3'-phosphate
  modified_base 21: mod_base = OTHER; note = 2'-O-methyladenosine-3'-phosphate ((2S,4R)-1-[29-[[2-(acetylamino)-2-deoxy-beta-D-galactopyra nosyl]oxy]-14,14-bis[[3-[[3-[[5-[[2-(acetylamino)-2-deoxy-b eta-D-galactopyranosyl]oxy]-1-oxopentyl]amino]propyl]amino] -3-oxopropoxy]methyl]-1,12,19,25-tetraoxo-16-oxa-13,20,24-t riazanonacos-1-yl]-4-hydroxy-2-pyrrolidinyl)methyl ester
agagtacagtgagccaagata

SEQ ID NO: 2848 - RNA, 21 nt, synthetic construct
  source 1..21: mol_type = other RNA
  modified_base 1: mod_base = OTHER; note = 2'-O-methyladenosine-3'-phosphorothioate
  modified_base 2: mod_base = OTHER; note = 2'-O-methylcytidine-3'-phosphorothioate
  modified_base 3: mod_base = OTHER; note = 2'-O-methyluridine-3'-phosphate
  modified_base 4: mod_base = OTHER; note = 2'-O-methylguanosine-3'-phosphate
  modified_base 5: mod_base = OTHER; note = 2'-O-methylcytidine-3'-phosphate
  modified_base 6: mod_base = OTHER; note = 2'-O-methyladenosine-3'-phosphate
  modified_base 7: mod_base = OTHER; note = 2'-deoxy-2'-fluorocytidine-3'-phosphate
  modified_base 8: mod_base = OTHER; note = 2'-O-methyluridine-3'-phosphate
  modified_base 9: mod_base = OTHER; note = 2'-deoxy-2'-fluorocytidine-3'-phosphate
  modified_base 10: mod_base = OTHER; note = 2'-deoxy-2'-fluorocytidine-3'-phosphate
  modified_base 11: mod_base = OTHER; note = 2'-deoxy-2'-fluoroguanosine-3'-phosphate
  modified_base 12: mod_base = OTHER; note = 2'-O-methylguanosine-3'-phosphate
  modified_base 13: mod_base = OTHER; note = 2'-O-methylcytidine-3'-phosphate
  modified_base 14: mod_base = OTHER; note = 2'-O-methylcytidine-3'-phosphate
  modified_base 15: mod_base = OTHER; note = 2'-O-methyluridine-3'-phosphate
  modified_base 16: mod_base = OTHER; note = 2'-O-methylguanosine-3'-phosphate
  modified_base 17: mod_base = OTHER; note = 2'-O-methyladenosine-3'-phosphate
  modified_base 18: mod_base = OTHER; note = 2'-O-methyluridine-3'-phosphate
  modified_base 19: mod_base = OTHER; note = 2'-O-methylguanosine-3'-phosphate
  modified_base 20: mod_base = OTHER; note = 2'-O-methyladenosine-3'-phosphate
  modified_base 21: mod_base = OTHER; note = 2'-O-methyladenosine-3'-phosphate ((2S,4R)-1-[29-[[2-(acetylamino)-2-deoxy-beta-D-galactopyra nosyl]oxy]-14,14-bis[[3-[[3-[[5-[[2-(acetylamino)-2-deoxy-b eta-D-galactopyranosyl]oxy]-1-oxopentyl]amino]propyl]amino] -3-oxopropoxy]methyl]-1,12,19,25-tetraoxo-16-oxa-13,20,24-t riazanonacos-1-yl]-4-hydroxy-2-pyrrolidinyl)methyl ester
actgcactccggcctgatgaa

SEQ ID NO: 2849 - RNA, 21 nt, synthetic construct
  source 1..21: mol_type = other RNA
  modified_base 1: mod_base = OTHER; note = 2'-O-methylguanosine-3'-phosphorothioate
  modified_base 2: mod_base = OTHER; note = 2'-O-methyladenosine-3'-phosphorothioate
  modified_base 3: mod_base = OTHER; note = 2'-O-methylguanosine-3'-phosphate
  modified_base 4: mod_base = OTHER; note = 2'-O-methylcytidine-3'-phosphate
  modified_base 5: mod_base = OTHER; note = 2'-O-methylguanosine-3'-phosphate
  modified_base 6: mod_base = OTHER; note = 2'-O-methyladenosine-3'-phosphate
  modified_base 7: mod_base = OTHER; note = 2'-deoxy-2'-fluoroguanosine-3'-phosphate
  modified_base 8: mod_base = OTHER; note = 2'-O-methyladenosine-3'-phosphate
  modified_base 9: mod_base = OTHER; note = 2'-deoxy-2'-fluorouridine-3'-phosphate
  modified_base 10: mod_base = OTHER; note = 2'-deoxy-2'-fluorouridine-3'-phosphate
  modified_base 11: mod_base = OTHER; note = 2'-deoxy-2'-fluorocytidine-3'-phosphate
  modified_base 12: mod_base = OTHER; note = 2'-O-methylcytidine-3'-phosphate
  modified_base 13: mod_base = OTHER; note = 2'-O-methylguanosine-3'-phosphate
  modified_base 14: mod_base = OTHER; note = 2'-O-methyluridine-3'-phosphate
  modified_base 15: mod_base = OTHER; note = 2'-O-methylcytidine-3'-phosphate
  modified_base 16: mod_base = OTHER; note = 2'-O-methyluridine-3'-phosphate
  modified_base 17: mod_base = OTHER; note = 2'-O-methyluridine-3'-phosphate
  modified_base 18: mod_base = OTHER; note = 2'-O-methyladenosine-3'-phosphate
  modified_base 19: mod_base = OTHER; note = 2'-O-methyladenosine-3'-phosphate
  modified_base 20: mod_base = OTHER; note = 2'-O-methyladenosine-3'-phosphate
  modified_base 21: mod_base = OTHER; note = 2'-O-methyladenosine-3'-phosphate ((2S,4R)-1-[29-[[2-(acetylamino)-2-deoxy-beta-D-galactopyra nosyl]oxy]-14,14-bis[[3-[[3-[[5-[[2-(acetylamino)-2-deoxy-b eta-D-galactopyranosyl]oxy]-1-oxopentyl]amino]propyl]amino] -3-oxopropoxy]methyl]-1,12,19,25-tetraoxo-16-oxa-13,20,24-t riazanonacos-1-yl]-4-hydroxy-2-pyrrolidinyl)methyl ester
gagcgagattccgtcttaaaa

SEQ ID NO: 2850 - RNA, 23 nt, synthetic construct
  source 1..23: mol_type = other RNA
  modified_base 1: mod_base = OTHER; note = 2'-O-methyluridine-3'-phosphorothioate 5'-(E)-Vinylphosphonate
  modified_base 2: mod_base = OTHER; note = 2'-deoxy-2'-fluorouridine-3'-phosphorothioate
  modified_base 3: mod_base = OTHER; note = 2'-O-methyluridine-3'-phosphate
  modified_base 4: mod_base = OTHER; note = 2'-O-methylcytidine-3'-phosphate
  modified_base 5: mod_base = OTHER; note = 2'-O-methyluridine-3'-phosphate
  modified_base 6: mod_base = OTHER; note = 2'-deoxy-2'-fluorouridine-3'-phosphate
  modified_base 7: mod_base = OTHER; note = 2'-O-methylguanosine-3'-phosphate
  modified_base 8: mod_base = OTHER; note = 2'-deoxy-2'-fluoroguanosine-3'-phosphate
  modified_base 9: mod_base = OTHER; note = 2'-deoxy-2'-fluoroguanosine-3'-phosphate
  modified_base 10: mod_base = OTHER; note = 2'-O-methylcytidine-3'-phosphate
  modified_base 11: mod_base = OTHER; note = 2'-O-methylcytidine-3'-phosphate
  modified_base 12: mod_base = OTHER; note = 2'-O-methyluridine-3'-phosphate
  modified_base 13: mod_base = OTHER; note = 2'-O-methyluridine-3'-phosphate
  modified_base 14: mod_base = OTHER; note = 2'-deoxy-2'-fluoroguanosine-3'-phosphate
  modified_base 15: mod_base = OTHER; note = 2'-O-methylcytidine-3'-phosphate
  modified_base 16: mod_base = OTHER; note = 2'-deoxy-2'-fluoroadenosine-3'-phosphate
  modified_base 17: mod_base = OTHER; note = 2'-O-methyladenosine-3'-phosphate
  modified_base 18: mod_base = OTHER; note = 2'-O-methylcytidine-3'-phosphate
  modified_base 19: mod_base = OTHER; note = 2'-O-methylcytidine-3'-phosphate
  modified_base 20: mod_base = OTHER; note = 2'-O-methylguanosine-3'-phosphate
  modified_base 21: mod_base = OTHER; note = 2'-O-methylcytidine-3'-phosphorothioate
  modified_base 22: mod_base = OTHER; note = 2'-O-methyluridine-3'-phosphorothioate
  modified_base 23: mod_base = OTHER; note = 2'-O-methylguanosine
tttcttgggccttgcaaccgctg

SEQ ID NO: 2851 - RNA, 23 nt, synthetic construct
  source 1..23: mol_type = other RNA
  modified_base 1: mod_base = OTHER; note = 2'-O-methyluridine-3'-phosphorothioate 5'-(E)-Vinylphosphonate
  modified_base 2: mod_base = OTHER; note = 2'-deoxy-2'-fluoroadenosine-3'-phosphorothioate
  modified_base 3: mod_base = OTHER; note = 2'-O-methyladenosine-3'-phosphate
  modified_base 4: mod_base = OTHER; note = 2'-O-methyluridine-3'-phosphate
  modified_base 5: mod_base = OTHER; note = 2'-O-methylguanosine-3'-phosphate
  modified_base 6: mod_base = OTHER; note = 2'-deoxy-2'-fluorocytidine-3'-phosphate
  modified_base 7: mod_base = OTHER; note = 2'-O-methyladenosine-3'-phosphate
  modified_base 8: mod_base = OTHER; note = 2'-deoxy-2'-fluorouridine-3'-phosphate
  modified_base 9: mod_base = OTHER; note = 2'-deoxy-2'-fluorouridine-3'-phosphate
  modified_base 10: mod_base = OTHER; note = 2'-O-methyluridine-3'-phosphate
  modified_base 11: mod_base = OTHER; note = 2'-O-methyluridine-3'-phosphate
  modified_base 12: mod_base = OTHER; note = 2'-O-methylcytidine-3'-phosphate
  modified_base 13: mod_base = OTHER; note = 2'-O-methylcytidine-3'-phosphate
  modified_base 14: mod_base = OTHER; note = 2'-deoxy-2'-fluorouridine-3'-phosphate
  modified_base 15: mod_base = OTHER; note = 2'-O-methyluridine-3'-phosphate
  modified_base 16: mod_base = OTHER; note = 2'-deoxy-2'-fluorocytidine-3'-phosphate
  modified_base 17: mod_base = OTHER; note = 2'-O-methylcytidine-3'-phosphate
  modified_base 18: mod_base = OTHER; note = 2'-O-methylcytidine-3'-phosphate
  modified_base 19: mod_base = OTHER; note = 2'-O-methyladenosine-3'-phosphate
  modified_base 20: mod_base = OTHER; note = 2'-O-methylguanosine-3'-phosphate
  modified_base 21: mod_base = OTHER; note = 2'-O-methylguanosine-3'-phosphorothioate
  modified_base 22: mod_base = OTHER; note = 2'-O-methyladenosine-3'-phosphorothioate
  modified_base 23: mod_base = OTHER; note = 2'-O-methyluridine
taatgcattttccttcccaggat

SEQ ID NO: 2852 - RNA, 23 nt, synthetic construct
  source 1..23: mol_type = other RNA
  modified_base 1: mod_base = OTHER; note = 2'-O-methyluridine-3'-phosphorothioate 5'-(E)-Vinylphosphonate
  modified_base 2: mod_base = OTHER; note = 2'-deoxy-2'-fluoroadenosine-3'-phosphorothioate
  modified_base 3: mod_base = OTHER; note = 2'-O-methyladenosine-3'-phosphate
  modified_base 4: mod_base = OTHER; note = 2'-O-methyladenosine-3'-phosphate
  modified_base 5: mod_base = OTHER; note = 2'-O-methylguanosine-3'-phosphate
  modified_base 6: mod_base = OTHER; note = 2'-deoxy-2'-fluorocytidine-3'-phosphate
  modified_base 7: mod_base = OTHER; note = 2'-O-methylcytidine-3'-phosphate
  modified_base 8: mod_base = OTHER; note = 2'-deoxy-2'-fluoroadenosine-3'-phosphate
  modified_base 9: mod_base = OTHER; note = 2'-deoxy-2'-fluorocytidine-3'-phosphate
  modified_base 10: mod_base = OTHER; note = 2'-O-methyladenosine-3'-phosphate
  modified_base 11: mod_base = OTHER; note = 2'-O-methyladenosine-3'-phosphate
  modified_base 12: mod_base = OTHER; note = 2'-O-methylguanosine-3'-phosphate
  modified_base 13: mod_base = OTHER; note = 2'-O-methyladenosine-3'-phosphate
  modified_base 14: mod_base = OTHER; note = 2'-deoxy-2'-fluoroadenosine-3'-phosphate
  modified_base 15: mod_base = OTHER; note = 2'-O-methyluridine-3'-phosphate
  modified_base 16: mod_base = OTHER; note = 2'-deoxy-2'-fluorocytidine-3'-phosphate
  modified_base 17: mod_base = OTHER; note = 2'-O-methylcytidine-3'-phosphate
  modified_base 18: mod_base = OTHER; note = 2'-O-methylguanosine-3'-phosphate
  modified_base 19: mod_base = OTHER; note = 2'-O-methylcytidine-3'-phosphate
  modified_base 20: mod_base = OTHER; note = 2'-O-methyladenosine-3'-phosphate
  modified_base 21: mod_base = OTHER; note = 2'-O-methylcytidine-3'-phosphorothioate
  modified_base 22: mod_base = OTHER; note = 2'-O-methyladenosine-3'-phosphorothioate
  modified_base 23: mod_base = OTHER; note = 2'-O-methylguanosine
taaagccacaagaatccgcacag

SEQ ID NO: 2853 - RNA, 23 nt, synthetic construct
  source 1..23: mol_type = other RNA
  modified_base 1: mod_base = OTHER; note = 2'-O-methyluridine-3'-phosphorothioate 5'-(E)-Vinylphosphonate
  modified_base 2: mod_base = OTHER; note = 2'-deoxy-2'-fluoroadenosine-3'-phosphorothioate
  modified_base 3: mod_base = OTHER; note = 2'-O-methylcytidine-3'-phosphate
  modified_base 4: mod_base = OTHER; note = 2'-O-methyladenosine-3'-phosphate
  modified_base 5: mod_base = OTHER; note = 2'-O-methyluridine-3'-phosphate
  modified_base 6: mod_base = OTHER; note = 2'-deoxy-2'-fluoroadenosine-3'-phosphate
  modified_base 7: mod_base = OTHER; note = 2'-O-methylguanosine-3'-phosphate
  modified_base 8: mod_base = OTHER; note = 2'-deoxy-2'-fluoroadenosine-3'-phosphate
  modified_base 9: mod_base = OTHER; note = 2'-deoxy-2'-fluoroadenosine-3'-phosphate
  modified_base 10: mod_base = OTHER; note = 2'-O-methyladenosine-3'-phosphate
  modified_base 11: mod_base = OTHER; note = 2'-O-methyladenosine-3'-phosphate
  modified_base 12: mod_base = OTHER; note = 2'-O-methylguanosine-3'-phosphate
  modified_base 13: mod_base = OTHER; note = 2'-O-methyladenosine-3'-phosphate
  modified_base 14: mod_base = OTHER; note = 2'-deoxy-2'-fluorouridine-3'-phosphate
  modified_base 15: mod_base = OTHER; note = 2'-O-methyladenosine-3'-phosphate
  modified_base 16: mod_base = OTHER; note = 2'-deoxy-2'-fluoroguanosine-3'-phosphate
  modified_base 17: mod_base = OTHER; note = 2'-O-methylguanosine-3'-phosphate
  modified_base 18: mod_base = OTHER; note = 2'-O-methylguanosine-3'-phosphate
  modified_base 19: mod_base = OTHER; note = 2'-O-methylcytidine-3'-phosphate
  modified_base 20: mod_base = OTHER; note = 2'-O-methylcytidine-3'-phosphate
  modified_base 21: mod_base = OTHER; note = 2'-O-methyladenosine-3'-phosphorothioate
  modified_base 22: mod_base = OTHER; note = 2'-O-methyladenosine-3'-phosphorothioate
  modified_base 23: mod_base = OTHER; note = 2'-O-methyladenosine
tacatagaaaagatagggccaaa

SEQ ID NO: 2854 - RNA, 23 nt, synthetic construct
  source 1..23: mol_type = other RNA
  modified_base 1: mod_base = OTHER; note = 2'-O-methyluridine-3'-phosphorothioate 5'-(E)-Vinylphosphonate
  modified_base 2: mod_base = OTHER; note = 2'-deoxy-2'-fluorouridine-3'-phosphorothioate
  modified_base 3: mod_base = OTHER; note = 2'-O-methyluridine-3'-phosphate
  modified_base 4: mod_base = OTHER; note = 2'-O-methyluridine-3'-phosphate
  modified_base 5: mod_base = OTHER; note = 2'-O-methylguanosine-3'-phosphate
  modified_base 6: mod_base = OTHER; note = 2'-deoxy-2'-fluoroguanosine-3'-phosphate
  modified_base 7: mod_base = OTHER; note = 2'-O-methyladenosine-3'-phosphate
  modified_base 8: mod_base = OTHER; note = 2'-deoxy-2'-fluorouridine-3'-phosphate
  modified_base 9: mod_base = OTHER; note = 2'-deoxy-2'-fluoroguanosine-3'-phosphate
  modified_base 10: mod_base = OTHER; note = 2'-O-methylguanosine-3'-phosphate
  modified_base 11: mod_base = OTHER; note = 2'-O-methylguanosine-3'-phosphate
  modified_base 12: mod_base = OTHER; note = 2'-O-methylcytidine-3'-phosphate
  modified_base 13: mod_base = OTHER; note = 2'-O-methyladenosine-3'-phosphate
  modified_base 14: mod_base = OTHER; note = 2'-deoxy-2'-fluorocytidine-3'-phosphate
  modified_base 15: mod_base = OTHER; note = 2'-O-methyladenosine-3'-phosphate
  modified_base 16: mod_base = OTHER; note = 2'-deoxy-2'-fluoroguanosine-3'-phosphate
  modified_base 17: mod_base = OTHER; note = 2'-O-methylcytidine-3'-phosphate
  modified_base 18: mod_base = OTHER; note = 2'-O-methyluridine-3'-phosphate
  modified_base 19: mod_base = OTHER; note = 2'-O-methyluridine-3'-phosphate
  modified_base 20: mod_base = OTHER; note = 2'-O-methylguanosine-3'-phosphate
  modified_base 21: mod_base = OTHER; note = 2'-O-methylguanosine-3'-phosphorothioate
  modified_base 22: mod_base = OTHER; note = 2'-O-methyladenosine-3'-phosphorothioate
  modified_base 23: mod_base = OTHER; note = 2'-O-methylcytidine
ttttggatgggcacagcttggac

SEQ ID NO: 2855 - RNA, 23 nt, synthetic construct
  source 1..23: mol_type = other RNA
  modified_base 1: mod_base = OTHER; note = 2'-O-methyluridine-3'-phosphorothioate 5'-(E)-Vinylphosphonate
  modified_base 2: mod_base = OTHER; note = 2'-deoxy-2'-fluorouridine-3'-phosphorothioate
  modified_base 3: mod_base = OTHER; note = 2'-O-methyluridine-3'-phosphate
  modified_base 4: mod_base = OTHER; note = 2'-O-methyluridine-3'-phosphate
  modified_base 5: mod_base = OTHER; note = 2'-O-methyluridine-3'-phosphate
  modified_base 6: mod_base = OTHER; note = 2'-deoxy-2'-fluoroguanosine-3'-phosphate
  modified_base 7: mod_base = OTHER; note = 2'-O-methylguanosine-3'-phosphate
  modified_base 8: mod_base = OTHER; note = 2'-deoxy-2'-fluorouridine-3'-phosphate
  modified_base 9: mod_base = OTHER; note = 2'-deoxy-2'-fluoroguanosine-3'-phosphate
  modified_base 10: mod_base = OTHER; note = 2'-O-methyluridine-3'-phosphate
  modified_base 11: mod_base = OTHER; note = 2'-O-methylcytidine-3'-phosphate
  modified_base 12: mod_base = OTHER; note = 2'-O-methyladenosine-3'-phosphate
  modified_base 13: mod_base = OTHER; note = 2'-O-methyluridine-3'-phosphate
  modified_base 14: mod_base = OTHER; note = 2'-deoxy-2'-fluorocytidine-3'-phosphate
  modified_base 15: mod_base = OTHER; note = 2'-O-methyluridine-3'-phosphate
  modified_base 16: mod_base = OTHER; note = 2'-deoxy-2'-fluorouridine-3'-phosphate
  modified_base 17: mod_base = OTHER; note = 2'-O-methylguanosine-3'-phosphate
  modified_base 18: mod_base = OTHER; note = 2'-O-methylguanosine-3'-phosphate
  modified_base 19: mod_base = OTHER; note = 2'-O-methyladenosine-3'-phosphate
  modified_base 20: mod_base = OTHER; note = 2'-O-methylcytidine-3'-phosphate
  modified_base 21: mod_base = OTHER; note = 2'-O-methyluridine-3'-phosphorothioate
  modified_base 22: mod_base = OTHER; note = 2'-O-methyluridine-3'-phosphorothioate
  modified_base 23: mod_base = OTHER; note = 2'-O-methyluridine
tttttggtgtcatcttggacttt

SEQ ID NO: 2856 - RNA, 23 nt, synthetic construct
  source 1..23: mol_type = other RNA
  modified_base 1: mod_base = OTHER; note = 2'-O-methyluridine-3'-phosphorothioate 5'-(E)-Vinylphosphonate
  modified_base 2: mod_base = OTHER; note = 2'-deoxy-2'-fluorouridine-3'-phosphorothioate
  modified_base 3: mod_base = OTHER; note = 2'-O-methylguanosine-3'-phosphate
  modified_base 4: mod_base = OTHER; note = 2'-O-methyladenosine-3'-phosphate
  modified_base 5: mod_base = OTHER; note = 2'-O-methylcytidine-3'-phosphate
  modified_base 6: mod_base = OTHER; note = 2'-deoxy-2'-fluoroadenosine-3'-phosphate
  modified_base 7: mod_base = OTHER; note = 2'-O-methyladenosine-3'-phosphate
  modified_base 8: mod_base = OTHER; note = 2'-deoxy-2'-fluorouridine-3'-phosphate
  modified_base 9: mod_base = OTHER; note = 2'-deoxy-2'-fluorouridine-3'-phosphate
  modified_base 10: mod_base = OTHER; note = 2'-O-methylguanosine-3'-phosphate
  modified_base 11: mod_base = OTHER; note = 2'-O-methyluridine-3'-phosphate
  modified_base 12: mod_base = OTHER; note = 2'-O-methylcytidine-3'-phosphate
  modified_base 13: mod_base = OTHER; note = 2'-O-methyluridine-3'-phosphate
  modified_base 14: mod_base = OTHER; note = 2'-deoxy-2'-fluorouridine-3'-phosphate
  modified_base 15: mod_base = OTHER; note = 2'-O-methylguanosine-3'-phosphate
  modified_base 16: mod_base = OTHER; note = 2'-deoxy-2'-fluoroadenosine-3'-phosphate
  modified_base 17: mod_base = OTHER; note = 2'-O-methyluridine-3'-phosphate
  modified_base 18: mod_base = OTHER; note = 2'-O-methylguanosine-3'-phosphate
  modified_base 19: mod_base = OTHER; note = 2'-O-methyladenosine-3'-phosphate
  modified_base 20: mod_base = OTHER; note = 2'-O-methylguanosine-3'-phosphate
  modified_base 21: mod_base = OTHER; note = 2'-O-methylguanosine-3'-phosphorothioate
  modified_base 22: mod_base = OTHER; note = 2'-O-methylguanosine-3'-phosphorothioate
  modified_base 23: mod_base = OTHER; note = 2'-O-methyluridine
ttgacaattgtcttgatgagggt

SEQ ID NO: 2857 - RNA, 23 nt, synthetic construct
  source 1..23: mol_type = other RNA
  modified_base 1: mod_base = OTHER; note = 2'-O-methyluridine-3'-phosphorothioate 5'-(E)-Vinylphosphonate
  modified_base 2: mod_base = OTHER; note = 2'-deoxy-2'-fluoroadenosine-3'-phosphorothioate
  modified_base 3: mod_base = OTHER; note = 2'-O-methylcytidine-3'-phosphate
  modified_base 4: mod_base = OTHER; note = 2'-O-methyluridine-3'-phosphate
  modified_base 5: mod_base = OTHER; note = 2'-O-methylguanosine-3'-phosphate
  modified_base 6: mod_base = OTHER; note = 2'-deoxy-2'-fluoroadenosine-3'-phosphate
  modified_base 7: mod_base = OTHER; note = 2'-O-methylcytidine-3'-phosphate
  modified_base 8: mod_base = OTHER; note = 2'-deoxy-2'-fluorouridine-3'-phosphate
  modified_base 9: mod_base = OTHER; note = 2'-deoxy-2'-fluoroguanosine-3'-phosphate
  modified_base 10: mod_base = OTHER; note = 2'-O-methylcytidine-3'-phosphate
  modified_base 11: mod_base = OTHER; note = 2'-O-methylguanosine-3'-phosphate
  modified_base 12: mod_base = OTHER; note = 2'-O-methyluridine-3'-phosphate
  modified_base 13: mod_base = OTHER; note = 2'-O-methylguanosine-3'-phosphate
  modified_base 14: mod_base = OTHER; note = 2'-deoxy-2'-fluorouridine-3'-phosphate
  modified_base 15: mod_base = OTHER; note = 2'-O-methylguanosine-3'-phosphate
  modified_base 16: mod_base = OTHER; note = 2'-deoxy-2'-fluorouridine-3'-phosphate
  modified_base 17: mod_base = OTHER; note = 2'-O-methylguanosine-3'-phosphate
  modified_base 18: mod_base = OTHER; note = 2'-O-methyladenosine-3'-phosphate
  modified_base 19: mod_base = OTHER; note = 2'-O-methyladenosine-3'-phosphate
  modified_base 20: mod_base = OTHER; note = 2'-O-methyladenosine-3'-phosphate
  modified_base 21: mod_base = OTHER; note = 2'-O-methyluridine-3'-phosphorothioate
  modified_base 22: mod_base = OTHER; note = 2'-O-methylguanosine-3'-phosphorothioate
  modified_base 23: mod_base = OTHER; note = 2'-O-methyluridine
tactgactgcgtgtgtgaaatgt

SEQ ID NO: 2858 - RNA, 23 nt, synthetic construct
  source 1..23: mol_type = other RNA
  modified_base 1: mod_base = OTHER; note = 2'-O-methyluridine-3'-phosphorothioate 5'-(E)-Vinylphosphonate
  modified_base 2: mod_base = OTHER; note = 2'-deoxy-2'-fluorouridine-3'-phosphorothioate
  modified_base 3: mod_base = OTHER; note = 2'-O-methylguanosine-3'-phosphate
  modified_base 4: mod_base = OTHER; note = 2'-O-methyladenosine-3'-phosphate
  modified_base 5: mod_base = OTHER; note = 2'-O-methylcytidine-3'-phosphate
  modified_base 6: mod_base = OTHER; note = 2'-deoxy-2'-fluorouridine-3'-phosphate
  modified_base 7: mod_base = OTHER; note = 2'-O-methyluridine-3'-phosphate
  modified_base 8: mod_base = OTHER; note = 2'-deoxy-2'-fluorouridine-3'-phosphate
  modified_base 9: mod_base = OTHER; note = 2'-deoxy-2'-fluorocytidine-3'-phosphate
  modified_base 10: mod_base = OTHER; note = 2'-O-methyluridine-3'-phosphate
  modified_base 11: mod_base = OTHER; note = 2'-O-methylguanosine-3'-phosphate
  modified_base 12: mod_base = OTHER; note = 2'-O-methyluridine-3'-phosphate
  modified_base 13: mod_base = OTHER; note = 2'-O-methyluridine-3'-phosphate
  modified_base 14: mod_base = OTHER; note = 2'-deoxy-2'-fluorouridine-3'-phosphate
  modified_base 15: mod_base = OTHER; note = 2'-O-methylguanosine-3'-phosphate
  modified_base 16: mod_base = OTHER; note = 2'-deoxy-2'-fluoroguanosine-3'-phosphate
  modified_base 17: mod_base = OTHER; note = 2'-O-methyladenosine-3'-phosphate
  modified_base 18: mod_base = OTHER; note = 2'-O-methylguanosine-3'-phosphate
  modified_base 19: mod_base = OTHER; note = 2'-O-methylguanosine-3'-phosphate
  modified_base 20: mod_base = OTHER; note = 2'-O-methyladenosine-3'-phosphate
  modified_base 21: mod_base = OTHER; note = 2'-O-methylguanosine-3'-phosphorothioate
  modified_base 22: mod_base = OTHER; note = 2'-O-methyladenosine-3'-phosphorothioate
  modified_base 23: mod_base = OTHER; note = 2'-O-methylcytidine
ttgactttctgtttggaggagac

SEQ ID NO: 2859 - RNA, 23 nt, synthetic construct
  source 1..23: mol_type = other RNA
  modified_base 1: mod_base = OTHER; note = 2'-O-methyluridine-3'-phosphorothioate 5'-(E)-Vinylphosphonate
  modified_base 2: mod_base = OTHER; note = 2'-deoxy-2'-fluoroadenosine-3'-phosphorothioate
  modified_base 3: mod_base = OTHER; note = 2'-O-methyladenosine-3'-phosphate
  modified_base 4: mod_base = OTHER; note = 2'-O-methyluridine-3'-phosphate
  modified_base 5: mod_base = OTHER; note = 2'-O-methylguanosine-3'-phosphate
  modified_base 6: mod_base = OTHER; note = 2'-deoxy-2'-fluoroadenosine-3'-phosphate
  modified_base 7: mod_base = OTHER; note = 2'-O-methyladenosine-3'-phosphate
  modified_base 8: mod_base = OTHER; note = 2'-deoxy-2'-fluoroguanosine-3'-phosphate
  modified_base 9: mod_base = OTHER; note = 2'-deoxy-2'-fluorouridine-3'-phosphate
  modified_base 10: mod_base = OTHER; note = 2'-O-methylcytidine-3'-phosphate
  modified_base 11: mod_base = OTHER; note = 2'-O-methylcytidine-3'-phosphate
  modified_base 12: mod_base = OTHER; note = 2'-O-methyladenosine-3'-phosphate
  modified_base 13: mod_base = OTHER; note = 2'-O-methyladenosine-3'-phosphate
  modified_base 14: mod_base = OTHER; note = 2'-deoxy-2'-fluoroadenosine-3'-phosphate
  modified_base 15: mod_base = OTHER; note = 2'-O-methylcytidine-3'-phosphate
  modified_base 16: mod_base = OTHER; note = 2'-deoxy-2'-fluorocytidine-3'-phosphate
  modified_base 17: mod_base = OTHER; note = 2'-O-methylguanosine-3'-phosphate
  modified_base 18: mod_base = OTHER; note = 2'-O-methylguanosine-3'-phosphate
  modified_base 19: mod_base = OTHER; note = 2'-O-methyluridine-3'-phosphate
  modified_base 20: mod_base = OTHER; note = 2'-O-methylguanosine-3'-phosphate
  modified_base 21: mod_base = OTHER; note = 2'-O-methyladenosine-3'-phosphorothioate
  modified_base 22: mod_base = OTHER; note = 2'-O-methylcytidine-3'-phosphorothioate
  modified_base 23: mod_base = OTHER; note = 2'-O-methyluridine
taatgaagtccaaaccggtgact

SEQ ID NO: 2860 - RNA, 23 nt, synthetic construct
  source 1..23: mol_type = other RNA
  modified_base 1: mod_base = OTHER; note = 2'-O-methyluridine-3'-phosphorothioate 5'-(E)-Vinylphosphonate
  modified_base 2: mod_base = OTHER; note = 2'-deoxy-2'-fluorocytidine-3'-phosphorothioate
  modified_base 3: mod_base = OTHER; note = 2'-O-methyladenosine-3'-phosphate
  modified_base 4: mod_base = OTHER; note = 2'-O-methyluridine-3'-phosphate
  modified_base 5: mod_base = OTHER; note = 2'-O-methylcytidine-3'-phosphate
  modified_base 6: mod_base = OTHER; note = 2'-deoxy-2'-fluorouridine-3'-phosphate
  modified_base 7: mod_base = OTHER; note = 2'-O-methyluridine-3'-phosphate
  modified_base 8: mod_base = OTHER; note = 2'-deoxy-2'-fluoroguanosine-3'-phosphate
  modified_base 9: mod_base = OTHER; note = 2'-deoxy-2'-fluoroguanosine-3'-phosphate
  modified_base 10: mod_base = OTHER; note = 2'-O-methyladenosine-3'-phosphate
  modified_base 11: mod_base = OTHER; note = 2'-O-methyluridine-3'-phosphate
  modified_base 12: mod_base = OTHER; note = 2'-O-methyladenosine-3'-phosphate
  modified_base 13: mod_base = OTHER; note = 2'-O-methyladenosine-3'-phosphate
  modified_base 14: mod_base = OTHER; note = 2'-deoxy-2'-fluoroguanosine-3'-phosphate
  modified_base 15: mod_base = OTHER; note = 2'-O-methylguanosine-3'-phosphate
  modified_base 16: mod_base = OTHER; note = 2'-deoxy-2'-fluorouridine-3'-phosphate
  modified_base 17: mod_base = OTHER; note = 2'-O-methylcytidine-3'-phosphate
  modified_base 18: mod_base = OTHER; note = 2'-O-methyladenosine-3'-phosphate
  modified_base 19: mod_base = OTHER; note = 2'-O-methylguanosine-3'-phosphate
  modified_base 20: mod_base = OTHER; note = 2'-O-methylguanosine-3'-phosphate
  modified_base 21: mod_base = OTHER; note = 2'-O-methyladenosine-3'-phosphorothioate
  modified_base 22: mod_base = OTHER; note = 2'-O-methyluridine-3'-phosphorothioate
  modified_base 23: mod_base = OTHER; note = 2'-O-methylguanosine
tcatcttggataaggtcaggatg

SEQ ID NO: 2861 - RNA, 23 nt, synthetic construct
  source 1..23: mol_type = other RNA
  modified_base 1: mod_base = OTHER; note = 2'-O-methyluridine-3'-phosphorothioate 5'-(E)-Vinylphosphonate
  modified_base 2: mod_base = OTHER; note = 2'-deoxy-2'-fluoroadenosine-3'-phosphorothioate
  modified_base 3: mod_base = OTHER; note = 2'-O-methyluridine-3'-phosphate
  modified_base 4: mod_base = OTHER; note = 2'-O-methylcytidine-3'-phosphate
  modified_base 5: mod_base = OTHER; note = 2'-O-methyluridine-3'-phosphate
  modified_base 6: mod_base = OTHER; note = 2'-deoxy-2'-fluoroguanosine-3'-phosphate
  modified_base 7: mod_base = OTHER; note = 2'-O-methyluridine-3'-phosphate
  modified_base 8: mod_base = OTHER; note = 2'-deoxy-2'-fluorouridine-3'-phosphate
  modified_base 9: mod_base = OTHER; note = 2'-deoxy-2'-fluoroguanosine-3'-phosphate
  modified_base 10: mod_base = OTHER; note = 2'-O-methylguanosine-3'-phosphate
  modified_base 11: mod_base = OTHER; note = 2'-O-methyluridine-3'-phosphate
  modified_base 12: mod_base = OTHER; note = 2'-O-methyladenosine-3'-phosphate
  modified_base 13: mod_base = OTHER; note = 2'-O-methylguanosine-3'-phosphate
  modified_base 14: mod_base = OTHER; note = 2'-deoxy-2'-fluoroadenosine-3'-phosphate
  modified_base 15: mod_base = OTHER; note = 2'-O-methylcytidine-3'-phosphate
  modified_base 16: mod_base = OTHER; note = 2'-deoxy-2'-fluorouridine-3'-phosphate
  modified_base 17: mod_base = OTHER; note = 2'-O-methylguanosine-3'-phosphate
  modified_base 18: mod_base = OTHER; note = 2'-O-methylcytidine-3'-phosphate
  modified_base 19: mod_base = OTHER; note = 2'-O-methylcytidine-3'-phosphate
  modified_base 20: mod_base = OTHER; note = 2'-O-methyladenosine-3'-phosphate
  modified_base 21: mod_base = OTHER; note = 2'-O-methylguanosine-3'-phosphorothioate
  modified_base 22: mod_base = OTHER; note = 2'-O-methyluridine-3'-phosphorothioate
  modified_base 23: mod_base = OTHER; note = 2'-O-methylguanosine
tatctgttggtagactgccagtg

SEQ ID NO: 2862 - RNA, 23 nt, synthetic construct
  source 1..23: mol_type = other RNA
  modified_base 1: mod_base = OTHER; note = 2'-O-methyluridine-3'-phosphorothioate 5'-(E)-Vinylphosphonate
  modified_base 2: mod_base = OTHER; note = 2'-deoxy-2'-fluoroadenosine-3'-phosphorothioate
  modified_base 3: mod_base = OTHER; note = 2'-O-methyladenosine-3'-phosphate
  modified_base 4: mod_base = OTHER; note = 2'-O-methylguanosine-3'-phosphate
  modified_base 5: mod_base = OTHER; note = 2'-O-methylguanosine-3'-phosphate
  modified_base 6: mod_base = OTHER; note = 2'-deoxy-2'-fluorocytidine-3'-phosphate
  modified_base 7: mod_base = OTHER; note = 2'-O-methyladenosine-3'-phosphate
  modified_base 8: mod_base = OTHER; note = 2'-deoxy-2'-fluorouridine-3'-phosphate
  modified_base 9: mod_base = OTHER; note = 2'-deoxy-2'-fluoroadenosine-3'-phosphate
  modified_base 10: mod_base = OTHER; note = 2'-O-methylcytidine-3'-phosphate
  modified_base 11: mod_base = OTHER; note = 2'-O-methyluridine-3'-phosphate
  modified_base 12: mod_base = OTHER; note = 2'-O-methylguanosine-3'-phosphate
  modified_base 13: mod_base = OTHER; note = 2'-O-methylguanosine-3'-phosphate
  modified_base 14: mod_base = OTHER; note = 2'-deoxy-2'-fluorouridine-3'-phosphate
  modified_base 15: mod_base = OTHER; note = 2'-O-methylguanosine-3'-phosphate
  modified_base 16: mod_base = OTHER; note = 2'-deoxy-2'-fluoroadenosine-3'-phosphate
  modified_base 17: mod_base = OTHER; note = 2'-O-methylguanosine-3'-phosphate
  modified_base 18: mod_base = OTHER; note = 2'-O-methylguanosine-3'-phosphate
  modified_base 19: mod_base = OTHER; note = 2'-O-methyladenosine-3'-phosphate
  modified_base 20: mod_base = OTHER; note = 2'-O-methyluridine-3'-phosphate
  modified_base 21: mod_base = OTHER; note = 2'-O-methylcytidine-3'-phosphorothioate
  modified_base 22: mod_base = OTHER; note = 2'-O-methyluridine-3'-phosphorothioate
  modified_base 23: mod_base = OTHER; note = 2'-O-methylguanosine
taaggcatactggtgaggatctg

SEQ ID NO: 2863 - RNA, 23 nt, synthetic construct
  source 1..23: mol_type = other RNA
  modified_base 1: mod_base = OTHER; note = 2'-O-methyluridine-3'-phosphorothioate 5'-(E)-Vinylphosphonate
  modified_base 2: mod_base = OTHER; note = 2'-deoxy-2'-fluorouridine-3'-phosphorothioate
  modified_base 3: mod_base = OTHER; note = 2'-O-methyluridine-3'-phosphate
  modified_base 4: mod_base = OTHER; note = 2'-O-methyluridine-3'-phosphate
  modified_base 5: mod_base = OTHER; note = 2'-O-methylguanosine-3'-phosphate
  modified_base 6: mod_base = OTHER; note = 2'-deoxy-2'-fluoroguanosine-3'-phosphate
  modified_base 7: mod_base = OTHER; note = 2'-O-methyladenosine-3'-phosphate
  modified_base 8: mod_base = OTHER; note = 2'-deoxy-2'-fluorouridine-3'-phosphate
  modified_base 9: mod_base = OTHER; note = 2'-deoxy-2'-fluorocytidine-3'-phosphate
  modified_base 10: mod_base = OTHER; note = 2'-O-methyladenosine-3'-phosphate
  modified_base 11: mod_base = OTHER; note = 2'-O-methylcytidine-3'-phosphate
  modified_base 12: mod_base = OTHER; note = 2'-O-methylguanosine-3'-phosphate
  modified_base 13: mod_base = OTHER; note = 2'-O-methyluridine-3'-phosphate
  modified_base 14: mod_base = OTHER; note = 2'-deoxy-2'-fluorouridine-3'-phosphate
  modified_base 15: mod_base = OTHER; note = 2'-O-methyluridine-3'-phosphate
  modified_base 16: mod_base = OTHER; note = 2'-deoxy-2'-fluorocytidine-3'-phosphate
  modified_base 17: mod_base = OTHER; note = 2'-O-methyluridine-3'-phosphate
  modified_base 18: mod_base = OTHER; note = 2'-O-methylguanosine-3'-phosphate
  modified_base 19: mod_base = OTHER; note = 2'-O-methylguanosine-3'-phosphate
  modified_base 20: mod_base = OTHER; note = 2'-O-methyladenosine-3'-phosphate
  modified_base 21: mod_base = OTHER; note = 2'-O-methyladenosine-3'-phosphorothioate
  modified_base 22: mod_base = OTHER; note = 2'-O-methylguanosine-3'-phosphorothioate
  modified_base 23: mod_base = OTHER; note = 2'-O-methylguanosine
ttttggatcacgtttctggaagg

SEQ ID NO: 2864 - RNA, 23 nt, synthetic construct
  source 1..23: mol_type = other RNA
  modified_base 1: mod_base = OTHER; note = 2'-O-methyluridine-3'-phosphorothioate 5'-(E)-Vinylphosphonate
  modified_base 2: mod_base = OTHER; note = 2'-deoxy-2'-fluorouridine-3'-phosphorothioate
  modified_base 3: mod_base = OTHER; note = 2'-O-methyluridine-3'-phosphate
  modified_base 4: mod_base = OTHER; note = 2'-O-methylcytidine-3'-phosphate
  modified_base 5: mod_base = OTHER; note = 2'-O-methyluridine-3'-phosphate
  modified_base 6: mod_base = OTHER; note = 2'-deoxy-2'-fluorocytidine-3'-phosphate
  modified_base 7: mod_base = OTHER; note = 2'-O-methylcytidine-3'-phosphate
  modified_base 8: mod_base = OTHER; note = 2'-deoxy-2'-fluoroadenosine-3'-phosphate
  modified_base 9: mod_base = OTHER; note = 2'-deoxy-2'-fluoroguanosine-3'-phosphate
  modified_base 10: mod_base = OTHER; note = 2'-O-methylguanosine-3'-phosphate
  modified_base 11: mod_base = OTHER; note = 2'-O-methyluridine-3'-phosphate
  modified_base 12: mod_base = OTHER; note = 2'-O-methylcytidine-3'-phosphate
  modified_base 13: mod_base = OTHER; note = 2'-O-methylguanosine-3'-phosphate
  modified_base 14: mod_base = OTHER; note = 2'-deoxy-2'-fluorouridine-3'-phosphate
  modified_base 15: mod_base = OTHER; note = 2'-O-methyluridine-3'-phosphate
  modified_base 16: mod_base = OTHER; note = 2'-deoxy-2'-fluoroguanosine-3'-phosphate
  modified_base 17: mod_base = OTHER; note = 2'-O-methylguanosine-3'-phosphate
  modified_base 18: mod_base = OTHER; note = 2'-O-methyladenosine-3'-phosphate
  modified_base 19: mod_base = OTHER; note = 2'-O-methyluridine-3'-phosphate
  modified_base 20: mod_base = OTHER; note = 2'-O-methyladenosine-3'-phosphate
  modified_base 21: mod_base = OTHER; note = 2'-O-methyluridine-3'-phosphorothioate
  modified_base 22: mod_base = OTHER; note = 2'-O-methyluridine-3'-phosphorothioate
  modified_base 23: mod_base = OTHER; note = 2'-O-methyluridine
tttctccaggtcgttggatattt

SEQ ID NO: 2865 - RNA, 23 nt, synthetic construct
  source 1..23: mol_type = other RNA
  modified_base 1: mod_base = OTHER; note = 2'-O-methyluridine-3'-phosphorothioate 5'-(E)-Vinylphosphonate
  modified_base 2: mod_base = OTHER; note = 2'-deoxy-2'-fluoroadenosine-3'-phosphorothioate
  modified_base 3: mod_base = OTHER; note = 2'-O-methylcytidine-3'-phosphate
  modified_base 4: mod_base = OTHER; note = 2'-O-methylguanosine-3'-phosphate
  modified_base 5: mod_base = OTHER; note = 2'-O-methyluridine-3'-phosphate
  modified_base 6: mod_base = OTHER; note = 2'-deoxy-2'-fluoroguanosine-3'-phosphate
  modified_base 7: mod_base = OTHER; note = 2'-O-methyladenosine-3'-phosphate
  modified_base 8: mod_base = OTHER; note = 2'-deoxy-2'-fluoroadenosine-3'-phosphate
  modified_base 9: mod_base = OTHER; note = 2'-deoxy-2'-fluoroguanosine-3'-phosphate
  modified_base 10: mod_base = OTHER; note = 2'-O-methyladenosine-3'-phosphate
  modified_base 11: mod_base = OTHER; note = 2'-O-methyladenosine-3'-phosphate
  modified_base 12: mod_base = OTHER; note = 2'-O-methylguanosine-3'-phosphate
  modified_base 13: mod_base = OTHER; note = 2'-O-methyladenosine-3'-phosphate
  modified_base 14: mod_base = OTHER; note = 2'-deoxy-2'-fluorouridine-3'-phosphate
  modified_base 15: mod_base = OTHER; note = 2'-O-methylcytidine-3'-phosphate
  modified_base 16: mod_base = OTHER; note = 2'-deoxy-2'-fluorocytidine-3'-phosphate
  modified_base 17: mod_base = OTHER; note = 2'-O-methylcytidine-3'-phosphate
  modified_base 18: mod_base = OTHER; note = 2'-O-methylguanosine-3'-phosphate
  modified_base 19: mod_base = OTHER; note = 2'-O-methylguanosine-3'-phosphate
  modified_base 20: mod_base = OTHER; note = 2'-O-methyladenosine-3'-phosphate
  modified_base 21: mod_base = OTHER; note = 2'-O-methylguanosine-3'-phosphorothioate
  modified_base 22: mod_base = OTHER; note = 2'-O-methylguanosine-3'-phosphorothioate
  modified_base 23: mod_base = OTHER; note = 2'-O-methyluridine
tacgtgaagaagatcccggaggt

SEQ ID NO: 2866 - RNA, 23 nt, synthetic construct
  source 1..23: mol_type = other RNA
  modified_base 1: mod_base = OTHER; note = 2'-O-methyluridine-3'-phosphorothioate 5'-(E)-Vinylphosphonate
  modified_base 2: mod_base = OTHER; note = 2'-deoxy-2'-fluorocytidine-3'-phosphorothioate
  modified_base 3: mod_base = OTHER; note = 2'-O-methyladenosine-3'-phosphate
  modified_base 4: mod_base = OTHER; note = 2'-O-methylguanosine-3'-phosphate
  modified_base 5: mod_base = OTHER; note = 2'-O-methylcytidine-3'-phosphate
  modified_base 6: mod_base = OTHER; note = 2'-deoxy-2'-fluorouridine-3'-phosphate
  modified_base 7: mod_base = OTHER; note = 2'-O-methylcytidine-3'-phosphate
  modified_base 8: mod_base = OTHER; note = 2'-deoxy-2'-fluorouridine-3'-phosphate
  modified_base 9: mod_base = OTHER; note = 2'-deoxy-2'-fluorouridine-3'-phosphate
  modified_base 10: mod_base = OTHER; note = 2'-O-methyladenosine-3'-phosphate
  modified_base 11: mod_base = OTHER; note = 2'-O-methylguanosine-3'-phosphate
  modified_base 12: mod_base = OTHER; note = 2'-O-methyladenosine-3'-phosphate
  modified_base 13: mod_base = OTHER; note = 2'-O-methylguanosine-3'-phosphate
  modified_base 14: mod_base = OTHER; note = 2'-deoxy-2'-fluoroadenosine-3'-phosphate
  modified_base 15: mod_base = OTHER; note = 2'-O-methyladenosine-3'-phosphate
  modified_base 16: mod_base = OTHER; note = 2'-deoxy-2'-fluoroguanosine-3'-phosphate
  modified_base 17: mod_base = OTHER; note = 2'-O-methylguanosine-3'-phosphate
  modified_base 18: mod_base = OTHER; note = 2'-O-methylcytidine-3'-phosphate
  modified_base 19: mod_base = OTHER; note = 2'-O-methylcytidine-3'-phosphate
  modified_base 20: mod_base = OTHER; note = 2'-O-methyladenosine-3'-phosphate
  modified_base 21: mod_base = OTHER; note = 2'-O-methylguanosine-3'-phosphorothioate
  modified_base 22: mod_base = OTHER; note = 2'-O-methylcytidine-3'-phosphorothioate
  modified_base 23: mod_base = OTHER; note = 2'-O-methyladenosine
tcagctcttagagaaggccagca

SEQ ID NO: 2867 - RNA, 23 nt, synthetic construct
  source 1..23: mol_type = other RNA
  modified_base 1: mod_base = OTHER; note = 2'-O-methyluridine-3'-phosphorothioate 5'-(E)-Vinylphosphonate
  modified_base 2: mod_base = OTHER; note = 2'-deoxy-2'-fluorouridine-3'-phosphorothioate
  modified_base 3: mod_base = OTHER; note = 2'-O-methylcytidine-3'-phosphate
  modified_base 4: mod_base = OTHER; note = 2'-O-methylcytidine-3'-phosphate
  modified_base 5: mod_base = OTHER; note = 2'-O-methyladenosine-3'-phosphate
  modified_base 6: mod_base = OTHER; note = 2'-deoxy-2'-fluoroadenosine-3'-phosphate
  modified_base 7: mod_base = OTHER; note = 2'-O-methylguanosine-3'-phosphate
  modified_base 8: mod_base = OTHER; note = 2'-deoxy-2'-fluoroguanosine-3'-phosphate
  modified_base 9: mod_base = OTHER; note = 2'-deoxy-2'-fluorouridine-3'-phosphate
  modified_base 10: mod_base = OTHER; note = 2'-O-methylcytidine-3'-phosphate
  modified_base 11: mod_base = OTHER; note = 2'-O-methyluridine-3'-phosphate
  modified_base 12: mod_base = OTHER; note = 2'-O-methylcytidine-3'-phosphate
  modified_base 13: mod_base = OTHER; note = 2'-O-methylcytidine-3'-phosphate
  modified_base 14: mod_base = OTHER; note = 2'-deoxy-2'-fluoroadenosine-3'-phosphate
  modified_base 15: mod_base = OTHER; note = 2'-O-methylguanosine-3'-phosphate
  modified_base 16: mod_base = OTHER; note = 2'-deoxy-2'-fluoroguanosine-3'-phosphate
  modified_base 17: mod_base = OTHER; note = 2'-O-methylcytidine-3'-phosphate
  modified_base 18: mod_base = OTHER; note = 2'-O-methylcytidine-3'-phosphate
  modified_base 19: mod_base = OTHER; note = 2'-O-methyladenosine-3'-phosphate
  modified_base 20: mod_base = OTHER; note = 2'-O-methylcytidine-3'-phosphate
  modified_base 21: mod_base = OTHER; note = 2'-O-methyluridine-3'-phosphorothioate
  modified_base 22: mod_base = OTHER; note = 2'-O-methylguanosine-3'-phosphorothioate
  modified_base 23: mod_base = OTHER; note = 2'-O-methylguanosine
ttccaaggtctccaggccactgg

SEQ ID NO: 2868 - RNA, 23 nt, synthetic construct
  source 1..23: mol_type = other RNA
  modified_base 1: mod_base = OTHER; note = 2'-O-methyluridine-3'-phosphorothioate 5'-(E)-Vinylphosphonate
  modified_base 2: mod_base = OTHER; note = 2'-deoxy-2'-fluorouridine-3'-phosphorothioate
  modified_base 3: mod_base = OTHER; note = 2'-O-methyladenosine-3'-phosphate
  modified_base 4: mod_base = OTHER; note = 2'-O-methylguanosine-3'-phosphate
  modified_base 5: mod_base = OTHER; note = 2'-O-methylcytidine-3'-phosphate
  modified_base 6: mod_base = OTHER; note = 2'-deoxy-2'-fluorocytidine-3'-phosphate
  modified_base 7: mod_base = OTHER; note = 2'-O-methyluridine-3'-phosphate
  modified_base 8: mod_base = OTHER; note = 2'-deoxy-2'-fluoroguanosine-3'-phosphate
  modified_base 9: mod_base = OTHER; note = 2'-deoxy-2'-fluoroadenosine-3'-phosphate
  modified_base 10: mod_base = OTHER; note = 2'-O-methyladenosine-3'-phosphate
  modified_base 11: mod_base = OTHER; note = 2'-O-methylguanosine-3'-phosphate
  modified_base 12: mod_base = OTHER; note = 2'-O-methylcytidine-3'-phosphate
  modified_base 13: mod_base = OTHER; note = 2'-O-methyluridine-3'-phosphate
  modified_base 14: mod_base = OTHER; note = 2'-deoxy-2'-fluorouridine-3'-phosphate
  modified_base 15: mod_base = OTHER; note = 2'-O-methylcytidine-3'-phosphate
  modified_base 16: mod_base = OTHER; note = 2'-deoxy-2'-fluorocytidine-3'-phosphate
  modified_base 17: mod_base = OTHER; note = 2'-O-methyladenosine-3'-phosphate
  modified_base 18: mod_base = OTHER; note = 2'-O-methylguanosine-3'-phosphate
  modified_base 19: mod_base = OTHER; note = 2'-O-methylguanosine-3'-phosphate
  modified_base 20: mod_base = OTHER; note = 2'-O-methyladenosine-3'-phosphate
  modified_base 21: mod_base = OTHER; note = 2'-O-methylcytidine-3'-phosphorothioate
  modified_base 22: mod_base = OTHER; note = 2'-O-methyladenosine-3'-phosphorothioate
  modified_base 23: mod_base = OTHER; note = 2'-O-methylcytidine
ttagcctgaagcttccaggacac

SEQ ID NO: 2869 - RNA, 23 nt, synthetic construct
  source 1..23: mol_type = other RNA
  modified_base 1: mod_base = OTHER; note = 2'-O-methyluridine-3'-phosphorothioate 5'-(E)-Vinylphosphonate
  modified_base 2: mod_base = OTHER; note = 2'-deoxy-2'-fluoroadenosine-3'-phosphorothioate
  modified_base 3: mod_base = OTHER; note = 2'-O-methylcytidine-3'-phosphate
  modified_base 4: mod_base = OTHER; note = 2'-O-methylcytidine-3'-phosphate
  modified_base 5: mod_base = OTHER; note = 2'-O-methyladenosine-3'-phosphate
  modified_base 6: mod_base = OTHER; note = 2'-deoxy-2'-fluorocytidine-3'-phosphate
  modified_base 7: mod_base = OTHER; note = 2'-O-methylcytidine-3'-phosphate
  modified_base 8: mod_base = OTHER; note = 2'-deoxy-2'-fluorouridine-3'-phosphate
  modified_base 9: mod_base = OTHER; note = 2'-deoxy-2'-fluorocytidine-3'-phosphate
  modified_base 10: mod_base = OTHER; note = 2'-O-methyluridine-3'-phosphate
  modified_base 11: mod_base = OTHER; note = 2'-O-methylguanosine-3'-phosphate
  modified_base 12: mod_base = OTHER; note = 2'-O-methyluridine-3'-phosphate
  modified_base 13: mod_base = OTHER; note = 2'-O-methylguanosine-3'-phosphate
  modified_base 14: mod_base = OTHER; note = 2'-deoxy-2'-fluoroguanosine-3'-phosphate
  modified_base 15: mod_base = OTHER; note = 2'-O-methyladenosine-3'-phosphate
  modified_base 16: mod_base = OTHER; note = 2'-deoxy-2'-fluoroguanosine-3'-phosphate
  modified_base 17: mod_base = OTHER; note = 2'-O-methyluridine-3'-phosphate
  modified_base 18: mod_base = OTHER; note = 2'-O-methyladenosine-3'-phosphate
  modified_base 19: mod_base = OTHER; note = 2'-O-methylguanosine-3'-phosphate
  modified_base 20: mod_base = OTHER; note = 2'-O-methylcytidine-3'-phosphate
  modified_base 21: mod_base = OTHER; note = 2'-O-methylcytidine-3'-phosphorothioate
  modified_base 22: mod_base = OTHER; note = 2'-O-methyluridine-3'-phosphorothioate
  modified_base 23: mod_base = OTHER; note = 2'-O-methylguanosine
taccacctctgtggagtagcctg

SEQ ID NO: 2870 - RNA, 23 nt, synthetic construct
  source 1..23: mol_type = other RNA
  modified_base 1: mod_base = OTHER; note = 2'-O-methyluridine-3'-phosphorothioate 5'-(E)-Vinylphosphonate
  modified_base 2: mod_base = OTHER; note = 2'-deoxy-2'-fluoroadenosine-3'-phosphorothioate
  modified_base 3: mod_base = OTHER; note = 2'-O-methylcytidine-3'-phosphate
  modified_base 4: mod_base = OTHER; note = 2'-O-methyladenosine-3'-phosphate
  modified_base 5: mod_base = OTHER; note = 2'-O-methylguanosine-3'-phosphate
  modified_base 6: mod_base = OTHER; note = 2'-deoxy-2'-fluorocytidine-3'-phosphate
  modified_base 7: mod_base = OTHER; note = 2'-O-methyladenosine-3'-phosphate
  modified_base 8: mod_base = OTHER; note = 2'-deoxy-2'-fluorouridine-3'-phosphate
  modified_base 9: mod_base = OTHER; note = 2'-deoxy-2'-fluoroguanosine-3'-phosphate
  modified_base 10: mod_base = OTHER; note = 2'-O-methyluridine-3'-phosphate
  modified_base 11: mod_base = OTHER; note = 2'-O-methylcytidine-3'-phosphate
  modified_base 12: mod_base = OTHER; note = 2'-O-methylcytidine-3'-phosphate
  modified_base 13: mod_base = OTHER; note = 2'-O-methyluridine-3'-phosphate
  modified_base 14: mod_base = OTHER; note = 2'-deoxy-2'-fluoroguanosine-3'-phosphate
  modified_base 15: mod_base = OTHER; note = 2'-O-methylcytidine-3'-phosphate
  modified_base 16: mod_base = OTHER; note = 2'-deoxy-2'-fluoroadenosine-3'-phosphate
  modified_base 17: mod_base = OTHER; note = 2'-O-methylguanosine-3'-phosphate
  modified_base 18: mod_base = OTHER; note = 2'-O-methyladenosine-3'-phosphate
  modified_base 19: mod_base = OTHER; note = 2'-O-methylguanosine-3'-phosphate
  modified_base 20: mod_base = OTHER; note = 2'-O-methyladenosine-3'-phosphate
  modified_base 21: mod_base = OTHER; note = 2'-O-methylcytidine-3'-phosphorothioate
  modified_base 22: mod_base = OTHER; note = 2'-O-methylcytidine-3'-phosphorothioate
  modified_base 23: mod_base = OTHER; note = 2'-O-methylcytidine
tacagcatgtcctgcagagaccc

SEQ ID NO: 2871 - RNA, 23 nt, synthetic construct
  source 1..23: mol_type = other RNA
  modified_base 1: mod_base = OTHER; note = 2'-O-methyluridine-3'-phosphorothioate 5'-(E)-Vinylphosphonate
  modified_base 2: mod_base = OTHER; note = 2'-deoxy-2'-fluoroadenosine-3'-phosphorothioate
  modified_base 3: mod_base = OTHER; note = 2'-O-methylguanosine-3'-phosphate
  modified_base 4: mod_base = OTHER; note = 2'-O-methylguanosine-3'-phosphate
  modified_base 5: mod_base = OTHER; note = 2'-O-methyladenosine-3'-phosphate
  modified_base 6: mod_base = OTHER; note = 2'-deoxy-2'-fluoroadenosine-3'-phosphate
  modified_base 7: mod_base = OTHER; note = 2'-O-methylguanosine-3'-phosphate
  modified_base 8: mod_base = OTHER; note = 2'-deoxy-2'-fluoroadenosine-3'-phosphate
  modified_base 9: mod_base = OTHER; note = 2'-deoxy-2'-fluoroguanosine-3'-phosphate
  modified_base 10: mod_base = OTHER; note = 2'-O-methyluridine-3'-phosphate
  modified_base 11: mod_base = OTHER; note = 2'-O-methylguanosine-3'-phosphate
  modified_base 12: mod_base = OTHER; note = 2'-O-methyladenosine-3'-phosphate
  modified_base 13: mod_base = OTHER; note = 2'-O-methylcytidine-3'-phosphate
  modified_base 14: mod_base = OTHER; note = 2'-deoxy-2'-fluorocytidine-3'-phosphate
  modified_base 15: mod_base = OTHER; note = 2'-O-methyluridine-3'-phosphate
  modified_base 16: mod_base = OTHER; note = 2'-deoxy-2'-fluorouridine-3'-phosphate
  modified_base 17: mod_base = OTHER; note = 2'-O-methylcytidine-3'-phosphate
  modified_base 18: mod_base = OTHER; note = 2'-O-methyladenosine-3'-phosphate
  modified_base 19: mod_base = OTHER; note = 2'-O-methyladenosine-3'-phosphate
  modified_base 20: mod_base = OTHER; note = 2'-O-methylguanosine-3'-phosphate
  modified_base 21: mod_base = OTHER; note = 2'-O-methylguanosine-3'-phosphorothioate
  modified_base 22: mod_base = OTHER; note = 2'-O-methylcytidine-3'-phosphorothioate
  modified_base 23: mod_base = OTHER; note = 2'-O-methylcytidine
taggaagagtgaccttcaaggcc

SEQ ID NO: 2872 - RNA, 23 nt, synthetic construct
  source 1..23: mol_type = other RNA
  modified_base 1: mod_base = OTHER; note = 2'-O-methyluridine-3'-phosphorothioate 5'-(E)-Vinylphosphonate
  modified_base 2: mod_base = OTHER; note = 2'-deoxy-2'-fluorouridine-3'-phosphorothioate
  modified_base 3: mod_base = OTHER; note = 2'-O-methyluridine-3'-phosphate
  modified_base 4: mod_base = OTHER; note = 2'-O-methyladenosine-3'-phosphate
  modified_base 5: mod_base = OTHER; note = 2'-O-methyladenosine-3'-phosphate
  modified_base 6: mod_base = OTHER; note = 2'-deoxy-2'-fluorocytidine-3'-phosphate
  modified_base 7: mod_base = OTHER; note = 2'-O-methylguanosine-3'-phosphate
  modified_base 8: mod_base = OTHER; note = 2'-deoxy-2'-fluorouridine-3'-phosphate
  modified_base 9: mod_base = OTHER; note = 2'-deoxy-2'-fluoroadenosine-3'-phosphate
  modified_base 10: mod_base = OTHER; note = 2'-O-methylguanosine-3'-phosphate
  modified_base 11: mod_base = OTHER; note = 2'-O-methyluridine-3'-phosphate
  modified_base 12: mod_base = OTHER; note = 2'-O-methylcytidine-3'-phosphate
  modified_base 13: mod_base = OTHER; note = 2'-O-methylcytidine-3'-phosphate
  modified_base 14: mod_base = OTHER; note = 2'-deoxy-2'-fluorouridine-3'-phosphate
  modified_base 15: mod_base = OTHER; note = 2'-O-methyluridine-3'-phosphate
  modified_base 16: mod_base = OTHER; note = 2'-deoxy-2'-fluoroguanosine-3'-phosphate
  modified_base 17: mod_base = OTHER; note = 2'-O-methylcytidine-3'-phosphate
  modified_base 18: mod_base = OTHER; note = 2'-O-methyladenosine-3'-phosphate
  modified_base 19: mod_base = OTHER; note = 2'-O-methylguanosine-3'-phosphate
  modified_base 20: mod_base = OTHER; note = 2'-O-methylguanosine-3'-phosphate
  modified_base 21: mod_base = OTHER; note = 2'-O-methyladenosine-3'-phosphorothioate
  modified_base 22: mod_base = OTHER; note = 2'-O-methyladenosine-3'-phosphorothioate
  modified_base 23: mod_base = OTHER; note = 2'-O-methylguanosine
tttaacgtagtccttgcaggaag

SEQ ID NO: 2873 - RNA, 23 nt, synthetic construct
  source 1..23: mol_type = other RNA
  modified_base 1: mod_base = OTHER; note = 2'-O-methyluridine-3'-phosphorothioate 5'-(E)-Vinylphosphonate
  modified_base 2: mod_base = OTHER; note = 2'-deoxy-2'-fluorocytidine-3'-phosphorothioate
  modified_base 3: mod_base = OTHER; note = 2'-O-methylcytidine-3'-phosphate
  modified_base 4: mod_base = OTHER; note = 2'-O-methyladenosine-3'-phosphate
  modified_base 5: mod_base = OTHER; note = 2'-O-methylguanosine-3'-phosphate
  modified_base 6: mod_base = OTHER; note = 2'-deoxy-2'-fluoroadenosine-3'-phosphate
  modified_base 7: mod_base = OTHER; note = 2'-O-methylguanosine-3'-phosphate
  modified_base 8: mod_base = OTHER; note = 2'-deoxy-2'-fluorouridine-3'-phosphate
  modified_base 9: mod_base = OTHER; note = 2'-deoxy-2'-fluorouridine-3'-phosphate
  modified_base 10: mod_base = OTHER; note = 2'-O-methylcytidine-3'-phosphate
  modified_base 11: mod_base = OTHER; note = 2'-O-methylcytidine-3'-phosphate
  modified_base 12: mod_base = OTHER; note = 2'-O-methyluridine-3'-phosphate
  modified_base 13: mod_base = OTHER; note = 2'-O-methyluridine-3'-phosphate
  modified_base 14: mod_base = OTHER; note = 2'-deoxy-2'-fluorocytidine-3'-phosphate
  modified_base 15: mod_base = OTHER; note = 2'-O-methylcytidine-3'-phosphate
  modified_base 16: mod_base = OTHER; note = 2'-deoxy-2'-fluorocytidine-3'-phosphate
  modified_base 17: mod_base = OTHER; note = 2'-O-methyluridine-3'-phosphate
  modified_base 18: mod_base = OTHER; note = 2'-O-methyluridine-3'-phosphate
  modified_base 19: mod_base = OTHER; note = 2'-O-methyladenosine-3'-phosphate
  modified_base 20: mod_base = OTHER; note = 2'-O-methyladenosine-3'-phosphate
  modified_base 21: mod_base = OTHER; note = 2'-O-methylcytidine-3'-phosphorothioate
  modified_base 22: mod_base = OTHER; note = 2'-O-methylguanosine-3'-phosphorothioate
  modified_base 23: mod_base = OTHER; note = 2'-O-methyluridine
tccagagttccttcccttaacgt

SEQ ID NO: 2874 - RNA, 23 nt, synthetic construct
  source 1..23: mol_type = other RNA
  modified_base 1: mod_base = OTHER; note = 2'-O-methyluridine-3'-phosphorothioate 5'-(E)-Vinylphosphonate
  modified_base 2: mod_base = OTHER; note = 2'-deoxy-2'-fluoroguanosine-3'-phosphorothioate
  modified_base 3: mod_base = OTHER; note = 2'-O-methylguanosine-3'-phosphate
  modified_base 4: mod_base = OTHER; note = 2'-O-methyladenosine-3'-phosphate
  modified_base 5: mod_base = OTHER; note = 2'-O-methylguanosine-3'-phosphate
  modified_base 6: mod_base = OTHER; note = 2'-deoxy-2'-fluoroadenosine-3'-phosphate
  modified_base 7: mod_base = OTHER; note = 2'-O-methyluridine-3'-phosphate
  modified_base 8: mod_base = OTHER; note = 2'-deoxy-2'-fluoroadenosine-3'-phosphate
  modified_base 9: mod_base = OTHER; note = 2'-deoxy-2'-fluorocytidine-3'-phosphate
  modified_base 10: mod_base = OTHER; note = 2'-O-methylcytidine-3'-phosphate
  modified_base 11: mod_base = OTHER; note = 2'-O-methyluridine-3'-phosphate
  modified_base 12: mod_base = OTHER; note = 2'-O-methylguanosine-3'-phosphate
  modified_base 13: mod_base = OTHER; note = 2'-O-methylguanosine-3'-phosphate
  modified_base 14: mod_base = OTHER; note = 2'-deoxy-2'-fluoroadenosine-3'-phosphate
  modified_base 15: mod_base = OTHER; note = 2'-O-methyladenosine-3'-phosphate
  modified_base 16: mod_base = OTHER; note = 2'-deoxy-2'-fluoroguanosine-3'-phosphate
  modified_base 17: mod_base = OTHER; note = 2'-O-methylcytidine-3'-phosphate
  modified_base 18: mod_base = OTHER; note = 2'-O-methylcytidine-3'-phosphate
  modified_base 19: mod_base = OTHER; note = 2'-O-methyladenosine-3'-phosphate
  modified_base 20: mod_base = OTHER; note = 2'-O-methylguanosine-3'-phosphate
  modified_base 21: mod_base = OTHER; note = 2'-O-methyladenosine-3'-phosphorothioate
  modified_base 22: mod_base = OTHER; note = 2'-O-methylguanosine-3'-phosphorothioate
  modified_base 23: mod_base = OTHER; note = 2'-O-methyluridine
tggagatacctggaagccagagt

SEQ ID NO: 2875 - RNA, 23 nt, synthetic construct
  source 1..23: mol_type = other RNA
  modified_base 1: mod_base = OTHER; note = 2'-O-methyluridine-3'-phosphorothioate 5'-(E)-Vinylphosphonate
  modified_base 2: mod_base = OTHER; note = 2'-deoxy-2'-fluoroadenosine-3'-phosphorothioate
  modified_base 3: mod_base = OTHER; note = 2'-O-methyluridine-3'-phosphate
  modified_base 4: mod_base = OTHER; note = 2'-O-methylguanosine-3'-phosphate
  modified_base 5: mod_base = OTHER; note = 2'-O-methylcytidine-3'-phosphate
  modified_base 6: mod_base = OTHER; note = 2'-deoxy-2'-fluoroadenosine-3'-phosphate
  modified_base 7: mod_base = OTHER; note = 2'-O-methyladenosine-3'-phosphate
  modified_base 8: mod_base = OTHER; note = 2'-deoxy-2'-fluorouridine-3'-phosphate
  modified_base 9: mod_base = OTHER; note = 2'-deoxy-2'-fluoroguanosine-3'-phosphate
  modified_base 10: mod_base = OTHER; note = 2'-O-methylcytidine-3'-phosphate
  modified_base 11: mod_base = OTHER; note = 2'-O-methyluridine-3'-phosphate
  modified_base 12: mod_base = OTHER; note = 2'-O-methylcytidine-3'-phosphate
  modified_base 13: mod_base = OTHER; note = 2'-O-methyluridine-3'-phosphate
  modified_base 14: mod_base = OTHER; note = 2'-deoxy-2'-fluorouridine-3'-phosphate
  modified_base 15: mod_base = OTHER; note = 2'-O-methylcytidine-3'-phosphate
  modified_base 16: mod_base = OTHER; note = 2'-deoxy-2'-fluoroadenosine-3'-phosphate
  modified_base 17: mod_base = OTHER; note = 2'-O-methyladenosine-3'-phosphate
  modified_base 18: mod_base = OTHER; note = 2'-O-methyluridine-3'-phosphate
  modified_base 19: mod_base = OTHER; note = 2'-O-methylcytidine-3'-phosphate
  modified_base 20: mod_base = OTHER; note = 2'-O-methylcytidine-3'-phosphate
  modified_base 21: mod_base = OTHER; note = 2'-O-methyluridine-3'-phosphorothioate
  modified_base 22: mod_base = OTHER; note = 2'-O-methylguanosine-3'-phosphorothioate
  modified_base 23: mod_base = OTHER; note = 2'-O-methylguanosine
tatgcaatgctcttcaatcctgg

SEQ ID NO: 2876 - RNA, 23 nt, synthetic construct
  source 1..23: mol_type = other RNA
  modified_base 1: mod_base = OTHER; note = 2'-O-methyluridine-3'-phosphorothioate 5'-(E)-Vinylphosphonate
  modified_base 2: mod_base = OTHER; note = 2'-deoxy-2'-fluoroadenosine-3'-phosphorothioate
  modified_base 3: mod_base = OTHER; note = 2'-O-methyladenosine-3'-phosphate
  modified_base 4: mod_base = OTHER; note = 2'-O-methyladenosine-3'-phosphate
  modified_base 5: mod_base = OTHER; note = 2'-O-methyluridine-3'-phosphate
  modified_base 6: mod_base = OTHER; note = 2'-deoxy-2'-fluorouridine-3'-phosphate
  modified_base 7: mod_base = OTHER; note = 2'-O-methylguanosine-3'-phosphate
  modified_base 8: mod_base = OTHER; note = 2'-deoxy-2'-fluoroadenosine-3'-phosphate
  modified_base 9: mod_base = OTHER; note = 2'-deoxy-2'-fluorocytidine-3'-phosphate
  modified_base 10: mod_base = OTHER; note = 2'-O-methyladenosine-3'-phosphate
  modified_base 11: mod_base = OTHER; note = 2'-O-methylguanosine-3'-phosphate
  modified_base 12: mod_base = OTHER; note = 2'-O-methyladenosine-3'-phosphate
  modified_base 13: mod_base = OTHER; note = 2'-O-methylguanosine-3'-phosphate
  modified_base 14: mod_base = OTHER; note = 2'-deoxy-2'-fluorouridine-3'-phosphate
  modified_base 15: mod_base = OTHER; note = 2'-O-methylcytidine-3'-phosphate
  modified_base 16: mod_base = OTHER; note = 2'-deoxy-2'-fluorocytidine-3'-phosphate
  modified_base 17: mod_base = OTHER; note = 2'-O-methyluridine-3'-phosphate
  modified_base 18: mod_base = OTHER; note = 2'-O-methylguanosine-3'-phosphate
  modified_base 19: mod_base = OTHER; note = 2'-O-methylguanosine-3'-phosphate
  modified_base 20: mod_base = OTHER; note = 2'-O-methyladenosine-3'-phosphate
  modified_base 21: mod_base = OTHER; note = 2'-O-methyluridine-3'-phosphorothioate
  modified_base 22: mod_base = OTHER; note = 2'-O-methyladenosine-3'-phosphorothioate
  modified_base 23: mod_base = OTHER; note = 2'-O-methyladenosine
taaattgacagagtcctggataa

SEQ ID NO: 2877 - RNA, 23 nt, synthetic construct
  source 1..23: mol_type = other RNA
  modified_base 1: mod_base = OTHER; note = 2'-O-methyluridine-3'-phosphorothioate 5'-(E)-Vinylphosphonate
  modified_base 2: mod_base = OTHER; note = 2'-deoxy-2'-fluorocytidine-3'-phosphorothioate
  modified_base 3: mod_base = OTHER; note = 2'-O-methyluridine-3'-phosphate
  modified_base 4: mod_base = OTHER; note = 2'-O-methyluridine-3'-phosphate
  modified_base 5: mod_base = OTHER; note = 2'-O-methyladenosine-3'-phosphate
  modified_base 6: mod_base = OTHER; note = 2'-deoxy-2'-fluoroguanosine-3'-phosphate
  modified_base 7: mod_base = OTHER; note = 2'-O-methyladenosine-3'-phosphate
  modified_base 8: mod_base = OTHER; note = 2'-deoxy-2'-fluoroguanosine-3'-phosphate
  modified_base 9: mod_base = OTHER; note = 2'-deoxy-2'-fluoroguanosine-3'-phosphate
  modified_base 10: mod_base = OTHER; note = 2'-O-methyladenosine-3'-phosphate
  modified_base 11: mod_base = OTHER; note = 2'-O-methylguanosine-3'-phosphate
  modified_base 12: mod_base = OTHER; note = 2'-O-methyluridine-3'-phosphate
  modified_base 13: mod_base = OTHER; note = 2'-O-methylcytidine-3'-phosphate
  modified_base 14: mod_base = OTHER; note = 2'-deoxy-2'-fluoroadenosine-3'-phosphate
  modified_base 15: mod_base = OTHER; note = 2'-O-methylguanosine-3'-phosphate
  modified_base 16: mod_base = OTHER; note = 2'-deoxy-2'-fluoroguanosine-3'-phosphate
  modified_base 17: mod_base = OTHER; note = 2'-O-methylguanosine-3'-phosphate
  modified_base 18: mod_base = OTHER; note = 2'-O-methyladenosine-3'-phosphate
  modified_base 19: mod_base = OTHER; note = 2'-O-methyladenosine-3'-phosphate
  modified_base 20: mod_base = OTHER; note = 2'-O-methyladenosine-3'-phosphate
  modified_base 21: mod_base = OTHER; note = 2'-O-methyluridine-3'-phosphorothioate
  modified_base 22: mod_base = OTHER; note = 2'-O-methyluridine-3'-phosphorothioate
  modified_base 23: mod_base = OTHER; note = 2'-O-methylguanosine
tcttagaggagtcagggaaattg

SEQ ID NO: 2878 - RNA, 23 nt, synthetic construct
  source 1..23: mol_type = other RNA
  modified_base 1: mod_base = OTHER; note = 2'-O-methyluridine-3'-phosphorothioate 5'-(E)-Vinylphosphonate
  modified_base 2: mod_base = OTHER; note = 2'-deoxy-2'-fluorouridine-3'-phosphorothioate
  modified_base 3: mod_base = OTHER; note = 2'-O-methylcytidine-3'-phosphate
  modified_base 4: mod_base = OTHER; note = 2'-O-methyluridine-3'-phosphate
  modified_base 5: mod_base = OTHER; note = 2'-O-methyluridine-3'-phosphate
  modified_base 6: mod_base = OTHER; note = 2'-deoxy-2'-fluoroadenosine-3'-phosphate
  modified_base 7: mod_base = OTHER; note = 2'-O-methyluridine-3'-phosphate
  modified_base 8: mod_base = OTHER; note = 2'-deoxy-2'-fluoroguanosine-3'-phosphate
  modified_base 9: mod_base = OTHER; note = 2'-deoxy-2'-fluorocytidine-3'-phosphate
  modified_base 10: mod_base = OTHER; note = 2'-O-methylcytidine-3'-phosphate
  modified_base 11: mod_base = OTHER; note = 2'-O-methyluridine-3'-phosphate
  modified_base 12: mod_base = OTHER; note = 2'-O-methyluridine-3'-phosphate
  modified_base 13: mod_base = OTHER; note = 2'-O-methyluridine-3'-phosphate
  modified_base 14: mod_base = OTHER; note = 2'-deoxy-2'-fluoroguanosine-3'-phosphate
  modified_base 15: mod_base = OTHER; note = 2'-O-methylguanosine-3'-phosphate
  modified_base 16: mod_base = OTHER; note = 2'-deoxy-2'-fluoroadenosine-3'-phosphate
  modified_base 17: mod_base = OTHER; note = 2'-O-methyladenosine-3'-phosphate
  modified_base 18: mod_base = OTHER; note = 2'-O-methylguanosine-3'-phosphate
  modified_base 19: mod_base = OTHER; note = 2'-O-methyladenosine-3'-phosphate
  modified_base 20: mod_base = OTHER; note = 2'-O-methylguanosine-3'-phosphate
  modified_base 21: mod_base = OTHER; note = 2'-O-methyluridine-3'-phosphorothioate
  modified_base 22: mod_base = OTHER; note = 2'-O-methylguanosine-3'-phosphorothioate
  modified_base 23: mod_base = OTHER; note = 2'-O-methylguanosine
ttcttatgcctttggaagagtgg

SEQ ID NO: 2879 - RNA, 23 nt, synthetic construct
  source 1..23: mol_type = other RNA
  modified_base 1: mod_base = OTHER; note = 2'-O-methyluridine-3'-phosphorothioate 5'-(E)-Vinylphosphonate
  modified_base 2: mod_base = OTHER; note = 2'-deoxy-2'-fluorouridine-3'-phosphorothioate
  modified_base 3: mod_base = OTHER; note = 2'-O-methyluridine-3'-phosphate
  modified_base 4: mod_base = OTHER; note = 2'-O-methylguanosine-3'-phosphate
  modified_base 5: mod_base = OTHER; note = 2'-O-methylguanosine-3'-phosphate
  modified_base 6: mod_base = OTHER; note = 2'-deoxy-2'-fluorouridine-3'-phosphate
  modified_base 7: mod_base = OTHER; note = 2'-O-methyluridine-3'-phosphate
  modified_base 8: mod_base = OTHER; note = 2'-deoxy-2'-fluorouridine-3'-phosphate
  modified_base 9: mod_base = OTHER; note = 2'-deoxy-2'-fluorocytidine-3'-phosphate
  modified_base 10: mod_base = OTHER; note = 2'-O-methyladenosine-3'-phosphate
  modified_base 11: mod_base = OTHER; note = 2'-O-methyladenosine-3'-phosphate
  modified_base 12: mod_base = OTHER; note = 2'-O-methylguanosine-3'-phosphate
  modified_base 13: mod_base = OTHER; note = 2'-O-methylcytidine-3'-phosphate
  modified_base 14: mod_base = OTHER; note = 2'-deoxy-2'-fluoroadenosine-3'-phosphate
  modified_base 15: mod_base = OTHER; note = 2'-O-methyladenosine-3'-phosphate
  modified_base 16: mod_base = OTHER; note = 2'-deoxy-2'-fluoroadenosine-3'-phosphate
  modified_base 17: mod_base = OTHER; note = 2'-O-methyladenosine-3'-phosphate
  modified_base 18: mod_base = OTHER; note = 2'-O-methylguanosine-3'-phosphate
  modified_base 19: mod_base = OTHER; note = 2'-O-methylguanosine-3'-phosphate
  modified_base 20: mod_base = OTHER; note = 2'-O-methyladenosine-3'-phosphate
  modified_base 21: mod_base = OTHER; note = 2'-O-methylguanosine-3'-phosphorothioate
  modified_base 22: mod_base = OTHER; note = 2'-O-methylguanosine-3'-phosphorothioate
  modified_base 23: mod_base = OTHER; note = 2'-O-methylcytidine
tttggtttcaagcaaaaggaggc

SEQ ID NO: 2880 - RNA, 23 nt, synthetic construct
  source 1..23: mol_type = other RNA
  modified_base 1: mod_base = OTHER; note = 2'-O-methyluridine-3'-phosphorothioate 5'-(E)-Vinylphosphonate
  modified_base 2: mod_base = OTHER; note = 2'-deoxy-2'-fluorouridine-3'-phosphorothioate
  modified_base 3: mod_base = OTHER; note = 2'-O-methylguanosine-3'-phosphate
  modified_base 4: mod_base = OTHER; note = 2'-O-methyladenosine-3'-phosphate
  modified_base 5: mod_base = OTHER; note = 2'-O-methylguanosine-3'-phosphate
  modified_base 6: mod_base = OTHER; note = 2'-deoxy-2'-fluoroadenosine-3'-phosphate
  modified_base 7: mod_base = OTHER; note = 2'-O-methyladenosine-3'-phosphate
  modified_base 8: mod_base = OTHER; note = 2'-deoxy-2'-fluorouridine-3'-phosphate
  modified_base 9: mod_base = OTHER; note = 2'-deoxy-2'-fluoroadenosine-3'-phosphate
  modified_base 10: mod_base = OTHER; note = 2'-O-methylguanosine-3'-phosphate
  modified_base 11: mod_base = OTHER; note = 2'-O-methylguanosine-3'-phosphate
  modified_base 12: mod_base = OTHER; note = 2'-O-methyladenosine-3'-phosphate
  modified_base 13: mod_base = OTHER; note = 2'-O-methyluridine-3'-phosphate
  modified_base 14: mod_base = OTHER; note = 2'-deoxy-2'-fluorocytidine-3'-phosphate
  modified_base 15: mod_base = OTHER; note = 2'-O-methylcytidine-3'-phosphate
  modified_base 16: mod_base = OTHER; note = 2'-deoxy-2'-fluorouridine-3'-phosphate
  modified_base 17: mod_base = OTHER; note = 2'-O-methylguanosine-3'-phosphate
  modified_base 18: mod_base = OTHER; note = 2'-O-methyluridine-3'-phosphate
  modified_base 19: mod_base = OTHER; note = 2'-O-methylguanosine-3'-phosphate
  modified_base 20: mod_base = OTHER; note = 2'-O-methyluridine-3'-phosphate
  modified_base 21: mod_base = OTHER; note = 2'-O-methyladenosine-3'-phosphorothioate
  modified_base 22: mod_base = OTHER; note = 2'-O-methyluridine-3'-phosphorothioate
  modified_base 23: mod_base = OTHER; note = 2'-O-methyladenosine
ttgagaataggatcctgtgtata

SEQ ID NO: 2881 - RNA, 23 nt, synthetic construct
  source 1..23: mol_type = other RNA
  modified_base 1: mod_base = OTHER; note = 2'-O-methyluridine-3'-phosphorothioate 5'-(E)-Vinylphosphonate
  modified_base 2: mod_base = OTHER; note = 2'-deoxy-2'-fluorocytidine-3'-phosphorothioate
  modified_base 3: mod_base = OTHER; note = 2'-O-methylcytidine-3'-phosphate
  modified_base 4: mod_base = OTHER; note = 2'-O-methyladenosine-3'-phosphate
  modified_base 5: mod_base = OTHER; note = 2'-O-methylcytidine-3'-phosphate
  modified_base 6: mod_base = OTHER; note = 2'-deoxy-2'-fluorouridine-3'-phosphate
  modified_base 7: mod_base = OTHER; note = 2'-O-methylcytidine-3'-phosphate
  modified_base 8: mod_base = OTHER; note = 2'-deoxy-2'-fluorouridine-3'-phosphate
  modified_base 9: mod_base = OTHER; note = 2'-deoxy-2'-fluorouridine-3'-phosphate
  modified_base 10: mod_base = OTHER; note = 2'-O-methyluridine-3'-phosphate
  modified_base 11: mod_base = OTHER; note = 2'-O-methylguanosine-3'-phosphate
  modified_base 12: mod_base = OTHER; note = 2'-O-methylcytidine-3'-phosphate
  modified_base 13: mod_base = OTHER; note = 2'-O-methyluridine-3'-phosphate
  modified_base 14: mod_base = OTHER; note = 2'-deoxy-2'-fluoroguanosine-3'-phosphate
  modified_base 15: mod_base = OTHER; note = 2'-O-methylguanosine-3'-phosphate
  modified_base 16: mod_base = OTHER; note = 2'-deoxy-2'-fluoroguanosine-3'-phosphate
  modified_base 17: mod_base = OTHER; note = 2'-O-methyluridine-3'-phosphate
  modified_base 18: mod_base = OTHER; note = 2'-O-methylguanosine-3'-phosphate
  modified_base 19: mod_base = OTHER; note = 2'-O-methylguanosine-3'-phosphate
  modified_base 20: mod_base = OTHER; note = 2'-O-methyladenosine-3'-phosphate
  modified_base 21: mod_base = OTHER; note = 2'-O-methylcytidine-3'-phosphorothioate
  modified_base 22: mod_base = OTHER; note = 2'-O-methylcytidine-3'-phosphorothioate
  modified_base 23: mod_base = OTHER; note = 2'-O-methylcytidine
tccactctttgctgggtggaccc

SEQ ID NO: 2882 - RNA, 23 nt, synthetic construct
  source 1..23: mol_type = other RNA
  modified_base 1: mod_base = OTHER; note = 2'-O-methyluridine-3'-phosphorothioate 5'-(E)-Vinylphosphonate
  modified_base 2: mod_base = OTHER; note = 2'-deoxy-2'-fluoroadenosine-3'-phosphorothioate
  modified_base 3: mod_base = OTHER; note = 2'-O-methyladenosine-3'-phosphate
  modified_base 4: mod_base = OTHER; note = 2'-O-methyluridine-3'-phosphate
  modified_base 5: mod_base = OTHER; note = 2'-O-methylcytidine-3'-phosphate
  modified_base 6: mod_base = OTHER; note = 2'-deoxy-2'-fluorocytidine-3'-phosphate
  modified_base 7: mod_base = OTHER; note = 2'-O-methylcytidine-3'-phosphate
  modified_base 8: mod_base = OTHER; note = 2'-deoxy-2'-fluoroadenosine-3'-phosphate
  modified_base 9: mod_base = OTHER; note = 2'-deoxy-2'-fluoroguanosine-3'-phosphate
  modified_base 10: mod_base = OTHER; note = 2'-O-methyladenosine-3'-phosphate
  modified_base 11: mod_base = OTHER; note = 2'-O-methyluridine-3'-phosphate
  modified_base 12: mod_base = OTHER; note = 2'-O-methylguanosine-3'-phosphate
  modified_base 13: mod_base = OTHER; note = 2'-O-methylcytidine-3'-phosphate
  modified_base 14: mod_base = OTHER; note = 2'-deoxy-2'-fluoroadenosine-3'-phosphate
  modified_base 15: mod_base = OTHER; note = 2'-O-methylguanosine-3'-phosphate
  modified_base 16: mod_base = OTHER; note = 2'-deoxy-2'-fluorocytidine-3'-phosphate
  modified_base 17: mod_base = OTHER; note = 2'-O-methylcytidine-3'-phosphate
  modified_base 18: mod_base = OTHER; note = 2'-O-methylcytidine-3'-phosphate
  modified_base 19: mod_base = OTHER; note = 2'-O-methyladenosine-3'-phosphate
  modified_base 20: mod_base = OTHER; note = 2'-O-methylcytidine-3'-phosphate
  modified_base 21: mod_base = OTHER; note = 2'-O-methyluridine-3'-phosphorothioate
  modified_base 22: mod_base = OTHER; note = 2'-O-methylcytidine-3'-phosphorothioate
  modified_base 23: mod_base = OTHER; note = 2'-O-methyluridine
taatcccagatgcagcccactct

SEQ ID NO: 2883 - RNA, 23 nt, synthetic construct
  source 1..23: mol_type = other RNA
  modified_base 1: mod_base = OTHER; note = 2'-O-methyluridine-3'-phosphorothioate 5'-(E)-Vinylphosphonate
  modified_base 2: mod_base = OTHER; note = 2'-deoxy-2'-fluorouridine-3'-phosphorothioate
  modified_base 3: mod_base = OTHER; note = 2'-O-methylguanosine-3'-phosphate
  modified_base 4: mod_base = OTHER; note = 2'-O-methyladenosine-3'-phosphate
  modified_base 5: mod_base = OTHER; note = 2'-O-methyladenosine-3'-phosphate
  modified_base 6: mod_base = OTHER; note = 2'-deoxy-2'-fluoroguanosine-3'-phosphate
  modified_base 7: mod_base = OTHER; note = 2'-O-methyladenosine-3'-phosphate
  modified_base 8: mod_base = OTHER; note = 2'-deoxy-2'-fluorocytidine-3'-phosphate
  modified_base 9: mod_base = OTHER; note = 2'-deoxy-2'-fluorocytidine-3'-phosphate
  modified_base 10: mod_base = OTHER; note = 2'-O-methyluridine-3'-phosphate
  modified_base 11: mod_base = OTHER; note = 2'-O-methyluridine-3'-phosphate
  modified_base 12: mod_base = OTHER; note = 2'-O-methylguanosine-3'-phosphate
  modified_base 13: mod_base = OTHER; note = 2'-O-methylguanosine-3'-phosphate
  modified_base 14: mod_base = OTHER; note = 2'-deoxy-2'-fluorouridine-3'-phosphate
  modified_base 15: mod_base = OTHER; note = 2'-O-methylguanosine-3'-phosphate
  modified_base 16: mod_base = OTHER; note = 2'-deoxy-2'-fluoroguanosine-3'-phosphate
  modified_base 17: mod_base = OTHER; note = 2'-O-methylguanosine-3'-phosphate
  modified_base 18: mod_base = OTHER; note = 2'-O-methyladenosine-3'-phosphate
  modified_base 19: mod_base = OTHER; note = 2'-O-methyladenosine-3'-phosphate
  modified_base 20: mod_base = OTHER; note = 2'-O-methyluridine-3'-phosphate
  modified_base 21: mod_base = OTHER; note = 2'-O-methylcytidine-3'-phosphorothioate
  modified_base 22: mod_base = OTHER; note = 2'-O-methylcytidine-3'-phosphorothioate
  modified_base 23: mod_base = OTHER; note = 2'-O-methylcytidine
ttgaagaccttggtgggaatccc

SEQ ID NO: 2884 - RNA, 23 nt, synthetic construct
  source 1..23: mol_type = other RNA
  modified_base 1: mod_base = OTHER; note = 2'-O-methyluridine-3'-phosphorothioate 5'-(E)-Vinylphosphonate
  modified_base 2: mod_base = OTHER; note = 2'-deoxy-2'-fluoroadenosine-3'-phosphorothioate
  modified_base 3: mod_base = OTHER; note = 2'-O-methyladenosine-3'-phosphate
  modified_base 4: mod_base = OTHER; note = 2'-O-methylcytidine-3'-phosphate
  modified_base 5: mod_base = OTHER; note = 2'-O-methyluridine-3'-phosphate
  modified_base 6: mod_base = OTHER; note = 2'-deoxy-2'-fluorocytidine-3'-phosphate
  modified_base 7: mod_base = OTHER; note = 2'-O-methyluridine-3'-phosphate
  modified_base 8: mod_base = OTHER; note = 2'-deoxy-2'-fluorouridine-3'-phosphate
  modified_base 9: mod_base = OTHER; note = 2'-deoxy-2'-fluoroguanosine-3'-phosphate
  modified_base 10: mod_base = OTHER; note = 2'-O-methyluridine-3'-phosphate
  modified_base 11: mod_base = OTHER; note = 2'-O-methyluridine-3'-phosphate
  modified_base 12: mod_base = OTHER; note = 2'-O-methylguanosine-3'-phosphate
  modified_base 13: mod_base = OTHER; note = 2'-O-methyladenosine-3'-phosphate
  modified_base 14: mod_base = OTHER; note = 2'-deoxy-2'-fluorouridine-3'-phosphate
  modified_base 15: mod_base = OTHER; note = 2'-O-methylguanosine-3'-phosphate
  modified_base 16: mod_base = OTHER; note = 2'-deoxy-2'-fluoroguanosine-3'-phosphate
  modified_base 17: mod_base = OTHER; note = 2'-O-methylcytidine-3'-phosphate
  modified_base 18: mod_base = OTHER; note = 2'-O-methyluridine-3'-phosphate
  modified_base 19: mod_base = OTHER; note = 2'-O-methylguanosine-3'-phosphate
  modified_base 20: mod_base = OTHER; note = 2'-O-methyladenosine-3'-phosphate
  modified_base 21: mod_base = OTHER; note = 2'-O-methyladenosine-3'-phosphorothioate
  modified_base 22: mod_base = OTHER; note = 2'-O-methylguanosine-3'-phosphorothioate
  modified_base 23: mod_base = OTHER; note = 2'-O-methyladenosine
taactcttgttgatggctgaaga

SEQ ID NO: 2885 - RNA, 23 nt, synthetic construct
  source 1..23: mol_type = other RNA
  modified_base 1: mod_base = OTHER; note = 2'-O-methyluridine-3'-phosphorothioate 5'-(E)-Vinylphosphonate
  modified_base 2: mod_base = OTHER; note = 2'-deoxy-2'-fluorouridine-3'-phosphorothioate
  modified_base 3: mod_base = OTHER; note = 2'-O-methylcytidine-3'-phosphate
  modified_base 4: mod_base = OTHER; note = 2'-O-methyladenosine-3'-phosphate
  modified_base 5: mod_base = OTHER; note = 2'-O-methylcytidine-3'-phosphate
  modified_base 6: mod_base = OTHER; note = 2'-deoxy-2'-fluoroadenosine-3'-phosphate
  modified_base 7: mod_base = OTHER; note = 2'-O-methyluridine-3'-phosphate
  modified_base 8: mod_base = OTHER; note = 2'-deoxy-2'-fluorouridine-3'-phosphate
  modified_base 9: mod_base = OTHER; note = 2'-deoxy-2'-fluoroguanosine-3'-phosphate
  modified_base 10: mod_base = OTHER; note = 2'-O-methyladenosine-3'-phosphate
  modified_base 11: mod_base = OTHER; note = 2'-O-methylguanosine-3'-phosphate
  modified_base 12: mod_base = OTHER; note = 2'-O-methylguanosine-3'-phosphate
  modified_base 13: mod_base = OTHER; note = 2'-O-methylcytidine-3'-phosphate
  modified_base 14: mod_base = OTHER; note = 2'-deoxy-2'-fluoroadenosine-3'-phosphate
  modified_base 15: mod_base = OTHER; note = 2'-O-methyluridine-3'-phosphate
  modified_base 16: mod_base = OTHER; note = 2'-deoxy-2'-fluorouridine-3'-phosphate
  modified_base 17: mod_base = OTHER; note = 2'-O-methylcytidine-3'-phosphate
  modified_base 18: mod_base = OTHER; note = 2'-O-methyladenosine-3'-phosphate
  modified_base 19: mod_base = OTHER; note = 2'-O-methylguanosine-3'-phosphate
  modified_base 20: mod_base = OTHER; note = 2'-O-methyluridine-3'-phosphate
  modified_base 21: mod_base = OTHER; note = 2'-O-methylguanosine-3'-phosphorothioate
  modified_base 22: mod_base = OTHER; note = 2'-O-methyladenosine-3'-phosphorothioate
  modified_base 23: mod_base = OTHER; note = 2'-O-methylguanosine
ttcacattgaggcattcagtgag

SEQ ID NO: 2886 - RNA, 23 nt, synthetic construct
  source 1..23: mol_type = other RNA
  modified_base 1: mod_base = OTHER; note = 2'-O-methyluridine-3'-phosphorothioate 5'-(E)-Vinylphosphonate
  modified_base 2: mod_base = OTHER; note = 2'-deoxy-2'-fluorouridine-3'-phosphorothioate
  modified_base 3: mod_base = OTHER; note = 2'-O-methyluridine-3'-phosphate
  modified_base 4: mod_base = OTHER; note = 2'-O-methylguanosine-3'-phosphate
  modified_base 5: mod_base = OTHER; note = 2'-O-methyluridine-3'-phosphate
  modified_base 6: mod_base = OTHER; note = 2'-deoxy-2'-fluorouridine-3'-phosphate
  modified_base 7: mod_base = OTHER; note = 2'-O-methylcytidine-3'-phosphate
  modified_base 8: mod_base = OTHER; note = 2'-deoxy-2'-fluorouridine-3'-phosphate
  modified_base 9: mod_base = OTHER; note = 2'-deoxy-2'-fluoroguanosine-3'-phosphate
  modified_base 10: mod_base = OTHER; note = 2'-O-methylguanosine-3'-phosphate
  modified_base 11: mod_base = OTHER; note = 2'-O-methyluridine-3'-phosphate
  modified_base 12: mod_base = OTHER; note = 2'-O-methylcytidine-3'-phosphate
  modified_base 13: mod_base = OTHER; note = 2'-O-methyladenosine-3'-phosphate
  modified_base 14: mod_base = OTHER; note = 2'-deoxy-2'-fluorouridine-3'-phosphate
  modified_base 15: mod_base = OTHER; note = 2'-O-methylcytidine-3'-phosphate
  modified_base 16: mod_base = OTHER; note = 2'-deoxy-2'-fluorocytidine-3'-phosphate
  modified_base 17: mod_base = OTHER; note = 2'-O-methyladenosine-3'-phosphate
  modified_base 18: mod_base = OTHER; note = 2'-O-methyladenosine-3'-phosphate
  modified_base 19: mod_base = OTHER; note = 2'-O-methyladenosine-3'-phosphate
  modified_base 20: mod_base = OTHER; note = 2'-O-methylguanosine-3'-phosphate
  modified_base 21: mod_base = OTHER; note = 2'-O-methylguanosine-3'-phosphorothioate
  modified_base 22: mod_base = OTHER; note = 2'-O-methylcytidine-3'-phosphorothioate
  modified_base 23: mod_base = OTHER; note = 2'-O-methyluridine
tttgttctggtcatccaaaggct

SEQ ID NO: 2887 - RNA, 23 nt, synthetic construct
  source 1..23: mol_type = other RNA
  modified_base 1: mod_base = OTHER; note = 2'-O-methyluridine-3'-phosphorothioate 5'-(E)-Vinylphosphonate
  modified_base 2: mod_base = OTHER; note = 2'-deoxy-2'-fluorouridine-3'-phosphorothioate
  modified_base 3: mod_base = OTHER; note = 2'-O-methyluridine-3'-phosphate
  modified_base 4: mod_base = OTHER; note = 2'-O-methylguanosine-3'-phosphate
  modified_base 5: mod_base = OTHER; note = 2'-O-methylguanosine-3'-phosphate
  modified_base 6: mod_base = OTHER; note = 2'-deoxy-2'-fluoroadenosine-3'-phosphate
  modified_base 7: mod_base = OTHER; note = 2'-O-methyladenosine-3'-phosphate
  modified_base 8: mod_base = OTHER; note = 2'-deoxy-2'-fluorouridine-3'-phosphate
  modified_base 9: mod_base = OTHER; note = 2'-deoxy-2'-fluorouridine-3'-phosphate
  modified_base 10: mod_base = OTHER; note = 2'-O-methylcytidine-3'-phosphate
  modified_base 11: mod_base = OTHER; note = 2'-O-methyluridine-3'-phosphate
  modified_base 12: mod_base = OTHER; note = 2'-O-methylcytidine-3'-phosphate
  modified_base 13: mod_base = OTHER; note = 2'-O-methyladenosine-3'-phosphate
  modified_base 14: mod_base = OTHER; note = 2'-deoxy-2'-fluoroguanosine-3'-phosphate
  modified_base 15: mod_base = OTHER; note = 2'-O-methyladenosine-3'-phosphate
  modified_base 16: mod_base = OTHER; note = 2'-deoxy-2'-fluoroguanosine-3'-phosphate
  modified_base 17: mod_base = OTHER; note = 2'-O-methylguanosine-3'-phosphate
  modified_base 18: mod_base = OTHER; note = 2'-O-methylguanosine-3'-phosphate
  modified_base 19: mod_base = OTHER; note = 2'-O-methyladenosine-3'-phosphate
  modified_base 20: mod_base = OTHER; note = 2'-O-methyladenosine-3'-phosphate
  modified_base 21: mod_base = OTHER; note = 2'-O-methylcytidine-3'-phosphorothioate
  modified_base 22: mod_base = OTHER; note = 2'-O-methylcytidine-3'-phosphorothioate
  modified_base 23: mod_base = OTHER; note = 2'-O-methyluridine
tttggaattctcagagggaacct

SEQ ID NO: 2888 - RNA, 23 nt, synthetic construct
  source 1..23: mol_type = other RNA
  modified_base 1: mod_base = OTHER; note = 2'-O-methyluridine-3'-phosphorothioate 5'-(E)-Vinylphosphonate
  modified_base 2: mod_base = OTHER; note = 2'-deoxy-2'-fluorouridine-3'-phosphorothioate
  modified_base 3: mod_base = OTHER; note = 2'-O-methylcytidine-3'-phosphate
  modified_base 4: mod_base = OTHER; note = 2'-O-methyluridine-3'-phosphate
  modified_base 5: mod_base = OTHER; note = 2'-O-methyluridine-3'-phosphate
  modified_base 6: mod_base = OTHER; note = 2'-deoxy-2'-fluorocytidine-3'-phosphate
  modified_base 7: mod_base = OTHER; note = 2'-O-methyladenosine-3'-phosphate
  modified_base 8: mod_base = OTHER; note = 2'-deoxy-2'-fluorouridine-3'-phosphate
  modified_base 9: mod_base = OTHER; note = 2'-deoxy-2'-fluoroguanosine-3'-phosphate
  modified_base 10: mod_base = OTHER; note = 2'-O-methylguanosine-3'-phosphate
  modified_base 11: mod_base = OTHER; note = 2'-O-methyladenosine-3'-phosphate
  modified_base 12: mod_base = OTHER; note = 2'-O-methyladenosine-3'-phosphate
  modified_base 13: mod_base = OTHER; note = 2'-O-methylcytidine-3'-phosphate
  modified_base 14: mod_base = OTHER; note = 2'-deoxy-2'-fluorouridine-3'-phosphate
  modified_base 15: mod_base = OTHER; note = 2'-O-methylcytidine-3'-phosphate
  modified_base 16: mod_base = OTHER; note = 2'-deoxy-2'-fluorocytidine-3'-phosphate
  modified_base 17: mod_base = OTHER; note = 2'-O-methyluridine-3'-phosphate
  modified_base 18: mod_base = OTHER; note = 2'-O-methyluridine-3'-phosphate
  modified_base 19: mod_base = OTHER; note = 2'-O-methylguanosine-3'-phosphate
  modified_base 20: mod_base = OTHER; note = 2'-O-methylguanosine-3'-phosphate
  modified_base 21: mod_base = OTHER; note = 2'-O-methyladenosine-3'-phosphorothioate
  modified_base 22: mod_base = OTHER; note = 2'-O-methyladenosine-3'-phosphorothioate
  modified_base 23: mod_base = OTHER; note = 2'-O-methyluridine
ttcttcatggaactccttggaat

SEQ ID NO: 2889 - RNA, 23 nt, synthetic construct
  source 1..23: mol_type = other RNA
  modified_base 1: mod_base = OTHER; note = 2'-O-methyluridine-3'-phosphorothioate 5'-(E)-Vinylphosphonate
  modified_base 2: mod_base = OTHER; note = 2'-deoxy-2'-fluoroadenosine-3'-phosphorothioate
  modified_base 3: mod_base = OTHER; note = 2'-O-methylguanosine-3'-phosphate
  modified_base 4: mod_base = OTHER; note = 2'-O-methyluridine-3'-phosphate
  modified_base 5: mod_base = OTHER; note = 2'-O-methyluridine-3'-phosphate
  modified_base 6: mod_base = OTHER; note = 2'-deoxy-2'-fluorocytidine-3'-phosphate
  modified_base 7: mod_base = OTHER; note = 2'-O-methylcytidine-3'-phosphate
  modified_base 8: mod_base = OTHER; note = 2'-deoxy-2'-fluorouridine-3'-phosphate
  modified_base 9: mod_base = OTHER; note = 2'-deoxy-2'-fluoroguanosine-3'-phosphate
  modified_base 10: mod_base = OTHER; note = 2'-O-methylcytidine-3'-phosphate
  modified_base 11: mod_base = OTHER; note = 2'-O-methylguanosine-3'-phosphate
  modified_base 12: mod_base = OTHER; note = 2'-O-methyluridine-3'-phosphate
  modified_base 13: mod_base = OTHER; note = 2'-O-methylguanosine-3'-phosphate
  modified_base 14: mod_base = OTHER; note = 2'-deoxy-2'-fluorouridine-3'-phosphate
  modified_base 15: mod_base = OTHER; note = 2'-O-methylguanosine-3'-phosphate
  modified_base 16: mod_base = OTHER; note = 2'-deoxy-2'-fluorouridine-3'-phosphate
  modified_base 17: mod_base = OTHER; note = 2'-O-methylguanosine-3'-phosphate
  modified_base 18: mod_base = OTHER; note = 2'-O-methylguanosine-3'-phosphate
  modified_base 19: mod_base = OTHER; note = 2'-O-methyladenosine-3'-phosphate
  modified_base 20: mod_base = OTHER; note = 2'-O-methyluridine-3'-phosphate
  modified_base 21: mod_base = OTHER; note = 2'-O-methylguanosine-3'-phosphorothioate
  modified_base 22: mod_base = OTHER; note = 2'-O-methyluridine-3'-phosphorothioate
  modified_base 23: mod_base = OTHER; note = 2'-O-methylguanosine
tagttcctgcgtgtgtggatgtg

SEQ ID NO: 2890 - RNA, 23 nt, synthetic construct
  source 1..23: mol_type = other RNA
  modified_base 1: mod_base = OTHER; note = 2'-O-methyluridine-3'-phosphorothioate 5'-(E)-Vinylphosphonate
  modified_base 2: mod_base = OTHER; note = 2'-deoxy-2'-fluorouridine-3'-phosphorothioate
  modified_base 3: mod_base = OTHER; note = 2'-O-methylcytidine-3'-phosphate
  modified_base 4: mod_base = OTHER; note = 2'-O-methylcytidine-3'-phosphate
  modified_base 5: mod_base = OTHER; note = 2'-O-methyladenosine-3'-phosphate
  modified_base 6: mod_base = OTHER; note = 2'-deoxy-2'-fluoroguanosine-3'-phosphate
  modified_base 7: mod_base = OTHER; note = 2'-O-methylcytidine-3'-phosphate
  modified_base 8: mod_base = OTHER; note = 2'-deoxy-2'-fluorouridine-3'-phosphate
  modified_base 9: mod_base = OTHER; note = 2'-deoxy-2'-fluorouridine-3'-phosphate
  modified_base 10: mod_base = OTHER; note = 2'-O-methylguanosine-3'-phosphate
  modified_base 11: mod_base = OTHER; note = 2'-O-methyluridine-3'-phosphate
  modified_base 12: mod_base = OTHER; note = 2'-O-methylguanosine-3'-phosphate
  modified_base 13: mod_base = OTHER; note = 2'-O-methyluridine-3'-phosphate
  modified_base 14: mod_base = OTHER; note = 2'-deoxy-2'-fluorouridine-3'-phosphate
  modified_base 15: mod_base = OTHER; note = 2'-O-methylguanosine-3'-phosphate
  modified_base 16: mod_base = OTHER; note = 2'-deoxy-2'-fluorocytidine-3'-phosphate
  modified_base 17: mod_base = OTHER; note = 2'-O-methyluridine-3'-phosphate
  modified_base 18: mod_base = OTHER; note = 2'-O-methylguanosine-3'-phosphate
  modified_base 19: mod_base = OTHER; note = 2'-O-methylguanosine-3'-phosphate
  modified_base 20: mod_base = OTHER; note = 2'-O-methylguanosine-3'-phosphate
  modified_base 21: mod_base = OTHER; note = 2'-O-methyladenosine-3'-phosphorothioate
  modified_base 22: mod_base = OTHER; note = 2'-O-methylguanosine-3'-phosphorothioate
  modified_base 23: mod_base = OTHER; note = 2'-O-methyluridine
ttccagcttgtgttgctgggagt

SEQ ID NO: 2891 - RNA, 23 nt, synthetic construct
  source 1..23: mol_type = other RNA
  modified_base 1: mod_base = OTHER; note = 2'-O-methyluridine-3'-phosphorothioate 5'-(E)-Vinylphosphonate
  modified_base 2: mod_base = OTHER; note = 2'-deoxy-2'-fluorouridine-3'-phosphorothioate
  modified_base 3: mod_base = OTHER; note = 2'-O-methyladenosine-3'-phosphate
  modified_base 4: mod_base = OTHER; note = 2'-O-methyladenosine-3'-phosphate
  modified_base 5: mod_base = OTHER; note = 2'-O-methyladenosine-3'-phosphate
  modified_base 6: mod_base = OTHER; note = 2'-deoxy-2'-fluorouridine-3'-phosphate
  modified_base 7: mod_base = OTHER; note = 2'-O-methyladenosine-3'-phosphate
  modified_base 8: mod_base = OTHER; note = 2'-deoxy-2'-fluoroadenosine-3'-phosphate
  modified_base 9: mod_base = OTHER; note = 2'-deoxy-2'-fluoroadenosine-3'-phosphate
  modified_base 10: mod_base = OTHER; note = 2'-O-methylcytidine-3'-phosphate
  modified_base 11: mod_base = OTHER; note = 2'-O-methyladenosine-3'-phosphate
  modified_base 12: mod_base = OTHER; note = 2'-O-methyluridine-3'-phosphate
  modified_base 13: mod_base = OTHER; note = 2'-O-methylguanosine-3'-phosphate
  modified_base 14: mod_base = OTHER; note = 2'-deoxy-2'-fluorouridine-3'-phosphate
  modified_base 15: mod_base = OTHER; note = 2'-O-methylguanosine-3'-phosphate
  modified_base 16: mod_base = OTHER; note = 2'-deoxy-2'-fluorocytidine-3'-phosphate
  modified_base 17: mod_base = OTHER; note = 2'-O-methyluridine-3'-phosphate
  modified_base 18: mod_base = OTHER; note = 2'-O-methyluridine-3'-phosphate
  modified_base 19: mod_base = OTHER; note = 2'-O-methylcytidine-3'-phosphate
  modified_base 20: mod_base = OTHER; note = 2'-O-methylcytidine-3'-phosphate
  modified_base 21: mod_base = OTHER; note = 2'-O-methyladenosine-3'-phosphorothioate
  modified_base 22: mod_base = OTHER; note = 2'-O-methylguanosine-3'-phosphorothioate
  modified_base 23: mod_base = OTHER; note = 2'-O-methylcytidine
ttaaataaacatgtgcttccagc

SEQ ID NO: 2892 - RNA, 23 nt, synthetic construct
  source 1..23: mol_type = other RNA
  modified_base 1: mod_base = OTHER; note = 2'-O-methyluridine-3'-phosphorothioate 5'-(E)-Vinylphosphonate
  modified_base 2: mod_base = OTHER; note = 2'-deoxy-2'-fluorocytidine-3'-phosphorothioate
  modified_base 3: mod_base = OTHER; note = 2'-O-methyladenosine-3'-phosphate
  modified_base 4: mod_base = OTHER; note = 2'-O-methyluridine-3'-phosphate
  modified_base 5: mod_base = OTHER; note = 2'-O-methylcytidine-3'-phosphate
  modified_base 6: mod_base = OTHER; note = 2'-deoxy-2'-fluorocytidine-3'-phosphate
  modified_base 7: mod_base = OTHER; note = 2'-O-methyladenosine-3'-phosphate
  modified_base 8: mod_base = OTHER; note = 2'-deoxy-2'-fluoroguanosine-3'-phosphate
  modified_base 9: mod_base = OTHER; note = 2'-deoxy-2'-fluoroadenosine-3'-phosphate
  modified_base 10: mod_base = OTHER; note = 2'-O-methyladenosine-3'-phosphate
  modified_base 11: mod_base = OTHER; note = 2'-O-methyluridine-3'-phosphate
  modified_base 12: mod_base = OTHER; note = 2'-O-methyladenosine-3'-phosphate
  modified_base 13: mod_base = OTHER; note = 2'-O-methyladenosine-3'-phosphate
  modified_base 14: mod_base = OTHER; note = 2'-deoxy-2'-fluoroadenosine-3'-phosphate
  modified_base 15: mod_base = OTHER; note = 2'-O-methyladenosine-3'-phosphate
  modified_base 16: mod_base = OTHER; note = 2'-deoxy-2'-fluorouridine-3'-phosphate
  modified_base 17: mod_base = OTHER; note = 2'-O-methylguanosine-3'-phosphate
  modified_base 18: mod_base = OTHER; note = 2'-O-methylcytidine-3'-phosphate
  modified_base 19: mod_base = OTHER; note = 2'-O-methyladenosine-3'-phosphate
  modified_base 20: mod_base = OTHER; note = 2'-O-methylguanosine-3'-phosphate
  modified_base 21: mod_base = OTHER; note = 2'-O-methyladenosine-3'-phosphorothioate
  modified_base 22: mod_base = OTHER; note = 2'-O-methyladenosine-3'-phosphorothioate
  modified_base 23: mod_base = OTHER; note = 2'-O-methyluridine
tcatccagaataaaatgcagaat

SEQ ID NO: 2893 - RNA, 23 nt, synthetic construct
  source 1..23: mol_type = other RNA
  modified_base 1: mod_base = OTHER; note = 2'-O-methyluridine-3'-phosphorothioate 5'-(E)-Vinylphosphonate
  modified_base 2: mod_base = OTHER; note = 2'-deoxy-2'-fluorouridine-3'-phosphorothioate
  modified_base 3: mod_base = OTHER; note = 2'-O-methylguanosine-3'-phosphate
  modified_base 4: mod_base = OTHER; note = 2'-O-methylcytidine-3'-phosphate
  modified_base 5: mod_base = OTHER; note = 2'-O-methyluridine-3'-phosphate
  modified_base 6: mod_base = OTHER; note = 2'-deoxy-2'-fluorouridine-3'-phosphate
  modified_base 7: mod_base = OTHER; note = 2'-O-methyluridine-3'-phosphate
  modified_base 8: mod_base = OTHER; note = 2'-deoxy-2'-fluoroguanosine-3'-phosphate
  modified_base 9: mod_base = OTHER; note = 2'-deoxy-2'-fluorocytidine-3'-phosphate
  modified_base 10: mod_base = OTHER; note = 2'-O-methyluridine-3'-phosphate
  modified_base 11: mod_base = OTHER; note = 2'-O-methyluridine-3'-phosphate
  modified_base 12: mod_base = OTHER; note = 2'-O-methylcytidine-3'-phosphate
  modified_base 13: mod_base = OTHER; note = 2'-O-methyladenosine-3'-phosphate
  modified_base 14: mod_base = OTHER; note = 2'-deoxy-2'-fluoroadenosine-3'-phosphate
  modified_base 15: mod_base = OTHER; note = 2'-O-methyladenosine-3'-phosphate
  modified_base 16: mod_base = OTHER; note = 2'-deoxy-2'-fluorouridine-3'-phosphate
  modified_base 17: mod_base = OTHER; note = 2'-O-methylcytidine-3'-phosphate
  modified_base 18: mod_base = OTHER; note = 2'-O-methylcytidine-3'-phosphate
  modified_base 19: mod_base = OTHER; note = 2'-O-methyladenosine-3'-phosphate
  modified_base 20: mod_base = OTHER; note = 2'-O-methyluridine-3'-phosphate
  modified_base 21: mod_base = OTHER; note = 2'-O-methylcytidine-3'-phosphorothioate
  modified_base 22: mod_base = OTHER; note = 2'-O-methylcytidine-3'-phosphorothioate
  modified_base 23: mod_base = OTHER; note = 2'-O-methyladenosine
ttgctttgcttcaaatccatcca

SEQ ID NO: 2894 - RNA, 23 nt, synthetic construct
  source 1..23: mol_type = other RNA
  modified_base 1: mod_base = OTHER; note = 2'-O-methyluridine-3'-phosphorothioate 5'-(E)-Vinylphosphonate
  modified_base 2: mod_base = OTHER; note = 2'-deoxy-2'-fluoroadenosine-3'-phosphorothioate
  modified_base 3: mod_base = OTHER; note = 2'-O-methyladenosine-3'-phosphate
  modified_base 4: mod_base = OTHER; note = 2'-O-methyladenosine-3'-phosphate
  modified_base 5: mod_base = OTHER; note = 2'-O-methylguanosine-3'-phosphate
  modified_base 6: mod_base = OTHER; note = 2'-deoxy-2'-fluoroadenosine-3'-phosphate
  modified_base 7: mod_base = OTHER; note = 2'-O-methylguanosine-3'-phosphate
  modified_base 8: mod_base = OTHER; note = 2'-deoxy-2'-fluorocytidine-3'-phosphate
  modified_base 9: mod_base = OTHER; note = 2'-deoxy-2'-fluorocytidine-3'-phosphate
  modified_base 10: mod_base = OTHER; note = 2'-O-methyluridine-3'-phosphate
  modified_base 11: mod_base = OTHER; note = 2'-O-methylguanosine-3'-phosphate
  modified_base 12: mod_base = OTHER; note = 2'-O-methylguanosine-3'-phosphate
  modified_base 13: mod_base = OTHER; note = 2'-O-methyladenosine-3'-phosphate
  modified_base 14: mod_base = OTHER; note = 2'-deoxy-2'-fluoroguanosine-3'-phosphate
  modified_base 15: mod_base = OTHER; note = 2'-O-methyladenosine-3'-phosphate
  modified_base 16: mod_base = OTHER; note = 2'-deoxy-2'-fluoroadenosine-3'-phosphate
  modified_base 17: mod_base = OTHER; note = 2'-O-methylguanosine-3'-phosphate
  modified_base 18: mod_base = OTHER; note = 2'-O-methylcytidine-3'-phosphate
  modified_base 19: mod_base = OTHER; note = 2'-O-methyluridine-3'-phosphate
  modified_base 20: mod_base = OTHER; note = 2'-O-methylguanosine-3'-phosphate
  modified_base 21: mod_base = OTHER; note = 2'-O-methylguanosine-3'-phosphorothioate
  modified_base 22: mod_base = OTHER; note = 2'-O-methyluridine-3'-phosphorothioate
  modified_base 23: mod_base = OTHER; note = 2'-O-methylguanosine
taaagagcctggagaagctggtg

SEQ ID NO: 2895 - RNA, 23 nt, synthetic construct
  source 1..23: mol_type = other RNA
  modified_base 1: mod_base = OTHER; note = 2'-O-methyluridine-3'-phosphorothioate 5'-(E)-Vinylphosphonate
  modified_base 2: mod_base = OTHER; note = 2'-deoxy-2'-fluoroadenosine-3'-phosphorothioate
  modified_base 3: mod_base = OTHER; note = 2'-O-methyluridine-3'-phosphate
  modified_base 4: mod_base = OTHER; note = 2'-O-methylcytidine-3'-phosphate
  modified_base 5: mod_base = OTHER; note = 2'-O-methyluridine-3'-phosphate
  modified_base 6: mod_base = OTHER; note = 2'-deoxy-2'-fluoroadenosine-3'-phosphate
  modified_base 7: mod_base = OTHER; note = 2'-O-methyluridine-3'-phosphate
  modified_base 8: mod_base = OTHER; note = 2'-deoxy-2'-fluoroguanosine-3'-phosphate
  modified_base 9: mod_base = OTHER; note = 2'-deoxy-2'-fluoroguanosine-3'-phosphate
  modified_base 10: mod_base = OTHER; note = 2'-O-methylguanosine-3'-phosphate
  modified_base 11: mod_base = OTHER; note = 2'-O-methyladenosine-3'-phosphate
  modified_base 12: mod_base = OTHER; note = 2'-O-methyluridine-3'-phosphate
  modified_base 13: mod_base = OTHER; note = 2'-O-methyluridine-3'-phosphate
  modified_base 14: mod_base = OTHER; note = 2'-deoxy-2'-fluoroguanosine-3'-phosphate
  modified_base 15: mod_base = OTHER; note = 2'-O-methylguanosine-3'-phosphate
  modified_base 16: mod_base = OTHER; note = 2'-deoxy-2'-fluoroadenosine-3'-phosphate
  modified_base 17: mod_base = OTHER; note = 2'-O-methyladenosine-3'-phosphate
  modified_base 18: mod_base = OTHER; note = 2'-O-methyladenosine-3'-phosphate
  modified_base 19: mod_base = OTHER; note = 2'-O-methylcytidine-3'-phosphate
  modified_base 20: mod_base = OTHER; note = 2'-O-methyluridine-3'-phosphate
  modified_base 21: mod_base = OTHER; note = 2'-O-methylguanosine-3'-phosphorothioate
  modified_base 22: mod_base = OTHER; note = 2'-O-methylcytidine-3'-phosphorothioate
  modified_base 23: mod_base = OTHER; note = 2'-O-methyladenosine
tatctatgggattggaaactgca

SEQ ID NO: 2896 - RNA, 23 nt, synthetic construct
  source 1..23: mol_type = other RNA
  modified_base 1: mod_base = OTHER; note = 2'-O-methyluridine-3'-phosphorothioate 5'-(E)-Vinylphosphonate
  modified_base 2: mod_base = OTHER; note = 2'-deoxy-2'-fluoroadenosine-3'-phosphorothioate
  modified_base 3: mod_base = OTHER; note = 2'-O-methylcytidine-3'-phosphate
  modified_base 4: mod_base = OTHER; note = 2'-O-methyluridine-3'-phosphate
  modified_base 5: mod_base = OTHER; note = 2'-O-methylcytidine-3'-phosphate
  modified_base 6: mod_base = OTHER; note = 2'-deoxy-2'-fluoroadenosine-3'-phosphate
  modified_base 7: mod_base = OTHER; note = 2'-O-methyladenosine-3'-phosphate
  modified_base 8: mod_base = OTHER; note = 2'-deoxy-2'-fluoroadenosine-3'-phosphate
  modified_base 9: mod_base = OTHER; note = 2'-deoxy-2'-fluoroadenosine-3'-phosphate
  modified_base 10: mod_base = OTHER; note = 2'-O-methyluridine-3'-phosphate
  modified_base 11: mod_base = OTHER; note = 2'-O-methylguanosine-3'-phosphate
  modified_base 12: mod_base = OTHER; note = 2'-O-methylguanosine-3'-phosphate
  modified_base 13: mod_base = OTHER; note = 2'-O-methylguanosine-3'-phosphate
  modified_base 14: mod_base = OTHER; note = 2'-deoxy-2'-fluorouridine-3'-phosphate
  modified_base 15: mod_base = OTHER; note = 2'-O-methyluridine-3'-phosphate
  modified_base 16: mod_base = OTHER; note = 2'-deoxy-2'-fluorocytidine-3'-phosphate
  modified_base 17: mod_base = OTHER; note = 2'-O-methyladenosine-3'-phosphate
  modified_base 18: mod_base = OTHER; note = 2'-O-methylguanosine-3'-phosphate
  modified_base 19: mod_base = OTHER; note = 2'-O-methylcytidine-3'-phosphate
  modified_base 20: mod_base = OTHER; note = 2'-O-methyluridine-3'-phosphate
  modified_base 21: mod_base = OTHER; note = 2'-O-methylcytidine-3'-phosphorothioate
  modified_base 22: mod_base = OTHER; note = 2'-O-methyladenosine-3'-phosphorothioate
  modified_base 23: mod_base = OTHER; note = 2'-O-methylguanosine
tactcaaaatgggttcagctcag

SEQ ID NO: 2897 - RNA, 23 nt, synthetic construct
  source 1..23: mol_type = other RNA
  modified_base 1: mod_base = OTHER; note = 2'-O-methyluridine-3'-phosphorothioate 5'-(E)-Vinylphosphonate
  modified_base 2: mod_base = OTHER; note = 2'-deoxy-2'-fluorouridine-3'-phosphorothioate
  modified_base 3: mod_base = OTHER; note = 2'-O-methylcytidine-3'-phosphate
  modified_base 4: mod_base = OTHER; note = 2'-O-methyluridine-3'-phosphate
  modified_base 5: mod_base = OTHER; note = 2'-O-methyluridine-3'-phosphate
  modified_base 6: mod_base = OTHER; note = 2'-deoxy-2'-fluoroguanosine-3'-phosphate
  modified_base 7: mod_base = OTHER; note = 2'-O-methylcytidine-3'-phosphate
  modified_base 8: mod_base = OTHER; note = 2'-deoxy-2'-fluorouridine-3'-phosphate
  modified_base 9: mod_base = OTHER; note = 2'-deoxy-2'-fluorocytidine-3'-phosphate
  modified_base 10: mod_base = OTHER; note = 2'-O-methyladenosine-3'-phosphate
  modified_base 11: mod_base = OTHER; note = 2'-O-methylguanosine-3'-phosphate
  modified_base 12: mod_base = OTHER; note = 2'-O-methyladenosine-3'-phosphate
  modified_base 13: mod_base = OTHER; note = 2'-O-methyluridine-3'-phosphate
  modified_base 14: mod_base = OTHER; note = 2'-deoxy-2'-fluoroguanosine-3'-phosphate
  modified_base 15: mod_base = OTHER; note = 2'-O-methyladenosine-3'-phosphate
  modified_base 16: mod_base = OTHER; note = 2'-deoxy-2'-fluoroadenosine-3'-phosphate
  modified_base 17: mod_base = OTHER; note = 2'-O-methylcytidine-3'-phosphate
  modified_base 18: mod_base = OTHER; note = 2'-O-methylcytidine-3'-phosphate
  modified_base 19: mod_base = OTHER; note = 2'-O-methylcytidine-3'-phosphate
  modified_base 20: mod_base = OTHER; note = 2'-O-methyladenosine-3'-phosphate
  modified_base 21: mod_base = OTHER; note = 2'-O-methyladenosine-3'-phosphorothioate
  modified_base 22: mod_base = OTHER; note = 2'-O-methylcytidine-3'-phosphorothioate
  modified_base 23: mod_base = OTHER; note = 2'-O-methylcytidine
ttcttgctcagatgaacccaacc

SEQ ID NO: 2898 - RNA, 23 nt, synthetic construct
  source 1..23: mol_type = other RNA
  modified_base 1: mod_base = OTHER; note = 2'-O-methyluridine-3'-phosphorothioate 5'-(E)-Vinylphosphonate
  modified_base 2: mod_base = OTHER; note = 2'-deoxy-2'-fluoroadenosine-3'-phosphorothioate
  modified_base 3: mod_base = OTHER; note = 2'-O-methylguanosine-3'-phosphate
  modified_base 4: mod_base = OTHER; note = 2'-O-methyladenosine-3'-phosphate
  modified_base 5: mod_base = OTHER; note = 2'-O-methylguanosine-3'-phosphate
  modified_base 6: mod_base = OTHER; note = 2'-deoxy-2'-fluorocytidine-3'-phosphate
  modified_base 7: mod_base = OTHER; note = 2'-O-methylcytidine-3'-phosphate
  modified_base 8: mod_base = OTHER; note = 2'-deoxy-2'-fluoroadenosine-3'-phosphate
  modified_base 9: mod_base = OTHER; note = 2'-deoxy-2'-fluorocytidine-3'-phosphate
  modified_base 10: mod_base = OTHER; note = 2'-O-methylcytidine-3'-phosphate
  modified_base 11: mod_base = OTHER; note = 2'-O-methyluridine-3'-phosphate
  modified_base 12: mod_base = OTHER; note = 2'-O-methyluridine-3'-phosphate
  modified_base 13: mod_base = OTHER; note = 2'-O-methyluridine-3'-phosphate
  modified_base 14: mod_base = OTHER; note = 2'-deoxy-2'-fluoroguanosine-3'-phosphate
  modified_base 15: mod_base = OTHER; note = 2'-O-methylcytidine-3'-phosphate
  modified_base 16: mod_base = OTHER; note = 2'-deoxy-2'-fluorocytidine-3'-phosphate
  modified_base 17: mod_base = OTHER; note = 2'-O-methyladenosine-3'-phosphate
  modified_base 18: mod_base = OTHER; note = 2'-O-methylguanosine-3'-phosphate
  modified_base 19: mod_base = OTHER; note = 2'-O-methylcytidine-3'-phosphate
  modified_base 20: mod_base = OTHER; note = 2'-O-methyluridine-3'-phosphate
  modified_base 21: mod_base = OTHER; note = 2'-O-methylcytidine-3'-phosphorothioate
  modified_base 22: mod_base = OTHER; note = 2'-O-methyluridine-3'-phosphorothioate
  modified_base 23: mod_base = OTHER; note = 2'-O-methyluridine
tagagccacctttgccagctctt

SEQ ID NO: 2899 - RNA, 23 nt, synthetic construct
  source 1..23: mol_type = other RNA
  modified_base 1: mod_base = OTHER; note = 2'-O-methyluridine-3'-phosphorothioate 5'-(E)-Vinylphosphonate
  modified_base 2: mod_base = OTHER; note = 2'-deoxy-2'-fluoroguanosine-3'-phosphorothioate
  modified_base 3: mod_base = OTHER; note = 2'-O-methyladenosine-3'-phosphate
  modified_base 4: mod_base = OTHER; note = 2'-O-methylguanosine-3'-phosphate
  modified_base 5: mod_base = OTHER; note = 2'-O-methyladenosine-3'-phosphate
  modified_base 6: mod_base = OTHER; note = 2'-deoxy-2'-fluoroguanosine-3'-phosphate
  modified_base 7: mod_base = OTHER; note = 2'-O-methyladenosine-3'-phosphate
  modified_base 8: mod_base = OTHER; note = 2'-deoxy-2'-fluoroadenosine-3'-phosphate
  modified_base 9: mod_base = OTHER; note = 2'-deoxy-2'-fluorocytidine-3'-phosphate
  modified_base 10: mod_base = OTHER; note = 2'-O-methyluridine-3'-phosphate
  modified_base 11: mod_base = OTHER; note = 2'-O-methyladenosine-3'-phosphate
  modified_base 12: mod_base = OTHER; note = 2'-O-methyladenosine-3'-phosphate
  modified_base 13: mod_base = OTHER; note = 2'-O-methylcytidine-3'-phosphate
  modified_base 14: mod_base = OTHER; note = 2'-deoxy-2'-fluorouridine-3'-phosphate
  modified_base 15: mod_base = OTHER; note = 2'-O-methylguanosine-3'-phosphate
  modified_base 16: mod_base = OTHER; note = 2'-deoxy-2'-fluoroguanosine-3'-phosphate
  modified_base 17: mod_base = OTHER; note = 2'-O-methyladenosine-3'-phosphate
  modified_base 18: mod_base = OTHER; note = 2'-O-methylguanosine-3'-phosphate
  modified_base 19: mod_base = OTHER; note = 2'-O-methyladenosine-3'-phosphate
  modified_base 20: mod_base = OTHER; note = 2'-O-methylguanosine-3'-phosphate
  modified_base 21: mod_base = OTHER; note = 2'-O-methylcytidine-3'-phosphorothioate
  modified_base 22: mod_base = OTHER; note = 2'-O-methylcytidine-3'-phosphorothioate
  modified_base 23: mod_base = OTHER; note = 2'-O-methyladenosine
tgagagaactaactggagagcca

SEQ ID NO: 2900 - RNA, 23 nt, synthetic construct
  source 1..23: mol_type = other RNA
  modified_base 1: mod_base = OTHER; note = 2'-O-methyluridine-3'-phosphorothioate 5'-(E)-Vinylphosphonate
  modified_base 2: mod_base = OTHER; note = 2'-deoxy-2'-fluoroadenosine-3'-phosphorothioate
  modified_base 3: mod_base = OTHER; note = 2'-O-methyladenosine-3'-phosphate
  modified_base 4: mod_base = OTHER; note = 2'-O-methyladenosine-3'-phosphate
  modified_base 5: mod_base = OTHER; note = 2'-O-methyluridine-3'-phosphate
  modified_base 6: mod_base = OTHER; note = 2'-deoxy-2'-fluoroguanosine-3'-phosphate
  modified_base 7: mod_base = OTHER; note = 2'-O-methyladenosine-3'-phosphate
  modified_base 8: mod_base = OTHER; note = 2'-deoxy-2'-fluoroadenosine-3'-phosphate
  modified_base 9: mod_base = OTHER; note = 2'-deoxy-2'-fluoroadenosine-3'-phosphate
  modified_base 10: mod_base = OTHER; note = 2'-O-methylcytidine-3'-phosphate
  modified_base 11: mod_base = OTHER; note = 2'-O-methylcytidine-3'-phosphate
  modified_base 12: mod_base = OTHER; note = 2'-O-methyladenosine-3'-phosphate
  modified_base 13: mod_base = OTHER; note = 2'-O-methylguanosine-3'-phosphate
  modified_base 14: mod_base = OTHER; note = 2'-deoxy-2'-fluorouridine-3'-phosphate
  modified_base 15: mod_base = OTHER; note = 2'-O-methyluridine-3'-phosphate
  modified_base 16: mod_base = OTHER; note = 2'-deoxy-2'-fluoroadenosine-3'-phosphate
  modified_base 17: mod_base = OTHER; note = 2'-O-methylcytidine-3'-phosphate
  modified_base 18: mod_base = OTHER; note = 2'-O-methylguanosine-3'-phosphate
  modified_base 19: mod_base = OTHER; note = 2'-O-methyladenosine-3'-phosphate
  modified_base 20: mod_base = OTHER; note = 2'-O-methylguanosine-3'-phosphate
  modified_base 21: mod_base = OTHER; note = 2'-O-methyladenosine-3'-phosphorothioate
  modified_base 22: mod_base = OTHER; note = 2'-O-methylguanosine-3'-phosphorothioate
  modified_base 23: mod_base = OTHER; note = 2'-O-methyladenosine
taaatgaaaccagttacgagaga

SEQ ID NO: 2901 - RNA, 23 nt, synthetic construct
  source 1..23: mol_type = other RNA
  modified_base 1: mod_base = OTHER; note = 2'-O-methyluridine-3'-phosphorothioate 5'-(E)-Vinylphosphonate
  modified_base 2: mod_base = OTHER; note = 2'-deoxy-2'-fluorouridine-3'-phosphorothioate
  modified_base 3: mod_base = OTHER; note = 2'-O-methylguanosine-3'-phosphate
  modified_base 4: mod_base = OTHER; note = 2'-O-methyluridine-3'-phosphate
  modified_base 5: mod_base = OTHER; note = 2'-O-methyladenosine-3'-phosphate
  modified_base 6: mod_base = OTHER; note = 2'-deoxy-2'-fluoroadenosine-3'-phosphate
  modified_base 7: mod_base = OTHER; note = 2'-O-methylcytidine-3'-phosphate
  modified_base 8: mod_base = OTHER; note = 2'-deoxy-2'-fluoroadenosine-3'-phosphate
  modified_base 9: mod_base = OTHER; note = 2'-deoxy-2'-fluorouridine-3'-phosphate
  modified_base 10: mod_base = OTHER; note = 2'-O-methylcytidine-3'-phosphate
  modified_base 11: mod_base = OTHER; note = 2'-O-methyladenosine-3'-phosphate
  modified_base 12: mod_base = OTHER; note = 2'-O-methylguanosine-3'-phosphate
  modified_base 13: mod_base = OTHER; note = 2'-O-methyluridine-3'-phosphate
  modified_base 14: mod_base = OTHER; note = 2'-deoxy-2'-fluorocytidine-3'-phosphate
  modified_base 15: mod_base = OTHER; note = 2'-O-methyladenosine-3'-phosphate
  modified_base 16: mod_base = OTHER; note = 2'-deoxy-2'-fluorocytidine-3'-phosphate
  modified_base 17: mod_base = OTHER; note = 2'-O-methyladenosine-3'-phosphate
  modified_base 18: mod_base = OTHER; note = 2'-O-methylguanosine-3'-phosphate
  modified_base 19: mod_base = OTHER; note = 2'-O-methyluridine-3'-phosphate
  modified_base 20: mod_base = OTHER; note = 2'-O-methyladenosine-3'-phosphate
  modified_base 21: mod_base = OTHER; note = 2'-O-methylguanosine-3'-phosphorothioate
  modified_base 22: mod_base = OTHER; note = 2'-O-methyladenosine-3'-phosphorothioate
  modified_base 23: mod_base = OTHER; note = 2'-O-methyladenosine
ttgtaacatcagtcacagtagaa

SEQ ID NO: 2902 - RNA, 23 nt, synthetic construct
  source 1..23: mol_type = other RNA
  modified_base 1: mod_base = OTHER; note = 2'-O-methyluridine-3'-phosphorothioate 5'-(E)-Vinylphosphonate
  modified_base 2: mod_base = OTHER; note = 2'-deoxy-2'-fluorouridine-3'-phosphorothioate
  modified_base 3: mod_base = OTHER; note = 2'-O-methyluridine-3'-phosphate
  modified_base 4: mod_base = OTHER; note = 2'-O-methylguanosine-3'-phosphate
  modified_base 5: mod_base = OTHER; note = 2'-O-methylcytidine-3'-phosphate
  modified_base 6: mod_base = OTHER; note = 2'-deoxy-2'-fluoroadenosine-3'-phosphate
  modified_base 7: mod_base = OTHER; note = 2'-O-methyladenosine-3'-phosphate
  modified_base 8: mod_base = OTHER; note = 2'-deoxy-2'-fluoroadenosine-3'-phosphate
  modified_base 9: mod_base = OTHER; note = 2'-deoxy-2'-fluorocytidine-3'-phosphate
  modified_base 10: mod_base = OTHER; note = 2'-O-methyladenosine-3'-phosphate
  modified_base 11: mod_base = OTHER; note = 2'-O-methylcytidine-3'-phosphate
  modified_base 12: mod_base = OTHER; note = 2'-O-methyluridine-3'-phosphate
  modified_base 13: mod_base = OTHER; note = 2'-O-methylguanosine-3'-phosphate
  modified_base 14: mod_base = OTHER; note = 2'-deoxy-2'-fluorouridine-3'-phosphate
  modified_base 15: mod_base = OTHER; note = 2'-O-methylguanosine-3'-phosphate
  modified_base 16: mod_base = OTHER; note = 2'-deoxy-2'-fluoroadenosine-3'-phosphate
  modified_base 17: mod_base = OTHER; note = 2'-O-methyluridine-3'-phosphate
  modified_base 18: mod_base = OTHER; note = 2'-O-methylguanosine-3'-phosphate
  modified_base 19: mod_base = OTHER; note = 2'-O-methyluridine-3'-phosphate
  modified_base 20: mod_base = OTHER; note = 2'-O-methyladenosine-3'-phosphate
  modified_base 21: mod_base = OTHER; note = 2'-O-methyladenosine-3'-phosphorothioate
  modified_base 22: mod_base = OTHER; note = 2'-O-methylcytidine-3'-phosphorothioate
  modified_base 23: mod_base = OTHER; note = 2'-O-methyladenosine
tttgcaaacactgtgatgtaaca

SEQ ID NO: 2903 - RNA, 23 nt, synthetic construct
  source 1..23: mol_type = other RNA
  modified_base 1: mod_base = OTHER; note = 2'-O-methyluridine-3'-phosphorothioate 5'-(E)-Vinylphosphonate
  modified_base 2: mod_base = OTHER; note = 2'-deoxy-2'-fluorouridine-3'-phosphorothioate
  modified_base 3: mod_base = OTHER; note = 2'-O-methylguanosine-3'-phosphate
  modified_base 4: mod_base = OTHER; note = 2'-O-methylguanosine-3'-phosphate
  modified_base 5: mod_base = OTHER; note = 2'-O-methyladenosine-3'-phosphate
  modified_base 6: mod_base = OTHER; note = 2'-deoxy-2'-fluoroguanosine-3'-phosphate
  modified_base 7: mod_base = OTHER; note = 2'-O-methyladenosine-3'-phosphate
  modified_base 8: mod_base = OTHER; note = 2'-deoxy-2'-fluorouridine-3'-phosphate
  modified_base 9: mod_base = OTHER; note = 2'-deoxy-2'-fluorocytidine-3'-phosphate
  modified_base 10: mod_base = OTHER; note = 2'-O-methylcytidine-3'-phosphate
  modified_base 11: mod_base = OTHER; note = 2'-O-methyladenosine-3'-phosphate
  modified_base 12: mod_base = OTHER; note = 2'-O-methylcytidine-3'-phosphate
  modified_base 13: mod_base = OTHER; note = 2'-O-methyluridine-3'-phosphate
  modified_base 14: mod_base = OTHER; note = 2'-deoxy-2'-fluorocytidine-3'-phosphate
  modified_base 15: mod_base = OTHER; note = 2'-O-methyladenosine-3'-phosphate
  modified_base 16: mod_base = OTHER; note = 2'-deoxy-2'-fluoroguanosine-3'-phosphate
  modified_base 17: mod_base = OTHER; note = 2'-O-methylguanosine-3'-phosphate
  modified_base 18: mod_base = OTHER; note = 2'-O-methylguanosine-3'-phosphate
  modified_base 19: mod_base = OTHER; note = 2'-O-methylcytidine-3'-phosphate
  modified_base 20: mod_base = OTHER; note = 2'-O-methyladenosine-3'-phosphate
  modified_base 21: mod_base = OTHER; note = 2'-O-methyladenosine-3'-phosphorothioate
  modified_base 22: mod_base = OTHER; note = 2'-O-methylcytidine-3'-phosphorothioate
  modified_base 23: mod_base = OTHER; note = 2'-O-methyladenosine
ttggagatccactcagggcaaca

SEQ ID NO: 2904 - RNA, 23 nt, synthetic construct
  source 1..23: mol_type = other RNA
  modified_base 1: mod_base = OTHER; note = 2'-O-methyluridine-3'-phosphorothioate 5'-(E)-Vinylphosphonate
  modified_base 2: mod_base = OTHER; note = 2'-deoxy-2'-fluoroadenosine-3'-phosphorothioate
  modified_base 3: mod_base = OTHER; note = 2'-O-methyladenosine-3'-phosphate
  modified_base 4: mod_base = OTHER; note = 2'-O-methyladenosine-3'-phosphate
  modified_base 5: mod_base = OTHER; note = 2'-O-methyladenosine-3'-phosphate
  modified_base 6: mod_base = OTHER; note = 2'-deoxy-2'-fluorouridine-3'-phosphate
  modified_base 7: mod_base = OTHER; note = 2'-O-methyladenosine-3'-phosphate
  modified_base 8: mod_base = OTHER; note = 2'-deoxy-2'-fluoroadenosine-3'-phosphate
  modified_base 9: mod_base = OTHER; note = 2'-deoxy-2'-fluorocytidine-3'-phosphate
  modified_base 10: mod_base = OTHER; note = 2'-O-methylcytidine-3'-phosphate
  modified_base 11: mod_base = OTHER; note = 2'-O-methyluridine-3'-phosphate
  modified_base 12: mod_base = OTHER; note = 2'-O-methylguanosine-3'-phosphate
  modified_base 13: mod_base = OTHER; note = 2'-O-methylguanosine-3'-phosphate
  modified_base 14: mod_base = OTHER; note = 2'-deoxy-2'-fluorouridine-3'-phosphate
  modified_base 15: mod_base = OTHER; note = 2'-O-methylcytidine-3'-phosphate
  modified_base 16: mod_base = OTHER; note = 2'-deoxy-2'-fluorocytidine-3'-phosphate
  modified_base 17: mod_base = OTHER; note = 2'-O-methyluridine-3'-phosphate
  modified_base 18: mod_base = OTHER; note = 2'-O-methyluridine-3'-phosphate
  modified_base 19: mod_base = OTHER; note = 2'-O-methylguanosine-3'-phosphate
  modified_base 20: mod_base = OTHER; note = 2'-O-methylguanosine-3'-phosphate
  modified_base 21: mod_base = OTHER; note = 2'-O-methyladenosine-3'-phosphorothioate
  modified_base 22: mod_base = OTHER; note = 2'-O-methylguanosine-3'-phosphorothioate
  modified_base 23: mod_base = OTHER; note = 2'-O-methyladenosine
taaaataacctggtccttggaga

SEQ ID NO: 2905 - RNA, 23 nt, synthetic construct
  source 1..23: mol_type = other RNA
  modified_base 1: mod_base = OTHER; note = 2'-O-methyluridine-3'-phosphorothioate 5'-(E)-Vinylphosphonate
  modified_base 2: mod_base = OTHER; note = 2'-deoxy-2'-fluorouridine-3'-phosphorothioate
  modified_base 3: mod_base = OTHER; note = 2'-O-methyladenosine-3'-phosphate
  modified_base 4: mod_base = OTHER; note = 2'-O-methylcytidine-3'-phosphate
  modified_base 5: mod_base = OTHER; note = 2'-O-methyladenosine-3'-phosphate
  modified_base 6: mod_base = OTHER; note = 2'-deoxy-2'-fluorouridine-3'-phosphate
  modified_base 7: mod_base = OTHER; note = 2'-O-methyladenosine-3'-phosphate
  modified_base 8: mod_base = OTHER; note = 2'-deoxy-2'-fluorouridine-3'-phosphate
  modified_base 9: mod_base = OTHER; note = 2'-deoxy-2'-fluoroguanosine-3'-phosphate
  modified_base 10: mod_base = OTHER; note = 2'-O-methyladenosine-3'-phosphate
  modified_base 11: mod_base = OTHER; note = 2'-O-methylcytidine-3'-phosphate
  modified_base 12: mod_base = OTHER; note = 2'-O-methyladenosine-3'-phosphate
  modified_base 13: mod_base = OTHER; note = 2'-O-methylcytidine-3'-phosphate
  modified_base 14: mod_base = OTHER; note = 2'-deoxy-2'-fluorouridine-3'-phosphate
  modified_base 15: mod_base = OTHER; note = 2'-O-methyluridine-3'-phosphate
  modified_base 16: mod_base = OTHER; note = 2'-deoxy-2'-fluoroguanosine-3'-phosphate
  modified_base 17: mod_base = OTHER; note = 2'-O-methyladenosine-3'-phosphate
  modified_base 18: mod_base = OTHER; note = 2'-O-methylcytidine-3'-phosphate
  modified_base 19: mod_base = OTHER; note = 2'-O-methyladenosine-3'-phosphate
  modified_base 20: mod_base = OTHER; note = 2'-O-methyladenosine-3'-phosphate
  modified_base 21: mod_base = OTHER; note = 2'-O-methyladenosine-3'-phosphorothioate
  modified_base 22: mod_base = OTHER; note = 2'-O-methyladenosine-3'-phosphorothioate
  modified_base 23: mod_base = OTHER; note = 2'-O-methylcytidine
ttacatatgacacttgacaaaac

SEQ ID NO: 2906 - RNA, 23 nt, synthetic construct
  source 1..23: mol_type = other RNA
  modified_base 1: mod_base = OTHER; note = 2'-O-methyluridine-3'-phosphorothioate 5'-(E)-Vinylphosphonate
  modified_base 2: mod_base = OTHER; note = 2'-deoxy-2'-fluoroadenosine-3'-phosphorothioate
  modified_base 3: mod_base = OTHER; note = 2'-O-methyluridine-3'-phosphate
  modified_base 4: mod_base = OTHER; note = 2'-O-methyluridine-3'-phosphate
  modified_base 5: mod_base = OTHER; note = 2'-O-methylcytidine-3'-phosphate
  modified_base 6: mod_base = OTHER; note = 2'-deoxy-2'-fluorouridine-3'-phosphate
  modified_base 7: mod_base = OTHER; note = 2'-O-methyladenosine-3'-phosphate
  modified_base 8: mod_base = OTHER; note = 2'-deoxy-2'-fluoroguanosine-3'-phosphate
  modified_base 9: mod_base = OTHER; note = 2'-deoxy-2'-fluoroadenosine-3'-phosphate
  modified_base 10: mod_base = OTHER; note = 2'-O-methyluridine-3'-phosphate
  modified_base 11: mod_base = OTHER; note = 2'-O-methylcytidine-3'-phosphate
  modified_base 12: mod_base = OTHER; note = 2'-O-methylcytidine-3'-phosphate
  modified_base 13: mod_base = OTHER; note = 2'-O-methyluridine-3'-phosphate
  modified_base 14: mod_base = OTHER; note = 2'-deoxy-2'-fluorouridine-3'-phosphate
  modified_base 15: mod_base = OTHER; note = 2'-O-methylcytidine-3'-phosphate
  modified_base 16: mod_base = OTHER; note = 2'-deoxy-2'-fluorouridine-3'-phosphate
  modified_base 17: mod_base = OTHER; note = 2'-O-methylcytidine-3'-phosphate
  modified_base 18: mod_base = OTHER; note = 2'-O-methylcytidine-3'-phosphate
  modified_base 19: mod_base = OTHER; note = 2'-O-methylcytidine-3'-phosphate
  modified_base 20: mod_base = OTHER; note = 2'-O-methyluridine-3'-phosphate
  modified_base 21: mod_base = OTHER; note = 2'-O-methyluridine-3'-phosphorothioate
  modified_base 22: mod_base = OTHER; note = 2'-O-methylcytidine-3'-phosphorothioate
  modified_base 23: mod_base = OTHER; note = 2'-O-methyluridine
tattctagatccttctcccttct

SEQ ID NO: 2907 - RNA, 23 nt, synthetic construct
  source 1..23: mol_type = other RNA
  modified_base 1: mod_base = OTHER; note = 2'-O-methyluridine-3'-phosphorothioate 5'-(E)-Vinylphosphonate
  modified_base 2: mod_base = OTHER; note = 2'-deoxy-2'-fluorouridine-3'-phosphorothioate
  modified_base 3: mod_base = OTHER; note = 2'-O-methylguanosine-3'-phosphate
  modified_base 4: mod_base = OTHER; note = 2'-O-methyluridine-3'-phosphate
  modified_base 5: mod_base = OTHER; note = 2'-O-methyluridine-3'-phosphate
  modified_base 6: mod_base = OTHER; note = 2'-deoxy-2'-fluoroadenosine-3'-phosphate
  modified_base 7: mod_base = OTHER; note = 2'-O-methyluridine-3'-phosphate
  modified_base 8: mod_base = OTHER; note = 2'-deoxy-2'-fluorouridine-3'-phosphate
  modified_base 9: mod_base = OTHER; note = 2'-deoxy-2'-fluorocytidine-3'-phosphate
  modified_base 10: mod_base = OTHER; note = 2'-O-methyladenosine-3'-phosphate
  modified_base 11: mod_base = OTHER; note = 2'-O-methylguanosine-3'-phosphate
  modified_base 12: mod_base = OTHER; note = 2'-O-methyladenosine-3'-phosphate
  modified_base 13: mod_base = OTHER; note = 2'-O-methyladenosine-3'-phosphate
  modified_base 14: mod_base = OTHER; note = 2'-deoxy-2'-fluoroadenosine-3'-phosphate
  modified_base 15: mod_base = OTHER; note = 2'-O-methyladenosine-3'-phosphate
  modified_base 16: mod_base = OTHER; note = 2'-deoxy-2'-fluorocytidine-3'-phosphate
  modified_base 17: mod_base = OTHER; note = 2'-O-methyladenosine-3'-phosphate
  modified_base 18: mod_base = OTHER; note = 2'-O-methylcytidine-3'-phosphate
  modified_base 19: mod_base = OTHER; note = 2'-O-methyladenosine-3'-phosphate
  modified_base 20: mod_base = OTHER; note = 2'-O-methyluridine-3'-phosphate
  modified_base 21: mod_base = OTHER; note = 2'-O-methyluridine-3'-phosphorothioate
  modified_base 22: mod_base = OTHER; note = 2'-O-methylcytidine-3'-phosphorothioate
  modified_base 23: mod_base = OTHER; note = 2'-O-methyluridine
ttgttattcagaaaacacattct

SEQ ID NO: 2908 - RNA, 23 nt, synthetic construct
  source 1..23: mol_type = other RNA
  modified_base 1: mod_base = OTHER; note = 2'-O-methyluridine-3'-phosphorothioate 5'-(E)-Vinylphosphonate
  modified_base 2: mod_base = OTHER; note = 2'-deoxy-2'-fluorouridine-3'-phosphorothioate
  modified_base 3: mod_base = OTHER; note = 2'-O-methyluridine-3'-phosphate
  modified_base 4: mod_base = OTHER; note = 2'-O-methylcytidine-3'-phosphate
  modified_base 5: mod_base = OTHER; note = 2'-O-methylcytidine-3'-phosphate
  modified_base 6: mod_base = OTHER; note = 2'-deoxy-2'-fluoroadenosine-3'-phosphate
  modified_base 7: mod_base = OTHER; note = 2'-O-methyladenosine-3'-phosphate
  modified_base 8: mod_base = OTHER; note = 2'-deoxy-2'-fluoroadenosine-3'-phosphate
  modified_base 9: mod_base = OTHER; note = 2'-deoxy-2'-fluoroguanosine-3'-phosphate
  modified_base 10: mod_base = OTHER; note = 2'-O-methyladenosine-3'-phosphate
  modified_base 11: mod_base = OTHER; note = 2'-O-methyladenosine-3'-phosphate
  modified_base 12: mod_base = OTHER; note = 2'-O-methylcytidine-3'-phosphate
  modified_base 13: mod_base = OTHER; note = 2'-O-methylcytidine-3'-phosphate
  modified_base 14: mod_base = OTHER; note = 2'-deoxy-2'-fluorocytidine-3'-phosphate
  modified_base 15: mod_base = OTHER; note = 2'-O-methyladenosine-3'-phosphate
  modified_base 16: mod_base = OTHER; note = 2'-deoxy-2'-fluorocytidine-3'-phosphate
  modified_base 17: mod_base = OTHER; note = 2'-O-methylcytidine-3'-phosphate
  modified_base 18: mod_base = OTHER; note = 2'-O-methyladenosine-3'-phosphate
  modified_base 19: mod_base = OTHER; note = 2'-O-methylcytidine-3'-phosphate
  modified_base 20: mod_base = OTHER; note = 2'-O-methyladenosine-3'-phosphate
  modified_base 21: mod_base = OTHER; note = 2'-O-methylcytidine-3'-phosphorothioate
  modified_base 22: mod_base = OTHER; note = 2'-O-methyladenosine-3'-phosphorothioate
  modified_base 23: mod_base = OTHER; note = 2'-O-methyladenosine
tttccaaagaacccaccacacaa

SEQ ID NO: 2909 - RNA, 23 nt, synthetic construct
  source 1..23: mol_type = other RNA
  modified_base 1: mod_base = OTHER; note = 2'-O-methyluridine-3'-phosphorothioate 5'-(E)-Vinylphosphonate
  modified_base 2: mod_base = OTHER; note = 2'-deoxy-2'-fluorouridine-3'-phosphorothioate
  modified_base 3: mod_base = OTHER; note = 2'-O-methyladenosine-3'-phosphate
  modified_base 4: mod_base = OTHER; note = 2'-O-methyladenosine-3'-phosphate
  modified_base 5: mod_base = OTHER; note = 2'-O-methylguanosine-3'-phosphate
  modified_base 6: mod_base = OTHER; note = 2'-deoxy-2'-fluoroadenosine-3'-phosphate
  modified_base 7: mod_base = OTHER; note = 2'-O-methyladenosine-3'-phosphate
  modified_base 8: mod_base = OTHER; note = 2'-deoxy-2'-fluoroadenosine-3'-phosphate
  modified_base 9: mod_base = OTHER; note = 2'-deoxy-2'-fluoroadenosine-3'-phosphate
  modified_base 10: mod_base = OTHER; note = 2'-O-methyluridine-3'-phosphate
  modified_base 11: mod_base = OTHER; note = 2'-O-methylguanosine-3'-phosphate
  modified_base 12: mod_base = OTHER; note = 2'-O-methyladenosine-3'-phosphate
  modified_base 13: mod_base = OTHER; note = 2'-O-methyluridine-3'-phosphate
  modified_base 14: mod_base = OTHER; note = 2'-deoxy-2'-fluorocytidine-3'-phosphate
  modified_base 15: mod_base = OTHER; note = 2'-O-methyluridine-3'-phosphate
  modified_base 16: mod_base = OTHER; note = 2'-deoxy-2'-fluorocytidine-3'-phosphate
  modified_base 17: mod_base = OTHER; note = 2'-O-methyladenosine-3'-phosphate
  modified_base 18: mod_base = OTHER; note = 2'-O-methylcytidine-3'-phosphate
  modified_base 19: mod_base = OTHER; note = 2'-O-methyluridine-3'-phosphate
  modified_base 20: mod_base = OTHER; note = 2'-O-methylcytidine-3'-phosphate
  modified_base 21: mod_base = OTHER; note = 2'-O-methylcytidine-3'-phosphorothioate
  modified_base 22: mod_base = OTHER; note = 2'-O-methyluridine-3'-phosphorothioate
  modified_base 23: mod_base = OTHER; note = 2'-O-methyluridine
ttaagaaaatgatctcactcctt

SEQ ID NO: 2910 - RNA, 23 nt, synthetic construct
  source 1..23: mol_type = other RNA
  modified_base 1: mod_base = OTHER; note = 2'-O-methyluridine-3'-phosphorothioate 5'-(E)-Vinylphosphonate
  modified_base 2: mod_base = OTHER; note = 2'-deoxy-2'-fluorouridine-3'-phosphorothioate
  modified_base 3: mod_base = OTHER; note = 2'-O-methyladenosine-3'-phosphate
  modified_base 4: mod_base = OTHER; note = 2'-O-methyladenosine-3'-phosphate
  modified_base 5: mod_base = OTHER; note = 2'-O-methylguanosine-3'-phosphate
  modified_base 6: mod_base = OTHER; note = 2'-deoxy-2'-fluorocytidine-3'-phosphate
  modified_base 7: mod_base = OTHER; note = 2'-O-methyladenosine-3'-phosphate
  modified_base 8: mod_base = OTHER; note = 2'-deoxy-2'-fluoroadenosine-3'-phosphate
  modified_base 9: mod_base = OTHER; note = 2'-deoxy-2'-fluorouridine-3'-phosphate
  modified_base 10: mod_base = OTHER; note = 2'-O-methyluridine-3'-phosphate
  modified_base 11: mod_base = OTHER; note = 2'-O-methylguanosine-3'-phosphate
  modified_base 12: mod_base = OTHER; note = 2'-O-methylcytidine-3'-phosphate
  modified_base 13: mod_base = OTHER; note = 2'-O-methyladenosine-3'-phosphate
  modified_base 14: mod_base = OTHER; note = 2'-deoxy-2'-fluoroguanosine-3'-phosphate
  modified_base 15: mod_base = OTHER; note = 2'-O-methyladenosine-3'-phosphate
  modified_base 16: mod_base = OTHER; note = 2'-deoxy-2'-fluoroadenosine-3'-phosphate
  modified_base 17: mod_base = OTHER; note = 2'-O-methylguanosine-3'-phosphate
  modified_base 18: mod_base = OTHER; note = 2'-O-methyladenosine-3'-phosphate
  modified_base 19: mod_base = OTHER; note = 2'-O-methyluridine-3'-phosphate
  modified_base 20: mod_base = OTHER; note = 2'-O-methyladenosine-3'-phosphate
  modified_base 21: mod_base = OTHER; note = 2'-O-methyladenosine-3'-phosphorothioate
  modified_base 22: mod_base = OTHER; note = 2'-O-methylguanosine-3'-phosphorothioate
  modified_base 23: mod_base = OTHER; note = 2'-O-methyladenosine
ttaagcaattgcagaagataaga

SEQ ID NO: 2911 - RNA, 23 nt, synthetic construct
  source 1..23: mol_type = other RNA
  modified_base 1: mod_base = OTHER; note = 2'-O-methyluridine-3'-phosphorothioate 5'-(E)-Vinylphosphonate
  modified_base 2: mod_base = OTHER; note = 2'-deoxy-2'-fluorouridine-3'-phosphorothioate
  modified_base 3: mod_base = OTHER; note = 2'-O-methyluridine-3'-phosphate
  modified_base 4: mod_base = OTHER; note = 2'-O-methyluridine-3'-phosphate
  modified_base 5: mod_base = OTHER; note = 2'-O-methylcytidine-3'-phosphate
  modified_base 6: mod_base = OTHER; note = 2'-deoxy-2'-fluoroadenosine-3'-phosphate
  modified_base 7: mod_base = OTHER; note = 2'-O-methyluridine-3'-phosphate
  modified_base 8: mod_base = OTHER; note = 2'-deoxy-2'-fluoroguanosine-3'-phosphate
  modified_base 9: mod_base = OTHER; note = 2'-deoxy-2'-fluoroadenosine-3'-phosphate
  modified_base 10: mod_base = OTHER; note = 2'-O-methyladenosine-3'-phosphate
  modified_base 11: mod_base = OTHER; note = 2'-O-methyladenosine-3'-phosphate
  modified_base 12: mod_base = OTHER; note = 2'-O-methyladenosine-3'-phosphate
  modified_base 13: mod_base = OTHER; note = 2'-O-methyladenosine-3'-phosphate
  modified_base 14: mod_base = OTHER; note = 2'-deoxy-2'-fluorocytidine-3'-phosphate
  modified_base 15: mod_base = OTHER; note = 2'-O-methyladenosine-3'-phosphate
  modified_base 16: mod_base = OTHER; note = 2'-deoxy-2'-fluorouridine-3'-phosphate
  modified_base 17: mod_base = OTHER; note = 2'-O-methylcytidine-3'-phosphate
  modified_base 18: mod_base = OTHER; note = 2'-O-methylcytidine-3'-phosphate
  modified_base 19: mod_base = OTHER; note = 2'-O-methyluridine-3'-phosphate
  modified_base 20: mod_base = OTHER; note = 2'-O-methyladenosine-3'-phosphate
  modified_base 21: mod_base = OTHER; note = 2'-O-methyladenosine-3'-phosphorothioate
  modified_base 22: mod_base = OTHER; note = 2'-O-methylguanosine-3'-phosphorothioate
  modified_base 23: mod_base = OTHER; note = 2'-O-methylcytidine
ttttcatgaaaaacatcctaagc

SEQ ID NO: 2912 - RNA, 23 nt, synthetic construct
  source 1..23: mol_type = other RNA
  modified_base 1: mod_base = OTHER; note = 2'-O-methyluridine-3'-phosphorothioate 5'-(E)-Vinylphosphonate
  modified_base 2: mod_base = OTHER; note = 2'-deoxy-2'-fluoroguanosine-3'-phosphorothioate
  modified_base 3: mod_base = OTHER; note = 2'-O-methylguanosine-3'-phosphate
  modified_base 4: mod_base = OTHER; note = 2'-O-methylcytidine-3'-phosphate
  modified_base 5: mod_base = OTHER; note = 2'-O-methylcytidine-3'-phosphate
  modified_base 6: mod_base = OTHER; note = 2'-deoxy-2'-fluoroadenosine-3'-phosphate
  modified_base 7: mod_base = OTHER; note = 2'-O-methylguanosine-3'-phosphate
  modified_base 8: mod_base = OTHER; note = 2'-deoxy-2'-fluoroadenosine-3'-phosphate
  modified_base 9: mod_base = OTHER; note = 2'-deoxy-2'-fluoroadenosine-3'-phosphate
  modified_base 10: mod_base = OTHER; note = 2'-O-methyladenosine-3'-phosphate
  modified_base 11: mod_base = OTHER; note = 2'-O-methylcytidine-3'-phosphate
  modified_base 12: mod_base = OTHER; note = 2'-O-methyluridine-3'-phosphate
  modified_base 13: mod_base = OTHER; note = 2'-O-methyluridine-3'-phosphate
  modified_base 14: mod_base = OTHER; note = 2'-deoxy-2'-fluorocytidine-3'-phosphate
  modified_base 15: mod_base = OTHER; note = 2'-O-methyluridine-3'-phosphate
  modified_base 16: mod_base = OTHER; note = 2'-deoxy-2'-fluorocytidine-3'-phosphate
  modified_base 17: mod_base = OTHER; note = 2'-O-methyluridine-3'-phosphate
  modified_base 18: mod_base = OTHER; note = 2'-O-methylcytidine-3'-phosphate
  modified_base 19: mod_base = OTHER; note = 2'-O-methylcytidine-3'-phosphate
  modified_base 20: mod_base = OTHER; note = 2'-O-methyladenosine-3'-phosphate
  modified_base 21: mod_base = OTHER; note = 2'-O-methylguanosine-3'-phosphorothioate
  modified_base 22: mod_base = OTHER; note = 2'-O-methylguanosine-3'-phosphorothioate
  modified_base 23: mod_base = OTHER; note = 2'-O-methylguanosine
tggccagaaacttctctccaggg

SEQ ID NO: 2913 - RNA, 23 nt, synthetic construct
  source 1..23: mol_type = other RNA
  modified_base 1: mod_base = OTHER; note = 2'-O-methyluridine-3'-phosphorothioate 5'-(E)-Vinylphosphonate
  modified_base 2: mod_base = OTHER; note = 2'-deoxy-2'-fluorouridine-3'-phosphorothioate
  modified_base 3: mod_base = OTHER; note = 2'-O-methylguanosine-3'-phosphate
  modified_base 4: mod_base = OTHER; note = 2'-O-methyladenosine-3'-phosphate
  modified_base 5: mod_base = OTHER; note = 2'-O-methyladenosine-3'-phosphate
  modified_base 6: mod_base = OTHER; note = 2'-deoxy-2'-fluoroguanosine-3'-phosphate
  modified_base 7: mod_base = OTHER; note = 2'-O-methylcytidine-3'-phosphate
  modified_base 8: mod_base = OTHER; note = 2'-deoxy-2'-fluoroadenosine-3'-phosphate
  modified_base 9: mod_base = OTHER; note = 2'-deoxy-2'-fluoroadenosine-3'-phosphate
  modified_base 10: mod_base = OTHER; note = 2'-O-methyladenosine-3'-phosphate
  modified_base 11: mod_base = OTHER; note = 2'-O-methylguanosine-3'-phosphate
  modified_base 12: mod_base = OTHER; note = 2'-O-methylcytidine-3'-phosphate
  modified_base 13: mod_base = OTHER; note = 2'-O-methyladenosine-3'-phosphate
  modified_base 14: mod_base = OTHER; note = 2'-deoxy-2'-fluorouridine-3'-phosphate
  modified_base 15: mod_base = OTHER; note = 2'-O-methylcytidine-3'-phosphate
  modified_base 16: mod_base = OTHER; note = 2'-deoxy-2'-fluoroadenosine-3'-phosphate
  modified_base 17: mod_base = OTHER; note = 2'-O-methylguanosine-3'-phosphate
  modified_base 18: mod_base = OTHER; note = 2'-O-methylcytidine-3'-phosphate
  modified_base 19: mod_base = OTHER; note = 2'-O-methyluridine-3'-phosphate
  modified_base 20: mod_base = OTHER; note = 2'-O-methyluridine-3'-phosphate
  modified_base 21: mod_base = OTHER; note = 2'-O-methylcytidine-3'-phosphorothioate
  modified_base 22: mod_base = OTHER; note = 2'-O-methyluridine-3'-phosphorothioate
  modified_base 23: mod_base = OTHER; note = 2'-O-methylcytidine
ttgaagcaaagcatcagcttctc

SEQ ID NO: 2914 - RNA, 23 nt, synthetic construct
  source 1..23: mol_type = other RNA
  modified_base 1: mod_base = OTHER; note = 2'-O-methyluridine-3'-phosphorothioate 5'-(E)-Vinylphosphonate
  modified_base 2: mod_base = OTHER; note = 2'-deoxy-2'-fluorouridine-3'-phosphorothioate
  modified_base 3: mod_base = OTHER; note = 2'-O-methyladenosine-3'-phosphate
  modified_base 4: mod_base = OTHER; note = 2'-O-methyluridine-3'-phosphate
  modified_base 5: mod_base = OTHER; note = 2'-O-methyluridine-3'-phosphate
  modified_base 6: mod_base = OTHER; note = 2'-deoxy-2'-fluorocytidine-3'-phosphate
  modified_base 7: mod_base = OTHER; note = 2'-O-methyluridine-3'-phosphate
  modified_base 8: mod_base = OTHER; note = 2'-deoxy-2'-fluoroguanosine-3'-phosphate
  modified_base 9: mod_base = OTHER; note = 2'-deoxy-2'-fluoroguanosine-3'-phosphate
  modified_base 10: mod_base = OTHER; note = 2'-O-methyladenosine-3'-phosphate
  modified_base 11: mod_base = OTHER; note = 2'-O-methyluridine-3'-phosphate
  modified_base 12: mod_base = OTHER; note = 2'-O-methylguanosine-3'-phosphate
  modified_base 13: mod_base = OTHER; note = 2'-O-methylguanosine-3'-phosphate
  modified_base 14: mod_base = OTHER; note = 2'-deoxy-2'-fluoroadenosine-3'-phosphate
  modified_base 15: mod_base = OTHER; note = 2'-O-methyluridine-3'-phosphate
  modified_base 16: mod_base = OTHER; note = 2'-deoxy-2'-fluorouridine-3'-phosphate
  modified_base 17: mod_base = OTHER; note = 2'-O-methyluridine-3'-phosphate
  modified_base 18: mod_base = OTHER; note = 2'-O-methylguanosine-3'-phosphate
  modified_base 19: mod_base = OTHER; note = 2'-O-methyladenosine-3'-phosphate
  modified_base 20: mod_base = OTHER; note = 2'-O-methyladenosine-3'-phosphate
  modified_base 21: mod_base = OTHER; note = 2'-O-methylguanosine-3'-phosphorothioate
  modified_base 22: mod_base = OTHER; note = 2'-O-methylcytidine-3'-phosphorothioate
  modified_base 23: mod_base = OTHER; note = 2'-O-methyladenosine
ttattctggatggatttgaagca

SEQ ID NO: 2915 - RNA, 23 nt, synthetic construct
  source 1..23: mol_type = other RNA
  modified_base 1: mod_base = OTHER; note = 2'-O-methyluridine-3'-phosphorothioate 5'-(E)-Vinylphosphonate
  modified_base 2: mod_base = OTHER; note = 2'-deoxy-2'-fluorocytidine-3'-phosphorothioate
  modified_base 3: mod_base = OTHER; note = 2'-O-methyladenosine-3'-phosphate
  modified_base 4: mod_base = OTHER; note = 2'-O-methyladenosine-3'-phosphate
  modified_base 5: mod_base = OTHER; note = 2'-O-methylcytidine-3'-phosphate
  modified_base 6: mod_base = OTHER; note = 2'-deoxy-2'-fluoroadenosine-3'-phosphate
  modified_base 7: mod_base = OTHER; note = 2'-O-methyladenosine-3'-phosphate
  modified_base 8: mod_base = OTHER; note = 2'-deoxy-2'-fluoroadenosine-3'-phosphate
  modified_base 9: mod_base = OTHER; note = 2'-deoxy-2'-fluorouridine-3'-phosphate
  modified_base 10: mod_base = OTHER; note = 2'-O-methylguanosine-3'-phosphate
  modified_base 11: mod_base = OTHER; note = 2'-O-methylguanosine-3'-phosphate
  modified_base 12: mod_base = OTHER; note = 2'-O-methylcytidine-3'-phosphate
  modified_base 13: mod_base = OTHER; note = 2'-O-methyluridine-3'-phosphate
  modified_base 14: mod_base = OTHER; note = 2'-deoxy-2'-fluorouridine-3'-phosphate
  modified_base 15: mod_base = OTHER; note = 2'-O-methyluridine-3'-phosphate
  modified_base 16: mod_base = OTHER; note = 2'-deoxy-2'-fluorocytidine-3'-phosphate
  modified_base 17: mod_base = OTHER; note = 2'-O-methyladenosine-3'-phosphate
  modified_base 18: mod_base = OTHER; note = 2'-O-methylguanosine-3'-phosphate
  modified_base 19: mod_base = OTHER; note = 2'-O-methylcytidine-3'-phosphate
  modified_base 20: mod_base = OTHER; note = 2'-O-methylcytidine-3'-phosphate
  modified_base 21: mod_base = OTHER; note = 2'-O-methylcytidine-3'-phosphorothioate
  modified_base 22: mod_base = OTHER; note = 2'-O-methyluridine-3'-phosphorothioate
  modified_base 23: mod_base = OTHER; note = 2'-O-methyluridine
tcaacaaatggctttcagccctt

SEQ ID NO: 2916 - RNA, 23 nt, synthetic construct
  source 1..23: mol_type = other RNA
  modified_base 1: mod_base = OTHER; note = 2'-O-methyluridine-3'-phosphorothioate 5'-(E)-Vinylphosphonate
  modified_base 2: mod_base = OTHER; note = 2'-deoxy-2'-fluorouridine-3'-phosphorothioate
  modified_base 3: mod_base = OTHER; note = 2'-O-methyladenosine-3'-phosphate
  modified_base 4: mod_base = OTHER; note = 2'-O-methylguanosine-3'-phosphate
  modified_base 5: mod_base = OTHER; note = 2'-O-methylcytidine-3'-phosphate
  modified_base 6: mod_base = OTHER; note = 2'-deoxy-2'-fluoroadenosine-3'-phosphate
  modified_base 7: mod_base = OTHER; note = 2'-O-methylguanosine-3'-phosphate
  modified_base 8: mod_base = OTHER; note = 2'-deoxy-2'-fluorouridine-3'-phosphate
  modified_base 9: mod_base = OTHER; note = 2'-deoxy-2'-fluorocytidine-3'-phosphate
  modified_base 10: mod_base = OTHER; note = 2'-O-methylguanosine-3'-phosphate
  modified_base 11: mod_base = OTHER; note = 2'-O-methylguanosine-3'-phosphate
  modified_base 12: mod_base = OTHER; note = 2'-O-methyladenosine-3'-phosphate
  modified_base 13: mod_base = OTHER; note = 2'-O-methylguanosine-3'-phosphate
  modified_base 14: mod_base = OTHER; note = 2'-deoxy-2'-fluoroadenosine-3'-phosphate
  modified_base 15: mod_base = OTHER; note = 2'-O-methyladenosine-3'-phosphate
  modified_base 16: mod_base = OTHER; note = 2'-deoxy-2'-fluoroadenosine-3'-phosphate
  modified_base 17: mod_base = OTHER; note = 2'-O-methylguanosine-3'-phosphate
  modified_base 18: mod_base = OTHER; note = 2'-O-methylcytidine-3'-phosphate
  modified_base 19: mod_base = OTHER; note = 2'-O-methylcytidine-3'-phosphate
  modified_base 20: mod_base = OTHER; note = 2'-O-methyladenosine-3'-phosphate
  modified_base 21: mod_base = OTHER; note = 2'-O-methylguanosine-3'-phosphorothioate
  modified_base 22: mod_base = OTHER; note = 2'-O-methyladenosine-3'-phosphorothioate
  modified_base 23: mod_base = OTHER; note = 2'-O-methylguanosine
ttagcagtcggagaaagccagag

SEQ ID NO: 2917 - RNA, 23 nt, synthetic construct
  source 1..23: mol_type = other RNA
  modified_base 1: mod_base = OTHER; note = 2'-O-methyluridine-3'-phosphorothioate 5'-(E)-Vinylphosphonate
  modified_base 2: mod_base = OTHER; note = 2'-deoxy-2'-fluorouridine-3'-phosphorothioate
  modified_base 3: mod_base = OTHER; note = 2'-O-methylcytidine-3'-phosphate
  modified_base 4: mod_base = OTHER; note = 2'-O-methylcytidine-3'-phosphate
  modified_base 5: mod_base = OTHER; note = 2'-O-methyladenosine-3'-phosphate
  modified_base 6: mod_base = OTHER; note = 2'-deoxy-2'-fluorouridine-3'-phosphate
  modified_base 7: mod_base = OTHER; note = 2'-O-methylguanosine-3'-phosphate
  modified_base 8: mod_base = OTHER; note = 2'-deoxy-2'-fluoroadenosine-3'-phosphate
  modified_base 9: mod_base = OTHER; note = 2'-deoxy-2'-fluorouridine-3'-phosphate
  modified_base 10: mod_base = OTHER; note = 2'-O-methyladenosine-3'-phosphate
  modified_base 11: mod_base = OTHER; note = 2'-O-methylguanosine-3'-phosphate
  modified_base 12: mod_base = OTHER; note = 2'-O-methylguanosine-3'-phosphate
  modified_base 13: mod_base = OTHER; note = 2'-O-methyladenosine-3'-phosphate
  modified_base 14: mod_base = OTHER; note = 2'-deoxy-2'-fluoroadenosine-3'-phosphate
  modified_base 15: mod_base = OTHER; note = 2'-O-methyladenosine-3'-phosphate
  modified_base 16: mod_base = OTHER; note = 2'-deoxy-2'-fluoroguanosine-3'-phosphate
  modified_base 17: mod_base = OTHER; note = 2'-O-methyladenosine-3'-phosphate
  modified_base 18: mod_base = OTHER; note = 2'-O-methylcytidine-3'-phosphate
  modified_base 19: mod_base = OTHER; note = 2'-O-methylcytidine-3'-phosphate
  modified_base 20: mod_base = OTHER; note = 2'-O-methyladenosine-3'-phosphate
  modified_base 21: mod_base = OTHER; note = 2'-O-methylcytidine-3'-phosphorothioate
  modified_base 22: mod_base = OTHER; note = 2'-O-methyluridine-3'-phosphorothioate
  modified_base 23: mod_base = OTHER; note = 2'-O-methylcytidine
ttccatgataggaaagaccactc

SEQ ID NO: 2918 - RNA, 23 nt, synthetic construct
  source 1..23: mol_type = other RNA
  modified_base 1: mod_base = OTHER; note = 2'-O-methyluridine-3'-phosphorothioate 5'-(E)-Vinylphosphonate
  modified_base 2: mod_base = OTHER; note = 2'-deoxy-2'-fluoroadenosine-3'-phosphorothioate
  modified_base 3: mod_base = OTHER; note = 2'-O-methylguanosine-3'-phosphate
  modified_base 4: mod_base = OTHER; note = 2'-O-methyluridine-3'-phosphate
  modified_base 5: mod_base = OTHER; note = 2'-O-methylcytidine-3'-phosphate
  modified_base 6: mod_base = OTHER; note = 2'-deoxy-2'-fluoroadenosine-3'-phosphate
  modified_base 7: mod_base = OTHER; note = 2'-O-methylcytidine-3'-phosphate
  modified_base 8: mod_base = OTHER; note = 2'-deoxy-2'-fluorocytidine-3'-phosphate
  modified_base 9: mod_base = OTHER; note = 2'-deoxy-2'-fluoroadenosine-3'-phosphate
  modified_base 10: mod_base = OTHER; note = 2'-O-methylguanosine-3'-phosphate
  modified_base 11: mod_base = OTHER; note = 2'-O-methyluridine-3'-phosphate
  modified_base 12: mod_base = OTHER; note = 2'-O-methylguanosine-3'-phosphate
  modified_base 13: mod_base = OTHER; note = 2'-O-methyluridine-3'-phosphate
  modified_base 14: mod_base = OTHER; note = 2'-deoxy-2'-fluoroguanosine-3'-phosphate
  modified_base 15: mod_base = OTHER; note = 2'-O-methylguanosine-3'-phosphate
  modified_base 16: mod_base = OTHER; note = 2'-deoxy-2'-fluoroguanosine-3'-phosphate
  modified_base 17: mod_base = OTHER; note = 2'-O-methyladenosine-3'-phosphate
  modified_base 18: mod_base = OTHER; note = 2'-O-methylcytidine-3'-phosphate
  modified_base 19: mod_base = OTHER; note = 2'-O-methylcytidine-3'-phosphate
  modified_base 20: mod_base = OTHER; note = 2'-O-methylguanosine-3'-phosphate
  modified_base 21: mod_base = OTHER; note = 2'-O-methyluridine-3'-phosphorothioate
  modified_base 22: mod_base = OTHER; note = 2'-O-methylcytidine-3'-phosphorothioate
  modified_base 23: mod_base = OTHER; note = 2'-O-methyladenosine
tagtcaccagtgtgggaccgtca

SEQ ID NO: 2919 - RNA, 23 nt, synthetic construct
  source 1..23: mol_type = other RNA
  modified_base 1: mod_base = OTHER; note = 2'-O-methyluridine-3'-phosphorothioate 5'-(E)-Vinylphosphonate
  modified_base 2: mod_base = OTHER; note = 2'-deoxy-2'-fluorouridine-3'-phosphorothioate
  modified_base 3: mod_base = OTHER; note = 2'-O-methylguanosine-3'-phosphate
  modified_base 4: mod_base = OTHER; note = 2'-O-methylcytidine-3'-phosphate
  modified_base 5: mod_base = OTHER; note = 2'-O-methyluridine-3'-phosphate
  modified_base 6: mod_base = OTHER; note = 2'-deoxy-2'-fluorocytidine-3'-phosphate
  modified_base 7: mod_base = OTHER; note = 2'-O-methyluridine-3'-phosphate
  modified_base 8: mod_base = OTHER; note = 2'-deoxy-2'-fluoroguanosine-3'-phosphate
  modified_base 9: mod_base = OTHER; note = 2'-deoxy-2'-fluoroadenosine-3'-phosphate
  modified_base 10: mod_base = OTHER; note = 2'-O-methyladenosine-3'-phosphate
  modified_base 11: mod_base = OTHER; note = 2'-O-methylguanosine-3'-phosphate
  modified_base 12: mod_base = OTHER; note = 2'-O-methyladenosine-3'-phosphate
  modified_base 13: mod_base = OTHER; note = 2'-O-methyluridine-3'-phosphate
  modified_base 14: mod_base = OTHER; note = 2'-deoxy-2'-fluorocytidine-3'-phosphate
  modified_base 15: mod_base = OTHER; note = 2'-O-methylguanosine-3'-phosphate
  modified_base 16: mod_base = OTHER; note = 2'-deoxy-2'-fluorocytidine-3'-phosphate
  modified_base 17: mod_base = OTHER; note = 2'-O-methyladenosine-3'-phosphate
  modified_base 18: mod_base = OTHER; note = 2'-O-methylguanosine-3'-phosphate
  modified_base 19: mod_base = OTHER; note = 2'-O-methyluridine-3'-phosphate
  modified_base 20: mod_base = OTHER; note = 2'-O-methylcytidine-3'-phosphate
  modified_base 21: mod_base = OTHER; note = 2'-O-methyladenosine-3'-phosphorothioate
  modified_base 22: mod_base = OTHER; note = 2'-O-methylcytidine-3'-phosphorothioate
  modified_base 23: mod_base = OTHER; note = 2'-O-methylcytidine
ttgctctgaagatcgcagtcacc

SEQ ID NO: 2920 - RNA, 23 nt, synthetic construct
  source 1..23: mol_type = other RNA
  modified_base 1: mod_base = OTHER; note = 2'-O-methyluridine-3'-phosphorothioate 5'-(E)-Vinylphosphonate
  modified_base 2: mod_base = OTHER; note = 2'-deoxy-2'-fluoroadenosine-3'-phosphorothioate
  modified_base 3: mod_base = OTHER; note = 2'-O-methyladenosine-3'-phosphate
  modified_base 4: mod_base = OTHER; note = 2'-O-methylcytidine-3'-phosphate
  modified_base 5: mod_base = OTHER; note = 2'-O-methylcytidine-3'-phosphate
  modified_base 6: mod_base = OTHER; note = 2'-deoxy-2'-fluorocytidine-3'-phosphate
  modified_base 7: mod_base = OTHER; note = 2'-O-methyluridine-3'-phosphate
  modified_base 8: mod_base = OTHER; note = 2'-deoxy-2'-fluoroguanosine-3'-phosphate
  modified_base 9: mod_base = OTHER; note = 2'-deoxy-2'-fluoroguanosine-3'-phosphate
  modified_base 10: mod_base = OTHER; note = 2'-O-methyladenosine-3'-phosphate
  modified_base 11: mod_base = OTHER; note = 2'-O-methylcytidine-3'-phosphate
  modified_base 12: mod_base = OTHER; note = 2'-O-methylcytidine-3'-phosphate
  modified_base 13: mod_base = OTHER; note = 2'-O-methyladenosine-3'-phosphate
  modified_base 14: mod_base = OTHER; note = 2'-deoxy-2'-fluorouridine-3'-phosphate
  modified_base 15: mod_base = OTHER; note = 2'-O-methyluridine-3'-phosphate
  modified_base 16: mod_base = OTHER; note = 2'-deoxy-2'-fluorocytidine-3'-phosphate
  modified_base 17: mod_base = OTHER; note = 2'-O-methyladenosine-3'-phosphate
  modified_base 18: mod_base = OTHER; note = 2'-O-methylguanosine-3'-phosphate
  modified_base 19: mod_base = OTHER; note = 2'-O-methyladenosine-3'-phosphate
  modified_base 20: mod_base = OTHER; note = 2'-O-methylguanosine-3'-phosphate
  modified_base 21: mod_base = OTHER; note = 2'-O-methylguanosine-3'-phosphorothioate
  modified_base 22: mod_base = OTHER; note = 2'-O-methylguanosine-3'-phosphorothioate
  modified_base 23: mod_base = OTHER; note = 2'-O-methyluridine
taaccctggaccattcagagggt

SEQ ID NO: 2921 - RNA, 23 nt, synthetic construct
  source 1..23: mol_type = other RNA
  modified_base 1: mod_base = OTHER; note = 2'-O-methyluridine-3'-phosphorothioate 5'-(E)-Vinylphosphonate
  modified_base 2: mod_base = OTHER; note = 2'-deoxy-2'-fluoroadenosine-3'-phosphorothioate
  modified_base 3: mod_base = OTHER; note = 2'-O-methyladenosine-3'-phosphate
  modified_base 4: mod_base = OTHER; note = 2'-O-methyluridine-3'-phosphate
  modified_base 5: mod_base = OTHER; note = 2'-O-methyladenosine-3'-phosphate
  modified_base 6: mod_base = OTHER; note = 2'-deoxy-2'-fluoroadenosine-3'-phosphate
  modified_base 7: mod_base = OTHER; note = 2'-O-methyladenosine-3'-phosphate
  modified_base 8: mod_base = OTHER; note = 2'-deoxy-2'-fluorocytidine-3'-phosphate
  modified_base 9: mod_base = OTHER; note = 2'-deoxy-2'-fluorocytidine-3'-phosphate
  modified_base 10: mod_base = OTHER; note = 2'-O-methylcytidine-3'-phosphate
  modified_base 11: mod_base = OTHER; note = 2'-O-methyladenosine-3'-phosphate
  modified_base 12: mod_base = OTHER; note = 2'-O-methylguanosine-3'-phosphate
  modified_base 13: mod_base = OTHER; note = 2'-O-methyladenosine-3'-phosphate
  modified_base 14: mod_base = OTHER; note = 2'-deoxy-2'-fluoroguanosine-3'-phosphate
  modified_base 15: mod_base = OTHER; note = 2'-O-methyluridine-3'-phosphate
  modified_base 16: mod_base = OTHER; note = 2'-deoxy-2'-fluoroguanosine-3'-phosphate
  modified_base 17: mod_base = OTHER; note = 2'-O-methyluridine-3'-phosphate
  modified_base 18: mod_base = OTHER; note = 2'-O-methylguanosine-3'-phosphate
  modified_base 19: mod_base = OTHER; note = 2'-O-methyladenosine-3'-phosphate
  modified_base 20: mod_base = OTHER; note = 2'-O-methyluridine-3'-phosphate
  modified_base 21: mod_base = OTHER; note = 2'-O-methylcytidine-3'-phosphorothioate
  modified_base 22: mod_base = OTHER; note = 2'-O-methyladenosine-3'-phosphorothioate
  modified_base 23: mod_base = OTHER; note = 2'-O-methyladenosine
taataaacccagagtgtgatcaa

SEQ ID NO: 2922 - RNA, 23 nt, synthetic construct
  source 1..23: mol_type = other RNA
  modified_base 1: mod_base = OTHER; note = 2'-O-methyluridine-3'-phosphorothioate 5'-(E)-Vinylphosphonate
  modified_base 2: mod_base = OTHER; note = 2'-deoxy-2'-fluorocytidine-3'-phosphorothioate
  modified_base 3: mod_base = OTHER; note = 2'-O-methyladenosine-3'-phosphate
  modified_base 4: mod_base = OTHER; note = 2'-O-methyladenosine-3'-phosphate
  modified_base 5: mod_base = OTHER; note = 2'-O-methyladenosine-3'-phosphate
  modified_base 6: mod_base = OTHER; note = 2'-deoxy-2'-fluorouridine-3'-phosphate
  modified_base 7: mod_base = OTHER; note = 2'-O-methyladenosine-3'-phosphate
  modified_base 8: mod_base = OTHER; note = 2'-deoxy-2'-fluoroguanosine-3'-phosphate
  modified_base 9: mod_base = OTHER; note = 2'-deoxy-2'-fluoroguanosine-3'-phosphate
  modified_base 10: mod_base = OTHER; note = 2'-O-methyladenosine-3'-phosphate
  modified_base 11: mod_base = OTHER; note = 2'-O-methyladenosine-3'-phosphate
  modified_base 12: mod_base = OTHER; note = 2'-O-methylcytidine-3'-phosphate
  modified_base 13: mod_base = OTHER; note = 2'-O-methyladenosine-3'-phosphate
  modified_base 14: mod_base = OTHER; note = 2'-deoxy-2'-fluorocytidine-3'-phosphate
  modified_base 15: mod_base = OTHER; note = 2'-O-methyluridine-3'-phosphate
  modified_base 16: mod_base = OTHER; note = 2'-deoxy-2'-fluoroguanosine-3'-phosphate
  modified_base 17: mod_base = OTHER; note = 2'-O-methylcytidine-3'-phosphate
  modified_base 18: mod_base = OTHER; note = 2'-O-methylcytidine-3'-phosphate
  modified_base 19: mod_base = OTHER; note = 2'-O-methyladenosine-3'-phosphate
  modified_base 20: mod_base = OTHER; note = 2'-O-methyluridine-3'-phosphate
  modified_base 21: mod_base = OTHER; note = 2'-O-methylguanosine-3'-phosphorothioate
  modified_base 22: mod_base = OTHER; note = 2'-O-methyluridine-3'-phosphorothioate
  modified_base 23: mod_base = OTHER; note = 2'-O-methyladenosine
tcaaataggaacactgccatgta

SEQ ID NO: 2923 - RNA, 23 nt, synthetic construct
  source 1..23: mol_type = other RNA
  modified_base 1: mod_base = OTHER; note = 2'-O-methyluridine-3'-phosphorothioate 5'-(E)-Vinylphosphonate
  modified_base 2: mod_base = OTHER; note = 2'-deoxy-2'-fluoroadenosine-3'-phosphorothioate
  modified_base 3: mod_base = OTHER; note = 2'-O-methylguanosine-3'-phosphate
  modified_base 4: mod_base = OTHER; note = 2'-O-methyladenosine-3'-phosphate
  modified_base 5: mod_base = OTHER; note = 2'-O-methyladenosine-3'-phosphate
  modified_base 6: mod_base = OTHER; note = 2'-deoxy-2'-fluorocytidine-3'-phosphate
  modified_base 7: mod_base = OTHER; note = 2'-O-methyluridine-3'-phosphate
  modified_base 8: mod_base = OTHER; note = 2'-deoxy-2'-fluoroadenosine-3'-phosphate
  modified_base 9: mod_base = OTHER; note = 2'-deoxy-2'-fluorocytidine-3'-phosphate
  modified_base 10: mod_base = OTHER; note = 2'-O-methyladenosine-3'-phosphate
  modified_base 11: mod_base = OTHER; note = 2'-O-methyladenosine-3'-phosphate
  modified_base 12: mod_base = OTHER; note = 2'-O-methyluridine-3'-phosphate
  modified_base 13: mod_base = OTHER; note = 2'-O-methyluridine-3'-phosphate
  modified_base 14: mod_base = OTHER; note = 2'-deoxy-2'-fluorouridine-3'-phosphate
  modified_base 15: mod_base = OTHER; note = 2'-O-methylguanosine-3'-phosphate
  modified_base 16: mod_base = OTHER; note = 2'-deoxy-2'-fluoroguanosine-3'-phosphate
  modified_base 17: mod_base = OTHER; note = 2'-O-methylcytidine-3'-phosphate
  modified_base 18: mod_base = OTHER; note = 2'-O-methyladenosine-3'-phosphate
  modified_base 19: mod_base = OTHER; note = 2'-O-methyluridine-3'-phosphate
  modified_base 20: mod_base = OTHER; note = 2'-O-methylguanosine-3'-phosphate
  modified_base 21: mod_base = OTHER; note = 2'-O-methylcytidine-3'-phosphorothioate
  modified_base 22: mod_base = OTHER; note = 2'-O-methyladenosine-3'-phosphorothioate
  modified_base 23: mod_base = OTHER; note = 2'-O-methyladenosine
tagaactacaatttggcatgcaa

SEQ ID NO: 2924 - RNA, 23 nt, synthetic construct
  source 1..23: mol_type = other RNA
  modified_base 1: mod_base = OTHER; note = 2'-O-methyluridine-3'-phosphorothioate 5'-(E)-Vinylphosphonate
  modified_base 2: mod_base = OTHER; note = 2'-deoxy-2'-fluorouridine-3'-phosphorothioate
  modified_base 3: mod_base = OTHER; note = 2'-O-methylguanosine-3'-phosphate
  modified_base 4: mod_base = OTHER; note = 2'-O-methyladenosine-3'-phosphate
  modified_base 5: mod_base = OTHER; note = 2'-O-methylguanosine-3'-phosphate
  modified_base 6: mod_base = OTHER; note = 2'-deoxy-2'-fluorocytidine-3'-phosphate
  modified_base 7: mod_base = OTHER; note = 2'-O-methylcytidine-3'-phosphate
  modified_base 8: mod_base = OTHER; note = 2'-deoxy-2'-fluoroadenosine-3'-phosphate
  modified_base 9: mod_base = OTHER; note = 2'-deoxy-2'-fluoroadenosine-3'-phosphate
  modified_base 10: mod_base = OTHER; note = 2'-O-methyluridine-3'-phosphate
  modified_base 11: mod_base = OTHER; note = 2'-O-methylcytidine-3'-phosphate
  modified_base 12: mod_base = OTHER; note = 2'-O-methyladenosine-3'-phosphate
  modified_base 13: mod_base = OTHER; note = 2'-O-methylguanosine-3'-phosphate
  modified_base 14: mod_base = OTHER; note = 2'-deoxy-2'-fluoroadenosine-3'-phosphate
  modified_base 15: mod_base = OTHER; note = 2'-O-methylcytidine-3'-phosphate
  modified_base 16: mod_base = OTHER; note = 2'-deoxy-2'-fluoroadenosine-3'-phosphate
  modified_base 17: mod_base = OTHER; note = 2'-O-methyladenosine-3'-phosphate
  modified_base 18: mod_base = OTHER; note = 2'-O-methylguanosine-3'-phosphate
  modified_base 19: mod_base = OTHER; note = 2'-O-methyladenosine-3'-phosphate
  modified_base 20: mod_base = OTHER; note = 2'-O-methyladenosine-3'-phosphate
  modified_base 21: mod_base = OTHER; note = 2'-O-methylcytidine-3'-phosphorothioate
  modified_base 22: mod_base = OTHER; note = 2'-O-methyluridine-3'-phosphorothioate
  modified_base 23: mod_base = OTHER; note = 2'-O-methyladenosine
ttgagccaatcagacaagaacta

SEQ ID NO: 2925 - RNA, 23 nt, synthetic construct
  source 1..23: mol_type = other RNA
  modified_base 1: mod_base = OTHER; note = 2'-O-methyluridine-3'-phosphorothioate 5'-(E)-Vinylphosphonate
  modified_base 2: mod_base = OTHER; note = 2'-deoxy-2'-fluorouridine-3'-phosphorothioate
  modified_base 3: mod_base = OTHER; note = 2'-O-methyluridine-3'-phosphate
  modified_base 4: mod_base = OTHER; note = 2'-O-methylguanosine-3'-phosphate
  modified_base 5: mod_base = OTHER; note = 2'-O-methylguanosine-3'-phosphate
  modified_base 6: mod_base = OTHER; note = 2'-deoxy-2'-fluorouridine-3'-phosphate
  modified_base 7: mod_base = OTHER; note = 2'-O-methyladenosine-3'-phosphate
  modified_base 8: mod_base = OTHER; note = 2'-deoxy-2'-fluoroadenosine-3'-phosphate
  modified_base 9: mod_base = OTHER; note = 2'-deoxy-2'-fluorouridine-3'-phosphate
  modified_base 10: mod_base = OTHER; note = 2'-O-methyluridine-3'-phosphate
  modified_base 11: mod_base = OTHER; note = 2'-O-methyluridine-3'-phosphate
  modified_base 12: mod_base = OTHER; note = 2'-O-methyluridine-3'-phosphate
  modified_base 13: mod_base = OTHER; note = 2'-O-methylguanosine-3'-phosphate
  modified_base 14: mod_base = OTHER; note = 2'-deoxy-2'-fluoroguanosine-3'-phosphate
  modified_base 15: mod_base = OTHER; note = 2'-O-methylcytidine-3'-phosphate
  modified_base 16: mod_base = OTHER; note = 2'-deoxy-2'-fluorocytidine-3'-phosphate
  modified_base 17: mod_base = OTHER; note = 2'-O-methyluridine-3'-phosphate
  modified_base 18: mod_base = OTHER; note = 2'-O-methyluridine-3'-phosphate
  modified_base 19: mod_base = OTHER; note = 2'-O-methylguanosine-3'-phosphate
  modified_base 20: mod_base = OTHER; note = 2'-O-methylcytidine-3'-phosphate
  modified_base 21: mod_base = OTHER; note = 2'-O-methyluridine-3'-phosphorothioate
  modified_base 22: mod_base = OTHER; note = 2'-O-methyluridine-3'-phosphorothioate
  modified_base 23: mod_base = OTHER; note = 2'-O-methylguanosine
tttggtaattttggccttgcttg

SEQ ID NO: 2926 - RNA, 23 nt, synthetic construct
  source 1..23: mol_type = other RNA
  modified_base 1: mod_base = OTHER; note = 2'-O-methyluridine-3'-phosphorothioate 5'-(E)-Vinylphosphonate
  modified_base 2: mod_base = OTHER; note = 2'-deoxy-2'-fluorouridine-3'-phosphorothioate
  modified_base 3: mod_base = OTHER; note = 2'-O-methyluridine-3'-phosphate
  modified_base 4: mod_base = OTHER; note = 2'-O-methylcytidine-3'-phosphate
  modified_base 5: mod_base = OTHER; note = 2'-O-methyladenosine-3'-phosphate
  modified_base 6: mod_base = OTHER; note = 2'-deoxy-2'-fluorocytidine-3'-phosphate
  modified_base 7: mod_base = OTHER; note = 2'-O-methylcytidine-3'-phosphate
  modified_base 8: mod_base = OTHER; note = 2'-deoxy-2'-fluoroadenosine-3'-phosphate
  modified_base 9: mod_base = OTHER; note = 2'-deoxy-2'-fluorocytidine-3'-phosphate
  modified_base 10: mod_base = OTHER; note = 2'-O-methyluridine-3'-phosphate
  modified_base 11: mod_base = OTHER; note = 2'-O-methylguanosine-3'-phosphate
  modified_base 12: mod_base = OTHER; note = 2'-O-methylguanosine-3'-phosphate
  modified_base 13: mod_base = OTHER; note = 2'-O-methyladenosine-3'-phosphate
  modified_base 14: mod_base = OTHER; note = 2'-deoxy-2'-fluoroguanosine-3'-phosphate
  modified_base 15: mod_base = OTHER; note = 2'-O-methyluridine-3'-phosphate
  modified_base 16: mod_base = OTHER; note = 2'-deoxy-2'-fluoroadenosine-3'-phosphate
  modified_base 17: mod_base = OTHER; note = 2'-O-methyladenosine-3'-phosphate
  modified_base 18: mod_base = OTHER; note = 2'-O-methyladenosine-3'-phosphate
  modified_base 19: mod_base = OTHER; note = 2'-O-methyladenosine-3'-phosphate
  modified_base 20: mod_base = OTHER; note = 2'-O-methyladenosine-3'-phosphate
  modified_base 21: mod_base = OTHER; note = 2'-O-methylcytidine-3'-phosphorothioate
  modified_base 22: mod_base = OTHER; note = 2'-O-methylcytidine-3'-phosphorothioate
  modified_base 23: mod_base = OTHER; note = 2'-O-methylcytidine
tttcaccactggagtaaaaaccc

SEQ ID NO: 2927 - RNA, 23 nt, synthetic construct
  source 1..23: mol_type = other RNA
  modified_base 1: mod_base = OTHER; note = 2'-O-methyluridine-3'-phosphorothioate 5'-(E)-Vinylphosphonate
  modified_base 2: mod_base = OTHER; note = 2'-deoxy-2'-fluorouridine-3'-phosphorothioate
  modified_base 3: mod_base = OTHER; note = 2'-O-methylguanosine-3'-phosphate
  modified_base 4: mod_base = OTHER; note = 2'-O-methylcytidine-3'-phosphate
  modified_base 5: mod_base = OTHER; note = 2'-O-methyluridine-3'-phosphate
  modified_base 6: mod_base = OTHER; note = 2'-deoxy-2'-fluoroadenosine-3'-phosphate
  modified_base 7: mod_base = OTHER; note = 2'-O-methyladenosine-3'-phosphate
  modified_base 8: mod_base = OTHER; note = 2'-deoxy-2'-fluoroadenosine-3'-phosphate
  modified_base 9: mod_base = OTHER; note = 2'-deoxy-2'-fluoroguanosine-3'-phosphate
  modified_base 10: mod_base = OTHER; note = 2'-O-methylguanosine-3'-phosphate
  modified_base 11: mod_base = OTHER; note = 2'-O-methyladenosine-3'-phosphate
  modified_base 12: mod_base = OTHER; note = 2'-O-methylguanosine-3'-phosphate
  modified_base 13: mod_base = OTHER; note = 2'-O-methyluridine-3'-phosphate
  modified_base 14: mod_base = OTHER; note = 2'-deoxy-2'-fluorouridine-3'-phosphate
  modified_base 15: mod_base = OTHER; note = 2'-O-methyluridine-3'-phosphate
  modified_base 16: mod_base = OTHER; note = 2'-deoxy-2'-fluorouridine-3'-phosphate
  modified_base 17: mod_base = OTHER; note = 2'-O-methylcytidine-3'-phosphate
  modified_base 18: mod_base = OTHER; note = 2'-O-methyluridine-3'-phosphate
  modified_base 19: mod_base = OTHER; note = 2'-O-methyluridine-3'-phosphate
  modified_base 20: mod_base = OTHER; note = 2'-O-methylcytidine-3'-phosphate
  modified_base 21: mod_base = OTHER; note = 2'-O-methyladenosine-3'-phosphorothioate
  modified_base 22: mod_base = OTHER; note = 2'-O-methylcytidine-3'-phosphorothioate
  modified_base 23: mod_base = OTHER; note = 2'-O-methylcytidine
ttgctaaaggagttttcttcacc

SEQ ID NO: 2928 - RNA, 23 nt, synthetic construct
  source 1..23: mol_type = other RNA
  modified_base 1: mod_base = OTHER; note = 2'-O-methyluridine-3'-phosphorothioate 5'-(E)-Vinylphosphonate
  modified_base 2: mod_base = OTHER; note = 2'-deoxy-2'-fluorouridine-3'-phosphorothioate
  modified_base 3: mod_base = OTHER; note = 2'-O-methyladenosine-3'-phosphate
  modified_base 4: mod_base = OTHER; note = 2'-O-methylguanosine-3'-phosphate
  modified_base 5: mod_base = OTHER; note = 2'-O-methylcytidine-3'-phosphate
  modified_base 6: mod_base = OTHER; note = 2'-deoxy-2'-fluoroadenosine-3'-phosphate
  modified_base 7: mod_base = OTHER; note = 2'-O-methylguanosine-3'-phosphate
  modified_base 8: mod_base = OTHER; note = 2'-deoxy-2'-fluorouridine-3'-phosphate
  modified_base 9: mod_base = OTHER; note = 2'-deoxy-2'-fluoroguanosine-3'-phosphate
  modified_base 10: mod_base = OTHER; note = 2'-O-methylcytidine-3'-phosphate
  modified_base 11: mod_base = OTHER; note = 2'-O-methyluridine-3'-phosphate
  modified_base 12: mod_base = OTHER; note = 2'-O-methyluridine-3'-phosphate
  modified_base 13: mod_base = OTHER; note = 2'-O-methylguanosine-3'-phosphate
  modified_base 14: mod_base = OTHER; note = 2'-deoxy-2'-fluorouridine-3'-phosphate
  modified_base 15: mod_base = OTHER; note = 2'-O-methylcytidine-3'-phosphate
  modified_base 16: mod_base = OTHER; note = 2'-deoxy-2'-fluoroadenosine-3'-phosphate
  modified_base 17: mod_base = OTHER; note = 2'-O-methylguanosine-3'-phosphate
  modified_base 18: mod_base = OTHER; note = 2'-O-methylguanosine-3'-phosphate
  modified_base 19: mod_base = OTHER; note = 2'-O-methyluridine-3'-phosphate
  modified_base 20: mod_base = OTHER; note = 2'-O-methylcytidine-3'-phosphate
  modified_base 21: mod_base = OTHER; note = 2'-O-methyluridine-3'-phosphorothioate
  modified_base 22: mod_base = OTHER; note = 2'-O-methylcytidine-3'-phosphorothioate
  modified_base 23: mod_base = OTHER; note = 2'-O-methyladenosine
ttagcagtgcttgtcaggtctca

SEQ ID NO: 2929 - RNA, 23 nt, synthetic construct
  source 1..23: mol_type = other RNA
  modified_base 1: mod_base = OTHER; note = 2'-O-methyluridine-3'-phosphorothioate 5'-(E)-Vinylphosphonate
  modified_base 2: mod_base = OTHER; note = 2'-deoxy-2'-fluorouridine-3'-phosphorothioate
  modified_base 3: mod_base = OTHER; note = 2'-O-methylguanosine-3'-phosphate
  modified_base 4: mod_base = OTHER; note = 2'-O-methyluridine-3'-phosphate
  modified_base 5: mod_base = OTHER; note = 2'-O-methylguanosine-3'-phosphate
  modified_base 6: mod_base = OTHER; note = 2'-deoxy-2'-fluoroadenosine-3'-phosphate
  modified_base 7: mod_base = OTHER; note = 2'-O-methylcytidine-3'-phosphate
  modified_base 8: mod_base = OTHER; note = 2'-deoxy-2'-fluorocytidine-3'-phosphate
  modified_base 9: mod_base = OTHER; note = 2'-deoxy-2'-fluorouridine-3'-phosphate
  modified_base 10: mod_base = OTHER; note = 2'-O-methylcytidine-3'-phosphate
  modified_base 11: mod_base = OTHER; note = 2'-O-methylcytidine-3'-phosphate
  modified_base 12: mod_base = OTHER; note = 2'-O-methyladenosine-3'-phosphate
  modified_base 13: mod_base = OTHER; note = 2'-O-methylguanosine-3'-phosphate
  modified_base 14: mod_base = OTHER; note = 2'-deoxy-2'-fluorouridine-3'-phosphate
  modified_base 15: mod_base = OTHER; note = 2'-O-methylguanosine-3'-phosphate
  modified_base 16: mod_base = OTHER; note = 2'-deoxy-2'-fluoroguanosine-3'-phosphate
  modified_base 17: mod_base = OTHER; note = 2'-O-methylguanosine-3'-phosphate
  modified_base 18: mod_base = OTHER; note = 2'-O-methyladenosine-3'-phosphate
  modified_base 19: mod_base = OTHER; note = 2'-O-methyladenosine-3'-phosphate
  modified_base 20: mod_base = OTHER; note = 2'-O-methylguanosine-3'-phosphate
  modified_base 21: mod_base = OTHER; note = 2'-O-methylguanosine-3'-phosphorothioate
  modified_base 22: mod_base = OTHER; note = 2'-O-methylguanosine-3'-phosphorothioate
  modified_base 23: mod_base = OTHER; note = 2'-O-methylcytidine
ttgtgacctccagtgggaagggc

SEQ ID NO: 2930 - RNA, 23 nt, synthetic construct
  source 1..23: mol_type = other RNA
  modified_base 1: mod_base = OTHER; note = 2'-O-methyluridine-3'-phosphorothioate 5'-(E)-Vinylphosphonate
  modified_base 2: mod_base = OTHER; note = 2'-deoxy-2'-fluorouridine-3'-phosphorothioate
  modified_base 3: mod_base = OTHER; note = 2'-O-methyluridine-3'-phosphate
  modified_base 4: mod_base = OTHER; note = 2'-O-methyluridine-3'-phosphate
  modified_base 5: mod_base = OTHER; note = 2'-O-methylcytidine-3'-phosphate
  modified_base 6: mod_base = OTHER; note = 2'-deoxy-2'-fluoroadenosine-3'-phosphate
  modified_base 7: mod_base = OTHER; note = 2'-O-methyluridine-3'-phosphate
  modified_base 8: mod_base = OTHER; note = 2'-deoxy-2'-fluorocytidine-3'-phosphate
  modified_base 9: mod_base = OTHER; note = 2'-deoxy-2'-fluorouridine-3'-phosphate
  modified_base 10: mod_base = OTHER; note = 2'-O-methyluridine-3'-phosphate
  modified_base 11: mod_base = OTHER; note = 2'-O-methylcytidine-3'-phosphate
  modified_base 12: mod_base = OTHER; note = 2'-O-methylcytidine-3'-phosphate
  modified_base 13: mod_base = OTHER; note = 2'-O-methyluridine-3'-phosphate
  modified_base 14: mod_base = OTHER; note = 2'-deoxy-2'-fluoroguanosine-3'-phosphate
  modified_base 15: mod_base = OTHER; note = 2'-O-methyladenosine-3'-phosphate
  modified_base 16: mod_base = OTHER; note = 2'-deoxy-2'-fluoroadenosine-3'-phosphate
  modified_base 17: mod_base = OTHER; note = 2'-O-methyluridine-3'-phosphate
  modified_base 18: mod_base = OTHER; note = 2'-O-methylguanosine-3'-phosphate
  modified_base 19: mod_base = OTHER; note = 2'-O-methyluridine-3'-phosphate
  modified_base 20: mod_base = OTHER; note = 2'-O-methylguanosine-3'-phosphate
  modified_base 21: mod_base = OTHER; note = 2'-O-methyladenosine-3'-phosphorothioate
  modified_base 22: mod_base = OTHER; note = 2'-O-methylcytidine-3'-phosphorothioate
  modified_base 23: mod_base = OTHER; note = 2'-O-methylcytidine
ttttcatcttcctgaatgtgacc

SEQ ID NO: 2931 - RNA, 23 nt, synthetic construct
  source 1..23: mol_type = other RNA
  modified_base 1: mod_base = OTHER; note = 2'-O-methyluridine-3'-phosphorothioate 5'-(E)-Vinylphosphonate
  modified_base 2: mod_base = OTHER; note = 2'-deoxy-2'-fluoroadenosine-3'-phosphorothioate
  modified_base 3: mod_base = OTHER; note = 2'-O-methylcytidine-3'-phosphate
  modified_base 4: mod_base = OTHER; note = 2'-O-methyladenosine-3'-phosphate
  modified_base 5: mod_base = OTHER; note = 2'-O-methylguanosine-3'-phosphate
  modified_base 6: mod_base = OTHER; note = 2'-deoxy-2'-fluorocytidine-3'-phosphate
  modified_base 7: mod_base = OTHER; note = 2'-O-methyladenosine-3'-phosphate
  modified_base 8: mod_base = OTHER; note = 2'-deoxy-2'-fluoroguanosine-3'-phosphate
  modified_base 9: mod_base = OTHER; note = 2'-deoxy-2'-fluorocytidine-3'-phosphate
  modified_base 10: mod_base = OTHER; note = 2'-O-methyladenosine-3'-phosphate
  modified_base 11: mod_base = OTHER; note = 2'-O-methylguanosine-3'-phosphate
  modified_base 12: mod_base = OTHER; note = 2'-O-methylguanosine-3'-phosphate
  modified_base 13: mod_base = OTHER; note = 2'-O-methyladenosine-3'-phosphate
  modified_base 14: mod_base = OTHER; note = 2'-deoxy-2'-fluorouridine-3'-phosphate
  modified_base 15: mod_base = OTHER; note = 2'-O-methylguanosine-3'-phosphate
  modified_base 16: mod_base = OTHER; note = 2'-deoxy-2'-fluoroguanosine-3'-phosphate
  modified_base 17: mod_base = OTHER; note = 2'-O-methyluridine-3'-phosphate
  modified_base 18: mod_base = OTHER; note = 2'-O-methylguanosine-3'-phosphate
  modified_base 19: mod_base = OTHER; note = 2'-O-methylguanosine-3'-phosphate
  modified_base 20: mod_base = OTHER; note = 2'-O-methylcytidine-3'-phosphate
  modified_base 21: mod_base = OTHER; note = 2'-O-methyladenosine-3'-phosphorothioate
  modified_base 22: mod_base = OTHER; note = 2'-O-methylguanosine-3'-phosphorothioate
  modified_base 23: mod_base = OTHER; note = 2'-O-methyladenosine
tacagcagcaggatggtggcaga

SEQ ID NO: 2932 - RNA, 23 nt, synthetic construct
  source 1..23: mol_type = other RNA
  modified_base 1: mod_base = OTHER; note = 2'-O-methyluridine-3'-phosphorothioate 5'-(E)-Vinylphosphonate
  modified_base 2: mod_base = OTHER; note = 2'-deoxy-2'-fluorouridine-3'-phosphorothioate
  modified_base 3: mod_base = OTHER; note = 2'-O-methylguanosine-3'-phosphate
  modified_base 4: mod_base = OTHER; note = 2'-O-methyluridine-3'-phosphate
  modified_base 5: mod_base = OTHER; note = 2'-O-methylguanosine-3'-phosphate
  modified_base 6: mod_base = OTHER; note = 2'-deoxy-2'-fluoroadenosine-3'-phosphate
  modified_base 7: mod_base = OTHER; note = 2'-O-methyluridine-3'-phosphate
  modified_base 8: mod_base = OTHER; note = 2'-deoxy-2'-fluoroadenosine-3'-phosphate
  modified_base 9: mod_base = OTHER; note = 2'-deoxy-2'-fluoroguanosine-3'-phosphate
  modified_base 10: mod_base = OTHER; note = 2'-O-methylcytidine-3'-phosphate
  modified_base 11: mod_base = OTHER; note = 2'-O-methyladenosine-3'-phosphate
  modified_base 12: mod_base = OTHER; note = 2'-O-methyladenosine-3'-phosphate
  modified_base 13: mod_base = OTHER; note = 2'-O-methyladenosine-3'-phosphate
  modified_base 14: mod_base = OTHER; note = 2'-deoxy-2'-fluoroadenosine-3'-phosphate
  modified_base 15: mod_base = OTHER; note = 2'-O-methyladenosine-3'-phosphate
  modified_base 16: mod_base = OTHER; note = 2'-deoxy-2'-fluorocytidine-3'-phosphate
  modified_base 17: mod_base = OTHER; note = 2'-O-methyladenosine-3'-phosphate
  modified_base 18: mod_base = OTHER; note = 2'-O-methylcytidine-3'-phosphate
  modified_base 19: mod_base = OTHER; note = 2'-O-methyladenosine-3'-phosphate
  modified_base 20: mod_base = OTHER; note = 2'-O-methylguanosine-3'-phosphate
  modified_base 21: mod_base = OTHER; note = 2'-O-methylcytidine-3'-phosphorothioate
  modified_base 22: mod_base = OTHER; note = 2'-O-methyladenosine-3'-phosphorothioate
  modified_base 23: mod_base = OTHER; note = 2'-O-methylguanosine
ttgtgatagcaaaaacacagcag

SEQ ID NO: 2933 - RNA, 23 nt, synthetic construct
  source 1..23: mol_type = other RNA
  modified_base 1: mod_base = OTHER; note = 2'-O-methyluridine-3'-phosphorothioate 5'-(E)-Vinylphosphonate
  modified_base 2: mod_base = OTHER; note = 2'-deoxy-2'-fluoroadenosine-3'-phosphorothioate
  modified_base 3: mod_base = OTHER; note = 2'-O-methylcytidine-3'-phosphate
  modified_base 4: mod_base = OTHER; note = 2'-O-methyladenosine-3'-phosphate
  modified_base 5: mod_base = OTHER; note = 2'-O-methylguanosine-3'-phosphate
  modified_base 6: mod_base = OTHER; note = 2'-deoxy-2'-fluoroadenosine-3'-phosphate
  modified_base 7: mod_base = OTHER; note = 2'-O-methyluridine-3'-phosphate
  modified_base 8: mod_base = OTHER; note = 2'-deoxy-2'-fluorocytidine-3'-phosphate
  modified_base 9: mod_base = OTHER; note = 2'-deoxy-2'-fluorocytidine-3'-phosphate
  modified_base 10: mod_base = OTHER; note = 2'-O-methyladenosine-3'-phosphate
  modified_base 11: mod_base = OTHER; note = 2'-O-methylcytidine-3'-phosphate
  modified_base 12: mod_base = OTHER; note = 2'-O-methylcytidine-3'-phosphate
  modified_base 13: mod_base = OTHER; note = 2'-O-methyladenosine-3'-phosphate
  modified_base 14: mod_base = OTHER; note = 2'-deoxy-2'-fluorocytidine-3'-phosphate
  modified_base 15: mod_base = OTHER; note = 2'-O-methylcytidine-3'-phosphate
  modified_base 16: mod_base = OTHER; note = 2'-deoxy-2'-fluorocytidine-3'-phosphate
  modified_base 17: mod_base = OTHER; note = 2'-O-methyladenosine-3'-phosphate
  modified_base 18: mod_base = OTHER; note = 2'-O-methylcytidine-3'-phosphate
  modified_base 19: mod_base = OTHER; note = 2'-O-methyluridine-3'-phosphate
  modified_base 20: mod_base = OTHER; note = 2'-O-methylguanosine-3'-phosphate
  modified_base 21: mod_base = OTHER; note = 2'-O-methyluridine-3'-phosphorothioate
  modified_base 22: mod_base = OTHER; note = 2'-O-methylguanosine-3'-phosphorothioate
  modified_base 23: mod_base = OTHER; note = 2'-O-methyluridine
tacagatccaccacccactgtgt

SEQ ID NO: 2934 - RNA, 23 nt, synthetic construct
  source 1..23: mol_type = other RNA
  modified_base 1: mod_base = OTHER; note = 2'-O-methyluridine-3'-phosphorothioate 5'-(E)-Vinylphosphonate
  modified_base 2: mod_base = OTHER; note = 2'-deoxy-2'-fluoroadenosine-3'-phosphorothioate
  modified_base 3: mod_base = OTHER; note = 2'-O-methyluridine-3'-phosphate
  modified_base 4: mod_base = OTHER; note = 2'-O-methyluridine-3'-phosphate
  modified_base 5: mod_base = OTHER; note = 2'-O-methylcytidine-3'-phosphate
  modified_base 6: mod_base = OTHER; note = 2'-deoxy-2'-fluoroadenosine-3'-phosphate
  modified_base 7: mod_base = OTHER; note = 2'-O-methyladenosine-3'-phosphate
  modified_base 8: mod_base = OTHER; note = 2'-deoxy-2'-fluoroguanosine-3'-phosphate
  modified_base 9: mod_base = OTHER; note = 2'-deoxy-2'-fluorouridine-3'-phosphate
  modified_base 10: mod_base = OTHER; note = 2'-O-methyluridine-3'-phosphate
  modified_base 11: mod_base = OTHER; note = 2'-O-methyluridine-3'-phosphate
  modified_base 12: mod_base = OTHER; note = 2'-O-methylcytidine-3'-phosphate
  modified_base 13: mod_base = OTHER; note = 2'-O-methylcytidine-3'-phosphate
  modified_base 14: mod_base = OTHER; note = 2'-deoxy-2'-fluorouridine-3'-phosphate
  modified_base 15: mod_base = OTHER; note = 2'-O-methyluridine-3'-phosphate
  modified_base 16: mod_base = OTHER; note = 2'-deoxy-2'-fluoroguanosine-3'-phosphate
  modified_base 17: mod_base = OTHER; note = 2'-O-methylguanosine-3'-phosphate
  modified_base 18: mod_base = OTHER; note = 2'-O-methyladenosine-3'-phosphate
  modified_base 19: mod_base = OTHER; note = 2'-O-methylcytidine-3'-phosphate
  modified_base 20: mod_base = OTHER; note = 2'-O-methyladenosine-3'-phosphate
  modified_base 21: mod_base = OTHER; note = 2'-O-methylguanosine-3'-phosphorothioate
  modified_base 22: mod_base = OTHER; note = 2'-O-methyladenosine-3'-phosphorothioate
  modified_base 23: mod_base = OTHER; note = 2'-O-methyluridine
tattcaagtttccttggacagat

SEQ ID NO: 2935 - RNA, 23 nt, synthetic construct
  source 1..23: mol_type = other RNA
  modified_base 1: mod_base = OTHER; note = 2'-O-methyluridine-3'-phosphorothioate 5'-(E)-Vinylphosphonate
  modified_base 2: mod_base = OTHER; note = 2'-deoxy-2'-fluoroadenosine-3'-phosphorothioate
  modified_base 3: mod_base = OTHER; note = 2'-O-methyladenosine-3'-phosphate
  modified_base 4: mod_base = OTHER; note = 2'-O-methylguanosine-3'-phosphate
  modified_base 5: mod_base = OTHER; note = 2'-O-methyluridine-3'-phosphate
  modified_base 6: mod_base = OTHER; note = 2'-deoxy-2'-fluorouridine-3'-phosphate
  modified_base 7: mod_base = OTHER; note = 2'-O-methyladenosine-3'-phosphate
  modified_base 8: mod_base = OTHER; note = 2'-deoxy-2'-fluoroadenosine-3'-phosphate
  modified_base 9: mod_base = OTHER; note = 2'-deoxy-2'-fluorocytidine-3'-phosphate
  modified_base 10: mod_base = OTHER; note = 2'-O-methyluridine-3'-phosphate
  modified_base 11: mod_base = OTHER; note = 2'-O-methylguanosine-3'-phosphate
  modified_base 12: mod_base = OTHER; note = 2'-O-methylcytidine-3'-phosphate
  modified_base 13: mod_base = OTHER; note = 2'-O-methyluridine-3'-phosphate
  modified_base 14: mod_base = OTHER; note = 2'-deoxy-2'-fluorouridine-3'-phosphate
  modified_base 15: mod_base = OTHER; note = 2'-O-methyluridine-3'-phosphate
  modified_base 16: mod_base = OTHER; note = 2'-deoxy-2'-fluoroguanosine-3'-phosphate
  modified_base 17: mod_base = OTHER; note = 2'-O-methyladenosine-3'-phosphate
  modified_base 18: mod_base = OTHER; note = 2'-O-methyluridine-3'-phosphate
  modified_base 19: mod_base = OTHER; note = 2'-O-methyluridine-3'-phosphate
  modified_base 20: mod_base = OTHER; note = 2'-O-methylcytidine-3'-phosphate
  modified_base 21: mod_base = OTHER; note = 2'-O-methyladenosine-3'-phosphorothioate
  modified_base 22: mod_base = OTHER; note = 2'-O-methyladenosine-3'-phosphorothioate
  modified_base 23: mod_base = OTHER; note = 2'-O-methylguanosine
taagttaactgctttgattcaag

SEQ ID NO: 2936 - RNA, 23 nt, synthetic construct
  source 1..23: mol_type = other RNA
  modified_base 1: mod_base = OTHER; note = 2'-O-methyluridine-3'-phosphorothioate 5'-(E)-Vinylphosphonate
  modified_base 2: mod_base = OTHER; note = 2'-deoxy-2'-fluorouridine-3'-phosphorothioate
  modified_base 3: mod_base = OTHER; note = 2'-O-methylguanosine-3'-phosphate
  modified_base 4: mod_base = OTHER; note = 2'-O-methyladenosine-3'-phosphate
  modified_base 5: mod_base = OTHER; note = 2'-O-methylguanosine-3'-phosphate
  modified_base 6: mod_base = OTHER; note = 2'-deoxy-2'-fluorocytidine-3'-phosphate
  modified_base 7: mod_base = OTHER; note = 2'-O-methyladenosine-3'-phosphate
  modified_base 8: mod_base = OTHER; note = 2'-deoxy-2'-fluorouridine-3'-phosphate
  modified_base 9: mod_base = OTHER; note = 2'-deoxy-2'-fluoroguanosine-3'-phosphate
  modified_base 10: mod_base = OTHER; note = 2'-O-methyladenosine-3'-phosphate
  modified_base 11: mod_base = OTHER; note = 2'-O-methyladenosine-3'-phosphate
  modified_base 12: mod_base = OTHER; note = 2'-O-methylguanosine-3'-phosphate
  modified_base 13: mod_base = OTHER; note = 2'-O-methylcytidine-3'-phosphate
  modified_base 14: mod_base = OTHER; note = 2'-deoxy-2'-fluoroadenosine-3'-phosphate
  modified_base 15: mod_base = OTHER; note = 2'-O-methylguanosine-3'-phosphate
  modified_base 16: mod_base = OTHER; note = 2'-deoxy-2'-fluoroguanosine-3'-phosphate
  modified_base 17: mod_base = OTHER; note = 2'-O-methyluridine-3'-phosphate
  modified_base 18: mod_base = OTHER; note = 2'-O-methylguanosine-3'-phosphate
  modified_base 19: mod_base = OTHER; note = 2'-O-methylcytidine-3'-phosphate
  modified_base 20: mod_base = OTHER; note = 2'-O-methyluridine-3'-phosphate
  modified_base 21: mod_base = OTHER; note = 2'-O-methylcytidine-3'-phosphorothioate
  modified_base 22: mod_base = OTHER; note = 2'-O-methyladenosine-3'-phosphorothioate
  modified_base 23: mod_base = OTHER; note = 2'-O-methylguanosine
ttgagcatgaagcaggtgctcag

SEQ ID NO: 2937 - RNA, 23 nt, synthetic construct
  source 1..23: mol_type = other RNA
  modified_base 1: mod_base = OTHER; note = 2'-O-methyluridine-3'-phosphorothioate 5'-(E)-Vinylphosphonate
  modified_base 2: mod_base = OTHER; note = 2'-deoxy-2'-fluorouridine-3'-phosphorothioate
  modified_base 3: mod_base = OTHER; note = 2'-O-methyluridine-3'-phosphate
  modified_base 4: mod_base = OTHER; note = 2'-O-methylcytidine-3'-phosphate
  modified_base 5: mod_base = OTHER; note = 2'-O-methyluridine-3'-phosphate
  modified_base 6: mod_base = OTHER; note = 2'-deoxy-2'-fluorocytidine-3'-phosphate
  modified_base 7: mod_base = OTHER; note = 2'-O-methylcytidine-3'-phosphate
  modified_base 8: mod_base = OTHER; note = 2'-deoxy-2'-fluoroadenosine-3'-phosphate
  modified_base 9: mod_base = OTHER; note = 2'-deoxy-2'-fluoroguanosine-3'-phosphate
  modified_base 10: mod_base = OTHER; note = 2'-O-methylcytidine-3'-phosphate
  modified_base 11: mod_base = OTHER; note = 2'-O-methylcytidine-3'-phosphate
  modified_base 12: mod_base = OTHER; note = 2'-O-methyluridine-3'-phosphate
  modified_base 13: mod_base = OTHER; note = 2'-O-methyladenosine-3'-phosphate
  modified_base 14: mod_base = OTHER; note = 2'-deoxy-2'-fluorouridine-3'-phosphate
  modified_base 15: mod_base = OTHER; note = 2'-O-methyladenosine-3'-phosphate
  modified_base 16: mod_base = OTHER; note = 2'-deoxy-2'-fluoroguanosine-3'-phosphate
  modified_base 17: mod_base = OTHER; note = 2'-O-methylcytidine-3'-phosphate
  modified_base 18: mod_base = OTHER; note = 2'-O-methyladenosine-3'-phosphate
  modified_base 19: mod_base = OTHER; note = 2'-O-methylcytidine-3'-phosphate
  modified_base 20: mod_base = OTHER; note = 2'-O-methylcytidine-3'-phosphate
  modified_base 21: mod_base = OTHER; note = 2'-O-methyladenosine-3'-phosphorothioate
  modified_base 22: mod_base = OTHER; note = 2'-O-methylguanosine-3'-phosphorothioate
  modified_base 23: mod_base = OTHER; note = 2'-O-methyluridine
tttctccagcctatagcaccagt

SEQ ID NO: 2938 - RNA, 23 nt, synthetic construct
  source 1..23: mol_type = other RNA
  modified_base 1: mod_base = OTHER; note = 2'-O-methyluridine-3'-phosphorothioate 5'-(E)-Vinylphosphonate
  modified_base 2: mod_base = OTHER; note = 2'-deoxy-2'-fluorouridine-3'-phosphorothioate
  modified_base 3: mod_base = OTHER; note = 2'-O-methyladenosine-3'-phosphate
  modified_base 4: mod_base = OTHER; note = 2'-O-methyladenosine-3'-phosphate
  modified_base 5: mod_base = OTHER; note = 2'-O-methyluridine-3'-phosphate
  modified_base 6: mod_base = OTHER; note = 2'-deoxy-2'-fluoroguanosine-3'-phosphate
  modified_base 7: mod_base = OTHER; note = 2'-O-methyluridine-3'-phosphate
  modified_base 8: mod_base = OTHER; note = 2'-deoxy-2'-fluorouridine-3'-phosphate
  modified_base 9: mod_base = OTHER; note = 2'-deoxy-2'-fluorouridine-3'-phosphate
  modified_base 10: mod_base = OTHER; note = 2'-O-methyladenosine-3'-phosphate
  modified_base 11: mod_base = OTHER; note = 2'-O-methyluridine-3'-phosphate
  modified_base 12: mod_base = OTHER; note = 2'-O-methyluridine-3'-phosphate
  modified_base 13: mod_base = OTHER; note = 2'-O-methylguanosine-3'-phosphate
  modified_base 14: mod_base = OTHER; note = 2'-deoxy-2'-fluoroguanosine-3'-phosphate
  modified_base 15: mod_base = OTHER; note = 2'-O-methylguanosine-3'-phosphate
  modified_base 16: mod_base = OTHER; note = 2'-deoxy-2'-fluorouridine-3'-phosphate
  modified_base 17: mod_base = OTHER; note = 2'-O-methylguanosine-3'-phosphate
  modified_base 18: mod_base = OTHER; note = 2'-O-methyladenosine-3'-phosphate
  modified_base 19: mod_base = OTHER; note = 2'-O-methylguanosine-3'-phosphate
  modified_base 20: mod_base = OTHER; note = 2'-O-methylcytidine-3'-phosphate
  modified_base 21: mod_base = OTHER; note = 2'-O-methyluridine-3'-phosphorothioate
  modified_base 22: mod_base = OTHER; note = 2'-O-methyluridine-3'-phosphorothioate
  modified_base 23: mod_base = OTHER; note = 2'-O-methylcytidine
ttaatgtttattgggtgagcttc

SEQ ID NO: 2939 - RNA, 23 nt, synthetic construct
  source 1..23: mol_type = other RNA
  modified_base 1: mod_base = OTHER; note = 2'-O-methyluridine-3'-phosphorothioate 5'-(E)-Vinylphosphonate
  modified_base 2: mod_base = OTHER; note = 2'-deoxy-2'-fluoroguanosine-3'-phosphorothioate
  modified_base 3: mod_base = OTHER; note = 2'-O-methylguanosine-3'-phosphate
  modified_base 4: mod_base = OTHER; note = 2'-O-methylcytidine-3'-phosphate
  modified_base 5: mod_base = OTHER; note = 2'-O-methyladenosine-3'-phosphate
  modified_base 6: mod_base = OTHER; note = 2'-deoxy-2'-fluoroguanosine-3'-phosphate
  modified_base 7: mod_base = OTHER; note = 2'-O-methylguanosine-3'-phosphate
  modified_base 8: mod_base = OTHER; note = 2'-deoxy-2'-fluorocytidine-3'-phosphate
  modified_base 9: mod_base = OTHER; note = 2'-deoxy-2'-fluorocytidine-3'-phosphate
  modified_base 10: mod_base = OTHER; note = 2'-O-methyluridine-3'-phosphate
  modified_base 11: mod_base = OTHER; note = 2'-O-methylcytidine-3'-phosphate
  modified_base 12: mod_base = OTHER; note = 2'-O-methyladenosine-3'-phosphate
  modified_base 13: mod_base = OTHER; note = 2'-O-methyladenosine-3'-phosphate
  modified_base 14: mod_base = OTHER; note = 2'-deoxy-2'-fluorouridine-3'-phosphate
  modified_base 15: mod_base = OTHER; note = 2'-O-methylcytidine-3'-phosphate
  modified_base 16: mod_base = OTHER; note = 2'-deoxy-2'-fluorouridine-3'-phosphate
  modified_base 17: mod_base = OTHER; note = 2'-O-methyluridine-3'-phosphate
  modified_base 18: mod_base = OTHER; note = 2'-O-methyladenosine-3'-phosphate
  modified_base 19: mod_base = OTHER; note = 2'-O-methyladenosine-3'-phosphate
  modified_base 20: mod_base = OTHER; note = 2'-O-methyluridine-3'-phosphate
  modified_base 21: mod_base = OTHER; note = 2'-O-methylguanosine-3'-phosphorothioate
  modified_base 22: mod_base = OTHER; note = 2'-O-methyluridine-3'-phosphorothioate
  modified_base 23: mod_base = OTHER; note = 2'-O-methyluridine
tggcaggcctcaatcttaatgtt

SEQ ID NO: 2940 - RNA, 23 nt, synthetic construct
  source 1..23: mol_type = other RNA
  modified_base 1: mod_base = OTHER; note = 2'-O-methyluridine-3'-phosphorothioate 5'-(E)-Vinylphosphonate
  modified_base 2: mod_base = OTHER; note = 2'-deoxy-2'-fluorouridine-3'-phosphorothioate
  modified_base 3: mod_base = OTHER; note = 2'-O-methylguanosine-3'-phosphate
  modified_base 4: mod_base = OTHER; note = 2'-O-methylcytidine-3'-phosphate
  modified_base 5: mod_base = OTHER; note = 2'-O-methyladenosine-3'-phosphate
  modified_base 6: mod_base = OTHER; note = 2'-deoxy-2'-fluoroadenosine-3'-phosphate
  modified_base 7: mod_base = OTHER; note = 2'-O-methylguanosine-3'-phosphate
  modified_base 8: mod_base = OTHER; note = 2'-deoxy-2'-fluoroadenosine-3'-phosphate
  modified_base 9: mod_base = OTHER; note = 2'-deoxy-2'-fluorouridine-3'-phosphate
  modified_base 10: mod_base = OTHER; note = 2'-O-methylcytidine-3'-phosphate
  modified_base 11: mod_base = OTHER; note = 2'-O-methylcytidine-3'-phosphate
  modified_base 12: mod_base = OTHER; note = 2'-O-methylcytidine-3'-phosphate
  modified_base 13: mod_base = OTHER; note = 2'-O-methyluridine-3'-phosphate
  modified_base 14: mod_base = OTHER; note = 2'-deoxy-2'-fluoroguanosine-3'-phosphate
  modified_base 15: mod_base = OTHER; note = 2'-O-methyladenosine-3'-phosphate
  modified_base 16: mod_base = OTHER; note = 2'-deoxy-2'-fluoroguanosine-3'-phosphate
  modified_base 17: mod_base = OTHER; note = 2'-O-methylguanosine-3'-phosphate
  modified_base 18: mod_base = OTHER; note = 2'-O-methylguanosine-3'-phosphate
  modified_base 19: mod_base = OTHER; note = 2'-O-methylcytidine-3'-phosphate
  modified_base 20: mod_base = OTHER; note = 2'-O-methyladenosine-3'-phosphate
  modified_base 21: mod_base = OTHER; note = 2'-O-methylguanosine-3'-phosphorothioate
  modified_base 22: mod_base = OTHER; note = 2'-O-methylguanosine-3'-phosphorothioate
  modified_base 23: mod_base = OTHER; note = 2'-O-methylcytidine
ttgcaagatccctgagggcaggc

SEQ ID NO: 2941 - RNA, 23 nt, synthetic construct
  source 1..23: mol_type = other RNA
  modified_base 1: mod_base = OTHER; note = 2'-O-methyluridine-3'-phosphorothioate 5'-(E)-Vinylphosphonate
  modified_base 2: mod_base = OTHER; note = 2'-deoxy-2'-fluorouridine-3'-phosphorothioate
  modified_base 3: mod_base = OTHER; note = 2'-O-methyluridine-3'-phosphate
  modified_base 4: mod_base = OTHER; note = 2'-O-methyluridine-3'-phosphate
  modified_base 5: mod_base = OTHER; note = 2'-O-methylguanosine-3'-phosphate
  modified_base 6: mod_base = OTHER; note = 2'-deoxy-2'-fluoroadenosine-3'-phosphate
  modified_base 7: mod_base = OTHER; note = 2'-O-methylcytidine-3'-phosphate
  modified_base 8: mod_base = OTHER; note = 2'-deoxy-2'-fluorocytidine-3'-phosphate
  modified_base 9: mod_base = OTHER; note = 2'-deoxy-2'-fluoroadenosine-3'-phosphate
  modified_base 10: mod_base = OTHER; note = 2'-O-methylcytidine-3'-phosphate
  modified_base 11: mod_base = OTHER; note = 2'-O-methyluridine-3'-phosphate
  modified_base 12: mod_base = OTHER; note = 2'-O-methylguanosine-3'-phosphate
  modified_base 13: mod_base = OTHER; note = 2'-O-methylguanosine-3'-phosphate
  modified_base 14: mod_base = OTHER; note = 2'-deoxy-2'-fluoroguanosine-3'-phosphate
  modified_base 15: mod_base = OTHER; note = 2'-O-methyladenosine-3'-phosphate
  modified_base 16: mod_base = OTHER; note = 2'-deoxy-2'-fluoroadenosine-3'-phosphate
  modified_base 17: mod_base = OTHER; note = 2'-O-methyluridine-3'-phosphate
  modified_base 18: mod_base = OTHER; note = 2'-O-methylguanosine-3'-phosphate
  modified_base 19: mod_base = OTHER; note = 2'-O-methylcytidine-3'-phosphate
  modified_base 20: mod_base = OTHER; note = 2'-O-methyladenosine-3'-phosphate
  modified_base 21: mod_base = OTHER; note = 2'-O-methyladenosine-3'-phosphorothioate
  modified_base 22: mod_base = OTHER; note = 2'-O-methylguanosine-3'-phosphorothioate
  modified_base 23: mod_base = OTHER; note = 2'-O-methyladenosine
ttttgaccactgggaatgcaaga

SEQ ID NO: 2942 - RNA, 23 nt, synthetic construct
  source 1..23: mol_type = other RNA
  modified_base 1: mod_base = OTHER; note = 2'-O-methyluridine-3'-phosphorothioate 5'-(E)-Vinylphosphonate
  modified_base 2: mod_base = OTHER; note = 2'-deoxy-2'-fluorouridine-3'-phosphorothioate
  modified_base 3: mod_base = OTHER; note = 2'-O-methyluridine-3'-phosphate
  modified_base 4: mod_base = OTHER; note = 2'-O-methylguanosine-3'-phosphate
  modified_base 5: mod_base = OTHER; note = 2'-O-methylguanosine-3'-phosphate
  modified_base 6: mod_base = OTHER; note = 2'-deoxy-2'-fluorocytidine-3'-phosphate
  modified_base 7: mod_base = OTHER; note = 2'-O-methyladenosine-3'-phosphate
  modified_base 8: mod_base = OTHER; note = 2'-deoxy-2'-fluorocytidine-3'-phosphate
  modified_base 9: mod_base = OTHER; note = 2'-deoxy-2'-fluoroadenosine-3'-phosphate
  modified_base 10: mod_base = OTHER; note = 2'-O-methyluridine-3'-phosphate
  modified_base 11: mod_base = OTHER; note = 2'-O-methylguanosine-3'-phosphate
  modified_base 12: mod_base = OTHER; note = 2'-O-methylguanosine-3'-phosphate
  modified_base 13: mod_base = OTHER; note = 2'-O-methylguanosine-3'-phosphate
  modified_base 14: mod_base = OTHER; note = 2'-deoxy-2'-fluorouridine-3'-phosphate
  modified_base 15: mod_base = OTHER; note = 2'-O-methylguanosine-3'-phosphate
  modified_base 16: mod_base = OTHER; note = 2'-deoxy-2'-fluoroadenosine-3'-phosphate
  modified_base 17: mod_base = OTHER; note = 2'-O-methylguanosine-3'-phosphate
  modified_base 18: mod_base = OTHER; note = 2'-O-methyluridine-3'-phosphate
  modified_base 19: mod_base = OTHER; note = 2'-O-methylguanosine-3'-phosphate
  modified_base 20: mod_base = OTHER; note = 2'-O-methylcytidine-3'-phosphate
  modified_base 21: mod_base = OTHER; note = 2'-O-methylguanosine-3'-phosphorothioate
  modified_base 22: mod_base = OTHER; note = 2'-O-methylguanosine-3'-phosphorothioate
  modified_base 23: mod_base = OTHER; note = 2'-O-methyluridine
tttggcacatgggtgagtgcggt

SEQ ID NO: 2943 - RNA, 23 nt, synthetic construct
  source 1..23: mol_type = other RNA
  modified_base 1: mod_base = OTHER; note = 2'-O-methyluridine-3'-phosphorothioate 5'-(E)-Vinylphosphonate
  modified_base 2: mod_base = OTHER; note = 2'-deoxy-2'-fluorouridine-3'-phosphorothioate
  modified_base 3: mod_base = OTHER; note = 2'-O-methylguanosine-3'-phosphate
  modified_base 4: mod_base = OTHER; note = 2'-O-methylcytidine-3'-phosphate
  modified_base 5: mod_base = OTHER; note = 2'-O-methyladenosine-3'-phosphate
  modified_base 6: mod_base = OTHER; note = 2'-deoxy-2'-fluorouridine-3'-phosphate
  modified_base 7: mod_base = OTHER; note = 2'-O-methyluridine-3'-phosphate
  modified_base 8: mod_base = OTHER; note = 2'-deoxy-2'-fluorouridine-3'-phosphate
  modified_base 9: mod_base = OTHER; note = 2'-deoxy-2'-fluoroguanosine-3'-phosphate
  modified_base 10: mod_base = OTHER; note = 2'-O-methylguanosine-3'-phosphate
  modified_base 11: mod_base = OTHER; note = 2'-O-methylcytidine-3'-phosphate
  modified_base 12: mod_base = OTHER; note = 2'-O-methyluridine-3'-phosphate
  modified_base 13: mod_base = OTHER; note = 2'-O-methylguanosine-3'-phosphate
  modified_base 14: mod_base = OTHER; note = 2'-deoxy-2'-fluorouridine-3'-phosphate
  modified_base 15: mod_base = OTHER; note = 2'-O-methyluridine-3'-phosphate
  modified_base 16: mod_base = OTHER; note = 2'-deoxy-2'-fluorocytidine-3'-phosphate
  modified_base 17: mod_base = OTHER; note = 2'-O-methyladenosine-3'-phosphate
  modified_base 18: mod_base = OTHER; note = 2'-O-methylguanosine-3'-phosphate
  modified_base 19: mod_base = OTHER; note = 2'-O-methylcytidine-3'-phosphate
  modified_base 20: mod_base = OTHER; note = 2'-O-methyluridine-3'-phosphate
  modified_base 21: mod_base = OTHER; note = 2'-O-methylguanosine-3'-phosphorothioate
  modified_base 22: mod_base = OTHER; note = 2'-O-methylcytidine-3'-phosphorothioate
  modified_base 23: mod_base = OTHER; note = 2'-O-methyluridine
ttgcatttggctgttcagctgct

SEQ ID NO: 2944 - RNA, 23 nt, synthetic construct
  source 1..23: mol_type = other RNA
  modified_base 1: mod_base = OTHER; note = 2'-O-methyluridine-3'-phosphorothioate 5'-(E)-Vinylphosphonate
  modified_base 2: mod_base = OTHER; note = 2'-deoxy-2'-fluorocytidine-3'-phosphorothioate
  modified_base 3: mod_base = OTHER; note = 2'-O-methyluridine-3'-phosphate
  modified_base 4: mod_base = OTHER; note = 2'-O-methylguanosine-3'-phosphate
  modified_base 5: mod_base = OTHER; note = 2'-O-methyluridine-3'-phosphate
  modified_base 6: mod_base = OTHER; note = 2'-deoxy-2'-fluorocytidine-3'-phosphate
  modified_base 7: mod_base = OTHER; note = 2'-O-methyladenosine-3'-phosphate
  modified_base 8: mod_base = OTHER; note = 2'-deoxy-2'-fluoroadenosine-3'-phosphate
  modified_base 9: mod_base = OTHER; note = 2'-deoxy-2'-fluorocytidine-3'-phosphate
  modified_base 10: mod_base = OTHER; note = 2'-O-methyluridine-3'-phosphate
  modified_base 11: mod_base = OTHER; note = 2'-O-methylguanosine-3'-phosphate
  modified_base 12: mod_base = OTHER; note = 2'-O-methylcytidine-3'-phosphate
  modified_base 13: mod_base = OTHER; note = 2'-O-methyladenosine-3'-phosphate
  modified_base 14: mod_base = OTHER; note = 2'-deoxy-2'-fluorocytidine-3'-phosphate
  modified_base 15: mod_base = OTHER; note = 2'-O-methylcytidine-3'-phosphate
  modified_base 16: mod_base = OTHER; note = 2'-deoxy-2'-fluoroadenosine-3'-phosphate
  modified_base 17: mod_base = OTHER; note = 2'-O-methyluridine-3'-phosphate
  modified_base 18: mod_base = OTHER; note = 2'-O-methylguanosine-3'-phosphate
  modified_base 19: mod_base = OTHER; note = 2'-O-methylcytidine-3'-phosphate
  modified_base 20: mod_base = OTHER; note = 2'-O-methyladenosine-3'-phosphate
  modified_base 21: mod_base = OTHER; note = 2'-O-methyluridine-3'-phosphorothioate
  modified_base 22: mod_base = OTHER; note = 2'-O-methyluridine-3'-phosphorothioate
  modified_base 23: mod_base = OTHER; note = 2'-O-methyluridine
tctgtcaactgcaccatgcattt

SEQ ID NO: 2945 - RNA, 23 nt, synthetic construct
  source 1..23: mol_type = other RNA
  modified_base 1: mod_base = OTHER; note = 2'-O-methyluridine-3'-phosphorothioate 5'-(E)-Vinylphosphonate
  modified_base 2: mod_base = OTHER; note = 2'-deoxy-2'-fluoroadenosine-3'-phosphorothioate
  modified_base 3: mod_base = OTHER; note = 2'-O-methylguanosine-3'-phosphate
  modified_base 4: mod_base = OTHER; note = 2'-O-methylcytidine-3'-phosphate
  modified_base 5: mod_base = OTHER; note = 2'-O-methyluridine-3'-phosphate
  modified_base 6: mod_base = OTHER; note = 2'-deoxy-2'-fluorocytidine-3'-phosphate
  modified_base 7: mod_base = OTHER; note = 2'-O-methyladenosine-3'-phosphate
  modified_base 8: mod_base = OTHER; note = 2'-deoxy-2'-fluorouridine-3'-phosphate
  modified_base 9: mod_base = OTHER; note = 2'-deoxy-2'-fluoroadenosine-3'-phosphate
  modified_base 10: mod_base = OTHER; note = 2'-O-methylcytidine-3'-phosphate
  modified_base 11: mod_base = OTHER; note = 2'-O-methylcytidine-3'-phosphate
  modified_base 12: mod_base = OTHER; note = 2'-O-methyladenosine-3'-phosphate
  modified_base 13: mod_base = OTHER; note = 2'-O-methyluridine-3'-phosphate
  modified_base 14: mod_base = OTHER; note = 2'-deoxy-2'-fluorouridine-3'-phosphate
  modified_base 15: mod_base = OTHER; note = 2'-O-methyluridine-3'-phosphate
  modified_base 16: mod_base = OTHER; note = 2'-deoxy-2'-fluorocytidine-3'-phosphate
  modified_base 17: mod_base = OTHER; note = 2'-O-methylcytidine-3'-phosphate
  modified_base 18: mod_base = OTHER; note = 2'-O-methylcytidine-3'-phosphate
  modified_base 19: mod_base = OTHER; note = 2'-O-methyladenosine-3'-phosphate
  modified_base 20: mod_base = OTHER; note = 2'-O-methylcytidine-3'-phosphate
  modified_base 21: mod_base = OTHER; note = 2'-O-methylcytidine-3'-phosphorothioate
  modified_base 22: mod_base = OTHER; note = 2'-O-methyluridine-3'-phosphorothioate
  modified_base 23: mod_base = OTHER; note = 2'-O-methylguanosine
tagctcataccatttcccacctg

SEQ ID NO: 2946 - RNA, 23 nt, synthetic construct
  source 1..23: mol_type = other RNA
  modified_base 1: mod_base = OTHER; note = 2'-O-methyluridine-3'-phosphorothioate 5'-(E)-Vinylphosphonate
  modified_base 2: mod_base = OTHER; note = 2'-deoxy-2'-fluorouridine-3'-phosphorothioate
  modified_base 3: mod_base = OTHER; note = 2'-O-methylguanosine-3'-phosphate
  modified_base 4: mod_base = OTHER; note = 2'-O-methylcytidine-3'-phosphate
  modified_base 5: mod_base = OTHER; note = 2'-O-methyladenosine-3'-phosphate
  modified_base 6: mod_base = OTHER; note = 2'-deoxy-2'-fluoroadenosine-3'-phosphate
  modified_base 7: mod_base = OTHER; note = 2'-O-methylguanosine-3'-phosphate
  modified_base 8: mod_base = OTHER; note = 2'-deoxy-2'-fluorocytidine-3'-phosphate
  modified_base 9: mod_base = OTHER; note = 2'-deoxy-2'-fluoroadenosine-3'-phosphate
  modified_base 10: mod_base = OTHER; note = 2'-O-methylguanosine-3'-phosphate
  modified_base 11: mod_base = OTHER; note = 2'-O-methylguanosine-3'-phosphate
  modified_base 12: mod_base = OTHER; note = 2'-O-methylguanosine-3'-phosphate
  modified_base 13: mod_base = OTHER; note = 2'-O-methyluridine-3'-phosphate
  modified_base 14: mod_base = OTHER; note = 2'-deoxy-2'-fluorouridine-3'-phosphate
  modified_base 15: mod_base = OTHER; note = 2'-O-methylcytidine-3'-phosphate
  modified_base 16: mod_base = OTHER; note = 2'-deoxy-2'-fluorocytidine-3'-phosphate
  modified_base 17: mod_base = OTHER; note = 2'-O-methylcytidine-3'-phosphate
  modified_base 18: mod_base = OTHER; note = 2'-O-methyluridine-3'-phosphate
  modified_base 19: mod_base = OTHER; note = 2'-O-methylguanosine-3'-phosphate
  modified_base 20: mod_base = OTHER; note = 2'-O-methyluridine-3'-phosphate
  modified_base 21: mod_base = OTHER; note = 2'-O-methylguanosine-3'-phosphorothioate
  modified_base 22: mod_base = OTHER; note = 2'-O-methylguanosine-3'-phosphorothioate
  modified_base 23: mod_base = OTHER; note = 2'-O-methylguanosine
ttgcaagcagggttccctgtggg

SEQ ID NO: 2947 - RNA, 23 nt, synthetic construct
  source 1..23: mol_type = other RNA
  modified_base 1: mod_base = OTHER; note = 2'-O-methyluridine-3'-phosphorothioate 5'-(E)-Vinylphosphonate
  modified_base 2: mod_base = OTHER; note = 2'-deoxy-2'-fluorouridine-3'-phosphorothioate
  modified_base 3: mod_base = OTHER; note = 2'-O-methyladenosine-3'-phosphate
  modified_base 4: mod_base = OTHER; note = 2'-O-methyladenosine-3'-phosphate
  modified_base 5: mod_base = OTHER; note = 2'-O-methyladenosine-3'-phosphate
  modified_base 6: mod_base = OTHER; note = 2'-deoxy-2'-fluorocytidine-3'-phosphate
  modified_base 7: mod_base = OTHER; note = 2'-O-methyladenosine-3'-phosphate
  modified_base 8: mod_base = OTHER; note = 2'-deoxy-2'-fluorouridine-3'-phosphate
  modified_base 9: mod_base = OTHER; note = 2'-deoxy-2'-fluoroguanosine-3'-phosphate
  modified_base 10: mod_base = OTHER; note = 2'-O-methyluridine-3'-phosphate
  modified_base 11: mod_base = OTHER; note = 2'-O-methyluridine-3'-phosphate
  modified_base 12: mod_base = OTHER; note = 2'-O-methyladenosine-3'-phosphate
  modified_base 13: mod_base = OTHER; note = 2'-O-methylcytidine-3'-phosphate
  modified_base 14: mod_base = OTHER; note = 2'-deoxy-2'-fluoroadenosine-3'-phosphate
  modified_base 15: mod_base = OTHER; note = 2'-O-methyladenosine-3'-phosphate
  modified_base 16: mod_base = OTHER; note = 2'-deoxy-2'-fluoroadenosine-3'-phosphate
  modified_base 17: mod_base = OTHER; note = 2'-O-methylguanosine-3'-phosphate
  modified_base 18: mod_base = OTHER; note = 2'-O-methyluridine-3'-phosphate
  modified_base 19: mod_base = OTHER; note = 2'-O-methylguanosine-3'-phosphate
  modified_base 20: mod_base = OTHER; note = 2'-O-methylcytidine-3'-phosphate
  modified_base 21: mod_base = OTHER; note = 2'-O-methyladenosine-3'-phosphorothioate
  modified_base 22: mod_base = OTHER; note = 2'-O-methyladenosine-3'-phosphorothioate
  modified_base 23: mod_base = OTHER; note = 2'-O-methylguanosine
ttaaacatgttacaaagtgcaag

SEQ ID NO: 2948 - RNA, 23 nt, synthetic construct
  source 1..23: mol_type = other RNA
  modified_base 1: mod_base = OTHER; note = 2'-O-methyluridine-3'-phosphorothioate 5'-(E)-Vinylphosphonate
  modified_base 2: mod_base = OTHER; note = 2'-deoxy-2'-fluorouridine-3'-phosphorothioate
  modified_base 3: mod_base = OTHER; note = 2'-O-methyladenosine-3'-phosphate
  modified_base 4: mod_base = OTHER; note = 2'-O-methyluridine-3'-phosphate
  modified_base 5: mod_base = OTHER; note = 2'-O-methyladenosine-3'-phosphate
  modified_base 6: mod_base = OTHER; note = 2'-deoxy-2'-fluoroadenosine-3'-phosphate
  modified_base 7: mod_base = OTHER; note = 2'-O-methyluridine-3'-phosphate
  modified_base 8: mod_base = OTHER; note = 2'-deoxy-2'-fluoroadenosine-3'-phosphate
  modified_base 9: mod_base = OTHER; note = 2'-deoxy-2'-fluoroguanosine-3'-phosphate
  modified_base 10: mod_base = OTHER; note = 2'-O-methyladenosine-3'-phosphate
  modified_base 11: mod_base = OTHER; note = 2'-O-methyladenosine-3'-phosphate
  modified_base 12: mod_base = OTHER; note = 2'-O-methylguanosine-3'-phosphate
  modified_base 13: mod_base = OTHER; note = 2'-O-methylcytidine-3'-phosphate
  modified_base 14: mod_base = OTHER; note = 2'-deoxy-2'-fluorouridine-3'-phosphate
  modified_base 15: mod_base = OTHER; note = 2'-O-methyladenosine-3'-phosphate
  modified_base 16: mod_base = OTHER; note = 2'-deoxy-2'-fluoroadenosine-3'-phosphate
  modified_base 17: mod_base = OTHER; note = 2'-O-methylguanosine-3'-phosphate
  modified_base 18: mod_base = OTHER; note = 2'-O-methyladenosine-3'-phosphate
  modified_base 19: mod_base = OTHER; note = 2'-O-methyluridine-3'-phosphate
  modified_base 20: mod_base = OTHER; note = 2'-O-methylguanosine-3'-phosphate
  modified_base 21: mod_base = OTHER; note = 2'-O-methylcytidine-3'-phosphorothioate
  modified_base 22: mod_base = OTHER; note = 2'-O-methylcytidine-3'-phosphorothioate
  modified_base 23: mod_base = OTHER; note = 2'-O-methylcytidine
ttataatagaagctaagatgccc

SEQ ID NO: 2949 - RNA, 23 nt, synthetic construct
  source 1..23: mol_type = other RNA
  modified_base 1: mod_base = OTHER; note = 2'-O-methyluridine-3'-phosphorothioate 5'-(E)-Vinylphosphonate
  modified_base 2: mod_base = OTHER; note = 2'-deoxy-2'-fluorocytidine-3'-phosphorothioate
  modified_base 3: mod_base = OTHER; note = 2'-O-methyladenosine-3'-phosphate
  modified_base 4: mod_base = OTHER; note = 2'-O-methylguanosine-3'-phosphate
  modified_base 5: mod_base = OTHER; note = 2'-O-methyluridine-3'-phosphate
  modified_base 6: mod_base = OTHER; note = 2'-deoxy-2'-fluorouridine-3'-phosphate
  modified_base 7: mod_base = OTHER; note = 2'-O-methyladenosine-3'-phosphate
  modified_base 8: mod_base = OTHER; note = 2'-deoxy-2'-fluorouridine-3'-phosphate
  modified_base 9: mod_base = OTHER; note = 2'-deoxy-2'-fluorocytidine-3'-phosphate
  modified_base 10: mod_base = OTHER; note = 2'-O-methyluridine-3'-phosphate
  modified_base 11: mod_base = OTHER; note = 2'-O-methyluridine-3'-phosphate
  modified_base 12: mod_base = OTHER; note = 2'-O-methylguanosine-3'-phosphate
  modified_base 13: mod_base = OTHER; note = 2'-O-methyluridine-3'-phosphate
  modified_base 14: mod_base = OTHER; note = 2'-deoxy-2'-fluorouridine-3'-phosphate
  modified_base 15: mod_base = OTHER; note = 2'-O-methyluridine-3'-phosphate
  modified_base 16: mod_base = OTHER; note = 2'-deoxy-2'-fluorocytidine-3'-phosphate
  modified_base 17: mod_base = OTHER; note = 2'-O-methyladenosine-3'-phosphate
  modified_base 18: mod_base = OTHER; note = 2'-O-methyladenosine-3'-phosphate
  modified_base 19: mod_base = OTHER; note = 2'-O-methyladenosine-3'-phosphate
  modified_base 20: mod_base = OTHER; note = 2'-O-methylguanosine-3'-phosphate
  modified_base 21: mod_base = OTHER; note = 2'-O-methylguanosine-3'-phosphorothioate
  modified_base 22: mod_base = OTHER; note = 2'-O-methylguanosine-3'-phosphorothioate
  modified_base 23: mod_base = OTHER; note = 2'-O-methyladenosine
tcagttatcttgtttcaaaggga

SEQ ID NO: 2950 - RNA, 23 nt, synthetic construct
  source 1..23: mol_type = other RNA
  modified_base 1: mod_base = OTHER; note = 2'-O-methyluridine-3'-phosphorothioate 5'-(E)-Vinylphosphonate
  modified_base 2: mod_base = OTHER; note = 2'-deoxy-2'-fluorouridine-3'-phosphorothioate
  modified_base 3: mod_base = OTHER; note = 2'-O-methylguanosine-3'-phosphate
  modified_base 4: mod_base = OTHER; note = 2'-O-methyluridine-3'-phosphate
  modified_base 5: mod_base = OTHER; note = 2'-O-methyluridine-3'-phosphate
  modified_base 6: mod_base = OTHER; note = 2'-deoxy-2'-fluoroadenosine-3'-phosphate
  modified_base 7: mod_base = OTHER; note = 2'-O-methyluridine-3'-phosphate
  modified_base 8: mod_base = OTHER; note = 2'-deoxy-2'-fluoroguanosine-3'-phosphate
  modified_base 9: mod_base = OTHER; note = 2'-deoxy-2'-fluoroguanosine-3'-phosphate
  modified_base 10: mod_base = OTHER; note = 2'-O-methyluridine-3'-phosphate
  modified_base 11: mod_base = OTHER; note = 2'-O-methylcytidine-3'-phosphate
  modified_base 12: mod_base = OTHER; note = 2'-O-methyluridine-3'-phosphate
  modified_base 13: mod_base = OTHER; note = 2'-O-methyluridine-3'-phosphate
  modified_base 14: mod_base = OTHER; note = 2'-deoxy-2'-fluoroadenosine-3'-phosphate
  modified_base 15: mod_base = OTHER; note = 2'-O-methyluridine-3'-phosphate
  modified_base 16: mod_base = OTHER; note = 2'-deoxy-2'-fluoroguanosine-3'-phosphate
  modified_base 17: mod_base = OTHER; note = 2'-O-methyluridine-3'-phosphate
  modified_base 18: mod_base = OTHER; note = 2'-O-methyladenosine-3'-phosphate
  modified_base 19: mod_base = OTHER; note = 2'-O-methyluridine-3'-phosphate
  modified_base 20: mod_base = OTHER; note = 2'-O-methyluridine-3'-phosphate
  modified_base 21: mod_base = OTHER; note = 2'-O-methyluridine-3'-phosphorothioate
  modified_base 22: mod_base = OTHER; note = 2'-O-methyluridine-3'-phosphorothioate
  modified_base 23: mod_base = OTHER; note = 2'-O-methylcytidine
ttgttatggtcttatgtattttc

SEQ ID NO: 2951 - RNA, 23 nt, synthetic construct
  source 1..23: mol_type = other RNA
  modified_base 1: mod_base = OTHER; note = 2'-O-methyluridine-3'-phosphorothioate 5'-(E)-Vinylphosphonate
  modified_base 2: mod_base = OTHER; note = 2'-deoxy-2'-fluorocytidine-3'-phosphorothioate
  modified_base 3: mod_base = OTHER; note = 2'-O-methyluridine-3'-phosphate
  modified_base 4: mod_base = OTHER; note = 2'-O-methyladenosine-3'-phosphate
  modified_base 5: mod_base = OTHER; note = 2'-O-methyluridine-3'-phosphate
  modified_base 6: mod_base = OTHER; note = 2'-deoxy-2'-fluoroadenosine-3'-phosphate
  modified_base 7: mod_base = OTHER; note = 2'-O-methylguanosine-3'-phosphate
  modified_base 8: mod_base = OTHER; note = 2'-deoxy-2'-fluorouridine-3'-phosphate
  modified_base 9: mod_base = OTHER; note = 2'-deoxy-2'-fluorocytidine-3'-phosphate
  modified_base 10: mod_base = OTHER; note = 2'-O-methylcytidine-3'-phosphate
  modified_base 11: mod_base = OTHER; note = 2'-O-methyluridine-3'-phosphate
  modified_base 12: mod_base = OTHER; note = 2'-O-methylguanosine-3'-phosphate
  modified_base 13: mod_base = OTHER; note = 2'-O-methylguanosine-3'-phosphate
  modified_base 14: mod_base = OTHER; note = 2'-deoxy-2'-fluorouridine-3'-phosphate
  modified_base 15: mod_base = OTHER; note = 2'-O-methylcytidine-3'-phosphate
  modified_base 16: mod_base = OTHER; note = 2'-deoxy-2'-fluorocytidine-3'-phosphate
  modified_base 17: mod_base = OTHER; note = 2'-O-methyluridine-3'-phosphate
  modified_base 18: mod_base = OTHER; note = 2'-O-methylguanosine-3'-phosphate
  modified_base 19: mod_base = OTHER; note = 2'-O-methylcytidine-3'-phosphate
  modified_base 20: mod_base = OTHER; note = 2'-O-methylcytidine-3'-phosphate
  modified_base 21: mod_base = OTHER; note = 2'-O-methyladenosine-3'-phosphorothioate
  modified_base 22: mod_base = OTHER; note = 2'-O-methylcytidine-3'-phosphorothioate
  modified_base 23: mod_base = OTHER; note = 2'-O-methylcytidine
tctatagtcctggtcctgccacc

SEQ ID NO: 2952 - RNA, 23 nt, synthetic construct
  source 1..23: mol_type = other RNA
  modified_base 1: mod_base = OTHER; note = 2'-O-methyluridine-3'-phosphorothioate 5'-(E)-Vinylphosphonate
  modified_base 2: mod_base = OTHER; note = 2'-deoxy-2'-fluorouridine-3'-phosphorothioate
  modified_base 3: mod_base = OTHER; note = 2'-O-methyladenosine-3'-phosphate
  modified_base 4: mod_base = OTHER; note = 2'-O-methyluridine-3'-phosphate
  modified_base 5: mod_base = OTHER; note = 2'-O-methylcytidine-3'-phosphate
  modified_base 6: mod_base = OTHER; note = 2'-deoxy-2'-fluoroadenosine-3'-phosphate
  modified_base 7: mod_base = OTHER; note = 2'-O-methylguanosine-3'-phosphate
  modified_base 8: mod_base = OTHER; note = 2'-deoxy-2'-fluoroadenosine-3'-phosphate
  modified_base 9: mod_base = OTHER; note = 2'-deoxy-2'-fluoroguanosine-3'-phosphate
  modified_base 10: mod_base = OTHER; note = 2'-O-methylguanosine-3'-phosphate
  modified_base 11: mod_base = OTHER; note = 2'-O-methyladenosine-3'-phosphate
  modified_base 12: mod_base = OTHER; note = 2'-O-methylcytidine-3'-phosphate
  modified_base 13: mod_base = OTHER; note = 2'-O-methylcytidine-3'-phosphate
  modified_base 14: mod_base = OTHER; note = 2'-deoxy-2'-fluorouridine-3'-phosphate
  modified_base 15: mod_base = OTHER; note = 2'-O-methylguanosine-3'-phosphate
  modified_base 16: mod_base = OTHER; note = 2'-deoxy-2'-fluoroguanosine-3'-phosphate
  modified_base 17: mod_base = OTHER; note = 2'-O-methylguanosine-3'-phosphate
  modified_base 18: mod_base = OTHER; note = 2'-O-methylcytidine-3'-phosphate
  modified_base 19: mod_base = OTHER; note = 2'-O-methyluridine-3'-phosphate
  modified_base 20: mod_base = OTHER; note = 2'-O-methyladenosine-3'-phosphate
  modified_base 21: mod_base = OTHER; note = 2'-O-methyluridine-3'-phosphorothioate
  modified_base 22: mod_base = OTHER; note = 2'-O-methyladenosine-3'-phosphorothioate
  modified_base 23: mod_base = OTHER; note = 2'-O-methylguanosine
ttatcagaggacctgggctatag

SEQ ID NO: 2953 - RNA, 23 nt, synthetic construct
  source 1..23: mol_type = other RNA
  modified_base 1: mod_base = OTHER; note = 2'-O-methyluridine-3'-phosphorothioate 5'-(E)-Vinylphosphonate
  modified_base 2: mod_base = OTHER; note = 2'-deoxy-2'-fluorouridine-3'-phosphorothioate
  modified_base 3: mod_base = OTHER; note = 2'-O-methylcytidine-3'-phosphate
  modified_base 4: mod_base = OTHER; note = 2'-O-methyladenosine-3'-phosphate
  modified_base 5: mod_base = OTHER; note = 2'-O-methylcytidine-3'-phosphate
  modified_base 6: mod_base = OTHER; note = 2'-deoxy-2'-fluoroguanosine-3'-phosphate
  modified_base 7: mod_base = OTHER; note = 2'-O-methyluridine-3'-phosphate
  modified_base 8: mod_base = OTHER; note = 2'-deoxy-2'-fluoroadenosine-3'-phosphate
  modified_base 9: mod_base = OTHER; note = 2'-deoxy-2'-fluoroadenosine-3'-phosphate
  modified_base 10: mod_base = OTHER; note = 2'-O-methyluridine-3'-phosphate
  modified_base 11: mod_base = OTHER; note = 2'-O-methylguanosine-3'-phosphate
  modified_base 12: mod_base = OTHER; note = 2'-O-methylcytidine-3'-phosphate
  modified_base 13: mod_base = OTHER; note = 2'-O-methyluridine-3'-phosphate
  modified_base 14: mod_base = OTHER; note = 2'-deoxy-2'-fluorocytidine-3'-phosphate
  modified_base 15: mod_base = OTHER; note = 2'-O-methyluridine-3'-phosphate
  modified_base 16: mod_base = OTHER; note = 2'-deoxy-2'-fluoroguanosine-3'-phosphate
  modified_base 17: mod_base = OTHER; note = 2'-O-methylguanosine-3'-phosphate
  modified_base 18: mod_base = OTHER; note = 2'-O-methylguanosine-3'-phosphate
  modified_base 19: mod_base = OTHER; note = 2'-O-methyluridine-3'-phosphate
  modified_base 20: mod_base = OTHER; note = 2'-O-methyladenosine-3'-phosphate
  modified_base 21: mod_base = OTHER; note = 2'-O-methyluridine-3'-phosphorothioate
  modified_base 22: mod_base = OTHER; note = 2'-O-methylcytidine-3'-phosphorothioate
  modified_base 23: mod_base = OTHER; note = 2'-O-methyladenosine
ttcacgtaatgctctgggtatca

SEQ ID NO: 2954 - RNA, 23 nt, synthetic construct
  source 1..23: mol_type = other RNA
  modified_base 1: mod_base = OTHER; note = 2'-O-methyluridine-3'-phosphorothioate 5'-(E)-Vinylphosphonate
  modified_base 2: mod_base = OTHER; note = 2'-deoxy-2'-fluorouridine-3'-phosphorothioate
  modified_base 3: mod_base = OTHER; note = 2'-O-methyluridine-3'-phosphate
  modified_base 4: mod_base = OTHER; note = 2'-O-methylcytidine-3'-phosphate
  modified_base 5: mod_base = OTHER; note = 2'-O-methylcytidine-3'-phosphate
  modified_base 6: mod_base = OTHER; note = 2'-deoxy-2'-fluoroadenosine-3'-phosphate
  modified_base 7: mod_base = OTHER; note = 2'-O-methylguanosine-3'-phosphate
  modified_base 8: mod_base = OTHER; note = 2'-deoxy-2'-fluorouridine-3'-phosphate
  modified_base 9: mod_base = OTHER; note = 2'-deoxy-2'-fluorocytidine-3'-phosphate
  modified_base 10: mod_base = OTHER; note = 2'-O-methylcytidine-3'-phosphate
  modified_base 11: mod_base = OTHER; note = 2'-O-methylcytidine-3'-phosphate
  modified_base 12: mod_base = OTHER; note = 2'-O-methyluridine-3'-phosphate
  modified_base 13: mod_base = OTHER; note = 2'-O-methylcytidine-3'-phosphate
  modified_base 14: mod_base = OTHER; note = 2'-deoxy-2'-fluoroadenosine-3'-phosphate
  modified_base 15: mod_base = OTHER; note = 2'-O-methyluridine-3'-phosphate
  modified_base 16: mod_base = OTHER; note = 2'-deoxy-2'-fluorouridine-3'-phosphate
  modified_base 17: mod_base = OTHER; note = 2'-O-methyladenosine-3'-phosphate
  modified_base 18: mod_base = OTHER; note = 2'-O-methylcytidine-3'-phosphate
  modified_base 19: mod_base = OTHER; note = 2'-O-methylcytidine-3'-phosphate
  modified_base 20: mod_base = OTHER; note = 2'-O-methyluridine-3'-phosphate
  modified_base 21: mod_base = OTHER; note = 2'-O-methylguanosine-3'-phosphorothioate
  modified_base 22: mod_base = OTHER; note = 2'-O-methylguanosine-3'-phosphorothioate
  modified_base 23: mod_base = OTHER; note = 2'-O-methylcytidine
tttccagtccctcattacctggc

SEQ ID NO: 2955 - RNA, 23 nt, synthetic construct
  source 1..23: mol_type = other RNA
  modified_base 1: mod_base = OTHER; note = 2'-O-methyluridine-3'-phosphorothioate 5'-(E)-Vinylphosphonate
  modified_base 2: mod_base = OTHER; note = 2'-deoxy-2'-fluorouridine-3'-phosphorothioate
  modified_base 3: mod_base = OTHER; note = 2'-O-methylcytidine-3'-phosphate
  modified_base 4: mod_base = OTHER; note = 2'-O-methylcytidine-3'-phosphate
  modified_base 5: mod_base = OTHER; note = 2'-O-methyladenosine-3'-phosphate
  modified_base 6: mod_base = OTHER; note = 2'-deoxy-2'-fluoroguanosine-3'-phosphate
  modified_base 7: mod_base = OTHER; note = 2'-O-methyladenosine-3'-phosphate
  modified_base 8: mod_base = OTHER; note = 2'-deoxy-2'-fluoroadenosine-3'-phosphate
  modified_base 9: mod_base = OTHER; note = 2'-deoxy-2'-fluoroadenosine-3'-phosphate
  modified_base 10: mod_base = OTHER; note = 2'-O-methylguanosine-3'-phosphate
  modified_base 11: mod_base = OTHER; note = 2'-O-methylcytidine-3'-phosphate
  modified_base 12: mod_base = OTHER; note = 2'-O-methylguanosine-3'-phosphate
  modified_base 13: mod_base = OTHER; note = 2'-O-methylcytidine-3'-phosphate
  modified_base 14: mod_base = OTHER; note = 2'-deoxy-2'-fluorouridine-3'-phosphate
  modified_base 15: mod_base = OTHER; note = 2'-O-methylcytidine-3'-phosphate
  modified_base 16: mod_base = OTHER; note = 2'-deoxy-2'-fluoroguanosine-3'-phosphate
  modified_base 17: mod_base = OTHER; note = 2'-O-methylguanosine-3'-phosphate
  modified_base 18: mod_base = OTHER; note = 2'-O-methyluridine-3'-phosphate
  modified_base 19: mod_base = OTHER; note = 2'-O-methylcytidine-3'-phosphate
  modified_base 20: mod_base = OTHER; note = 2'-O-methyluridine-3'-phosphate
  modified_base 21: mod_base = OTHER; note = 2'-O-methylcytidine-3'-phosphorothioate
  modified_base 22: mod_base = OTHER; note = 2'-O-methylcytidine-3'-phosphorothioate
  modified_base 23: mod_base = OTHER; note = 2'-O-methylcytidine
ttccagaaagcgctcggtctccc

SEQ ID NO: 2956 - RNA, 23 nt, synthetic construct
  source 1..23: mol_type = other RNA
  modified_base 1: mod_base = OTHER; note = 2'-O-methyluridine-3'-phosphorothioate 5'-(E)-Vinylphosphonate
  modified_base 2: mod_base = OTHER; note = 2'-deoxy-2'-fluorouridine-3'-phosphorothioate
  modified_base 3: mod_base = OTHER; note = 2'-O-methylcytidine-3'-phosphate
  modified_base 4: mod_base = OTHER; note = 2'-O-methylguanosine-3'-phosphate
  modified_base 5: mod_base = OTHER; note = 2'-O-methyladenosine-3'-phosphate
  modified_base 6: mod_base = OTHER; note = 2'-deoxy-2'-fluoroadenosine-3'-phosphate
  modified_base 7: mod_base = OTHER; note = 2'-O-methyladenosine-3'-phosphate
  modified_base 8: mod_base = OTHER; note = 2'-deoxy-2'-fluorocytidine-3'-phosphate
  modified_base 9: mod_base = OTHER; note = 2'-deoxy-2'-fluorouridine-3'-phosphate
  modified_base 10: mod_base = OTHER; note = 2'-O-methylcytidine-3'-phosphate
  modified_base 11: mod_base = OTHER; note = 2'-O-methylcytidine-3'-phosphate
  modified_base 12: mod_base = OTHER; note = 2'-O-methyluridine-3'-phosphate
  modified_base 13: mod_base = OTHER; note = 2'-O-methylcytidine-3'-phosphate
  modified_base 14: mod_base = OTHER; note = 2'-deoxy-2'-fluorouridine-3'-phosphate
  modified_base 15: mod_base = OTHER; note = 2'-O-methyluridine-3'-phosphate
  modified_base 16: mod_base = OTHER; note = 2'-deoxy-2'-fluorouridine-3'-phosphate
  modified_base 17: mod_base = OTHER; note = 2'-O-methyluridine-3'-phosphate
  modified_base 18: mod_base = OTHER; note = 2'-O-methylcytidine-3'-phosphate
  modified_base 19: mod_base = OTHER; note = 2'-O-methylcytidine-3'-phosphate
  modified_base 20: mod_base = OTHER; note = 2'-O-methyladenosine-3'-phosphate
  modified_base 21: mod_base = OTHER; note = 2'-O-methylguanosine-3'-phosphorothioate
  modified_base 22: mod_base = OTHER; note = 2'-O-methyladenosine-3'-phosphorothioate
  modified_base 23: mod_base = OTHER; note = 2'-O-methyladenosine
ttcgaaactcctcttttccagaa

SEQ ID NO: 2957 - RNA, 23 nt, synthetic construct
  source 1..23: mol_type = other RNA
  modified_base 1: mod_base = OTHER; note = 2'-O-methyluridine-3'-phosphorothioate 5'-(E)-Vinylphosphonate
  modified_base 2: mod_base = OTHER; note = 2'-deoxy-2'-fluorocytidine-3'-phosphorothioate
  modified_base 3: mod_base = OTHER; note = 2'-O-methylcytidine-3'-phosphate
  modified_base 4: mod_base = OTHER; note = 2'-O-methyluridine-3'-phosphate
  modified_base 5: mod_base = OTHER; note = 2'-O-methyluridine-3'-phosphate
  modified_base 6: mod_base = OTHER; note = 2'-deoxy-2'-fluorocytidine-3'-phosphate
  modified_base 7: mod_base = OTHER; note = 2'-O-methyladenosine-3'-phosphate
  modified_base 8: mod_base = OTHER; note = 2'-deoxy-2'-fluoroadenosine-3'-phosphate
  modified_base 9: mod_base = OTHER; note = 2'-deoxy-2'-fluoroadenosine-3'-phosphate
  modified_base 10: mod_base = OTHER; note = 2'-O-methylcytidine-3'-phosphate
  modified_base 11: mod_base = OTHER; note = 2'-O-methyluridine-3'-phosphate
  modified_base 12: mod_base = OTHER; note = 2'-O-methylcytidine-3'-phosphate
  modified_base 13: mod_base = OTHER; note = 2'-O-methyluridine-3'-phosphate
  modified_base 14: mod_base = OTHER; note = 2'-deoxy-2'-fluoroadenosine-3'-phosphate
  modified_base 15: mod_base = OTHER; note = 2'-O-methylcytidine-3'-phosphate
  modified_base 16: mod_base = OTHER; note = 2'-deoxy-2'-fluorocytidine-3'-phosphate
  modified_base 17: mod_base = OTHER; note = 2'-O-methyluridine-3'-phosphate
  modified_base 18: mod_base = OTHER; note = 2'-O-methylcytidine-3'-phosphate
  modified_base 19: mod_base = OTHER; note = 2'-O-methylguanosine-3'-phosphate
  modified_base 20: mod_base = OTHER; note = 2'-O-methyladenosine-3'-phosphate
  modified_base 21: mod_base = OTHER; note = 2'-O-methyladenosine-3'-phosphorothioate
  modified_base 22: mod_base = OTHER; note = 2'-O-methyladenosine-3'-phosphorothioate
  modified_base 23: mod_base = OTHER; note = 2'-O-methylcytidine
tccttcaaactctacctcgaaac

SEQ ID NO: 2958 - RNA, 23 nt, synthetic construct
  source 1..23: mol_type = other RNA
  modified_base 1: mod_base = OTHER; note = 2'-O-methyluridine-3'-phosphorothioate 5'-(E)-Vinylphosphonate
  modified_base 2: mod_base = OTHER; note = 2'-deoxy-2'-fluorocytidine-3'-phosphorothioate
  modified_base 3: mod_base = OTHER; note = 2'-O-methyladenosine-3'-phosphate
  modified_base 4: mod_base = OTHER; note = 2'-O-methylguanosine-3'-phosphate
  modified_base 5: mod_base = OTHER; note = 2'-O-methylguanosine-3'-phosphate
  modified_base 6: mod_base = OTHER; note = 2'-deoxy-2'-fluorocytidine-3'-phosphate
  modified_base 7: mod_base = OTHER; note = 2'-O-methyladenosine-3'-phosphate
  modified_base 8: mod_base = OTHER; note = 2'-deoxy-2'-fluoroadenosine-3'-phosphate
  modified_base 9: mod_base = OTHER; note = 2'-deoxy-2'-fluorouridine-3'-phosphate
  modified_base 10: mod_base = OTHER; note = 2'-O-methyluridine-3'-phosphate
  modified_base 11: mod_base = OTHER; note = 2'-O-methylcytidine-3'-phosphate
  modified_base 12: mod_base = OTHER; note = 2'-O-methyladenosine-3'-phosphate
  modified_base 13: mod_base = OTHER; note = 2'-O-methylcytidine-3'-phosphate
  modified_base 14: mod_base = OTHER; note = 2'-deoxy-2'-fluoroadenosine-3'-phosphate
  modified_base 15: mod_base = OTHER; note = 2'-O-methyluridine-3'-phosphate
  modified_base 16: mod_base = OTHER; note = 2'-deoxy-2'-fluorocytidine-3'-phosphate
  modified_base 17: mod_base = OTHER; note = 2'-O-methylcytidine-3'-phosphate
  modified_base 18: mod_base = OTHER; note = 2'-O-methylcytidine-3'-phosphate
  modified_base 19: mod_base = OTHER; note = 2'-O-methyluridine-3'-phosphate
  modified_base 20: mod_base = OTHER; note = 2'-O-methylcytidine-3'-phosphate
  modified_base 21: mod_base = OTHER; note = 2'-O-methyladenosine-3'-phosphorothioate
  modified_base 22: mod_base = OTHER; note = 2'-O-methylcytidine-3'-phosphorothioate
  modified_base 23: mod_base = OTHER; note = 2'-O-methylcytidine
tcaggcaattcacatccctcacc

SEQ ID NO: 2959 - RNA, 23 nt, synthetic construct
  source 1..23: mol_type = other RNA
  modified_base 1: mod_base = OTHER; note = 2'-O-methyluridine-3'-phosphorothioate 5'-(E)-Vinylphosphonate
  modified_base 2: mod_base = OTHER; note = 2'-deoxy-2'-fluoroadenosine-3'-phosphorothioate
  modified_base 3: mod_base = OTHER; note = 2'-O-methylcytidine-3'-phosphate
  modified_base 4: mod_base = OTHER; note = 2'-O-methyladenosine-3'-phosphate
  modified_base 5: mod_base = OTHER; note = 2'-O-methylguanosine-3'-phosphate
  modified_base 6: mod_base = OTHER; note = 2'-deoxy-2'-fluoroguanosine-3'-phosphate
  modified_base 7: mod_base = OTHER; note = 2'-O-methylcytidine-3'-phosphate
  modified_base 8: mod_base = OTHER; note = 2'-deoxy-2'-fluorouridine-3'-phosphate
  modified_base 9: mod_base = OTHER; note = 2'-deoxy-2'-fluorouridine-3'-phosphate
  modified_base 10: mod_base = OTHER; note = 2'-O-methylcytidine-3'-phosphate
  modified_base 11: mod_base = OTHER; note = 2'-O-methyluridine-3'-phosphate
  modified_base 12: mod_base = OTHER; note = 2'-O-methylcytidine-3'-phosphate
  modified_base 13: mod_base = OTHER; note = 2'-O-methyluridine-3'-phosphate
  modified_base 14: mod_base = OTHER; note = 2'-deoxy-2'-fluorocytidine-3'-phosphate
  modified_base 15: mod_base = OTHER; note = 2'-O-methyluridine-3'-phosphate
  modified_base 16: mod_base = OTHER; note = 2'-deoxy-2'-fluoroguanosine-3'-phosphate
  modified_base 17: mod_base = OTHER; note = 2'-O-methylcytidine-3'-phosphate
  modified_base 18: mod_base = OTHER; note = 2'-O-methyladenosine-3'-phosphate
  modified_base 19: mod_base = OTHER; note = 2'-O-methylguanosine-3'-phosphate
  modified_base 20: mod_base = OTHER; note = 2'-O-methylguanosine-3'-phosphate
  modified_base 21: mod_base = OTHER; note = 2'-O-methylcytidine-3'-phosphorothioate
  modified_base 22: mod_base = OTHER; note = 2'-O-methyladenosine-3'-phosphorothioate
  modified_base 23: mod_base = OTHER; note = 2'-O-methyladenosine
tacaggcttctctctgcaggcaa

SEQ ID NO: 2960 - RNA, 23 nt, synthetic construct
  source 1..23: mol_type = other RNA
  modified_base 1: mod_base = OTHER; note = 2'-O-methyluridine-3'-phosphorothioate 5'-(E)-Vinylphosphonate
  modified_base 2: mod_base = OTHER; note = 2'-deoxy-2'-fluoroadenosine-3'-phosphorothioate
  modified_base 3: mod_base = OTHER; note = 2'-O-methyladenosine-3'-phosphate
  modified_base 4: mod_base = OTHER; note = 2'-O-methyladenosine-3'-phosphate
  modified_base 5: mod_base = OTHER; note = 2'-O-methylcytidine-3'-phosphate
  modified_base 6: mod_base = OTHER; note = 2'-deoxy-2'-fluorocytidine-3'-phosphate
  modified_base 7: mod_base = OTHER; note = 2'-O-methyluridine-3'-phosphate
  modified_base 8: mod_base = OTHER; note = 2'-deoxy-2'-fluorouridine-3'-phosphate
  modified_base 9: mod_base = OTHER; note = 2'-deoxy-2'-fluorocytidine-3'-phosphate
  modified_base 10: mod_base = OTHER; note = 2'-O-methylcytidine-3'-phosphate
  modified_base 11: mod_base = OTHER; note = 2'-O-methyladenosine-3'-phosphate
  modified_base 12: mod_base = OTHER; note = 2'-O-methyladenosine-3'-phosphate
  modified_base 13: mod_base = OTHER; note = 2'-O-methylcytidine-3'-phosphate
  modified_base 14: mod_base = OTHER; note = 2'-deoxy-2'-fluoroadenosine-3'-phosphate
  modified_base 15: mod_base = OTHER; note = 2'-O-methyladenosine-3'-phosphate
  modified_base 16: mod_base = OTHER; note = 2'-deoxy-2'-fluoroadenosine-3'-phosphate
  modified_base 17: mod_base = OTHER; note = 2'-O-methyladenosine-3'-phosphate
  modified_base 18: mod_base = OTHER; note = 2'-O-methylcytidine-3'-phosphate
  modified_base 19: mod_base = OTHER; note = 2'-O-methyladenosine-3'-phosphate
  modified_base 20: mod_base = OTHER; note = 2'-O-methylguanosine-3'-phosphate
  modified_base 21: mod_base = OTHER; note = 2'-O-methylguanosine-3'-phosphorothioate
  modified_base 22: mod_base = OTHER; note = 2'-O-methylcytidine-3'-phosphorothioate
  modified_base 23: mod_base = OTHER; note = 2'-O-methyluridine
taaaccttccaacaaaacaggct

SEQ ID NO: 2961 - RNA, 23 nt, synthetic construct
  source 1..23: mol_type = other RNA
  modified_base 1: mod_base = OTHER; note = 2'-O-methyluridine-3'-phosphorothioate 5'-(E)-Vinylphosphonate
  modified_base 2: mod_base = OTHER; note = 2'-deoxy-2'-fluoroadenosine-3'-phosphorothioate
  modified_base 3: mod_base = OTHER; note = 2'-O-methylcytidine-3'-phosphate
  modified_base 4: mod_base = OTHER; note = 2'-O-methyluridine-3'-phosphate
  modified_base 5: mod_base = OTHER; note = 2'-O-methyluridine-3'-phosphate
  modified_base 6: mod_base = OTHER; note = 2'-deoxy-2'-fluorouridine-3'-phosphate
  modified_base 7: mod_base = OTHER; note = 2'-O-methyluridine-3'-phosphate
  modified_base 8: mod_base = OTHER; note = 2'-deoxy-2'-fluoroadenosine-3'-phosphate
  modified_base 9: mod_base = OTHER; note = 2'-deoxy-2'-fluorocytidine-3'-phosphate
  modified_base 10: mod_base = OTHER; note = 2'-O-methylcytidine-3'-phosphate
  modified_base 11: mod_base = OTHER; note = 2'-O-methyluridine-3'-phosphate
  modified_base 12: mod_base = OTHER; note = 2'-O-methylcytidine-3'-phosphate
  modified_base 13: mod_base = OTHER; note = 2'-O-methyluridine-3'-phosphate
  modified_base 14: mod_base = OTHER; note = 2'-deoxy-2'-fluoroguanosine-3'-phosphate
  modified_base 15: mod_base = OTHER; note = 2'-O-methylcytidine-3'-phosphate
  modified_base 16: mod_base = OTHER; note = 2'-deoxy-2'-fluoroadenosine-3'-phosphate
  modified_base 17: mod_base = OTHER; note = 2'-O-methyluridine-3'-phosphate
  modified_base 18: mod_base = OTHER; note = 2'-O-methylcytidine-3'-phosphate
  modified_base 19: mod_base = OTHER; note = 2'-O-methyluridine-3'-phosphate
  modified_base 20: mod_base = OTHER; note = 2'-O-methylcytidine-3'-phosphate
  modified_base 21: mod_base = OTHER; note = 2'-O-methylcytidine-3'-phosphorothioate
  modified_base 22: mod_base = OTHER; note = 2'-O-methyladenosine-3'-phosphorothioate
  modified_base 23: mod_base = OTHER; note = 2'-O-methylcytidine
tacttttacctctgcatctccac

SEQ ID NO: 2962 - RNA, 23 nt, synthetic construct
  source 1..23: mol_type = other RNA
  modified_base 1: mod_base = OTHER; note = 2'-O-methyluridine-3'-phosphorothioate 5'-(E)-Vinylphosphonate
  modified_base 2: mod_base = OTHER; note = 2'-deoxy-2'-fluorouridine-3'-phosphorothioate
  modified_base 3: mod_base = OTHER; note = 2'-O-methylguanosine-3'-phosphate
  modified_base 4: mod_base = OTHER; note = 2'-O-methyluridine-3'-phosphate
  modified_base 5: mod_base = OTHER; note = 2'-O-methyladenosine-3'-phosphate
  modified_base 6: mod_base = OTHER; note = 2'-deoxy-2'-fluoroadenosine-3'-phosphate
  modified_base 7: mod_base = OTHER; note = 2'-O-methylcytidine-3'-phosphate
  modified_base 8: mod_base = OTHER; note = 2'-deoxy-2'-fluorouridine-3'-phosphate
  modified_base 9: mod_base = OTHER; note = 2'-deoxy-2'-fluorocytidine-3'-phosphate
  modified_base 10: mod_base = OTHER; note = 2'-O-methyladenosine-3'-phosphate
  modified_base 11: mod_base = OTHER; note = 2'-O-methylcytidine-3'-phosphate
  modified_base 12: mod_base = OTHER; note = 2'-O-methyluridine-3'-phosphate
  modified_base 13: mod_base = OTHER; note = 2'-O-methylguanosine-3'-phosphate
  modified_base 14: mod_base = OTHER; note = 2'-deoxy-2'-fluorocytidine-3'-phosphate
  modified_base 15: mod_base = OTHER; note = 2'-O-methyluridine-3'-phosphate
  modified_base 16: mod_base = OTHER; note = 2'-deoxy-2'-fluorocytidine-3'-phosphate
  modified_base 17: mod_base = OTHER; note = 2'-O-methyladenosine-3'-phosphate
  modified_base 18: mod_base = OTHER; note = 2'-O-methylcytidine-3'-phosphate
  modified_base 19: mod_base = OTHER; note = 2'-O-methyladenosine-3'-phosphate
  modified_base 20: mod_base = OTHER; note = 2'-O-methylcytidine-3'-phosphate
  modified_base 21: mod_base = OTHER; note = 2'-O-methyluridine-3'-phosphorothioate
  modified_base 22: mod_base = OTHER; note = 2'-O-methyluridine-3'-phosphorothioate
  modified_base 23: mod_base = OTHER; note = 2'-O-methyluridine
ttgtaactcactgctcacacttt

SEQ ID NO: 2963 - RNA, 23 nt, synthetic construct
  source 1..23: mol_type = other RNA
  modified_base 1: mod_base = OTHER; note = 2'-O-methyluridine-3'-phosphorothioate 5'-(E)-Vinylphosphonate
  modified_base 2: mod_base = OTHER; note = 2'-deoxy-2'-fluorouridine-3'-phosphorothioate
  modified_base 3: mod_base = OTHER; note = 2'-O-methyluridine-3'-phosphate
  modified_base 4: mod_base = OTHER; note = 2'-O-methylcytidine-3'-phosphate
  modified_base 5: mod_base = OTHER; note = 2'-O-methyluridine-3'-phosphate
  modified_base 6: mod_base = OTHER; note = 2'-deoxy-2'-fluorouridine-3'-phosphate
  modified_base 7: mod_base = OTHER; note = 2'-O-methyluridine-3'-phosphate
  modified_base 8: mod_base = OTHER; note = 2'-deoxy-2'-fluorocytidine-3'-phosphate
  modified_base 9: mod_base = OTHER; note = 2'-deoxy-2'-fluorouridine-3'-phosphate
  modified_base 10: mod_base = OTHER; note = 2'-O-methylcytidine-3'-phosphate
  modified_base 11: mod_base = OTHER; note = 2'-O-methyluridine-3'-phosphate
  modified_base 12: mod_base = OTHER; note = 2'-O-methylguanosine-3'-phosphate
  modified_base 13: mod_base = OTHER; note = 2'-O-methylcytidine-3'-phosphate
  modified_base 14: mod_base = OTHER; note = 2'-deoxy-2'-fluorocytidine-3'-phosphate
  modified_base 15: mod_base = OTHER; note = 2'-O-methyluridine-3'-phosphate
  modified_base 16: mod_base = OTHER; note = 2'-deoxy-2'-fluorocytidine-3'-phosphate
  modified_base 17: mod_base = OTHER; note = 2'-O-methyluridine-3'-phosphate
  modified_base 18: mod_base = OTHER; note = 2'-O-methylcytidine-3'-phosphate
  modified_base 19: mod_base = OTHER; note = 2'-O-methylguanosine-3'-phosphate
  modified_base 20: mod_base = OTHER; note = 2'-O-methylcytidine-3'-phosphate
  modified_base 21: mod_base = OTHER; note = 2'-O-methyluridine-3'-phosphorothioate
  modified_base 22: mod_base = OTHER; note = 2'-O-methylguanosine-3'-phosphorothioate
  modified_base 23: mod_base = OTHER; note = 2'-O-methyluridine
tttctttctctgcctctcgctgt

SEQ ID NO: 2964 - RNA, 23 nt, synthetic construct
  source 1..23: mol_type = other RNA
  modified_base 1: mod_base = OTHER; note = 2'-O-methyluridine-3'-phosphorothioate 5'-(E)-Vinylphosphonate
  modified_base 2: mod_base = OTHER; note = 2'-deoxy-2'-fluorouridine-3'-phosphorothioate
  modified_base 3: mod_base = OTHER; note = 2'-O-methyluridine-3'-phosphate
  modified_base 4: mod_base = OTHER; note = 2'-O-methylcytidine-3'-phosphate
  modified_base 5: mod_base = OTHER; note = 2'-O-methyladenosine-3'-phosphate
  modified_base 6: mod_base = OTHER; note = 2'-deoxy-2'-fluoroadenosine-3'-phosphate
  modified_base 7: mod_base = OTHER; note = 2'-O-methylguanosine-3'-phosphate
  modified_base 8: mod_base = OTHER; note = 2'-deoxy-2'-fluoroguanosine-3'-phosphate
  modified_base 9: mod_base = OTHER; note = 2'-deoxy-2'-fluorouridine-3'-phosphate
  modified_base 10: mod_base = OTHER; note = 2'-O-methylcytidine-3'-phosphate
  modified_base 11: mod_base = OTHER; note = 2'-O-methylcytidine-3'-phosphate
  modified_base 12: mod_base = OTHER; note = 2'-O-methylcytidine-3'-phosphate
  modified_base 13: mod_base = OTHER; note = 2'-O-methyluridine-3'-phosphate
  modified_base 14: mod_base = OTHER; note = 2'-deoxy-2'-fluorouridine-3'-phosphate
  modified_base 15: mod_base = OTHER; note = 2'-O-methylcytidine-3'-phosphate
  modified_base 16: mod_base = OTHER; note = 2'-deoxy-2'-fluoroadenosine-3'-phosphate
  modified_base 17: mod_base = OTHER; note = 2'-O-methylguanosine-3'-phosphate
  modified_base 18: mod_base = OTHER; note = 2'-O-methylcytidine-3'-phosphate
  modified_base 19: mod_base = OTHER; note = 2'-O-methyladenosine-3'-phosphate
  modified_base 20: mod_base = OTHER; note = 2'-O-methyluridine-3'-phosphate
  modified_base 21: mod_base = OTHER; note = 2'-O-methylguanosine-3'-phosphorothioate
  modified_base 22: mod_base = OTHER; note = 2'-O-methylguanosine-3'-phosphorothioate
  modified_base 23: mod_base = OTHER; note = 2'-O-methylcytidine
tttcaaggtcccttcagcatggc

SEQ ID NO: 2965 - RNA, 23 nt, synthetic construct
  source 1..23: mol_type = other RNA
  modified_base 1: mod_base = OTHER; note = 2'-O-methyluridine-3'-phosphorothioate 5'-(E)-Vinylphosphonate
  modified_base 2: mod_base = OTHER; note = 2'-deoxy-2'-fluorouridine-3'-phosphorothioate
  modified_base 3: mod_base = OTHER; note = 2'-O-methyladenosine-3'-phosphate
  modified_base 4: mod_base = OTHER; note = 2'-O-methyluridine-3'-phosphate
  modified_base 5: mod_base = OTHER; note = 2'-O-methylcytidine-3'-phosphate
  modified_base 6: mod_base = OTHER; note = 2'-deoxy-2'-fluoroadenosine-3'-phosphate
  modified_base 7: mod_base = OTHER; note = 2'-O-methyladenosine-3'-phosphate
  modified_base 8: mod_base = OTHER; note = 2'-deoxy-2'-fluoroadenosine-3'-phosphate
  modified_base 9: mod_base = OTHER; note = 2'-deoxy-2'-fluorocytidine-3'-phosphate
  modified_base 10: mod_base = OTHER; note = 2'-O-methyluridine-3'-phosphate
  modified_base 11: mod_base = OTHER; note = 2'-O-methyluridine-3'-phosphate
  modified_base 12: mod_base = OTHER; note = 2'-O-methylcytidine-3'-phosphate
  modified_base 13: mod_base = OTHER; note = 2'-O-methyluridine-3'-phosphate
  modified_base 14: mod_base = OTHER; note = 2'-deoxy-2'-fluorouridine-3'-phosphate
  modified_base 15: mod_base = OTHER; note = 2'-O-methyluridine-3'-phosphate
  modified_base 16: mod_base = OTHER; note = 2'-deoxy-2'-fluoroadenosine-3'-phosphate
  modified_base 17: mod_base = OTHER; note = 2'-O-methylcytidine-3'-phosphate
  modified_base 18: mod_base = OTHER; note = 2'-O-methylcytidine-3'-phosphate
  modified_base 19: mod_base = OTHER; note = 2'-O-methylcytidine-3'-phosphate
  modified_base 20: mod_base = OTHER; note = 2'-O-methyluridine-3'-phosphate
  modified_base 21: mod_base = OTHER; note = 2'-O-methyluridine-3'-phosphorothioate
  modified_base 22: mod_base = OTHER; note = 2'-O-methylcytidine-3'-phosphorothioate
  modified_base 23: mod_base = OTHER; note = 2'-O-methyladenosine
ttatcaaacttctttacccttca

SEQ ID NO: 2966 - RNA, 23 nt, synthetic construct
  source 1..23: mol_type = other RNA
  modified_base 1: mod_base = OTHER; note = 2'-O-methyluridine-3'-phosphorothioate 5'-(E)-Vinylphosphonate
  modified_base 2: mod_base = OTHER; note = 2'-deoxy-2'-fluorouridine-3'-phosphorothioate
  modified_base 3: mod_base = OTHER; note = 2'-O-methyladenosine-3'-phosphate
  modified_base 4: mod_base = OTHER; note = 2'-O-methylcytidine-3'-phosphate
  modified_base 5: mod_base = OTHER; note = 2'-O-methyluridine-3'-phosphate
  modified_base 6: mod_base = OTHER; note = 2'-deoxy-2'-fluorocytidine-3'-phosphate
  modified_base 7: mod_base = OTHER; note = 2'-O-methyluridine-3'-phosphate
  modified_base 8: mod_base = OTHER; note = 2'-deoxy-2'-fluorouridine-3'-phosphate
  modified_base 9: mod_base = OTHER; note = 2'-deoxy-2'-fluoroadenosine-3'-phosphate
  modified_base 10: mod_base = OTHER; note = 2'-O-methyladenosine-3'-phosphate
  modified_base 11: mod_base = OTHER; note = 2'-O-methylcytidine-3'-phosphate
  modified_base 12: mod_base = OTHER; note = 2'-O-methyluridine-3'-phosphate
  modified_base 13: mod_base = OTHER; note = 2'-O-methylcytidine-3'-phosphate
  modified_base 14: mod_base = OTHER; note = 2'-deoxy-2'-fluorocytidine-3'-phosphate
  modified_base 15: mod_base = OTHER; note = 2'-O-methyluridine-3'-phosphate
  modified_base 16: mod_base = OTHER; note = 2'-deoxy-2'-fluorouridine-3'-phosphate
  modified_base 17: mod_base = OTHER; note = 2'-O-methyluridine-3'-phosphate
  modified_base 18: mod_base = OTHER; note = 2'-O-methyladenosine-3'-phosphate
  modified_base 19: mod_base = OTHER; note = 2'-O-methyladenosine-3'-phosphate
  modified_base 20: mod_base = OTHER; note = 2'-O-methyluridine-3'-phosphate
  modified_base 21: mod_base = OTHER; note = 2'-O-methyladenosine-3'-phosphorothioate
  modified_base 22: mod_base = OTHER; note = 2'-O-methyluridine-3'-phosphorothioate
  modified_base 23: mod_base = OTHER; note = 2'-O-methylcytidine
ttactcttaactcctttaatatc

SEQ ID NO: 2967 - RNA, 23 nt, synthetic construct
  source 1..23: mol_type = other RNA
  modified_base 1: mod_base = OTHER; note = 2'-O-methyluridine-3'-phosphorothioate 5'-(E)-Vinylphosphonate
  modified_base 2: mod_base = OTHER; note = 2'-deoxy-2'-fluorouridine-3'-phosphorothioate
  modified_base 3: mod_base = OTHER; note = 2'-O-methyluridine-3'-phosphate
  modified_base 4: mod_base = OTHER; note = 2'-O-methylcytidine-3'-phosphate
  modified_base 5: mod_base = OTHER; note = 2'-O-methyluridine-3'-phosphate
  modified_base 6: mod_base = OTHER; note = 2'-deoxy-2'-fluorocytidine-3'-phosphate
  modified_base 7: mod_base = OTHER; note = 2'-O-methyluridine-3'-phosphate
  modified_base 8: mod_base = OTHER; note = 2'-deoxy-2'-fluoroadenosine-3'-phosphate
  modified_base 9: mod_base = OTHER; note = 2'-deoxy-2'-fluoroguanosine-3'-phosphate
  modified_base 10: mod_base = OTHER; note = 2'-O-methyladenosine-3'-phosphate
  modified_base 11: mod_base = OTHER; note = 2'-O-methyladenosine-3'-phosphate
  modified_base 12: mod_base = OTHER; note = 2'-O-methylcytidine-3'-phosphate
  modified_base 13: mod_base = OTHER; note = 2'-O-methyluridine-3'-phosphate
  modified_base 14: mod_base = OTHER; note = 2'-deoxy-2'-fluorouridine-3'-phosphate
  modified_base 15: mod_base = OTHER; note = 2'-O-methylguanosine-3'-phosphate
  modified_base 16: mod_base = OTHER; note = 2'-deoxy-2'-fluorocytidine-3'-phosphate
  modified_base 17: mod_base = OTHER; note = 2'-O-methyluridine-3'-phosphate
  modified_base 18: mod_base = OTHER; note = 2'-O-methyladenosine-3'-phosphate
  modified_base 19: mod_base = OTHER; note = 2'-O-methylcytidine-3'-phosphate
  modified_base 20: mod_base = OTHER; note = 2'-O-methyluridine-3'-phosphate
  modified_base 21: mod_base = OTHER; note = 2'-O-methylcytidine-3'-phosphorothioate
  modified_base 22: mod_base = OTHER; note = 2'-O-methyluridine-3'-phosphorothioate
  modified_base 23: mod_base = OTHER; note = 2'-O-methyluridine
tttctctagaacttgctactctt

SEQ ID NO: 2968 - RNA, 23 nt, synthetic construct
  source 1..23: mol_type = other RNA
  modified_base 1: mod_base = OTHER; note = 2'-O-methyluridine-3'-phosphorothioate 5'-(E)-Vinylphosphonate
  modified_base 2: mod_base = OTHER; note = 2'-deoxy-2'-fluoroadenosine-3'-phosphorothioate
  modified_base 3: mod_base = OTHER; note = 2'-O-methylcytidine-3'-phosphate
  modified_base 4: mod_base = OTHER; note = 2'-O-methyladenosine-3'-phosphate
  modified_base 5: mod_base = OTHER; note = 2'-O-methyluridine-3'-phosphate
  modified_base 6: mod_base = OTHER; note = 2'-deoxy-2'-fluorouridine-3'-phosphate
  modified_base 7: mod_base = OTHER; note = 2'-O-methyluridine-3'-phosphate
  modified_base 8: mod_base = OTHER; note = 2'-deoxy-2'-fluorouridine-3'-phosphate
  modified_base 9: mod_base = OTHER; note = 2'-deoxy-2'-fluorocytidine-3'-phosphate
  modified_base 10: mod_base = OTHER; note = 2'-O-methylcytidine-3'-phosphate
  modified_base 11: mod_base = OTHER; note = 2'-O-methyladenosine-3'-phosphate
  modified_base 12: mod_base = OTHER; note = 2'-O-methylguanosine-3'-phosphate
  modified_base 13: mod_base = OTHER; note = 2'-O-methyladenosine-3'-phosphate
  modified_base 14: mod_base = OTHER; note = 2'-deoxy-2'-fluoroguanosine-3'-phosphate
  modified_base 15: mod_base = OTHER; note = 2'-O-methylcytidine-3'-phosphate
  modified_base 16: mod_base = OTHER; note = 2'-deoxy-2'-fluoroadenosine-3'-phosphate
  modified_base 17: mod_base = OTHER; note = 2'-O-methylguanosine-3'-phosphate
  modified_base 18: mod_base = OTHER; note = 2'-O-methylcytidine-3'-phosphate
  modified_base 19: mod_base = OTHER; note = 2'-O-methyluridine-3'-phosphate
  modified_base 20: mod_base = OTHER; note = 2'-O-methylcytidine-3'-phosphate
  modified_base 21: mod_base = OTHER; note = 2'-O-methyluridine-3'-phosphorothioate
  modified_base 22: mod_base = OTHER; note = 2'-O-methylcytidine-3'-phosphorothioate
  modified_base 23: mod_base = OTHER; note = 2'-O-methyladenosine
tacattttccagagcagctctca

SEQ ID NO: 2969 - RNA, 23 nt, synthetic construct
  source 1..23: mol_type = other RNA
  modified_base 1: mod_base = OTHER; note = 2'-O-methyluridine-3'-phosphorothioate 5'-(E)-Vinylphosphonate
  modified_base 2: mod_base = OTHER; note = 2'-deoxy-2'-fluorouridine-3'-phosphorothioate
  modified_base 3: mod_base = OTHER; note = 2'-O-methylguanosine-3'-phosphate
  modified_base 4: mod_base = OTHER; note = 2'-O-methyladenosine-3'-phosphate
  modified_base 5: mod_base = OTHER; note = 2'-O-methyluridine-3'-phosphate
  modified_base 6: mod_base = OTHER; note = 2'-deoxy-2'-fluorouridine-3'-phosphate
  modified_base 7: mod_base = OTHER; note = 2'-O-methyladenosine-3'-phosphate
  modified_base 8: mod_base = OTHER; note = 2'-deoxy-2'-fluoroguanosine-3'-phosphate
  modified_base 9: mod_base = OTHER; note = 2'-deoxy-2'-fluoroguanosine-3'-phosphate
  modified_base 10: mod_base = OTHER; note = 2'-O-methyluridine-3'-phosphate
  modified_base 11: mod_base = OTHER; note = 2'-O-methylguanosine-3'-phosphate
  modified_base 12: mod_base = OTHER; note = 2'-O-methylguanosine-3'-phosphate
  modified_base 13: mod_base = OTHER; note = 2'-O-methyluridine-3'-phosphate
  modified_base 14: mod_base = OTHER; note = 2'-deoxy-2'-fluorouridine-3'-phosphate
  modified_base 15: mod_base = OTHER; note = 2'-O-methylguanosine-3'-phosphate
  modified_base 16: mod_base = OTHER; note = 2'-deoxy-2'-fluorouridine-3'-phosphate
  modified_base 17: mod_base = OTHER; note = 2'-O-methylguanosine-3'-phosphate
  modified_base 18: mod_base = OTHER; note = 2'-O-methyladenosine-3'-phosphate
  modified_base 19: mod_base = OTHER; note = 2'-O-methylguanosine-3'-phosphate
  modified_base 20: mod_base = OTHER; note = 2'-O-methylguanosine-3'-phosphate
  modified_base 21: mod_base = OTHER; note = 2'-O-methyladenosine-3'-phosphorothioate
  modified_base 22: mod_base = OTHER; note = 2'-O-methyluridine-3'-phosphorothioate
  modified_base 23: mod_base = OTHER; note = 2'-O-methylcytidine
ttgattaggtggttgtgaggatc

SEQ ID NO: 2970 - RNA, 23 nt, synthetic construct
  source 1..23: mol_type = other RNA
  modified_base 1: mod_base = OTHER; note = 2'-O-methyluridine-3'-phosphorothioate 5'-(E)-Vinylphosphonate
  modified_base 2: mod_base = OTHER; note = 2'-deoxy-2'-fluorouridine-3'-phosphorothioate
  modified_base 3: mod_base = OTHER; note = 2'-O-methyluridine-3'-phosphate
  modified_base 4: mod_base = OTHER; note = 2'-O-methyladenosine-3'-phosphate
  modified_base 5: mod_base = OTHER; note = 2'-O-methyladenosine-3'-phosphate
  modified_base 6: mod_base = OTHER; note = 2'-deoxy-2'-fluoroguanosine-3'-phosphate
  modified_base 7: mod_base = OTHER; note = 2'-O-methyladenosine-3'-phosphate
  modified_base 8: mod_base = OTHER; note = 2'-deoxy-2'-fluorocytidine-3'-phosphate
  modified_base 9: mod_base = OTHER; note = 2'-deoxy-2'-fluoroadenosine-3'-phosphate
  modified_base 10: mod_base = OTHER; note = 2'-O-methylcytidine-3'-phosphate
  modified_base 11: mod_base = OTHER; note = 2'-O-methylcytidine-3'-phosphate
  modified_base 12: mod_base = OTHER; note = 2'-O-methyluridine-3'-phosphate
  modified_base 13: mod_base = OTHER; note = 2'-O-methylcytidine-3'-phosphate
  modified_base 14: mod_base = OTHER; note = 2'-deoxy-2'-fluoroadenosine-3'-phosphate
  modified_base 15: mod_base = OTHER; note = 2'-O-methylguanosine-3'-phosphate
  modified_base 16: mod_base = OTHER; note = 2'-deoxy-2'-fluorocytidine-3'-phosphate
  modified_base 17: mod_base = OTHER; note = 2'-O-methylcytidine-3'-phosphate
  modified_base 18: mod_base = OTHER; note = 2'-O-methyluridine-3'-phosphate
  modified_base 19: mod_base = OTHER; note = 2'-O-methylguanosine-3'-phosphate
  modified_base 20: mod_base = OTHER; note = 2'-O-methyladenosine-3'-phosphate
  modified_base 21: mod_base = OTHER; note = 2'-O-methyluridine-3'-phosphorothioate
  modified_base 22: mod_base = OTHER; note = 2'-O-methyluridine-3'-phosphorothioate
  modified_base 23: mod_base = OTHER; note = 2'-O-methyladenosine
tttaagacacctcagcctgatta

SEQ ID NO: 2971 - RNA, 23 nt, synthetic construct
  source 1..23: mol_type = other RNA
  modified_base 1: mod_base = OTHER; note = 2'-O-methyluridine-3'-phosphorothioate 5'-(E)-Vinylphosphonate
  modified_base 2: mod_base = OTHER; note = 2'-deoxy-2'-fluoroguanosine-3'-phosphorothioate
  modified_base 3: mod_base = OTHER; note = 2'-O-methyluridine-3'-phosphate
  modified_base 4: mod_base = OTHER; note = 2'-O-methyluridine-3'-phosphate
  modified_base 5: mod_base = OTHER; note = 2'-O-methyluridine-3'-phosphate
  modified_base 6: mod_base = OTHER; note = 2'-deoxy-2'-fluorouridine-3'-phosphate
  modified_base 7: mod_base = OTHER; note = 2'-O-methylguanosine-3'-phosphate
  modified_base 8: mod_base = OTHER; note = 2'-deoxy-2'-fluorouridine-3'-phosphate
  modified_base 9: mod_base = OTHER; note = 2'-deoxy-2'-fluoroguanosine-3'-phosphate
  modified_base 10: mod_base = OTHER; note = 2'-O-methyladenosine-3'-phosphate
  modified_base 11: mod_base = OTHER; note = 2'-O-methylguanosine-3'-phosphate
  modified_base 12: mod_base = OTHER; note = 2'-O-methylcytidine-3'-phosphate
  modified_base 13: mod_base = OTHER; note = 2'-O-methyladenosine-3'-phosphate
  modified_base 14: mod_base = OTHER; note = 2'-deoxy-2'-fluoroadenosine-3'-phosphate
  modified_base 15: mod_base = OTHER; note = 2'-O-methyladenosine-3'-phosphate
  modified_base 16: mod_base = OTHER; note = 2'-deoxy-2'-fluoroadenosine-3'-phosphate
  modified_base 17: mod_base = OTHER; note = 2'-O-methylguanosine-3'-phosphate
  modified_base 18: mod_base = OTHER; note = 2'-O-methylguanosine-3'-phosphate
  modified_base 19: mod_base = OTHER; note = 2'-O-methylcytidine-3'-phosphate
  modified_base 20: mod_base = OTHER; note = 2'-O-methyluridine-3'-phosphate
  modified_base 21: mod_base = OTHER; note = 2'-O-methyluridine-3'-phosphorothioate
  modified_base 22: mod_base = OTHER; note = 2'-O-methyladenosine-3'-phosphorothioate
  modified_base 23: mod_base = OTHER; note = 2'-O-methyladenosine
tgttttgtgagcaaaaggcttaa

SEQ ID NO: 2972 - RNA, 23 nt, synthetic construct
  source 1..23: mol_type = other RNA
  modified_base 1: mod_base = OTHER; note = 2'-O-methyluridine-3'-phosphorothioate 5'-(E)-Vinylphosphonate
  modified_base 2: mod_base = OTHER; note = 2'-deoxy-2'-fluoroadenosine-3'-phosphorothioate
  modified_base 3: mod_base = OTHER; note = 2'-O-methyladenosine-3'-phosphate
  modified_base 4: mod_base = OTHER; note = 2'-O-methyluridine-3'-phosphate
  modified_base 5: mod_base = OTHER; note = 2'-O-methyluridine-3'-phosphate
  modified_base 6: mod_base = OTHER; note = 2'-deoxy-2'-fluoroadenosine-3'-phosphate
  modified_base 7: mod_base = OTHER; note = 2'-O-methylguanosine-3'-phosphate
  modified_base 8: mod_base = OTHER; note = 2'-deoxy-2'-fluorocytidine-3'-phosphate
  modified_base 9: mod_base = OTHER; note = 2'-deoxy-2'-fluorocytidine-3'-phosphate
  modified_base 10: mod_base = OTHER; note = 2'-O-methyladenosine-3'-phosphate
  modified_base 11: mod_base = OTHER; note = 2'-O-methyluridine-3'-phosphate
  modified_base 12: mod_base = OTHER; note = 2'-O-methyluridine-3'-phosphate
  modified_base 13: mod_base = OTHER; note = 2'-O-methylguanosine-3'-phosphate
  modified_base 14: mod_base = OTHER; note = 2'-deoxy-2'-fluorouridine-3'-phosphate
  modified_base 15: mod_base = OTHER; note = 2'-O-methylguanosine-3'-phosphate
  modified_base 16: mod_base = OTHER; note = 2'-deoxy-2'-fluorocytidine-3'-phosphate
  modified_base 17: mod_base = OTHER; note = 2'-O-methylcytidine-3'-phosphate
  modified_base 18: mod_base = OTHER; note = 2'-O-methyladenosine-3'-phosphate
  modified_base 19: mod_base = OTHER; note = 2'-O-methylguanosine-3'-phosphate
  modified_base 20: mod_base = OTHER; note = 2'-O-methylguanosine-3'-phosphate
  modified_base 21: mod_base = OTHER; note = 2'-O-methyluridine-3'-phosphorothioate
  modified_base 22: mod_base = OTHER; note = 2'-O-methyluridine-3'-phosphorothioate
  modified_base 23: mod_base = OTHER; note = 2'-O-methyluridine
taattagccattgtgccaggttt

SEQ ID NO: 2973 - RNA, 23 nt, synthetic construct
  source 1..23: mol_type = other RNA
  modified_base 1: mod_base = OTHER; note = 2'-O-methyluridine-3'-phosphorothioate 5'-(E)-Vinylphosphonate
  modified_base 2: mod_base = OTHER; note = 2'-deoxy-2'-fluorouridine-3'-phosphorothioate
  modified_base 3: mod_base = OTHER; note = 2'-O-methyluridine-3'-phosphate
  modified_base 4: mod_base = OTHER; note = 2'-O-methyladenosine-3'-phosphate
  modified_base 5: mod_base = OTHER; note = 2'-O-methyluridine-3'-phosphate
  modified_base 6: mod_base = OTHER; note = 2'-deoxy-2'-fluoroadenosine-3'-phosphate
  modified_base 7: mod_base = OTHER; note = 2'-O-methylcytidine-3'-phosphate
  modified_base 8: mod_base = OTHER; note = 2'-deoxy-2'-fluorouridine-3'-phosphate
  modified_base 9: mod_base = OTHER; note = 2'-deoxy-2'-fluorouridine-3'-phosphate
  modified_base 10: mod_base = OTHER; note = 2'-O-methyladenosine-3'-phosphate
  modified_base 11: mod_base = OTHER; note = 2'-O-methylguanosine-3'-phosphate
  modified_base 12: mod_base = OTHER; note = 2'-O-methylguanosine-3'-phosphate
  modified_base 13: mod_base = OTHER; note = 2'-O-methyladenosine-3'-phosphate
  modified_base 14: mod_base = OTHER; note = 2'-deoxy-2'-fluoroadenosine-3'-phosphate
  modified_base 15: mod_base = OTHER; note = 2'-O-methylguanosine-3'-phosphate
  modified_base 16: mod_base = OTHER; note = 2'-deoxy-2'-fluorouridine-3'-phosphate
  modified_base 17: mod_base = OTHER; note = 2'-O-methyluridine-3'-phosphate
  modified_base 18: mod_base = OTHER; note = 2'-O-methyluridine-3'-phosphate
  modified_base 19: mod_base = OTHER; note = 2'-O-methylcytidine-3'-phosphate
  modified_base 20: mod_base = OTHER; note = 2'-O-methyladenosine-3'-phosphate
  modified_base 21: mod_base = OTHER; note = 2'-O-methylcytidine-3'-phosphorothioate
  modified_base 22: mod_base = OTHER; note = 2'-O-methyladenosine-3'-phosphorothioate
  modified_base 23: mod_base = OTHER; note = 2'-O-methylcytidine
tttatacttaggaagtttcacac

SEQ ID NO: 2974 - RNA, 23 nt, synthetic construct
  source 1..23: mol_type = other RNA
  modified_base 1: mod_base = OTHER; note = 2'-O-methyluridine-3'-phosphorothioate 5'-(E)-Vinylphosphonate
  modified_base 2: mod_base = OTHER; note = 2'-deoxy-2'-fluorouridine-3'-phosphorothioate
  modified_base 3: mod_base = OTHER; note = 2'-O-methyladenosine-3'-phosphate
  modified_base 4: mod_base = OTHER; note = 2'-O-methyladenosine-3'-phosphate
  modified_base 5: mod_base = OTHER; note = 2'-O-methylguanosine-3'-phosphate
  modified_base 6: mod_base = OTHER; note = 2'-deoxy-2'-fluorouridine-3'-phosphate
  modified_base 7: mod_base = OTHER; note = 2'-O-methyluridine-3'-phosphate
  modified_base 8: mod_base = OTHER; note = 2'-deoxy-2'-fluoroadenosine-3'-phosphate
  modified_base 9: mod_base = OTHER; note = 2'-deoxy-2'-fluorocytidine-3'-phosphate
  modified_base 10: mod_base = OTHER; note = 2'-O-methyladenosine-3'-phosphate
  modified_base 11: mod_base = OTHER; note = 2'-O-methyladenosine-3'-phosphate
  modified_base 12: mod_base = OTHER; note = 2'-O-methyladenosine-3'-phosphate
  modified_base 13: mod_base = OTHER; note = 2'-O-methyladenosine-3'-phosphate
  modified_base 14: mod_base = OTHER; note = 2'-deoxy-2'-fluoroadenosine-3'-phosphate
  modified_base 15: mod_base = OTHER; note = 2'-O-methylcytidine-3'-phosphate
  modified_base 16: mod_base = OTHER; note = 2'-deoxy-2'-fluoroadenosine-3'-phosphate
  modified_base 17: mod_base = OTHER; note = 2'-O-methylguanosine-3'-phosphate
  modified_base 18: mod_base = OTHER; note = 2'-O-methyladenosine-3'-phosphate
  modified_base 19: mod_base = OTHER; note = 2'-O-methylcytidine-3'-phosphate
  modified_base 20: mod_base = OTHER; note = 2'-O-methyladenosine-3'-phosphate
  modified_base 21: mod_base = OTHER; note = 2'-O-methyladenosine-3'-phosphorothioate
  modified_base 22: mod_base = OTHER; note = 2'-O-methylcytidine-3'-phosphorothioate
  modified_base 23: mod_base = OTHER; note = 2'-O-methylcytidine
ttaagttacaaaaacagacaacc

SEQ ID NO: 2975 - RNA, 23 nt, synthetic construct
  source 1..23: mol_type = other RNA
  modified_base 1: mod_base = OTHER; note = 2'-O-methyluridine-3'-phosphorothioate 5'-(E)-Vinylphosphonate
  modified_base 2: mod_base = OTHER; note = 2'-deoxy-2'-fluoroguanosine-3'-phosphorothioate
  modified_base 3: mod_base = OTHER; note = 2'-O-methyluridine-3'-phosphate
  modified_base 4: mod_base = OTHER; note = 2'-O-methyluridine-3'-phosphate
  modified_base 5: mod_base = OTHER; note = 2'-O-methyluridine-3'-phosphate
  modified_base 6: mod_base = OTHER; note = 2'-deoxy-2'-fluorocytidine-3'-phosphate
  modified_base 7: mod_base = OTHER; note = 2'-O-methyladenosine-3'-phosphate
  modified_base 8: mod_base = OTHER; note = 2'-deoxy-2'-fluorocytidine-3'-phosphate
  modified_base 9: mod_base = OTHER; note = 2'-deoxy-2'-fluorocytidine-3'-phosphate
  modified_base 10: mod_base = OTHER; note = 2'-O-methyladenosine-3'-phosphate
  modified_base 11: mod_base = OTHER; note = 2'-O-methyluridine-3'-phosphate
  modified_base 12: mod_base = OTHER; note = 2'-O-methylguanosine-3'-phosphate
  modified_base 13: mod_base = OTHER; note = 2'-O-methyluridine-3'-phosphate
  modified_base 14: mod_base = OTHER; note = 2'-deoxy-2'-fluorouridine-3'-phosphate
  modified_base 15: mod_base = OTHER; note = 2'-O-methylguanosine-3'-phosphate
  modified_base 16: mod_base = OTHER; note = 2'-deoxy-2'-fluoroguanosine-3'-phosphate
  modified_base 17: mod_base = OTHER; note = 2'-O-methylcytidine-3'-phosphate
  modified_base 18: mod_base = OTHER; note = 2'-O-methylcytidine-3'-phosphate
  modified_base 19: mod_base = OTHER; note = 2'-O-methyladenosine-3'-phosphate
  modified_base 20: mod_base = OTHER; note = 2'-O-methylguanosine-3'-phosphate
  modified_base 21: mod_base = OTHER; note = 2'-O-methylguanosine-3'-phosphorothioate
  modified_base 22: mod_base = OTHER; note = 2'-O-methyladenosine-3'-phosphorothioate
  modified_base 23: mod_base = OTHER; note = 2'-O-methyluridine
tgtttcaccatgttggccaggat

SEQ ID NO: 2976 - RNA, 23 nt, synthetic construct
  source 1..23: mol_type = other RNA
  modified_base 1: mod_base = OTHER; note = 2'-O-methyluridine-3'-phosphorothioate 5'-(E)-Vinylphosphonate
  modified_base 2: mod_base = OTHER; note = 2'-deoxy-2'-fluorocytidine-3'-phosphorothioate
  modified_base 3: mod_base = OTHER; note = 2'-O-methyladenosine-3'-phosphate
  modified_base 4: mod_base = OTHER; note = 2'-O-methyluridine-3'-phosphate
  modified_base 5: mod_base = OTHER; note = 2'-O-methylcytidine-3'-phosphate
  modified_base 6: mod_base = OTHER; note = 2'-deoxy-2'-fluorouridine-3'-phosphate
  modified_base 7: mod_base = OTHER; note = 2'-O-methyladenosine-3'-phosphate
  modified_base 8: mod_base = OTHER; note = 2'-deoxy-2'-fluoroguanosine-3'-phosphate
  modified_base 9: mod_base = OTHER; note = 2'-deoxy-2'-fluorouridine-3'-phosphate
  modified_base 10: mod_base = OTHER; note = 2'-O-methylguanosine-3'-phosphate
  modified_base 11: mod_base = OTHER; note = 2'-O-methyladenosine-3'-phosphate
  modified_base 12: mod_base = OTHER; note = 2'-O-methylcytidine-3'-phosphate
  modified_base 13: mod_base = OTHER; note = 2'-O-methylcytidine-3'-phosphate
  modified_base 14: mod_base = OTHER; note = 2'-deoxy-2'-fluorouridine-3'-phosphate
  modified_base 15: mod_base = OTHER; note = 2'-O-methyluridine-3'-phosphate
  modified_base 16: mod_base = OTHER; note = 2'-deoxy-2'-fluoroguanosine-3'-phosphate
  modified_base 17: mod_base = OTHER; note = 2'-O-methyluridine-3'-phosphate
  modified_base 18: mod_base = OTHER; note = 2'-O-methylguanosine-3'-phosphate
  modified_base 19: mod_base = OTHER; note = 2'-O-methyladenosine-3'-phosphate
  modified_base 20: mod_base = OTHER; note = 2'-O-methyluridine-3'-phosphate
  modified_base 21: mod_base = OTHER; note = 2'-O-methylcytidine-3'-phosphorothioate
  modified_base 22: mod_base = OTHER; note = 2'-O-methylcytidine-3'-phosphorothioate
  modified_base 23: mod_base = OTHER; note = 2'-O-methylcytidine
tcatctagtgaccttgtgatccc

SEQ ID NO: 2977 - RNA, 23 nt, synthetic construct
  source 1..23: mol_type = other RNA
  modified_base 1: mod_base = OTHER; note = 2'-O-methyluridine-3'-phosphorothioate 5'-(E)-Vinylphosphonate
  modified_base 2: mod_base = OTHER; note = 2'-deoxy-2'-fluoroguanosine-3'-phosphorothioate
  modified_base 3: mod_base = OTHER; note = 2'-O-methylcytidine-3'-phosphate
  modified_base 4: mod_base = OTHER; note = 2'-O-methyluridine-3'-phosphate
  modified_base 5: mod_base = OTHER; note = 2'-O-methylcytidine-3'-phosphate
  modified_base 6: mod_base = OTHER; note = 2'-deoxy-2'-fluoroadenosine-3'-phosphate
  modified_base 7: mod_base = OTHER; note = 2'-O-methylguanosine-3'-phosphate
  modified_base 8: mod_base = OTHER; note = 2'-deoxy-2'-fluorocytidine-3'-phosphate
  modified_base 9: mod_base = OTHER; note = 2'-deoxy-2'-fluorouridine-3'-phosphate
  modified_base 10: mod_base = OTHER; note = 2'-O-methyladenosine-3'-phosphate
  modified_base 11: mod_base = OTHER; note = 2'-O-methyladenosine-3'-phosphate
  modified_base 12: mod_base = OTHER; note = 2'-O-methylcytidine-3'-phosphate
  modified_base 13: mod_base = OTHER; note = 2'-O-methyluridine-3'-phosphate
  modified_base 14: mod_base = OTHER; note = 2'-deoxy-2'-fluorouridine-3'-phosphate
  modified_base 15: mod_base = OTHER; note = 2'-O-methyluridine-3'-phosphate
  modified_base 16: mod_base = OTHER; note = 2'-deoxy-2'-fluorouridine-3'-phosphate
  modified_base 17: mod_base = OTHER; note = 2'-O-methylguanosine-3'-phosphate
  modified_base 18: mod_base = OTHER; note = 2'-O-methyluridine-3'-phosphate
  modified_base 19: mod_base = OTHER; note = 2'-O-methylguanosine-3'-phosphate
  modified_base 20: mod_base = OTHER; note = 2'-O-methyluridine-3'-phosphate
  modified_base 21: mod_base = OTHER; note = 2'-O-methyluridine-3'-phosphorothioate
  modified_base 22: mod_base = OTHER; note = 2'-O-methyluridine-3'-phosphorothioate
  modified_base 23: mod_base = OTHER; note = 2'-O-methyluridine
tgctcagctaacttttgtgtttt

SEQ ID NO: 2978 - RNA, 23 nt, synthetic construct
  source 1..23: mol_type = other RNA
  modified_base 1: mod_base = OTHER; note = 2'-O-methyluridine-3'-phosphorothioate 5'-(E)-Vinylphosphonate
  modified_base 2: mod_base = OTHER; note = 2'-deoxy-2'-fluorouridine-3'-phosphorothioate
  modified_base 3: mod_base = OTHER; note = 2'-O-methylguanosine-3'-phosphate
  modified_base 4: mod_base = OTHER; note = 2'-O-methyluridine-3'-phosphate
  modified_base 5: mod_base = OTHER; note = 2'-O-methylcytidine-3'-phosphate
  modified_base 6: mod_base = OTHER; note = 2'-deoxy-2'-fluorouridine-3'-phosphate
  modified_base 7: mod_base = OTHER; note = 2'-O-methylcytidine-3'-phosphate
  modified_base 8: mod_base = OTHER; note = 2'-deoxy-2'-fluoroadenosine-3'-phosphate
  modified_base 9: mod_base = OTHER; note = 2'-deoxy-2'-fluoroguanosine-3'-phosphate
  modified_base 10: mod_base = OTHER; note = 2'-O-methylcytidine-3'-phosphate
  modified_base 11: mod_base = OTHER; note = 2'-O-methylcytidine-3'-phosphate
  modified_base 12: mod_base = OTHER; note = 2'-O-methyluridine-3'-phosphate
  modified_base 13: mod_base = OTHER; note = 2'-O-methylcytidine-3'-phosphate
  modified_base 14: mod_base = OTHER; note = 2'-deoxy-2'-fluorocytidine-3'-phosphate
  modified_base 15: mod_base = OTHER; note = 2'-O-methylcytidine-3'-phosphate
  modified_base 16: mod_base = OTHER; note = 2'-deoxy-2'-fluoroguanosine-3'-phosphate
  modified_base 17: mod_base = OTHER; note = 2'-O-methyladenosine-3'-phosphate
  modified_base 18: mod_base = OTHER; note = 2'-O-methylguanosine-3'-phosphate
  modified_base 19: mod_base = OTHER; note = 2'-O-methyluridine-3'-phosphate
  modified_base 20: mod_base = OTHER; note = 2'-O-methylguanosine-3'-phosphate
  modified_base 21: mod_base = OTHER; note = 2'-O-methylguanosine-3'-phosphorothioate
  modified_base 22: mod_base = OTHER; note = 2'-O-methylcytidine-3'-phosphorothioate
  modified_base 23: mod_base = OTHER; note = 2'-O-methyluridine
ttgtctcagcctcccgagtggct

SEQ ID NO: 2979 - RNA, 23 nt, synthetic construct
  source 1..23: mol_type = other RNA
  modified_base 1: mod_base = OTHER; note = 2'-O-methyluridine-3'-phosphorothioate 5'-(E)-Vinylphosphonate
  modified_base 2: mod_base = OTHER; note = 2'-deoxy-2'-fluoroguanosine-3'-phosphorothioate
  modified_base 3: mod_base = OTHER; note = 2'-O-methylguanosine-3'-phosphate
  modified_base 4: mod_base = OTHER; note = 2'-O-methyluridine-3'-phosphate
  modified_base 5: mod_base = OTHER; note = 2'-O-methyluridine-3'-phosphate
  modified_base 6: mod_base = OTHER; note = 2'-deoxy-2'-fluorouridine-3'-phosphate
  modified_base 7: mod_base = OTHER; note = 2'-O-methyladenosine-3'-phosphate
  modified_base 8: mod_base = OTHER; note = 2'-deoxy-2'-fluoroadenosine-3'-phosphate
  modified_base 9: mod_base = OTHER; note = 2'-deoxy-2'-fluoroguanosine-3'-phosphate
  modified_base 10: mod_base = OTHER; note = 2'-O-methylcytidine-3'-phosphate
  modified_base 11: mod_base = OTHER; note = 2'-O-methylguanosine-3'-phosphate
  modified_base 12: mod_base = OTHER; note = 2'-O-methyladenosine-3'-phosphate
  modified_base 13: mod_base = OTHER; note = 2'-O-methyluridine-3'-phosphate
  modified_base 14: mod_base = OTHER; note = 2'-deoxy-2'-fluorouridine-3'-phosphate
  modified_base 15: mod_base = OTHER; note = 2'-O-methylcytidine-3'-phosphate
  modified_base 16: mod_base = OTHER; note = 2'-deoxy-2'-fluorouridine-3'-phosphate
  modified_base 17: mod_base = OTHER; note = 2'-O-methylcytidine-3'-phosphate
  modified_base 18: mod_base = OTHER; note = 2'-O-methylcytidine-3'-phosphate
  modified_base 19: mod_base = OTHER; note = 2'-O-methyluridine-3'-phosphate
  modified_base 20: mod_base = OTHER; note = 2'-O-methylguanosine-3'-phosphate
  modified_base 21: mod_base = OTHER; note = 2'-O-methyluridine-3'-phosphorothioate
  modified_base 22: mod_base = OTHER; note = 2'-O-methylcytidine-3'-phosphorothioate
  modified_base 23: mod_base = OTHER; note = 2'-O-methyluridine
tggtttaagcgattctcctgtct

SEQ ID NO: 2980 - RNA, 23 nt, synthetic construct
  source 1..23: mol_type = other RNA
  modified_base 1: mod_base = OTHER; note = 2'-O-methyluridine-3'-phosphorothioate 5'-(E)-Vinylphosphonate
  modified_base 2: mod_base = OTHER; note = 2'-deoxy-2'-fluoroadenosine-3'-phosphorothioate
  modified_base 3: mod_base = OTHER; note = 2'-O-methyluridine-3'-phosphate
  modified_base 4: mod_base = OTHER; note = 2'-O-methylcytidine-3'-phosphate
  modified_base 5: mod_base = OTHER; note = 2'-O-methyluridine-3'-phosphate
  modified_base 6: mod_base = OTHER; note = 2'-deoxy-2'-fluorouridine-3'-phosphate
  modified_base 7: mod_base = OTHER; note = 2'-O-methylguanosine-3'-phosphate
  modified_base 8: mod_base = OTHER; note = 2'-deoxy-2'-fluoroguanosine-3'-phosphate
  modified_base 9: mod_base = OTHER; note = 2'-deoxy-2'-fluorocytidine-3'-phosphate
  modified_base 10: mod_base = OTHER; note = 2'-O-methyluridine-3'-phosphate
  modified_base 11: mod_base = OTHER; note = 2'-O-methylcytidine-3'-phosphate
  modified_base 12: mod_base = OTHER; note = 2'-O-methyladenosine-3'-phosphate
  modified_base 13: mod_base = OTHER; note = 2'-O-methylcytidine-3'-phosphate
  modified_base 14: mod_base = OTHER; note = 2'-deoxy-2'-fluorouridine-3'-phosphate
  modified_base 15: mod_base = OTHER; note = 2'-O-methylguanosine-3'-phosphate
  modified_base 16: mod_base = OTHER; note = 2'-deoxy-2'-fluorouridine-3'-phosphate
  modified_base 17: mod_base = OTHER; note = 2'-O-methyladenosine-3'-phosphate
  modified_base 18: mod_base = OTHER; note = 2'-O-methylcytidine-3'-phosphate
  modified_base 19: mod_base = OTHER; note = 2'-O-methyluridine-3'-phosphate
  modified_base 20: mod_base = OTHER; note = 2'-O-methylcytidine-3'-phosphate
  modified_base 21: mod_base = OTHER; note = 2'-O-methyluridine-3'-phosphorothioate
  modified_base 22: mod_base = OTHER; note = 2'-O-methylcytidine-3'-phosphorothioate
  modified_base 23: mod_base = OTHER; note = 2'-O-methylcytidine
tatcttggctcactgtactctcc

SEQ ID NO: 2981 - RNA, 23 nt, synthetic construct
  source 1..23: mol_type = other RNA
  modified_base 1: mod_base = OTHER; note = 2'-O-methyluridine-3'-phosphorothioate 5'-(E)-Vinylphosphonate
  modified_base 2: mod_base = OTHER; note = 2'-deoxy-2'-fluorouridine-3'-phosphorothioate
  modified_base 3: mod_base = OTHER; note = 2'-O-methylcytidine-3'-phosphate
  modified_base 4: mod_base = OTHER; note = 2'-O-methyladenosine-3'-phosphate
  modified_base 5: mod_base = OTHER; note = 2'-O-methyluridine-3'-phosphate
  modified_base 6: mod_base = OTHER; note = 2'-deoxy-2'-fluorocytidine-3'-phosphate
  modified_base 7: mod_base = OTHER; note = 2'-O-methyladenosine-3'-phosphate
  modified_base 8: mod_base = OTHER; note = 2'-deoxy-2'-fluoroguanosine-3'-phosphate
  modified_base 9: mod_base = OTHER; note = 2'-deoxy-2'-fluoroguanosine-3'-phosphate
  modified_base 10: mod_base = OTHER; note = 2'-O-methylcytidine-3'-phosphate
  modified_base 11: mod_base = OTHER; note = 2'-O-methylcytidine-3'-phosphate
  modified_base 12: mod_base = OTHER; note = 2'-O-methylguanosine-3'-phosphate
  modified_base 13: mod_base = OTHER; note = 2'-O-methylguanosine-3'-phosphate
  modified_base 14: mod_base = OTHER; note = 2'-deoxy-2'-fluoroadenosine-3'-phosphate
  modified_base 15: mod_base = OTHER; note = 2'-O-methylguanosine-3'-phosphate
  modified_base 16: mod_base = OTHER; note = 2'-deoxy-2'-fluorouridine-3'-phosphate
  modified_base 17: mod_base = OTHER; note = 2'-O-methylguanosine-3'-phosphate
  modified_base 18: mod_base = OTHER; note = 2'-O-methylcytidine-3'-phosphate
  modified_base 19: mod_base = OTHER; note = 2'-O-methyladenosine-3'-phosphate
  modified_base 20: mod_base = OTHER; note = 2'-O-methylguanosine-3'-phosphate
  modified_base 21: mod_base = OTHER; note = 2'-O-methyluridine-3'-phosphorothioate
  modified_base 22: mod_base = OTHER; note = 2'-O-methylguanosine-3'-phosphorothioate
  modified_base 23: mod_base = OTHER; note = 2'-O-methylguanosine
ttcatcaggccggagtgcagtgg

SEQ ID NO: 2982 - RNA, 23 nt, synthetic construct
  source 1..23: mol_type = other RNA
  modified_base 1: mod_base = OTHER; note = 2'-O-methyluridine-3'-phosphorothioate 5'-(E)-Vinylphosphonate
  modified_base 2: mod_base = OTHER; note = 2'-deoxy-2'-fluorouridine-3'-phosphorothioate
  modified_base 3: mod_base = OTHER; note = 2'-O-methyluridine-3'-phosphate
  modified_base 4: mod_base = OTHER; note = 2'-O-methyluridine-3'-phosphate
  modified_base 5: mod_base = OTHER; note = 2'-O-methyladenosine-3'-phosphate
  modified_base 6: mod_base = OTHER; note = 2'-deoxy-2'-fluoroadenosine-3'-phosphate
  modified_base 7: mod_base = OTHER; note = 2'-O-methylguanosine-3'-phosphate
  modified_base 8: mod_base = OTHER; note = 2'-deoxy-2'-fluoroadenosine-3'-phosphate
  modified_base 9: mod_base = OTHER; note = 2'-deoxy-2'-fluorocytidine-3'-phosphate
  modified_base 10: mod_base = OTHER; note = 2'-O-methylguanosine-3'-phosphate
  modified_base 11: mod_base = OTHER; note = 2'-O-methylguanosine-3'-phosphate
  modified_base 12: mod_base = OTHER; note = 2'-O-methyladenosine-3'-phosphate
  modified_base 13: mod_base = OTHER; note = 2'-O-methyladenosine-3'-phosphate
  modified_base 14: mod_base = OTHER; note = 2'-deoxy-2'-fluorouridine-3'-phosphate
  modified_base 15: mod_base = OTHER; note = 2'-O-methylcytidine-3'-phosphate
  modified_base 16: mod_base = OTHER; note = 2'-deoxy-2'-fluorouridine-3'-phosphate
  modified_base 17: mod_base = OTHER; note = 2'-O-methylcytidine-3'-phosphate
  modified_base 18: mod_base = OTHER; note = 2'-O-methylguanosine-3'-phosphate
  modified_base 19: mod_base = OTHER; note = 2'-O-methylcytidine-3'-phosphate
  modified_base 20: mod_base = OTHER; note = 2'-O-methyluridine-3'-phosphate
  modified_base 21: mod_base = OTHER; note = 2'-O-methylcytidine-3'-phosphorothioate
  modified_base 22: mod_base = OTHER; note = 2'-O-methyluridine-3'-phosphorothioate
  modified_base 23: mod_base = OTHER; note = 2'-O-methylguanosine
ttttaagacggaatctcgctctg

SEQ ID NO: 2983 - RNA, 23 nt, synthetic construct
  source 1..23: mol_type = other RNA
cagcggttgcaaggcccaagaag

SEQ ID NO: 2984 - RNA, 23 nt, synthetic construct
  source 1..23: mol_type = other RNA
atcctgggaaggaaaatgcattg

SEQ ID NO: 2985 - RNA, 23 nt, synthetic construct
  source 1..23: mol_type = other RNA
ctgtgcggattcttgtggctttg

SEQ ID NO: 2986 - RNA, 23 nt, synthetic construct
  source 1..23: mol_type = other RNA
tttggccctatcttttctatgtc

SEQ ID NO: 2987 - RNA, 23 nt, synthetic construct
  source 1..23: mol_type = other RNA
gtccaagctgtgcccatccaaaa

SEQ ID NO: 2988 - RNA, 23 nt, synthetic construct
  source 1..23: mol_type = other RNA
aaagtccaagatgacaccaaaac

SEQ ID NO: 2989 - RNA, 23 nt, synthetic construct
  source 1..23: mol_type = other RNA
accctcatcaagacaattgtcac

SEQ ID NO: 2990 - RNA, 23 nt, synthetic construct
  source 1..23: mol_type = other RNA
acatttcacacacgcagtcagtc

SEQ ID NO: 2991 - RNA, 23 nt, synthetic construct
  source 1..23: mol_type = other RNA
gtctcctccaaacagaaagtcac

SEQ ID NO: 2992 - RNA, 23 nt, synthetic construct
  source 1..23: mol_type = other RNA
agtcaccggtttggacttcattc

SEQ ID NO: 2993 - RNA, 23 nt, synthetic construct
  source 1..23: mol_type = other RNA
catcctgaccttatccaagatgg

SEQ ID NO: 2994 - RNA, 23 nt, synthetic construct
  source 1..23: mol_type = other RNA
cactggcagtctaccaacagatc

SEQ ID NO: 2995 - RNA, 23 nt, synthetic construct
  source 1..23: mol_type = other RNA
cagatcctcaccagtatgccttc

SEQ ID NO: 2996 - RNA, 23 nt, synthetic construct
  source 1..23: mol_type = other RNA
ccttccagaaacgtgatccaaat

SEQ ID NO: 2997 - RNA, 23 nt, synthetic construct
  source 1..23: mol_type = other RNA
aaatatccaacgacctggagaac

SEQ ID NO: 2998 - RNA, 23 nt, synthetic construct
  source 1..23: mol_type = other RNA
acctccgggatcttcttcacgtg

SEQ ID NO: 2999 - RNA, 23 nt, synthetic construct
  source 1..23: mol_type = other RNA
tgctggccttctctaagagctgc

SEQ ID NO: 3000 - RNA, 23 nt, synthetic construct
  source 1..23: mol_type = other RNA
ccagtggcctggagaccttggac

SEQ ID NO: 3001 - RNA, 23 nt, synthetic construct
  source 1..23: mol_type = other RNA
gtgtcctggaagcttcaggctac

SEQ ID NO: 3002 - RNA, 23 nt, synthetic construct
  source 1..23: mol_type = other RNA
caggctactccacagaggtggtg

SEQ ID NO: 3003 - RNA, 23 nt, synthetic construct
  source 1..23: mol_type = other RNA
gggtctctgcaggacatgctgtg

SEQ ID NO: 3004 - RNA, 23 nt, synthetic construct
  source 1..23: mol_type = other RNA
ggccttgaaggtcactcttcctg

SEQ ID NO: 3005 - RNA, 23 nt, synthetic construct
  source 1..23: mol_type = other RNA
cttcctgcaaggactacgttaag

SEQ ID NO: 3006 - RNA, 23 nt, synthetic construct
  source 1..23: mol_type = other RNA
acgttaagggaaggaactctggc

SEQ ID NO: 3007 - RNA, 23 nt, synthetic construct
  source 1..23: mol_type = other RNA
actctggcttccaggtatctcca

SEQ ID NO: 3008 - RNA, 23 nt, synthetic construct
  source 1..23: mol_type = other RNA
ccaggattgaagagcattgcatg

SEQ ID NO: 3009 - RNA, 23 nt, synthetic construct
  source 1..23: mol_type = other RNA
ttatccaggactctgtcaatttc

SEQ ID NO: 3010 - RNA, 23 nt, synthetic construct
  source 1..23: mol_type = other RNA
caatttccctgactcctctaagc

SEQ ID NO: 3011 - RNA, 23 nt, synthetic construct
  source 1..23: mol_type = other RNA
ccactcttccaaaggcataagac

SEQ ID NO: 3012 - RNA, 23 nt, synthetic construct
  source 1..23: mol_type = other RNA
gcctccttttgcttgaaaccaaa

SEQ ID NO: 3013 - RNA, 23 nt, synthetic construct
  source 1..23: mol_type = other RNA
tatacacaggatcctattctcac

SEQ ID NO: 3014 - RNA, 23 nt, synthetic construct
  source 1..23: mol_type = other RNA
gggtccacccagcaaagagtggg

SEQ ID NO: 3015 - RNA, 23 nt, synthetic construct
  source 1..23: mol_type = other RNA
agagtgggctgcatctgggattc

SEQ ID NO: 3016 - RNA, 23 nt, synthetic construct
  source 1..23: mol_type = other RNA
gggattcccaccaaggtcttcag

SEQ ID NO: 3017 - RNA, 23 nt, synthetic construct
  source 1..23: mol_type = other RNA
tcttcagccatcaacaagagttg

SEQ ID NO: 3018 - RNA, 23 nt, synthetic construct
  source 1..23: mol_type = other RNA
ctcactgaatgcctcaatgtgac

SEQ ID NO: 3019 - RNA, 23 nt, synthetic construct
  source 1..23: mol_type = other RNA
agcctttggatgaccagaacaag

SEQ ID NO: 3020 - RNA, 23 nt, synthetic construct
  source 1..23: mol_type = other RNA
aggttccctctgagaattccaag

SEQ ID NO: 3021 - RNA, 23 nt, synthetic construct
  source 1..23: mol_type = other RNA
attccaaggagttccatgaagac

SEQ ID NO: 3022 - RNA, 23 nt, synthetic construct
  source 1..23: mol_type = other RNA
cacatccacacacgcaggaactc

SEQ ID NO: 3023 - RNA, 23 nt, synthetic construct
  source 1..23: mol_type = other RNA
actcccagcaacacaagctggaa

SEQ ID NO: 3024 - RNA, 23 nt, synthetic construct
  source 1..23: mol_type = other RNA
gctggaagcacatgtttatttat

SEQ ID NO: 3025 - RNA, 23 nt, synthetic construct
  source 1..23: mol_type = other RNA
attctgcattttattctggatgg

SEQ ID NO: 3026 - RNA, 23 nt, synthetic construct
  source 1..23: mol_type = other RNA
tggatggatttgaagcaaagcac

SEQ ID NO: 3027 - RNA, 23 nt, synthetic construct
  source 1..23: mol_type = other RNA
caccagcttctccaggctctttg

SEQ ID NO: 3028 - RNA, 23 nt, synthetic construct
  source 1..23: mol_type = other RNA
tgcagtttccaatcccatagatg

SEQ ID NO: 3029 - RNA, 23 nt, synthetic construct
  source 1..23: mol_type = other RNA
ctgagctgaacccattttgagtg

SEQ ID NO: 3030 - RNA, 23 nt, synthetic construct
  source 1..23: mol_type = other RNA
ggttgggttcatctgagcaagag

SEQ ID NO: 3031 - RNA, 23 nt, synthetic construct
  source 1..23: mol_type = other RNA
aagagctggcaaaggtggctctc

SEQ ID NO: 3032 - RNA, 23 nt, synthetic construct
  source 1..23: mol_type = other RNA
tggctctccagttagttctctcg

SEQ ID NO: 3033 - RNA, 23 nt, synthetic construct
  source 1..23: mol_type = other RNA
tctctcgtaactggtttcatttc

SEQ ID NO: 3034 - RNA, 23 nt, synthetic construct
  source 1..23: mol_type = other RNA
ttctactgtgactgatgttacat

SEQ ID NO: 3035 - RNA, 23 nt, synthetic construct
  source 1..23: mol_type = other RNA
tgttacatcacagtgtttgcaat

SEQ ID NO: 3036 - RNA, 23 nt, synthetic construct
  source 1..23: mol_type = other RNA
tgttgccctgagtggatctccaa

SEQ ID NO: 3037 - RNA, 23 nt, synthetic construct
  source 1..23: mol_type = other RNA
tctccaaggaccaggttatttta

SEQ ID NO: 3038 - RNA, 23 nt, synthetic construct
  source 1..23: mol_type = other RNA
gttttgtcaagtgtcatatgtag

SEQ ID NO: 3039 - RNA, 23 nt, synthetic construct
  source 1..23: mol_type = other RNA
agaagggagaaggatctagaatg

SEQ ID NO: 3040 - RNA, 23 nt, synthetic construct
  source 1..23: mol_type = other RNA
agaatgtgttttctgaataacat

SEQ ID NO: 3041 - RNA, 23 nt, synthetic construct
  source 1..23: mol_type = other RNA
ttgtgtggtgggttctttggaag

SEQ ID NO: 3042 - RNA, 23 nt, synthetic construct
  source 1..23: mol_type = other RNA
aaggagtgagatcattttcttat

SEQ ID NO: 3043 - RNA, 23 nt, synthetic construct
  source 1..23: mol_type = other RNA
tcttatcttctgcaattgcttag

SEQ ID NO: 3044 - RNA, 23 nt, synthetic construct
  source 1..23: mol_type = other RNA
gcttaggatgtttttcatgaaaa

SEQ ID NO: 3045 - RNA, 23 nt, synthetic construct
  source 1..23: mol_type = other RNA
ccctggagagaagtttctggccc

SEQ ID NO: 3046 - RNA, 23 nt, synthetic construct
  source 1..23: mol_type = other RNA
gagaagctgatgctttgcttcaa

SEQ ID NO: 3047 - RNA, 23 nt, synthetic construct
  source 1..23: mol_type = other RNA
tgcttcaaatccatccagaataa

SEQ ID NO: 3048 - RNA, 23 nt, synthetic construct
  source 1..23: mol_type = other RNA
aagggctgaaagccatttgttgg

SEQ ID NO: 3049 - RNA, 23 nt, synthetic construct
  source 1..23: mol_type = other RNA
ctctggctttctccgactgctag

SEQ ID NO: 3050 - RNA, 23 nt, synthetic construct
  source 1..23: mol_type = other RNA
gagtggtctttcctatcatggag

SEQ ID NO: 3051 - RNA, 23 nt, synthetic construct
  source 1..23: mol_type = other RNA
tgacggtcccacactggtgactg

SEQ ID NO: 3052 - RNA, 23 nt, synthetic construct
  source 1..23: mol_type = other RNA
ggtgactgcgatcttcagagcag

SEQ ID NO: 3053 - RNA, 23 nt, synthetic construct
  source 1..23: mol_type = other RNA
accctctgaatggtccagggttg

SEQ ID NO: 3054 - RNA, 23 nt, synthetic construct
  source 1..23: mol_type = other RNA
ttgatcacactctgggtttatta

SEQ ID NO: 3055 - RNA, 23 nt, synthetic construct
  source 1..23: mol_type = other RNA
tacatggcagtgttcctatttgg

SEQ ID NO: 3056 - RNA, 23 nt, synthetic construct
  source 1..23: mol_type = other RNA
ttgcatgccaaattgtagttctt

SEQ ID NO: 3057 - RNA, 23 nt, synthetic construct
  source 1..23: mol_type = other RNA
tagttcttgtctgattggctcac

SEQ ID NO: 3058 - RNA, 23 nt, synthetic construct
  source 1..23: mol_type = other RNA
caagcaaggccaaaattaccaaa

SEQ ID NO: 3059 - RNA, 23 nt, synthetic construct
  source 1..23: mol_type = other RNA
gggtttttactccagtggtgaag

SEQ ID NO: 3060 - RNA, 23 nt, synthetic construct
  source 1..23: mol_type = other RNA
ggtgaagaaaactcctttagcag

SEQ ID NO: 3061 - RNA, 23 nt, synthetic construct
  source 1..23: mol_type = other RNA
tgagacctgacaagcactgctag

SEQ ID NO: 3062 - RNA, 23 nt, synthetic construct
  source 1..23: mol_type = other RNA
gcccttcccactggaggtcacat

SEQ ID NO: 3063 - RNA, 23 nt, synthetic construct
  source 1..23: mol_type = other RNA
ggtcacattcaggaagatgaaag

SEQ ID NO: 3064 - RNA, 23 nt, synthetic construct
  source 1..23: mol_type = other RNA
tctgccaccatcctgctgctgtg

SEQ ID NO: 3065 - RNA, 23 nt, synthetic construct
  source 1..23: mol_type = other RNA
ctgctgtgtttttgctatcacac

SEQ ID NO: 3066 - RNA, 23 nt, synthetic construct
  source 1..23: mol_type = other RNA
acacagtgggtggtggatctgtc

SEQ ID NO: 3067 - RNA, 23 nt, synthetic construct
  source 1..23: mol_type = other RNA
atctgtccaaggaaacttgaatc

SEQ ID NO: 3068 - RNA, 23 nt, synthetic construct
  source 1..23: mol_type = other RNA
cttgaatcaaagcagttaacttt

SEQ ID NO: 3069 - RNA, 23 nt, synthetic construct
  source 1..23: mol_type = other RNA
ctgagcacctgcttcatgctcag

SEQ ID NO: 3070 - RNA, 23 nt, synthetic construct
  source 1..23: mol_type = other RNA
actggtgctataggctggagaag

SEQ ID NO: 3071 - RNA, 23 nt, synthetic construct
  source 1..23: mol_type = other RNA
gaagctcacccaataaacattaa

SEQ ID NO: 3072 - RNA, 23 nt, synthetic construct
  source 1..23: mol_type = other RNA
aacattaagattgaggcctgccc

SEQ ID NO: 3073 - RNA, 23 nt, synthetic construct
  source 1..23: mol_type = other RNA
gcctgccctcagggatcttgcat

SEQ ID NO: 3074 - RNA, 23 nt, synthetic construct
  source 1..23: mol_type = other RNA
tcttgcattcccagtggtcaaac

SEQ ID NO: 3075 - RNA, 23 nt, synthetic construct
  source 1..23: mol_type = other RNA
accgcactcacccatgtgccaag

SEQ ID NO: 3076 - RNA, 23 nt, synthetic construct
  source 1..23: mol_type = other RNA
agcagctgaacagccaaatgcat

SEQ ID NO: 3077 - RNA, 23 nt, synthetic construct
  source 1..23: mol_type = other RNA
aaatgcatggtgcagttgacagc

SEQ ID NO: 3078 - RNA, 23 nt, synthetic construct
  source 1..23: mol_type = other RNA
caggtgggaaatggtatgagctg

SEQ ID NO: 3079 - RNA, 23 nt, synthetic construct
  source 1..23: mol_type = other RNA
cccacagggaaccctgcttgcac

SEQ ID NO: 3080 - RNA, 23 nt, synthetic construct
  source 1..23: mol_type = other RNA
cttgcactttgtaacatgtttac

SEQ ID NO: 3081 - RNA, 23 nt, synthetic construct
  source 1..23: mol_type = other RNA
gggcatcttagcttctattatag

SEQ ID NO: 3082 - RNA, 23 nt, synthetic construct
  source 1..23: mol_type = other RNA
tccctttgaaacaagataactga

SEQ ID NO: 3083 - RNA, 23 nt, synthetic construct
  source 1..23: mol_type = other RNA
gaaaatacataagaccataacag

SEQ ID NO: 3084 - RNA, 23 nt, synthetic construct
  source 1..23: mol_type = other RNA
ggtggcaggaccaggactatagc

SEQ ID NO: 3085 - RNA, 23 nt, synthetic construct
  source 1..23: mol_type = other RNA
ctatagcccaggtcctctgatac

SEQ ID NO: 3086 - RNA, 23 nt, synthetic construct
  source 1..23: mol_type = other RNA
tgatacccagagcattacgtgag

SEQ ID NO: 3087 - RNA, 23 nt, synthetic construct
  source 1..23: mol_type = other RNA
gccaggtaatgagggactggaac

SEQ ID NO: 3088 - RNA, 23 nt, synthetic construct
  source 1..23: mol_type = other RNA
gggagaccgagcgctttctggaa

SEQ ID NO: 3089 - RNA, 23 nt, synthetic construct
  source 1..23: mol_type = other RNA
ttctggaaaagaggagtttcgag

SEQ ID NO: 3090 - RNA, 23 nt, synthetic construct
  source 1..23: mol_type = other RNA
gtttcgaggtagagtttgaagga

SEQ ID NO: 3091 - RNA, 23 nt, synthetic construct
  source 1..23: mol_type = other RNA
ggtgagggatgtgaattgcctgc

SEQ ID NO: 3092 - RNA, 23 nt, synthetic construct
  source 1..23: mol_type = other RNA
ttgcctgcagagagaagcctgtt

SEQ ID NO: 3093 - RNA, 23 nt, synthetic construct
  source 1..23: mol_type = other RNA
agcctgttttgttggaaggtttg

SEQ ID NO: 3094 - RNA, 23 nt, synthetic construct
  source 1..23: mol_type = other RNA
gtggagatgcagaggtaaaagtg

SEQ ID NO: 3095 - RNA, 23 nt, synthetic construct
  source 1..23: mol_type = other RNA
aaagtgtgagcagtgagttacag

SEQ ID NO: 3096 - RNA, 23 nt, synthetic construct
  source 1..23: mol_type = other RNA
acagcgagaggcagagaaagaag

SEQ ID NO: 3097 - RNA, 23 nt, synthetic construct
  source 1..23: mol_type = other RNA
gccatgctgaagggaccttgaag

SEQ ID NO: 3098 - RNA, 23 nt, synthetic construct
  source 1..23: mol_type = other RNA
tgaagggtaaagaagtttgatat

SEQ ID NO: 3099 - RNA, 23 nt, synthetic construct
  source 1..23: mol_type = other RNA
gatattaaaggagttaagagtag

SEQ ID NO: 3100 - RNA, 23 nt, synthetic construct
  source 1..23: mol_type = other RNA
aagagtagcaagttctagagaag

SEQ ID NO: 3101 - RNA, 23 nt, synthetic construct
  source 1..23: mol_type = other RNA
tgagagctgctctggaaaatgtg

SEQ ID NO: 3102 - RNA, 23 nt, synthetic construct
  source 1..23: mol_type = other RNA
gatcctcacaaccacctaatcag

SEQ ID NO: 3103 - RNA, 23 nt, synthetic construct
  source 1..23: mol_type = other RNA
taatcaggctgaggtgtcttaag

SEQ ID NO: 3104 - RNA, 23 nt, synthetic construct
  source 1..23: mol_type = other RNA
ttaagccttttgctcacaaaacc

SEQ ID NO: 3105 - RNA, 23 nt, synthetic construct
  source 1..23: mol_type = other RNA
aaacctggcacaatggctaattc

SEQ ID NO: 3106 - RNA, 23 nt, synthetic construct
  source 1..23: mol_type = other RNA
gtgtgaaacttcctaagtataaa

SEQ ID NO: 3107 - RNA, 23 nt, synthetic construct
  source 1..23: mol_type = other RNA
ggttgtctgtttttgtaacttaa

SEQ ID NO: 3108 - RNA, 23 nt, synthetic construct
  source 1..23: mol_type = other RNA
agcctggccaacatggtgaaacc

SEQ ID NO: 3109 - RNA, 23 nt, synthetic construct
  source 1..23: mol_type = other RNA
gggatcacaaggtcactagatgg

SEQ ID NO: 3110 - RNA, 23 nt, synthetic construct
  source 1..23: mol_type = other RNA
aaaacacaaaagttagctgagcg

SEQ ID NO: 3111 - RNA, 23 nt, synthetic construct
  source 1..23: mol_type = other RNA
agccactcgggaggctgagacag

SEQ ID NO: 3112 - RNA, 23 nt, synthetic construct
  source 1..23: mol_type = other RNA
agacaggagaatcgcttaaacct

SEQ ID NO: 3113 - RNA, 23 nt, synthetic construct
  source 1..23: mol_type = other RNA
ggagagtacagtgagccaagatc

SEQ ID NO: 3114 - RNA, 23 nt, synthetic construct
  source 1..23: mol_type = other RNA
ccactgcactccggcctgatgac

SEQ ID NO: 3115 - RNA, 23 nt, synthetic construct
  source 1..23: mol_type = other RNA
cagagcgagattccgtcttaaaa

SEQ ID NO: 3116 - RNA, 21 nt, synthetic construct
  source 1..21: mol_type = other RNA
caccaggatcaatgacattta

SEQ ID NO: 3117 - RNA, 23 nt, synthetic construct
  source 1..23: mol_type = other RNA
taaatgtcattgatcctggtgac

SEQ ID NO: 3118 - RNA, 21 nt, synthetic construct
  source 1..21: mol_type = other RNA
  modified_base 1: mod_base = OTHER; note = 2'-O-methylcytidine-3'-phosphorothioate
  modified_base 2: mod_base = OTHER; note = 2'-O-methyladenosine-3'-phosphorothioate
  modified_base 3: mod_base = OTHER; note = 2'-O-methylcytidine-3'-phosphate
  modified_base 4: mod_base = OTHER; note = 2'-O-methylcytidine-3'-phosphate
  modified_base 5: mod_base = OTHER; note = 2'-O-methyladenosine-3'-phosphate
  modified_base 6: mod_base = OTHER; note = 2'-O-methylguanosine-3'-phosphate
  modified_base 7: mod_base = OTHER; note = 2'-deoxy-2'-fluoroguanosine-3'-phosphate
  modified_base 8: mod_base = OTHER; note = 2'-O-methyladenosine-3'-phosphate
  modified_base 9: mod_base = OTHER; note = 2'-deoxy-2'-fluorouridine-3'-phosphate
  modified_base 10: mod_base = OTHER; note = 2'-deoxy-2'-fluorocytidine-3'-phosphate
  modified_base 11: mod_base = OTHER; note = 2'-deoxy-2'-fluoroadenosine-3'-phosphate
  modified_base 12: mod_base = OTHER; note = 2'-O-methyladenosine-3'-phosphate
  modified_base 13: mod_base = OTHER; note = 2'-O-methyluridine-3'-phosphate
  modified_base 14: mod_base = OTHER; note = 2'-O-methylguanosine-3'-phosphate
  modified_base 15: mod_base = OTHER; note = 2'-O-methyladenosine-3'-phosphate
  modified_base 16: mod_base = OTHER; note = 2'-O-methylcytidine-3'-phosphate
  modified_base 17: mod_base = OTHER; note = 2'-O-methyladenosine-3'-phosphate
  modified_base 18: mod_base = OTHER; note = 2'-O-methyluridine-3'-phosphate
  modified_base 19: mod_base = OTHER; note = 2'-O-methyluridine-3'-phosphate
  modified_base 20: mod_base = OTHER; note = 2'-O-methyluridine-3'-phosphate
  modified_base 21: mod_base = OTHER; note = 2'-O-methyladenosine-3'-phosphate ((2S,4R)-1-[29-[[2-(acetylamino)-2-deoxy-beta-D-galactopyra nosyl]oxy]-14,14-bis[[3-[[3-[[5-[[2-(acetylamino)-2-deoxy-b eta-D-galactopyranosyl]oxy]-1-oxopentyl]amino]propyl]amino] -3-oxopropoxy]methyl]-1,12,19,25-tetraoxo-16-oxa-13,20,24-t riazanonacos-1-yl]-4-hydroxy-2-pyrrolidinyl)methyl ester
caccaggatcaatgacattta

SEQ ID NO: 3119 - RNA, 23 nt, synthetic construct
  source 1..23: mol_type = other RNA
  modified_base 1: mod_base = OTHER; note = 2'-O-methyluridine-3'-phosphorothioate 5'-(E)-Vinylphosphonate
  modified_base 2: mod_base = OTHER; note = 2'-deoxy-2'-fluoroadenosine-3'-phosphorothioate
  modified_base 3: mod_base = OTHER; note = 2'-O-methyladenosine-3'-phosphate
  modified_base 4: mod_base = OTHER; note = 2'-O-methyladenosine-3'-phosphate
  modified_base 5: mod_base = OTHER; note = 2'-O-methyluridine-3'-phosphate
  modified_base 6: mod_base = OTHER; note = 2'-deoxy-2'-fluoroguanosine-3'-phosphate
  modified_base 7: mod_base = OTHER; note = 2'-O-methyluridine-3'-phosphate
  modified_base 8: mod_base = OTHER; note = 2'-deoxy-2'-fluorocytidine-3'-phosphate
  modified_base 9: mod_base = OTHER; note = 2'-deoxy-2'-fluoroadenosine-3'-phosphate
  modified_base 10: mod_base = OTHER; note = 2'-O-methyluridine-3'-phosphate
  modified_base 11: mod_base = OTHER; note = 2'-O-methyluridine-3'-phosphate
  modified_base 12: mod_base = OTHER; note = 2'-O-methylguanosine-3'-phosphate
  modified_base 13: mod_base = OTHER; note = 2'-O-methyladenosine-3'-phosphate
  modified_base 14: mod_base = OTHER; note = 2'-deoxy-2'-fluorouridine-3'-phosphate
  modified_base 15: mod_base = OTHER; note = 2'-O-methylcytidine-3'-phosphate
  modified_base 16: mod_base = OTHER; note = 2'-deoxy-2'-fluorocytidine-3'-phosphate
  modified_base 17: mod_base = OTHER; note = 2'-O-methyluridine-3'-phosphate
  modified_base 18: mod_base = OTHER; note = 2'-O-methylguanosine-3'-phosphate
  modified_base 19: mod_base = OTHER; note = 2'-O-methylguanosine-3'-phosphate
  modified_base 20: mod_base = OTHER; note = 2'-O-methyluridine-3'-phosphate
  modified_base 21: mod_base = OTHER; note = 2'-O-methylguanosine-3'-phosphorothioate
  modified_base 22: mod_base = OTHER; note = 2'-O-methyladenosine-3'-phosphorothioate
  modified_base 23: mod_base = OTHER; note = 2'-O-methylcytidine
taaatgtcattgatcctggtgac

SEQ ID NO: 3120 - RNA, 23 nt, synthetic construct
  source 1..23: mol_type = other RNA
gtcaccaggatcaatgacatttc

SEQ ID NO: 3121 - RNA, 21 nt, synthetic construct
  source 1..21: mol_type = other RNA
ttgaagtgtagttttatacaa

SEQ ID NO: 3122 - RNA, 21 nt, synthetic construct
  source 1..21: mol_type = other RNA
gtgactggttttgtttctata

SEQ ID NO: 3123 - RNA, 23 nt, synthetic construct
  source 1..23: mol_type = other RNA
ttgtataaaactacacttcaagc

SEQ ID NO: 3124 - RNA, 23 nt, synthetic construct
  source 1..23: mol_type = other RNA
tatagaaacaaaaccagtcacca

SEQ ID NO: 3125 - RNA, 21 nt, synthetic construct
  source 1..21: mol_type = other RNA
  modified_base 1: mod_base = OTHER; note = 2'-O-methyluridine-3'-phosphorothioate
  modified_base 2: mod_base = OTHER; note = 2'-O-methyluridine-3'-phosphorothioate
  modified_base 3: mod_base = OTHER; note = 2'-O-methylguanosine-3'-phosphate
  modified_base 4: mod_base = OTHER; note = 2'-O-methyladenosine-3'-phosphate
  modified_base 5: mod_base = OTHER; note = 2'-O-methyladenosine-3'-phosphate
  modified_base 6: mod_base = OTHER; note = 2'-O-docosanyl-guanosine-3'-phosphate
  modified_base 7: mod_base = OTHER; note = 2'-deoxy-2'-fluorouridine-3'-phosphate
  modified_base 8: mod_base = OTHER; note = 2'-O-methylguanosine-3'-phosphate
  modified_base 9: mod_base = OTHER; note = 2'-deoxy-2'-fluorouridine-3'-phosphate
  modified_base 10: mod_base = OTHER; note = 2'-deoxy-2'-fluoroadenosine-3'-phosphate
  modified_base 11: mod_base = OTHER; note = 2'-deoxy-2'-fluoroguanosine-3'-phosphate
  modified_base 12: mod_base = OTHER; note = 2'-O-methyluridine-3'-phosphate
  modified_base 13: mod_base = OTHER; note = 2'-O-methyluridine-3'-phosphate
  modified_base 14: mod_base = OTHER; note = 2'-O-methyluridine-3'-phosphate
  modified_base 15: mod_base = OTHER; note = 2'-O-methyluridine-3'-phosphate
  modified_base 16: mod_base = OTHER; note = 2'-O-methyladenosine-3'-phosphate
  modified_base 17: mod_base = OTHER; note = 2'-O-methyluridine-3'-phosphate
  modified_base 18: mod_base = OTHER; note = 2'-O-methyladenosine-3'-phosphate
  modified_base 19: mod_base = OTHER; note = 2'-O-methylcytidine-3'-phosphorothioate
  modified_base 20: mod_base = OTHER; note = 2'-O-methyladenosine-3'-phosphorothioate
  modified_base 21: mod_base = OTHER; note = 2'-O-methyladenosine
ttgaagtgtagttttatacaa

SEQ ID NO: 3126 - RNA, 21 nt, synthetic construct
  source 1..21: mol_type = other RNA
  modified_base 1: mod_base = OTHER; note = 2'-O-methylguanosine-3'-phosphorothioate
  modified_base 2: mod_base = OTHER; note = 2'-O-methyluridine-3'-phosphorothioate
  modified_base 3: mod_base = OTHER; note = 2'-O-methylguanosine-3'-phosphate
  modified_base 4: mod_base = OTHER; note = 2'-O-methyladenosine-3'-phosphate
  modified_base 5: mod_base = OTHER; note = 2'-O-methylcytidine-3'-phosphate
  modified_base 6: mod_base = OTHER; note = 2'-O-docosanyl-uridine-3'-phosphate
  modified_base 7: mod_base = OTHER; note = 2'-deoxy-2'-fluoroguanosine-3'-phosphate
  modified_base 8: mod_base = OTHER; note = 2'-O-methylguanosine-3'-phosphate
  modified_base 9: mod_base = OTHER; note = 2'-deoxy-2'-fluorouridine-3'-phosphate
  modified_base 10: mod_base = OTHER; note = 2'-deoxy-2'-fluorouridine-3'-phosphate
  modified_base 11: mod_base = OTHER; note = 2'-deoxy-2'-fluorouridine-3'-phosphate
  modified_base 12: mod_base = OTHER; note = 2'-O-methyluridine-3'-phosphate
  modified_base 13: mod_base = OTHER; note = 2'-O-methylguanosine-3'-phosphate
  modified_base 14: mod_base = OTHER; note = 2'-O-methyluridine-3'-phosphate
  modified_base 15: mod_base = OTHER; note = 2'-O-methyluridine-3'-phosphate
  modified_base 16: mod_base = OTHER; note = 2'-O-methyluridine-3'-phosphate
  modified_base 17: mod_base = OTHER; note = 2'-O-methylcytidine-3'-phosphate
  modified_base 18: mod_base = OTHER; note = 2'-O-methyluridine-3'-phosphate
  modified_base 19: mod_base = OTHER; note = 2'-O-methyladenosine-3'-phosphorothioate
  modified_base 20: mod_base = OTHER; note = 2'-O-methyluridine-3'-phosphorothioate
  modified_base 21: mod_base = OTHER; note = 2'-O-methyladenosine-3'-phosphate
gtgactggttttgtttctata

SEQ ID NO: 3127 - RNA, 23 nt, synthetic construct
  source 1..23: mol_type = other RNA
  modified_base 1: mod_base = OTHER; note = 2'-O-methyluridine-3'-phosphorothioate 5'-(E)-Vinylphosphonate
  modified_base 2: mod_base = OTHER; note = 2'-deoxy-2'-fluorouridine-3'-phosphorothioate
  modified_base 3: mod_base = OTHER; note = 2'-O-methylguanosine-3'-phosphate
  modified_base 4: mod_base = OTHER; note = 2'-O-methyluridine-3'-phosphate
  modified_base 5: mod_base = OTHER; note = 2'-O-methyladenosine-3'-phosphate
  modified_base 6: mod_base = OTHER; note = 2'-deoxy-2'-fluorouridine-3'-phosphate
  modified_base 7: mod_base = OTHER; note = 2'-O-methyladenosine-3'-phosphate
  modified_base 8: mod_base = OTHER; note = 2'-deoxy-2'-fluoroadenosine-3'-phosphate
  modified_base 9: mod_base = OTHER; note = 2'-deoxy-2'-fluoroadenosine-3'-phosphate
  modified_base 10: mod_base = OTHER; note = 2'-O-methyladenosine-3'-phosphate
  modified_base 11: mod_base = OTHER; note = 2'-O-methylcytidine-3'-phosphate
  modified_base 12: mod_base = OTHER; note = 2'-O-methyluridine-3'-phosphate
  modified_base 13: mod_base = OTHER; note = 2'-O-methyladenosine-3'-phosphate
  modified_base 14: mod_base = OTHER; note = 2'-deoxy-2'-fluorocytidine-3'-phosphate
  modified_base 15: mod_base = OTHER; note = 2'-O-methyladenosine-3'-phosphate
  modified_base 16: mod_base = OTHER; note = 2'-deoxy-2'-fluorocytidine-3'-phosphate
  modified_base 17: mod_base = OTHER; note = 2'-O-methyluridine-3'-phosphate
  modified_base 18: mod_base = OTHER; note = 2'-O-methyluridine-3'-phosphate
  modified_base 19: mod_base = OTHER; note = 2'-O-methylcytidine-3'-phosphate
  modified_base 20: mod_base = OTHER; note = 2'-O-methyladenosine-3'-phosphate
  modified_base 21: mod_base = OTHER; note = 2'-O-methyladenosine-3'-phosphorothioate
  modified_base 22: mod_base = OTHER; note = 2'-O-methylguanosine-3'-phosphorothioate
  modified_base 23: mod_base = OTHER; note = 2'-O-methylcytidine
ttgtataaaactacacttcaagc

SEQ ID NO: 3128 - RNA, 23 nt, synthetic construct
  source 1..23: mol_type = other RNA
  modified_base 1: mod_base = OTHER; note = 2'-O-methyluridine-3'-phosphorothioate 5'-(E)-Vinylphosphonate
  modified_base 2: mod_base = OTHER; note = 2'-deoxy-2'-fluoroadenosine-3'-phosphate
  modified_base 3: mod_base = OTHER; note = 2'-O-methyluridine-3'-phosphate
  modified_base 4: mod_base = OTHER; note = 2'-O-methyladenosine-3'-phosphate
  modified_base 5: mod_base = OTHER; note = 2'-O-methylguanosine-3'-phosphate
  modified_base 6: mod_base = OTHER; note = 2'-deoxy-2'-fluoroadenosine-3'-phosphate
  modified_base 7: mod_base = OTHER; note = 2'-O-methyladenosine-3'-phosphate
  modified_base 8: mod_base = OTHER; note = 2'-deoxy-2'-fluoroadenosine-3'-phosphate
  modified_base 9: mod_base = OTHER; note = 2'-deoxy-2'-fluorocytidine-3'-phosphate
  modified_base 10: mod_base = OTHER; note = 2'-O-methyladenosine-3'-phosphate
  modified_base 11: mod_base = OTHER; note = 2'-O-methyladenosine-3'-phosphate
  modified_base 12: mod_base = OTHER; note = 2'-O-methyladenosine-3'-phosphate
  modified_base 13: mod_base = OTHER; note = 2'-O-methyladenosine-3'-phosphate
  modified_base 14: mod_base = OTHER; note = 2'-deoxy-2'-fluorocytidine-3'-phosphate
  modified_base 15: mod_base = OTHER; note = 2'-O-methylcytidine-3'-phosphate
  modified_base 16: mod_base = OTHER; note = 2'-deoxy-2'-fluoroadenosine-3'-phosphate
  modified_base 17: mod_base = OTHER; note = 2'-O-methylguanosine-3'-phosphate
  modified_base 18: mod_base = OTHER; note = 2'-O-methyluridine-3'-phosphate
  modified_base 19: mod_base = OTHER; note = 2'-O-methylcytidine-3'-phosphate
  modified_base 20: mod_base = OTHER; note = 2'-O-methyladenosine-3'-phosphate
  modified_base 21: mod_base = OTHER; note = 2'-O-methylcytidine-3'-phosphorothioate
  modified_base 22: mod_base = OTHER; note = 2'-O-methylcytidine-3'-phosphorothioate
  modified_base 23: mod_base = OTHER; note = 2'-O-methyladenosine
tatagaaacaaaaccagtcacca

SEQ ID NO: 3129 - RNA, 21 nt, synthetic construct
  source 1..21: mol_type = other RNA
ctatttttcttcctctatcat

SEQ ID NO: 3130 - RNA, 21 nt, synthetic construct
  source 1..21: mol_type = other RNA
tatcaatttctgtctcatctt

SEQ ID NO: 3131 - RNA, 21 nt, synthetic construct
  source 1..21: mol_type = other RNA
aacataaaagtcttcattctt

SEQ ID NO: 3132 - RNA, 21 nt, synthetic construct
  source 1..21: mol_type = other RNA
tctcagtaaacagaaataact

SEQ ID NO: 3133 - RNA, 21 nt, synthetic construct
  source 1..21: mol_type = other RNA
atcttaatatgtctcttgctt

SEQ ID NO: 3134 - RNA, 21 nt, synthetic construct
  source 1..21: mol_type = other RNA
cacaaatttctatcccaaatt

SEQ ID NO: 3135 - RNA, 21 nt, synthetic construct
  source 1..21: mol_type = other RNA
cttccaataactcataaaact

SEQ ID NO: 3136 - RNA, 21 nt, synthetic construct
  source 1..21: mol_type = other RNA
tatcagaatctacattctaat

SEQ ID NO: 3137 - RNA, 21 nt, synthetic construct
  source 1..21: mol_type = other RNA
tatgaattctctctccaaatt

SEQ ID NO: 3138 - RNA, 21 nt, synthetic construct
  source 1..21: mol_type = other RNA
taacaacagaatctaatcttt

SEQ ID NO: 3139 - RNA, 21 nt, synthetic construct
  source 1..21: mol_type = other RNA
cctcacatctgttatcttatt

SEQ ID NO: 3140 - RNA, 21 nt, synthetic construct
  source 1..21: mol_type = other RNA
cacttaaaacttcagacttct

SEQ ID NO: 3141 - RNA, 21 nt, synthetic construct
  source 1..21: mol_type = other RNA
cattctcattgtcttcacatt

SEQ ID NO: 3142 - RNA, 21 nt, synthetic construct
  source 1..21: mol_type = other RNA
gaccatttcagaacatcttct

SEQ ID NO: 3143 - RNA, 21 nt, synthetic construct
  source 1..21: mol_type = other RNA
ccttactgataacataaacat

SEQ ID NO: 3144 - RNA, 21 nt, synthetic construct
  source 1..21: mol_type = other RNA
tctctgaagttctgctacaat

SEQ ID NO: 3145 - RNA, 21 nt, synthetic construct
  source 1..21: mol_type = other RNA
ctacagaatctatttatcaat

SEQ ID NO: 3146 - RNA, 21 nt, synthetic construct
  source 1..21: mol_type = other RNA
taagacttcagaatgattttt

SEQ ID NO: 3147 - RNA, 21 nt, synthetic construct
  source 1..21: mol_type = other RNA
aagtatttttcaggtcttcat

SEQ ID NO: 3148 - RNA, 21 nt, synthetic construct
  source 1..21: mol_type = other RNA
actgttgatttcctcaacatt

SEQ ID NO: 3149 - RNA, 21 nt, synthetic construct
  source 1..21: mol_type = other RNA
cctatactgcataatccaact

SEQ ID NO: 3150 - RNA, 21 nt, synthetic construct
  source 1..21: mol_type = other RNA
ctgttctaagacatatgatct

SEQ ID NO: 3151 - RNA, 21 nt, synthetic construct
  source 1..21: mol_type = other RNA
tctactatagaataagttctt

SEQ ID NO: 3152 - RNA, 21 nt, synthetic construct
  source 1..21: mol_type = other RNA
atgctcaaatatgttctactt

SEQ ID NO: 3153 - RNA, 21 nt, synthetic construct
  source 1..21: mol_type = other RNA
ttctaaaacatggttactaat

SEQ ID NO: 3154 - RNA, 21 nt, synthetic construct
  source 1..21: mol_type = other RNA
ggaaaatatattcaccaaact

SEQ ID NO: 3155 - RNA, 21 nt, synthetic construct
  source 1..21: mol_type = other RNA
caaaatcttaactacctaatt

SEQ ID NO: 3156 - RNA, 21 nt, synthetic construct
  source 1..21: mol_type = other RNA
ttttcaatttctcctctgact

SEQ ID NO: 3157 - RNA, 21 nt, synthetic construct
  source 1..21: mol_type = other RNA
tctttctctcgaccacttaat

SEQ ID NO: 3158 - RNA, 21 nt, synthetic construct
  source 1..21: mol_type = other RNA
gcttaccatactatatctttt

SEQ ID NO: 3159 - RNA, 21 nt, synthetic construct
  source 1..21: mol_type = other RNA
ttcaccaagtatcaaagtaat

SEQ ID NO: 3160 - RNA, 21 nt, synthetic construct
  source 1..21: mol_type = other RNA
catcagcttaaaatctgtcat

SEQ ID NO: 3161 - RNA, 21 nt, synthetic construct
  source 1..21: mol_type = other RNA
actattgaccataaaccttat

SEQ ID NO: 3162 - RNA, 21 nt, synthetic construct
  source 1..21: mol_type = other RNA
ctatattcctacaataaagtt

SEQ ID NO: 3163 - RNA, 21 nt, synthetic construct
  source 1..21: mol_type = other RNA
tacaagctggaaattcctaat

SEQ ID NO: 3164 - RNA, 21 nt, synthetic construct
  source 1..21: mol_type = other RNA
tactgagctaaattatagatt

SEQ ID NO: 3165 - RNA, 21 nt, synthetic construct
  source 1..21: mol_type = other RNA
tgccaacaagttcacttcatt

SEQ ID NO: 3166 - RNA, 21 nt, synthetic construct
  source 1..21: mol_type = other RNA
ctacctaaaagaagacagttt

SEQ ID NO: 3167 - RNA, 21 nt, synthetic construct
  source 1..21: mol_type = other RNA
agacatgttactaatataact

SEQ ID NO: 3168 - RNA, 21 nt, synthetic construct
  source 1..21: mol_type = other RNA
ttcatacaacacaatactctt

SEQ ID NO: 3169 - RNA, 21 nt, synthetic construct
  source 1..21: mol_type = other RNA
atgccacattaacatcttttt

SEQ ID NO: 3170 - RNA, 21 nt, synthetic construct
  source 1..21: mol_type = other RNA
cactggttttagtaaattact

SEQ ID NO: 3171 - RNA, 21 nt, synthetic construct
  source 1..21: mol_type = other RNA
ctcgctcagctataagaagat

SEQ ID NO: 3172 - RNA, 21 nt, synthetic construct
  source 1..21: mol_type = other RNA
tcttcattctttgatagaaat

SEQ ID NO: 3173 - RNA, 21 nt, synthetic construct
  source 1..21: mol_type = other RNA
caagattaagactaaaacttt

SEQ ID NO: 3174 - RNA, 21 nt, synthetic construct
  source 1..21: mol_type = other RNA
aagctagagaaaatgttattt

SEQ ID NO: 3175 - RNA, 21 nt, synthetic construct
  source 1..21: mol_type = other RNA
aaactttggtaatttaagttt

SEQ ID NO: 3176 - RNA, 21 nt, synthetic construct
  source 1..21: mol_type = other RNA
catatcactaatatactaact

SEQ ID NO: 3177 - RNA, 21 nt, synthetic construct
  source 1..21: mol_type = other RNA
ttgctgatctgtatcatcgtt

SEQ ID NO: 3178 - RNA, 21 nt, synthetic construct
  source 1..21: mol_type = other RNA
atctgttggatcttgtaaact

SEQ ID NO: 3179 - RNA, 21 nt, synthetic construct
  source 1..21: mol_type = other RNA
atgtaggtaaatcataaatct

SEQ ID NO: 3180 - RNA, 21 nt, synthetic construct
  source 1..21: mol_type = other RNA
ctgattagtcatattcctttt

SEQ ID NO: 3181 - RNA, 21 nt, synthetic construct
  source 1..21: mol_type = other RNA
catctattacatctacagctt

SEQ ID NO: 3182 - RNA, 21 nt, synthetic construct
  source 1..21: mol_type = other RNA
aaaatagtttacacctatact

SEQ ID NO: 3183 - RNA, 21 nt, synthetic construct
  source 1..21: mol_type = other RNA
ggagacactattaaattttct

SEQ ID NO: 3184 - RNA, 21 nt, synthetic construct
  source 1..21: mol_type = other RNA
agtagaaagcttataaacaat

SEQ ID NO: 3185 - RNA, 21 nt, synthetic construct
  source 1..21: mol_type = other RNA
tcttacacaagtgttgctaat

SEQ ID NO: 3186 - RNA, 21 nt, synthetic construct
  source 1..21: mol_type = other RNA
aactatttgtagtaactatct

SEQ ID NO: 3187 - RNA, 21 nt, synthetic construct
  source 1..21: mol_type = other RNA
ttactaaaagaatatgtaact

SEQ ID NO: 3188 - RNA, 21 nt, synthetic construct
  source 1..21: mol_type = other RNA
tcaaaatagtccactgactct

SEQ ID NO: 3189 - RNA, 21 nt, synthetic construct
  source 1..21: mol_type = other RNA
acaggaaaacaatattgtatt

SEQ ID NO: 3190 - RNA, 21 nt, synthetic construct
  source 1..21: mol_type = other RNA
gtgtataaaatgcaactgttt

SEQ ID NO: 3191 - RNA, 21 nt, synthetic construct
  source 1..21: mol_type = other RNA
ctatactgtgatgatcacagt

SEQ ID NO: 3192 - RNA, 21 nt, synthetic construct
  source 1..21: mol_type = other RNA
gccatactcttacataataat

SEQ ID NO: 3193 - RNA, 21 nt, synthetic construct
  source 1..21: mol_type = other RNA
gaatcacagaattctagtact

SEQ ID NO: 3194 - RNA, 21 nt, synthetic construct
  source 1..21: mol_type = other RNA
acacatattttgcgtgttatt

SEQ ID NO: 3195 - RNA, 21 nt, synthetic construct
  source 1..21: mol_type = other RNA
ttgattacactgtttgttact

SEQ ID NO: 3196 - RNA, 21 nt, synthetic construct
  source 1..21: mol_type = other RNA
ccagctatgctatttataatt

SEQ ID NO: 3197 - RNA, 21 nt, synthetic construct
  source 1..21: mol_type = other RNA
caactgaagtaaaattgagtt

SEQ ID NO: 3198 - RNA, 21 nt, synthetic construct
  source 1..21: mol_type = other RNA
gtgtaattaaccatatcttct

SEQ ID NO: 3199 - RNA, 21 nt, synthetic construct
  source 1..21: mol_type = other RNA
tctatcaaccaaatggtaagt

SEQ ID NO: 3200 - RNA, 21 nt, synthetic construct
  source 1..21: mol_type = other RNA
tgaggattacagaatactatt

SEQ ID NO: 3201 - RNA, 21 nt, synthetic construct
  source 1..21: mol_type = other RNA
gtggaaaatttgaactgattt

SEQ ID NO: 3202 - RNA, 21 nt, synthetic construct
  source 1..21: mol_type = other RNA
atggagaaagtccaatacctt

SEQ ID NO: 3203 - RNA, 21 nt, synthetic construct
  source 1..21: mol_type = other RNA
aaatcagaatcactatattat

SEQ ID NO: 3204 - RNA, 21 nt, synthetic construct
  source 1..21: mol_type = other RNA
cttccattccagcctaacatt

SEQ ID NO: 3205 - RNA, 21 nt, synthetic construct
  source 1..21: mol_type = other RNA
aatgaagtgtcattattcaat

SEQ ID NO: 3206 - RNA, 21 nt, synthetic construct
  source 1..21: mol_type = other RNA
cttcatcataaagtgtaaagt

SEQ ID NO: 3207 - RNA, 21 nt, synthetic construct
  source 1..21: mol_type = other RNA
ccaaatcttttctgaagatgt

SEQ ID NO: 3208 - RNA, 21 nt, synthetic construct
  source 1..21: mol_type = other RNA
tttggaatcatgaaaccttat

SEQ ID NO: 3209 - RNA, 21 nt, synthetic construct
  source 1..21: mol_type = other RNA
aaacacccgtaagacttcatt

SEQ ID NO: 3210 - RNA, 21 nt, synthetic construct
  source 1..21: mol_type = other RNA
aactcaatagtgaaggagact

SEQ ID NO: 3211 - RNA, 21 nt, synthetic construct
  source 1..21: mol_type = other RNA
tcttcatttaaggcactgtat

SEQ ID NO: 3212 - RNA, 21 nt, synthetic construct
  source 1..21: mol_type = other RNA
ggtcttgcagtcttgtcttat

SEQ ID NO: 3213 - RNA, 21 nt, synthetic construct
  source 1..21: mol_type = other RNA
tatctgagctagagttacctt

SEQ ID NO: 3214 - RNA, 21 nt, synthetic construct
  source 1..21: mol_type = other RNA
aactgtaataggatatagctt

SEQ ID NO: 3215 - RNA, 21 nt, synthetic construct
  source 1..21: mol_type = other RNA
atgaaaagggctttattttct

SEQ ID NO: 3216 - RNA, 21 nt, synthetic construct
  source 1..21: mol_type = other RNA
cagaaagtatccctagtcttt

SEQ ID NO: 3217 - RNA, 21 nt, synthetic construct
  source 1..21: mol_type = other RNA
tgccagctttttatctttctt

SEQ ID NO: 3218 - RNA, 21 nt, synthetic construct
  source 1..21: mol_type = other RNA
cttttgaggtgaatataattt

SEQ ID NO: 3219 - RNA, 21 nt, synthetic construct
  source 1..21: mol_type = other RNA
tcagggatatctgaagaacat

SEQ ID NO: 3220 - RNA, 21 nt, synthetic construct
  source 1..21: mol_type = other RNA
caacaagcacgtcaaaagctt

SEQ ID NO: 3221 - RNA, 21 nt, synthetic construct
  source 1..21: mol_type = other RNA
attgtataacagaccacttct

SEQ ID NO: 3222 - RNA, 21 nt, synthetic construct
  source 1..21: mol_type = other RNA
ttaatgttgccttttatattt

SEQ ID NO: 3223 - RNA, 21 nt, synthetic construct
  source 1..21: mol_type = other RNA
attgaccttggtttcttacat

SEQ ID NO: 3224 - RNA, 21 nt, synthetic construct
  source 1..21: mol_type = other RNA
tatgatcaacagatgagaact

SEQ ID NO: 3225 - RNA, 21 nt, synthetic construct
  source 1..21: mol_type = other RNA
gcagagatttcttaagtgact

SEQ ID NO: 3226 - RNA, 21 nt, synthetic construct
  source 1..21: mol_type = other RNA
gaagagtttctttgtgaaaat

SEQ ID NO: 3227 - RNA, 21 nt, synthetic construct
  source 1..21: mol_type = other RNA
caaccattgaaatgcctcaat

SEQ ID NO: 3228 - RNA, 21 nt, synthetic construct
  source 1..21: mol_type = other RNA
atctattttgcagtccactct

SEQ ID NO: 3229 - RNA, 21 nt, synthetic construct
  source 1..21: mol_type = other RNA
gttaccatatgtattcatctt

SEQ ID NO: 3230 - RNA, 21 nt, synthetic construct
  source 1..21: mol_type = other RNA
ttcttatcttaatttacaggt

SEQ ID NO: 3231 - RNA, 21 nt, synthetic construct
  source 1..21: mol_type = other RNA
acagttatctcatatttggct

SEQ ID NO: 3232 - RNA, 21 nt, synthetic construct
  source 1..21: mol_type = other RNA
aacaattttaatttcagttgt

SEQ ID NO: 3233 - RNA, 21 nt, synthetic construct
  source 1..21: mol_type = other RNA
ggcaaggaaaataaaagattt

SEQ ID NO: 3234 - RNA, 21 nt, synthetic construct
  source 1..21: mol_type = other RNA
tcatcgtgatgcttctctgat

SEQ ID NO: 3235 - RNA, 21 nt, synthetic construct
  source 1..21: mol_type = other RNA
aagatgaagagtttagttttt

SEQ ID NO: 3236 - RNA, 21 nt, synthetic construct
  source 1..21: mol_type = other RNA
cactgtagtgaattatctgat

SEQ ID NO: 3237 - RNA, 21 nt, synthetic construct
  source 1..21: mol_type = other RNA
ctacaacctctagatctgcat

SEQ ID NO: 3238 - RNA, 21 nt, synthetic construct
  source 1..21: mol_type = other RNA
atgagaatcaagtatggaaat

SEQ ID NO: 3239 - RNA, 21 nt, synthetic construct
  source 1..21: mol_type = other RNA
ttgttcaagggtcaactgtat

SEQ ID NO: 3240 - RNA, 21 nt, synthetic construct
  source 1..21: mol_type = other RNA
gaacccatgagagatactagt

SEQ ID NO: 3241 - RNA, 21 nt, synthetic construct
  source 1..21: mol_type = other RNA
atgtgacagtgagattagtct

SEQ ID NO: 3242 - RNA, 21 nt, synthetic construct
  source 1..21: mol_type = other RNA
ctattcattaaatggaagtgt

SEQ ID NO: 3243 - RNA, 21 nt, synthetic construct
  source 1..21: mol_type = other RNA
tcttttaaagttgatgagaat

SEQ ID NO: 3244 - RNA, 21 nt, synthetic construct
  source 1..21: mol_type = other RNA
ggtgacagagtcagaaaactt

SEQ ID NO: 3245 - RNA, 21 nt, synthetic construct
  source 1..21: mol_type = other RNA
aaacaacaggtgatacactct

SEQ ID NO: 3246 - RNA, 21 nt, synthetic construct
  source 1..21: mol_type = other RNA
ccacttcctgagtagaagagt

SEQ ID NO: 3247 - RNA, 21 nt, synthetic construct
  source 1..21: mol_type = other RNA
aaatcttattctgtgaggatt

SEQ ID NO: 3248 - RNA, 21 nt, synthetic construct
  source 1..21: mol_type = other RNA
agtggaaagtgtttggttcat

SEQ ID NO: 3249 - RNA, 21 nt, synthetic construct
  source 1..21: mol_type = other RNA
ttgtattttttctatgccact

SEQ ID NO: 3250 - RNA, 21 nt, synthetic construct
  source 1..21: mol_type = other RNA
gtgttatatgtattatacact

SEQ ID NO: 3251 - RNA, 21 nt, synthetic construct
  source 1..21: mol_type = other RNA
aaagagtagaggatgtgtaat

SEQ ID NO: 3252 - RNA, 21 nt, synthetic construct
  source 1..21: mol_type = other RNA
agttttaaaactgcactgcct

SEQ ID NO: 3253 - RNA, 21 nt, synthetic construct
  source 1..21: mol_type = other RNA
aagatttccagtgacagaaat

SEQ ID NO: 3254 - RNA, 21 nt, synthetic construct
  source 1..21: mol_type = other RNA
actggtggttaatatgtgact

SEQ ID NO: 3255 - RNA, 21 nt, synthetic construct
  source 1..21: mol_type = other RNA
ttgcaattcaagcccttgttt

SEQ ID NO: 3256 - RNA, 21 nt, synthetic construct
  source 1..21: mol_type = other RNA
aagtgacgcctcatctacaat

SEQ ID NO: 3257 - RNA, 21 nt, synthetic construct
  source 1..21: mol_type = other RNA
attttgcaggttgtcttccat

SEQ ID NO: 3258 - RNA, 21 nt, synthetic construct
  source 1..21: mol_type = other RNA
atgtaacatcaatattgacct

SEQ ID NO: 3259 - RNA, 21 nt, synthetic construct
  source 1..21: mol_type = other RNA
aaagaatattcatgtataagt

SEQ ID NO: 3260 - RNA, 21 nt, synthetic construct
  source 1..21: mol_type = other RNA
aagtaataacacaaatgaagt

SEQ ID NO: 3261 - RNA, 21 nt, synthetic construct
  source 1..21: mol_type = other RNA
tacagctgacccttgaacatt

SEQ ID NO: 3262 - RNA, 21 nt, synthetic construct
  source 1..21: mol_type = other RNA
atggaaaagtaaggccatact

SEQ ID NO: 3263 - RNA, 21 nt, synthetic construct
  source 1..21: mol_type = other RNA
gaacttgttggcccatctatt

SEQ ID NO: 3264 - RNA, 23 nt, synthetic construct
  source 1..23: mol_type = other RNA
atgatagaggaagaaaaatagct

SEQ ID NO: 3265 - RNA, 23 nt, synthetic construct
  source 1..23: mol_type = other RNA
aagatgagacagaaattgataaa

SEQ ID NO: 3266 - RNA, 23 nt, synthetic construct
  source 1..23: mol_type = other RNA
aagaatgaagacttttatgttga

SEQ ID NO: 3267 - RNA, 23 nt, synthetic construct
  source 1..23: mol_type = other RNA
agttatttctgtttactgagaaa

SEQ ID NO: 3268 - RNA, 23 nt, synthetic construct
  source 1..23: mol_type = other RNA
aagcaagagacatattaagatga

SEQ ID NO: 3269 - RNA, 23 nt, synthetic construct
  source 1..23: mol_type = other RNA
aatttgggatagaaatttgtgag

SEQ ID NO: 3270 - RNA, 23 nt, synthetic construct
  source 1..23: mol_type = other RNA
agttttatgagttattggaagat

SEQ ID NO: 3271 - RNA, 23 nt, synthetic construct
  source 1..23: mol_type = other RNA
attagaatgtagattctgatagt

SEQ ID NO: 3272 - RNA, 23 nt, synthetic construct
  source 1..23: mol_type = other RNA
aatttggagagagaattcatata

SEQ ID NO: 3273 - RNA, 23 nt, synthetic construct
  source 1..23: mol_type = other RNA
aaagattagattctgttgttagt

SEQ ID NO: 3274 - RNA, 23 nt, synthetic construct
  source 1..23: mol_type = other RNA
aataagataacagatgtgaggag

SEQ ID NO: 3275 - RNA, 23 nt, synthetic construct
  source 1..23: mol_type = other RNA
agaagtctgaagttttaagtggt

SEQ ID NO: 3276 - RNA, 23 nt, synthetic construct
  source 1..23: mol_type = other RNA
aatgtgaagacaatgagaatgaa

SEQ ID NO: 3277 - RNA, 23 nt, synthetic construct
  source 1..23: mol_type = other RNA
agaagatgttctgaaatggtcag

SEQ ID NO: 3278 - RNA, 23 nt, synthetic construct
  source 1..23: mol_type = other RNA
atgtttatgttatcagtaaggtt

SEQ ID NO: 3279 - RNA, 23 nt, synthetic construct
  source 1..23: mol_type = other RNA
attgtagcagaacttcagagaag

SEQ ID NO: 3280 - RNA, 23 nt, synthetic construct
  source 1..23: mol_type = other RNA
attgataaatagattctgtagct

SEQ ID NO: 3281 - RNA, 23 nt, synthetic construct
  source 1..23: mol_type = other RNA
aaaaatcattctgaagtcttaag

SEQ ID NO: 3282 - RNA, 23 nt, synthetic construct
  source 1..23: mol_type = other RNA
atgaagacctgaaaaatacttag

SEQ ID NO: 3283 - RNA, 23 nt, synthetic construct
  source 1..23: mol_type = other RNA
aatgttgaggaaatcaacagttg

SEQ ID NO: 3284 - RNA, 23 nt, synthetic construct
  source 1..23: mol_type = other RNA
agttggattatgcagtataggtg

SEQ ID NO: 3285 - RNA, 23 nt, synthetic construct
  source 1..23: mol_type = other RNA
agatcatatgtcttagaacagat

SEQ ID NO: 3286 - RNA, 23 nt, synthetic construct
  source 1..23: mol_type = other RNA
aagaacttattctatagtagaac

SEQ ID NO: 3287 - RNA, 23 nt, synthetic construct
  source 1..23: mol_type = other RNA
aagtagaacatatttgagcattt

SEQ ID NO: 3288 - RNA, 23 nt, synthetic construct
  source 1..23: mol_type = other RNA
attagtaaccatgttttagaaga

SEQ ID NO: 3289 - RNA, 23 nt, synthetic construct
  source 1..23: mol_type = other RNA
agtttggtgaatatattttccag

SEQ ID NO: 3290 - RNA, 23 nt, synthetic construct
  source 1..23: mol_type = other RNA
aattaggtagttaagattttgcg

SEQ ID NO: 3291 - RNA, 23 nt, synthetic construct
  source 1..23: mol_type = other RNA
agtcagaggagaaattgaaaatt

SEQ ID NO: 3292 - RNA, 23 nt, synthetic construct
  source 1..23: mol_type = other RNA
attaagtggtcgagagaaagata

SEQ ID NO: 3293 - RNA, 23 nt, synthetic construct
  source 1..23: mol_type = other RNA
aaaagatatagtatggtaagcta

SEQ ID NO: 3294 - RNA, 23 nt, synthetic construct
  source 1..23: mol_type = other RNA
attactttgatacttggtgaaga

SEQ ID NO: 3295 - RNA, 23 nt, synthetic construct
  source 1..23: mol_type = other RNA
atgacagattttaagctgatgtg

SEQ ID NO: 3296 - RNA, 23 nt, synthetic construct
  source 1..23: mol_type = other RNA
ataaggtttatggtcaatagtag

SEQ ID NO: 3297 - RNA, 23 nt, synthetic construct
  source 1..23: mol_type = other RNA
aactttattgtaggaatatagtg

SEQ ID NO: 3298 - RNA, 23 nt, synthetic construct
  source 1..23: mol_type = other RNA
attaggaatttccagcttgtaga

SEQ ID NO: 3299 - RNA, 23 nt, synthetic construct
  source 1..23: mol_type = other RNA
aatctataatttagctcagtaga

SEQ ID NO: 3300 - RNA, 23 nt, synthetic construct
  source 1..23: mol_type = other RNA
aatgaagtgaacttgttggcagt

SEQ ID NO: 3301 - RNA, 23 nt, synthetic construct
  source 1..23: mol_type = other RNA
aaactgtcttcttttaggtagcc

SEQ ID NO: 3302 - RNA, 23 nt, synthetic construct
  source 1..23: mol_type = other RNA
agttatattagtaacatgtcttc

SEQ ID NO: 3303 - RNA, 23 nt, synthetic construct
  source 1..23: mol_type = other RNA
aagagtattgtgttgtatgaagt

SEQ ID NO: 3304 - RNA, 23 nt, synthetic construct
  source 1..23: mol_type = other RNA
aaaaagatgttaatgtggcatag

SEQ ID NO: 3305 - RNA, 23 nt, synthetic construct
  source 1..23: mol_type = other RNA
agtaatttactaaaaccagtgag

SEQ ID NO: 3306 - RNA, 23 nt, synthetic construct
  source 1..23: mol_type = other RNA
atcttcttatagctgagcgagtg

SEQ ID NO: 3307 - RNA, 23 nt, synthetic construct
  source 1..23: mol_type = other RNA
atttctatcaaagaatgaagaac

SEQ ID NO: 3308 - RNA, 23 nt, synthetic construct
  source 1..23: mol_type = other RNA
aaagttttagtcttaatcttgac

SEQ ID NO: 3309 - RNA, 23 nt, synthetic construct
  source 1..23: mol_type = other RNA
aaataacattttctctagcttac

SEQ ID NO: 3310 - RNA, 23 nt, synthetic construct
  source 1..23: mol_type = other RNA
aaacttaaattaccaaagtttgg

SEQ ID NO: 3311 - RNA, 23 nt, synthetic construct
  source 1..23: mol_type = other RNA
agttagtatattagtgatatgac

SEQ ID NO: 3312 - RNA, 23 nt, synthetic construct
  source 1..23: mol_type = other RNA
aacgatgatacagatcagcaaga

SEQ ID NO: 3313 - RNA, 23 nt, synthetic construct
  source 1..23: mol_type = other RNA
agtttacaagatccaacagatga

SEQ ID NO: 3314 - RNA, 23 nt, synthetic construct
  source 1..23: mol_type = other RNA
agatttatgatttacctacatgt

SEQ ID NO: 3315 - RNA, 23 nt, synthetic construct
  source 1..23: mol_type = other RNA
aaaaggaatatgactaatcagtt

SEQ ID NO: 3316 - RNA, 23 nt, synthetic construct
  source 1..23: mol_type = other RNA
aagctgtagatgtaatagatggg

SEQ ID NO: 3317 - RNA, 23 nt, synthetic construct
  source 1..23: mol_type = other RNA
agtataggtgtaaactattttag

SEQ ID NO: 3318 - RNA, 23 nt, synthetic construct
  source 1..23: mol_type = other RNA
agaaaatttaatagtgtctcctt

SEQ ID NO: 3319 - RNA, 23 nt, synthetic construct
  source 1..23: mol_type = other RNA
attgtttataagctttctacttg

SEQ ID NO: 3320 - RNA, 23 nt, synthetic construct
  source 1..23: mol_type = other RNA
attagcaacacttgtgtaagaaa

SEQ ID NO: 3321 - RNA, 23 nt, synthetic construct
  source 1..23: mol_type = other RNA
agatagttactacaaatagttct

SEQ ID NO: 3322 - RNA, 23 nt, synthetic construct
  source 1..23: mol_type = other RNA
agttacatattcttttagtaacc

SEQ ID NO: 3323 - RNA, 23 nt, synthetic construct
  source 1..23: mol_type = other RNA
agagtcagtggactattttgaat

SEQ ID NO: 3324 - RNA, 23 nt, synthetic construct
  source 1..23: mol_type = other RNA
aatacaatattgttttcctgtct

SEQ ID NO: 3325 - RNA, 23 nt, synthetic construct
  source 1..23: mol_type = other RNA
aaacagttgcattttatacactt

SEQ ID NO: 3326 - RNA, 23 nt, synthetic construct
  source 1..23: mol_type = other RNA
actgtgatcatcacagtatagag

SEQ ID NO: 3327 - RNA, 23 nt, synthetic construct
  source 1..23: mol_type = other RNA
attattatgtaagagtatggcct

SEQ ID NO: 3328 - RNA, 23 nt, synthetic construct
  source 1..23: mol_type = other RNA
agtactagaattctgtgattctt

SEQ ID NO: 3329 - RNA, 23 nt, synthetic construct
  source 1..23: mol_type = other RNA
aataacacgcaaaatatgtgtta

SEQ ID NO: 3330 - RNA, 23 nt, synthetic construct
  source 1..23: mol_type = other RNA
agtaacaaacagtgtaatcaaag

SEQ ID NO: 3331 - RNA, 23 nt, synthetic construct
  source 1..23: mol_type = other RNA
aattataaatagcatagctggat

SEQ ID NO: 3332 - RNA, 23 nt, synthetic construct
  source 1..23: mol_type = other RNA
aactcaattttacttcagttgtt

SEQ ID NO: 3333 - RNA, 23 nt, synthetic construct
  source 1..23: mol_type = other RNA
agaagatatggttaattacacat

SEQ ID NO: 3334 - RNA, 23 nt, synthetic construct
  source 1..23: mol_type = other RNA
acttaccatttggttgatagagg

SEQ ID NO: 3335 - RNA, 23 nt, synthetic construct
  source 1..23: mol_type = other RNA
aatagtattctgtaatcctcaca

SEQ ID NO: 3336 - RNA, 23 nt, synthetic construct
  source 1..23: mol_type = other RNA
aaatcagttcaaattttccactt

SEQ ID NO: 3337 - RNA, 23 nt, synthetic construct
  source 1..23: mol_type = other RNA
aaggtattggactttctccatga

SEQ ID NO: 3338 - RNA, 23 nt, synthetic construct
  source 1..23: mol_type = other RNA
ataatatagtgattctgatttgc

SEQ ID NO: 3339 - RNA, 23 nt, synthetic construct
  source 1..23: mol_type = other RNA
aatgttaggctggaatggaagac

SEQ ID NO: 3340 - RNA, 23 nt, synthetic construct
  source 1..23: mol_type = other RNA
attgaataatgacacttcatttg

SEQ ID NO: 3341 - RNA, 23 nt, synthetic construct
  source 1..23: mol_type = other RNA
actttacactttatgatgaagaa

SEQ ID NO: 3342 - RNA, 23 nt, synthetic construct
  source 1..23: mol_type = other RNA
acatcttcagaaaagatttggga

SEQ ID NO: 3343 - RNA, 23 nt, synthetic construct
  source 1..23: mol_type = other RNA
ataaggtttcatgattccaaaga

SEQ ID NO: 3344 - RNA, 23 nt, synthetic construct
  source 1..23: mol_type = other RNA
aatgaagtcttacgggtgtttag

SEQ ID NO: 3345 - RNA, 23 nt, synthetic construct
  source 1..23: mol_type = other RNA
agtctccttcactattgagttag

SEQ ID NO: 3346 - RNA, 23 nt, synthetic construct
  source 1..23: mol_type = other RNA
atacagtgccttaaatgaagatt

SEQ ID NO: 3347 - RNA, 23 nt, synthetic construct
  source 1..23: mol_type = other RNA
ataagacaagactgcaagaccaa

SEQ ID NO: 3348 - RNA, 23 nt, synthetic construct
  source 1..23: mol_type = other RNA
aaggtaactctagctcagataat

SEQ ID NO: 3349 - RNA, 23 nt, synthetic construct
  source 1..23: mol_type = other RNA
aagctatatcctattacagttga

SEQ ID NO: 3350 - RNA, 23 nt, synthetic construct
  source 1..23: mol_type = other RNA
agaaaataaagcccttttcatgt

SEQ ID NO: 3351 - RNA, 23 nt, synthetic construct
  source 1..23: mol_type = other RNA
aaagactagggatactttctgta

SEQ ID NO: 3352 - RNA, 23 nt, synthetic construct
  source 1..23: mol_type = other RNA
aagaaagataaaaagctggcagc

SEQ ID NO: 3353 - RNA, 23 nt, synthetic construct
  source 1..23: mol_type = other RNA
aaattatattcacctcaaaagag

SEQ ID NO: 3354 - RNA, 23 nt, synthetic construct
  source 1..23: mol_type = other RNA
atgttcttcagatatccctgaac

SEQ ID NO: 3355 - RNA, 23 nt, synthetic construct
  source 1..23: mol_type = other RNA
aagcttttgacgtgcttgttgag

SEQ ID NO: 3356 - RNA, 23 nt, synthetic construct
  source 1..23: mol_type = other RNA
agaagtggtctgttatacaatat

SEQ ID NO: 3357 - RNA, 23 nt, synthetic construct
  source 1..23: mol_type = other RNA
aaatataaaaggcaacattaagc

SEQ ID NO: 3358 - RNA, 23 nt, synthetic construct
  source 1..23: mol_type = other RNA
atgtaagaaaccaaggtcaatat

SEQ ID NO: 3359 - RNA, 23 nt, synthetic construct
  source 1..23: mol_type = other RNA
agttctcatctgttgatcatatg

SEQ ID NO: 3360 - RNA, 23 nt, synthetic construct
  source 1..23: mol_type = other RNA
agtcacttaagaaatctctgccc

SEQ ID NO: 3361 - RNA, 23 nt, synthetic construct
  source 1..23: mol_type = other RNA
attttcacaaagaaactcttcta

SEQ ID NO: 3362 - RNA, 23 nt, synthetic construct
  source 1..23: mol_type = other RNA
attgaggcatttcaatggttgag

SEQ ID NO: 3363 - RNA, 23 nt, synthetic construct
  source 1..23: mol_type = other RNA
agagtggactgcaaaatagatgc

SEQ ID NO: 3364 - RNA, 23 nt, synthetic construct
  source 1..23: mol_type = other RNA
aagatgaatacatatggtaacaa

SEQ ID NO: 3365 - RNA, 23 nt, synthetic construct
  source 1..23: mol_type = other RNA
acctgtaaattaagataagaact

SEQ ID NO: 3366 - RNA, 23 nt, synthetic construct
  source 1..23: mol_type = other RNA
agccaaatatgagataactgtct

SEQ ID NO: 3367 - RNA, 23 nt, synthetic construct
  source 1..23: mol_type = other RNA
acaactgaaattaaaattgttgg

SEQ ID NO: 3368 - RNA, 23 nt, synthetic construct
  source 1..23: mol_type = other RNA
aaatcttttattttccttgcctg

SEQ ID NO: 3369 - RNA, 23 nt, synthetic construct
  source 1..23: mol_type = other RNA
atcagagaagcatcacgatgata

SEQ ID NO: 3370 - RNA, 23 nt, synthetic construct
  source 1..23: mol_type = other RNA
aaaaactaaactcttcatcttca

SEQ ID NO: 3371 - RNA, 23 nt, synthetic construct
  source 1..23: mol_type = other RNA
atcagataattcactacagtgcc

SEQ ID NO: 3372 - RNA, 23 nt, synthetic construct
  source 1..23: mol_type = other RNA
atgcagatctagaggttgtagca

SEQ ID NO: 3373 - RNA, 23 nt, synthetic construct
  source 1..23: mol_type = other RNA
atttccatacttgattctcatca

SEQ ID NO: 3374 - RNA, 23 nt, synthetic construct
  source 1..23: mol_type = other RNA
atacagttgacccttgaacaaca

SEQ ID NO: 3375 - RNA, 23 nt, synthetic construct
  source 1..23: mol_type = other RNA
actagtatctctcatgggttcag

SEQ ID NO: 3376 - RNA, 23 nt, synthetic construct
  source 1..23: mol_type = other RNA
agactaatctcactgtcacatat

SEQ ID NO: 3377 - RNA, 23 nt, synthetic construct
  source 1..23: mol_type = other RNA
acacttccatttaatgaatagta

SEQ ID NO: 3378 - RNA, 23 nt, synthetic construct
  source 1..23: mol_type = other RNA
attctcatcaactttaaaagatg

SEQ ID NO: 3379 - RNA, 23 nt, synthetic construct
  source 1..23: mol_type = other RNA
aagttttctgactctgtcaccca

SEQ ID NO: 3380 - RNA, 23 nt, synthetic construct
  source 1..23: mol_type = other RNA
agagtgtatcacctgttgtttat

SEQ ID NO: 3381 - RNA, 23 nt, synthetic construct
  source 1..23: mol_type = other RNA
actcttctactcaggaagtggtc

SEQ ID NO: 3382 - RNA, 23 nt, synthetic construct
  source 1..23: mol_type = other RNA
aatcctcacagaataagatttta

SEQ ID NO: 3383 - RNA, 23 nt, synthetic construct
  source 1..23: mol_type = other RNA
atgaaccaaacactttccactcc

SEQ ID NO: 3384 - RNA, 23 nt, synthetic construct
  source 1..23: mol_type = other RNA
agtggcatagaaaaaatacaatt

SEQ ID NO: 3385 - RNA, 23 nt, synthetic construct
  source 1..23: mol_type = other RNA
agtgtataatacatataacacgc

SEQ ID NO: 3386 - RNA, 23 nt, synthetic construct
  source 1..23: mol_type = other RNA
attacacatcctctactctttta

SEQ ID NO: 3387 - RNA, 23 nt, synthetic construct
  source 1..23: mol_type = other RNA
aggcagtgcagttttaaaactaa

SEQ ID NO: 3388 - RNA, 23 nt, synthetic construct
  source 1..23: mol_type = other RNA
atttctgtcactggaaatctttt

SEQ ID NO: 3389 - RNA, 23 nt, synthetic construct
  source 1..23: mol_type = other RNA
agtcacatattaaccaccagttc

SEQ ID NO: 3390 - RNA, 23 nt, synthetic construct
  source 1..23: mol_type = other RNA
aaacaagggcttgaattgcaagg

SEQ ID NO: 3391 - RNA, 23 nt, synthetic construct
  source 1..23: mol_type = other RNA
attgtagatgaggcgtcacttaa

SEQ ID NO: 3392 - RNA, 23 nt, synthetic construct
  source 1..23: mol_type = other RNA
atggaagacaacctgcaaaatca

SEQ ID NO: 3393 - RNA, 23 nt, synthetic construct
  source 1..23: mol_type = other RNA
aggtcaatattgatgttacatat

SEQ ID NO: 3394 - RNA, 23 nt, synthetic construct
  source 1..23: mol_type = other RNA
acttatacatgaatattctttcc

SEQ ID NO: 3395 - RNA, 23 nt, synthetic construct
  source 1..23: mol_type = other RNA
acttcatttgtgttattactttg

SEQ ID NO: 3396 - RNA, 23 nt, synthetic construct
  source 1..23: mol_type = other RNA
aatgttcaagggtcagctgtaga

SEQ ID NO: 3397 - RNA, 23 nt, synthetic construct
  source 1..23: mol_type = other RNA
agtatggccttacttttccatac

SEQ ID NO: 3398 - RNA, 23 nt, synthetic construct
  source 1..23: mol_type = other RNA
aatagatgggccaacaagttcat

SEQ ID NO: 3399 - RNA, 21 nt, synthetic construct
  source 1..21: mol_type = other RNA
  modified_base 1: mod_base = OTHER; note = 2'-O-methylcytidine-3'-phosphorothioate
  modified_base 2: mod_base = OTHER; note = 2'-O-methyluridine-3'-phosphorothioate
  modified_base 3: mod_base = OTHER; note = 2'-O-methyladenosine-3'-phosphate
  modified_base 4: mod_base = OTHER; note = 2'-O-methyluridine-3'-phosphate
  modified_base 5: mod_base = OTHER; note = 2'-O-methyluridine-3'-phosphate
  modified_base 6: mod_base = OTHER; note = 2'-O-docosanyl-uridine-3'-phosphate
  modified_base 7: mod_base = OTHER; note = 2'-deoxy-2'-fluorouridine-3'-phosphate
  modified_base 8: mod_base = OTHER; note = 2'-O-methyluridine-3'-phosphate
  modified_base 9: mod_base = OTHER; note = 2'-deoxy-2'-fluorocytidine-3'-phosphate
  modified_base 10: mod_base = OTHER; note = 2'-deoxy-2'-fluorouridine-3'-phosphate
  modified_base 11: mod_base = OTHER; note = 2'-deoxy-2'-fluorouridine-3'-phosphate
  modified_base 12: mod_base = OTHER; note = 2'-O-methylcytidine-3'-phosphate
  modified_base 13: mod_base = OTHER; note = 2'-O-methylcytidine-3'-phosphate
  modified_base 14: mod_base = OTHER; note = 2'-O-methyluridine-3'-phosphate
  modified_base 15: mod_base = OTHER; note = 2'-O-methylcytidine-3'-phosphate
  modified_base 16: mod_base = OTHER; note = 2'-O-methyluridine-3'-phosphate
  modified_base 17: mod_base = OTHER; note = 2'-O-methyladenosine-3'-phosphate
  modified_base 18: mod_base = OTHER; note = 2'-O-methyluridine-3'-phosphate
  modified_base 19: mod_base = OTHER; note = 2'-O-methylcytidine-3'-phosphate
  modified_base 20: mod_base = OTHER; note = 2'-O-methyladenosine-3'-phosphate
  modified_base 21: mod_base = OTHER; note = 2'-O-methyluridine-3'-phosphate ((2S,4R)-1-[29-[[2-(acetylamino)-2-deoxy-beta-D-galactopyra nosyl]oxy]-14,14-bis[[3-[[3-[[5-[[2-(acetylamino)-2-deoxy-b eta-D-galactopyranosyl]oxy]-1-oxopentyl]amino]propyl]amino] -3-oxopropoxy]methyl]-1,12,19,25-tetraoxo-16-oxa-13,20,24-t riazanonacos-1-yl]-4-hydroxy-2-pyrrolidinyl)methyl ester
ctatttttcttcctctatcat

SEQ ID NO: 3400 - RNA, 21 nt, synthetic construct
  source 1..21: mol_type = other RNA
  modified_base 1: mod_base = OTHER; note = 2'-O-methyluridine-3'-phosphorothioate
  modified_base 2: mod_base = OTHER; note = 2'-O-methyladenosine-3'-phosphorothioate
  modified_base 3: mod_base = OTHER; note = 2'-O-methyluridine-3'-phosphate
  modified_base 4: mod_base = OTHER; note = 2'-O-methylcytidine-3'-phosphate
  modified_base 5: mod_base = OTHER; note = 2'-O-methyladenosine-3'-phosphate
  modified_base 6: mod_base = OTHER; note = 2'-O-docosanyl-adenosine-3'-phosphate
  modified_base 7: mod_base = OTHER; note = 2'-deoxy-2'-fluorouridine-3'-phosphate
  modified_base 8: mod_base = OTHER; note = 2'-O-methyluridine-3'-phosphate
  modified_base 9: mod_base = OTHER; note = 2'-deoxy-2'-fluorouridine-3'-phosphate
  modified_base 10: mod_base = OTHER; note = 2'-deoxy-2'-fluorocytidine-3'-phosphate
  modified_base 11: mod_base = OTHER; note = 2'-deoxy-2'-fluorouridine-3'-phosphate
  modified_base 12: mod_base = OTHER; note = 2'-O-methylguanosine-3'-phosphate
  modified_base 13: mod_base = OTHER; note = 2'-O-methyluridine-3'-phosphate
  modified_base 14: mod_base = OTHER; note = 2'-O-methylcytidine-3'-phosphate
  modified_base 15: mod_base = OTHER; note = 2'-O-methyluridine-3'-phosphate
  modified_base 16: mod_base = OTHER; note = 2'-O-methylcytidine-3'-phosphate
  modified_base 17: mod_base = OTHER; note = 2'-O-methyladenosine-3'-phosphate
  modified_base 18: mod_base = OTHER; note = 2'-O-methyluridine-3'-phosphate
  modified_base 19: mod_base = OTHER; note = 2'-O-methylcytidine-3'-phosphate
  modified_base 20: mod_base = OTHER; note = 2'-O-methyluridine-3'-phosphate
  modified_base 21: mod_base = OTHER; note = 2'-O-methyluridine-3'-phosphate ((2S,4R)-1-[29-[[2-(acetylamino)-2-deoxy-beta-D-galactopyra nosyl]oxy]-14,14-bis[[3-[[3-[[5-[[2-(acetylamino)-2-deoxy-b eta-D-galactopyranosyl]oxy]-1-oxopentyl]amino]propyl]amino] -3-oxopropoxy]methyl]-1,12,19,25-tetraoxo-16-oxa-13,20,24-t riazanonacos-1-yl]-4-hydroxy-2-pyrrolidinyl)methyl ester
tatcaatttctgtctcatctt

SEQ ID NO: 3401 - RNA, 21 nt, synthetic construct
  source 1..21: mol_type = other RNA
  modified_base 1: mod_base = OTHER; note = 2'-O-methyladenosine-3'-phosphorothioate
  modified_base 2: mod_base = OTHER; note = 2'-O-methyladenosine-3'-phosphorothioate
  modified_base 3: mod_base = OTHER; note = 2'-O-methylcytidine-3'-phosphate
  modified_base 4: mod_base = OTHER; note = 2'-O-methyladenosine-3'-phosphate
  modified_base 5: mod_base = OTHER; note = 2'-O-methyluridine-3'-phosphate
  modified_base 6: mod_base = OTHER; note = 2'-O-docosanyl-adenosine-3'-phosphate
  modified_base 7: mod_base = OTHER; note = 2'-deoxy-2'-fluoroadenosine-3'-phosphate
  modified_base 8: mod_base = OTHER; note = 2'-O-methyladenosine-3'-phosphate
  modified_base 9: mod_base = OTHER; note = 2'-deoxy-2'-fluoroadenosine-3'-phosphate
  modified_base 10: mod_base = OTHER; note = 2'-deoxy-2'-fluoroguanosine-3'-phosphate
  modified_base 11: mod_base = OTHER; note = 2'-deoxy-2'-fluorouridine-3'-phosphate
  modified_base 12: mod_base = OTHER; note = 2'-O-methylcytidine-3'-phosphate
  modified_base 13: mod_base = OTHER; note = 2'-O-methyluridine-3'-phosphate
  modified_base 14: mod_base = OTHER; note = 2'-O-methyluridine-3'-phosphate
  modified_base 15: mod_base = OTHER; note = 2'-O-methylcytidine-3'-phosphate
  modified_base 16: mod_base = OTHER; note = 2'-O-methyladenosine-3'-phosphate
  modified_base 17: mod_base = OTHER; note = 2'-O-methyluridine-3'-phosphate
  modified_base 18: mod_base = OTHER; note = 2'-O-methyluridine-3'-phosphate
  modified_base 19: mod_base = OTHER; note = 2'-O-methylcytidine-3'-phosphate
  modified_base 20: mod_base = OTHER; note = 2'-O-methyluridine-3'-phosphate
  modified_base 21: mod_base = OTHER; note = 2'-O-methyluridine-3'-phosphate ((2S,4R)-1-[29-[[2-(acetylamino)-2-deoxy-beta-D-galactopyra nosyl]oxy]-14,14-bis[[3-[[3-[[5-[[2-(acetylamino)-2-deoxy-b eta-D-galactopyranosyl]oxy]-1-oxopentyl]amino]propyl]amino] -3-oxopropoxy]methyl]-1,12,19,25-tetraoxo-16-oxa-13,20,24-t riazanonacos-1-yl]-4-hydroxy-2-pyrrolidinyl)methyl ester
aacataaaagtcttcattctt

SEQ ID NO: 3402 - RNA, 21 nt, synthetic construct
  source 1..21: mol_type = other RNA
  modified_base 1: mod_base = OTHER; note = 2'-O-methyluridine-3'-phosphorothioate
  modified_base 2: mod_base = OTHER; note = 2'-O-methylcytidine-3'-phosphorothioate
  modified_base 3: mod_base = OTHER; note = 2'-O-methyluridine-3'-phosphate
  modified_base 4: mod_base = OTHER; note = 2'-O-methylcytidine-3'-phosphate
  modified_base 5: mod_base = OTHER; note = 2'-O-methyladenosine-3'-phosphate
  modified_base 6: mod_base = OTHER; note = 2'-O-docosanyl-guanosine-3'-phosphate
  modified_base 7: mod_base = OTHER; note = 2'-deoxy-2'-fluorouridine-3'-phosphate
  modified_base 8: mod_base = OTHER; note = 2'-O-methyladenosine-3'-phosphate
  modified_base 9: mod_base = OTHER; note = 2'-deoxy-2'-fluoroadenosine-3'-phosphate
  modified_base 10: mod_base = OTHER; note = 2'-deoxy-2'-fluoroadenosine-3'-phosphate
  modified_base 11: mod_base = OTHER; note = 2'-deoxy-2'-fluorocytidine-3'-phosphate
  modified_base 12: mod_base = OTHER; note = 2'-O-methyladenosine-3'-phosphate
  modified_base 13: mod_base = OTHER; note = 2'-O-methylguanosine-3'-phosphate
  modified_base 14: mod_base = OTHER; note = 2'-O-methyladenosine-3'-phosphate
  modified_base 15: mod_base = OTHER; note = 2'-O-methyladenosine-3'-phosphate
  modified_base 16: mod_base = OTHER; note = 2'-O-methyladenosine-3'-phosphate
  modified_base 17: mod_base = OTHER; note = 2'-O-methyluridine-3'-phosphate
  modified_base 18: mod_base = OTHER; note = 2'-O-methyladenosine-3'-phosphate
  modified_base 19: mod_base = OTHER; note = 2'-O-methyladenosine-3'-phosphate
  modified_base 20: mod_base = OTHER; note = 2'-O-methylcytidine-3'-phosphate
  modified_base 21: mod_base = OTHER; note = 2'-O-methyluridine-3'-phosphate ((2S,4R)-1-[29-[[2-(acetylamino)-2-deoxy-beta-D-galactopyra nosyl]oxy]-14,14-bis[[3-[[3-[[5-[[2-(acetylamino)-2-deoxy-b eta-D-galactopyranosyl]oxy]-1-oxopentyl]amino]propyl]amino] -3-oxopropoxy]methyl]-1,12,19,25-tetraoxo-16-oxa-13,20,24-t riazanonacos-1-yl]-4-hydroxy-2-pyrrolidinyl)methyl ester
tctcagtaaacagaaataact

SEQ ID NO: 3403 - RNA, 21 nt, synthetic construct
  source 1..21: mol_type = other RNA
  modified_base 1: mod_base = OTHER; note = 2'-O-methyladenosine-3'-phosphorothioate
  modified_base 2: mod_base = OTHER; note = 2'-O-methyluridine-3'-phosphorothioate
  modified_base 3: mod_base = OTHER; note = 2'-O-methylcytidine-3'-phosphate
  modified_base 4: mod_base = OTHER; note = 2'-O-methyluridine-3'-phosphate
  modified_base 5: mod_base = OTHER; note = 2'-O-methyluridine-3'-phosphate
  modified_base 6: mod_base = OTHER; note = 2'-O-docosanyl-adenosine-3'-phosphate
  modified_base 7: mod_base = OTHER; note = 2'-deoxy-2'-fluoroadenosine-3'-phosphate
  modified_base 8: mod_base = OTHER; note = 2'-O-methyluridine-3'-phosphate
  modified_base 9: mod_base = OTHER; note = 2'-deoxy-2'-fluoroadenosine-3'-phosphate
  modified_base 10: mod_base = OTHER; note = 2'-deoxy-2'-fluorouridine-3'-phosphate
  modified_base 11: mod_base = OTHER; note = 2'-deoxy-2'-fluoroguanosine-3'-phosphate
  modified_base 12: mod_base = OTHER; note = 2'-O-methyluridine-3'-phosphate
  modified_base 13: mod_base = OTHER; note = 2'-O-methylcytidine-3'-phosphate
  modified_base 14: mod_base = OTHER; note = 2'-O-methyluridine-3'-phosphate
  modified_base 15: mod_base = OTHER; note = 2'-O-methylcytidine-3'-phosphate
  modified_base 16: mod_base = OTHER; note = 2'-O-methyluridine-3'-phosphate
  modified_base 17: mod_base = OTHER; note = 2'-O-methyluridine-3'-phosphate
  modified_base 18: mod_base = OTHER; note = 2'-O-methylguanosine-3'-phosphate
  modified_base 19: mod_base = OTHER; note = 2'-O-methylcytidine-3'-phosphate
  modified_base 20: mod_base = OTHER; note = 2'-O-methyluridine-3'-phosphate
  modified_base 21: mod_base = OTHER; note = 2'-O-methyluridine-3'-phosphate ((2S,4R)-1-[29-[[2-(acetylamino)-2-deoxy-beta-D-galactopyra nosyl]oxy]-14,14-bis[[3-[[3-[[5-[[2-(acetylamino)-2-deoxy-b eta-D-galactopyranosyl]oxy]-1-oxopentyl]amino]propyl]amino] -3-oxopropoxy]methyl]-1,12,19,25-tetraoxo-16-oxa-13,20,24-t riazanonacos-1-yl]-4-hydroxy-2-pyrrolidinyl)methyl ester
atcttaatatgtctcttgctt

SEQ ID NO: 3404 - RNA, 21 nt, synthetic construct
  source 1..21: mol_type = other RNA
  modified_base 1: mod_base = OTHER; note = 2'-O-methylcytidine-3'-phosphorothioate
  modified_base 2: mod_base = OTHER; note = 2'-O-methyladenosine-3'-phosphorothioate
  modified_base 3: mod_base = OTHER; note = 2'-O-methylcytidine-3'-phosphate
  modified_base 4: mod_base = OTHER; note = 2'-O-methyladenosine-3'-phosphate
  modified_base 5: mod_base = OTHER; note = 2'-O-methyladenosine-3'-phosphate
  modified_base 6: mod_base = OTHER; note = 2'-O-docosanyl-adenosine-3'-phosphate
  modified_base 7: mod_base = OTHER; note = 2'-deoxy-2'-fluorouridine-3'-phosphate
  modified_base 8: mod_base = OTHER; note = 2'-O-methyluridine-3'-phosphate
  modified_base 9: mod_base = OTHER; note = 2'-deoxy-2'-fluorouridine-3'-phosphate
  modified_base 10: mod_base = OTHER; note = 2'-deoxy-2'-fluorocytidine-3'-phosphate
  modified_base 11: mod_base = OTHER; note = 2'-deoxy-2'-fluorouridine-3'-phosphate
  modified_base 12: mod_base = OTHER; note = 2'-O-methyladenosine-3'-phosphate
  modified_base 13: mod_base = OTHER; note = 2'-O-methyluridine-3'-phosphate
  modified_base 14: mod_base = OTHER; note = 2'-O-methylcytidine-3'-phosphate
  modified_base 15: mod_base = OTHER; note = 2'-O-methylcytidine-3'-phosphate
  modified_base 16: mod_base = OTHER; note = 2'-O-methylcytidine-3'-phosphate
  modified_base 17: mod_base = OTHER; note = 2'-O-methyladenosine-3'-phosphate
  modified_base 18: mod_base = OTHER; note = 2'-O-methyladenosine-3'-phosphate
  modified_base 19: mod_base = OTHER; note = 2'-O-methyladenosine-3'-phosphate
  modified_base 20: mod_base = OTHER; note = 2'-O-methyluridine-3'-phosphate
  modified_base 21: mod_base = OTHER; note = 2'-O-methyluridine-3'-phosphate ((2S,4R)-1-[29-[[2-(acetylamino)-2-deoxy-beta-D-galactopyra nosyl]oxy]-14,14-bis[[3-[[3-[[5-[[2-(acetylamino)-2-deoxy-b eta-D-galactopyranosyl]oxy]-1-oxopentyl]amino]propyl]amino] -3-oxopropoxy]methyl]-1,12,19,25-tetraoxo-16-oxa-13,20,24-t riazanonacos-1-yl]-4-hydroxy-2-pyrrolidinyl)methyl ester
cacaaatttctatcccaaatt

SEQ ID NO: 3405 - RNA, 21 nt, synthetic construct
  source 1..21: mol_type = other RNA
  modified_base 1: mod_base = OTHER; note = 2'-O-methylcytidine-3'-phosphorothioate
  modified_base 2: mod_base = OTHER; note = 2'-O-methyluridine-3'-phosphorothioate
  modified_base 3: mod_base = OTHER; note = 2'-O-methyluridine-3'-phosphate
  modified_base 4: mod_base = OTHER; note = 2'-O-methylcytidine-3'-phosphate
  modified_base 5: mod_base = OTHER; note = 2'-O-methylcytidine-3'-phosphate
  modified_base 6: mod_base = OTHER; note = 2'-O-docosanyl-adenosine-3'-phosphate
  modified_base 7: mod_base = OTHER; note = 2'-deoxy-2'-fluoroadenosine-3'-phosphate
  modified_base 8: mod_base = OTHER; note = 2'-O-methyluridine-3'-phosphate
  modified_base 9: mod_base = OTHER; note = 2'-deoxy-2'-fluoroadenosine-3'-phosphate
  modified_base 10: mod_base = OTHER; note = 2'-deoxy-2'-fluoroadenosine-3'-phosphate
  modified_base 11: mod_base = OTHER; note = 2'-deoxy-2'-fluorocytidine-3'-phosphate
  modified_base 12: mod_base = OTHER; note = 2'-O-methyluridine-3'-phosphate
  modified_base 13: mod_base = OTHER; note = 2'-O-methylcytidine-3'-phosphate
  modified_base 14: mod_base = OTHER; note = 2'-O-methyladenosine-3'-phosphate
  modified_base 15: mod_base = OTHER; note = 2'-O-methyluridine-3'-phosphate
  modified_base 16: mod_base = OTHER; note = 2'-O-methyladenosine-3'-phosphate
  modified_base 17: mod_base = OTHER; note = 2'-O-methyladenosine-3'-phosphate
  modified_base 18: mod_base = OTHER; note = 2'-O-methyladenosine-3'-phosphate
  modified_base 19: mod_base = OTHER; note = 2'-O-methyladenosine-3'-phosphate
  modified_base 20: mod_base = OTHER; note = 2'-O-methylcytidine-3'-phosphate
  modified_base 21: mod_base = OTHER; note = 2'-O-methyluridine-3'-phosphate ((2S,4R)-1-[29-[[2-(acetylamino)-2-deoxy-beta-D-galactopyra nosyl]oxy]-14,14-bis[[3-[[3-[[5-[[2-(acetylamino)-2-deoxy-b eta-D-galactopyranosyl]oxy]-1-oxopentyl]amino]propyl]amino] -3-oxopropoxy]methyl]-1,12,19,25-tetraoxo-16-oxa-13,20,24-t riazanonacos-1-yl]-4-hydroxy-2-pyrrolidinyl)methyl ester
cttccaataactcataaaact

SEQ ID NO: 3406 - RNA, 21 nt, synthetic construct
  source 1..21: mol_type = other RNA
  modified_base 1: mod_base = OTHER; note = 2'-O-methyluridine-3'-phosphorothioate
  modified_base 2: mod_base = OTHER; note = 2'-O-methyladenosine-3'-phosphorothioate
  modified_base 3: mod_base = OTHER; note = 2'-O-methyluridine-3'-phosphate
  modified_base 4: mod_base = OTHER; note = 2'-O-methylcytidine-3'-phosphate
  modified_base 5: mod_base = OTHER; note = 2'-O-methyladenosine-3'-phosphate
  modified_base 6: mod_base = OTHER; note = 2'-O-docosanyl-guanosine-3'-phosphate
  modified_base 7: mod_base = OTHER; note = 2'-deoxy-2'-fluoroadenosine-3'-phosphate
  modified_base 8: mod_base = OTHER; note = 2'-O-methyladenosine-3'-phosphate
  modified_base 9: mod_base = OTHER; note = 2'-deoxy-2'-fluorouridine-3'-phosphate
  modified_base 10: mod_base = OTHER; note = 2'-deoxy-2'-fluorocytidine-3'-phosphate
  modified_base 11: mod_base = OTHER; note = 2'-deoxy-2'-fluorouridine-3'-phosphate
  modified_base 12: mod_base = OTHER; note = 2'-O-methyladenosine-3'-phosphate
  modified_base 13: mod_base = OTHER; note = 2'-O-methylcytidine-3'-phosphate
  modified_base 14: mod_base = OTHER; note = 2'-O-methyladenosine-3'-phosphate
  modified_base 15: mod_base = OTHER; note = 2'-O-methyluridine-3'-phosphate
  modified_base 16: mod_base = OTHER; note = 2'-O-methyluridine-3'-phosphate
  modified_base 17: mod_base = OTHER; note = 2'-O-methylcytidine-3'-phosphate
  modified_base 18: mod_base = OTHER; note = 2'-O-methyluridine-3'-phosphate
  modified_base 19: mod_base = OTHER; note = 2'-O-methyladenosine-3'-phosphate
  modified_base 20: mod_base = OTHER; note = 2'-O-methyladenosine-3'-phosphate
  modified_base 21: mod_base = OTHER; note = 2'-O-methyluridine-3'-phosphate ((2S,4R)-1-[29-[[2-(acetylamino)-2-deoxy-beta-D-galactopyra nosyl]oxy]-14,14-bis[[3-[[3-[[5-[[2-(acetylamino)-2-deoxy-b eta-D-galactopyranosyl]oxy]-1-oxopentyl]amino]propyl]amino] -3-oxopropoxy]methyl]-1,12,19,25-tetraoxo-16-oxa-13,20,24-t riazanonacos-1-yl]-4-hydroxy-2-pyrrolidinyl)methyl ester
tatcagaatctacattctaat

SEQ ID NO: 3407 - RNA, 21 nt, synthetic construct
  source 1..21: mol_type = other RNA
  modified_base 1: mod_base = OTHER; note = 2'-O-methyluridine-3'-phosphorothioate
  modified_base 2: mod_base = OTHER; note = 2'-O-methyladenosine-3'-phosphorothioate
  modified_base 3: mod_base = OTHER; note = 2'-O-methyluridine-3'-phosphate
  modified_base 4: mod_base = OTHER; note = 2'-O-methylguanosine-3'-phosphate
  modified_base 5: mod_base = OTHER; note = 2'-O-methyladenosine-3'-phosphate
  modified_base 6: mod_base = OTHER; note = 2'-O-docosanyl-adenosine-3'-phosphate
  modified_base 7: mod_base = OTHER; note = 2'-deoxy-2'-fluorouridine-3'-phosphate
  modified_base 8: mod_base = OTHER; note = 2'-O-methyluridine-3'-phosphate
  modified_base 9: mod_base = OTHER; note = 2'-deoxy-2'-fluorocytidine-3'-phosphate
  modified_base 10: mod_base = OTHER; note = 2'-deoxy-2'-fluorouridine-3'-phosphate
  modified_base 11: mod_base = OTHER; note = 2'-deoxy-2'-fluorocytidine-3'-phosphate
  modified_base 12: mod_base = OTHER; note = 2'-O-methyluridine-3'-phosphate
  modified_base 13: mod_base = OTHER; note = 2'-O-methylcytidine-3'-phosphate
  modified_base 14: mod_base = OTHER; note = 2'-O-methyluridine-3'-phosphate
  modified_base 15: mod_base = OTHER; note = 2'-O-methylcytidine-3'-phosphate
  modified_base 16: mod_base = OTHER; note = 2'-O-methylcytidine-3'-phosphate
  modified_base 17: mod_base = OTHER; note = 2'-O-methyladenosine-3'-phosphate
  modified_base 18: mod_base = OTHER; note = 2'-O-methyladenosine-3'-phosphate
  modified_base 19: mod_base = OTHER; note = 2'-O-methyladenosine-3'-phosphate
  modified_base 20: mod_base = OTHER; note = 2'-O-methyluridine-3'-phosphate
  modified_base 21: mod_base = OTHER; note = 2'-O-methyluridine-3'-phosphate ((2S,4R)-1-[29-[[2-(acetylamino)-2-deoxy-beta-D-galactopyra nosyl]oxy]-14,14-bis[[3-[[3-[[5-[[2-(acetylamino)-2-deoxy-b eta-D-galactopyranosyl]oxy]-1-oxopentyl]amino]propyl]amino] -3-oxopropoxy]methyl]-1,12,19,25-tetraoxo-16-oxa-13,20,24-t riazanonacos-1-yl]-4-hydroxy-2-pyrrolidinyl)methyl ester
tatgaattctctctccaaatt

SEQ ID NO: 3408 - RNA, 21 nt, synthetic construct
  source 1..21: mol_type = other RNA
  modified_base 1: mod_base = OTHER; note = 2'-O-methyluridine-3'-phosphorothioate
  modified_base 2: mod_base = OTHER; note = 2'-O-methyladenosine-3'-phosphorothioate
  modified_base 3: mod_base = OTHER; note = 2'-O-methyladenosine-3'-phosphate
  modified_base 4: mod_base = OTHER; note = 2'-O-methylcytidine-3'-phosphate
  modified_base 5: mod_base = OTHER; note = 2'-O-methyladenosine-3'-phosphate
  modified_base 6: mod_base = OTHER; note = 2'-O-docosanyl-adenosine-3'-phosphate
  modified_base 7: mod_base = OTHER; note = 2'-deoxy-2'-fluorocytidine-3'-phosphate
  modified_base 8: mod_base = OTHER; note = 2'-O-methyladenosine-3'-phosphate
  modified_base 9: mod_base = OTHER; note = 2'-deoxy-2'-fluoroguanosine-3'-phosphate
  modified_base 10: mod_base = OTHER; note = 2'-deoxy-2'-fluoroadenosine-3'-phosphate
  modified_base 11: mod_base = OTHER; note = 2'-deoxy-2'-fluoroadenosine-3'-phosphate
  modified_base 12: mod_base = OTHER; note = 2'-O-methyluridine-3'-phosphate
  modified_base 13: mod_base = OTHER; note = 2'-O-methylcytidine-3'-phosphate
  modified_base 14: mod_base = OTHER; note = 2'-O-methyluridine-3'-phosphate
  modified_base 15: mod_base = OTHER; note = 2'-O-methyladenosine-3'-phosphate
  modified_base 16: mod_base = OTHER; note = 2'-O-methyladenosine-3'-phosphate
  modified_base 17: mod_base = OTHER; note = 2'-O-methyluridine-3'-phosphate
  modified_base 18: mod_base = OTHER; note = 2'-O-methylcytidine-3'-phosphate
  modified_base 19: mod_base = OTHER; note = 2'-O-methyluridine-3'-phosphate
  modified_base 20: mod_base = OTHER; note = 2'-O-methyluridine-3'-phosphate
  modified_base 21: mod_base = OTHER; note = 2'-O-methyluridine-3'-phosphate ((2S,4R)-1-[29-[[2-(acetylamino)-2-deoxy-beta-D-galactopyra nosyl]oxy]-14,14-bis[[3-[[3-[[5-[[2-(acetylamino)-2-deoxy-b eta-D-galactopyranosyl]oxy]-1-oxopentyl]amino]propyl]amino] -3-oxopropoxy]methyl]-1,12,19,25-tetraoxo-16-oxa-13,20,24-t riazanonacos-1-yl]-4-hydroxy-2-pyrrolidinyl)methyl ester
taacaacagaatctaatcttt

SEQ ID NO: 3409 - RNA, 21 nt, synthetic construct
  source 1..21: mol_type = other RNA
  modified_base 1: mod_base = OTHER; note = 2'-O-methylcytidine-3'-phosphorothioate
  modified_base 2: mod_base = OTHER; note = 2'-O-methylcytidine-3'-phosphorothioate
  modified_base 3: mod_base = OTHER; note = 2'-O-methyluridine-3'-phosphate
  modified_base 4: mod_base = OTHER; note = 2'-O-methylcytidine-3'-phosphate
  modified_base 5: mod_base = OTHER; note = 2'-O-methyladenosine-3'-phosphate
  modified_base 6: mod_base = OTHER; note = 2'-O-docosanyl-cytidine-3'-phosphate
  modified_base 7: mod_base = OTHER; note = 2'-deoxy-2'-fluoroadenosine-3'-phosphate
  modified_base 8: mod_base = OTHER; note = 2'-O-methyluridine-3'-phosphate
  modified_base 9: mod_base = OTHER; note = 2'-deoxy-2'-fluorocytidine-3'-phosphate
  modified_base 10: mod_base = OTHER; note = 2'-deoxy-2'-fluorouridine-3'-phosphate
  modified_base 11: mod_base = OTHER; note = 2'-deoxy-2'-fluoroguanosine-3'-phosphate
  modified_base 12: mod_base = OTHER; note = 2'-O-methyluridine-3'-phosphate
  modified_base 13: mod_base = OTHER; note = 2'-O-methyluridine-3'-phosphate
  modified_base 14: mod_base = OTHER; note = 2'-O-methyladenosine-3'-phosphate
  modified_base 15: mod_base = OTHER; note = 2'-O-methyluridine-3'-phosphate
  modified_base 16: mod_base = OTHER; note = 2'-O-methylcytidine-3'-phosphate
  modified_base 17: mod_base = OTHER; note = 2'-O-methyluridine-3'-phosphate
  modified_base 18: mod_base = OTHER; note = 2'-O-methyluridine-3'-phosphate
  modified_base 19: mod_base = OTHER; note = 2'-O-methyladenosine-3'-phosphate
  modified_base 20: mod_base = OTHER; note = 2'-O-methyluridine-3'-phosphate
  modified_base 21: mod_base = OTHER; note = 2'-O-methyluridine-3'-phosphate ((2S,4R)-1-[29-[[2-(acetylamino)-2-deoxy-beta-D-galactopyra nosyl]oxy]-14,14-bis[[3-[[3-[[5-[[2-(acetylamino)-2-deoxy-b eta-D-galactopyranosyl]oxy]-1-oxopentyl]amino]propyl]amino] -3-oxopropoxy]methyl]-1,12,19,25-tetraoxo-16-oxa-13,20,24-t riazanonacos-1-yl]-4-hydroxy-2-pyrrolidinyl)methyl ester
cctcacatctgttatcttatt

SEQ ID NO: 3410 - RNA, 21 nt, synthetic construct
  source 1..21: mol_type = other RNA
  modified_base 1: mod_base = OTHER; note = 2'-O-methylcytidine-3'-phosphorothioate
  modified_base 2: mod_base = OTHER; note = 2'-O-methyladenosine-3'-phosphorothioate
  modified_base 3: mod_base = OTHER; note = 2'-O-methylcytidine-3'-phosphate
  modified_base 4: mod_base = OTHER; note = 2'-O-methyluridine-3'-phosphate
  modified_base 5: mod_base = OTHER; note = 2'-O-methyluridine-3'-phosphate
  modified_base 6: mod_base = OTHER; note = 2'-O-docosanyl-adenosine-3'-phosphate
  modified_base 7: mod_base = OTHER; note = 2'-deoxy-2'-fluoroadenosine-3'-phosphate
  modified_base 8: mod_base = OTHER; note = 2'-O-methyladenosine-3'-phosphate
  modified_base 9: mod_base = OTHER; note = 2'-deoxy-2'-fluoroadenosine-3'-phosphate
  modified_base 10: mod_base = OTHER; note = 2'-deoxy-2'-fluorocytidine-3'-phosphate
  modified_base 11: mod_base = OTHER; note = 2'-deoxy-2'-fluorouridine-3'-phosphate
  modified_base 12: mod_base = OTHER; note = 2'-O-methyluridine-3'-phosphate
  modified_base 13: mod_base = OTHER; note = 2'-O-methylcytidine-3'-phosphate
  modified_base 14: mod_base = OTHER; note = 2'-O-methyladenosine-3'-phosphate
  modified_base 15: mod_base = OTHER; note = 2'-O-methylguanosine-3'-phosphate
  modified_base 16: mod_base = OTHER; note = 2'-O-methyladenosine-3'-phosphate
  modified_base 17: mod_base = OTHER; note = 2'-O-methylcytidine-3'-phosphate
  modified_base 18: mod_base = OTHER; note = 2'-O-methyluridine-3'-phosphate
  modified_base 19: mod_base = OTHER; note = 2'-O-methyluridine-3'-phosphate
  modified_base 20: mod_base = OTHER; note = 2'-O-methylcytidine-3'-phosphate
  modified_base 21: mod_base = OTHER; note = 2'-O-methyluridine-3'-phosphate ((2S,4R)-1-[29-[[2-(acetylamino)-2-deoxy-beta-D-galactopyra nosyl]oxy]-14,14-bis[[3-[[3-[[5-[[2-(acetylamino)-2-deoxy-b eta-D-galactopyranosyl]oxy]-1-oxopentyl]amino]propyl]amino] -3-oxopropoxy]methyl]-1,12,19,25-tetraoxo-16-oxa-13,20,24-t riazanonacos-1-yl]-4-hydroxy-2-pyrrolidinyl)methyl ester
cacttaaaacttcagacttct

SEQ ID NO: 3411 - RNA, 21 nt, synthetic construct
  source 1..21: mol_type = other RNA
  modified_base 1: mod_base = OTHER; note = 2'-O-methylcytidine-3'-phosphorothioate
  modified_base 2: mod_base = OTHER; note = 2'-O-methyladenosine-3'-phosphorothioate
  modified_base 3: mod_base = OTHER; note = 2'-O-methyluridine-3'-phosphate
  modified_base 4: mod_base = OTHER; note = 2'-O-methyluridine-3'-phosphate
  modified_base 5: mod_base = OTHER; note = 2'-O-methylcytidine-3'-phosphate
  modified_base 6: mod_base = OTHER; note = 2'-O-docosanyl-uridine-3'-phosphate
  modified_base 7: mod_base = OTHER; note = 2'-deoxy-2'-fluorocytidine-3'-phosphate
  modified_base 8: mod_base = OTHER; note = 2'-O-methyladenosine-3'-phosphate
  modified_base 9: mod_base = OTHER; note = 2'-deoxy-2'-fluorouridine-3'-phosphate
  modified_base 10: mod_base = OTHER; note = 2'-deoxy-2'-fluorouridine-3'-phosphate
  modified_base 11: mod_base = OTHER; note = 2'-deoxy-2'-fluoroguanosine-3'-phosphate
  modified_base 12: mod_base = OTHER; note = 2'-O-methyluridine-3'-phosphate
  modified_base 13: mod_base = OTHER; note = 2'-O-methylcytidine-3'-phosphate
  modified_base 14: mod_base = OTHER; note = 2'-O-methyluridine-3'-phosphate
  modified_base 15: mod_base = OTHER; note = 2'-O-methyluridine-3'-phosphate
  modified_base 16: mod_base = OTHER; note = 2'-O-methylcytidine-3'-phosphate
  modified_base 17: mod_base = OTHER; note = 2'-O-methyladenosine-3'-phosphate
  modified_base 18: mod_base = OTHER; note = 2'-O-methylcytidine-3'-phosphate
  modified_base 19: mod_base = OTHER; note = 2'-O-methyladenosine-3'-phosphate
  modified_base 20: mod_base = OTHER; note = 2'-O-methyluridine-3'-phosphate
  modified_base 21: mod_base = OTHER; note = 2'-O-methyluridine-3'-phosphate ((2S,4R)-1-[29-[[2-(acetylamino)-2-deoxy-beta-D-galactopyra nosyl]oxy]-14,14-bis[[3-[[3-[[5-[[2-(acetylamino)-2-deoxy-b eta-D-galactopyranosyl]oxy]-1-oxopentyl]amino]propyl]amino] -3-oxopropoxy]methyl]-1,12,19,25-tetraoxo-16-oxa-13,20,24-t riazanonacos-1-yl]-4-hydroxy-2-pyrrolidinyl)methyl ester
cattctcattgtcttcacatt

SEQ ID NO: 3412 - RNA, 21 nt, synthetic construct
  source 1..21: mol_type = other RNA
  modified_base 1: mod_base = OTHER; note = 2'-O-methylguanosine-3'-phosphorothioate
  modified_base 2: mod_base = OTHER; note = 2'-O-methyladenosine-3'-phosphorothioate
  modified_base 3: mod_base = OTHER; note = 2'-O-methylcytidine-3'-phosphate
  modified_base 4: mod_base = OTHER; note = 2'-O-methylcytidine-3'-phosphate
  modified_base 5: mod_base = OTHER; note = 2'-O-methyladenosine-3'-phosphate
  modified_base 6: mod_base = OTHER; note = 2'-O-docosanyl-uridine-3'-phosphate
  modified_base 7: mod_base = OTHER; note = 2'-deoxy-2'-fluorouridine-3'-phosphate
  modified_base 8: mod_base = OTHER; note = 2'-O-methyluridine-3'-phosphate
  modified_base 9: mod_base = OTHER; note = 2'-deoxy-2'-fluorocytidine-3'-phosphate
  modified_base 10: mod_base = OTHER; note = 2'-deoxy-2'-fluoroadenosine-3'-phosphate
  modified_base 11: mod_base = OTHER; note = 2'-deoxy-2'-fluoroguanosine-3'-phosphate
  modified_base 12: mod_base = OTHER; note = 2'-O-methyladenosine-3'-phosphate
  modified_base 13: mod_base = OTHER; note = 2'-O-methyladenosine-3'-phosphate
  modified_base 14: mod_base = OTHER; note = 2'-O-methylcytidine-3'-phosphate
  modified_base 15: mod_base = OTHER; note = 2'-O-methyladenosine-3'-phosphate
  modified_base 16: mod_base = OTHER; note = 2'-O-methyluridine-3'-phosphate
  modified_base 17: mod_base = OTHER; note = 2'-O-methylcytidine-3'-phosphate
  modified_base 18: mod_base = OTHER; note = 2'-O-methyluridine-3'-phosphate
  modified_base 19: mod_base = OTHER; note = 2'-O-methyluridine-3'-phosphate
  modified_base 20: mod_base = OTHER; note = 2'-O-methylcytidine-3'-phosphate
  modified_base 21: mod_base = OTHER; note = 2'-O-methyluridine-3'-phosphate ((2S,4R)-1-[29-[[2-(acetylamino)-2-deoxy-beta-D-galactopyra nosyl]oxy]-14,14-bis[[3-[[3-[[5-[[2-(acetylamino)-2-deoxy-b eta-D-galactopyranosyl]oxy]-1-oxopentyl]amino]propyl]amino] -3-oxopropoxy]methyl]-1,12,19,25-tetraoxo-16-oxa-13,20,24-t riazanonacos-1-yl]-4-hydroxy-2-pyrrolidinyl)methyl ester
gaccatttcagaacatcttct

SEQ ID NO: 3413 - RNA, 21 nt, synthetic construct
  source 1..21: mol_type = other RNA
  modified_base 1: mod_base = OTHER; note = 2'-O-methylcytidine-3'-phosphorothioate
  modified_base 2: mod_base = OTHER; note = 2'-O-methylcytidine-3'-phosphorothioate
  modified_base 3: mod_base = OTHER; note = 2'-O-methyluridine-3'-phosphate
  modified_base 4: mod_base = OTHER; note = 2'-O-methyluridine-3'-phosphate
  modified_base 5: mod_base = OTHER; note = 2'-O-methyladenosine-3'-phosphate
  modified_base 6: mod_base = OTHER; note = 2'-O-docosanyl-cytidine-3'-phosphate
  modified_base 7: mod_base = OTHER; note = 2'-deoxy-2'-fluorouridine-3'-phosphate
  modified_base 8: mod_base = OTHER; note = 2'-O-methylguanosine-3'-phosphate
  modified_base 9: mod_base = OTHER; note = 2'-deoxy-2'-fluoroadenosine-3'-phosphate
  modified_base 10: mod_base = OTHER; note = 2'-deoxy-2'-fluorouridine-3'-phosphate
  modified_base 11: mod_base = OTHER; note = 2'-deoxy-2'-fluoroadenosine-3'-phosphate
  modified_base 12: mod_base = OTHER; note = 2'-O-methyladenosine-3'-phosphate
  modified_base 13: mod_base = OTHER; note = 2'-O-methylcytidine-3'-phosphate
  modified_base 14: mod_base = OTHER; note = 2'-O-methyladenosine-3'-phosphate
  modified_base 15: mod_base = OTHER; note = 2'-O-methyluridine-3'-phosphate
  modified_base 16: mod_base = OTHER; note = 2'-O-methyladenosine-3'-phosphate
  modified_base 17: mod_base = OTHER; note = 2'-O-methyladenosine-3'-phosphate
  modified_base 18: mod_base = OTHER; note = 2'-O-methyladenosine-3'-phosphate
  modified_base 19: mod_base = OTHER; note = 2'-O-methylcytidine-3'-phosphate
  modified_base 20: mod_base = OTHER; note = 2'-O-methyladenosine-3'-phosphate
  modified_base 21: mod_base = OTHER; note = 2'-O-methyluridine-3'-phosphate ((2S,4R)-1-[29-[[2-(acetylamino)-2-deoxy-beta-D-galactopyra nosyl]oxy]-14,14-bis[[3-[[3-[[5-[[2-(acetylamino)-2-deoxy-b eta-D-galactopyranosyl]oxy]-1-oxopentyl]amino]propyl]amino] -3-oxopropoxy]methyl]-1,12,19,25-tetraoxo-16-oxa-13,20,24-t riazanonacos-1-yl]-4-hydroxy-2-pyrrolidinyl)methyl ester
ccttactgataacataaacat

SEQ ID NO: 3414 - RNA, 21 nt, synthetic construct
  source 1..21: mol_type = other RNA
  modified_base 1: mod_base = OTHER; note = 2'-O-methyluridine-3'-phosphorothioate
  modified_base 2: mod_base = OTHER; note = 2'-O-methylcytidine-3'-phosphorothioate
  modified_base 3: mod_base = OTHER; note = 2'-O-methyluridine-3'-phosphate
  modified_base 4: mod_base = OTHER; note = 2'-O-methylcytidine-3'-phosphate
  modified_base 5: mod_base = OTHER; note = 2'-O-methyluridine-3'-phosphate
  modified_base 6: mod_base = OTHER; note = 2'-O-docosanyl-guanosine-3'-phosphate
  modified_base 7: mod_base = OTHER; note = 2'-deoxy-2'-fluoroadenosine-3'-phosphate
  modified_base 8: mod_base = OTHER; note = 2'-O-methyladenosine-3'-phosphate
  modified_base 9: mod_base = OTHER; note = 2'-deoxy-2'-fluoroguanosine-3'-phosphate
  modified_base 10: mod_base = OTHER; note = 2'-deoxy-2'-fluorouridine-3'-phosphate
  modified_base 11: mod_base = OTHER; note = 2'-deoxy-2'-fluorouridine-3'-phosphate
  modified_base 12: mod_base = OTHER; note = 2'-O-methylcytidine-3'-phosphate
  modified_base 13: mod_base = OTHER; note = 2'-O-methyluridine-3'-phosphate
  modified_base 14: mod_base = OTHER; note = 2'-O-methylguanosine-3'-phosphate
  modified_base 15: mod_base = OTHER; note = 2'-O-methylcytidine-3'-phosphate
  modified_base 16: mod_base = OTHER; note = 2'-O-methyluridine-3'-phosphate
  modified_base 17: mod_base = OTHER; note = 2'-O-methyladenosine-3'-phosphate
  modified_base 18: mod_base = OTHER; note = 2'-O-methylcytidine-3'-phosphate
  modified_base 19: mod_base = OTHER; note = 2'-O-methyladenosine-3'-phosphate
  modified_base 20: mod_base = OTHER; note = 2'-O-methyladenosine-3'-phosphate
  modified_base 21: mod_base = OTHER; note = 2'-O-methyluridine-3'-phosphate ((2S,4R)-1-[29-[[2-(acetylamino)-2-deoxy-beta-D-galactopyra nosyl]oxy]-14,14-bis[[3-[[3-[[5-[[2-(acetylamino)-2-deoxy-b eta-D-galactopyranosyl]oxy]-1-oxopentyl]amino]propyl]amino] -3-oxopropoxy]methyl]-1,12,19,25-tetraoxo-16-oxa-13,20,24-t riazanonacos-1-yl]-4-hydroxy-2-pyrrolidinyl)methyl ester
tctctgaagttctgctacaat

SEQ ID NO: 3415 - RNA, 21 nt, synthetic construct
  source 1..21: mol_type = other RNA
  modified_base 1: mod_base = OTHER; note = 2'-O-methylcytidine-3'-phosphorothioate
  modified_base 2: mod_base = OTHER; note = 2'-O-methyluridine-3'-phosphorothioate
  modified_base 3: mod_base = OTHER; note = 2'-O-methyladenosine-3'-phosphate
  modified_base 4: mod_base = OTHER; note = 2'-O-methylcytidine-3'-phosphate
  modified_base 5: mod_base = OTHER; note = 2'-O-methyladenosine-3'-phosphate
  modified_base 6: mod_base = OTHER; note = 2'-O-docosanyl-guanosine-3'-phosphate
  modified_base 7: mod_base = OTHER; note = 2'-deoxy-2'-fluoroadenosine-3'-phosphate
  modified_base 8: mod_base = OTHER; note = 2'-O-methyladenosine-3'-phosphate
  modified_base 9: mod_base = OTHER; note = 2'-deoxy-2'-fluorouridine-3'-phosphate
  modified_base 10: mod_base = OTHER; note = 2'-deoxy-2'-fluorocytidine-3'-phosphate
  modified_base 11: mod_base = OTHER; note = 2'-deoxy-2'-fluorouridine-3'-phosphate
  modified_base 12: mod_base = OTHER; note = 2'-O-methyladenosine-3'-phosphate
  modified_base 13: mod_base = OTHER; note = 2'-O-methyluridine-3'-phosphate
  modified_base 14: mod_base = OTHER; note = 2'-O-methyluridine-3'-phosphate
  modified_base 15: mod_base = OTHER; note = 2'-O-methyluridine-3'-phosphate
  modified_base 16: mod_base = OTHER; note = 2'-O-methyladenosine-3'-phosphate
  modified_base 17: mod_base = OTHER; note = 2'-O-methyluridine-3'-phosphate
  modified_base 18: mod_base = OTHER; note = 2'-O-methylcytidine-3'-phosphate
  modified_base 19: mod_base = OTHER; note = 2'-O-methyladenosine-3'-phosphate
  modified_base 20: mod_base = OTHER; note = 2'-O-methyladenosine-3'-phosphate
  modified_base 21: mod_base = OTHER; note = 2'-O-methyluridine-3'-phosphate ((2S,4R)-1-[29-[[2-(acetylamino)-2-deoxy-beta-D-galactopyra nosyl]oxy]-14,14-bis[[3-[[3-[[5-[[2-(acetylamino)-2-deoxy-b eta-D-galactopyranosyl]oxy]-1-oxopentyl]amino]propyl]amino] -3-oxopropoxy]methyl]-1,12,19,25-tetraoxo-16-oxa-13,20,24-t riazanonacos-1-yl]-4-hydroxy-2-pyrrolidinyl)methyl ester
ctacagaatctatttatcaat

SEQ ID NO: 3416 - RNA, 21 nt, synthetic construct
  source 1..21: mol_type = other RNA
  modified_base 1: mod_base = OTHER; note = 2'-O-methyluridine-3'-phosphorothioate
  modified_base 2: mod_base = OTHER; note = 2'-O-methyladenosine-3'-phosphorothioate
  modified_base 3: mod_base = OTHER; note = 2'-O-methyladenosine-3'-phosphate
  modified_base 4: mod_base = OTHER; note = 2'-O-methylguanosine-3'-phosphate
  modified_base 5: mod_base = OTHER; note = 2'-O-methyladenosine-3'-phosphate
  modified_base 6: mod_base = OTHER; note = 2'-O-docosanyl-cytidine-3'-phosphate
  modified_base 7: mod_base = OTHER; note = 2'-deoxy-2'-fluorouridine-3'-phosphate
  modified_base 8: mod_base = OTHER; note = 2'-O-methyluridine-3'-phosphate
  modified_base 9: mod_base = OTHER; note = 2'-deoxy-2'-fluorocytidine-3'-phosphate
  modified_base 10: mod_base = OTHER; note = 2'-deoxy-2'-fluoroadenosine-3'-phosphate
  modified_base 11: mod_base = OTHER; note = 2'-deoxy-2'-fluoroguanosine-3'-phosphate
  modified_base 12: mod_base = OTHER; note = 2'-O-methyladenosine-3'-phosphate
  modified_base 13: mod_base = OTHER; note = 2'-O-methyladenosine-3'-phosphate
  modified_base 14: mod_base = OTHER; note = 2'-O-methyluridine-3'-phosphate
  modified_base 15: mod_base = OTHER; note = 2'-O-methylguanosine-3'-phosphate
  modified_base 16: mod_base = OTHER; note = 2'-O-methyladenosine-3'-phosphate
  modified_base 17: mod_base = OTHER; note = 2'-O-methyluridine-3'-phosphate
  modified_base 18: mod_base = OTHER; note = 2'-O-methyluridine-3'-phosphate
  modified_base 19: mod_base = OTHER; note = 2'-O-methyluridine-3'-phosphate
  modified_base 20: mod_base = OTHER; note = 2'-O-methyluridine-3'-phosphate
  modified_base 21: mod_base = OTHER; note = 2'-O-methyluridine-3'-phosphate ((2S,4R)-1-[29-[[2-(acetylamino)-2-deoxy-beta-D-galactopyra nosyl]oxy]-14,14-bis[[3-[[3-[[5-[[2-(acetylamino)-2-deoxy-b eta-D-galactopyranosyl]oxy]-1-oxopentyl]amino]propyl]amino] -3-oxopropoxy]methyl]-1,12,19,25-tetraoxo-16-oxa-13,20,24-t riazanonacos-1-yl]-4-hydroxy-2-pyrrolidinyl)methyl ester
taagacttcagaatgattttt

SEQ ID NO: 3417 - RNA, 21 nt, synthetic construct
  source 1..21: mol_type = other RNA
  modified_base 1: mod_base = OTHER; note = 2'-O-methyladenosine-3'-phosphorothioate
  modified_base 2: mod_base = OTHER; note = 2'-O-methyladenosine-3'-phosphorothioate
  modified_base 3: mod_base = OTHER; note = 2'-O-methylguanosine-3'-phosphate
  modified_base 4: mod_base = OTHER; note = 2'-O-methyluridine-3'-phosphate
  modified_base 5: mod_base = OTHER; note = 2'-O-methyladenosine-3'-phosphate
  modified_base 6: mod_base = OTHER; note = 2'-O-docosanyl-uridine-3'-phosphate
  modified_base 7: mod_base = OTHER; note = 2'-deoxy-2'-fluorouridine-3'-phosphate
  modified_base 8: mod_base = OTHER; note = 2'-O-methyluridine-3'-phosphate
  modified_base 9: mod_base = OTHER; note = 2'-deoxy-2'-fluorouridine-3'-phosphate
  modified_base 10: mod_base = OTHER; note = 2'-deoxy-2'-fluorouridine-3'-phosphate
  modified_base 11: mod_base = OTHER; note = 2'-deoxy-2'-fluorocytidine-3'-phosphate
  modified_base 12: mod_base = OTHER; note = 2'-O-methyladenosine-3'-phosphate
  modified_base 13: mod_base = OTHER; note = 2'-O-methylguanosine-3'-phosphate
  modified_base 14: mod_base = OTHER; note = 2'-O-methylguanosine-3'-phosphate
  modified_base 15: mod_base = OTHER; note = 2'-O-methyluridine-3'-phosphate
  modified_base 16: mod_base = OTHER; note = 2'-O-methylcytidine-3'-phosphate
  modified_base 17: mod_base = OTHER; note = 2'-O-methyluridine-3'-phosphate
  modified_base 18: mod_base = OTHER; note = 2'-O-methyluridine-3'-phosphate
  modified_base 19: mod_base = OTHER; note = 2'-O-methylcytidine-3'-phosphate
  modified_base 20: mod_base = OTHER; note = 2'-O-methyladenosine-3'-phosphate
  modified_base 21: mod_base = OTHER; note = 2'-O-methyluridine-3'-phosphate ((2S,4R)-1-[29-[[2-(acetylamino)-2-deoxy-beta-D-galactopyra nosyl]oxy]-14,14-bis[[3-[[3-[[5-[[2-(acetylamino)-2-deoxy-b eta-D-galactopyranosyl]oxy]-1-oxopentyl]amino]propyl]amino] -3-oxopropoxy]methyl]-1,12,19,25-tetraoxo-16-oxa-13,20,24-t riazanonacos-1-yl]-4-hydroxy-2-pyrrolidinyl)methyl ester
aagtatttttcaggtcttcat

SEQ ID NO: 3418 - RNA, 21 nt, synthetic construct
  source 1..21: mol_type = other RNA
  modified_base 1: mod_base = OTHER; note = 2'-O-methyladenosine-3'-phosphorothioate
  modified_base 2: mod_base = OTHER; note = 2'-O-methylcytidine-3'-phosphorothioate
  modified_base 3: mod_base = OTHER; note = 2'-O-methyluridine-3'-phosphate
  modified_base 4: mod_base = OTHER; note = 2'-O-methylguanosine-3'-phosphate
  modified_base 5: mod_base = OTHER; note = 2'-O-methyluridine-3'-phosphate
  modified_base 6: mod_base = OTHER; note = 2'-O-docosanyl-uridine-3'-phosphate
  modified_base 7: mod_base = OTHER; note = 2'-deoxy-2'-fluoroguanosine-3'-phosphate
  modified_base 8: mod_base = OTHER; note = 2'-O-methyladenosine-3'-phosphate
  modified_base 9: mod_base = OTHER; note = 2'-deoxy-2'-fluorouridine-3'-phosphate
  modified_base 10: mod_base = OTHER; note = 2'-deoxy-2'-fluorouridine-3'-phosphate
  modified_base 11: mod_base = OTHER; note = 2'-deoxy-2'-fluorouridine-3'-phosphate
  modified_base 12: mod_base = OTHER; note = 2'-O-methylcytidine-3'-phosphate
  modified_base 13: mod_base = OTHER; note = 2'-O-methylcytidine-3'-phosphate
  modified_base 14: mod_base = OTHER; note = 2'-O-methyluridine-3'-phosphate
  modified_base 15: mod_base = OTHER; note = 2'-O-methylcytidine-3'-phosphate
  modified_base 16: mod_base = OTHER; note = 2'-O-methyladenosine-3'-phosphate
  modified_base 17: mod_base = OTHER; note = 2'-O-methyladenosine-3'-phosphate
  modified_base 18: mod_base = OTHER; note = 2'-O-methylcytidine-3'-phosphate
  modified_base 19: mod_base = OTHER; note = 2'-O-methyladenosine-3'-phosphate
  modified_base 20: mod_base = OTHER; note = 2'-O-methyluridine-3'-phosphate
  modified_base 21: mod_base = OTHER; note = 2'-O-methyluridine-3'-phosphate ((2S,4R)-1-[29-[[2-(acetylamino)-2-deoxy-beta-D-galactopyra nosyl]oxy]-14,14-bis[[3-[[3-[[5-[[2-(acetylamino)-2-deoxy-b eta-D-galactopyranosyl]oxy]-1-oxopentyl]amino]propyl]amino] -3-oxopropoxy]methyl]-1,12,19,25-tetraoxo-16-oxa-13,20,24-t riazanonacos-1-yl]-4-hydroxy-2-pyrrolidinyl)methyl ester
actgttgatttcctcaacatt

SEQ ID NO: 3419 - RNA, 21 nt, synthetic construct
  source 1..21: mol_type = other RNA
  modified_base 1: mod_base = OTHER; note = 2'-O-methylcytidine-3'-phosphorothioate
  modified_base 2: mod_base = OTHER; note = 2'-O-methylcytidine-3'-phosphorothioate
  modified_base 3: mod_base = OTHER; note = 2'-O-methyluridine-3'-phosphate
  modified_base 4: mod_base = OTHER; note = 2'-O-methyladenosine-3'-phosphate
  modified_base 5: mod_base = OTHER; note = 2'-O-methyluridine-3'-phosphate
  modified_base 6: mod_base = OTHER; note = 2'-O-docosanyl-adenosine-3'-phosphate
  modified_base 7: mod_base = OTHER; note = 2'-deoxy-2'-fluorocytidine-3'-phosphate
  modified_base 8: mod_base = OTHER; note = 2'-O-methyluridine-3'-phosphate
  modified_base 9: mod_base = OTHER; note = 2'-deoxy-2'-fluoroguanosine-3'-phosphate
  modified_base 10: mod_base = OTHER; note = 2'-deoxy-2'-fluorocytidine-3'-phosphate
  modified_base 11: mod_base = OTHER; note = 2'-deoxy-2'-fluoroadenosine-3'-phosphate
  modified_base 12: mod_base = OTHER; note = 2'-O-methyluridine-3'-phosphate
  modified_base 13: mod_base = OTHER; note = 2'-O-methyladenosine-3'-phosphate
  modified_base 14: mod_base = OTHER; note = 2'-O-methyladenosine-3'-phosphate
  modified_base 15: mod_base = OTHER; note = 2'-O-methyluridine-3'-phosphate
  modified_base 16: mod_base = OTHER; note = 2'-O-methylcytidine-3'-phosphate
  modified_base 17: mod_base = OTHER; note = 2'-O-methylcytidine-3'-phosphate
  modified_base 18: mod_base = OTHER; note = 2'-O-methyladenosine-3'-phosphate
  modified_base 19: mod_base = OTHER; note = 2'-O-methyladenosine-3'-phosphate
  modified_base 20: mod_base = OTHER; note = 2'-O-methylcytidine-3'-phosphate
  modified_base 21: mod_base = OTHER; note = 2'-O-methyluridine-3'-phosphate ((2S,4R)-1-[29-[[2-(acetylamino)-2-deoxy-beta-D-galactopyra nosyl]oxy]-14,14-bis[[3-[[3-[[5-[[2-(acetylamino)-2-deoxy-b eta-D-galactopyranosyl]oxy]-1-oxopentyl]amino]propyl]amino] -3-oxopropoxy]methyl]-1,12,19,25-tetraoxo-16-oxa-13,20,24-t riazanonacos-1-yl]-4-hydroxy-2-pyrrolidinyl)methyl ester
cctatactgcataatccaact

SEQ ID NO: 3420 - RNA, 21 nt, synthetic construct
  source 1..21: mol_type = other RNA
  modified_base 1: mod_base = OTHER; note = 2'-O-methylcytidine-3'-phosphorothioate
  modified_base 2: mod_base = OTHER; note = 2'-O-methyluridine-3'-phosphorothioate
  modified_base 3: mod_base = OTHER; note = 2'-O-methylguanosine-3'-phosphate
  modified_base 4: mod_base = OTHER; note = 2'-O-methyluridine-3'-phosphate
  modified_base 5: mod_base = OTHER; note = 2'-O-methyluridine-3'-phosphate
  modified_base 6: mod_base = OTHER; note = 2'-O-docosanyl-cytidine-3'-phosphate
  modified_base 7: mod_base = OTHER; note = 2'-deoxy-2'-fluorouridine-3'-phosphate
  modified_base 8: mod_base = OTHER; note = 2'-O-methyladenosine-3'-phosphate
  modified_base 9: mod_base = OTHER; note = 2'-deoxy-2'-fluoroadenosine-3'-phosphate
  modified_base 10: mod_base = OTHER; note = 2'-deoxy-2'-fluoroguanosine-3'-phosphate
  modified_base 11: mod_base = OTHER; note = 2'-deoxy-2'-fluoroadenosine-3'-phosphate
  modified_base 12: mod_base = OTHER; note = 2'-O-methylcytidine-3'-phosphate
  modified_base 13: mod_base = OTHER; note = 2'-O-methyladenosine-3'-phosphate
  modified_base 14: mod_base = OTHER; note = 2'-O-methyluridine-3'-phosphate
  modified_base 15: mod_base = OTHER; note = 2'-O-methyladenosine-3'-phosphate
  modified_base 16: mod_base = OTHER; note = 2'-O-methyluridine-3'-phosphate
  modified_base 17: mod_base = OTHER; note = 2'-O-methylguanosine-3'-phosphate
  modified_base 18: mod_base = OTHER; note = 2'-O-methyladenosine-3'-phosphate
  modified_base 19: mod_base = OTHER; note = 2'-O-methyluridine-3'-phosphate
  modified_base 20: mod_base = OTHER; note = 2'-O-methylcytidine-3'-phosphate
  modified_base 21: mod_base = OTHER; note = 2'-O-methyluridine-3'-phosphate ((2S,4R)-1-[29-[[2-(acetylamino)-2-deoxy-beta-D-galactopyra nosyl]oxy]-14,14-bis[[3-[[3-[[5-[[2-(acetylamino)-2-deoxy-b eta-D-galactopyranosyl]oxy]-1-oxopentyl]amino]propyl]amino] -3-oxopropoxy]methyl]-1,12,19,25-tetraoxo-16-oxa-13,20,24-t riazanonacos-1-yl]-4-hydroxy-2-pyrrolidinyl)methyl ester
ctgttctaagacatatgatct

SEQ ID NO: 3421 - RNA, 21 nt, synthetic construct
  source 1..21: mol_type = other RNA
  modified_base 1: mod_base = OTHER; note = 2'-O-methyluridine-3'-phosphorothioate
  modified_base 2: mod_base = OTHER; note = 2'-O-methylcytidine-3'-phosphorothioate
  modified_base 3: mod_base = OTHER; note = 2'-O-methyluridine-3'-phosphate
  modified_base 4: mod_base = OTHER; note = 2'-O-methyladenosine-3'-phosphate
  modified_base 5: mod_base = OTHER; note = 2'-O-methylcytidine-3'-phosphate
  modified_base 6: mod_base = OTHER; note = 2'-O-docosanyl-uridine-3'-phosphate
  modified_base 7: mod_base = OTHER; note = 2'-deoxy-2'-fluoroadenosine-3'-phosphate
  modified_base 8: mod_base = OTHER; note = 2'-O-methyluridine-3'-phosphate
  modified_base 9: mod_base = OTHER; note = 2'-deoxy-2'-fluoroadenosine-3'-phosphate
  modified_base 10: mod_base = OTHER; note = 2'-deoxy-2'-fluoroguanosine-3'-phosphate
  modified_base 11: mod_base = OTHER; note = 2'-deoxy-2'-fluoroadenosine-3'-phosphate
  modified_base 12: mod_base = OTHER; note = 2'-O-methyladenosine-3'-phosphate
  modified_base 13: mod_base = OTHER; note = 2'-O-methyluridine-3'-phosphate
  modified_base 14: mod_base = OTHER; note = 2'-O-methyladenosine-3'-phosphate
  modified_base 15: mod_base = OTHER; note = 2'-O-methyladenosine-3'-phosphate
  modified_base 16: mod_base = OTHER; note = 2'-O-methylguanosine-3'-phosphate
  modified_base 17: mod_base = OTHER; note = 2'-O-methyluridine-3'-phosphate
  modified_base 18: mod_base = OTHER; note = 2'-O-methyluridine-3'-phosphate
  modified_base 19: mod_base = OTHER; note = 2'-O-methylcytidine-3'-phosphate
  modified_base 20: mod_base = OTHER; note = 2'-O-methyluridine-3'-phosphate
  modified_base 21: mod_base = OTHER; note = 2'-O-methyluridine-3'-phosphate ((2S,4R)-1-[29-[[2-(acetylamino)-2-deoxy-beta-D-galactopyra nosyl]oxy]-14,14-bis[[3-[[3-[[5-[[2-(acetylamino)-2-deoxy-b eta-D-galactopyranosyl]oxy]-1-oxopentyl]amino]propyl]amino] -3-oxopropoxy]methyl]-1,12,19,25-tetraoxo-16-oxa-13,20,24-t riazanonacos-1-yl]-4-hydroxy-2-pyrrolidinyl)methyl ester
tctactatagaataagttctt

SEQ ID NO: 3422 - RNA, 21 nt, synthetic construct
  source 1..21: mol_type = other RNA
  modified_base 1: mod_base = OTHER; note = 2'-O-methyladenosine-3'-phosphorothioate
  modified_base 2: mod_base = OTHER; note = 2'-O-methyluridine-3'-phosphorothioate
  modified_base 3: mod_base = OTHER; note = 2'-O-methylguanosine-3'-phosphate
  modified_base 4: mod_base = OTHER; note = 2'-O-methylcytidine-3'-phosphate
  modified_base 5: mod_base = OTHER; note = 2'-O-methyluridine-3'-phosphate
  modified_base 6: mod_base = OTHER; note = 2'-O-docosanyl-cytidine-3'-phosphate
  modified_base 7: mod_base = OTHER; note = 2'-deoxy-2'-fluoroadenosine-3'-phosphate
  modified_base 8: mod_base = OTHER; note = 2'-O-methyladenosine-3'-phosphate
  modified_base 9: mod_base = OTHER; note = 2'-deoxy-2'-fluoroadenosine-3'-phosphate
  modified_base 10: mod_base = OTHER; note = 2'-deoxy-2'-fluorouridine-3'-phosphate
  modified_base 11: mod_base = OTHER; note = 2'-deoxy-2'-fluoroadenosine-3'-phosphate
  modified_base 12: mod_base = OTHER; note = 2'-O-methyluridine-3'-phosphate
  modified_base 13: mod_base = OTHER; note = 2'-O-methylguanosine-3'-phosphate
  modified_base 14: mod_base = OTHER; note = 2'-O-methyluridine-3'-phosphate
  modified_base 15: mod_base = OTHER; note = 2'-O-methyluridine-3'-phosphate
  modified_base 16: mod_base = OTHER; note = 2'-O-methylcytidine-3'-phosphate
  modified_base 17: mod_base = OTHER; note = 2'-O-methyluridine-3'-phosphate
  modified_base 18: mod_base = OTHER; note = 2'-O-methyladenosine-3'-phosphate
  modified_base 19: mod_base = OTHER; note = 2'-O-methylcytidine-3'-phosphate
  modified_base 20: mod_base = OTHER; note = 2'-O-methyluridine-3'-phosphate
  modified_base 21: mod_base = OTHER; note = 2'-O-methyluridine-3'-phosphate ((2S,4R)-1-[29-[[2-(acetylamino)-2-deoxy-beta-D-galactopyra nosyl]oxy]-14,14-bis[[3-[[3-[[5-[[2-(acetylamino)-2-deoxy-b eta-D-galactopyranosyl]oxy]-1-oxopentyl]amino]propyl]amino] -3-oxopropoxy]methyl]-1,12,19,25-tetraoxo-16-oxa-13,20,24-t riazanonacos-1-yl]-4-hydroxy-2-pyrrolidinyl)methyl ester
atgctcaaatatgttctactt

SEQ ID NO: 3423 - RNA, 21 nt, synthetic construct
  source 1..21: mol_type = other RNA
  modified_base 1: mod_base = OTHER; note = 2'-O-methyluridine-3'-phosphorothioate
  modified_base 2: mod_base = OTHER; note = 2'-O-methyluridine-3'-phosphorothioate
  modified_base 3: mod_base = OTHER; note = 2'-O-methylcytidine-3'-phosphate
  modified_base 4: mod_base = OTHER; note = 2'-O-methyluridine-3'-phosphate
  modified_base 5: mod_base = OTHER; note = 2'-O-methyladenosine-3'-phosphate
  modified_base 6: mod_base = OTHER; note = 2'-O-docosanyl-adenosine-3'-phosphate
  modified_base 7: mod_base = OTHER; note = 2'-deoxy-2'-fluoroadenosine-3'-phosphate
  modified_base 8: mod_base = OTHER; note = 2'-O-methyladenosine-3'-phosphate
  modified_base 9: mod_base = OTHER; note = 2'-deoxy-2'-fluorocytidine-3'-phosphate
  modified_base 10: mod_base = OTHER; note = 2'-deoxy-2'-fluoroadenosine-3'-phosphate
  modified_base 11: mod_base = OTHER; note = 2'-deoxy-2'-fluorouridine-3'-phosphate
  modified_base 12: mod_base = OTHER; note = 2'-O-methylguanosine-3'-phosphate
  modified_base 13: mod_base = OTHER; note = 2'-O-methylguanosine-3'-phosphate
  modified_base 14: mod_base = OTHER; note = 2'-O-methyluridine-3'-phosphate
  modified_base 15: mod_base = OTHER; note = 2'-O-methyluridine-3'-phosphate
  modified_base 16: mod_base = OTHER; note = 2'-O-methyladenosine-3'-phosphate
  modified_base 17: mod_base = OTHER; note = 2'-O-methylcytidine-3'-phosphate
  modified_base 18: mod_base = OTHER; note = 2'-O-methyluridine-3'-phosphate
  modified_base 19: mod_base = OTHER; note = 2'-O-methyladenosine-3'-phosphate
  modified_base 20: mod_base = OTHER; note = 2'-O-methyladenosine-3'-phosphate
  modified_base 21: mod_base = OTHER; note = 2'-O-methyluridine-3'-phosphate ((2S,4R)-1-[29-[[2-(acetylamino)-2-deoxy-beta-D-galactopyra nosyl]oxy]-14,14-bis[[3-[[3-[[5-[[2-(acetylamino)-2-deoxy-b eta-D-galactopyranosyl]oxy]-1-oxopentyl]amino]propyl]amino] -3-oxopropoxy]methyl]-1,12,19,25-tetraoxo-16-oxa-13,20,24-t riazanonacos-1-yl]-4-hydroxy-2-pyrrolidinyl)methyl ester
ttctaaaacatggttactaat

SEQ ID NO: 3424 - RNA, 21 nt, synthetic construct
  source 1..21: mol_type = other RNA
  modified_base 1: mod_base = OTHER; note = 2'-O-methylguanosine-3'-phosphorothioate
  modified_base 2: mod_base = OTHER; note = 2'-O-methylguanosine-3'-phosphorothioate
  modified_base 3: mod_base = OTHER; note = 2'-O-methyladenosine-3'-phosphate
  modified_base 4: mod_base = OTHER; note = 2'-O-methyladenosine-3'-phosphate
  modified_base 5: mod_base = OTHER; note = 2'-O-methyladenosine-3'-phosphate
  modified_base 6: mod_base = OTHER; note = 2'-O-docosanyl-adenosine-3'-phosphate
  modified_base 7: mod_base = OTHER; note = 2'-deoxy-2'-fluorouridine-3'-phosphate
  modified_base 8: mod_base = OTHER; note = 2'-O-methyladenosine-3'-phosphate
  modified_base 9: mod_base = OTHER; note = 2'-deoxy-2'-fluorouridine-3'-phosphate
  modified_base 10: mod_base = OTHER; note = 2'-deoxy-2'-fluoroadenosine-3'-phosphate
  modified_base 11: mod_base = OTHER; note = 2'-deoxy-2'-fluorouridine-3'-phosphate
  modified_base 12: mod_base = OTHER; note = 2'-O-methyluridine-3'-phosphate
  modified_base 13: mod_base = OTHER; note = 2'-O-methylcytidine-3'-phosphate
  modified_base 14: mod_base = OTHER; note = 2'-O-methyladenosine-3'-phosphate
  modified_base 15: mod_base = OTHER; note = 2'-O-methylcytidine-3'-phosphate
  modified_base 16: mod_base = OTHER; note = 2'-O-methylcytidine-3'-phosphate
  modified_base 17: mod_base = OTHER; note = 2'-O-methyladenosine-3'-phosphate
  modified_base 18: mod_base = OTHER; note = 2'-O-methyladenosine-3'-phosphate
  modified_base 19: mod_base = OTHER; note = 2'-O-methyladenosine-3'-phosphate
  modified_base 20: mod_base = OTHER; note = 2'-O-methylcytidine-3'-phosphate
  modified_base 21: mod_base = OTHER; note = 2'-O-methyluridine-3'-phosphate ((2S,4R)-1-[29-[[2-(acetylamino)-2-deoxy-beta-D-galactopyra nosyl]oxy]-14,14-bis[[3-[[3-[[5-[[2-(acetylamino)-2-deoxy-b eta-D-galactopyranosyl]oxy]-1-oxopentyl]amino]propyl]amino] -3-oxopropoxy]methyl]-1,12,19,25-tetraoxo-16-oxa-13,20,24-t riazanonacos-1-yl]-4-hydroxy-2-pyrrolidinyl)methyl ester
ggaaaatatattcaccaaact

SEQ ID NO: 3425 - RNA, 21 nt, synthetic construct
  source 1..21: mol_type = other RNA
  modified_base 1: mod_base = OTHER; note = 2'-O-methylcytidine-3'-phosphorothioate
  modified_base 2: mod_base = OTHER; note = 2'-O-methyladenosine-3'-phosphorothioate
  modified_base 3: mod_base = OTHER; note = 2'-O-methyladenosine-3'-phosphate
  modified_base 4: mod_base = OTHER; note = 2'-O-methyladenosine-3'-phosphate
  modified_base 5: mod_base = OTHER; note = 2'-O-methyladenosine-3'-phosphate
  modified_base 6: mod_base = OTHER; note = 2'-O-docosanyl-uridine-3'-phosphate
  modified_base 7: mod_base = OTHER; note = 2'-deoxy-2'-fluorocytidine-3'-phosphate
  modified_base 8: mod_base = OTHER; note = 2'-O-methyluridine-3'-phosphate
  modified_base 9: mod_base = OTHER; note = 2'-deoxy-2'-fluorouridine-3'-phosphate
  modified_base 10: mod_base = OTHER; note = 2'-deoxy-2'-fluoroadenosine-3'-phosphate
  modified_base 11: mod_base = OTHER; note = 2'-deoxy-2'-fluoroadenosine-3'-phosphate
  modified_base 12: mod_base = OTHER; note = 2'-O-methylcytidine-3'-phosphate
  modified_base 13: mod_base = OTHER; note = 2'-O-methyluridine-3'-phosphate
  modified_base 14: mod_base = OTHER; note = 2'-O-methyladenosine-3'-phosphate
  modified_base 15: mod_base = OTHER; note = 2'-O-methylcytidine-3'-phosphate
  modified_base 16: mod_base = OTHER; note = 2'-O-methylcytidine-3'-phosphate
  modified_base 17: mod_base = OTHER; note = 2'-O-methyluridine-3'-phosphate
  modified_base 18: mod_base = OTHER; note = 2'-O-methyladenosine-3'-phosphate
  modified_base 19: mod_base = OTHER; note = 2'-O-methyladenosine-3'-phosphate
  modified_base 20: mod_base = OTHER; note = 2'-O-methyluridine-3'-phosphate
  modified_base 21: mod_base = OTHER; note = 2'-O-methyluridine-3'-phosphate ((2S,4R)-1-[29-[[2-(acetylamino)-2-deoxy-beta-D-galactopyra nosyl]oxy]-14,14-bis[[3-[[3-[[5-[[2-(acetylamino)-2-deoxy-b eta-D-galactopyranosyl]oxy]-1-oxopentyl]amino]propyl]amino] -3-oxopropoxy]methyl]-1,12,19,25-tetraoxo-16-oxa-13,20,24-t riazanonacos-1-yl]-4-hydroxy-2-pyrrolidinyl)methyl ester
caaaatcttaactacctaatt

SEQ ID NO: 3426 - RNA, 21 nt, synthetic construct
  source 1..21: mol_type = other RNA
  modified_base 1: mod_base = OTHER; note = 2'-O-methyluridine-3'-phosphorothioate
  modified_base 2: mod_base = OTHER; note = 2'-O-methyluridine-3'-phosphorothioate
  modified_base 3: mod_base = OTHER; note = 2'-O-methyluridine-3'-phosphate
  modified_base 4: mod_base = OTHER; note = 2'-O-methyluridine-3'-phosphate
  modified_base 5: mod_base = OTHER; note = 2'-O-methylcytidine-3'-phosphate
  modified_base 6: mod_base = OTHER; note = 2'-O-docosanyl-adenosine-3'-phosphate
  modified_base 7: mod_base = OTHER; note = 2'-deoxy-2'-fluoroadenosine-3'-phosphate
  modified_base 8: mod_base = OTHER; note = 2'-O-methyluridine-3'-phosphate
  modified_base 9: mod_base = OTHER; note = 2'-deoxy-2'-fluorouridine-3'-phosphate
  modified_base 10: mod_base = OTHER; note = 2'-deoxy-2'-fluorouridine-3'-phosphate
  modified_base 11: mod_base = OTHER; note = 2'-deoxy-2'-fluorocytidine-3'-phosphate
  modified_base 12: mod_base = OTHER; note = 2'-O-methyluridine-3'-phosphate
  modified_base 13: mod_base = OTHER; note = 2'-O-methylcytidine-3'-phosphate
  modified_base 14: mod_base = OTHER; note = 2'-O-methylcytidine-3'-phosphate
  modified_base 15: mod_base = OTHER; note = 2'-O-methyluridine-3'-phosphate
  modified_base 16: mod_base = OTHER; note = 2'-O-methylcytidine-3'-phosphate
  modified_base 17: mod_base = OTHER; note = 2'-O-methyluridine-3'-phosphate
  modified_base 18: mod_base = OTHER; note = 2'-O-methylguanosine-3'-phosphate
  modified_base 19: mod_base = OTHER; note = 2'-O-methyladenosine-3'-phosphate
  modified_base 20: mod_base = OTHER; note = 2'-O-methylcytidine-3'-phosphate
  modified_base 21: mod_base = OTHER; note = 2'-O-methyluridine-3'-phosphate ((2S,4R)-1-[29-[[2-(acetylamino)-2-deoxy-beta-D-galactopyra nosyl]oxy]-14,14-bis[[3-[[3-[[5-[[2-(acetylamino)-2-deoxy-b eta-D-galactopyranosyl]oxy]-1-oxopentyl]amino]propyl]amino] -3-oxopropoxy]methyl]-1,12,19,25-tetraoxo-16-oxa-13,20,24-t riazanonacos-1-yl]-4-hydroxy-2-pyrrolidinyl)methyl ester
ttttcaatttctcctctgact

SEQ ID NO: 3427 - RNA, 21 nt, synthetic construct
  source 1..21: mol_type = other RNA
  modified_base 1: mod_base = OTHER; note = 2'-O-methyluridine-3'-phosphorothioate
  modified_base 2: mod_base = OTHER; note = 2'-O-methylcytidine-3'-phosphorothioate
  modified_base 3: mod_base = OTHER; note = 2'-O-methyluridine-3'-phosphate
  modified_base 4: mod_base = OTHER; note = 2'-O-methyluridine-3'-phosphate
  modified_base 5: mod_base = OTHER; note = 2'-O-methyluridine-3'-phosphate
  modified_base 6: mod_base = OTHER; note = 2'-O-docosanyl-cytidine-3'-phosphate
  modified_base 7: mod_base = OTHER; note = 2'-deoxy-2'-fluorouridine-3'-phosphate
  modified_base 8: mod_base = OTHER; note = 2'-O-methylcytidine-3'-phosphate
  modified_base 9: mod_base = OTHER; note = 2'-deoxy-2'-fluorouridine-3'-phosphate
  modified_base 10: mod_base = OTHER; note = 2'-deoxy-2'-fluorocytidine-3'-phosphate
  modified_base 11: mod_base = OTHER; note = 2'-deoxy-2'-fluoroguanosine-3'-phosphate
  modified_base 12: mod_base = OTHER; note = 2'-O-methyladenosine-3'-phosphate
  modified_base 13: mod_base = OTHER; note = 2'-O-methylcytidine-3'-phosphate
  modified_base 14: mod_base = OTHER; note = 2'-O-methylcytidine-3'-phosphate
  modified_base 15: mod_base = OTHER; note = 2'-O-methyladenosine-3'-phosphate
  modified_base 16: mod_base = OTHER; note = 2'-O-methylcytidine-3'-phosphate
  modified_base 17: mod_base = OTHER; note = 2'-O-methyluridine-3'-phosphate
  modified_base 18: mod_base = OTHER; note = 2'-O-methyluridine-3'-phosphate
  modified_base 19: mod_base = OTHER; note = 2'-O-methyladenosine-3'-phosphate
  modified_base 20: mod_base = OTHER; note = 2'-O-methyladenosine-3'-phosphate
  modified_base 21: mod_base = OTHER; note = 2'-O-methyluridine-3'-phosphate ((2S,4R)-1-[29-[[2-(acetylamino)-2-deoxy-beta-D-galactopyra nosyl]oxy]-14,14-bis[[3-[[3-[[5-[[2-(acetylamino)-2-deoxy-b eta-D-galactopyranosyl]oxy]-1-oxopentyl]amino]propyl]amino] -3-oxopropoxy]methyl]-1,12,19,25-tetraoxo-16-oxa-13,20,24-t riazanonacos-1-yl]-4-hydroxy-2-pyrrolidinyl)methyl ester
tctttctctcgaccacttaat

SEQ ID NO: 3428 - RNA, 21 nt, synthetic construct
  source 1..21: mol_type = other RNA
  modified_base 1: mod_base = OTHER; note = 2'-O-methylguanosine-3'-phosphorothioate
  modified_base 2: mod_base = OTHER; note = 2'-O-methylcytidine-3'-phosphorothioate
  modified_base 3: mod_base = OTHER; note = 2'-O-methyluridine-3'-phosphate
  modified_base 4: mod_base = OTHER; note = 2'-O-methyluridine-3'-phosphate
  modified_base 5: mod_base = OTHER; note = 2'-O-methyladenosine-3'-phosphate
  modified_base 6: mod_base = OTHER; note = 2'-O-docosanyl-cytidine-3'-phosphate
  modified_base 7: mod_base = OTHER; note = 2'-deoxy-2'-fluorocytidine-3'-phosphate
  modified_base 8: mod_base = OTHER; note = 2'-O-methyladenosine-3'-phosphate
  modified_base 9: mod_base = OTHER; note = 2'-deoxy-2'-fluorouridine-3'-phosphate
  modified_base 10: mod_base = OTHER; note = 2'-deoxy-2'-fluoroadenosine-3'-phosphate
  modified_base 11: mod_base = OTHER; note = 2'-deoxy-2'-fluorocytidine-3'-phosphate
  modified_base 12: mod_base = OTHER; note = 2'-O-methyluridine-3'-phosphate
  modified_base 13: mod_base = OTHER; note = 2'-O-methyladenosine-3'-phosphate
  modified_base 14: mod_base = OTHER; note = 2'-O-methyluridine-3'-phosphate
  modified_base 15: mod_base = OTHER; note = 2'-O-methyladenosine-3'-phosphate
  modified_base 16: mod_base = OTHER; note = 2'-O-methyluridine-3'-phosphate
  modified_base 17: mod_base = OTHER; note = 2'-O-methylcytidine-3'-phosphate
  modified_base 18: mod_base = OTHER; note = 2'-O-methyluridine-3'-phosphate
  modified_base 19: mod_base = OTHER; note = 2'-O-methyluridine-3'-phosphate
  modified_base 20: mod_base = OTHER; note = 2'-O-methyluridine-3'-phosphate
  modified_base 21: mod_base = OTHER; note = 2'-O-methyluridine-3'-phosphate ((2S,4R)-1-[29-[[2-(acetylamino)-2-deoxy-beta-D-galactopyra nosyl]oxy]-14,14-bis[[3-[[3-[[5-[[2-(acetylamino)-2-deoxy-b eta-D-galactopyranosyl]oxy]-1-oxopentyl]amino]propyl]amino] -3-oxopropoxy]methyl]-1,12,19,25-tetraoxo-16-oxa-13,20,24-t riazanonacos-1-yl]-4-hydroxy-2-pyrrolidinyl)methyl ester
gcttaccatactatatctttt

SEQ ID NO: 3429 - RNA, 21 nt, synthetic construct
  source 1..21: mol_type = other RNA
  modified_base 1: mod_base = OTHER; note = 2'-O-methyluridine-3'-phosphorothioate
  modified_base 2: mod_base = OTHER; note = 2'-O-methyluridine-3'-phosphorothioate
  modified_base 3: mod_base = OTHER; note = 2'-O-methylcytidine-3'-phosphate
  modified_base 4: mod_base = OTHER; note = 2'-O-methyladenosine-3'-phosphate
  modified_base 5: mod_base = OTHER; note = 2'-O-methylcytidine-3'-phosphate
  modified_base 6: mod_base = OTHER; note = 2'-O-docosanyl-cytidine-3'-phosphate
  modified_base 7: mod_base = OTHER; note = 2'-deoxy-2'-fluoroadenosine-3'-phosphate
  modified_base 8: mod_base = OTHER; note = 2'-O-methyladenosine-3'-phosphate
  modified_base 9: mod_base = OTHER; note = 2'-deoxy-2'-fluoroguanosine-3'-phosphate
  modified_base 10: mod_base = OTHER; note = 2'-deoxy-2'-fluorouridine-3'-phosphate
  modified_base 11: mod_base = OTHER; note = 2'-deoxy-2'-fluoroadenosine-3'-phosphate
  modified_base 12: mod_base = OTHER; note = 2'-O-methyluridine-3'-phosphate
  modified_base 13: mod_base = OTHER; note = 2'-O-methylcytidine-3'-phosphate
  modified_base 14: mod_base = OTHER; note = 2'-O-methyladenosine-3'-phosphate
  modified_base 15: mod_base = OTHER; note = 2'-O-methyladenosine-3'-phosphate
  modified_base 16: mod_base = OTHER; note = 2'-O-methyladenosine-3'-phosphate
  modified_base 17: mod_base = OTHER; note = 2'-O-methylguanosine-3'-phosphate
  modified_base 18: mod_base = OTHER; note = 2'-O-methyluridine-3'-phosphate
  modified_base 19: mod_base = OTHER; note = 2'-O-methyladenosine-3'-phosphate
  modified_base 20: mod_base = OTHER; note = 2'-O-methyladenosine-3'-phosphate
  modified_base 21: mod_base = OTHER; note = 2'-O-methyluridine-3'-phosphate ((2S,4R)-1-[29-[[2-(acetylamino)-2-deoxy-beta-D-galactopyra nosyl]oxy]-14,14-bis[[3-[[3-[[5-[[2-(acetylamino)-2-deoxy-b eta-D-galactopyranosyl]oxy]-1-oxopentyl]amino]propyl]amino] -3-oxopropoxy]methyl]-1,12,19,25-tetraoxo-16-oxa-13,20,24-t riazanonacos-1-yl]-4-hydroxy-2-pyrrolidinyl)methyl ester
ttcaccaagtatcaaagtaat

SEQ ID NO: 3430 - RNA, 21 nt, synthetic construct
  source 1..21: mol_type = other RNA
  modified_base 1: mod_base = OTHER; note = 2'-O-methylcytidine-3'-phosphorothioate
  modified_base 2: mod_base = OTHER; note = 2'-O-methyladenosine-3'-phosphorothioate
  modified_base 3: mod_base = OTHER; note = 2'-O-methyluridine-3'-phosphate
  modified_base 4: mod_base = OTHER; note = 2'-O-methylcytidine-3'-phosphate
  modified_base 5: mod_base = OTHER; note = 2'-O-methyladenosine-3'-phosphate
  modified_base 6: mod_base = OTHER; note = 2'-O-docosanyl-guanosine-3'-phosphate
  modified_base 7: mod_base = OTHER; note = 2'-deoxy-2'-fluorocytidine-3'-phosphate
  modified_base 8: mod_base = OTHER; note = 2'-O-methyluridine-3'-phosphate
  modified_base 9: mod_base = OTHER; note = 2'-deoxy-2'-fluorouridine-3'-phosphate
  modified_base 10: mod_base = OTHER; note = 2'-deoxy-2'-fluoroadenosine-3'-phosphate
  modified_base 11: mod_base = OTHER; note = 2'-deoxy-2'-fluoroadenosine-3'-phosphate
  modified_base 12: mod_base = OTHER; note = 2'-O-methyladenosine-3'-phosphate
  modified_base 13: mod_base = OTHER; note = 2'-O-methyladenosine-3'-phosphate
  modified_base 14: mod_base = OTHER; note = 2'-O-methyluridine-3'-phosphate
  modified_base 15: mod_base = OTHER; note = 2'-O-methylcytidine-3'-phosphate
  modified_base 16: mod_base = OTHER; note = 2'-O-methyluridine-3'-phosphate
  modified_base 17: mod_base = OTHER; note = 2'-O-methylguanosine-3'-phosphate
  modified_base 18: mod_base = OTHER; note = 2'-O-methyluridine-3'-phosphate
  modified_base 19: mod_base = OTHER; note = 2'-O-methylcytidine-3'-phosphate
  modified_base 20: mod_base = OTHER; note = 2'-O-methyladenosine-3'-phosphate
  modified_base 21: mod_base = OTHER; note = 2'-O-methyluridine-3'-phosphate ((2S,4R)-1-[29-[[2-(acetylamino)-2-deoxy-beta-D-galactopyra nosyl]oxy]-14,14-bis[[3-[[3-[[5-[[2-(acetylamino)-2-deoxy-b eta-D-galactopyranosyl]oxy]-1-oxopentyl]amino]propyl]amino] -3-oxopropoxy]methyl]-1,12,19,25-tetraoxo-16-oxa-13,20,24-t riazanonacos-1-yl]-4-hydroxy-2-pyrrolidinyl)methyl ester
catcagcttaaaatctgtcat

SEQ ID NO: 3431 - RNA, 21 nt, synthetic construct
  source 1..21: mol_type = other RNA
  modified_base 1: mod_base = OTHER; note = 2'-O-methyladenosine-3'-phosphorothioate
  modified_base 2: mod_base = OTHER; note = 2'-O-methylcytidine-3'-phosphorothioate
  modified_base 3: mod_base = OTHER; note = 2'-O-methyluridine-3'-phosphate
  modified_base 4: mod_base = OTHER; note = 2'-O-methyladenosine-3'-phosphate
  modified_base 5: mod_base = OTHER; note = 2'-O-methyluridine-3'-phosphate
  modified_base 6: mod_base = OTHER; note = 2'-O-docosanyl-uridine-3'-phosphate
  modified_base 7: mod_base = OTHER; note = 2'-deoxy-2'-fluoroguanosine-3'-phosphate
  modified_base 8: mod_base = OTHER; note = 2'-O-methyladenosine-3'-phosphate
  modified_base 9: mod_base = OTHER; note = 2'-deoxy-2'-fluorocytidine-3'-phosphate
  modified_base 10: mod_base = OTHER; note = 2'-deoxy-2'-fluorocytidine-3'-phosphate
  modified_base 11: mod_base = OTHER; note = 2'-deoxy-2'-fluoroadenosine-3'-phosphate
  modified_base 12: mod_base = OTHER; note = 2'-O-methyluridine-3'-phosphate
  modified_base 13: mod_base = OTHER; note = 2'-O-methyladenosine-3'-phosphate
  modified_base 14: mod_base = OTHER; note = 2'-O-methyladenosine-3'-phosphate
  modified_base 15: mod_base = OTHER; note = 2'-O-methyladenosine-3'-phosphate
  modified_base 16: mod_base = OTHER; note = 2'-O-methylcytidine-3'-phosphate
  modified_base 17: mod_base = OTHER; note = 2'-O-methylcytidine-3'-phosphate
  modified_base 18: mod_base = OTHER; note = 2'-O-methyluridine-3'-phosphate
  modified_base 19: mod_base = OTHER; note = 2'-O-methyluridine-3'-phosphate
  modified_base 20: mod_base = OTHER; note = 2'-O-methyladenosine-3'-phosphate
  modified_base 21: mod_base = OTHER; note = 2'-O-methyluridine-3'-phosphate ((2S,4R)-1-[29-[[2-(acetylamino)-2-deoxy-beta-D-galactopyra nosyl]oxy]-14,14-bis[[3-[[3-[[5-[[2-(acetylamino)-2-deoxy-b eta-D-galactopyranosyl]oxy]-1-oxopentyl]amino]propyl]amino] -3-oxopropoxy]methyl]-1,12,19,25-tetraoxo-16-oxa-13,20,24-t riazanonacos-1-yl]-4-hydroxy-2-pyrrolidinyl)methyl ester
actattgaccataaaccttat

SEQ ID NO: 3432 - RNA, 21 nt, synthetic construct
  source 1..21: mol_type = other RNA
  modified_base 1: mod_base = OTHER; note = 2'-O-methylcytidine-3'-phosphorothioate
  modified_base 2: mod_base = OTHER; note = 2'-O-methyluridine-3'-phosphorothioate
  modified_base 3: mod_base = OTHER; note = 2'-O-methyladenosine-3'-phosphate
  modified_base 4: mod_base = OTHER; note = 2'-O-methyluridine-3'-phosphate
  modified_base 5: mod_base = OTHER; note = 2'-O-methyladenosine-3'-phosphate
  modified_base 6: mod_base = OTHER; note = 2'-O-docosanyl-uridine-3'-phosphate
  modified_base 7: mod_base = OTHER; note = 2'-deoxy-2'-fluorouridine-3'-phosphate
  modified_base 8: mod_base = OTHER; note = 2'-O-methylcytidine-3'-phosphate
  modified_base 9: mod_base = OTHER; note = 2'-deoxy-2'-fluorocytidine-3'-phosphate
  modified_base 10: mod_base = OTHER; note = 2'-deoxy-2'-fluorouridine-3'-phosphate
  modified_base 11: mod_base = OTHER; note = 2'-deoxy-2'-fluoroadenosine-3'-phosphate
  modified_base 12: mod_base = OTHER; note = 2'-O-methylcytidine-3'-phosphate
  modified_base 13: mod_base = OTHER; note = 2'-O-methyladenosine-3'-phosphate
  modified_base 14: mod_base = OTHER; note = 2'-O-methyladenosine-3'-phosphate
  modified_base 15: mod_base = OTHER; note = 2'-O-methyluridine-3'-phosphate
  modified_base 16: mod_base = OTHER; note = 2'-O-methyladenosine-3'-phosphate
  modified_base 17: mod_base = OTHER; note = 2'-O-methyladenosine-3'-phosphate
  modified_base 18: mod_base = OTHER; note = 2'-O-methyladenosine-3'-phosphate
  modified_base 19: mod_base = OTHER; note = 2'-O-methylguanosine-3'-phosphate
  modified_base 20: mod_base = OTHER; note = 2'-O-methyluridine-3'-phosphate
  modified_base 21: mod_base = OTHER; note = 2'-O-methyluridine-3'-phosphate ((2S,4R)-1-[29-[[2-(acetylamino)-2-deoxy-beta-D-galactopyra nosyl]oxy]-14,14-bis[[3-[[3-[[5-[[2-(acetylamino)-2-deoxy-b eta-D-galactopyranosyl]oxy]-1-oxopentyl]amino]propyl]amino] -3-oxopropoxy]methyl]-1,12,19,25-tetraoxo-16-oxa-13,20,24-t riazanonacos-1-yl]-4-hydroxy-2-pyrrolidinyl)methyl ester
ctatattcctacaataaagtt

SEQ ID NO: 3433 - RNA, 21 nt, synthetic construct
  source 1..21: mol_type = other RNA
  modified_base 1: mod_base = OTHER; note = 2'-O-methyluridine-3'-phosphorothioate
  modified_base 2: mod_base = OTHER; note = 2'-O-methyladenosine-3'-phosphorothioate
  modified_base 3: mod_base = OTHER; note = 2'-O-methylcytidine-3'-phosphate
  modified_base 4: mod_base = OTHER; note = 2'-O-methyladenosine-3'-phosphate
  modified_base 5: mod_base = OTHER; note = 2'-O-methyladenosine-3'-phosphate
  modified_base 6: mod_base = OTHER; note = 2'-O-docosanyl-guanosine-3'-phosphate
  modified_base 7: mod_base = OTHER; note = 2'-deoxy-2'-fluorocytidine-3'-phosphate
  modified_base 8: mod_base = OTHER; note = 2'-O-methyluridine-3'-phosphate
  modified_base 9: mod_base = OTHER; note = 2'-deoxy-2'-fluoroguanosine-3'-phosphate
  modified_base 10: mod_base = OTHER; note = 2'-deoxy-2'-fluoroguanosine-3'-phosphate
  modified_base 11: mod_base = OTHER; note = 2'-deoxy-2'-fluoroadenosine-3'-phosphate
  modified_base 12: mod_base = OTHER; note = 2'-O-methyladenosine-3'-phosphate
  modified_base 13: mod_base = OTHER; note = 2'-O-methyladenosine-3'-phosphate
  modified_base 14: mod_base = OTHER; note = 2'-O-methyluridine-3'-phosphate
  modified_base 15: mod_base = OTHER; note = 2'-O-methyluridine-3'-phosphate
  modified_base 16: mod_base = OTHER; note = 2'-O-methylcytidine-3'-phosphate
  modified_base 17: mod_base = OTHER; note = 2'-O-methylcytidine-3'-phosphate
  modified_base 18: mod_base = OTHER; note = 2'-O-methyluridine-3'-phosphate
  modified_base 19: mod_base = OTHER; note = 2'-O-methyladenosine-3'-phosphate
  modified_base 20: mod_base = OTHER; note = 2'-O-methyladenosine-3'-phosphate
  modified_base 21: mod_base = OTHER; note = 2'-O-methyluridine-3'-phosphate ((2S,4R)-1-[29-[[2-(acetylamino)-2-deoxy-beta-D-galactopyra nosyl]oxy]-14,14-bis[[3-[[3-[[5-[[2-(acetylamino)-2-deoxy-b eta-D-galactopyranosyl]oxy]-1-oxopentyl]amino]propyl]amino] -3-oxopropoxy]methyl]-1,12,19,25-tetraoxo-16-oxa-13,20,24-t riazanonacos-1-yl]-4-hydroxy-2-pyrrolidinyl)methyl ester
tacaagctggaaattcctaat

SEQ ID NO: 3434 - RNA, 21 nt, synthetic construct
  source 1..21: mol_type = other RNA
  modified_base 1: mod_base = OTHER; note = 2'-O-methyluridine-3'-phosphorothioate
  modified_base 2: mod_base = OTHER; note = 2'-O-methyladenosine-3'-phosphorothioate
  modified_base 3: mod_base = OTHER; note = 2'-O-methylcytidine-3'-phosphate
  modified_base 4: mod_base = OTHER; note = 2'-O-methyluridine-3'-phosphate
  modified_base 5: mod_base = OTHER; note = 2'-O-methylguanosine-3'-phosphate
  modified_base 6: mod_base = OTHER; note = 2'-O-docosanyl-adenosine-3'-phosphate
  modified_base 7: mod_base = OTHER; note = 2'-deoxy-2'-fluoroguanosine-3'-phosphate
  modified_base 8: mod_base = OTHER; note = 2'-O-methylcytidine-3'-phosphate
  modified_base 9: mod_base = OTHER; note = 2'-deoxy-2'-fluorouridine-3'-phosphate
  modified_base 10: mod_base = OTHER; note = 2'-deoxy-2'-fluoroadenosine-3'-phosphate
  modified_base 11: mod_base = OTHER; note = 2'-deoxy-2'-fluoroadenosine-3'-phosphate
  modified_base 12: mod_base = OTHER; note = 2'-O-methyladenosine-3'-phosphate
  modified_base 13: mod_base = OTHER; note = 2'-O-methyluridine-3'-phosphate
  modified_base 14: mod_base = OTHER; note = 2'-O-methyluridine-3'-phosphate
  modified_base 15: mod_base = OTHER; note = 2'-O-methyladenosine-3'-phosphate
  modified_base 16: mod_base = OTHER; note = 2'-O-methyluridine-3'-phosphate
  modified_base 17: mod_base = OTHER; note = 2'-O-methyladenosine-3'-phosphate
  modified_base 18: mod_base = OTHER; note = 2'-O-methylguanosine-3'-phosphate
  modified_base 19: mod_base = OTHER; note = 2'-O-methyladenosine-3'-phosphate
  modified_base 20: mod_base = OTHER; note = 2'-O-methyluridine-3'-phosphate
  modified_base 21: mod_base = OTHER; note = 2'-O-methyluridine-3'-phosphate ((2S,4R)-1-[29-[[2-(acetylamino)-2-deoxy-beta-D-galactopyra nosyl]oxy]-14,14-bis[[3-[[3-[[5-[[2-(acetylamino)-2-deoxy-b eta-D-galactopyranosyl]oxy]-1-oxopentyl]amino]propyl]amino] -3-oxopropoxy]methyl]-1,12,19,25-tetraoxo-16-oxa-13,20,24-t riazanonacos-1-yl]-4-hydroxy-2-pyrrolidinyl)methyl ester
tactgagctaaattatagatt

SEQ ID NO: 3435 - RNA, 21 nt, synthetic construct
  source 1..21: mol_type = other RNA
  modified_base 1: mod_base = OTHER; note = 2'-O-methyluridine-3'-phosphorothioate
  modified_base 2: mod_base = OTHER; note = 2'-O-methylguanosine-3'-phosphorothioate
  modified_base 3: mod_base = OTHER; note = 2'-O-methylcytidine-3'-phosphate
  modified_base 4: mod_base = OTHER; note = 2'-O-methylcytidine-3'-phosphate
  modified_base 5: mod_base = OTHER; note = 2'-O-methyladenosine-3'-phosphate
  modified_base 6: mod_base = OTHER; note = 2'-O-docosanyl-adenosine-3'-phosphate
  modified_base 7: mod_base = OTHER; note = 2'-deoxy-2'-fluorocytidine-3'-phosphate
  modified_base 8: mod_base = OTHER; note = 2'-O-methyladenosine-3'-phosphate
  modified_base 9: mod_base = OTHER; note = 2'-deoxy-2'-fluoroadenosine-3'-phosphate
  modified_base 10: mod_base = OTHER; note = 2'-deoxy-2'-fluoroguanosine-3'-phosphate
  modified_base 11: mod_base = OTHER; note = 2'-deoxy-2'-fluorouridine-3'-phosphate
  modified_base 12: mod_base = OTHER; note = 2'-O-methyluridine-3'-phosphate
  modified_base 13: mod_base = OTHER; note = 2'-O-methylcytidine-3'-phosphate
  modified_base 14: mod_base = OTHER; note = 2'-O-methyladenosine-3'-phosphate
  modified_base 15: mod_base = OTHER; note = 2'-O-methylcytidine-3'-phosphate
  modified_base 16: mod_base = OTHER; note = 2'-O-methyluridine-3'-phosphate
  modified_base 17: mod_base = OTHER; note = 2'-O-methyluridine-3'-phosphate
  modified_base 18: mod_base = OTHER; note = 2'-O-methylcytidine-3'-phosphate
  modified_base 19: mod_base = OTHER; note = 2'-O-methyladenosine-3'-phosphate
  modified_base 20: mod_base = OTHER; note = 2'-O-methyluridine-3'-phosphate
  modified_base 21: mod_base = OTHER; note = 2'-O-methyluridine-3'-phosphate ((2S,4R)-1-[29-[[2-(acetylamino)-2-deoxy-beta-D-galactopyra nosyl]oxy]-14,14-bis[[3-[[3-[[5-[[2-(acetylamino)-2-deoxy-b eta-D-galactopyranosyl]oxy]-1-oxopentyl]amino]propyl]amino] -3-oxopropoxy]methyl]-1,12,19,25-tetraoxo-16-oxa-13,20,24-t riazanonacos-1-yl]-4-hydroxy-2-pyrrolidinyl)methyl ester
tgccaacaagttcacttcatt

SEQ ID NO: 3436 - RNA, 21 nt, synthetic construct
  source 1..21: mol_type = other RNA
  modified_base 1: mod_base = OTHER; note = 2'-O-methylcytidine-3'-phosphorothioate
  modified_base 2: mod_base = OTHER; note = 2'-O-methyluridine-3'-phosphorothioate
  modified_base 3: mod_base = OTHER; note = 2'-O-methyladenosine-3'-phosphate
  modified_base 4: mod_base = OTHER; note = 2'-O-methylcytidine-3'-phosphate
  modified_base 5: mod_base = OTHER; note = 2'-O-methylcytidine-3'-phosphate
  modified_base 6: mod_base = OTHER; note = 2'-O-docosanyl-uridine-3'-phosphate
  modified_base 7: mod_base = OTHER; note = 2'-deoxy-2'-fluoroadenosine-3'-phosphate
  modified_base 8: mod_base = OTHER; note = 2'-O-methyladenosine-3'-phosphate
  modified_base 9: mod_base = OTHER; note = 2'-deoxy-2'-fluoroadenosine-3'-phosphate
  modified_base 10: mod_base = OTHER; note = 2'-deoxy-2'-fluoroadenosine-3'-phosphate
  modified_base 11: mod_base = OTHER; note = 2'-deoxy-2'-fluoroguanosine-3'-phosphate
  modified_base 12: mod_base = OTHER; note = 2'-O-methyladenosine-3'-phosphate
  modified_base 13: mod_base = OTHER; note = 2'-O-methyladenosine-3'-phosphate
  modified_base 14: mod_base = OTHER; note = 2'-O-methylguanosine-3'-phosphate
  modified_base 15: mod_base = OTHER; note = 2'-O-methyladenosine-3'-phosphate
  modified_base 16: mod_base = OTHER; note = 2'-O-methylcytidine-3'-phosphate
  modified_base 17: mod_base = OTHER; note = 2'-O-methyladenosine-3'-phosphate
  modified_base 18: mod_base = OTHER; note = 2'-O-methylguanosine-3'-phosphate
  modified_base 19: mod_base = OTHER; note = 2'-O-methyluridine-3'-phosphate
  modified_base 20: mod_base = OTHER; note = 2'-O-methyluridine-3'-phosphate
  modified_base 21: mod_base = OTHER; note = 2'-O-methyluridine-3'-phosphate ((2S,4R)-1-[29-[[2-(acetylamino)-2-deoxy-beta-D-galactopyra nosyl]oxy]-14,14-bis[[3-[[3-[[5-[[2-(acetylamino)-2-deoxy-b eta-D-galactopyranosyl]oxy]-1-oxopentyl]amino]propyl]amino] -3-oxopropoxy]methyl]-1,12,19,25-tetraoxo-16-oxa-13,20,24-t riazanonacos-1-yl]-4-hydroxy-2-pyrrolidinyl)methyl ester
ctacctaaaagaagacagttt

SEQ ID NO: 3437 - RNA, 21 nt, synthetic construct
  source 1..21: mol_type = other RNA
  modified_base 1: mod_base = OTHER; note = 2'-O-methyladenosine-3'-phosphorothioate
  modified_base 2: mod_base = OTHER; note = 2'-O-methylguanosine-3'-phosphorothioate
  modified_base 3: mod_base = OTHER; note = 2'-O-methyladenosine-3'-phosphate
  modified_base 4: mod_base = OTHER; note = 2'-O-methylcytidine-3'-phosphate
  modified_base 5: mod_base = OTHER; note = 2'-O-methyladenosine-3'-phosphate
  modified_base 6: mod_base = OTHER; note = 2'-O-docosanyl-uridine-3'-phosphate
  modified_base 7: mod_base = OTHER; note = 2'-deoxy-2'-fluoroguanosine-3'-phosphate
  modified_base 8: mod_base = OTHER; note = 2'-O-methyluridine-3'-phosphate
  modified_base 9: mod_base = OTHER; note = 2'-deoxy-2'-fluorouridine-3'-phosphate
  modified_base 10: mod_base = OTHER; note = 2'-deoxy-2'-fluoroadenosine-3'-phosphate
  modified_base 11: mod_base = OTHER; note = 2'-deoxy-2'-fluorocytidine-3'-phosphate
  modified_base 12: mod_base = OTHER; note = 2'-O-methyluridine-3'-phosphate
  modified_base 13: mod_base = OTHER; note = 2'-O-methyladenosine-3'-phosphate
  modified_base 14: mod_base = OTHER; note = 2'-O-methyladenosine-3'-phosphate
  modified_base 15: mod_base = OTHER; note = 2'-O-methyluridine-3'-phosphate
  modified_base 16: mod_base = OTHER; note = 2'-O-methyladenosine-3'-phosphate
  modified_base 17: mod_base = OTHER; note = 2'-O-methyluridine-3'-phosphate
  modified_base 18: mod_base = OTHER; note = 2'-O-methyladenosine-3'-phosphate
  modified_base 19: mod_base = OTHER; note = 2'-O-methyladenosine-3'-phosphate
  modified_base 20: mod_base = OTHER; note = 2'-O-methylcytidine-3'-phosphate
  modified_base 21: mod_base = OTHER; note = 2'-O-methyluridine-3'-phosphate ((2S,4R)-1-[29-[[2-(acetylamino)-2-deoxy-beta-D-galactopyra nosyl]oxy]-14,14-bis[[3-[[3-[[5-[[2-(acetylamino)-2-deoxy-b eta-D-galactopyranosyl]oxy]-1-oxopentyl]amino]propyl]amino] -3-oxopropoxy]methyl]-1,12,19,25-tetraoxo-16-oxa-13,20,24-t riazanonacos-1-yl]-4-hydroxy-2-pyrrolidinyl)methyl ester
agacatgttactaatataact

SEQ ID NO: 3438 - RNA, 21 nt, synthetic construct
  source 1..21: mol_type = other RNA
  modified_base 1: mod_base = OTHER; note = 2'-O-methyluridine-3'-phosphorothioate
  modified_base 2: mod_base = OTHER; note = 2'-O-methyluridine-3'-phosphorothioate
  modified_base 3: mod_base = OTHER; note = 2'-O-methylcytidine-3'-phosphate
  modified_base 4: mod_base = OTHER; note = 2'-O-methyladenosine-3'-phosphate
  modified_base 5: mod_base = OTHER; note = 2'-O-methyluridine-3'-phosphate
  modified_base 6: mod_base = OTHER; note = 2'-O-docosanyl-adenosine-3'-phosphate
  modified_base 7: mod_base = OTHER; note = 2'-deoxy-2'-fluorocytidine-3'-phosphate
  modified_base 8: mod_base = OTHER; note = 2'-O-methyladenosine-3'-phosphate
  modified_base 9: mod_base = OTHER; note = 2'-deoxy-2'-fluoroadenosine-3'-phosphate
  modified_base 10: mod_base = OTHER; note = 2'-deoxy-2'-fluorocytidine-3'-phosphate
  modified_base 11: mod_base = OTHER; note = 2'-deoxy-2'-fluoroadenosine-3'-phosphate
  modified_base 12: mod_base = OTHER; note = 2'-O-methylcytidine-3'-phosphate
  modified_base 13: mod_base = OTHER; note = 2'-O-methyladenosine-3'-phosphate
  modified_base 14: mod_base = OTHER; note = 2'-O-methyladenosine-3'-phosphate
  modified_base 15: mod_base = OTHER; note = 2'-O-methyluridine-3'-phosphate
  modified_base 16: mod_base = OTHER; note = 2'-O-methyladenosine-3'-phosphate
  modified_base 17: mod_base = OTHER; note = 2'-O-methylcytidine-3'-phosphate
  modified_base 18: mod_base = OTHER; note = 2'-O-methyluridine-3'-phosphate
  modified_base 19: mod_base = OTHER; note = 2'-O-methylcytidine-3'-phosphate
  modified_base 20: mod_base = OTHER; note = 2'-O-methyluridine-3'-phosphate
  modified_base 21: mod_base = OTHER; note = 2'-O-methyluridine-3'-phosphate ((2S,4R)-1-[29-[[2-(acetylamino)-2-deoxy-beta-D-galactopyra nosyl]oxy]-14,14-bis[[3-[[3-[[5-[[2-(acetylamino)-2-deoxy-b eta-D-galactopyranosyl]oxy]-1-oxopentyl]amino]propyl]amino] -3-oxopropoxy]methyl]-1,12,19,25-tetraoxo-16-oxa-13,20,24-t riazanonacos-1-yl]-4-hydroxy-2-pyrrolidinyl)methyl ester
ttcatacaacacaatactctt

SEQ ID NO: 3439 - RNA, 21 nt, synthetic construct
  source 1..21: mol_type = other RNA
  modified_base 1: mod_base = OTHER; note = 2'-O-methyladenosine-3'-phosphorothioate
  modified_base 2: mod_base = OTHER; note = 2'-O-methyluridine-3'-phosphorothioate
  modified_base 3: mod_base = OTHER; note = 2'-O-methylguanosine-3'-phosphate
  modified_base 4: mod_base = OTHER; note = 2'-O-methylcytidine-3'-phosphate
  modified_base 5: mod_base = OTHER; note = 2'-O-methylcytidine-3'-phosphate
  modified_base 6: mod_base = OTHER; note = 2'-O-docosanyl-adenosine-3'-phosphate
  modified_base 7: mod_base = OTHER; note = 2'-deoxy-2'-fluorocytidine-3'-phosphate
  modified_base 8: mod_base = OTHER; note = 2'-O-methyladenosine-3'-phosphate
  modified_base 9: mod_base = OTHER; note = 2'-deoxy-2'-fluorouridine-3'-phosphate
  modified_base 10: mod_base = OTHER; note = 2'-deoxy-2'-fluorouridine-3'-phosphate
  modified_base 11: mod_base = OTHER; note = 2'-deoxy-2'-fluoroadenosine-3'-phosphate
  modified_base 12: mod_base = OTHER; note = 2'-O-methyladenosine-3'-phosphate
  modified_base 13: mod_base = OTHER; note = 2'-O-methylcytidine-3'-phosphate
  modified_base 14: mod_base = OTHER; note = 2'-O-methyladenosine-3'-phosphate
  modified_base 15: mod_base = OTHER; note = 2'-O-methyluridine-3'-phosphate
  modified_base 16: mod_base = OTHER; note = 2'-O-methylcytidine-3'-phosphate
  modified_base 17: mod_base = OTHER; note = 2'-O-methyluridine-3'-phosphate
  modified_base 18: mod_base = OTHER; note = 2'-O-methyluridine-3'-phosphate
  modified_base 19: mod_base = OTHER; note = 2'-O-methyluridine-3'-phosphate
  modified_base 20: mod_base = OTHER; note = 2'-O-methyluridine-3'-phosphate
  modified_base 21: mod_base = OTHER; note = 2'-O-methyluridine-3'-phosphate ((2S,4R)-1-[29-[[2-(acetylamino)-2-deoxy-beta-D-galactopyra nosyl]oxy]-14,14-bis[[3-[[3-[[5-[[2-(acetylamino)-2-deoxy-b eta-D-galactopyranosyl]oxy]-1-oxopentyl]amino]propyl]amino] -3-oxopropoxy]methyl]-1,12,19,25-tetraoxo-16-oxa-13,20,24-t riazanonacos-1-yl]-4-hydroxy-2-pyrrolidinyl)methyl ester
atgccacattaacatcttttt

SEQ ID NO: 3440 - RNA, 21 nt, synthetic construct
  source 1..21: mol_type = other RNA
  modified_base 1: mod_base = OTHER; note = 2'-O-methylcytidine-3'-phosphorothioate
  modified_base 2: mod_base = OTHER; note = 2'-O-methyladenosine-3'-phosphorothioate
  modified_base 3: mod_base = OTHER; note = 2'-O-methylcytidine-3'-phosphate
  modified_base 4: mod_base = OTHER; note = 2'-O-methyluridine-3'-phosphate
  modified_base 5: mod_base = OTHER; note = 2'-O-methylguanosine-3'-phosphate
  modified_base 6: mod_base = OTHER; note = 2'-O-docosanyl-guanosine-3'-phosphate
  modified_base 7: mod_base = OTHER; note = 2'-deoxy-2'-fluorouridine-3'-phosphate
  modified_base 8: mod_base = OTHER; note = 2'-O-methyluridine-3'-phosphate
  modified_base 9: mod_base = OTHER; note = 2'-deoxy-2'-fluorouridine-3'-phosphate
  modified_base 10: mod_base = OTHER; note = 2'-deoxy-2'-fluorouridine-3'-phosphate
  modified_base 11: mod_base = OTHER; note = 2'-deoxy-2'-fluoroadenosine-3'-phosphate
  modified_base 12: mod_base = OTHER; note = 2'-O-methylguanosine-3'-phosphate
  modified_base 13: mod_base = OTHER; note = 2'-O-methyluridine-3'-phosphate
  modified_base 14: mod_base = OTHER; note = 2'-O-methyladenosine-3'-phosphate
  modified_base 15: mod_base = OTHER; note = 2'-O-methyladenosine-3'-phosphate
  modified_base 16: mod_base = OTHER; note = 2'-O-methyladenosine-3'-phosphate
  modified_base 17: mod_base = OTHER; note = 2'-O-methyluridine-3'-phosphate
  modified_base 18: mod_base = OTHER; note = 2'-O-methyluridine-3'-phosphate
  modified_base 19: mod_base = OTHER; note = 2'-O-methyladenosine-3'-phosphate
  modified_base 20: mod_base = OTHER; note = 2'-O-methylcytidine-3'-phosphate
  modified_base 21: mod_base = OTHER; note = 2'-O-methyluridine-3'-phosphate ((2S,4R)-1-[29-[[2-(acetylamino)-2-deoxy-beta-D-galactopyra nosyl]oxy]-14,14-bis[[3-[[3-[[5-[[2-(acetylamino)-2-deoxy-b eta-D-galactopyranosyl]oxy]-1-oxopentyl]amino]propyl]amino] -3-oxopropoxy]methyl]-1,12,19,25-tetraoxo-16-oxa-13,20,24-t riazanonacos-1-yl]-4-hydroxy-2-pyrrolidinyl)methyl ester
cactggttttagtaaattact

SEQ ID NO: 3441 - RNA, 21 nt, synthetic construct
  source 1..21: mol_type = other RNA
  modified_base 1: mod_base = OTHER; note = 2'-O-methylcytidine-3'-phosphorothioate
  modified_base 2: mod_base = OTHER; note = 2'-O-methyluridine-3'-phosphorothioate
  modified_base 3: mod_base = OTHER; note = 2'-O-methylcytidine-3'-phosphate
  modified_base 4: mod_base = OTHER; note = 2'-O-methylguanosine-3'-phosphate
  modified_base 5: mod_base = OTHER; note = 2'-O-methylcytidine-3'-phosphate
  modified_base 6: mod_base = OTHER; note = 2'-O-docosanyl-uridine-3'-phosphate
  modified_base 7: mod_base = OTHER; note = 2'-deoxy-2'-fluorocytidine-3'-phosphate
  modified_base 8: mod_base = OTHER; note = 2'-O-methyladenosine-3'-phosphate
  modified_base 9: mod_base = OTHER; note = 2'-deoxy-2'-fluoroguanosine-3'-phosphate
  modified_base 10: mod_base = OTHER; note = 2'-deoxy-2'-fluorocytidine-3'-phosphate
  modified_base 11: mod_base = OTHER; note = 2'-deoxy-2'-fluorouridine-3'-phosphate
  modified_base 12: mod_base = OTHER; note = 2'-O-methyladenosine-3'-phosphate
  modified_base 13: mod_base = OTHER; note = 2'-O-methyluridine-3'-phosphate
  modified_base 14: mod_base = OTHER; note = 2'-O-methyladenosine-3'-phosphate
  modified_base 15: mod_base = OTHER; note = 2'-O-methyladenosine-3'-phosphate
  modified_base 16: mod_base = OTHER; note = 2'-O-methylguanosine-3'-phosphate
  modified_base 17: mod_base = OTHER; note = 2'-O-methyladenosine-3'-phosphate
  modified_base 18: mod_base = OTHER; note = 2'-O-methyladenosine-3'-phosphate
  modified_base 19: mod_base = OTHER; note = 2'-O-methylguanosine-3'-phosphate
  modified_base 20: mod_base = OTHER; note = 2'-O-methyladenosine-3'-phosphate
  modified_base 21: mod_base = OTHER; note = 2'-O-methyluridine-3'-phosphate ((2S,4R)-1-[29-[[2-(acetylamino)-2-deoxy-beta-D-galactopyra nosyl]oxy]-14,14-bis[[3-[[3-[[5-[[2-(acetylamino)-2-deoxy-b eta-D-galactopyranosyl]oxy]-1-oxopentyl]amino]propyl]amino] -3-oxopropoxy]methyl]-1,12,19,25-tetraoxo-16-oxa-13,20,24-t riazanonacos-1-yl]-4-hydroxy-2-pyrrolidinyl)methyl ester
ctcgctcagctataagaagat

SEQ ID NO: 3442 - RNA, 21 nt, synthetic construct
  source 1..21: mol_type = other RNA
  modified_base 1: mod_base = OTHER; note = 2'-O-methyluridine-3'-phosphorothioate
  modified_base 2: mod_base = OTHER; note = 2'-O-methylcytidine-3'-phosphorothioate
  modified_base 3: mod_base = OTHER; note = 2'-O-methyluridine-3'-phosphate
  modified_base 4: mod_base = OTHER; note = 2'-O-methyluridine-3'-phosphate
  modified_base 5: mod_base = OTHER; note = 2'-O-methylcytidine-3'-phosphate
  modified_base 6: mod_base = OTHER; note = 2'-O-docosanyl-adenosine-3'-phosphate
  modified_base 7: mod_base = OTHER; note = 2'-deoxy-2'-fluorouridine-3'-phosphate
  modified_base 8: mod_base = OTHER; note = 2'-O-methyluridine-3'-phosphate
  modified_base 9: mod_base = OTHER; note = 2'-deoxy-2'-fluorocytidine-3'-phosphate
  modified_base 10: mod_base = OTHER; note = 2'-deoxy-2'-fluorouridine-3'-phosphate
  modified_base 11: mod_base = OTHER; note = 2'-deoxy-2'-fluorouridine-3'-phosphate
  modified_base 12: mod_base = OTHER; note = 2'-O-methyluridine-3'-phosphate
  modified_base 13: mod_base = OTHER; note = 2'-O-methylguanosine-3'-phosphate
  modified_base 14: mod_base = OTHER; note = 2'-O-methyladenosine-3'-phosphate
  modified_base 15: mod_base = OTHER; note = 2'-O-methyluridine-3'-phosphate
  modified_base 16: mod_base = OTHER; note = 2'-O-methyladenosine-3'-phosphate
  modified_base 17: mod_base = OTHER; note = 2'-O-methylguanosine-3'-phosphate
  modified_base 18: mod_base = OTHER; note = 2'-O-methyladenosine-3'-phosphate
  modified_base 19: mod_base = OTHER; note = 2'-O-methyladenosine-3'-phosphate
  modified_base 20: mod_base = OTHER; note = 2'-O-methyladenosine-3'-phosphate
  modified_base 21: mod_base = OTHER; note = 2'-O-methyluridine-3'-phosphate ((2S,4R)-1-[29-[[2-(acetylamino)-2-deoxy-beta-D-galactopyra nosyl]oxy]-14,14-bis[[3-[[3-[[5-[[2-(acetylamino)-2-deoxy-b eta-D-galactopyranosyl]oxy]-1-oxopentyl]amino]propyl]amino] -3-oxopropoxy]methyl]-1,12,19,25-tetraoxo-16-oxa-13,20,24-t riazanonacos-1-yl]-4-hydroxy-2-pyrrolidinyl)methyl ester
tcttcattctttgatagaaat

SEQ ID NO: 3443 - RNA, 21 nt, synthetic construct
  source 1..21: mol_type = other RNA
  modified_base 1: mod_base = OTHER; note = 2'-O-methylcytidine-3'-phosphorothioate
  modified_base 2: mod_base = OTHER; note = 2'-O-methyladenosine-3'-phosphorothioate
  modified_base 3: mod_base = OTHER; note = 2'-O-methyladenosine-3'-phosphate
  modified_base 4: mod_base = OTHER; note = 2'-O-methylguanosine-3'-phosphate
  modified_base 5: mod_base = OTHER; note = 2'-O-methyladenosine-3'-phosphate
  modified_base 6: mod_base = OTHER; note = 2'-O-docosanyl-uridine-3'-phosphate
  modified_base 7: mod_base = OTHER; note = 2'-deoxy-2'-fluorouridine-3'-phosphate
  modified_base 8: mod_base = OTHER; note = 2'-O-methyladenosine-3'-phosphate
  modified_base 9: mod_base = OTHER; note = 2'-deoxy-2'-fluoroadenosine-3'-phosphate
  modified_base 10: mod_base = OTHER; note = 2'-deoxy-2'-fluoroguanosine-3'-phosphate
  modified_base 11: mod_base = OTHER; note = 2'-deoxy-2'-fluoroadenosine-3'-phosphate
  modified_base 12: mod_base = OTHER; note = 2'-O-methylcytidine-3'-phosphate
  modified_base 13: mod_base = OTHER; note = 2'-O-methyluridine-3'-phosphate
  modified_base 14: mod_base = OTHER; note = 2'-O-methyladenosine-3'-phosphate
  modified_base 15: mod_base = OTHER; note = 2'-O-methyladenosine-3'-phosphate
  modified_base 16: mod_base = OTHER; note = 2'-O-methyladenosine-3'-phosphate
  modified_base 17: mod_base = OTHER; note = 2'-O-methyladenosine-3'-phosphate
  modified_base 18: mod_base = OTHER; note = 2'-O-methylcytidine-3'-phosphate
  modified_base 19: mod_base = OTHER; note = 2'-O-methyluridine-3'-phosphate
  modified_base 20: mod_base = OTHER; note = 2'-O-methyluridine-3'-phosphate
  modified_base 21: mod_base = OTHER; note = 2'-O-methyluridine-3'-phosphate ((2S,4R)-1-[29-[[2-(acetylamino)-2-deoxy-beta-D-galactopyra nosyl]oxy]-14,14-bis[[3-[[3-[[5-[[2-(acetylamino)-2-deoxy-b eta-D-galactopyranosyl]oxy]-1-oxopentyl]amino]propyl]amino] -3-oxopropoxy]methyl]-1,12,19,25-tetraoxo-16-oxa-13,20,24-t riazanonacos-1-yl]-4-hydroxy-2-pyrrolidinyl)methyl ester
caagattaagactaaaacttt

SEQ ID NO: 3444 - RNA, 21 nt, synthetic construct
  source 1..21: mol_type = other RNA
  modified_base 1: mod_base = OTHER; note = 2'-O-methyladenosine-3'-phosphorothioate
  modified_base 2: mod_base = OTHER; note = 2'-O-methyladenosine-3'-phosphorothioate
  modified_base 3: mod_base = OTHER; note = 2'-O-methylguanosine-3'-phosphate
  modified_base 4: mod_base = OTHER; note = 2'-O-methylcytidine-3'-phosphate
  modified_base 5: mod_base = OTHER; note = 2'-O-methyluridine-3'-phosphate
  modified_base 6: mod_base = OTHER; note = 2'-O-docosanyl-adenosine-3'-phosphate
  modified_base 7: mod_base = OTHER; note = 2'-deoxy-2'-fluoroguanosine-3'-phosphate
  modified_base 8: mod_base = OTHER; note = 2'-O-methyladenosine-3'-phosphate
  modified_base 9: mod_base = OTHER; note = 2'-deoxy-2'-fluoroguanosine-3'-phosphate
  modified_base 10: mod_base = OTHER; note = 2'-deoxy-2'-fluoroadenosine-3'-phosphate
  modified_base 11: mod_base = OTHER; note = 2'-deoxy-2'-fluoroadenosine-3'-phosphate
  modified_base 12: mod_base = OTHER; note = 2'-O-methyladenosine-3'-phosphate
  modified_base 13: mod_base = OTHER; note = 2'-O-methyladenosine-3'-phosphate
  modified_base 14: mod_base = OTHER; note = 2'-O-methyluridine-3'-phosphate
  modified_base 15: mod_base = OTHER; note = 2'-O-methylguanosine-3'-phosphate
  modified_base 16: mod_base = OTHER; note = 2'-O-methyluridine-3'-phosphate
  modified_base 17: mod_base = OTHER; note = 2'-O-methyluridine-3'-phosphate
  modified_base 18: mod_base = OTHER; note = 2'-O-methyladenosine-3'-phosphate
  modified_base 19: mod_base = OTHER; note = 2'-O-methyluridine-3'-phosphate
  modified_base 20: mod_base = OTHER; note = 2'-O-methyluridine-3'-phosphate
  modified_base 21: mod_base = OTHER; note = 2'-O-methyluridine-3'-phosphate ((2S,4R)-1-[29-[[2-(acetylamino)-2-deoxy-beta-D-galactopyra nosyl]oxy]-14,14-bis[[3-[[3-[[5-[[2-(acetylamino)-2-deoxy-b eta-D-galactopyranosyl]oxy]-1-oxopentyl]amino]propyl]amino] -3-oxopropoxy]methyl]-1,12,19,25-tetraoxo-16-oxa-13,20,24-t riazanonacos-1-yl]-4-hydroxy-2-pyrrolidinyl)methyl ester
aagctagagaaaatgttattt

SEQ ID NO: 3445 - RNA, 21 nt, synthetic construct
  source 1..21: mol_type = other RNA
  modified_base 1: mod_base = OTHER; note = 2'-O-methyladenosine-3'-phosphorothioate
  modified_base 2: mod_base = OTHER; note = 2'-O-methyladenosine-3'-phosphorothioate
  modified_base 3: mod_base = OTHER; note = 2'-O-methyladenosine-3'-phosphate
  modified_base 4: mod_base = OTHER; note = 2'-O-methylcytidine-3'-phosphate
  modified_base 5: mod_base = OTHER; note = 2'-O-methyluridine-3'-phosphate
  modified_base 6: mod_base = OTHER; note = 2'-O-docosanyl-uridine-3'-phosphate
  modified_base 7: mod_base = OTHER; note = 2'-deoxy-2'-fluorouridine-3'-phosphate
  modified_base 8: mod_base = OTHER; note = 2'-O-methylguanosine-3'-phosphate
  modified_base 9: mod_base = OTHER; note = 2'-deoxy-2'-fluoroguanosine-3'-phosphate
  modified_base 10: mod_base = OTHER; note = 2'-deoxy-2'-fluorouridine-3'-phosphate
  modified_base 11: mod_base = OTHER; note = 2'-deoxy-2'-fluoroadenosine-3'-phosphate
  modified_base 12: mod_base = OTHER; note = 2'-O-methyladenosine-3'-phosphate
  modified_base 13: mod_base = OTHER; note = 2'-O-methyluridine-3'-phosphate
  modified_base 14: mod_base = OTHER; note = 2'-O-methyluridine-3'-phosphate
  modified_base 15: mod_base = OTHER; note = 2'-O-methyluridine-3'-phosphate
  modified_base 16: mod_base = OTHER; note = 2'-O-methyladenosine-3'-phosphate
  modified_base 17: mod_base = OTHER; note = 2'-O-methyladenosine-3'-phosphate
  modified_base 18: mod_base = OTHER; note = 2'-O-methylguanosine-3'-phosphate
  modified_base 19: mod_base = OTHER; note = 2'-O-methyluridine-3'-phosphate
  modified_base 20: mod_base = OTHER; note = 2'-O-methyluridine-3'-phosphate
  modified_base 21: mod_base = OTHER; note = 2'-O-methyluridine-3'-phosphate ((2S,4R)-1-[29-[[2-(acetylamino)-2-deoxy-beta-D-galactopyra nosyl]oxy]-14,14-bis[[3-[[3-[[5-[[2-(acetylamino)-2-deoxy-b eta-D-galactopyranosyl]oxy]-1-oxopentyl]amino]propyl]amino] -3-oxopropoxy]methyl]-1,12,19,25-tetraoxo-16-oxa-13,20,24-t riazanonacos-1-yl]-4-hydroxy-2-pyrrolidinyl)methyl ester
aaactttggtaatttaagttt

SEQ ID NO: 3446 - RNA, 21 nt, synthetic construct
  source 1..21: mol_type = other RNA
  modified_base 1: mod_base = OTHER; note = 2'-O-methylcytidine-3'-phosphorothioate
  modified_base 2: mod_base = OTHER; note = 2'-O-methyladenosine-3'-phosphorothioate
  modified_base 3: mod_base = OTHER; note = 2'-O-methyluridine-3'-phosphate
  modified_base 4: mod_base = OTHER; note = 2'-O-methyladenosine-3'-phosphate
  modified_base 5: mod_base = OTHER; note = 2'-O-methyluridine-3'-phosphate
  modified_base 6: mod_base = OTHER; note = 2'-O-docosanyl-cytidine-3'-phosphate
  modified_base 7: mod_base = OTHER; note = 2'-deoxy-2'-fluoroadenosine-3'-phosphate
  modified_base 8: mod_base = OTHER; note = 2'-O-methylcytidine-3'-phosphate
  modified_base 9: mod_base = OTHER; note = 2'-deoxy-2'-fluorouridine-3'-phosphate
  modified_base 10: mod_base = OTHER; note = 2'-deoxy-2'-fluoroadenosine-3'-phosphate
  modified_base 11: mod_base = OTHER; note = 2'-deoxy-2'-fluoroadenosine-3'-phosphate
  modified_base 12: mod_base = OTHER; note = 2'-O-methyluridine-3'-phosphate
  modified_base 13: mod_base = OTHER; note = 2'-O-methyladenosine-3'-phosphate
  modified_base 14: mod_base = OTHER; note = 2'-O-methyluridine-3'-phosphate
  modified_base 15: mod_base = OTHER; note = 2'-O-methyladenosine-3'-phosphate
  modified_base 16: mod_base = OTHER; note = 2'-O-methylcytidine-3'-phosphate
  modified_base 17: mod_base = OTHER; note = 2'-O-methyluridine-3'-phosphate
  modified_base 18: mod_base = OTHER; note = 2'-O-methyladenosine-3'-phosphate
  modified_base 19: mod_base = OTHER; note = 2'-O-methyladenosine-3'-phosphate
  modified_base 20: mod_base = OTHER; note = 2'-O-methylcytidine-3'-phosphate
  modified_base 21: mod_base = OTHER; note = 2'-O-methyluridine-3'-phosphate ((2S,4R)-1-[29-[[2-(acetylamino)-2-deoxy-beta-D-galactopyra nosyl]oxy]-14,14-bis[[3-[[3-[[5-[[2-(acetylamino)-2-deoxy-b eta-D-galactopyranosyl]oxy]-1-oxopentyl]amino]propyl]amino] -3-oxopropoxy]methyl]-1,12,19,25-tetraoxo-16-oxa-13,20,24-t riazanonacos-1-yl]-4-hydroxy-2-pyrrolidinyl)methyl ester
catatcactaatatactaact

SEQ ID NO: 3447 - RNA, 21 nt, synthetic construct
  source 1..21: mol_type = other RNA
  modified_base 1: mod_base = OTHER; note = 2'-O-methyluridine-3'-phosphorothioate
  modified_base 2: mod_base = OTHER; note = 2'-O-methyluridine-3'-phosphorothioate
  modified_base 3: mod_base = OTHER; note = 2'-O-methylguanosine-3'-phosphate
  modified_base 4: mod_base = OTHER; note = 2'-O-methylcytidine-3'-phosphate
  modified_base 5: mod_base = OTHER; note = 2'-O-methyluridine-3'-phosphate
  modified_base 6: mod_base = OTHER; note = 2'-O-docosanyl-guanosine-3'-phosphate
  modified_base 7: mod_base = OTHER; note = 2'-deoxy-2'-fluoroadenosine-3'-phosphate
  modified_base 8: mod_base = OTHER; note = 2'-O-methyluridine-3'-phosphate
  modified_base 9: mod_base = OTHER; note = 2'-deoxy-2'-fluorocytidine-3'-phosphate
  modified_base 10: mod_base = OTHER; note = 2'-deoxy-2'-fluorouridine-3'-phosphate
  modified_base 11: mod_base = OTHER; note = 2'-deoxy-2'-fluoroguanosine-3'-phosphate
  modified_base 12: mod_base = OTHER; note = 2'-O-methyluridine-3'-phosphate
  modified_base 13: mod_base = OTHER; note = 2'-O-methyladenosine-3'-phosphate
  modified_base 14: mod_base = OTHER; note = 2'-O-methyluridine-3'-phosphate
  modified_base 15: mod_base = OTHER; note = 2'-O-methylcytidine-3'-phosphate
  modified_base 16: mod_base = OTHER; note = 2'-O-methyladenosine-3'-phosphate
  modified_base 17: mod_base = OTHER; note = 2'-O-methyluridine-3'-phosphate
  modified_base 18: mod_base = OTHER; note = 2'-O-methylcytidine-3'-phosphate
  modified_base 19: mod_base = OTHER; note = 2'-O-methylguanosine-3'-phosphate
  modified_base 20: mod_base = OTHER; note = 2'-O-methyluridine-3'-phosphate
  modified_base 21: mod_base = OTHER; note = 2'-O-methyluridine-3'-phosphate ((2S,4R)-1-[29-[[2-(acetylamino)-2-deoxy-beta-D-galactopyra nosyl]oxy]-14,14-bis[[3-[[3-[[5-[[2-(acetylamino)-2-deoxy-b eta-D-galactopyranosyl]oxy]-1-oxopentyl]amino]propyl]amino] -3-oxopropoxy]methyl]-1,12,19,25-tetraoxo-16-oxa-13,20,24-t riazanonacos-1-yl]-4-hydroxy-2-pyrrolidinyl)methyl ester
ttgctgatctgtatcatcgtt

SEQ ID NO: 3448 - RNA, 21 nt, synthetic construct
  source 1..21: mol_type = other RNA
  modified_base 1: mod_base = OTHER; note = 2'-O-methyladenosine-3'-phosphorothioate
  modified_base 2: mod_base = OTHER; note = 2'-O-methyluridine-3'-phosphorothioate
  modified_base 3: mod_base = OTHER; note = 2'-O-methylcytidine-3'-phosphate
  modified_base 4: mod_base = OTHER; note = 2'-O-methyluridine-3'-phosphate
  modified_base 5: mod_base = OTHER; note = 2'-O-methylguanosine-3'-phosphate
  modified_base 6: mod_base = OTHER; note = 2'-O-docosanyl-uridine-3'-phosphate
  modified_base 7: mod_base = OTHER; note = 2'-deoxy-2'-fluorouridine-3'-phosphate
  modified_base 8: mod_base = OTHER; note = 2'-O-methylguanosine-3'-phosphate
  modified_base 9: mod_base = OTHER; note = 2'-deoxy-2'-fluoroguanosine-3'-phosphate
  modified_base 10: mod_base = OTHER; note = 2'-deoxy-2'-fluoroadenosine-3'-phosphate
  modified_base 11: mod_base = OTHER; note = 2'-deoxy-2'-fluorouridine-3'-phosphate
  modified_base 12: mod_base = OTHER; note = 2'-O-methylcytidine-3'-phosphate
  modified_base 13: mod_base = OTHER; note = 2'-O-methyluridine-3'-phosphate
  modified_base 14: mod_base = OTHER; note = 2'-O-methyluridine-3'-phosphate
  modified_base 15: mod_base = OTHER; note = 2'-O-methylguanosine-3'-phosphate
  modified_base 16: mod_base = OTHER; note = 2'-O-methyluridine-3'-phosphate
  modified_base 17: mod_base = OTHER; note = 2'-O-methyladenosine-3'-phosphate
  modified_base 18: mod_base = OTHER; note = 2'-O-methyladenosine-3'-phosphate
  modified_base 19: mod_base = OTHER; note = 2'-O-methyladenosine-3'-phosphate
  modified_base 20: mod_base = OTHER; note = 2'-O-methylcytidine-3'-phosphate
  modified_base 21: mod_base = OTHER; note = 2'-O-methyluridine-3'-phosphate ((2S,4R)-1-[29-[[2-(acetylamino)-2-deoxy-beta-D-galactopyra nosyl]oxy]-14,14-bis[[3-[[3-[[5-[[2-(acetylamino)-2-deoxy-b eta-D-galactopyranosyl]oxy]-1-oxopentyl]amino]propyl]amino] -3-oxopropoxy]methyl]-1,12,19,25-tetraoxo-16-oxa-13,20,24-t riazanonacos-1-yl]-4-hydroxy-2-pyrrolidinyl)methyl ester
atctgttggatcttgtaaact

SEQ ID NO: 3449 - RNA, 21 nt, synthetic construct
  source 1..21: mol_type = other RNA
  modified_base 1: mod_base = OTHER; note = 2'-O-methyladenosine-3'-phosphorothioate
  modified_base 2: mod_base = OTHER; note = 2'-O-methyluridine-3'-phosphorothioate
  modified_base 3: mod_base = OTHER; note = 2'-O-methylguanosine-3'-phosphate
  modified_base 4: mod_base = OTHER; note = 2'-O-methyluridine-3'-phosphate
  modified_base 5: mod_base = OTHER; note = 2'-O-methyladenosine-3'-phosphate
  modified_base 6: mod_base = OTHER; note = 2'-O-docosanyl-guanosine-3'-phosphate
  modified_base 7: mod_base = OTHER; note = 2'-deoxy-2'-fluoroguanosine-3'-phosphate
  modified_base 8: mod_base = OTHER; note = 2'-O-methyluridine-3'-phosphate
  modified_base 9: mod_base = OTHER; note = 2'-deoxy-2'-fluoroadenosine-3'-phosphate
  modified_base 10: mod_base = OTHER; note = 2'-deoxy-2'-fluoroadenosine-3'-phosphate
  modified_base 11: mod_base = OTHER; note = 2'-deoxy-2'-fluoroadenosine-3'-phosphate
  modified_base 12: mod_base = OTHER; note = 2'-O-methyluridine-3'-phosphate
  modified_base 13: mod_base = OTHER; note = 2'-O-methylcytidine-3'-phosphate
  modified_base 14: mod_base = OTHER; note = 2'-O-methyladenosine-3'-phosphate
  modified_base 15: mod_base = OTHER; note = 2'-O-methyluridine-3'-phosphate
  modified_base 16: mod_base = OTHER; note = 2'-O-methyladenosine-3'-phosphate
  modified_base 17: mod_base = OTHER; note = 2'-O-methyladenosine-3'-phosphate
  modified_base 18: mod_base = OTHER; note = 2'-O-methyladenosine-3'-phosphate
  modified_base 19: mod_base = OTHER; note = 2'-O-methyluridine-3'-phosphate
  modified_base 20: mod_base = OTHER; note = 2'-O-methylcytidine-3'-phosphate
  modified_base 21: mod_base = OTHER; note = 2'-O-methyluridine-3'-phosphate ((2S,4R)-1-[29-[[2-(acetylamino)-2-deoxy-beta-D-galactopyra nosyl]oxy]-14,14-bis[[3-[[3-[[5-[[2-(acetylamino)-2-deoxy-b eta-D-galactopyranosyl]oxy]-1-oxopentyl]amino]propyl]amino] -3-oxopropoxy]methyl]-1,12,19,25-tetraoxo-16-oxa-13,20,24-t riazanonacos-1-yl]-4-hydroxy-2-pyrrolidinyl)methyl ester
atgtaggtaaatcataaatct

SEQ ID NO: 3450 - RNA, 21 nt, synthetic construct
  source 1..21: mol_type = other RNA
  modified_base 1: mod_base = OTHER; note = 2'-O-methylcytidine-3'-phosphorothioate
  modified_base 2: mod_base = OTHER; note = 2'-O-methyluridine-3'-phosphorothioate
  modified_base 3: mod_base = OTHER; note = 2'-O-methylguanosine-3'-phosphate
  modified_base 4: mod_base = OTHER; note = 2'-O-methyladenosine-3'-phosphate
  modified_base 5: mod_base = OTHER; note = 2'-O-methyluridine-3'-phosphate
  modified_base 6: mod_base = OTHER; note = 2'-O-docosanyl-uridine-3'-phosphate
  modified_base 7: mod_base = OTHER; note = 2'-deoxy-2'-fluoroadenosine-3'-phosphate
  modified_base 8: mod_base = OTHER; note = 2'-O-methylguanosine-3'-phosphate
  modified_base 9: mod_base = OTHER; note = 2'-deoxy-2'-fluorouridine-3'-phosphate
  modified_base 10: mod_base = OTHER; note = 2'-deoxy-2'-fluorocytidine-3'-phosphate
  modified_base 11: mod_base = OTHER; note = 2'-deoxy-2'-fluoroadenosine-3'-phosphate
  modified_base 12: mod_base = OTHER; note = 2'-O-methyluridine-3'-phosphate
  modified_base 13: mod_base = OTHER; note = 2'-O-methyladenosine-3'-phosphate
  modified_base 14: mod_base = OTHER; note = 2'-O-methyluridine-3'-phosphate
  modified_base 15: mod_base = OTHER; note = 2'-O-methyluridine-3'-phosphate
  modified_base 16: mod_base = OTHER; note = 2'-O-methylcytidine-3'-phosphate
  modified_base 17: mod_base = OTHER; note = 2'-O-methylcytidine-3'-phosphate
  modified_base 18: mod_base = OTHER; note = 2'-O-methyluridine-3'-phosphate
  modified_base 19: mod_base = OTHER; note = 2'-O-methyluridine-3'-phosphate
  modified_base 20: mod_base = OTHER; note = 2'-O-methyluridine-3'-phosphate
  modified_base 21: mod_base = OTHER; note = 2'-O-methyluridine-3'-phosphate ((2S,4R)-1-[29-[[2-(acetylamino)-2-deoxy-beta-D-galactopyra nosyl]oxy]-14,14-bis[[3-[[3-[[5-[[2-(acetylamino)-2-deoxy-b eta-D-galactopyranosyl]oxy]-1-oxopentyl]amino]propyl]amino] -3-oxopropoxy]methyl]-1,12,19,25-tetraoxo-16-oxa-13,20,24-t riazanonacos-1-yl]-4-hydroxy-2-pyrrolidinyl)methyl ester
ctgattagtcatattcctttt

SEQ ID NO: 3451 - RNA, 21 nt, synthetic construct
  source 1..21: mol_type = other RNA
  modified_base 1: mod_base = OTHER; note = 2'-O-methylcytidine-3'-phosphorothioate
  modified_base 2: mod_base = OTHER; note = 2'-O-methyladenosine-3'-phosphorothioate
  modified_base 3: mod_base = OTHER; note = 2'-O-methyluridine-3'-phosphate
  modified_base 4: mod_base = OTHER; note = 2'-O-methylcytidine-3'-phosphate
  modified_base 5: mod_base = OTHER; note = 2'-O-methyluridine-3'-phosphate
  modified_base 6: mod_base = OTHER; note = 2'-O-docosanyl-adenosine-3'-phosphate
  modified_base 7: mod_base = OTHER; note = 2'-deoxy-2'-fluorouridine-3'-phosphate
  modified_base 8: mod_base = OTHER; note = 2'-O-methyluridine-3'-phosphate
  modified_base 9: mod_base = OTHER; note = 2'-deoxy-2'-fluoroadenosine-3'-phosphate
  modified_base 10: mod_base = OTHER; note = 2'-deoxy-2'-fluorocytidine-3'-phosphate
  modified_base 11: mod_base = OTHER; note = 2'-deoxy-2'-fluoroadenosine-3'-phosphate
  modified_base 12: mod_base = OTHER; note = 2'-O-methyluridine-3'-phosphate
  modified_base 13: mod_base = OTHER; note = 2'-O-methylcytidine-3'-phosphate
  modified_base 14: mod_base = OTHER; note = 2'-O-methyluridine-3'-phosphate
  modified_base 15: mod_base = OTHER; note = 2'-O-methyladenosine-3'-phosphate
  modified_base 16: mod_base = OTHER; note = 2'-O-methylcytidine-3'-phosphate
  modified_base 17: mod_base = OTHER; note = 2'-O-methyladenosine-3'-phosphate
  modified_base 18: mod_base = OTHER; note = 2'-O-methylguanosine-3'-phosphate
  modified_base 19: mod_base = OTHER; note = 2'-O-methylcytidine-3'-phosphate
  modified_base 20: mod_base = OTHER; note = 2'-O-methyluridine-3'-phosphate
  modified_base 21: mod_base = OTHER; note = 2'-O-methyluridine-3'-phosphate ((2S,4R)-1-[29-[[2-(acetylamino)-2-deoxy-beta-D-galactopyra nosyl]oxy]-14,14-bis[[3-[[3-[[5-[[2-(acetylamino)-2-deoxy-b eta-D-galactopyranosyl]oxy]-1-oxopentyl]amino]propyl]amino] -3-oxopropoxy]methyl]-1,12,19,25-tetraoxo-16-oxa-13,20,24-t riazanonacos-1-yl]-4-hydroxy-2-pyrrolidinyl)methyl ester
catctattacatctacagctt

SEQ ID NO: 3452 - RNA, 21 nt, synthetic construct
  source 1..21: mol_type = other RNA
  modified_base 1: mod_base = OTHER; note = 2'-O-methyladenosine-3'-phosphorothioate
  modified_base 2: mod_base = OTHER; note = 2'-O-methyladenosine-3'-phosphorothioate
  modified_base 3: mod_base = OTHER; note = 2'-O-methyladenosine-3'-phosphate
  modified_base 4: mod_base = OTHER; note = 2'-O-methyladenosine-3'-phosphate
  modified_base 5: mod_base = OTHER; note = 2'-O-methyluridine-3'-phosphate
  modified_base 6: mod_base = OTHER; note = 2'-O-docosanyl-adenosine-3'-phosphate
  modified_base 7: mod_base = OTHER; note = 2'-deoxy-2'-fluoroguanosine-3'-phosphate
  modified_base 8: mod_base = OTHER; note = 2'-O-methyluridine-3'-phosphate
  modified_base 9: mod_base = OTHER; note = 2'-deoxy-2'-fluorouridine-3'-phosphate
  modified_base 10: mod_base = OTHER; note = 2'-deoxy-2'-fluorouridine-3'-phosphate
  modified_base 11: mod_base = OTHER; note = 2'-deoxy-2'-fluoroadenosine-3'-phosphate
  modified_base 12: mod_base = OTHER; note = 2'-O-methylcytidine-3'-phosphate
  modified_base 13: mod_base = OTHER; note = 2'-O-methyladenosine-3'-phosphate
  modified_base 14: mod_base = OTHER; note = 2'-O-methylcytidine-3'-phosphate
  modified_base 15: mod_base = OTHER; note = 2'-O-methylcytidine-3'-phosphate
  modified_base 16: mod_base = OTHER; note = 2'-O-methyluridine-3'-phosphate
  modified_base 17: mod_base = OTHER; note = 2'-O-methyladenosine-3'-phosphate
  modified_base 18: mod_base = OTHER; note = 2'-O-methyluridine-3'-phosphate
  modified_base 19: mod_base = OTHER; note = 2'-O-methyladenosine-3'-phosphate
  modified_base 20: mod_base = OTHER; note = 2'-O-methylcytidine-3'-phosphate
  modified_base 21: mod_base = OTHER; note = 2'-O-methyluridine-3'-phosphate ((2S,4R)-1-[29-[[2-(acetylamino)-2-deoxy-beta-D-galactopyra nosyl]oxy]-14,14-bis[[3-[[3-[[5-[[2-(acetylamino)-2-deoxy-b eta-D-galactopyranosyl]oxy]-1-oxopentyl]amino]propyl]amino] -3-oxopropoxy]methyl]-1,12,19,25-tetraoxo-16-oxa-13,20,24-t riazanonacos-1-yl]-4-hydroxy-2-pyrrolidinyl)methyl ester
aaaatagtttacacctatact

SEQ ID NO: 3453 - RNA, 21 nt, synthetic construct
  source 1..21: mol_type = other RNA
  modified_base 1: mod_base = OTHER; note = 2'-O-methylguanosine-3'-phosphorothioate
  modified_base 2: mod_base = OTHER; note = 2'-O-methylguanosine-3'-phosphorothioate
  modified_base 3: mod_base = OTHER; note = 2'-O-methyladenosine-3'-phosphate
  modified_base 4: mod_base = OTHER; note = 2'-O-methylguanosine-3'-phosphate
  modified_base 5: mod_base = OTHER; note = 2'-O-methyladenosine-3'-phosphate
  modified_base 6: mod_base = OTHER; note = 2'-O-docosanyl-cytidine-3'-phosphate
  modified_base 7: mod_base = OTHER; note = 2'-deoxy-2'-fluoroadenosine-3'-phosphate
  modified_base 8: mod_base = OTHER; note = 2'-O-methylcytidine-3'-phosphate
  modified_base 9: mod_base = OTHER; note = 2'-deoxy-2'-fluorouridine-3'-phosphate
  modified_base 10: mod_base = OTHER; note = 2'-deoxy-2'-fluoroadenosine-3'-phosphate
  modified_base 11: mod_base = OTHER; note = 2'-deoxy-2'-fluorouridine-3'-phosphate
  modified_base 12: mod_base = OTHER; note = 2'-O-methyluridine-3'-phosphate
  modified_base 13: mod_base = OTHER; note = 2'-O-methyladenosine-3'-phosphate
  modified_base 14: mod_base = OTHER; note = 2'-O-methyladenosine-3'-phosphate
  modified_base 15: mod_base = OTHER; note = 2'-O-methyladenosine-3'-phosphate
  modified_base 16: mod_base = OTHER; note = 2'-O-methyluridine-3'-phosphate
  modified_base 17: mod_base = OTHER; note = 2'-O-methyluridine-3'-phosphate
  modified_base 18: mod_base = OTHER; note = 2'-O-methyluridine-3'-phosphate
  modified_base 19: mod_base = OTHER; note = 2'-O-methyluridine-3'-phosphate
  modified_base 20: mod_base = OTHER; note = 2'-O-methylcytidine-3'-phosphate
  modified_base 21: mod_base = OTHER; note = 2'-O-methyluridine-3'-phosphate ((2S,4R)-1-[29-[[2-(acetylamino)-2-deoxy-beta-D-galactopyra nosyl]oxy]-14,14-bis[[3-[[3-[[5-[[2-(acetylamino)-2-deoxy-b eta-D-galactopyranosyl]oxy]-1-oxopentyl]amino]propyl]amino] -3-oxopropoxy]methyl]-1,12,19,25-tetraoxo-16-oxa-13,20,24-t riazanonacos-1-yl]-4-hydroxy-2-pyrrolidinyl)methyl ester
ggagacactattaaattttct

SEQ ID NO: 3454 - RNA, 21 nt, synthetic construct
  source 1..21: mol_type = other RNA
  modified_base 1: mod_base = OTHER; note = 2'-O-methyladenosine-3'-phosphorothioate
  modified_base 2: mod_base = OTHER; note = 2'-O-methylguanosine-3'-phosphorothioate
  modified_base 3: mod_base = OTHER; note = 2'-O-methyluridine-3'-phosphate
  modified_base 4: mod_base = OTHER; note = 2'-O-methyladenosine-3'-phosphate
  modified_base 5: mod_base = OTHER; note = 2'-O-methylguanosine-3'-phosphate
  modified_base 6: mod_base = OTHER; note = 2'-O-docosanyl-adenosine-3'-phosphate
  modified_base 7: mod_base = OTHER; note = 2'-deoxy-2'-fluoroadenosine-3'-phosphate
  modified_base 8: mod_base = OTHER; note = 2'-O-methyladenosine-3'-phosphate
  modified_base 9: mod_base = OTHER; note = 2'-deoxy-2'-fluoroguanosine-3'-phosphate
  modified_base 10: mod_base = OTHER; note = 2'-deoxy-2'-fluorocytidine-3'-phosphate
  modified_base 11: mod_base = OTHER; note = 2'-deoxy-2'-fluorouridine-3'-phosphate
  modified_base 12: mod_base = OTHER; note = 2'-O-methyluridine-3'-phosphate
  modified_base 13: mod_base = OTHER; note = 2'-O-methyladenosine-3'-phosphate
  modified_base 14: mod_base = OTHER; note = 2'-O-methyluridine-3'-phosphate
  modified_base 15: mod_base = OTHER; note = 2'-O-methyladenosine-3'-phosphate
  modified_base 16: mod_base = OTHER; note = 2'-O-methyladenosine-3'-phosphate
  modified_base 17: mod_base = OTHER; note = 2'-O-methyladenosine-3'-phosphate
  modified_base 18: mod_base = OTHER; note = 2'-O-methylcytidine-3'-phosphate
  modified_base 19: mod_base = OTHER; note = 2'-O-methyladenosine-3'-phosphate
  modified_base 20: mod_base = OTHER; note = 2'-O-methyladenosine-3'-phosphate
  modified_base 21: mod_base = OTHER; note = 2'-O-methyluridine-3'-phosphate ((2S,4R)-1-[29-[[2-(acetylamino)-2-deoxy-beta-D-galactopyra nosyl]oxy]-14,14-bis[[3-[[3-[[5-[[2-(acetylamino)-2-deoxy-b eta-D-galactopyranosyl]oxy]-1-oxopentyl]amino]propyl]amino] -3-oxopropoxy]methyl]-1,12,19,25-tetraoxo-16-oxa-13,20,24-t riazanonacos-1-yl]-4-hydroxy-2-pyrrolidinyl)methyl ester
agtagaaagcttataaacaat

SEQ ID NO: 3455 - RNA, 21 nt, synthetic construct
  source 1..21: mol_type = other RNA
  modified_base 1: mod_base = OTHER; note = 2'-O-methyluridine-3'-phosphorothioate
  modified_base 2: mod_base = OTHER; note = 2'-O-methylcytidine-3'-phosphorothioate
  modified_base 3: mod_base = OTHER; note = 2'-O-methyluridine-3'-phosphate
  modified_base 4: mod_base = OTHER; note = 2'-O-methyluridine-3'-phosphate
  modified_base 5: mod_base = OTHER; note = 2'-O-methyladenosine-3'-phosphate
  modified_base 6: mod_base = OTHER; note = 2'-O-docosanyl-cytidine-3'-phosphate
  modified_base 7: mod_base = OTHER; note = 2'-deoxy-2'-fluoroadenosine-3'-phosphate
  modified_base 8: mod_base = OTHER; note = 2'-O-methylcytidine-3'-phosphate
  modified_base 9: mod_base = OTHER; note = 2'-deoxy-2'-fluoroadenosine-3'-phosphate
  modified_base 10: mod_base = OTHER; note = 2'-deoxy-2'-fluoroadenosine-3'-phosphate
  modified_base 11: mod_base = OTHER; note = 2'-deoxy-2'-fluoroguanosine-3'-phosphate
  modified_base 12: mod_base = OTHER; note = 2'-O-methyluridine-3'-phosphate
  modified_base 13: mod_base = OTHER; note = 2'-O-methylguanosine-3'-phosphate
  modified_base 14: mod_base = OTHER; note = 2'-O-methyluridine-3'-phosphate
  modified_base 15: mod_base = OTHER; note = 2'-O-methyluridine-3'-phosphate
  modified_base 16: mod_base = OTHER; note = 2'-O-methylguanosine-3'-phosphate
  modified_base 17: mod_base = OTHER; note = 2'-O-methylcytidine-3'-phosphate
  modified_base 18: mod_base = OTHER; note = 2'-O-methyluridine-3'-phosphate
  modified_base 19: mod_base = OTHER; note = 2'-O-methyladenosine-3'-phosphate
  modified_base 20: mod_base = OTHER; note = 2'-O-methyladenosine-3'-phosphate
  modified_base 21: mod_base = OTHER; note = 2'-O-methyluridine-3'-phosphate ((2S,4R)-1-[29-[[2-(acetylamino)-2-deoxy-beta-D-galactopyra nosyl]oxy]-14,14-bis[[3-[[3-[[5-[[2-(acetylamino)-2-deoxy-b eta-D-galactopyranosyl]oxy]-1-oxopentyl]amino]propyl]amino] -3-oxopropoxy]methyl]-1,12,19,25-tetraoxo-16-oxa-13,20,24-t riazanonacos-1-yl]-4-hydroxy-2-pyrrolidinyl)methyl ester
tcttacacaagtgttgctaat

SEQ ID NO: 3456 - RNA, 21 nt, synthetic construct
  source 1..21: mol_type = other RNA
  modified_base 1: mod_base = OTHER; note = 2'-O-methyladenosine-3'-phosphorothioate
  modified_base 2: mod_base = OTHER; note = 2'-O-methyladenosine-3'-phosphorothioate
  modified_base 3: mod_base = OTHER; note = 2'-O-methylcytidine-3'-phosphate
  modified_base 4: mod_base = OTHER; note = 2'-O-methyluridine-3'-phosphate
  modified_base 5: mod_base = OTHER; note = 2'-O-methyladenosine-3'-phosphate
  modified_base 6: mod_base = OTHER; note = 2'-O-docosanyl-uridine-3'-phosphate
  modified_base 7: mod_base = OTHER; note = 2'-deoxy-2'-fluorouridine-3'-phosphate
  modified_base 8: mod_base = OTHER; note = 2'-O-methyluridine-3'-phosphate
  modified_base 9: mod_base = OTHER; note = 2'-deoxy-2'-fluoroguanosine-3'-phosphate
  modified_base 10: mod_base = OTHER; note = 2'-deoxy-2'-fluorouridine-3'-phosphate
  modified_base 11: mod_base = OTHER; note = 2'-deoxy-2'-fluoroadenosine-3'-phosphate
  modified_base 12: mod_base = OTHER; note = 2'-O-methylguanosine-3'-phosphate
  modified_base 13: mod_base = OTHER; note = 2'-O-methyluridine-3'-phosphate
  modified_base 14: mod_base = OTHER; note = 2'-O-methyladenosine-3'-phosphate
  modified_base 15: mod_base = OTHER; note = 2'-O-methyladenosine-3'-phosphate
  modified_base 16: mod_base = OTHER; note = 2'-O-methylcytidine-3'-phosphate
  modified_base 17: mod_base = OTHER; note = 2'-O-methyluridine-3'-phosphate
  modified_base 18: mod_base = OTHER; note = 2'-O-methyladenosine-3'-phosphate
  modified_base 19: mod_base = OTHER; note = 2'-O-methyluridine-3'-phosphate
  modified_base 20: mod_base = OTHER; note = 2'-O-methylcytidine-3'-phosphate
  modified_base 21: mod_base = OTHER; note = 2'-O-methyluridine-3'-phosphate ((2S,4R)-1-[29-[[2-(acetylamino)-2-deoxy-beta-D-galactopyra nosyl]oxy]-14,14-bis[[3-[[3-[[5-[[2-(acetylamino)-2-deoxy-b eta-D-galactopyranosyl]oxy]-1-oxopentyl]amino]propyl]amino] -3-oxopropoxy]methyl]-1,12,19,25-tetraoxo-16-oxa-13,20,24-t riazanonacos-1-yl]-4-hydroxy-2-pyrrolidinyl)methyl ester
aactatttgtagtaactatct

SEQ ID NO: 3457 - RNA, 21 nt, synthetic construct
  source 1..21: mol_type = other RNA
  modified_base 1: mod_base = OTHER; note = 2'-O-methyluridine-3'-phosphorothioate
  modified_base 2: mod_base = OTHER; note = 2'-O-methyluridine-3'-phosphorothioate
  modified_base 3: mod_base = OTHER; note = 2'-O-methyladenosine-3'-phosphate
  modified_base 4: mod_base = OTHER; note = 2'-O-methylcytidine-3'-phosphate
  modified_base 5: mod_base = OTHER; note = 2'-O-methyluridine-3'-phosphate
  modified_base 6: mod_base = OTHER; note = 2'-O-docosanyl-adenosine-3'-phosphate
  modified_base 7: mod_base = OTHER; note = 2'-deoxy-2'-fluoroadenosine-3'-phosphate
  modified_base 8: mod_base = OTHER; note = 2'-O-methyladenosine-3'-phosphate
  modified_base 9: mod_base = OTHER; note = 2'-deoxy-2'-fluoroadenosine-3'-phosphate
  modified_base 10: mod_base = OTHER; note = 2'-deoxy-2'-fluoroguanosine-3'-phosphate
  modified_base 11: mod_base = OTHER; note = 2'-deoxy-2'-fluoroadenosine-3'-phosphate
  modified_base 12: mod_base = OTHER; note = 2'-O-methyladenosine-3'-phosphate
  modified_base 13: mod_base = OTHER; note = 2'-O-methyluridine-3'-phosphate
  modified_base 14: mod_base = OTHER; note = 2'-O-methyladenosine-3'-phosphate
  modified_base 15: mod_base = OTHER; note = 2'-O-methyluridine-3'-phosphate
  modified_base 16: mod_base = OTHER; note = 2'-O-methylguanosine-3'-phosphate
  modified_base 17: mod_base = OTHER; note = 2'-O-methyluridine-3'-phosphate
  modified_base 18: mod_base = OTHER; note = 2'-O-methyladenosine-3'-phosphate
  modified_base 19: mod_base = OTHER; note = 2'-O-methyladenosine-3'-phosphate
  modified_base 20: mod_base = OTHER; note = 2'-O-methylcytidine-3'-phosphate
  modified_base 21: mod_base = OTHER; note = 2'-O-methyluridine-3'-phosphate ((2S,4R)-1-[29-[[2-(acetylamino)-2-deoxy-beta-D-galactopyra nosyl]oxy]-14,14-bis[[3-[[3-[[5-[[2-(acetylamino)-2-deoxy-b eta-D-galactopyranosyl]oxy]-1-oxopentyl]amino]propyl]amino] -3-oxopropoxy]methyl]-1,12,19,25-tetraoxo-16-oxa-13,20,24-t riazanonacos-1-yl]-4-hydroxy-2-pyrrolidinyl)methyl ester
ttactaaaagaatatgtaact

SEQ ID NO: 3458 - RNA, 21 nt, synthetic construct
  source 1..21: mol_type = other RNA
  modified_base 1: mod_base = OTHER; note = 2'-O-methyluridine-3'-phosphorothioate
  modified_base 2: mod_base = OTHER; note = 2'-O-methylcytidine-3'-phosphorothioate
  modified_base 3: mod_base = OTHER; note = 2'-O-methyladenosine-3'-phosphate
  modified_base 4: mod_base = OTHER; note = 2'-O-methyladenosine-3'-phosphate
  modified_base 5: mod_base = OTHER; note = 2'-O-methyladenosine-3'-phosphate
  modified_base 6: mod_base = OTHER; note = 2'-O-docosanyl-adenosine-3'-phosphate
  modified_base 7: mod_base = OTHER; note = 2'-deoxy-2'-fluorouridine-3'-phosphate
  modified_base 8: mod_base = OTHER; note = 2'-O-methyladenosine-3'-phosphate
  modified_base 9: mod_base = OTHER; note = 2'-deoxy-2'-fluoroguanosine-3'-phosphate
  modified_base 10: mod_base = OTHER; note = 2'-deoxy-2'-fluorouridine-3'-phosphate
  modified_base 11: mod_base = OTHER; note = 2'-deoxy-2'-fluorocytidine-3'-phosphate
  modified_base 12: mod_base = OTHER; note = 2'-O-methylcytidine-3'-phosphate
  modified_base 13: mod_base = OTHER; note = 2'-O-methyladenosine-3'-phosphate
  modified_base 14: mod_base = OTHER; note = 2'-O-methylcytidine-3'-phosphate
  modified_base 15: mod_base = OTHER; note = 2'-O-methyluridine-3'-phosphate
  modified_base 16: mod_base = OTHER; note = 2'-O-methylguanosine-3'-phosphate
  modified_base 17: mod_base = OTHER; note = 2'-O-methyladenosine-3'-phosphate
  modified_base 18: mod_base = OTHER; note = 2'-O-methylcytidine-3'-phosphate
  modified_base 19: mod_base = OTHER; note = 2'-O-methyluridine-3'-phosphate
  modified_base 20: mod_base = OTHER; note = 2'-O-methylcytidine-3'-phosphate
  modified_base 21: mod_base = OTHER; note = 2'-O-methyluridine-3'-phosphate ((2S,4R)-1-[29-[[2-(acetylamino)-2-deoxy-beta-D-galactopyra nosyl]oxy]-14,14-bis[[3-[[3-[[5-[[2-(acetylamino)-2-deoxy-b eta-D-galactopyranosyl]oxy]-1-oxopentyl]amino]propyl]amino] -3-oxopropoxy]methyl]-1,12,19,25-tetraoxo-16-oxa-13,20,24-t riazanonacos-1-yl]-4-hydroxy-2-pyrrolidinyl)methyl ester
tcaaaatagtccactgactct

SEQ ID NO: 3459 - RNA, 21 nt, synthetic construct
  source 1..21: mol_type = other RNA
  modified_base 1: mod_base = OTHER; note = 2'-O-methyladenosine-3'-phosphorothioate
  modified_base 2: mod_base = OTHER; note = 2'-O-methylcytidine-3'-phosphorothioate
  modified_base 3: mod_base = OTHER; note = 2'-O-methyladenosine-3'-phosphate
  modified_base 4: mod_base = OTHER; note = 2'-O-methylguanosine-3'-phosphate
  modified_base 5: mod_base = OTHER; note = 2'-O-methylguanosine-3'-phosphate
  modified_base 6: mod_base = OTHER; note = 2'-O-docosanyl-adenosine-3'-phosphate
  modified_base 7: mod_base = OTHER; note = 2'-deoxy-2'-fluoroadenosine-3'-phosphate
  modified_base 8: mod_base = OTHER; note = 2'-O-methyladenosine-3'-phosphate
  modified_base 9: mod_base = OTHER; note = 2'-deoxy-2'-fluoroadenosine-3'-phosphate
  modified_base 10: mod_base = OTHER; note = 2'-deoxy-2'-fluorocytidine-3'-phosphate
  modified_base 11: mod_base = OTHER; note = 2'-deoxy-2'-fluoroadenosine-3'-phosphate
  modified_base 12: mod_base = OTHER; note = 2'-O-methyladenosine-3'-phosphate
  modified_base 13: mod_base = OTHER; note = 2'-O-methyluridine-3'-phosphate
  modified_base 14: mod_base = OTHER; note = 2'-O-methyladenosine-3'-phosphate
  modified_base 15: mod_base = OTHER; note = 2'-O-methyluridine-3'-phosphate
  modified_base 16: mod_base = OTHER; note = 2'-O-methyluridine-3'-phosphate
  modified_base 17: mod_base = OTHER; note = 2'-O-methylguanosine-3'-phosphate
  modified_base 18: mod_base = OTHER; note = 2'-O-methyluridine-3'-phosphate
  modified_base 19: mod_base = OTHER; note = 2'-O-methyladenosine-3'-phosphate
  modified_base 20: mod_base = OTHER; note = 2'-O-methyluridine-3'-phosphate
  modified_base 21: mod_base = OTHER; note = 2'-O-methyluridine-3'-phosphate ((2S,4R)-1-[29-[[2-(acetylamino)-2-deoxy-beta-D-galactopyra nosyl]oxy]-14,14-bis[[3-[[3-[[5-[[2-(acetylamino)-2-deoxy-b eta-D-galactopyranosyl]oxy]-1-oxopentyl]amino]propyl]amino] -3-oxopropoxy]methyl]-1,12,19,25-tetraoxo-16-oxa-13,20,24-t riazanonacos-1-yl]-4-hydroxy-2-pyrrolidinyl)methyl ester
acaggaaaacaatattgtatt

SEQ ID NO: 3460 - RNA, 21 nt, synthetic construct
  source 1..21: mol_type = other RNA
  modified_base 1: mod_base = OTHER; note = 2'-O-methylguanosine-3'-phosphorothioate
  modified_base 2: mod_base = OTHER; note = 2'-O-methyluridine-3'-phosphorothioate
  modified_base 3: mod_base = OTHER; note = 2'-O-methylguanosine-3'-phosphate
  modified_base 4: mod_base = OTHER; note = 2'-O-methyluridine-3'-phosphate
  modified_base 5: mod_base = OTHER; note = 2'-O-methyladenosine-3'-phosphate
  modified_base 6: mod_base = OTHER; note = 2'-O-docosanyl-uridine-3'-phosphate
  modified_base 7: mod_base = OTHER; note = 2'-deoxy-2'-fluoroadenosine-3'-phosphate
  modified_base 8: mod_base = OTHER; note = 2'-O-methyladenosine-3'-phosphate
  modified_base 9: mod_base = OTHER; note = 2'-deoxy-2'-fluoroadenosine-3'-phosphate
  modified_base 10: mod_base = OTHER; note = 2'-deoxy-2'-fluoroadenosine-3'-phosphate
  modified_base 11: mod_base = OTHER; note = 2'-deoxy-2'-fluorouridine-3'-phosphate
  modified_base 12: mod_base = OTHER; note = 2'-O-methylguanosine-3'-phosphate
  modified_base 13: mod_base = OTHER; note = 2'-O-methylcytidine-3'-phosphate
  modified_base 14: mod_base = OTHER; note = 2'-O-methyladenosine-3'-phosphate
  modified_base 15: mod_base = OTHER; note = 2'-O-methyladenosine-3'-phosphate
  modified_base 16: mod_base = OTHER; note = 2'-O-methylcytidine-3'-phosphate
  modified_base 17: mod_base = OTHER; note = 2'-O-methyluridine-3'-phosphate
  modified_base 18: mod_base = OTHER; note = 2'-O-methylguanosine-3'-phosphate
  modified_base 19: mod_base = OTHER; note = 2'-O-methyluridine-3'-phosphate
  modified_base 20: mod_base = OTHER; note = 2'-O-methyluridine-3'-phosphate
  modified_base 21: mod_base = OTHER; note = 2'-O-methyluridine-3'-phosphate ((2S,4R)-1-[29-[[2-(acetylamino)-2-deoxy-beta-D-galactopyra nosyl]oxy]-14,14-bis[[3-[[3-[[5-[[2-(acetylamino)-2-deoxy-b eta-D-galactopyranosyl]oxy]-1-oxopentyl]amino]propyl]amino] -3-oxopropoxy]methyl]-1,12,19,25-tetraoxo-16-oxa-13,20,24-t riazanonacos-1-yl]-4-hydroxy-2-pyrrolidinyl)methyl ester
gtgtataaaatgcaactgttt

SEQ ID NO: 3461 - RNA, 21 nt, synthetic construct
  source 1..21: mol_type = other RNA
  modified_base 1: mod_base = OTHER; note = 2'-O-methylcytidine-3'-phosphorothioate
  modified_base 2: mod_base = OTHER; note = 2'-O-methyluridine-3'-phosphorothioate
  modified_base 3: mod_base = OTHER; note = 2'-O-methyladenosine-3'-phosphate
  modified_base 4: mod_base = OTHER; note = 2'-O-methyluridine-3'-phosphate
  modified_base 5: mod_base = OTHER; note = 2'-O-methyladenosine-3'-phosphate
  modified_base 6: mod_base = OTHER; note = 2'-O-docosanyl-cytidine-3'-phosphate
  modified_base 7: mod_base = OTHER; note = 2'-deoxy-2'-fluorouridine-3'-phosphate
  modified_base 8: mod_base = OTHER; note = 2'-O-methylguanosine-3'-phosphate
  modified_base 9: mod_base = OTHER; note = 2'-deoxy-2'-fluorouridine-3'-phosphate
  modified_base 10: mod_base = OTHER; note = 2'-deoxy-2'-fluoroguanosine-3'-phosphate
  modified_base 11: mod_base = OTHER; note = 2'-deoxy-2'-fluoroadenosine-3'-phosphate
  modified_base 12: mod_base = OTHER; note = 2'-O-methyluridine-3'-phosphate
  modified_base 13: mod_base = OTHER; note = 2'-O-methylguanosine-3'-phosphate
  modified_base 14: mod_base = OTHER; note = 2'-O-methyladenosine-3'-phosphate
  modified_base 15: mod_base = OTHER; note = 2'-O-methyluridine-3'-phosphate
  modified_base 16: mod_base = OTHER; note = 2'-O-methylcytidine-3'-phosphate
  modified_base 17: mod_base = OTHER; note = 2'-O-methyladenosine-3'-phosphate
  modified_base 18: mod_base = OTHER; note = 2'-O-methylcytidine-3'-phosphate
  modified_base 19: mod_base = OTHER; note = 2'-O-methyladenosine-3'-phosphate
  modified_base 20: mod_base = OTHER; note = 2'-O-methylguanosine-3'-phosphate
  modified_base 21: mod_base = OTHER; note = 2'-O-methyluridine-3'-phosphate ((2S,4R)-1-[29-[[2-(acetylamino)-2-deoxy-beta-D-galactopyra nosyl]oxy]-14,14-bis[[3-[[3-[[5-[[2-(acetylamino)-2-deoxy-b eta-D-galactopyranosyl]oxy]-1-oxopentyl]amino]propyl]amino] -3-oxopropoxy]methyl]-1,12,19,25-tetraoxo-16-oxa-13,20,24-t riazanonacos-1-yl]-4-hydroxy-2-pyrrolidinyl)methyl ester
ctatactgtgatgatcacagt

SEQ ID NO: 3462 - RNA, 21 nt, synthetic construct
  source 1..21: mol_type = other RNA
  modified_base 1: mod_base = OTHER; note = 2'-O-methylguanosine-3'-phosphorothioate
  modified_base 2: mod_base = OTHER; note = 2'-O-methylcytidine-3'-phosphorothioate
  modified_base 3: mod_base = OTHER; note = 2'-O-methylcytidine-3'-phosphate
  modified_base 4: mod_base = OTHER; note = 2'-O-methyladenosine-3'-phosphate
  modified_base 5: mod_base = OTHER; note = 2'-O-methyluridine-3'-phosphate
  modified_base 6: mod_base = OTHER; note = 2'-O-docosanyl-adenosine-3'-phosphate
  modified_base 7: mod_base = OTHER; note = 2'-deoxy-2'-fluorocytidine-3'-phosphate
  modified_base 8: mod_base = OTHER; note = 2'-O-methyluridine-3'-phosphate
  modified_base 9: mod_base = OTHER; note = 2'-deoxy-2'-fluorocytidine-3'-phosphate
  modified_base 10: mod_base = OTHER; note = 2'-deoxy-2'-fluorouridine-3'-phosphate
  modified_base 11: mod_base = OTHER; note = 2'-deoxy-2'-fluorouridine-3'-phosphate
  modified_base 12: mod_base = OTHER; note = 2'-O-methyladenosine-3'-phosphate
  modified_base 13: mod_base = OTHER; note = 2'-O-methylcytidine-3'-phosphate
  modified_base 14: mod_base = OTHER; note = 2'-O-methyladenosine-3'-phosphate
  modified_base 15: mod_base = OTHER; note = 2'-O-methyluridine-3'-phosphate
  modified_base 16: mod_base = OTHER; note = 2'-O-methyladenosine-3'-phosphate
  modified_base 17: mod_base = OTHER; note = 2'-O-methyladenosine-3'-phosphate
  modified_base 18: mod_base = OTHER; note = 2'-O-methyluridine-3'-phosphate
  modified_base 19: mod_base = OTHER; note = 2'-O-methyladenosine-3'-phosphate
  modified_base 20: mod_base = OTHER; note = 2'-O-methyladenosine-3'-phosphate
  modified_base 21: mod_base = OTHER; note = 2'-O-methyluridine-3'-phosphate ((2S,4R)-1-[29-[[2-(acetylamino)-2-deoxy-beta-D-galactopyra nosyl]oxy]-14,14-bis[[3-[[3-[[5-[[2-(acetylamino)-2-deoxy-b eta-D-galactopyranosyl]oxy]-1-oxopentyl]amino]propyl]amino] -3-oxopropoxy]methyl]-1,12,19,25-tetraoxo-16-oxa-13,20,24-t riazanonacos-1-yl]-4-hydroxy-2-pyrrolidinyl)methyl ester
gccatactcttacataataat

SEQ ID NO: 3463 - RNA, 21 nt, synthetic construct
  source 1..21: mol_type = other RNA
  modified_base 1: mod_base = OTHER; note = 2'-O-methylguanosine-3'-phosphorothioate
  modified_base 2: mod_base = OTHER; note = 2'-O-methyladenosine-3'-phosphorothioate
  modified_base 3: mod_base = OTHER; note = 2'-O-methyladenosine-3'-phosphate
  modified_base 4: mod_base = OTHER; note = 2'-O-methyluridine-3'-phosphate
  modified_base 5: mod_base = OTHER; note = 2'-O-methylcytidine-3'-phosphate
  modified_base 6: mod_base = OTHER; note = 2'-O-docosanyl-adenosine-3'-phosphate
  modified_base 7: mod_base = OTHER; note = 2'-deoxy-2'-fluorocytidine-3'-phosphate
  modified_base 8: mod_base = OTHER; note = 2'-O-methyladenosine-3'-phosphate
  modified_base 9: mod_base = OTHER; note = 2'-deoxy-2'-fluoroguanosine-3'-phosphate
  modified_base 10: mod_base = OTHER; note = 2'-deoxy-2'-fluoroadenosine-3'-phosphate
  modified_base 11: mod_base = OTHER; note = 2'-deoxy-2'-fluoroadenosine-3'-phosphate
  modified_base 12: mod_base = OTHER; note = 2'-O-methyluridine-3'-phosphate
  modified_base 13: mod_base = OTHER; note = 2'-O-methyluridine-3'-phosphate
  modified_base 14: mod_base = OTHER; note = 2'-O-methylcytidine-3'-phosphate
  modified_base 15: mod_base = OTHER; note = 2'-O-methyluridine-3'-phosphate
  modified_base 16: mod_base = OTHER; note = 2'-O-methyladenosine-3'-phosphate
  modified_base 17: mod_base = OTHER; note = 2'-O-methylguanosine-3'-phosphate
  modified_base 18: mod_base = OTHER; note = 2'-O-methyluridine-3'-phosphate
  modified_base 19: mod_base = OTHER; note = 2'-O-methyladenosine-3'-phosphate
  modified_base 20: mod_base = OTHER; note = 2'-O-methylcytidine-3'-phosphate
  modified_base 21: mod_base = OTHER; note = 2'-O-methyluridine-3'-phosphate ((2S,4R)-1-[29-[[2-(acetylamino)-2-deoxy-beta-D-galactopyra nosyl]oxy]-14,14-bis[[3-[[3-[[5-[[2-(acetylamino)-2-deoxy-b eta-D-galactopyranosyl]oxy]-1-oxopentyl]amino]propyl]amino] -3-oxopropoxy]methyl]-1,12,19,25-tetraoxo-16-oxa-13,20,24-t riazanonacos-1-yl]-4-hydroxy-2-pyrrolidinyl)methyl ester
gaatcacagaattctagtact

SEQ ID NO: 3464 - RNA, 21 nt, synthetic construct
  source 1..21: mol_type = other RNA
  modified_base 1: mod_base = OTHER; note = 2'-O-methyladenosine-3'-phosphorothioate
  modified_base 2: mod_base = OTHER; note = 2'-O-methylcytidine-3'-phosphorothioate
  modified_base 3: mod_base = OTHER; note = 2'-O-methyladenosine-3'-phosphate
  modified_base 4: mod_base = OTHER; note = 2'-O-methylcytidine-3'-phosphate
  modified_base 5: mod_base = OTHER; note = 2'-O-methyladenosine-3'-phosphate
  modified_base 6: mod_base = OTHER; note = 2'-O-docosanyl-uridine-3'-phosphate
  modified_base 7: mod_base = OTHER; note = 2'-deoxy-2'-fluoroadenosine-3'-phosphate
  modified_base 8: mod_base = OTHER; note = 2'-O-methyluridine-3'-phosphate
  modified_base 9: mod_base = OTHER; note = 2'-deoxy-2'-fluorouridine-3'-phosphate
  modified_base 10: mod_base = OTHER; note = 2'-deoxy-2'-fluorouridine-3'-phosphate
  modified_base 11: mod_base = OTHER; note = 2'-deoxy-2'-fluorouridine-3'-phosphate
  modified_base 12: mod_base = OTHER; note = 2'-O-methylguanosine-3'-phosphate
  modified_base 13: mod_base = OTHER; note = 2'-O-methylcytidine-3'-phosphate
  modified_base 14: mod_base = OTHER; note = 2'-O-methylguanosine-3'-phosphate
  modified_base 15: mod_base = OTHER; note = 2'-O-methyluridine-3'-phosphate
  modified_base 16: mod_base = OTHER; note = 2'-O-methylguanosine-3'-phosphate
  modified_base 17: mod_base = OTHER; note = 2'-O-methyluridine-3'-phosphate
  modified_base 18: mod_base = OTHER; note = 2'-O-methyluridine-3'-phosphate
  modified_base 19: mod_base = OTHER; note = 2'-O-methyladenosine-3'-phosphate
  modified_base 20: mod_base = OTHER; note = 2'-O-methyluridine-3'-phosphate
  modified_base 21: mod_base = OTHER; note = 2'-O-methyluridine-3'-phosphate ((2S,4R)-1-[29-[[2-(acetylamino)-2-deoxy-beta-D-galactopyra nosyl]oxy]-14,14-bis[[3-[[3-[[5-[[2-(acetylamino)-2-deoxy-b eta-D-galactopyranosyl]oxy]-1-oxopentyl]amino]propyl]amino] -3-oxopropoxy]methyl]-1,12,19,25-tetraoxo-16-oxa-13,20,24-t riazanonacos-1-yl]-4-hydroxy-2-pyrrolidinyl)methyl ester
acacatattttgcgtgttatt

SEQ ID NO: 3465 - RNA, 21 nt, synthetic construct
  source 1..21: mol_type = other RNA
  modified_base 1: mod_base = OTHER; note = 2'-O-methyluridine-3'-phosphorothioate
  modified_base 2: mod_base = OTHER; note = 2'-O-methyluridine-3'-phosphorothioate
  modified_base 3: mod_base = OTHER; note = 2'-O-methylguanosine-3'-phosphate
  modified_base 4: mod_base = OTHER; note = 2'-O-methyladenosine-3'-phosphate
  modified_base 5: mod_base = OTHER; note = 2'-O-methyluridine-3'-phosphate
  modified_base 6: mod_base = OTHER; note = 2'-O-docosanyl-uridine-3'-phosphate
  modified_base 7: mod_base = OTHER; note = 2'-deoxy-2'-fluoroadenosine-3'-phosphate
  modified_base 8: mod_base = OTHER; note = 2'-O-methylcytidine-3'-phosphate
  modified_base 9: mod_base = OTHER; note = 2'-deoxy-2'-fluoroadenosine-3'-phosphate
  modified_base 10: mod_base = OTHER; note = 2'-deoxy-2'-fluorocytidine-3'-phosphate
  modified_base 11: mod_base = OTHER; note = 2'-deoxy-2'-fluorouridine-3'-phosphate
  modified_base 12: mod_base = OTHER; note = 2'-O-methylguanosine-3'-phosphate
  modified_base 13: mod_base = OTHER; note = 2'-O-methyluridine-3'-phosphate
  modified_base 14: mod_base = OTHER; note = 2'-O-methyluridine-3'-phosphate
  modified_base 15: mod_base = OTHER; note = 2'-O-methyluridine-3'-phosphate
  modified_base 16: mod_base = OTHER; note = 2'-O-methylguanosine-3'-phosphate
  modified_base 17: mod_base = OTHER; note = 2'-O-methyluridine-3'-phosphate
  modified_base 18: mod_base = OTHER; note = 2'-O-methyluridine-3'-phosphate
  modified_base 19: mod_base = OTHER; note = 2'-O-methyladenosine-3'-phosphate
  modified_base 20: mod_base = OTHER; note = 2'-O-methylcytidine-3'-phosphate
  modified_base 21: mod_base = OTHER; note = 2'-O-methyluridine-3'-phosphate ((2S,4R)-1-[29-[[2-(acetylamino)-2-deoxy-beta-D-galactopyra nosyl]oxy]-14,14-bis[[3-[[3-[[5-[[2-(acetylamino)-2-deoxy-b eta-D-galactopyranosyl]oxy]-1-oxopentyl]amino]propyl]amino] -3-oxopropoxy]methyl]-1,12,19,25-tetraoxo-16-oxa-13,20,24-t riazanonacos-1-yl]-4-hydroxy-2-pyrrolidinyl)methyl ester
ttgattacactgtttgttact

SEQ ID NO: 3466 - RNA, 21 nt, synthetic construct
  source 1..21: mol_type = other RNA
  modified_base 1: mod_base = OTHER; note = 2'-O-methylcytidine-3'-phosphorothioate
  modified_base 2: mod_base = OTHER; note = 2'-O-methylcytidine-3'-phosphorothioate
  modified_base 3: mod_base = OTHER; note = 2'-O-methyladenosine-3'-phosphate
  modified_base 4: mod_base = OTHER; note = 2'-O-methylguanosine-3'-phosphate
  modified_base 5: mod_base = OTHER; note = 2'-O-methylcytidine-3'-phosphate
  modified_base 6: mod_base = OTHER; note = 2'-O-docosanyl-uridine-3'-phosphate
  modified_base 7: mod_base = OTHER; note = 2'-deoxy-2'-fluoroadenosine-3'-phosphate
  modified_base 8: mod_base = OTHER; note = 2'-O-methyluridine-3'-phosphate
  modified_base 9: mod_base = OTHER; note = 2'-deoxy-2'-fluoroguanosine-3'-phosphate
  modified_base 10: mod_base = OTHER; note = 2'-deoxy-2'-fluorocytidine-3'-phosphate
  modified_base 11: mod_base = OTHER; note = 2'-deoxy-2'-fluorouridine-3'-phosphate
  modified_base 12: mod_base = OTHER; note = 2'-O-methyladenosine-3'-phosphate
  modified_base 13: mod_base = OTHER; note = 2'-O-methyluridine-3'-phosphate
  modified_base 14: mod_base = OTHER; note = 2'-O-methyluridine-3'-phosphate
  modified_base 15: mod_base = OTHER; note = 2'-O-methyluridine-3'-phosphate
  modified_base 16: mod_base = OTHER; note = 2'-O-methyladenosine-3'-phosphate
  modified_base 17: mod_base = OTHER; note = 2'-O-methyluridine-3'-phosphate
  modified_base 18: mod_base = OTHER; note = 2'-O-methyladenosine-3'-phosphate
  modified_base 19: mod_base = OTHER; note = 2'-O-methyladenosine-3'-phosphate
  modified_base 20: mod_base = OTHER; note = 2'-O-methyluridine-3'-phosphate
  modified_base 21: mod_base = OTHER; note = 2'-O-methyluridine-3'-phosphate ((2S,4R)-1-[29-[[2-(acetylamino)-2-deoxy-beta-D-galactopyra nosyl]oxy]-14,14-bis[[3-[[3-[[5-[[2-(acetylamino)-2-deoxy-b eta-D-galactopyranosyl]oxy]-1-oxopentyl]amino]propyl]amino] -3-oxopropoxy]methyl]-1,12,19,25-tetraoxo-16-oxa-13,20,24-t riazanonacos-1-yl]-4-hydroxy-2-pyrrolidinyl)methyl ester
ccagctatgctatttataatt

SEQ ID NO: 3467 - RNA, 21 nt, synthetic construct
  source 1..21: mol_type = other RNA
  modified_base 1: mod_base = OTHER; note = 2'-O-methylcytidine-3'-phosphorothioate
  modified_base 2: mod_base = OTHER; note = 2'-O-methyladenosine-3'-phosphorothioate
  modified_base 3: mod_base = OTHER; note = 2'-O-methyladenosine-3'-phosphate
  modified_base 4: mod_base = OTHER; note = 2'-O-methylcytidine-3'-phosphate
  modified_base 5: mod_base = OTHER; note = 2'-O-methyluridine-3'-phosphate
  modified_base 6: mod_base = OTHER; note = 2'-O-docosanyl-guanosine-3'-phosphate
  modified_base 7: mod_base = OTHER; note = 2'-deoxy-2'-fluoroadenosine-3'-phosphate
  modified_base 8: mod_base = OTHER; note = 2'-O-methyladenosine-3'-phosphate
  modified_base 9: mod_base = OTHER; note = 2'-deoxy-2'-fluoroguanosine-3'-phosphate
  modified_base 10: mod_base = OTHER; note = 2'-deoxy-2'-fluorouridine-3'-phosphate
  modified_base 11: mod_base = OTHER; note = 2'-deoxy-2'-fluoroadenosine-3'-phosphate
  modified_base 12: mod_base = OTHER; note = 2'-O-methyladenosine-3'-phosphate
  modified_base 13: mod_base = OTHER; note = 2'-O-methyladenosine-3'-phosphate
  modified_base 14: mod_base = OTHER; note = 2'-O-methyladenosine-3'-phosphate
  modified_base 15: mod_base = OTHER; note = 2'-O-methyluridine-3'-phosphate
  modified_base 16: mod_base = OTHER; note = 2'-O-methyluridine-3'-phosphate
  modified_base 17: mod_base = OTHER; note = 2'-O-methylguanosine-3'-phosphate
  modified_base 18: mod_base = OTHER; note = 2'-O-methyladenosine-3'-phosphate
  modified_base 19: mod_base = OTHER; note = 2'-O-methylguanosine-3'-phosphate
  modified_base 20: mod_base = OTHER; note = 2'-O-methyluridine-3'-phosphate
  modified_base 21: mod_base = OTHER; note = 2'-O-methyluridine-3'-phosphate ((2S,4R)-1-[29-[[2-(acetylamino)-2-deoxy-beta-D-galactopyra nosyl]oxy]-14,14-bis[[3-[[3-[[5-[[2-(acetylamino)-2-deoxy-b eta-D-galactopyranosyl]oxy]-1-oxopentyl]amino]propyl]amino] -3-oxopropoxy]methyl]-1,12,19,25-tetraoxo-16-oxa-13,20,24-t riazanonacos-1-yl]-4-hydroxy-2-pyrrolidinyl)methyl ester
caactgaagtaaaattgagtt

SEQ ID NO: 3468 - RNA, 21 nt, synthetic construct
  source 1..21: mol_type = other RNA
  modified_base 1: mod_base = OTHER; note = 2'-O-methylguanosine-3'-phosphorothioate
  modified_base 2: mod_base = OTHER; note = 2'-O-methyluridine-3'-phosphorothioate
  modified_base 3: mod_base = OTHER; note = 2'-O-methylguanosine-3'-phosphate
  modified_base 4: mod_base = OTHER; note = 2'-O-methyluridine-3'-phosphate
  modified_base 5: mod_base = OTHER; note = 2'-O-methyladenosine-3'-phosphate
  modified_base 6: mod_base = OTHER; note = 2'-O-docosanyl-adenosine-3'-phosphate
  modified_base 7: mod_base = OTHER; note = 2'-deoxy-2'-fluorouridine-3'-phosphate
  modified_base 8: mod_base = OTHER; note = 2'-O-methyluridine-3'-phosphate
  modified_base 9: mod_base = OTHER; note = 2'-deoxy-2'-fluoroadenosine-3'-phosphate
  modified_base 10: mod_base = OTHER; note = 2'-deoxy-2'-fluoroadenosine-3'-phosphate
  modified_base 11: mod_base = OTHER; note = 2'-deoxy-2'-fluorocytidine-3'-phosphate
  modified_base 12: mod_base = OTHER; note = 2'-O-methylcytidine-3'-phosphate
  modified_base 13: mod_base = OTHER; note = 2'-O-methyladenosine-3'-phosphate
  modified_base 14: mod_base = OTHER; note = 2'-O-methyluridine-3'-phosphate
  modified_base 15: mod_base = OTHER; note = 2'-O-methyladenosine-3'-phosphate
  modified_base 16: mod_base = OTHER; note = 2'-O-methyluridine-3'-phosphate
  modified_base 17: mod_base = OTHER; note = 2'-O-methylcytidine-3'-phosphate
  modified_base 18: mod_base = OTHER; note = 2'-O-methyluridine-3'-phosphate
  modified_base 19: mod_base = OTHER; note = 2'-O-methyluridine-3'-phosphate
  modified_base 20: mod_base = OTHER; note = 2'-O-methylcytidine-3'-phosphate
  modified_base 21: mod_base = OTHER; note = 2'-O-methyluridine-3'-phosphate ((2S,4R)-1-[29-[[2-(acetylamino)-2-deoxy-beta-D-galactopyra nosyl]oxy]-14,14-bis[[3-[[3-[[5-[[2-(acetylamino)-2-deoxy-b eta-D-galactopyranosyl]oxy]-1-oxopentyl]amino]propyl]amino] -3-oxopropoxy]methyl]-1,12,19,25-tetraoxo-16-oxa-13,20,24-t riazanonacos-1-yl]-4-hydroxy-2-pyrrolidinyl)methyl ester
gtgtaattaaccatatcttct

SEQ ID NO: 3469 - RNA, 21 nt, synthetic construct
  source 1..21: mol_type = other RNA
  modified_base 1: mod_base = OTHER; note = 2'-O-methyluridine-3'-phosphorothioate
  modified_base 2: mod_base = OTHER; note = 2'-O-methylcytidine-3'-phosphorothioate
  modified_base 3: mod_base = OTHER; note = 2'-O-methyluridine-3'-phosphate
  modified_base 4: mod_base = OTHER; note = 2'-O-methyladenosine-3'-phosphate
  modified_base 5: mod_base = OTHER; note = 2'-O-methyluridine-3'-phosphate
  modified_base 6: mod_base = OTHER; note = 2'-O-docosanyl-cytidine-3'-phosphate
  modified_base 7: mod_base = OTHER; note = 2'-deoxy-2'-fluoroadenosine-3'-phosphate
  modified_base 8: mod_base = OTHER; note = 2'-O-methyladenosine-3'-phosphate
  modified_base 9: mod_base = OTHER; note = 2'-deoxy-2'-fluorocytidine-3'-phosphate
  modified_base 10: mod_base = OTHER; note = 2'-deoxy-2'-fluorocytidine-3'-phosphate
  modified_base 11: mod_base = OTHER; note = 2'-deoxy-2'-fluoroadenosine-3'-phosphate
  modified_base 12: mod_base = OTHER; note = 2'-O-methyladenosine-3'-phosphate
  modified_base 13: mod_base = OTHER; note = 2'-O-methyladenosine-3'-phosphate
  modified_base 14: mod_base = OTHER; note = 2'-O-methyluridine-3'-phosphate
  modified_base 15: mod_base = OTHER; note = 2'-O-methylguanosine-3'-phosphate
  modified_base 16: mod_base = OTHER; note = 2'-O-methylguanosine-3'-phosphate
  modified_base 17: mod_base = OTHER; note = 2'-O-methyluridine-3'-phosphate
  modified_base 18: mod_base = OTHER; note = 2'-O-methyladenosine-3'-phosphate
  modified_base 19: mod_base = OTHER; note = 2'-O-methyladenosine-3'-phosphate
  modified_base 20: mod_base = OTHER; note = 2'-O-methylguanosine-3'-phosphate
  modified_base 21: mod_base = OTHER; note = 2'-O-methyluridine-3'-phosphate ((2S,4R)-1-[29-[[2-(acetylamino)-2-deoxy-beta-D-galactopyra nosyl]oxy]-14,14-bis[[3-[[3-[[5-[[2-(acetylamino)-2-deoxy-b eta-D-galactopyranosyl]oxy]-1-oxopentyl]amino]propyl]amino] -3-oxopropoxy]methyl]-1,12,19,25-tetraoxo-16-oxa-13,20,24-t riazanonacos-1-yl]-4-hydroxy-2-pyrrolidinyl)methyl ester
tctatcaaccaaatggtaagt

SEQ ID NO: 3470 - RNA, 21 nt, synthetic construct
  source 1..21: mol_type = other RNA
  modified_base 1: mod_base = OTHER; note = 2'-O-methyluridine-3'-phosphorothioate
  modified_base 2: mod_base = OTHER; note = 2'-O-methylguanosine-3'-phosphorothioate
  modified_base 3: mod_base = OTHER; note = 2'-O-methyladenosine-3'-phosphate
  modified_base 4: mod_base = OTHER; note = 2'-O-methylguanosine-3'-phosphate
  modified_base 5: mod_base = OTHER; note = 2'-O-methylguanosine-3'-phosphate
  modified_base 6: mod_base = OTHER; note = 2'-O-docosanyl-adenosine-3'-phosphate
  modified_base 7: mod_base = OTHER; note = 2'-deoxy-2'-fluorouridine-3'-phosphate
  modified_base 8: mod_base = OTHER; note = 2'-O-methyluridine-3'-phosphate
  modified_base 9: mod_base = OTHER; note = 2'-deoxy-2'-fluoroadenosine-3'-phosphate
  modified_base 10: mod_base = OTHER; note = 2'-deoxy-2'-fluorocytidine-3'-phosphate
  modified_base 11: mod_base = OTHER; note = 2'-deoxy-2'-fluoroadenosine-3'-phosphate
  modified_base 12: mod_base = OTHER; note = 2'-O-methylguanosine-3'-phosphate
  modified_base 13: mod_base = OTHER; note = 2'-O-methyladenosine-3'-phosphate
  modified_base 14: mod_base = OTHER; note = 2'-O-methyladenosine-3'-phosphate
  modified_base 15: mod_base = OTHER; note = 2'-O-methyluridine-3'-phosphate
  modified_base 16: mod_base = OTHER; note = 2'-O-methyladenosine-3'-phosphate
  modified_base 17: mod_base = OTHER; note = 2'-O-methylcytidine-3'-phosphate
  modified_base 18: mod_base = OTHER; note = 2'-O-methyluridine-3'-phosphate
  modified_base 19: mod_base = OTHER; note = 2'-O-methyladenosine-3'-phosphate
  modified_base 20: mod_base = OTHER; note = 2'-O-methyluridine-3'-phosphate
  modified_base 21: mod_base = OTHER; note = 2'-O-methyluridine-3'-phosphate ((2S,4R)-1-[29-[[2-(acetylamino)-2-deoxy-beta-D-galactopyra nosyl]oxy]-14,14-bis[[3-[[3-[[5-[[2-(acetylamino)-2-deoxy-b eta-D-galactopyranosyl]oxy]-1-oxopentyl]amino]propyl]amino] -3-oxopropoxy]methyl]-1,12,19,25-tetraoxo-16-oxa-13,20,24-t riazanonacos-1-yl]-4-hydroxy-2-pyrrolidinyl)methyl ester
tgaggattacagaatactatt

SEQ ID NO: 3471 - RNA, 21 nt, synthetic construct
  source 1..21: mol_type = other RNA
  modified_base 1: mod_base = OTHER; note = 2'-O-methylguanosine-3'-phosphorothioate
  modified_base 2: mod_base = OTHER; note = 2'-O-methyluridine-3'-phosphorothioate
  modified_base 3: mod_base = OTHER; note = 2'-O-methylguanosine-3'-phosphate
  modified_base 4: mod_base = OTHER; note = 2'-O-methylguanosine-3'-phosphate
  modified_base 5: mod_base = OTHER; note = 2'-O-methyladenosine-3'-phosphate
  modified_base 6: mod_base = OTHER; note = 2'-O-docosanyl-adenosine-3'-phosphate
  modified_base 7: mod_base = OTHER; note = 2'-deoxy-2'-fluoroadenosine-3'-phosphate
  modified_base 8: mod_base = OTHER; note = 2'-O-methyladenosine-3'-phosphate
  modified_base 9: mod_base = OTHER; note = 2'-deoxy-2'-fluorouridine-3'-phosphate
  modified_base 10: mod_base = OTHER; note = 2'-deoxy-2'-fluorouridine-3'-phosphate
  modified_base 11: mod_base = OTHER; note = 2'-deoxy-2'-fluorouridine-3'-phosphate
  modified_base 12: mod_base = OTHER; note = 2'-O-methylguanosine-3'-phosphate
  modified_base 13: mod_base = OTHER; note = 2'-O-methyladenosine-3'-phosphate
  modified_base 14: mod_base = OTHER; note = 2'-O-methyladenosine-3'-phosphate
  modified_base 15: mod_base = OTHER; note = 2'-O-methylcytidine-3'-phosphate
  modified_base 16: mod_base = OTHER; note = 2'-O-methyluridine-3'-phosphate
  modified_base 17: mod_base = OTHER; note = 2'-O-methylguanosine-3'-phosphate
  modified_base 18: mod_base = OTHER; note = 2'-O-methyladenosine-3'-phosphate
  modified_base 19: mod_base = OTHER; note = 2'-O-methyluridine-3'-phosphate
  modified_base 20: mod_base = OTHER; note = 2'-O-methyluridine-3'-phosphate
  modified_base 21: mod_base = OTHER; note = 2'-O-methyluridine-3'-phosphate ((2S,4R)-1-[29-[[2-(acetylamino)-2-deoxy-beta-D-galactopyra nosyl]oxy]-14,14-bis[[3-[[3-[[5-[[2-(acetylamino)-2-deoxy-b eta-D-galactopyranosyl]oxy]-1-oxopentyl]amino]propyl]amino] -3-oxopropoxy]methyl]-1,12,19,25-tetraoxo-16-oxa-13,20,24-t riazanonacos-1-yl]-4-hydroxy-2-pyrrolidinyl)methyl ester
gtggaaaatttgaactgattt

SEQ ID NO: 3472 - RNA, 21 nt, synthetic construct
  source 1..21: mol_type = other RNA
  modified_base 1: mod_base = OTHER; note = 2'-O-methyladenosine-3'-phosphorothioate
  modified_base 2: mod_base = OTHER; note = 2'-O-methyluridine-3'-phosphorothioate
  modified_base 3: mod_base = OTHER; note = 2'-O-methylguanosine-3'-phosphate
  modified_base 4: mod_base = OTHER; note = 2'-O-methylguanosine-3'-phosphate
  modified_base 5: mod_base = OTHER; note = 2'-O-methyladenosine-3'-phosphate
  modified_base 6: mod_base = OTHER; note = 2'-O-docosanyl-guanosine-3'-phosphate
  modified_base 7: mod_base = OTHER; note = 2'-deoxy-2'-fluoroadenosine-3'-phosphate
  modified_base 8: mod_base = OTHER; note = 2'-O-methyladenosine-3'-phosphate
  modified_base 9: mod_base = OTHER; note = 2'-deoxy-2'-fluoroadenosine-3'-phosphate
  modified_base 10: mod_base = OTHER; note = 2'-deoxy-2'-fluoroguanosine-3'-phosphate
  modified_base 11: mod_base = OTHER; note = 2'-deoxy-2'-fluorouridine-3'-phosphate
  modified_base 12: mod_base = OTHER; note = 2'-O-methylcytidine-3'-phosphate
  modified_base 13: mod_base = OTHER; note = 2'-O-methylcytidine-3'-phosphate
  modified_base 14: mod_base = OTHER; note = 2'-O-methyladenosine-3'-phosphate
  modified_base 15: mod_base = OTHER; note = 2'-O-methyladenosine-3'-phosphate
  modified_base 16: mod_base = OTHER; note = 2'-O-methyluridine-3'-phosphate
  modified_base 17: mod_base = OTHER; note = 2'-O-methyladenosine-3'-phosphate
  modified_base 18: mod_base = OTHER; note = 2'-O-methylcytidine-3'-phosphate
  modified_base 19: mod_base = OTHER; note = 2'-O-methylcytidine-3'-phosphate
  modified_base 20: mod_base = OTHER; note = 2'-O-methyluridine-3'-phosphate
  modified_base 21: mod_base = OTHER; note = 2'-O-methyluridine-3'-phosphate ((2S,4R)-1-[29-[[2-(acetylamino)-2-deoxy-beta-D-galactopyra nosyl]oxy]-14,14-bis[[3-[[3-[[5-[[2-(acetylamino)-2-deoxy-b eta-D-galactopyranosyl]oxy]-1-oxopentyl]amino]propyl]amino] -3-oxopropoxy]methyl]-1,12,19,25-tetraoxo-16-oxa-13,20,24-t riazanonacos-1-yl]-4-hydroxy-2-pyrrolidinyl)methyl ester
atggagaaagtccaatacctt

SEQ ID NO: 3473 - RNA, 21 nt, synthetic construct
  source 1..21: mol_type = other RNA
  modified_base 1: mod_base = OTHER; note = 2'-O-methyladenosine-3'-phosphorothioate
  modified_base 2: mod_base = OTHER; note = 2'-O-methyladenosine-3'-phosphorothioate
  modified_base 3: mod_base = OTHER; note = 2'-O-methyladenosine-3'-phosphate
  modified_base 4: mod_base = OTHER; note = 2'-O-methyluridine-3'-phosphate
  modified_base 5: mod_base = OTHER; note = 2'-O-methylcytidine-3'-phosphate
  modified_base 6: mod_base = OTHER; note = 2'-O-docosanyl-adenosine-3'-phosphate
  modified_base 7: mod_base = OTHER; note = 2'-deoxy-2'-fluoroguanosine-3'-phosphate
  modified_base 8: mod_base = OTHER; note = 2'-O-methyladenosine-3'-phosphate
  modified_base 9: mod_base = OTHER; note = 2'-deoxy-2'-fluoroadenosine-3'-phosphate
  modified_base 10: mod_base = OTHER; note = 2'-deoxy-2'-fluorouridine-3'-phosphate
  modified_base 11: mod_base = OTHER; note = 2'-deoxy-2'-fluorocytidine-3'-phosphate
  modified_base 12: mod_base = OTHER; note = 2'-O-methyladenosine-3'-phosphate
  modified_base 13: mod_base = OTHER; note = 2'-O-methylcytidine-3'-phosphate
  modified_base 14: mod_base = OTHER; note = 2'-O-methyluridine-3'-phosphate
  modified_base 15: mod_base = OTHER; note = 2'-O-methyladenosine-3'-phosphate
  modified_base 16: mod_base = OTHER; note = 2'-O-methyluridine-3'-phosphate
  modified_base 17: mod_base = OTHER; note = 2'-O-methyladenosine-3'-phosphate
  modified_base 18: mod_base = OTHER; note = 2'-O-methyluridine-3'-phosphate
  modified_base 19: mod_base = OTHER; note = 2'-O-methyluridine-3'-phosphate
  modified_base 20: mod_base = OTHER; note = 2'-O-methyladenosine-3'-phosphate
  modified_base 21: mod_base = OTHER; note = 2'-O-methyluridine-3'-phosphate ((2S,4R)-1-[29-[[2-(acetylamino)-2-deoxy-beta-D-galactopyra nosyl]oxy]-14,14-bis[[3-[[3-[[5-[[2-(acetylamino)-2-deoxy-b eta-D-galactopyranosyl]oxy]-1-oxopentyl]amino]propyl]amino] -3-oxopropoxy]methyl]-1,12,19,25-tetraoxo-16-oxa-13,20,24-t riazanonacos-1-yl]-4-hydroxy-2-pyrrolidinyl)methyl ester
aaatcagaatcactatattat

SEQ ID NO: 3474 - RNA, 21 nt, synthetic construct
  source 1..21: mol_type = other RNA
  modified_base 1: mod_base = OTHER; note = 2'-O-methylcytidine-3'-phosphorothioate
  modified_base 2: mod_base = OTHER; note = 2'-O-methyluridine-3'-phosphorothioate
  modified_base 3: mod_base = OTHER; note = 2'-O-methyluridine-3'-phosphate
  modified_base 4: mod_base = OTHER; note = 2'-O-methylcytidine-3'-phosphate
  modified_base 5: mod_base = OTHER; note = 2'-O-methylcytidine-3'-phosphate
  modified_base 6: mod_base = OTHER; note = 2'-O-docosanyl-adenosine-3'-phosphate
  modified_base 7: mod_base = OTHER; note = 2'-deoxy-2'-fluorouridine-3'-phosphate
  modified_base 8: mod_base = OTHER; note = 2'-O-methyluridine-3'-phosphate
  modified_base 9: mod_base = OTHER; note = 2'-deoxy-2'-fluorocytidine-3'-phosphate
  modified_base 10: mod_base = OTHER; note = 2'-deoxy-2'-fluorocytidine-3'-phosphate
  modified_base 11: mod_base = OTHER; note = 2'-deoxy-2'-fluoroadenosine-3'-phosphate
  modified_base 12: mod_base = OTHER; note = 2'-O-methylguanosine-3'-phosphate
  modified_base 13: mod_base = OTHER; note = 2'-O-methylcytidine-3'-phosphate
  modified_base 14: mod_base = OTHER; note = 2'-O-methylcytidine-3'-phosphate
  modified_base 15: mod_base = OTHER; note = 2'-O-methyluridine-3'-phosphate
  modified_base 16: mod_base = OTHER; note = 2'-O-methyladenosine-3'-phosphate
  modified_base 17: mod_base = OTHER; note = 2'-O-methyladenosine-3'-phosphate
  modified_base 18: mod_base = OTHER; note = 2'-O-methylcytidine-3'-phosphate
  modified_base 19: mod_base = OTHER; note = 2'-O-methyladenosine-3'-phosphate
  modified_base 20: mod_base = OTHER; note = 2'-O-methyluridine-3'-phosphate
  modified_base 21: mod_base = OTHER; note = 2'-O-methyluridine-3'-phosphate ((2S,4R)-1-[29-[[2-(acetylamino)-2-deoxy-beta-D-galactopyra nosyl]oxy]-14,14-bis[[3-[[3-[[5-[[2-(acetylamino)-2-deoxy-b eta-D-galactopyranosyl]oxy]-1-oxopentyl]amino]propyl]amino] -3-oxopropoxy]methyl]-1,12,19,25-tetraoxo-16-oxa-13,20,24-t riazanonacos-1-yl]-4-hydroxy-2-pyrrolidinyl)methyl ester
cttccattccagcctaacatt

SEQ ID NO: 3475 - RNA, 21 nt, synthetic construct
  source 1..21: mol_type = other RNA
  modified_base 1: mod_base = OTHER; note = 2'-O-methyladenosine-3'-phosphorothioate
  modified_base 2: mod_base = OTHER; note = 2'-O-methyladenosine-3'-phosphorothioate
  modified_base 3: mod_base = OTHER; note = 2'-O-methyluridine-3'-phosphate
  modified_base 4: mod_base = OTHER; note = 2'-O-methylguanosine-3'-phosphate
  modified_base 5: mod_base = OTHER; note = 2'-O-methyladenosine-3'-phosphate
  modified_base 6: mod_base = OTHER; note = 2'-O-docosanyl-adenosine-3'-phosphate
  modified_base 7: mod_base = OTHER; note = 2'-deoxy-2'-fluoroguanosine-3'-phosphate
  modified_base 8: mod_base = OTHER; note = 2'-O-methyluridine-3'-phosphate
  modified_base 9: mod_base = OTHER; note = 2'-deoxy-2'-fluoroguanosine-3'-phosphate
  modified_base 10: mod_base = OTHER; note = 2'-deoxy-2'-fluorouridine-3'-phosphate
  modified_base 11: mod_base = OTHER; note = 2'-deoxy-2'-fluorocytidine-3'-phosphate
  modified_base 12: mod_base = OTHER; note = 2'-O-methyladenosine-3'-phosphate
  modified_base 13: mod_base = OTHER; note = 2'-O-methyluridine-3'-phosphate
  modified_base 14: mod_base = OTHER; note = 2'-O-methyluridine-3'-phosphate
  modified_base 15: mod_base = OTHER; note = 2'-O-methyladenosine-3'-phosphate
  modified_base 16: mod_base = OTHER; note = 2'-O-methyluridine-3'-phosphate
  modified_base 17: mod_base = OTHER; note = 2'-O-methyluridine-3'-phosphate
  modified_base 18: mod_base = OTHER; note = 2'-O-methylcytidine-3'-phosphate
  modified_base 19: mod_base = OTHER; note = 2'-O-methyladenosine-3'-phosphate
  modified_base 20: mod_base = OTHER; note = 2'-O-methyladenosine-3'-phosphate
  modified_base 21: mod_base = OTHER; note = 2'-O-methyluridine-3'-phosphate ((2S,4R)-1-[29-[[2-(acetylamino)-2-deoxy-beta-D-galactopyra nosyl]oxy]-14,14-bis[[3-[[3-[[5-[[2-(acetylamino)-2-deoxy-b eta-D-galactopyranosyl]oxy]-1-oxopentyl]amino]propyl]amino] -3-oxopropoxy]methyl]-1,12,19,25-tetraoxo-16-oxa-13,20,24-t riazanonacos-1-yl]-4-hydroxy-2-pyrrolidinyl)methyl ester
aatgaagtgtcattattcaat

SEQ ID NO: 3476 - RNA, 21 nt, synthetic construct
  source 1..21: mol_type = other RNA
  modified_base 1: mod_base = OTHER; note = 2'-O-methylcytidine-3'-phosphorothioate
  modified_base 2: mod_base = OTHER; note = 2'-O-methyluridine-3'-phosphorothioate
  modified_base 3: mod_base = OTHER; note = 2'-O-methyluridine-3'-phosphate
  modified_base 4: mod_base = OTHER; note = 2'-O-methylcytidine-3'-phosphate
  modified_base 5: mod_base = OTHER; note = 2'-O-methyladenosine-3'-phosphate
  modified_base 6: mod_base = OTHER; note = 2'-O-docosanyl-uridine-3'-phosphate
  modified_base 7: mod_base = OTHER; note = 2'-deoxy-2'-fluorocytidine-3'-phosphate
  modified_base 8: mod_base = OTHER; note = 2'-O-methyladenosine-3'-phosphate
  modified_base 9: mod_base = OTHER; note = 2'-deoxy-2'-fluorouridine-3'-phosphate
  modified_base 10: mod_base = OTHER; note = 2'-deoxy-2'-fluoroadenosine-3'-phosphate
  modified_base 11: mod_base = OTHER; note = 2'-deoxy-2'-fluoroadenosine-3'-phosphate
  modified_base 12: mod_base = OTHER; note = 2'-O-methyladenosine-3'-phosphate
  modified_base 13: mod_base = OTHER; note = 2'-O-methylguanosine-3'-phosphate
  modified_base 14: mod_base = OTHER; note = 2'-O-methyluridine-3'-phosphate
  modified_base 15: mod_base = OTHER; note = 2'-O-methylguanosine-3'-phosphate
  modified_base 16: mod_base = OTHER; note = 2'-O-methyluridine-3'-phosphate
  modified_base 17: mod_base = OTHER; note = 2'-O-methyladenosine-3'-phosphate
  modified_base 18: mod_base = OTHER; note = 2'-O-methyladenosine-3'-phosphate
  modified_base 19: mod_base = OTHER; note = 2'-O-methyladenosine-3'-phosphate
  modified_base 20: mod_base = OTHER; note = 2'-O-methylguanosine-3'-phosphate
  modified_base 21: mod_base = OTHER; note = 2'-O-methyluridine-3'-phosphate ((2S,4R)-1-[29-[[2-(acetylamino)-2-deoxy-beta-D-galactopyra nosyl]oxy]-14,14-bis[[3-[[3-[[5-[[2-(acetylamino)-2-deoxy-b eta-D-galactopyranosyl]oxy]-1-oxopentyl]amino]propyl]amino] -3-oxopropoxy]methyl]-1,12,19,25-tetraoxo-16-oxa-13,20,24-t riazanonacos-1-yl]-4-hydroxy-2-pyrrolidinyl)methyl ester
cttcatcataaagtgtaaagt

SEQ ID NO: 3477 - RNA, 21 nt, synthetic construct
  source 1..21: mol_type = other RNA
  modified_base 1: mod_base = OTHER; note = 2'-O-methylcytidine-3'-phosphorothioate
  modified_base 2: mod_base = OTHER; note = 2'-O-methylcytidine-3'-phosphorothioate
  modified_base 3: mod_base = OTHER; note = 2'-O-methyladenosine-3'-phosphate
  modified_base 4: mod_base = OTHER; note = 2'-O-methyladenosine-3'-phosphate
  modified_base 5: mod_base = OTHER; note = 2'-O-methyladenosine-3'-phosphate
  modified_base 6: mod_base = OTHER; note = 2'-O-docosanyl-uridine-3'-phosphate
  modified_base 7: mod_base = OTHER; note = 2'-deoxy-2'-fluorocytidine-3'-phosphate
  modified_base 8: mod_base = OTHER; note = 2'-O-methyluridine-3'-phosphate
  modified_base 9: mod_base = OTHER; note = 2'-deoxy-2'-fluorouridine-3'-phosphate
  modified_base 10: mod_base = OTHER; note = 2'-deoxy-2'-fluorouridine-3'-phosphate
  modified_base 11: mod_base = OTHER; note = 2'-deoxy-2'-fluorouridine-3'-phosphate
  modified_base 12: mod_base = OTHER; note = 2'-O-methylcytidine-3'-phosphate
  modified_base 13: mod_base = OTHER; note = 2'-O-methyluridine-3'-phosphate
  modified_base 14: mod_base = OTHER; note = 2'-O-methylguanosine-3'-phosphate
  modified_base 15: mod_base = OTHER; note = 2'-O-methyladenosine-3'-phosphate
  modified_base 16: mod_base = OTHER; note = 2'-O-methyladenosine-3'-phosphate
  modified_base 17: mod_base = OTHER; note = 2'-O-methylguanosine-3'-phosphate
  modified_base 18: mod_base = OTHER; note = 2'-O-methyladenosine-3'-phosphate
  modified_base 19: mod_base = OTHER; note = 2'-O-methyluridine-3'-phosphate
  modified_base 20: mod_base = OTHER; note = 2'-O-methylguanosine-3'-phosphate
  modified_base 21: mod_base = OTHER; note = 2'-O-methyluridine-3'-phosphate ((2S,4R)-1-[29-[[2-(acetylamino)-2-deoxy-beta-D-galactopyra nosyl]oxy]-14,14-bis[[3-[[3-[[5-[[2-(acetylamino)-2-deoxy-b eta-D-galactopyranosyl]oxy]-1-oxopentyl]amino]propyl]amino] -3-oxopropoxy]methyl]-1,12,19,25-tetraoxo-16-oxa-13,20,24-t riazanonacos-1-yl]-4-hydroxy-2-pyrrolidinyl)methyl ester
ccaaatcttttctgaagatgt

SEQ ID NO: 3478 - RNA, 21 nt, synthetic construct
  source 1..21: mol_type = other RNA
  modified_base 1: mod_base = OTHER; note = 2'-O-methyluridine-3'-phosphorothioate
  modified_base 2: mod_base = OTHER; note = 2'-O-methyluridine-3'-phosphorothioate
  modified_base 3: mod_base = OTHER; note = 2'-O-methyluridine-3'-phosphate
  modified_base 4: mod_base = OTHER; note = 2'-O-methylguanosine-3'-phosphate
  modified_base 5: mod_base = OTHER; note = 2'-O-methylguanosine-3'-phosphate
  modified_base 6: mod_base = OTHER; note = 2'-O-docosanyl-adenosine-3'-phosphate
  modified_base 7: mod_base = OTHER; note = 2'-deoxy-2'-fluoroadenosine-3'-phosphate
  modified_base 8: mod_base = OTHER; note = 2'-O-methyluridine-3'-phosphate
  modified_base 9: mod_base = OTHER; note = 2'-deoxy-2'-fluorocytidine-3'-phosphate
  modified_base 10: mod_base = OTHER; note = 2'-deoxy-2'-fluoroadenosine-3'-phosphate
  modified_base 11: mod_base = OTHER; note = 2'-deoxy-2'-fluorouridine-3'-phosphate
  modified_base 12: mod_base = OTHER; note = 2'-O-methylguanosine-3'-phosphate
  modified_base 13: mod_base = OTHER; note = 2'-O-methyladenosine-3'-phosphate
  modified_base 14: mod_base = OTHER; note = 2'-O-methyladenosine-3'-phosphate
  modified_base 15: mod_base = OTHER; note = 2'-O-methyladenosine-3'-phosphate
  modified_base 16: mod_base = OTHER; note = 2'-O-methylcytidine-3'-phosphate
  modified_base 17: mod_base = OTHER; note = 2'-O-methylcytidine-3'-phosphate
  modified_base 18: mod_base = OTHER; note = 2'-O-methyluridine-3'-phosphate
  modified_base 19: mod_base = OTHER; note = 2'-O-methyluridine-3'-phosphate
  modified_base 20: mod_base = OTHER; note = 2'-O-methyladenosine-3'-phosphate
  modified_base 21: mod_base = OTHER; note = 2'-O-methyluridine-3'-phosphate ((2S,4R)-1-[29-[[2-(acetylamino)-2-deoxy-beta-D-galactopyra nosyl]oxy]-14,14-bis[[3-[[3-[[5-[[2-(acetylamino)-2-deoxy-b eta-D-galactopyranosyl]oxy]-1-oxopentyl]amino]propyl]amino] -3-oxopropoxy]methyl]-1,12,19,25-tetraoxo-16-oxa-13,20,24-t riazanonacos-1-yl]-4-hydroxy-2-pyrrolidinyl)methyl ester
tttggaatcatgaaaccttat

SEQ ID NO: 3479 - RNA, 21 nt, synthetic construct
  source 1..21: mol_type = other RNA
  modified_base 1: mod_base = OTHER; note = 2'-O-methyladenosine-3'-phosphorothioate
  modified_base 2: mod_base = OTHER; note = 2'-O-methyladenosine-3'-phosphorothioate
  modified_base 3: mod_base = OTHER; note = 2'-O-methyladenosine-3'-phosphate
  modified_base 4: mod_base = OTHER; note = 2'-O-methylcytidine-3'-phosphate
  modified_base 5: mod_base = OTHER; note = 2'-O-methyladenosine-3'-phosphate
  modified_base 6: mod_base = OTHER; note = 2'-O-docosanyl-cytidine-3'-phosphate
  modified_base 7: mod_base = OTHER; note = 2'-deoxy-2'-fluorocytidine-3'-phosphate
  modified_base 8: mod_base = OTHER; note = 2'-O-methylcytidine-3'-phosphate
  modified_base 9: mod_base = OTHER; note = 2'-deoxy-2'-fluoroguanosine-3'-phosphate
  modified_base 10: mod_base = OTHER; note = 2'-deoxy-2'-fluorouridine-3'-phosphate
  modified_base 11: mod_base = OTHER; note = 2'-deoxy-2'-fluoroadenosine-3'-phosphate
  modified_base 12: mod_base = OTHER; note = 2'-O-methyladenosine-3'-phosphate
  modified_base 13: mod_base = OTHER; note = 2'-O-methylguanosine-3'-phosphate
  modified_base 14: mod_base = OTHER; note = 2'-O-methyladenosine-3'-phosphate
  modified_base 15: mod_base = OTHER; note = 2'-O-methylcytidine-3'-phosphate
  modified_base 16: mod_base = OTHER; note = 2'-O-methyluridine-3'-phosphate
  modified_base 17: mod_base = OTHER; note = 2'-O-methyluridine-3'-phosphate
  modified_base 18: mod_base = OTHER; note = 2'-O-methylcytidine-3'-phosphate
  modified_base 19: mod_base = OTHER; note = 2'-O-methyladenosine-3'-phosphate
  modified_base 20: mod_base = OTHER; note = 2'-O-methyluridine-3'-phosphate
  modified_base 21: mod_base = OTHER; note = 2'-O-methyluridine-3'-phosphate ((2S,4R)-1-[29-[[2-(acetylamino)-2-deoxy-beta-D-galactopyra nosyl]oxy]-14,14-bis[[3-[[3-[[5-[[2-(acetylamino)-2-deoxy-b eta-D-galactopyranosyl]oxy]-1-oxopentyl]amino]propyl]amino] -3-oxopropoxy]methyl]-1,12,19,25-tetraoxo-16-oxa-13,20,24-t riazanonacos-1-yl]-4-hydroxy-2-pyrrolidinyl)methyl ester
aaacacccgtaagacttcatt

SEQ ID NO: 3480 - RNA, 21 nt, synthetic construct
  source 1..21: mol_type = other RNA
  modified_base 1: mod_base = OTHER; note = 2'-O-methyladenosine-3'-phosphorothioate
  modified_base 2: mod_base = OTHER; note = 2'-O-methyladenosine-3'-phosphorothioate
  modified_base 3: mod_base = OTHER; note = 2'-O-methylcytidine-3'-phosphate
  modified_base 4: mod_base = OTHER; note = 2'-O-methyluridine-3'-phosphate
  modified_base 5: mod_base = OTHER; note = 2'-O-methylcytidine-3'-phosphate
  modified_base 6: mod_base = OTHER; note = 2'-O-docosanyl-adenosine-3'-phosphate
  modified_base 7: mod_base = OTHER; note = 2'-deoxy-2'-fluoroadenosine-3'-phosphate
  modified_base 8: mod_base = OTHER; note = 2'-O-methyluridine-3'-phosphate
  modified_base 9: mod_base = OTHER; note = 2'-deoxy-2'-fluoroadenosine-3'-phosphate
  modified_base 10: mod_base = OTHER; note = 2'-deoxy-2'-fluoroguanosine-3'-phosphate
  modified_base 11: mod_base = OTHER; note = 2'-deoxy-2'-fluorouridine-3'-phosphate
  modified_base 12: mod_base = OTHER; note = 2'-O-methylguanosine-3'-phosphate
  modified_base 13: mod_base = OTHER; note = 2'-O-methyladenosine-3'-phosphate
  modified_base 14: mod_base = OTHER; note = 2'-O-methyladenosine-3'-phosphate
  modified_base 15: mod_base = OTHER; note = 2'-O-methylguanosine-3'-phosphate
  modified_base 16: mod_base = OTHER; note = 2'-O-methylguanosine-3'-phosphate
  modified_base 17: mod_base = OTHER; note = 2'-O-methyladenosine-3'-phosphate
  modified_base 18: mod_base = OTHER; note = 2'-O-methylguanosine-3'-phosphate
  modified_base 19: mod_base = OTHER; note = 2'-O-methyladenosine-3'-phosphate
  modified_base 20: mod_base = OTHER; note = 2'-O-methylcytidine-3'-phosphate
  modified_base 21: mod_base = OTHER; note = 2'-O-methyluridine-3'-phosphate ((2S,4R)-1-[29-[[2-(acetylamino)-2-deoxy-beta-D-galactopyra nosyl]oxy]-14,14-bis[[3-[[3-[[5-[[2-(acetylamino)-2-deoxy-b eta-D-galactopyranosyl]oxy]-1-oxopentyl]amino]propyl]amino] -3-oxopropoxy]methyl]-1,12,19,25-tetraoxo-16-oxa-13,20,24-t riazanonacos-1-yl]-4-hydroxy-2-pyrrolidinyl)methyl ester
aactcaatagtgaaggagact

SEQ ID NO: 3481 - RNA, 21 nt, synthetic construct
  source 1..21: mol_type = other RNA
  modified_base 1: mod_base = OTHER; note = 2'-O-methyluridine-3'-phosphorothioate
  modified_base 2: mod_base = OTHER; note = 2'-O-methylcytidine-3'-phosphorothioate
  modified_base 3: mod_base = OTHER; note = 2'-O-methyluridine-3'-phosphate
  modified_base 4: mod_base = OTHER; note = 2'-O-methyluridine-3'-phosphate
  modified_base 5: mod_base = OTHER; note = 2'-O-methylcytidine-3'-phosphate
  modified_base 6: mod_base = OTHER; note = 2'-O-docosanyl-adenosine-3'-phosphate
  modified_base 7: mod_base = OTHER; note = 2'-deoxy-2'-fluorouridine-3'-phosphate
  modified_base 8: mod_base = OTHER; note = 2'-O-methyluridine-3'-phosphate
  modified_base 9: mod_base = OTHER; note = 2'-deoxy-2'-fluorouridine-3'-phosphate
  modified_base 10: mod_base = OTHER; note = 2'-deoxy-2'-fluoroadenosine-3'-phosphate
  modified_base 11: mod_base = OTHER; note = 2'-deoxy-2'-fluoroadenosine-3'-phosphate
  modified_base 12: mod_base = OTHER; note = 2'-O-methylguanosine-3'-phosphate
  modified_base 13: mod_base = OTHER; note = 2'-O-methylguanosine-3'-phosphate
  modified_base 14: mod_base = OTHER; note = 2'-O-methylcytidine-3'-phosphate
  modified_base 15: mod_base = OTHER; note = 2'-O-methyladenosine-3'-phosphate
  modified_base 16: mod_base = OTHER; note = 2'-O-methylcytidine-3'-phosphate
  modified_base 17: mod_base = OTHER; note = 2'-O-methyluridine-3'-phosphate
  modified_base 18: mod_base = OTHER; note = 2'-O-methylguanosine-3'-phosphate
  modified_base 19: mod_base = OTHER; note = 2'-O-methyluridine-3'-phosphate
  modified_base 20: mod_base = OTHER; note = 2'-O-methyladenosine-3'-phosphate
  modified_base 21: mod_base = OTHER; note = 2'-O-methyluridine-3'-phosphate ((2S,4R)-1-[29-[[2-(acetylamino)-2-deoxy-beta-D-galactopyra nosyl]oxy]-14,14-bis[[3-[[3-[[5-[[2-(acetylamino)-2-deoxy-b eta-D-galactopyranosyl]oxy]-1-oxopentyl]amino]propyl]amino] -3-oxopropoxy]methyl]-1,12,19,25-tetraoxo-16-oxa-13,20,24-t riazanonacos-1-yl]-4-hydroxy-2-pyrrolidinyl)methyl ester
tcttcatttaaggcactgtat

SEQ ID NO: 3482 - RNA, 21 nt, synthetic construct
  source 1..21: mol_type = other RNA
  modified_base 1: mod_base = OTHER; note = 2'-O-methylguanosine-3'-phosphorothioate
  modified_base 2: mod_base = OTHER; note = 2'-O-methylguanosine-3'-phosphorothioate
  modified_base 3: mod_base = OTHER; note = 2'-O-methyluridine-3'-phosphate
  modified_base 4: mod_base = OTHER; note = 2'-O-methylcytidine-3'-phosphate
  modified_base 5: mod_base = OTHER; note = 2'-O-methyluridine-3'-phosphate
  modified_base 6: mod_base = OTHER; note = 2'-O-docosanyl-uridine-3'-phosphate
  modified_base 7: mod_base = OTHER; note = 2'-deoxy-2'-fluoroguanosine-3'-phosphate
  modified_base 8: mod_base = OTHER; note = 2'-O-methylcytidine-3'-phosphate
  modified_base 9: mod_base = OTHER; note = 2'-deoxy-2'-fluoroadenosine-3'-phosphate
  modified_base 10: mod_base = OTHER; note = 2'-deoxy-2'-fluoroguanosine-3'-phosphate
  modified_base 11: mod_base = OTHER; note = 2'-deoxy-2'-fluorouridine-3'-phosphate
  modified_base 12: mod_base = OTHER; note = 2'-O-methylcytidine-3'-phosphate
  modified_base 13: mod_base = OTHER; note = 2'-O-methyluridine-3'-phosphate
  modified_base 14: mod_base = OTHER; note = 2'-O-methyluridine-3'-phosphate
  modified_base 15: mod_base = OTHER; note = 2'-O-methylguanosine-3'-phosphate
  modified_base 16: mod_base = OTHER; note = 2'-O-methyluridine-3'-phosphate
  modified_base 17: mod_base = OTHER; note = 2'-O-methylcytidine-3'-phosphate
  modified_base 18: mod_base = OTHER; note = 2'-O-methyluridine-3'-phosphate
  modified_base 19: mod_base = OTHER; note = 2'-O-methyluridine-3'-phosphate
  modified_base 20: mod_base = OTHER; note = 2'-O-methyladenosine-3'-phosphate
  modified_base 21: mod_base = OTHER; note = 2'-O-methyluridine-3'-phosphate ((2S,4R)-1-[29-[[2-(acetylamino)-2-deoxy-beta-D-galactopyra nosyl]oxy]-14,14-bis[[3-[[3-[[5-[[2-(acetylamino)-2-deoxy-b eta-D-galactopyranosyl]oxy]-1-oxopentyl]amino]propyl]amino] -3-oxopropoxy]methyl]-1,12,19,25-tetraoxo-16-oxa-13,20,24-t riazanonacos-1-yl]-4-hydroxy-2-pyrrolidinyl)methyl ester
ggtcttgcagtcttgtcttat

SEQ ID NO: 3483 - RNA, 21 nt, synthetic construct
  source 1..21: mol_type = other RNA
  modified_base 1: mod_base = OTHER; note = 2'-O-methyluridine-3'-phosphorothioate
  modified_base 2: mod_base = OTHER; note = 2'-O-methyladenosine-3'-phosphorothioate
  modified_base 3: mod_base = OTHER; note = 2'-O-methyluridine-3'-phosphate
  modified_base 4: mod_base = OTHER; note = 2'-O-methylcytidine-3'-phosphate
  modified_base 5: mod_base = OTHER; note = 2'-O-methyluridine-3'-phosphate
  modified_base 6: mod_base = OTHER; note = 2'-O-docosanyl-guanosine-3'-phosphate
  modified_base 7: mod_base = OTHER; note = 2'-deoxy-2'-fluoroadenosine-3'-phosphate
  modified_base 8: mod_base = OTHER; note = 2'-O-methylguanosine-3'-phosphate
  modified_base 9: mod_base = OTHER; note = 2'-deoxy-2'-fluorocytidine-3'-phosphate
  modified_base 10: mod_base = OTHER; note = 2'-deoxy-2'-fluorouridine-3'-phosphate
  modified_base 11: mod_base = OTHER; note = 2'-deoxy-2'-fluoroadenosine-3'-phosphate
  modified_base 12: mod_base = OTHER; note = 2'-O-methylguanosine-3'-phosphate
  modified_base 13: mod_base = OTHER; note = 2'-O-methyladenosine-3'-phosphate
  modified_base 14: mod_base = OTHER; note = 2'-O-methylguanosine-3'-phosphate
  modified_base 15: mod_base = OTHER; note = 2'-O-methyluridine-3'-phosphate
  modified_base 16: mod_base = OTHER; note = 2'-O-methyluridine-3'-phosphate
  modified_base 17: mod_base = OTHER; note = 2'-O-methyladenosine-3'-phosphate
  modified_base 18: mod_base = OTHER; note = 2'-O-methylcytidine-3'-phosphate
  modified_base 19: mod_base = OTHER; note = 2'-O-methylcytidine-3'-phosphate
  modified_base 20: mod_base = OTHER; note = 2'-O-methyluridine-3'-phosphate
  modified_base 21: mod_base = OTHER; note = 2'-O-methyluridine-3'-phosphate ((2S,4R)-1-[29-[[2-(acetylamino)-2-deoxy-beta-D-galactopyra nosyl]oxy]-14,14-bis[[3-[[3-[[5-[[2-(acetylamino)-2-deoxy-b eta-D-galactopyranosyl]oxy]-1-oxopentyl]amino]propyl]amino] -3-oxopropoxy]methyl]-1,12,19,25-tetraoxo-16-oxa-13,20,24-t riazanonacos-1-yl]-4-hydroxy-2-pyrrolidinyl)methyl ester
tatctgagctagagttacctt

SEQ ID NO: 3484 - RNA, 21 nt, synthetic construct
  source 1..21: mol_type = other RNA
  modified_base 1: mod_base = OTHER; note = 2'-O-methyladenosine-3'-phosphorothioate
  modified_base 2: mod_base = OTHER; note = 2'-O-methyladenosine-3'-phosphorothioate
  modified_base 3: mod_base = OTHER; note = 2'-O-methylcytidine-3'-phosphate
  modified_base 4: mod_base = OTHER; note = 2'-O-methyluridine-3'-phosphate
  modified_base 5: mod_base = OTHER; note = 2'-O-methylguanosine-3'-phosphate
  modified_base 6: mod_base = OTHER; note = 2'-O-docosanyl-uridine-3'-phosphate
  modified_base 7: mod_base = OTHER; note = 2'-deoxy-2'-fluoroadenosine-3'-phosphate
  modified_base 8: mod_base = OTHER; note = 2'-O-methyladenosine-3'-phosphate
  modified_base 9: mod_base = OTHER; note = 2'-deoxy-2'-fluorouridine-3'-phosphate
  modified_base 10: mod_base = OTHER; note = 2'-deoxy-2'-fluoroadenosine-3'-phosphate
  modified_base 11: mod_base = OTHER; note = 2'-deoxy-2'-fluoroguanosine-3'-phosphate
  modified_base 12: mod_base = OTHER; note = 2'-O-methylguanosine-3'-phosphate
  modified_base 13: mod_base = OTHER; note = 2'-O-methyladenosine-3'-phosphate
  modified_base 14: mod_base = OTHER; note = 2'-O-methyluridine-3'-phosphate
  modified_base 15: mod_base = OTHER; note = 2'-O-methyladenosine-3'-phosphate
  modified_base 16: mod_base = OTHER; note = 2'-O-methyluridine-3'-phosphate
  modified_base 17: mod_base = OTHER; note = 2'-O-methyladenosine-3'-phosphate
  modified_base 18: mod_base = OTHER; note = 2'-O-methylguanosine-3'-phosphate
  modified_base 19: mod_base = OTHER; note = 2'-O-methylcytidine-3'-phosphate
  modified_base 20: mod_base = OTHER; note = 2'-O-methyluridine-3'-phosphate
  modified_base 21: mod_base = OTHER; note = 2'-O-methyluridine-3'-phosphate ((2S,4R)-1-[29-[[2-(acetylamino)-2-deoxy-beta-D-galactopyra nosyl]oxy]-14,14-bis[[3-[[3-[[5-[[2-(acetylamino)-2-deoxy-b eta-D-galactopyranosyl]oxy]-1-oxopentyl]amino]propyl]amino] -3-oxopropoxy]methyl]-1,12,19,25-tetraoxo-16-oxa-13,20,24-t riazanonacos-1-yl]-4-hydroxy-2-pyrrolidinyl)methyl ester
aactgtaataggatatagctt

SEQ ID NO: 3485 - RNA, 21 nt, synthetic construct
  source 1..21: mol_type = other RNA
  modified_base 1: mod_base = OTHER; note = 2'-O-methyladenosine-3'-phosphorothioate
  modified_base 2: mod_base = OTHER; note = 2'-O-methyluridine-3'-phosphorothioate
  modified_base 3: mod_base = OTHER; note = 2'-O-methylguanosine-3'-phosphate
  modified_base 4: mod_base = OTHER; note = 2'-O-methyladenosine-3'-phosphate
  modified_base 5: mod_base = OTHER; note = 2'-O-methyladenosine-3'-phosphate
  modified_base 6: mod_base = OTHER; note = 2'-O-docosanyl-adenosine-3'-phosphate
  modified_base 7: mod_base = OTHER; note = 2'-deoxy-2'-fluoroadenosine-3'-phosphate
  modified_base 8: mod_base = OTHER; note = 2'-O-methylguanosine-3'-phosphate
  modified_base 9: mod_base = OTHER; note = 2'-deoxy-2'-fluoroguanosine-3'-phosphate
  modified_base 10: mod_base = OTHER; note = 2'-deoxy-2'-fluoroguanosine-3'-phosphate
  modified_base 11: mod_base = OTHER; note = 2'-deoxy-2'-fluorocytidine-3'-phosphate
  modified_base 12: mod_base = OTHER; note = 2'-O-methyluridine-3'-phosphate
  modified_base 13: mod_base = OTHER; note = 2'-O-methyluridine-3'-phosphate
  modified_base 14: mod_base = OTHER; note = 2'-O-methyluridine-3'-phosphate
  modified_base 15: mod_base = OTHER; note = 2'-O-methyladenosine-3'-phosphate
  modified_base 16: mod_base = OTHER; note = 2'-O-methyluridine-3'-phosphate
  modified_base 17: mod_base = OTHER; note = 2'-O-methyluridine-3'-phosphate
  modified_base 18: mod_base = OTHER; note = 2'-O-methyluridine-3'-phosphate
  modified_base 19: mod_base = OTHER; note = 2'-O-methyluridine-3'-phosphate
  modified_base 20: mod_base = OTHER; note = 2'-O-methylcytidine-3'-phosphate
  modified_base 21: mod_base = OTHER; note = 2'-O-methyluridine-3'-phosphate ((2S,4R)-1-[29-[[2-(acetylamino)-2-deoxy-beta-D-galactopyra nosyl]oxy]-14,14-bis[[3-[[3-[[5-[[2-(acetylamino)-2-deoxy-b eta-D-galactopyranosyl]oxy]-1-oxopentyl]amino]propyl]amino] -3-oxopropoxy]methyl]-1,12,19,25-tetraoxo-16-oxa-13,20,24-t riazanonacos-1-yl]-4-hydroxy-2-pyrrolidinyl)methyl ester
atgaaaagggctttattttct

SEQ ID NO: 3486 - RNA, 21 nt, synthetic construct
  source 1..21: mol_type = other RNA
  modified_base 1: mod_base = OTHER; note = 2'-O-methylcytidine-3'-phosphorothioate
  modified_base 2: mod_base = OTHER; note = 2'-O-methyladenosine-3'-phosphorothioate
  modified_base 3: mod_base = OTHER; note = 2'-O-methylguanosine-3'-phosphate
  modified_base 4: mod_base = OTHER; note = 2'-O-methyladenosine-3'-phosphate
  modified_base 5: mod_base = OTHER; note = 2'-O-methyladenosine-3'-phosphate
  modified_base 6: mod_base = OTHER; note = 2'-O-docosanyl-adenosine-3'-phosphate
  modified_base 7: mod_base = OTHER; note = 2'-deoxy-2'-fluoroguanosine-3'-phosphate
  modified_base 8: mod_base = OTHER; note = 2'-O-methyluridine-3'-phosphate
  modified_base 9: mod_base = OTHER; note = 2'-deoxy-2'-fluoroadenosine-3'-phosphate
  modified_base 10: mod_base = OTHER; note = 2'-deoxy-2'-fluorouridine-3'-phosphate
  modified_base 11: mod_base = OTHER; note = 2'-deoxy-2'-fluorocytidine-3'-phosphate
  modified_base 12: mod_base = OTHER; note = 2'-O-methylcytidine-3'-phosphate
  modified_base 13: mod_base = OTHER; note = 2'-O-methylcytidine-3'-phosphate
  modified_base 14: mod_base = OTHER; note = 2'-O-methyluridine-3'-phosphate
  modified_base 15: mod_base = OTHER; note = 2'-O-methyladenosine-3'-phosphate
  modified_base 16: mod_base = OTHER; note = 2'-O-methylguanosine-3'-phosphate
  modified_base 17: mod_base = OTHER; note = 2'-O-methyluridine-3'-phosphate
  modified_base 18: mod_base = OTHER; note = 2'-O-methylcytidine-3'-phosphate
  modified_base 19: mod_base = OTHER; note = 2'-O-methyluridine-3'-phosphate
  modified_base 20: mod_base = OTHER; note = 2'-O-methyluridine-3'-phosphate
  modified_base 21: mod_base = OTHER; note = 2'-O-methyluridine-3'-phosphate ((2S,4R)-1-[29-[[2-(acetylamino)-2-deoxy-beta-D-galactopyra nosyl]oxy]-14,14-bis[[3-[[3-[[5-[[2-(acetylamino)-2-deoxy-b eta-D-galactopyranosyl]oxy]-1-oxopentyl]amino]propyl]amino] -3-oxopropoxy]methyl]-1,12,19,25-tetraoxo-16-oxa-13,20,24-t riazanonacos-1-yl]-4-hydroxy-2-pyrrolidinyl)methyl ester
cagaaagtatccctagtcttt

SEQ ID NO: 3487 - RNA, 21 nt, synthetic construct
  source 1..21: mol_type = other RNA
  modified_base 1: mod_base = OTHER; note = 2'-O-methyluridine-3'-phosphorothioate
  modified_base 2: mod_base = OTHER; note = 2'-O-methylguanosine-3'-phosphorothioate
  modified_base 3: mod_base = OTHER; note = 2'-O-methylcytidine-3'-phosphate
  modified_base 4: mod_base = OTHER; note = 2'-O-methylcytidine-3'-phosphate
  modified_base 5: mod_base = OTHER; note = 2'-O-methyladenosine-3'-phosphate
  modified_base 6: mod_base = OTHER; note = 2'-O-docosanyl-guanosine-3'-phosphate
  modified_base 7: mod_base = OTHER; note = 2'-deoxy-2'-fluorocytidine-3'-phosphate
  modified_base 8: mod_base = OTHER; note = 2'-O-methyluridine-3'-phosphate
  modified_base 9: mod_base = OTHER; note = 2'-deoxy-2'-fluorouridine-3'-phosphate
  modified_base 10: mod_base = OTHER; note = 2'-deoxy-2'-fluorouridine-3'-phosphate
  modified_base 11: mod_base = OTHER; note = 2'-deoxy-2'-fluorouridine-3'-phosphate
  modified_base 12: mod_base = OTHER; note = 2'-O-methyluridine-3'-phosphate
  modified_base 13: mod_base = OTHER; note = 2'-O-methyladenosine-3'-phosphate
  modified_base 14: mod_base = OTHER; note = 2'-O-methyluridine-3'-phosphate
  modified_base 15: mod_base = OTHER; note = 2'-O-methylcytidine-3'-phosphate
  modified_base 16: mod_base = OTHER; note = 2'-O-methyluridine-3'-phosphate
  modified_base 17: mod_base = OTHER; note = 2'-O-methyluridine-3'-phosphate
  modified_base 18: mod_base = OTHER; note = 2'-O-methyluridine-3'-phosphate
  modified_base 19: mod_base = OTHER; note = 2'-O-methylcytidine-3'-phosphate
  modified_base 20: mod_base = OTHER; note = 2'-O-methyluridine-3'-phosphate
  modified_base 21: mod_base = OTHER; note = 2'-O-methyluridine-3'-phosphate ((2S,4R)-1-[29-[[2-(acetylamino)-2-deoxy-beta-D-galactopyra nosyl]oxy]-14,14-bis[[3-[[3-[[5-[[2-(acetylamino)-2-deoxy-b eta-D-galactopyranosyl]oxy]-1-oxopentyl]amino]propyl]amino] -3-oxopropoxy]methyl]-1,12,19,25-tetraoxo-16-oxa-13,20,24-t riazanonacos-1-yl]-4-hydroxy-2-pyrrolidinyl)methyl ester
tgccagctttttatctttctt

SEQ ID NO: 3488 - RNA, 21 nt, synthetic construct
  source 1..21: mol_type = other RNA
  modified_base 1: mod_base = OTHER; note = 2'-O-methylcytidine-3'-phosphorothioate
  modified_base 2: mod_base = OTHER; note = 2'-O-methyluridine-3'-phosphorothioate
  modified_base 3: mod_base = OTHER; note = 2'-O-methyluridine-3'-phosphate
  modified_base 4: mod_base = OTHER; note = 2'-O-methyluridine-3'-phosphate
  modified_base 5: mod_base = OTHER; note = 2'-O-methyluridine-3'-phosphate
  modified_base 6: mod_base = OTHER; note = 2'-O-docosanyl-guanosine-3'-phosphate
  modified_base 7: mod_base = OTHER; note = 2'-deoxy-2'-fluoroadenosine-3'-phosphate
  modified_base 8: mod_base = OTHER; note = 2'-O-methylguanosine-3'-phosphate
  modified_base 9: mod_base = OTHER; note = 2'-deoxy-2'-fluoroguanosine-3'-phosphate
  modified_base 10: mod_base = OTHER; note = 2'-deoxy-2'-fluorouridine-3'-phosphate
  modified_base 11: mod_base = OTHER; note = 2'-deoxy-2'-fluoroguanosine-3'-phosphate
  modified_base 12: mod_base = OTHER; note = 2'-O-methyladenosine-3'-phosphate
  modified_base 13: mod_base = OTHER; note = 2'-O-methyladenosine-3'-phosphate
  modified_base 14: mod_base = OTHER; note = 2'-O-methyluridine-3'-phosphate
  modified_base 15: mod_base = OTHER; note = 2'-O-methyladenosine-3'-phosphate
  modified_base 16: mod_base = OTHER; note = 2'-O-methyluridine-3'-phosphate
  modified_base 17: mod_base = OTHER; note = 2'-O-methyladenosine-3'-phosphate
  modified_base 18: mod_base = OTHER; note = 2'-O-methyladenosine-3'-phosphate
  modified_base 19: mod_base = OTHER; note = 2'-O-methyluridine-3'-phosphate
  modified_base 20: mod_base = OTHER; note = 2'-O-methyluridine-3'-phosphate
  modified_base 21: mod_base = OTHER; note = 2'-O-methyluridine-3'-phosphate ((2S,4R)-1-[29-[[2-(acetylamino)-2-deoxy-beta-D-galactopyra nosyl]oxy]-14,14-bis[[3-[[3-[[5-[[2-(acetylamino)-2-deoxy-b eta-D-galactopyranosyl]oxy]-1-oxopentyl]amino]propyl]amino] -3-oxopropoxy]methyl]-1,12,19,25-tetraoxo-16-oxa-13,20,24-t riazanonacos-1-yl]-4-hydroxy-2-pyrrolidinyl)methyl ester
cttttgaggtgaatataattt

SEQ ID NO: 3489 - RNA, 21 nt, synthetic construct
  source 1..21: mol_type = other RNA
  modified_base 1: mod_base = OTHER; note = 2'-O-methyluridine-3'-phosphorothioate
  modified_base 2: mod_base = OTHER; note = 2'-O-methylcytidine-3'-phosphorothioate
  modified_base 3: mod_base = OTHER; note = 2'-O-methyladenosine-3'-phosphate
  modified_base 4: mod_base = OTHER; note = 2'-O-methylguanosine-3'-phosphate
  modified_base 5: mod_base = OTHER; note = 2'-O-methylguanosine-3'-phosphate
  modified_base 6: mod_base = OTHER; note = 2'-O-docosanyl-guanosine-3'-phosphate
  modified_base 7: mod_base = OTHER; note = 2'-deoxy-2'-fluoroadenosine-3'-phosphate
  modified_base 8: mod_base = OTHER; note = 2'-O-methyluridine-3'-phosphate
  modified_base 9: mod_base = OTHER; note = 2'-deoxy-2'-fluoroadenosine-3'-phosphate
  modified_base 10: mod_base = OTHER; note = 2'-deoxy-2'-fluorouridine-3'-phosphate
  modified_base 11: mod_base = OTHER; note = 2'-deoxy-2'-fluorocytidine-3'-phosphate
  modified_base 12: mod_base = OTHER; note = 2'-O-methyluridine-3'-phosphate
  modified_base 13: mod_base = OTHER; note = 2'-O-methylguanosine-3'-phosphate
  modified_base 14: mod_base = OTHER; note = 2'-O-methyladenosine-3'-phosphate
  modified_base 15: mod_base = OTHER; note = 2'-O-methyladenosine-3'-phosphate
  modified_base 16: mod_base = OTHER; note = 2'-O-methylguanosine-3'-phosphate
  modified_base 17: mod_base = OTHER; note = 2'-O-methyladenosine-3'-phosphate
  modified_base 18: mod_base = OTHER; note = 2'-O-methyladenosine-3'-phosphate
  modified_base 19: mod_base = OTHER; note = 2'-O-methylcytidine-3'-phosphate
  modified_base 20: mod_base = OTHER; note = 2'-O-methyladenosine-3'-phosphate
  modified_base 21: mod_base = OTHER; note = 2'-O-methyluridine-3'-phosphate ((2S,4R)-1-[29-[[2-(acetylamino)-2-deoxy-beta-D-galactopyra nosyl]oxy]-14,14-bis[[3-[[3-[[5-[[2-(acetylamino)-2-deoxy-b eta-D-galactopyranosyl]oxy]-1-oxopentyl]amino]propyl]amino] -3-oxopropoxy]methyl]-1,12,19,25-tetraoxo-16-oxa-13,20,24-t riazanonacos-1-yl]-4-hydroxy-2-pyrrolidinyl)methyl ester
tcagggatatctgaagaacat

SEQ ID NO: 3490 - RNA, 21 nt, synthetic construct
  source 1..21: mol_type = other RNA
  modified_base 1: mod_base = OTHER; note = 2'-O-methylcytidine-3'-phosphorothioate
  modified_base 2: mod_base = OTHER; note = 2'-O-methyladenosine-3'-phosphorothioate
  modified_base 3: mod_base = OTHER; note = 2'-O-methyladenosine-3'-phosphate
  modified_base 4: mod_base = OTHER; note = 2'-O-methylcytidine-3'-phosphate
  modified_base 5: mod_base = OTHER; note = 2'-O-methyladenosine-3'-phosphate
  modified_base 6: mod_base = OTHER; note = 2'-O-docosanyl-adenosine-3'-phosphate
  modified_base 7: mod_base = OTHER; note = 2'-deoxy-2'-fluoroguanosine-3'-phosphate
  modified_base 8: mod_base = OTHER; note = 2'-O-methylcytidine-3'-phosphate
  modified_base 9: mod_base = OTHER; note = 2'-deoxy-2'-fluoroadenosine-3'-phosphate
  modified_base 10: mod_base = OTHER; note = 2'-deoxy-2'-fluorocytidine-3'-phosphate
  modified_base 11: mod_base = OTHER; note = 2'-deoxy-2'-fluoroguanosine-3'-phosphate
  modified_base 12: mod_base = OTHER; note = 2'-O-methyluridine-3'-phosphate
  modified_base 13: mod_base = OTHER; note = 2'-O-methylcytidine-3'-phosphate
  modified_base 14: mod_base = OTHER; note = 2'-O-methyladenosine-3'-phosphate
  modified_base 15: mod_base = OTHER; note = 2'-O-methyladenosine-3'-phosphate
  modified_base 16: mod_base = OTHER; note = 2'-O-methyladenosine-3'-phosphate
  modified_base 17: mod_base = OTHER; note = 2'-O-methyladenosine-3'-phosphate
  modified_base 18: mod_base = OTHER; note = 2'-O-methylguanosine-3'-phosphate
  modified_base 19: mod_base = OTHER; note = 2'-O-methylcytidine-3'-phosphate
  modified_base 20: mod_base = OTHER; note = 2'-O-methyluridine-3'-phosphate
  modified_base 21: mod_base = OTHER; note = 2'-O-methyluridine-3'-phosphate ((2S,4R)-1-[29-[[2-(acetylamino)-2-deoxy-beta-D-galactopyra nosyl]oxy]-14,14-bis[[3-[[3-[[5-[[2-(acetylamino)-2-deoxy-b eta-D-galactopyranosyl]oxy]-1-oxopentyl]amino]propyl]amino] -3-oxopropoxy]methyl]-1,12,19,25-tetraoxo-16-oxa-13,20,24-t riazanonacos-1-yl]-4-hydroxy-2-pyrrolidinyl)methyl ester
caacaagcacgtcaaaagctt

SEQ ID NO: 3491 - RNA, 21 nt, synthetic construct
  source 1..21: mol_type = other RNA
  modified_base 1: mod_base = OTHER; note = 2'-O-methyladenosine-3'-phosphorothioate
  modified_base 2: mod_base = OTHER; note = 2'-O-methyluridine-3'-phosphorothioate
  modified_base 3: mod_base = OTHER; note = 2'-O-methyluridine-3'-phosphate
  modified_base 4: mod_base = OTHER; note = 2'-O-methylguanosine-3'-phosphate
  modified_base 5: mod_base = OTHER; note = 2'-O-methyluridine-3'-phosphate
  modified_base 6: mod_base = OTHER; note = 2'-O-docosanyl-adenosine-3'-phosphate
  modified_base 7: mod_base = OTHER; note = 2'-deoxy-2'-fluorouridine-3'-phosphate
  modified_base 8: mod_base = OTHER; note = 2'-O-methyladenosine-3'-phosphate
  modified_base 9: mod_base = OTHER; note = 2'-deoxy-2'-fluoroadenosine-3'-phosphate
  modified_base 10: mod_base = OTHER; note = 2'-deoxy-2'-fluorocytidine-3'-phosphate
  modified_base 11: mod_base = OTHER; note = 2'-deoxy-2'-fluoroadenosine-3'-phosphate
  modified_base 12: mod_base = OTHER; note = 2'-O-methylguanosine-3'-phosphate
  modified_base 13: mod_base = OTHER; note = 2'-O-methyladenosine-3'-phosphate
  modified_base 14: mod_base = OTHER; note = 2'-O-methylcytidine-3'-phosphate
  modified_base 15: mod_base = OTHER; note = 2'-O-methylcytidine-3'-phosphate
  modified_base 16: mod_base = OTHER; note = 2'-O-methyladenosine-3'-phosphate
  modified_base 17: mod_base = OTHER; note = 2'-O-methylcytidine-3'-phosphate
  modified_base 18: mod_base = OTHER; note = 2'-O-methyluridine-3'-phosphate
  modified_base 19: mod_base = OTHER; note = 2'-O-methyluridine-3'-phosphate
  modified_base 20: mod_base = OTHER; note = 2'-O-methylcytidine-3'-phosphate
  modified_base 21: mod_base = OTHER; note = 2'-O-methyluridine-3'-phosphate ((2S,4R)-1-[29-[[2-(acetylamino)-2-deoxy-beta-D-galactopyra nosyl]oxy]-14,14-bis[[3-[[3-[[5-[[2-(acetylamino)-2-deoxy-b eta-D-galactopyranosyl]oxy]-1-oxopentyl]amino]propyl]amino] -3-oxopropoxy]methyl]-1,12,19,25-tetraoxo-16-oxa-13,20,24-t riazanonacos-1-yl]-4-hydroxy-2-pyrrolidinyl)methyl ester
attgtataacagaccacttct

SEQ ID NO: 3492 - RNA, 21 nt, synthetic construct
  source 1..21: mol_type = other RNA
  modified_base 1: mod_base = OTHER; note = 2'-O-methyluridine-3'-phosphorothioate
  modified_base 2: mod_base = OTHER; note = 2'-O-methyluridine-3'-phosphorothioate
  modified_base 3: mod_base = OTHER; note = 2'-O-methyladenosine-3'-phosphate
  modified_base 4: mod_base = OTHER; note = 2'-O-methyladenosine-3'-phosphate
  modified_base 5: mod_base = OTHER; note = 2'-O-methyluridine-3'-phosphate
  modified_base 6: mod_base = OTHER; note = 2'-O-docosanyl-guanosine-3'-phosphate
  modified_base 7: mod_base = OTHER; note = 2'-deoxy-2'-fluorouridine-3'-phosphate
  modified_base 8: mod_base = OTHER; note = 2'-O-methyluridine-3'-phosphate
  modified_base 9: mod_base = OTHER; note = 2'-deoxy-2'-fluoroguanosine-3'-phosphate
  modified_base 10: mod_base = OTHER; note = 2'-deoxy-2'-fluorocytidine-3'-phosphate
  modified_base 11: mod_base = OTHER; note = 2'-deoxy-2'-fluorocytidine-3'-phosphate
  modified_base 12: mod_base = OTHER; note = 2'-O-methyluridine-3'-phosphate
  modified_base 13: mod_base = OTHER; note = 2'-O-methyluridine-3'-phosphate
  modified_base 14: mod_base = OTHER; note = 2'-O-methyluridine-3'-phosphate
  modified_base 15: mod_base = OTHER; note = 2'-O-methyluridine-3'-phosphate
  modified_base 16: mod_base = OTHER; note = 2'-O-methyladenosine-3'-phosphate
  modified_base 17: mod_base = OTHER; note = 2'-O-methyluridine-3'-phosphate
  modified_base 18: mod_base = OTHER; note = 2'-O-methyladenosine-3'-phosphate
  modified_base 19: mod_base = OTHER; note = 2'-O-methyluridine-3'-phosphate
  modified_base 20: mod_base = OTHER; note = 2'-O-methyluridine-3'-phosphate
  modified_base 21: mod_base = OTHER; note = 2'-O-methyluridine-3'-phosphate ((2S,4R)-1-[29-[[2-(acetylamino)-2-deoxy-beta-D-galactopyra nosyl]oxy]-14,14-bis[[3-[[3-[[5-[[2-(acetylamino)-2-deoxy-b eta-D-galactopyranosyl]oxy]-1-oxopentyl]amino]propyl]amino] -3-oxopropoxy]methyl]-1,12,19,25-tetraoxo-16-oxa-13,20,24-t riazanonacos-1-yl]-4-hydroxy-2-pyrrolidinyl)methyl ester
ttaatgttgccttttatattt

SEQ ID NO: 3493 - RNA, 21 nt, synthetic construct
  source 1..21: mol_type = other RNA
  modified_base 1: mod_base = OTHER; note = 2'-O-methyladenosine-3'-phosphorothioate
  modified_base 2: mod_base = OTHER; note = 2'-O-methyluridine-3'-phosphorothioate
  modified_base 3: mod_base = OTHER; note = 2'-O-methyluridine-3'-phosphate
  modified_base 4: mod_base = OTHER; note = 2'-O-methylguanosine-3'-phosphate
  modified_base 5: mod_base = OTHER; note = 2'-O-methyladenosine-3'-phosphate
  modified_base 6: mod_base = OTHER; note = 2'-O-docosanyl-cytidine-3'-phosphate
  modified_base 7: mod_base = OTHER; note = 2'-deoxy-2'-fluorocytidine-3'-phosphate
  modified_base 8: mod_base = OTHER; note = 2'-O-methyluridine-3'-phosphate
  modified_base 9: mod_base = OTHER; note = 2'-deoxy-2'-fluorouridine-3'-phosphate
  modified_base 10: mod_base = OTHER; note = 2'-deoxy-2'-fluoroguanosine-3'-phosphate
  modified_base 11: mod_base = OTHER; note = 2'-deoxy-2'-fluoroguanosine-3'-phosphate
  modified_base 12: mod_base = OTHER; note = 2'-O-methyluridine-3'-phosphate
  modified_base 13: mod_base = OTHER; note = 2'-O-methyluridine-3'-phosphate
  modified_base 14: mod_base = OTHER; note = 2'-O-methyluridine-3'-phosphate
  modified_base 15: mod_base = OTHER; note = 2'-O-methylcytidine-3'-phosphate
  modified_base 16: mod_base = OTHER; note = 2'-O-methyluridine-3'-phosphate
  modified_base 17: mod_base = OTHER; note = 2'-O-methyluridine-3'-phosphate
  modified_base 18: mod_base = OTHER; note = 2'-O-methyladenosine-3'-phosphate
  modified_base 19: mod_base = OTHER; note = 2'-O-methylcytidine-3'-phosphate
  modified_base 20: mod_base = OTHER; note = 2'-O-methyladenosine-3'-phosphate
  modified_base 21: mod_base = OTHER; note = 2'-O-methyluridine-3'-phosphate ((2S,4R)-1-[29-[[2-(acetylamino)-2-deoxy-beta-D-galactopyra nosyl]oxy]-14,14-bis[[3-[[3-[[5-[[2-(acetylamino)-2-deoxy-b eta-D-galactopyranosyl]oxy]-1-oxopentyl]amino]propyl]amino] -3-oxopropoxy]methyl]-1,12,19,25-tetraoxo-16-oxa-13,20,24-t riazanonacos-1-yl]-4-hydroxy-2-pyrrolidinyl)methyl ester
attgaccttggtttcttacat

SEQ ID NO: 3494 - RNA, 21 nt, synthetic construct
  source 1..21: mol_type = other RNA
  modified_base 1: mod_base = OTHER; note = 2'-O-methyluridine-3'-phosphorothioate
  modified_base 2: mod_base = OTHER; note = 2'-O-methyladenosine-3'-phosphorothioate
  modified_base 3: mod_base = OTHER; note = 2'-O-methyluridine-3'-phosphate
  modified_base 4: mod_base = OTHER; note = 2'-O-methylguanosine-3'-phosphate
  modified_base 5: mod_base = OTHER; note = 2'-O-methyladenosine-3'-phosphate
  modified_base 6: mod_base = OTHER; note = 2'-O-docosanyl-uridine-3'-phosphate
  modified_base 7: mod_base = OTHER; note = 2'-deoxy-2'-fluorocytidine-3'-phosphate
  modified_base 8: mod_base = OTHER; note = 2'-O-methyladenosine-3'-phosphate
  modified_base 9: mod_base = OTHER; note = 2'-deoxy-2'-fluoroadenosine-3'-phosphate
  modified_base 10: mod_base = OTHER; note = 2'-deoxy-2'-fluorocytidine-3'-phosphate
  modified_base 11: mod_base = OTHER; note = 2'-deoxy-2'-fluoroadenosine-3'-phosphate
  modified_base 12: mod_base = OTHER; note = 2'-O-methylguanosine-3'-phosphate
  modified_base 13: mod_base = OTHER; note = 2'-O-methyladenosine-3'-phosphate
  modified_base 14: mod_base = OTHER; note = 2'-O-methyluridine-3'-phosphate
  modified_base 15: mod_base = OTHER; note = 2'-O-methylguanosine-3'-phosphate
  modified_base 16: mod_base = OTHER; note = 2'-O-methyladenosine-3'-phosphate
  modified_base 17: mod_base = OTHER; note = 2'-O-methylguanosine-3'-phosphate
  modified_base 18: mod_base = OTHER; note = 2'-O-methyladenosine-3'-phosphate
  modified_base 19: mod_base = OTHER; note = 2'-O-methyladenosine-3'-phosphate
  modified_base 20: mod_base = OTHER; note = 2'-O-methylcytidine-3'-phosphate
  modified_base 21: mod_base = OTHER; note = 2'-O-methyluridine-3'-phosphate ((2S,4R)-1-[29-[[2-(acetylamino)-2-deoxy-beta-D-galactopyra nosyl]oxy]-14,14-bis[[3-[[3-[[5-[[2-(acetylamino)-2-deoxy-b eta-D-galactopyranosyl]oxy]-1-oxopentyl]amino]propyl]amino] -3-oxopropoxy]methyl]-1,12,19,25-tetraoxo-16-oxa-13,20,24-t riazanonacos-1-yl]-4-hydroxy-2-pyrrolidinyl)methyl ester
tatgatcaacagatgagaact

SEQ ID NO: 3495 - RNA, 21 nt, synthetic construct
  source 1..21: mol_type = other RNA
  modified_base 1: mod_base = OTHER; note = 2'-O-methylguanosine-3'-phosphorothioate
  modified_base 2: mod_base = OTHER; note = 2'-O-methylcytidine-3'-phosphorothioate
  modified_base 3: mod_base = OTHER; note = 2'-O-methyladenosine-3'-phosphate
  modified_base 4: mod_base = OTHER; note = 2'-O-methylguanosine-3'-phosphate
  modified_base 5: mod_base = OTHER; note = 2'-O-methyladenosine-3'-phosphate
  modified_base 6: mod_base = OTHER; note = 2'-O-docosanyl-guanosine-3'-phosphate
  modified_base 7: mod_base = OTHER; note = 2'-deoxy-2'-fluoroadenosine-3'-phosphate
  modified_base 8: mod_base = OTHER; note = 2'-O-methyluridine-3'-phosphate
  modified_base 9: mod_base = OTHER; note = 2'-deoxy-2'-fluorouridine-3'-phosphate
  modified_base 10: mod_base = OTHER; note = 2'-deoxy-2'-fluorouridine-3'-phosphate
  modified_base 11: mod_base = OTHER; note = 2'-deoxy-2'-fluorocytidine-3'-phosphate
  modified_base 12: mod_base = OTHER; note = 2'-O-methyluridine-3'-phosphate
  modified_base 13: mod_base = OTHER; note = 2'-O-methyluridine-3'-phosphate
  modified_base 14: mod_base = OTHER; note = 2'-O-methyladenosine-3'-phosphate
  modified_base 15: mod_base = OTHER; note = 2'-O-methyladenosine-3'-phosphate
  modified_base 16: mod_base = OTHER; note = 2'-O-methylguanosine-3'-phosphate
  modified_base 17: mod_base = OTHER; note = 2'-O-methyluridine-3'-phosphate
  modified_base 18: mod_base = OTHER; note = 2'-O-methylguanosine-3'-phosphate
  modified_base 19: mod_base = OTHER; note = 2'-O-methyladenosine-3'-phosphate
  modified_base 20: mod_base = OTHER; note = 2'-O-methylcytidine-3'-phosphate
  modified_base 21: mod_base = OTHER; note = 2'-O-methyluridine-3'-phosphate ((2S,4R)-1-[29-[[2-(acetylamino)-2-deoxy-beta-D-galactopyra nosyl]oxy]-14,14-bis[[3-[[3-[[5-[[2-(acetylamino)-2-deoxy-b eta-D-galactopyranosyl]oxy]-1-oxopentyl]amino]propyl]amino] -3-oxopropoxy]methyl]-1,12,19,25-tetraoxo-16-oxa-13,20,24-t riazanonacos-1-yl]-4-hydroxy-2-pyrrolidinyl)methyl ester
gcagagatttcttaagtgact

SEQ ID NO: 3496 - RNA, 21 nt, synthetic construct
  source 1..21: mol_type = other RNA
  modified_base 1: mod_base = OTHER; note = 2'-O-methylguanosine-3'-phosphorothioate
  modified_base 2: mod_base = OTHER; note = 2'-O-methyladenosine-3'-phosphorothioate
  modified_base 3: mod_base = OTHER; note = 2'-O-methyladenosine-3'-phosphate
  modified_base 4: mod_base = OTHER; note = 2'-O-methylguanosine-3'-phosphate
  modified_base 5: mod_base = OTHER; note = 2'-O-methyladenosine-3'-phosphate
  modified_base 6: mod_base = OTHER; note = 2'-O-docosanyl-guanosine-3'-phosphate
  modified_base 7: mod_base = OTHER; note = 2'-deoxy-2'-fluorouridine-3'-phosphate
  modified_base 8: mod_base = OTHER; note = 2'-O-methyluridine-3'-phosphate
  modified_base 9: mod_base = OTHER; note = 2'-deoxy-2'-fluorouridine-3'-phosphate
  modified_base 10: mod_base = OTHER; note = 2'-deoxy-2'-fluorocytidine-3'-phosphate
  modified_base 11: mod_base = OTHER; note = 2'-deoxy-2'-fluorouridine-3'-phosphate
  modified_base 12: mod_base = OTHER; note = 2'-O-methyluridine-3'-phosphate
  modified_base 13: mod_base = OTHER; note = 2'-O-methyluridine-3'-phosphate
  modified_base 14: mod_base = OTHER; note = 2'-O-methylguanosine-3'-phosphate
  modified_base 15: mod_base = OTHER; note = 2'-O-methyluridine-3'-phosphate
  modified_base 16: mod_base = OTHER; note = 2'-O-methylguanosine-3'-phosphate
  modified_base 17: mod_base = OTHER; note = 2'-O-methyladenosine-3'-phosphate
  modified_base 18: mod_base = OTHER; note = 2'-O-methyladenosine-3'-phosphate
  modified_base 19: mod_base = OTHER; note = 2'-O-methyladenosine-3'-phosphate
  modified_base 20: mod_base = OTHER; note = 2'-O-methyladenosine-3'-phosphate
  modified_base 21: mod_base = OTHER; note = 2'-O-methyluridine-3'-phosphate ((2S,4R)-1-[29-[[2-(acetylamino)-2-deoxy-beta-D-galactopyra nosyl]oxy]-14,14-bis[[3-[[3-[[5-[[2-(acetylamino)-2-deoxy-b eta-D-galactopyranosyl]oxy]-1-oxopentyl]amino]propyl]amino] -3-oxopropoxy]methyl]-1,12,19,25-tetraoxo-16-oxa-13,20,24-t riazanonacos-1-yl]-4-hydroxy-2-pyrrolidinyl)methyl ester
gaagagtttctttgtgaaaat

SEQ ID NO: 3497 - RNA, 21 nt, synthetic construct
  source 1..21: mol_type = other RNA
  modified_base 1: mod_base = OTHER; note = 2'-O-methylcytidine-3'-phosphorothioate
  modified_base 2: mod_base = OTHER; note = 2'-O-methyladenosine-3'-phosphorothioate
  modified_base 3: mod_base = OTHER; note = 2'-O-methyladenosine-3'-phosphate
  modified_base 4: mod_base = OTHER; note = 2'-O-methylcytidine-3'-phosphate
  modified_base 5: mod_base = OTHER; note = 2'-O-methylcytidine-3'-phosphate
  modified_base 6: mod_base = OTHER; note = 2'-O-docosanyl-adenosine-3'-phosphate
  modified_base 7: mod_base = OTHER; note = 2'-deoxy-2'-fluorouridine-3'-phosphate
  modified_base 8: mod_base = OTHER; note = 2'-O-methyluridine-3'-phosphate
  modified_base 9: mod_base = OTHER; note = 2'-deoxy-2'-fluoroguanosine-3'-phosphate
  modified_base 10: mod_base = OTHER; note = 2'-deoxy-2'-fluoroadenosine-3'-phosphate
  modified_base 11: mod_base = OTHER; note = 2'-deoxy-2'-fluoroadenosine-3'-phosphate
  modified_base 12: mod_base = OTHER; note = 2'-O-methyladenosine-3'-phosphate
  modified_base 13: mod_base = OTHER; note = 2'-O-methyluridine-3'-phosphate
  modified_base 14: mod_base = OTHER; note = 2'-O-methylguanosine-3'-phosphate
  modified_base 15: mod_base = OTHER; note = 2'-O-methylcytidine-3'-phosphate
  modified_base 16: mod_base = OTHER; note = 2'-O-methylcytidine-3'-phosphate
  modified_base 17: mod_base = OTHER; note = 2'-O-methyluridine-3'-phosphate
  modified_base 18: mod_base = OTHER; note = 2'-O-methylcytidine-3'-phosphate
  modified_base 19: mod_base = OTHER; note = 2'-O-methyladenosine-3'-phosphate
  modified_base 20: mod_base = OTHER; note = 2'-O-methyladenosine-3'-phosphate
  modified_base 21: mod_base = OTHER; note = 2'-O-methyluridine-3'-phosphate ((2S,4R)-1-[29-[[2-(acetylamino)-2-deoxy-beta-D-galactopyra nosyl]oxy]-14,14-bis[[3-[[3-[[5-[[2-(acetylamino)-2-deoxy-b eta-D-galactopyranosyl]oxy]-1-oxopentyl]amino]propyl]amino] -3-oxopropoxy]methyl]-1,12,19,25-tetraoxo-16-oxa-13,20,24-t riazanonacos-1-yl]-4-hydroxy-2-pyrrolidinyl)methyl ester
caaccattgaaatgcctcaat

SEQ ID NO: 3498 - RNA, 21 nt, synthetic construct
  source 1..21: mol_type = other RNA
  modified_base 1: mod_base = OTHER; note = 2'-O-methyladenosine-3'-phosphorothioate
  modified_base 2: mod_base = OTHER; note = 2'-O-methyluridine-3'-phosphorothioate
  modified_base 3: mod_base = OTHER; note = 2'-O-methylcytidine-3'-phosphate
  modified_base 4: mod_base = OTHER; note = 2'-O-methyluridine-3'-phosphate
  modified_base 5: mod_base = OTHER; note = 2'-O-methyladenosine-3'-phosphate
  modified_base 6: mod_base = OTHER; note = 2'-O-docosanyl-uridine-3'-phosphate
  modified_base 7: mod_base = OTHER; note = 2'-deoxy-2'-fluorouridine-3'-phosphate
  modified_base 8: mod_base = OTHER; note = 2'-O-methyluridine-3'-phosphate
  modified_base 9: mod_base = OTHER; note = 2'-deoxy-2'-fluorouridine-3'-phosphate
  modified_base 10: mod_base = OTHER; note = 2'-deoxy-2'-fluoroguanosine-3'-phosphate
  modified_base 11: mod_base = OTHER; note = 2'-deoxy-2'-fluorocytidine-3'-phosphate
  modified_base 12: mod_base = OTHER; note = 2'-O-methyladenosine-3'-phosphate
  modified_base 13: mod_base = OTHER; note = 2'-O-methylguanosine-3'-phosphate
  modified_base 14: mod_base = OTHER; note = 2'-O-methyluridine-3'-phosphate
  modified_base 15: mod_base = OTHER; note = 2'-O-methylcytidine-3'-phosphate
  modified_base 16: mod_base = OTHER; note = 2'-O-methylcytidine-3'-phosphate
  modified_base 17: mod_base = OTHER; note = 2'-O-methyladenosine-3'-phosphate
  modified_base 18: mod_base = OTHER; note = 2'-O-methylcytidine-3'-phosphate
  modified_base 19: mod_base = OTHER; note = 2'-O-methyluridine-3'-phosphate
  modified_base 20: mod_base = OTHER; note = 2'-O-methylcytidine-3'-phosphate
  modified_base 21: mod_base = OTHER; note = 2'-O-methyluridine-3'-phosphate ((2S,4R)-1-[29-[[2-(acetylamino)-2-deoxy-beta-D-galactopyra nosyl]oxy]-14,14-bis[[3-[[3-[[5-[[2-(acetylamino)-2-deoxy-b eta-D-galactopyranosyl]oxy]-1-oxopentyl]amino]propyl]amino] -3-oxopropoxy]methyl]-1,12,19,25-tetraoxo-16-oxa-13,20,24-t riazanonacos-1-yl]-4-hydroxy-2-pyrrolidinyl)methyl ester
atctattttgcagtccactct

SEQ ID NO: 3499 - RNA, 21 nt, synthetic construct
  source 1..21: mol_type = other RNA
  modified_base 1: mod_base = OTHER; note = 2'-O-methylguanosine-3'-phosphorothioate
  modified_base 2: mod_base = OTHER; note = 2'-O-methyluridine-3'-phosphorothioate
  modified_base 3: mod_base = OTHER; note = 2'-O-methyluridine-3'-phosphate
  modified_base 4: mod_base = OTHER; note = 2'-O-methyladenosine-3'-phosphate
  modified_base 5: mod_base = OTHER; note = 2'-O-methylcytidine-3'-phosphate
  modified_base 6: mod_base = OTHER; note = 2'-O-docosanyl-cytidine-3'-phosphate
  modified_base 7: mod_base = OTHER; note = 2'-deoxy-2'-fluoroadenosine-3'-phosphate
  modified_base 8: mod_base = OTHER; note = 2'-O-methyluridine-3'-phosphate
  modified_base 9: mod_base = OTHER; note = 2'-deoxy-2'-fluoroadenosine-3'-phosphate
  modified_base 10: mod_base = OTHER; note = 2'-deoxy-2'-fluorouridine-3'-phosphate
  modified_base 11: mod_base = OTHER; note = 2'-deoxy-2'-fluoroguanosine-3'-phosphate
  modified_base 12: mod_base = OTHER; note = 2'-O-methyluridine-3'-phosphate
  modified_base 13: mod_base = OTHER; note = 2'-O-methyladenosine-3'-phosphate
  modified_base 14: mod_base = OTHER; note = 2'-O-methyluridine-3'-phosphate
  modified_base 15: mod_base = OTHER; note = 2'-O-methyluridine-3'-phosphate
  modified_base 16: mod_base = OTHER; note = 2'-O-methylcytidine-3'-phosphate
  modified_base 17: mod_base = OTHER; note = 2'-O-methyladenosine-3'-phosphate
  modified_base 18: mod_base = OTHER; note = 2'-O-methyluridine-3'-phosphate
  modified_base 19: mod_base = OTHER; note = 2'-O-methylcytidine-3'-phosphate
  modified_base 20: mod_base = OTHER; note = 2'-O-methyluridine-3'-phosphate
  modified_base 21: mod_base = OTHER; note = 2'-O-methyluridine-3'-phosphate ((2S,4R)-1-[29-[[2-(acetylamino)-2-deoxy-beta-D-galactopyra nosyl]oxy]-14,14-bis[[3-[[3-[[5-[[2-(acetylamino)-2-deoxy-b eta-D-galactopyranosyl]oxy]-1-oxopentyl]amino]propyl]amino] -3-oxopropoxy]methyl]-1,12,19,25-tetraoxo-16-oxa-13,20,24-t riazanonacos-1-yl]-4-hydroxy-2-pyrrolidinyl)methyl ester
gttaccatatgtattcatctt

SEQ ID NO: 3500 - RNA, 21 nt, synthetic construct
  source 1..21: mol_type = other RNA
  modified_base 1: mod_base = OTHER; note = 2'-O-methyluridine-3'-phosphorothioate
  modified_base 2: mod_base = OTHER; note = 2'-O-methyluridine-3'-phosphorothioate
  modified_base 3: mod_base = OTHER; note = 2'-O-methylcytidine-3'-phosphate
  modified_base 4: mod_base = OTHER; note = 2'-O-methyluridine-3'-phosphate
  modified_base 5: mod_base = OTHER; note = 2'-O-methyluridine-3'-phosphate
  modified_base 6: mod_base = OTHER; note = 2'-O-docosanyl-adenosine-3'-phosphate
  modified_base 7: mod_base = OTHER; note = 2'-deoxy-2'-fluorouridine-3'-phosphate
  modified_base 8: mod_base = OTHER; note = 2'-O-methylcytidine-3'-phosphate
  modified_base 9: mod_base = OTHER; note = 2'-deoxy-2'-fluorouridine-3'-phosphate
  modified_base 10: mod_base = OTHER; note = 2'-deoxy-2'-fluorouridine-3'-phosphate
  modified_base 11: mod_base = OTHER; note = 2'-deoxy-2'-fluoroadenosine-3'-phosphate
  modified_base 12: mod_base = OTHER; note = 2'-O-methyladenosine-3'-phosphate
  modified_base 13: mod_base = OTHER; note = 2'-O-methyluridine-3'-phosphate
  modified_base 14: mod_base = OTHER; note = 2'-O-methyluridine-3'-phosphate
  modified_base 15: mod_base = OTHER; note = 2'-O-methyluridine-3'-phosphate
  modified_base 16: mod_base = OTHER; note = 2'-O-methyladenosine-3'-phosphate
  modified_base 17: mod_base = OTHER; note = 2'-O-methylcytidine-3'-phosphate
  modified_base 18: mod_base = OTHER; note = 2'-O-methyladenosine-3'-phosphate
  modified_base 19: mod_base = OTHER; note = 2'-O-methylguanosine-3'-phosphate
  modified_base 20: mod_base = OTHER; note = 2'-O-methylguanosine-3'-phosphate
  modified_base 21: mod_base = OTHER; note = 2'-O-methyluridine-3'-phosphate ((2S,4R)-1-[29-[[2-(acetylamino)-2-deoxy-beta-D-galactopyra nosyl]oxy]-14,14-bis[[3-[[3-[[5-[[2-(acetylamino)-2-deoxy-b eta-D-galactopyranosyl]oxy]-1-oxopentyl]amino]propyl]amino] -3-oxopropoxy]methyl]-1,12,19,25-tetraoxo-16-oxa-13,20,24-t riazanonacos-1-yl]-4-hydroxy-2-pyrrolidinyl)methyl ester
ttcttatcttaatttacaggt

SEQ ID NO: 3501 - RNA, 21 nt, synthetic construct
  source 1..21: mol_type = other RNA
  modified_base 1: mod_base = OTHER; note = 2'-O-methyladenosine-3'-phosphorothioate
  modified_base 2: mod_base = OTHER; note = 2'-O-methylcytidine-3'-phosphorothioate
  modified_base 3: mod_base = OTHER; note = 2'-O-methyladenosine-3'-phosphate
  modified_base 4: mod_base = OTHER; note = 2'-O-methylguanosine-3'-phosphate
  modified_base 5: mod_base = OTHER; note = 2'-O-methyluridine-3'-phosphate
  modified_base 6: mod_base = OTHER; note = 2'-O-docosanyl-uridine-3'-phosphate
  modified_base 7: mod_base = OTHER; note = 2'-deoxy-2'-fluoroadenosine-3'-phosphate
  modified_base 8: mod_base = OTHER; note = 2'-O-methyluridine-3'-phosphate
  modified_base 9: mod_base = OTHER; note = 2'-deoxy-2'-fluorocytidine-3'-phosphate
  modified_base 10: mod_base = OTHER; note = 2'-deoxy-2'-fluorouridine-3'-phosphate
  modified_base 11: mod_base = OTHER; note = 2'-deoxy-2'-fluorocytidine-3'-phosphate
  modified_base 12: mod_base = OTHER; note = 2'-O-methyladenosine-3'-phosphate
  modified_base 13: mod_base = OTHER; note = 2'-O-methyluridine-3'-phosphate
  modified_base 14: mod_base = OTHER; note = 2'-O-methyladenosine-3'-phosphate
  modified_base 15: mod_base = OTHER; note = 2'-O-methyluridine-3'-phosphate
  modified_base 16: mod_base = OTHER; note = 2'-O-methyluridine-3'-phosphate
  modified_base 17: mod_base = OTHER; note = 2'-O-methyluridine-3'-phosphate
  modified_base 18: mod_base = OTHER; note = 2'-O-methylguanosine-3'-phosphate
  modified_base 19: mod_base = OTHER; note = 2'-O-methylguanosine-3'-phosphate
  modified_base 20: mod_base = OTHER; note = 2'-O-methylcytidine-3'-phosphate
  modified_base 21: mod_base = OTHER; note = 2'-O-methyluridine-3'-phosphate ((2S,4R)-1-[29-[[2-(acetylamino)-2-deoxy-beta-D-galactopyra nosyl]oxy]-14,14-bis[[3-[[3-[[5-[[2-(acetylamino)-2-deoxy-b eta-D-galactopyranosyl]oxy]-1-oxopentyl]amino]propyl]amino] -3-oxopropoxy]methyl]-1,12,19,25-tetraoxo-16-oxa-13,20,24-t riazanonacos-1-yl]-4-hydroxy-2-pyrrolidinyl)methyl ester
acagttatctcatatttggct

SEQ ID NO: 3502 - RNA, 21 nt, synthetic construct
  source 1..21: mol_type = other RNA
  modified_base 1: mod_base = OTHER; note = 2'-O-methyladenosine-3'-phosphorothioate
  modified_base 2: mod_base = OTHER; note = 2'-O-methyladenosine-3'-phosphorothioate
  modified_base 3: mod_base = OTHER; note = 2'-O-methylcytidine-3'-phosphate
  modified_base 4: mod_base = OTHER; note = 2'-O-methyladenosine-3'-phosphate
  modified_base 5: mod_base = OTHER; note = 2'-O-methyladenosine-3'-phosphate
  modified_base 6: mod_base = OTHER; note = 2'-O-docosanyl-uridine-3'-phosphate
  modified_base 7: mod_base = OTHER; note = 2'-deoxy-2'-fluorouridine-3'-phosphate
  modified_base 8: mod_base = OTHER; note = 2'-O-methyluridine-3'-phosphate
  modified_base 9: mod_base = OTHER; note = 2'-deoxy-2'-fluorouridine-3'-phosphate
  modified_base 10: mod_base = OTHER; note = 2'-deoxy-2'-fluoroadenosine-3'-phosphate
  modified_base 11: mod_base = OTHER; note = 2'-deoxy-2'-fluoroadenosine-3'-phosphate
  modified_base 12: mod_base = OTHER; note = 2'-O-methyluridine-3'-phosphate
  modified_base 13: mod_base = OTHER; note = 2'-O-methyluridine-3'-phosphate
  modified_base 14: mod_base = OTHER; note = 2'-O-methyluridine-3'-phosphate
  modified_base 15: mod_base = OTHER; note = 2'-O-methylcytidine-3'-phosphate
  modified_base 16: mod_base = OTHER; note = 2'-O-methyladenosine-3'-phosphate
  modified_base 17: mod_base = OTHER; note = 2'-O-methylguanosine-3'-phosphate
  modified_base 18: mod_base = OTHER; note = 2'-O-methyluridine-3'-phosphate
  modified_base 19: mod_base = OTHER; note = 2'-O-methyluridine-3'-phosphate
  modified_base 20: mod_base = OTHER; note = 2'-O-methylguanosine-3'-phosphate
  modified_base 21: mod_base = OTHER; note = 2'-O-methyluridine-3'-phosphate ((2S,4R)-1-[29-[[2-(acetylamino)-2-deoxy-beta-D-galactopyra nosyl]oxy]-14,14-bis[[3-[[3-[[5-[[2-(acetylamino)-2-deoxy-b eta-D-galactopyranosyl]oxy]-1-oxopentyl]amino]propyl]amino] -3-oxopropoxy]methyl]-1,12,19,25-tetraoxo-16-oxa-13,20,24-t riazanonacos-1-yl]-4-hydroxy-2-pyrrolidinyl)methyl ester
aacaattttaatttcagttgt

SEQ ID NO: 3503 - RNA, 21 nt, synthetic construct
  source 1..21: mol_type = other RNA
  modified_base 1: mod_base = OTHER; note = 2'-O-methylguanosine-3'-phosphorothioate
  modified_base 2: mod_base = OTHER; note = 2'-O-methylguanosine-3'-phosphorothioate
  modified_base 3: mod_base = OTHER; note = 2'-O-methylcytidine-3'-phosphate
  modified_base 4: mod_base = OTHER; note = 2'-O-methyladenosine-3'-phosphate
  modified_base 5: mod_base = OTHER; note = 2'-O-methyladenosine-3'-phosphate
  modified_base 6: mod_base = OTHER; note = 2'-O-docosanyl-guanosine-3'-phosphate
  modified_base 7: mod_base = OTHER; note = 2'-deoxy-2'-fluoroguanosine-3'-phosphate
  modified_base 8: mod_base = OTHER; note = 2'-O-methyladenosine-3'-phosphate
  modified_base 9: mod_base = OTHER; note = 2'-deoxy-2'-fluoroadenosine-3'-phosphate
  modified_base 10: mod_base = OTHER; note = 2'-deoxy-2'-fluoroadenosine-3'-phosphate
  modified_base 11: mod_base = OTHER; note = 2'-deoxy-2'-fluoroadenosine-3'-phosphate
  modified_base 12: mod_base = OTHER; note = 2'-O-methyluridine-3'-phosphate
  modified_base 13: mod_base = OTHER; note = 2'-O-methyladenosine-3'-phosphate
  modified_base 14: mod_base = OTHER; note = 2'-O-methyladenosine-3'-phosphate
  modified_base 15: mod_base = OTHER; note = 2'-O-methyladenosine-3'-phosphate
  modified_base 16: mod_base = OTHER; note = 2'-O-methyladenosine-3'-phosphate
  modified_base 17: mod_base = OTHER; note = 2'-O-methylguanosine-3'-phosphate
  modified_base 18: mod_base = OTHER; note = 2'-O-methyladenosine-3'-phosphate
  modified_base 19: mod_base = OTHER; note = 2'-O-methyluridine-3'-phosphate
  modified_base 20: mod_base = OTHER; note = 2'-O-methyluridine-3'-phosphate
  modified_base 21: mod_base = OTHER; note = 2'-O-methyluridine-3'-phosphate ((2S,4R)-1-[29-[[2-(acetylamino)-2-deoxy-beta-D-galactopyra nosyl]oxy]-14,14-bis[[3-[[3-[[5-[[2-(acetylamino)-2-deoxy-b eta-D-galactopyranosyl]oxy]-1-oxopentyl]amino]propyl]amino] -3-oxopropoxy]methyl]-1,12,19,25-tetraoxo-16-oxa-13,20,24-t riazanonacos-1-yl]-4-hydroxy-2-pyrrolidinyl)methyl ester
ggcaaggaaaataaaagattt

SEQ ID NO: 3504 - RNA, 21 nt, synthetic construct
  source 1..21: mol_type = other RNA
  modified_base 1: mod_base = OTHER; note = 2'-O-methyluridine-3'-phosphorothioate
  modified_base 2: mod_base = OTHER; note = 2'-O-methylcytidine-3'-phosphorothioate
  modified_base 3: mod_base = OTHER; note = 2'-O-methyladenosine-3'-phosphate
  modified_base 4: mod_base = OTHER; note = 2'-O-methyluridine-3'-phosphate
  modified_base 5: mod_base = OTHER; note = 2'-O-methylcytidine-3'-phosphate
  modified_base 6: mod_base = OTHER; note = 2'-O-docosanyl-guanosine-3'-phosphate
  modified_base 7: mod_base = OTHER; note = 2'-deoxy-2'-fluorouridine-3'-phosphate
  modified_base 8: mod_base = OTHER; note = 2'-O-methylguanosine-3'-phosphate
  modified_base 9: mod_base = OTHER; note = 2'-deoxy-2'-fluoroadenosine-3'-phosphate
  modified_base 10: mod_base = OTHER; note = 2'-deoxy-2'-fluorouridine-3'-phosphate
  modified_base 11: mod_base = OTHER; note = 2'-deoxy-2'-fluoroguanosine-3'-phosphate
  modified_base 12: mod_base = OTHER; note = 2'-O-methylcytidine-3'-phosphate
  modified_base 13: mod_base = OTHER; note = 2'-O-methyluridine-3'-phosphate
  modified_base 14: mod_base = OTHER; note = 2'-O-methyluridine-3'-phosphate
  modified_base 15: mod_base = OTHER; note = 2'-O-methylcytidine-3'-phosphate
  modified_base 16: mod_base = OTHER; note = 2'-O-methyluridine-3'-phosphate
  modified_base 17: mod_base = OTHER; note = 2'-O-methylcytidine-3'-phosphate
  modified_base 18: mod_base = OTHER; note = 2'-O-methyluridine-3'-phosphate
  modified_base 19: mod_base = OTHER; note = 2'-O-methylguanosine-3'-phosphate
  modified_base 20: mod_base = OTHER; note = 2'-O-methyladenosine-3'-phosphate
  modified_base 21: mod_base = OTHER; note = 2'-O-methyluridine-3'-phosphate ((2S,4R)-1-[29-[[2-(acetylamino)-2-deoxy-beta-D-galactopyra nosyl]oxy]-14,14-bis[[3-[[3-[[5-[[2-(acetylamino)-2-deoxy-b eta-D-galactopyranosyl]oxy]-1-oxopentyl]amino]propyl]amino] -3-oxopropoxy]methyl]-1,12,19,25-tetraoxo-16-oxa-13,20,24-t riazanonacos-1-yl]-4-hydroxy-2-pyrrolidinyl)methyl ester
tcatcgtgatgcttctctgat

SEQ ID NO: 3505 - RNA, 21 nt, synthetic construct
  source 1..21: mol_type = other RNA
  modified_base 1: mod_base = OTHER; note = 2'-O-methyladenosine-3'-phosphorothioate
  modified_base 2: mod_base = OTHER; note = 2'-O-methyladenosine-3'-phosphorothioate
  modified_base 3: mod_base = OTHER; note = 2'-O-methylguanosine-3'-phosphate
  modified_base 4: mod_base = OTHER; note = 2'-O-methyladenosine-3'-phosphate
  modified_base 5: mod_base = OTHER; note = 2'-O-methyluridine-3'-phosphate
  modified_base 6: mod_base = OTHER; note = 2'-O-docosanyl-guanosine-3'-phosphate
  modified_base 7: mod_base = OTHER; note = 2'-deoxy-2'-fluoroadenosine-3'-phosphate
  modified_base 8: mod_base = OTHER; note = 2'-O-methyladenosine-3'-phosphate
  modified_base 9: mod_base = OTHER; note = 2'-deoxy-2'-fluoroguanosine-3'-phosphate
  modified_base 10: mod_base = OTHER; note = 2'-deoxy-2'-fluoroadenosine-3'-phosphate
  modified_base 11: mod_base = OTHER; note = 2'-deoxy-2'-fluoroguanosine-3'-phosphate
  modified_base 12: mod_base = OTHER; note = 2'-O-methyluridine-3'-phosphate
  modified_base 13: mod_base = OTHER; note = 2'-O-methyluridine-3'-phosphate
  modified_base 14: mod_base = OTHER; note = 2'-O-methyluridine-3'-phosphate
  modified_base 15: mod_base = OTHER; note = 2'-O-methyladenosine-3'-phosphate
  modified_base 16: mod_base = OTHER; note = 2'-O-methylguanosine-3'-phosphate
  modified_base 17: mod_base = OTHER; note = 2'-O-methyluridine-3'-phosphate
  modified_base 18: mod_base = OTHER; note = 2'-O-methyluridine-3'-phosphate
  modified_base 19: mod_base = OTHER; note = 2'-O-methyluridine-3'-phosphate
  modified_base 20: mod_base = OTHER; note = 2'-O-methyluridine-3'-phosphate
  modified_base 21: mod_base = OTHER; note = 2'-O-methyluridine-3'-phosphate ((2S,4R)-1-[29-[[2-(acetylamino)-2-deoxy-beta-D-galactopyra nosyl]oxy]-14,14-bis[[3-[[3-[[5-[[2-(acetylamino)-2-deoxy-b eta-D-galactopyranosyl]oxy]-1-oxopentyl]amino]propyl]amino] -3-oxopropoxy]methyl]-1,12,19,25-tetraoxo-16-oxa-13,20,24-t riazanonacos-1-yl]-4-hydroxy-2-pyrrolidinyl)methyl ester
aagatgaagagtttagttttt

SEQ ID NO: 3506 - RNA, 21 nt, synthetic construct
  source 1..21: mol_type = other RNA
  modified_base 1: mod_base = OTHER; note = 2'-O-methylcytidine-3'-phosphorothioate
  modified_base 2: mod_base = OTHER; note = 2'-O-methyladenosine-3'-phosphorothioate
  modified_base 3: mod_base = OTHER; note = 2'-O-methylcytidine-3'-phosphate
  modified_base 4: mod_base = OTHER; note = 2'-O-methyluridine-3'-phosphate
  modified_base 5: mod_base = OTHER; note = 2'-O-methylguanosine-3'-phosphate
  modified_base 6: mod_base = OTHER; note = 2'-O-docosanyl-uridine-3'-phosphate
  modified_base 7: mod_base = OTHER; note = 2'-deoxy-2'-fluoroadenosine-3'-phosphate
  modified_base 8: mod_base = OTHER; note = 2'-O-methylguanosine-3'-phosphate
  modified_base 9: mod_base = OTHER; note = 2'-deoxy-2'-fluorouridine-3'-phosphate
  modified_base 10: mod_base = OTHER; note = 2'-deoxy-2'-fluoroguanosine-3'-phosphate
  modified_base 11: mod_base = OTHER; note = 2'-deoxy-2'-fluoroadenosine-3'-phosphate
  modified_base 12: mod_base = OTHER; note = 2'-O-methyladenosine-3'-phosphate
  modified_base 13: mod_base = OTHER; note = 2'-O-methyluridine-3'-phosphate
  modified_base 14: mod_base = OTHER; note = 2'-O-methyluridine-3'-phosphate
  modified_base 15: mod_base = OTHER; note = 2'-O-methyladenosine-3'-phosphate
  modified_base 16: mod_base = OTHER; note = 2'-O-methyluridine-3'-phosphate
  modified_base 17: mod_base = OTHER; note = 2'-O-methylcytidine-3'-phosphate
  modified_base 18: mod_base = OTHER; note = 2'-O-methyluridine-3'-phosphate
  modified_base 19: mod_base = OTHER; note = 2'-O-methylguanosine-3'-phosphate
  modified_base 20: mod_base = OTHER; note = 2'-O-methyladenosine-3'-phosphate
  modified_base 21: mod_base = OTHER; note = 2'-O-methyluridine-3'-phosphate ((2S,4R)-1-[29-[[2-(acetylamino)-2-deoxy-beta-D-galactopyra nosyl]oxy]-14,14-bis[[3-[[3-[[5-[[2-(acetylamino)-2-deoxy-b eta-D-galactopyranosyl]oxy]-1-oxopentyl]amino]propyl]amino] -3-oxopropoxy]methyl]-1,12,19,25-tetraoxo-16-oxa-13,20,24-t riazanonacos-1-yl]-4-hydroxy-2-pyrrolidinyl)methyl ester
cactgtagtgaattatctgat

SEQ ID NO: 3507 - RNA, 21 nt, synthetic construct
  source 1..21: mol_type = other RNA
  modified_base 1: mod_base = OTHER; note = 2'-O-methylcytidine-3'-phosphorothioate
  modified_base 2: mod_base = OTHER; note = 2'-O-methyluridine-3'-phosphorothioate
  modified_base 3: mod_base = OTHER; note = 2'-O-methyladenosine-3'-phosphate
  modified_base 4: mod_base = OTHER; note = 2'-O-methylcytidine-3'-phosphate
  modified_base 5: mod_base = OTHER; note = 2'-O-methyladenosine-3'-phosphate
  modified_base 6: mod_base = OTHER; note = 2'-O-docosanyl-adenosine-3'-phosphate
  modified_base 7: mod_base = OTHER; note = 2'-deoxy-2'-fluorocytidine-3'-phosphate
  modified_base 8: mod_base = OTHER; note = 2'-O-methylcytidine-3'-phosphate
  modified_base 9: mod_base = OTHER; note = 2'-deoxy-2'-fluorouridine-3'-phosphate
  modified_base 10: mod_base = OTHER; note = 2'-deoxy-2'-fluorocytidine-3'-phosphate
  modified_base 11: mod_base = OTHER; note = 2'-deoxy-2'-fluorouridine-3'-phosphate
  modified_base 12: mod_base = OTHER; note = 2'-O-methyladenosine-3'-phosphate
  modified_base 13: mod_base = OTHER; note = 2'-O-methylguanosine-3'-phosphate
  modified_base 14: mod_base = OTHER; note = 2'-O-methyladenosine-3'-phosphate
  modified_base 15: mod_base = OTHER; note = 2'-O-methyluridine-3'-phosphate
  modified_base 16: mod_base = OTHER; note = 2'-O-methylcytidine-3'-phosphate
  modified_base 17: mod_base = OTHER; note = 2'-O-methyluridine-3'-phosphate
  modified_base 18: mod_base = OTHER; note = 2'-O-methylguanosine-3'-phosphate
  modified_base 19: mod_base = OTHER; note = 2'-O-methylcytidine-3'-phosphate
  modified_base 20: mod_base = OTHER; note = 2'-O-methyladenosine-3'-phosphate
  modified_base 21: mod_base = OTHER; note = 2'-O-methyluridine-3'-phosphate ((2S,4R)-1-[29-[[2-(acetylamino)-2-deoxy-beta-D-galactopyra nosyl]oxy]-14,14-bis[[3-[[3-[[5-[[2-(acetylamino)-2-deoxy-b eta-D-galactopyranosyl]oxy]-1-oxopentyl]amino]propyl]amino] -3-oxopropoxy]methyl]-1,12,19,25-tetraoxo-16-oxa-13,20,24-t riazanonacos-1-yl]-4-hydroxy-2-pyrrolidinyl)methyl ester
ctacaacctctagatctgcat

SEQ ID NO: 3508 - RNA, 21 nt, synthetic construct
  source 1..21: mol_type = other RNA
  modified_base 1: mod_base = OTHER; note = 2'-O-methyladenosine-3'-phosphorothioate
  modified_base 2: mod_base = OTHER; note = 2'-O-methyluridine-3'-phosphorothioate
  modified_base 3: mod_base = OTHER; note = 2'-O-methylguanosine-3'-phosphate
  modified_base 4: mod_base = OTHER; note = 2'-O-methyladenosine-3'-phosphate
  modified_base 5: mod_base = OTHER; note = 2'-O-methylguanosine-3'-phosphate
  modified_base 6: mod_base = OTHER; note = 2'-O-docosanyl-adenosine-3'-phosphate
  modified_base 7: mod_base = OTHER; note = 2'-deoxy-2'-fluoroadenosine-3'-phosphate
  modified_base 8: mod_base = OTHER; note = 2'-O-methyluridine-3'-phosphate
  modified_base 9: mod_base = OTHER; note = 2'-deoxy-2'-fluorocytidine-3'-phosphate
  modified_base 10: mod_base = OTHER; note = 2'-deoxy-2'-fluoroadenosine-3'-phosphate
  modified_base 11: mod_base = OTHER; note = 2'-deoxy-2'-fluoroadenosine-3'-phosphate
  modified_base 12: mod_base = OTHER; note = 2'-O-methylguanosine-3'-phosphate
  modified_base 13: mod_base = OTHER; note = 2'-O-methyluridine-3'-phosphate
  modified_base 14: mod_base = OTHER; note = 2'-O-methyladenosine-3'-phosphate
  modified_base 15: mod_base = OTHER; note = 2'-O-methyluridine-3'-phosphate
  modified_base 16: mod_base = OTHER; note = 2'-O-methylguanosine-3'-phosphate
  modified_base 17: mod_base = OTHER; note = 2'-O-methylguanosine-3'-phosphate
  modified_base 18: mod_base = OTHER; note = 2'-O-methyladenosine-3'-phosphate
  modified_base 19: mod_base = OTHER; note = 2'-O-methyladenosine-3'-phosphate
  modified_base 20: mod_base = OTHER; note = 2'-O-methyladenosine-3'-phosphate
  modified_base 21: mod_base = OTHER; note = 2'-O-methyluridine-3'-phosphate ((2S,4R)-1-[29-[[2-(acetylamino)-2-deoxy-beta-D-galactopyra nosyl]oxy]-14,14-bis[[3-[[3-[[5-[[2-(acetylamino)-2-deoxy-b eta-D-galactopyranosyl]oxy]-1-oxopentyl]amino]propyl]amino] -3-oxopropoxy]methyl]-1,12,19,25-tetraoxo-16-oxa-13,20,24-t riazanonacos-1-yl]-4-hydroxy-2-pyrrolidinyl)methyl ester
atgagaatcaagtatggaaat

SEQ ID NO: 3509 - RNA, 21 nt, synthetic construct
  source 1..21: mol_type = other RNA
  modified_base 1: mod_base = OTHER; note = 2'-O-methyluridine-3'-phosphorothioate
  modified_base 2: mod_base = OTHER; note = 2'-O-methyluridine-3'-phosphorothioate
  modified_base 3: mod_base = OTHER; note = 2'-O-methylguanosine-3'-phosphate
  modified_base 4: mod_base = OTHER; note = 2'-O-methyluridine-3'-phosphate
  modified_base 5: mod_base = OTHER; note = 2'-O-methyluridine-3'-phosphate
  modified_base 6: mod_base = OTHER; note = 2'-O-docosanyl-cytidine-3'-phosphate
  modified_base 7: mod_base = OTHER; note = 2'-deoxy-2'-fluoroadenosine-3'-phosphate
  modified_base 8: mod_base = OTHER; note = 2'-O-methyladenosine-3'-phosphate
  modified_base 9: mod_base = OTHER; note = 2'-deoxy-2'-fluoroguanosine-3'-phosphate
  modified_base 10: mod_base = OTHER; note = 2'-deoxy-2'-fluoroguanosine-3'-phosphate
  modified_base 11: mod_base = OTHER; note = 2'-deoxy-2'-fluoroguanosine-3'-phosphate
  modified_base 12: mod_base = OTHER; note = 2'-O-methyluridine-3'-phosphate
  modified_base 13: mod_base = OTHER; note = 2'-O-methylcytidine-3'-phosphate
  modified_base 14: mod_base = OTHER; note = 2'-O-methyladenosine-3'-phosphate
  modified_base 15: mod_base = OTHER; note = 2'-O-methyladenosine-3'-phosphate
  modified_base 16: mod_base = OTHER; note = 2'-O-methylcytidine-3'-phosphate
  modified_base 17: mod_base = OTHER; note = 2'-O-methyluridine-3'-phosphate
  modified_base 18: mod_base = OTHER; note = 2'-O-methylguanosine-3'-phosphate
  modified_base 19: mod_base = OTHER; note = 2'-O-methyluridine-3'-phosphate
  modified_base 20: mod_base = OTHER; note = 2'-O-methyladenosine-3'-phosphate
  modified_base 21: mod_base = OTHER; note = 2'-O-methyluridine-3'-phosphate ((2S,4R)-1-[29-[[2-(acetylamino)-2-deoxy-beta-D-galactopyra nosyl]oxy]-14,14-bis[[3-[[3-[[5-[[2-(acetylamino)-2-deoxy-b eta-D-galactopyranosyl]oxy]-1-oxopentyl]amino]propyl]amino] -3-oxopropoxy]methyl]-1,12,19,25-tetraoxo-16-oxa-13,20,24-t riazanonacos-1-yl]-4-hydroxy-2-pyrrolidinyl)methyl ester
ttgttcaagggtcaactgtat

SEQ ID NO: 3510 - RNA, 21 nt, synthetic construct
  source 1..21: mol_type = other RNA
  modified_base 1: mod_base = OTHER; note = 2'-O-methylguanosine-3'-phosphorothioate
  modified_base 2: mod_base = OTHER; note = 2'-O-methyladenosine-3'-phosphorothioate
  modified_base 3: mod_base = OTHER; note = 2'-O-methyladenosine-3'-phosphate
  modified_base 4: mod_base = OTHER; note = 2'-O-methylcytidine-3'-phosphate
  modified_base 5: mod_base = OTHER; note = 2'-O-methylcytidine-3'-phosphate
  modified_base 6: mod_base = OTHER; note = 2'-O-docosanyl-cytidine-3'-phosphate
  modified_base 7: mod_base = OTHER; note = 2'-deoxy-2'-fluoroadenosine-3'-phosphate
  modified_base 8: mod_base = OTHER; note = 2'-O-methyluridine-3'-phosphate
  modified_base 9: mod_base = OTHER; note = 2'-deoxy-2'-fluoroguanosine-3'-phosphate
  modified_base 10: mod_base = OTHER; note = 2'-deoxy-2'-fluoroadenosine-3'-phosphate
  modified_base 11: mod_base = OTHER; note = 2'-deoxy-2'-fluoroguanosine-3'-phosphate
  modified_base 12: mod_base = OTHER; note = 2'-O-methyladenosine-3'-phosphate
  modified_base 13: mod_base = OTHER; note = 2'-O-methylguanosine-3'-phosphate
  modified_base 14: mod_base = OTHER; note = 2'-O-methyladenosine-3'-phosphate
  modified_base 15: mod_base = OTHER; note = 2'-O-methyluridine-3'-phosphate
  modified_base 16: mod_base = OTHER; note = 2'-O-methyladenosine-3'-phosphate
  modified_base 17: mod_base = OTHER; note = 2'-O-methylcytidine-3'-phosphate
  modified_base 18: mod_base = OTHER; note = 2'-O-methyluridine-3'-phosphate
  modified_base 19: mod_base = OTHER; note = 2'-O-methyladenosine-3'-phosphate
  modified_base 20: mod_base = OTHER; note = 2'-O-methylguanosine-3'-phosphate
  modified_base 21: mod_base = OTHER; note = 2'-O-methyluridine-3'-phosphate ((2S,4R)-1-[29-[[2-(acetylamino)-2-deoxy-beta-D-galactopyra nosyl]oxy]-14,14-bis[[3-[[3-[[5-[[2-(acetylamino)-2-deoxy-b eta-D-galactopyranosyl]oxy]-1-oxopentyl]amino]propyl]amino] -3-oxopropoxy]methyl]-1,12,19,25-tetraoxo-16-oxa-13,20,24-t riazanonacos-1-yl]-4-hydroxy-2-pyrrolidinyl)methyl ester
gaacccatgagagatactagt

SEQ ID NO: 3511 - RNA, 21 nt, synthetic construct
  source 1..21: mol_type = other RNA
  modified_base 1: mod_base = OTHER; note = 2'-O-methyladenosine-3'-phosphorothioate
  modified_base 2: mod_base = OTHER; note = 2'-O-methyluridine-3'-phosphorothioate
  modified_base 3: mod_base = OTHER; note = 2'-O-methylguanosine-3'-phosphate
  modified_base 4: mod_base = OTHER; note = 2'-O-methyluridine-3'-phosphate
  modified_base 5: mod_base = OTHER; note = 2'-O-methylguanosine-3'-phosphate
  modified_base 6: mod_base = OTHER; note = 2'-O-docosanyl-adenosine-3'-phosphate
  modified_base 7: mod_base = OTHER; note = 2'-deoxy-2'-fluorocytidine-3'-phosphate
  modified_base 8: mod_base = OTHER; note = 2'-O-methyladenosine-3'-phosphate
  modified_base 9: mod_base = OTHER; note = 2'-deoxy-2'-fluoroguanosine-3'-phosphate
  modified_base 10: mod_base = OTHER; note = 2'-deoxy-2'-fluorouridine-3'-phosphate
  modified_base 11: mod_base = OTHER; note = 2'-deoxy-2'-fluoroguanosine-3'-phosphate
  modified_base 12: mod_base = OTHER; note = 2'-O-methyladenosine-3'-phosphate
  modified_base 13: mod_base = OTHER; note = 2'-O-methylguanosine-3'-phosphate
  modified_base 14: mod_base = OTHER; note = 2'-O-methyladenosine-3'-phosphate
  modified_base 15: mod_base = OTHER; note = 2'-O-methyluridine-3'-phosphate
  modified_base 16: mod_base = OTHER; note = 2'-O-methyluridine-3'-phosphate
  modified_base 17: mod_base = OTHER; note = 2'-O-methyladenosine-3'-phosphate
  modified_base 18: mod_base = OTHER; note = 2'-O-methylguanosine-3'-phosphate
  modified_base 19: mod_base = OTHER; note = 2'-O-methyluridine-3'-phosphate
  modified_base 20: mod_base = OTHER; note = 2'-O-methylcytidine-3'-phosphate
  modified_base 21: mod_base = OTHER; note = 2'-O-methyluridine-3'-phosphate ((2S,4R)-1-[29-[[2-(acetylamino)-2-deoxy-beta-D-galactopyra nosyl]oxy]-14,14-bis[[3-[[3-[[5-[[2-(acetylamino)-2-deoxy-b eta-D-galactopyranosyl]oxy]-1-oxopentyl]amino]propyl]amino] -3-oxopropoxy]methyl]-1,12,19,25-tetraoxo-16-oxa-13,20,24-t riazanonacos-1-yl]-4-hydroxy-2-pyrrolidinyl)methyl ester
atgtgacagtgagattagtct

SEQ ID NO: 3512 - RNA, 21 nt, synthetic construct
  source 1..21: mol_type = other RNA
  modified_base 1: mod_base = OTHER; note = 2'-O-methylcytidine-3'-phosphorothioate
  modified_base 2: mod_base = OTHER; note = 2'-O-methyluridine-3'-phosphorothioate
  modified_base 3: mod_base = OTHER; note = 2'-O-methyladenosine-3'-phosphate
  modified_base 4: mod_base = OTHER; note = 2'-O-methyluridine-3'-phosphate
  modified_base 5: mod_base = OTHER; note = 2'-O-methyluridine-3'-phosphate
  modified_base 6: mod_base = OTHER; note = 2'-O-docosanyl-cytidine-3'-phosphate
  modified_base 7: mod_base = OTHER; note = 2'-deoxy-2'-fluoroadenosine-3'-phosphate
  modified_base 8: mod_base = OTHER; note = 2'-O-methyluridine-3'-phosphate
  modified_base 9: mod_base = OTHER; note = 2'-deoxy-2'-fluorouridine-3'-phosphate
  modified_base 10: mod_base = OTHER; note = 2'-deoxy-2'-fluoroadenosine-3'-phosphate
  modified_base 11: mod_base = OTHER; note = 2'-deoxy-2'-fluoroadenosine-3'-phosphate
  modified_base 12: mod_base = OTHER; note = 2'-O-methyladenosine-3'-phosphate
  modified_base 13: mod_base = OTHER; note = 2'-O-methyluridine-3'-phosphate
  modified_base 14: mod_base = OTHER; note = 2'-O-methylguanosine-3'-phosphate
  modified_base 15: mod_base = OTHER; note = 2'-O-methylguanosine-3'-phosphate
  modified_base 16: mod_base = OTHER; note = 2'-O-methyladenosine-3'-phosphate
  modified_base 17: mod_base = OTHER; note = 2'-O-methyladenosine-3'-phosphate
  modified_base 18: mod_base = OTHER; note = 2'-O-methylguanosine-3'-phosphate
  modified_base 19: mod_base = OTHER; note = 2'-O-methyluridine-3'-phosphate
  modified_base 20: mod_base = OTHER; note = 2'-O-methylguanosine-3'-phosphate
  modified_base 21: mod_base = OTHER; note = 2'-O-methyluridine-3'-phosphate ((2S,4R)-1-[29-[[2-(acetylamino)-2-deoxy-beta-D-galactopyra nosyl]oxy]-14,14-bis[[3-[[3-[[5-[[2-(acetylamino)-2-deoxy-b eta-D-galactopyranosyl]oxy]-1-oxopentyl]amino]propyl]amino] -3-oxopropoxy]methyl]-1,12,19,25-tetraoxo-16-oxa-13,20,24-t riazanonacos-1-yl]-4-hydroxy-2-pyrrolidinyl)methyl ester
ctattcattaaatggaagtgt

SEQ ID NO: 3513 - RNA, 21 nt, synthetic construct
  source 1..21: mol_type = other RNA
  modified_base 1: mod_base = OTHER; note = 2'-O-methyluridine-3'-phosphorothioate
  modified_base 2: mod_base = OTHER; note = 2'-O-methylcytidine-3'-phosphorothioate
  modified_base 3: mod_base = OTHER; note = 2'-O-methyluridine-3'-phosphate
  modified_base 4: mod_base = OTHER; note = 2'-O-methyluridine-3'-phosphate
  modified_base 5: mod_base = OTHER; note = 2'-O-methyluridine-3'-phosphate
  modified_base 6: mod_base = OTHER; note = 2'-O-docosanyl-uridine-3'-phosphate
  modified_base 7: mod_base = OTHER; note = 2'-deoxy-2'-fluoroadenosine-3'-phosphate
  modified_base 8: mod_base = OTHER; note = 2'-O-methyladenosine-3'-phosphate
  modified_base 9: mod_base = OTHER; note = 2'-deoxy-2'-fluoroadenosine-3'-phosphate
  modified_base 10: mod_base = OTHER; note = 2'-deoxy-2'-fluoroguanosine-3'-phosphate
  modified_base 11: mod_base = OTHER; note = 2'-deoxy-2'-fluorouridine-3'-phosphate
  modified_base 12: mod_base = OTHER; note = 2'-O-methyluridine-3'-phosphate
  modified_base 13: mod_base = OTHER; note = 2'-O-methylguanosine-3'-phosphate
  modified_base 14: mod_base = OTHER; note = 2'-O-methyladenosine-3'-phosphate
  modified_base 15: mod_base = OTHER; note = 2'-O-methyluridine-3'-phosphate
  modified_base 16: mod_base = OTHER; note = 2'-O-methylguanosine-3'-phosphate
  modified_base 17: mod_base = OTHER; note = 2'-O-methyladenosine-3'-phosphate
  modified_base 18: mod_base = OTHER; note = 2'-O-methylguanosine-3'-phosphate
  modified_base 19: mod_base = OTHER; note = 2'-O-methyladenosine-3'-phosphate
  modified_base 20: mod_base = OTHER; note = 2'-O-methyladenosine-3'-phosphate
  modified_base 21: mod_base = OTHER; note = 2'-O-methyluridine-3'-phosphate ((2S,4R)-1-[29-[[2-(acetylamino)-2-deoxy-beta-D-galactopyra nosyl]oxy]-14,14-bis[[3-[[3-[[5-[[2-(acetylamino)-2-deoxy-b eta-D-galactopyranosyl]oxy]-1-oxopentyl]amino]propyl]amino] -3-oxopropoxy]methyl]-1,12,19,25-tetraoxo-16-oxa-13,20,24-t riazanonacos-1-yl]-4-hydroxy-2-pyrrolidinyl)methyl ester
tcttttaaagttgatgagaat

SEQ ID NO: 3514 - RNA, 21 nt, synthetic construct
  source 1..21: mol_type = other RNA
  modified_base 1: mod_base = OTHER; note = 2'-O-methylguanosine-3'-phosphorothioate
  modified_base 2: mod_base = OTHER; note = 2'-O-methylguanosine-3'-phosphorothioate
  modified_base 3: mod_base = OTHER; note = 2'-O-methyluridine-3'-phosphate
  modified_base 4: mod_base = OTHER; note = 2'-O-methylguanosine-3'-phosphate
  modified_base 5: mod_base = OTHER; note = 2'-O-methyladenosine-3'-phosphate
  modified_base 6: mod_base = OTHER; note = 2'-O-docosanyl-cytidine-3'-phosphate
  modified_base 7: mod_base = OTHER; note = 2'-deoxy-2'-fluoroadenosine-3'-phosphate
  modified_base 8: mod_base = OTHER; note = 2'-O-methylguanosine-3'-phosphate
  modified_base 9: mod_base = OTHER; note = 2'-deoxy-2'-fluoroadenosine-3'-phosphate
  modified_base 10: mod_base = OTHER; note = 2'-deoxy-2'-fluoroguanosine-3'-phosphate
  modified_base 11: mod_base = OTHER; note = 2'-deoxy-2'-fluorouridine-3'-phosphate
  modified_base 12: mod_base = OTHER; note = 2'-O-methylcytidine-3'-phosphate
  modified_base 13: mod_base = OTHER; note = 2'-O-methyladenosine-3'-phosphate
  modified_base 14: mod_base = OTHER; note = 2'-O-methylguanosine-3'-phosphate
  modified_base 15: mod_base = OTHER; note = 2'-O-methyladenosine-3'-phosphate
  modified_base 16: mod_base = OTHER; note = 2'-O-methyladenosine-3'-phosphate
  modified_base 17: mod_base = OTHER; note = 2'-O-methyladenosine-3'-phosphate
  modified_base 18: mod_base = OTHER; note = 2'-O-methyladenosine-3'-phosphate
  modified_base 19: mod_base = OTHER; note = 2'-O-methylcytidine-3'-phosphate
  modified_base 20: mod_base = OTHER; note = 2'-O-methyluridine-3'-phosphate
  modified_base 21: mod_base = OTHER; note = 2'-O-methyluridine-3'-phosphate ((2S,4R)-1-[29-[[2-(acetylamino)-2-deoxy-beta-D-galactopyra nosyl]oxy]-14,14-bis[[3-[[3-[[5-[[2-(acetylamino)-2-deoxy-b eta-D-galactopyranosyl]oxy]-1-oxopentyl]amino]propyl]amino] -3-oxopropoxy]methyl]-1,12,19,25-tetraoxo-16-oxa-13,20,24-t riazanonacos-1-yl]-4-hydroxy-2-pyrrolidinyl)methyl ester
ggtgacagagtcagaaaactt

SEQ ID NO: 3515 - RNA, 21 nt, synthetic construct
  source 1..21: mol_type = other RNA
  modified_base 1: mod_base = OTHER; note = 2'-O-methyladenosine-3'-phosphorothioate
  modified_base 2: mod_base = OTHER; note = 2'-O-methyladenosine-3'-phosphorothioate
  modified_base 3: mod_base = OTHER; note = 2'-O-methyladenosine-3'-phosphate
  modified_base 4: mod_base = OTHER; note = 2'-O-methylcytidine-3'-phosphate
  modified_base 5: mod_base = OTHER; note = 2'-O-methyladenosine-3'-phosphate
  modified_base 6: mod_base = OTHER; note = 2'-O-docosanyl-adenosine-3'-phosphate
  modified_base 7: mod_base = OTHER; note = 2'-deoxy-2'-fluorocytidine-3'-phosphate
  modified_base 8: mod_base = OTHER; note = 2'-O-methyladenosine-3'-phosphate
  modified_base 9: mod_base = OTHER; note = 2'-deoxy-2'-fluoroguanosine-3'-phosphate
  modified_base 10: mod_base = OTHER; note = 2'-deoxy-2'-fluoroguanosine-3'-phosphate
  modified_base 11: mod_base = OTHER; note = 2'-deoxy-2'-fluorouridine-3'-phosphate
  modified_base 12: mod_base = OTHER; note = 2'-O-methylguanosine-3'-phosphate
  modified_base 13: mod_base = OTHER; note = 2'-O-methyladenosine-3'-phosphate
  modified_base 14: mod_base = OTHER; note = 2'-O-methyluridine-3'-phosphate
  modified_base 15: mod_base = OTHER; note = 2'-O-methyladenosine-3'-phosphate
  modified_base 16: mod_base = OTHER; note = 2'-O-methylcytidine-3'-phosphate
  modified_base 17: mod_base = OTHER; note = 2'-O-methyladenosine-3'-phosphate
  modified_base 18: mod_base = OTHER; note = 2'-O-methylcytidine-3'-phosphate
  modified_base 19: mod_base = OTHER; note = 2'-O-methyluridine-3'-phosphate
  modified_base 20: mod_base = OTHER; note = 2'-O-methylcytidine-3'-phosphate
  modified_base 21: mod_base = OTHER; note = 2'-O-methyluridine-3'-phosphate ((2S,4R)-1-[29-[[2-(acetylamino)-2-deoxy-beta-D-galactopyra nosyl]oxy]-14,14-bis[[3-[[3-[[5-[[2-(acetylamino)-2-deoxy-b eta-D-galactopyranosyl]oxy]-1-oxopentyl]amino]propyl]amino] -3-oxopropoxy]methyl]-1,12,19,25-tetraoxo-16-oxa-13,20,24-t riazanonacos-1-yl]-4-hydroxy-2-pyrrolidinyl)methyl ester
aaacaacaggtgatacactct

SEQ ID NO: 3516 - RNA, 21 nt, synthetic construct
  source 1..21: mol_type = other RNA
  modified_base 1: mod_base = OTHER; note = 2'-O-methylcytidine-3'-phosphorothioate
  modified_base 2: mod_base = OTHER; note = 2'-O-methylcytidine-3'-phosphorothioate
  modified_base 3: mod_base = OTHER; note = 2'-O-methyladenosine-3'-phosphate
  modified_base 4: mod_base = OTHER; note = 2'-O-methylcytidine-3'-phosphate
  modified_base 5: mod_base = OTHER; note = 2'-O-methyluridine-3'-phosphate
  modified_base 6: mod_base = OTHER; note = 2'-O-docosanyl-uridine-3'-phosphate
  modified_base 7: mod_base = OTHER; note = 2'-deoxy-2'-fluorocytidine-3'-phosphate
  modified_base 8: mod_base = OTHER; note = 2'-O-methylcytidine-3'-phosphate
  modified_base 9: mod_base = OTHER; note = 2'-deoxy-2'-fluorouridine-3'-phosphate
  modified_base 10: mod_base = OTHER; note = 2'-deoxy-2'-fluoroguanosine-3'-phosphate
  modified_base 11: mod_base = OTHER; note = 2'-deoxy-2'-fluoroadenosine-3'-phosphate
  modified_base 12: mod_base = OTHER; note = 2'-O-methylguanosine-3'-phosphate
  modified_base 13: mod_base = OTHER; note = 2'-O-methyluridine-3'-phosphate
  modified_base 14: mod_base = OTHER; note = 2'-O-methyladenosine-3'-phosphate
  modified_base 15: mod_base = OTHER; note = 2'-O-methylguanosine-3'-phosphate
  modified_base 16: mod_base = OTHER; note = 2'-O-methyladenosine-3'-phosphate
  modified_base 17: mod_base = OTHER; note = 2'-O-methyladenosine-3'-phosphate
  modified_base 18: mod_base = OTHER; note = 2'-O-methylguanosine-3'-phosphate
  modified_base 19: mod_base = OTHER; note = 2'-O-methyladenosine-3'-phosphate
  modified_base 20: mod_base = OTHER; note = 2'-O-methylguanosine-3'-phosphate
  modified_base 21: mod_base = OTHER; note = 2'-O-methyluridine-3'-phosphate ((2S,4R)-1-[29-[[2-(acetylamino)-2-deoxy-beta-D-galactopyra nosyl]oxy]-14,14-bis[[3-[[3-[[5-[[2-(acetylamino)-2-deoxy-b eta-D-galactopyranosyl]oxy]-1-oxopentyl]amino]propyl]amino] -3-oxopropoxy]methyl]-1,12,19,25-tetraoxo-16-oxa-13,20,24-t riazanonacos-1-yl]-4-hydroxy-2-pyrrolidinyl)methyl ester
ccacttcctgagtagaagagt

SEQ ID NO: 3517 - RNA, 21 nt, synthetic construct
  source 1..21: mol_type = other RNA
  modified_base 1: mod_base = OTHER; note = 2'-O-methyladenosine-3'-phosphorothioate
  modified_base 2: mod_base = OTHER; note = 2'-O-methyladenosine-3'-phosphorothioate
  modified_base 3: mod_base = OTHER; note = 2'-O-methyladenosine-3'-phosphate
  modified_base 4: mod_base = OTHER; note = 2'-O-methyluridine-3'-phosphate
  modified_base 5: mod_base = OTHER; note = 2'-O-methylcytidine-3'-phosphate
  modified_base 6: mod_base = OTHER; note = 2'-O-docosanyl-uridine-3'-phosphate
  modified_base 7: mod_base = OTHER; note = 2'-deoxy-2'-fluorouridine-3'-phosphate
  modified_base 8: mod_base = OTHER; note = 2'-O-methyladenosine-3'-phosphate
  modified_base 9: mod_base = OTHER; note = 2'-deoxy-2'-fluorouridine-3'-phosphate
  modified_base 10: mod_base = OTHER; note = 2'-deoxy-2'-fluorouridine-3'-phosphate
  modified_base 11: mod_base = OTHER; note = 2'-deoxy-2'-fluorocytidine-3'-phosphate
  modified_base 12: mod_base = OTHER; note = 2'-O-methyluridine-3'-phosphate
  modified_base 13: mod_base = OTHER; note = 2'-O-methylguanosine-3'-phosphate
  modified_base 14: mod_base = OTHER; note = 2'-O-methyluridine-3'-phosphate
  modified_base 15: mod_base = OTHER; note = 2'-O-methylguanosine-3'-phosphate
  modified_base 16: mod_base = OTHER; note = 2'-O-methyladenosine-3'-phosphate
  modified_base 17: mod_base = OTHER; note = 2'-O-methylguanosine-3'-phosphate
  modified_base 18: mod_base = OTHER; note = 2'-O-methylguanosine-3'-phosphate
  modified_base 19: mod_base = OTHER; note = 2'-O-methyladenosine-3'-phosphate
  modified_base 20: mod_base = OTHER; note = 2'-O-methyluridine-3'-phosphate
  modified_base 21: mod_base = OTHER; note = 2'-O-methyluridine-3'-phosphate ((2S,4R)-1-[29-[[2-(acetylamino)-2-deoxy-beta-D-galactopyra nosyl]oxy]-14,14-bis[[3-[[3-[[5-[[2-(acetylamino)-2-deoxy-b eta-D-galactopyranosyl]oxy]-1-oxopentyl]amino]propyl]amino] -3-oxopropoxy]methyl]-1,12,19,25-tetraoxo-16-oxa-13,20,24-t riazanonacos-1-yl]-4-hydroxy-2-pyrrolidinyl)methyl ester
aaatcttattctgtgaggatt

SEQ ID NO: 3518 - RNA, 21 nt, synthetic construct
  source 1..21: mol_type = other RNA
  modified_base 1: mod_base = OTHER; note = 2'-O-methyladenosine-3'-phosphorothioate
  modified_base 2: mod_base = OTHER; note = 2'-O-methylguanosine-3'-phosphorothioate
  modified_base 3: mod_base = OTHER; note = 2'-O-methyluridine-3'-phosphate
  modified_base 4: mod_base = OTHER; note = 2'-O-methylguanosine-3'-phosphate
  modified_base 5: mod_base = OTHER; note = 2'-O-methylguanosine-3'-phosphate
  modified_base 6: mod_base = OTHER; note = 2'-O-docosanyl-adenosine-3'-phosphate
  modified_base 7: mod_base = OTHER; note = 2'-deoxy-2'-fluoroadenosine-3'-phosphate
  modified_base 8: mod_base = OTHER; note = 2'-O-methyladenosine-3'-phosphate
  modified_base 9: mod_base = OTHER; note = 2'-deoxy-2'-fluoroguanosine-3'-phosphate
  modified_base 10: mod_base = OTHER; note = 2'-deoxy-2'-fluorouridine-3'-phosphate
  modified_base 11: mod_base = OTHER; note = 2'-deoxy-2'-fluoroguanosine-3'-phosphate
  modified_base 12: mod_base = OTHER; note = 2'-O-methyluridine-3'-phosphate
  modified_base 13: mod_base = OTHER; note = 2'-O-methyluridine-3'-phosphate
  modified_base 14: mod_base = OTHER; note = 2'-O-methyluridine-3'-phosphate
  modified_base 15: mod_base = OTHER; note = 2'-O-methylguanosine-3'-phosphate
  modified_base 16: mod_base = OTHER; note = 2'-O-methylguanosine-3'-phosphate
  modified_base 17: mod_base = OTHER; note = 2'-O-methyluridine-3'-phosphate
  modified_base 18: mod_base = OTHER; note = 2'-O-methyluridine-3'-phosphate
  modified_base 19: mod_base = OTHER; note = 2'-O-methylcytidine-3'-phosphate
  modified_base 20: mod_base = OTHER; note = 2'-O-methyladenosine-3'-phosphate
  modified_base 21: mod_base = OTHER; note = 2'-O-methyluridine-3'-phosphate ((2S,4R)-1-[29-[[2-(acetylamino)-2-deoxy-beta-D-galactopyra nosyl]oxy]-14,14-bis[[3-[[3-[[5-[[2-(acetylamino)-2-deoxy-b eta-D-galactopyranosyl]oxy]-1-oxopentyl]amino]propyl]amino] -3-oxopropoxy]methyl]-1,12,19,25-tetraoxo-16-oxa-13,20,24-t riazanonacos-1-yl]-4-hydroxy-2-pyrrolidinyl)methyl ester
agtggaaagtgtttggttcat

SEQ ID NO: 3519 - RNA, 21 nt, synthetic construct
  source 1..21: mol_type = other RNA
  modified_base 1: mod_base = OTHER; note = 2'-O-methyluridine-3'-phosphorothioate
  modified_base 2: mod_base = OTHER; note = 2'-O-methyluridine-3'-phosphorothioate
  modified_base 3: mod_base = OTHER; note = 2'-O-methylguanosine-3'-phosphate
  modified_base 4: mod_base = OTHER; note = 2'-O-methyluridine-3'-phosphate
  modified_base 5: mod_base = OTHER; note = 2'-O-methyladenosine-3'-phosphate
  modified_base 6: mod_base = OTHER; note = 2'-O-docosanyl-uridine-3'-phosphate
  modified_base 7: mod_base = OTHER; note = 2'-deoxy-2'-fluorouridine-3'-phosphate
  modified_base 8: mod_base = OTHER; note = 2'-O-methyluridine-3'-phosphate
  modified_base 9: mod_base = OTHER; note = 2'-deoxy-2'-fluorouridine-3'-phosphate
  modified_base 10: mod_base = OTHER; note = 2'-deoxy-2'-fluorouridine-3'-phosphate
  modified_base 11: mod_base = OTHER; note = 2'-deoxy-2'-fluorouridine-3'-phosphate
  modified_base 12: mod_base = OTHER; note = 2'-O-methylcytidine-3'-phosphate
  modified_base 13: mod_base = OTHER; note = 2'-O-methyluridine-3'-phosphate
  modified_base 14: mod_base = OTHER; note = 2'-O-methyladenosine-3'-phosphate
  modified_base 15: mod_base = OTHER; note = 2'-O-methyluridine-3'-phosphate
  modified_base 16: mod_base = OTHER; note = 2'-O-methylguanosine-3'-phosphate
  modified_base 17: mod_base = OTHER; note = 2'-O-methylcytidine-3'-phosphate
  modified_base 18: mod_base = OTHER; note = 2'-O-methylcytidine-3'-phosphate
  modified_base 19: mod_base = OTHER; note = 2'-O-methyladenosine-3'-phosphate
  modified_base 20: mod_base = OTHER; note = 2'-O-methylcytidine-3'-phosphate
  modified_base 21: mod_base = OTHER; note = 2'-O-methyluridine-3'-phosphate ((2S,4R)-1-[29-[[2-(acetylamino)-2-deoxy-beta-D-galactopyra nosyl]oxy]-14,14-bis[[3-[[3-[[5-[[2-(acetylamino)-2-deoxy-b eta-D-galactopyranosyl]oxy]-1-oxopentyl]amino]propyl]amino] -3-oxopropoxy]methyl]-1,12,19,25-tetraoxo-16-oxa-13,20,24-t riazanonacos-1-yl]-4-hydroxy-2-pyrrolidinyl)methyl ester
ttgtattttttctatgccact

SEQ ID NO: 3520 - RNA, 21 nt, synthetic construct
  source 1..21: mol_type = other RNA
  modified_base 1: mod_base = OTHER; note = 2'-O-methylguanosine-3'-phosphorothioate
  modified_base 2: mod_base = OTHER; note = 2'-O-methyluridine-3'-phosphorothioate
  modified_base 3: mod_base = OTHER; note = 2'-O-methylguanosine-3'-phosphate
  modified_base 4: mod_base = OTHER; note = 2'-O-methyluridine-3'-phosphate
  modified_base 5: mod_base = OTHER; note = 2'-O-methyluridine-3'-phosphate
  modified_base 6: mod_base = OTHER; note = 2'-O-docosanyl-adenosine-3'-phosphate
  modified_base 7: mod_base = OTHER; note = 2'-deoxy-2'-fluorouridine-3'-phosphate
  modified_base 8: mod_base = OTHER; note = 2'-O-methyladenosine-3'-phosphate
  modified_base 9: mod_base = OTHER; note = 2'-deoxy-2'-fluorouridine-3'-phosphate
  modified_base 10: mod_base = OTHER; note = 2'-deoxy-2'-fluoroguanosine-3'-phosphate
  modified_base 11: mod_base = OTHER; note = 2'-deoxy-2'-fluorouridine-3'-phosphate
  modified_base 12: mod_base = OTHER; note = 2'-O-methyladenosine-3'-phosphate
  modified_base 13: mod_base = OTHER; note = 2'-O-methyluridine-3'-phosphate
  modified_base 14: mod_base = OTHER; note = 2'-O-methyluridine-3'-phosphate
  modified_base 15: mod_base = OTHER; note = 2'-O-methyladenosine-3'-phosphate
  modified_base 16: mod_base = OTHER; note = 2'-O-methyluridine-3'-phosphate
  modified_base 17: mod_base = OTHER; note = 2'-O-methyladenosine-3'-phosphate
  modified_base 18: mod_base = OTHER; note = 2'-O-methylcytidine-3'-phosphate
  modified_base 19: mod_base = OTHER; note = 2'-O-methyladenosine-3'-phosphate
  modified_base 20: mod_base = OTHER; note = 2'-O-methylcytidine-3'-phosphate
  modified_base 21: mod_base = OTHER; note = 2'-O-methyluridine-3'-phosphate ((2S,4R)-1-[29-[[2-(acetylamino)-2-deoxy-beta-D-galactopyra nosyl]oxy]-14,14-bis[[3-[[3-[[5-[[2-(acetylamino)-2-deoxy-b eta-D-galactopyranosyl]oxy]-1-oxopentyl]amino]propyl]amino] -3-oxopropoxy]methyl]-1,12,19,25-tetraoxo-16-oxa-13,20,24-t riazanonacos-1-yl]-4-hydroxy-2-pyrrolidinyl)methyl ester
gtgttatatgtattatacact

SEQ ID NO: 3521 - RNA, 21 nt, synthetic construct
  source 1..21: mol_type = other RNA
  modified_base 1: mod_base = OTHER; note = 2'-O-methyladenosine-3'-phosphorothioate
  modified_base 2: mod_base = OTHER; note = 2'-O-methyladenosine-3'-phosphorothioate
  modified_base 3: mod_base = OTHER; note = 2'-O-methyladenosine-3'-phosphate
  modified_base 4: mod_base = OTHER; note = 2'-O-methylguanosine-3'-phosphate
  modified_base 5: mod_base = OTHER; note = 2'-O-methyladenosine-3'-phosphate
  modified_base 6: mod_base = OTHER; note = 2'-O-docosanyl-guanosine-3'-phosphate
  modified_base 7: mod_base = OTHER; note = 2'-deoxy-2'-fluorouridine-3'-phosphate
  modified_base 8: mod_base = OTHER; note = 2'-O-methyladenosine-3'-phosphate
  modified_base 9: mod_base = OTHER; note = 2'-deoxy-2'-fluoroguanosine-3'-phosphate
  modified_base 10: mod_base = OTHER; note = 2'-deoxy-2'-fluoroadenosine-3'-phosphate
  modified_base 11: mod_base = OTHER; note = 2'-deoxy-2'-fluoroguanosine-3'-phosphate
  modified_base 12: mod_base = OTHER; note = 2'-O-methylguanosine-3'-phosphate
  modified_base 13: mod_base = OTHER; note = 2'-O-methyladenosine-3'-phosphate
  modified_base 14: mod_base = OTHER; note = 2'-O-methyluridine-3'-phosphate
  modified_base 15: mod_base = OTHER; note = 2'-O-methylguanosine-3'-phosphate
  modified_base 16: mod_base = OTHER; note = 2'-O-methyluridine-3'-phosphate
  modified_base 17: mod_base = OTHER; note = 2'-O-methylguanosine-3'-phosphate
  modified_base 18: mod_base = OTHER; note = 2'-O-methyluridine-3'-phosphate
  modified_base 19: mod_base = OTHER; note = 2'-O-methyladenosine-3'-phosphate
  modified_base 20: mod_base = OTHER; note = 2'-O-methyladenosine-3'-phosphate
  modified_base 21: mod_base = OTHER; note = 2'-O-methyluridine-3'-phosphate ((2S,4R)-1-[29-[[2-(acetylamino)-2-deoxy-beta-D-galactopyra nosyl]oxy]-14,14-bis[[3-[[3-[[5-[[2-(acetylamino)-2-deoxy-b eta-D-galactopyranosyl]oxy]-1-oxopentyl]amino]propyl]amino] -3-oxopropoxy]methyl]-1,12,19,25-tetraoxo-16-oxa-13,20,24-t riazanonacos-1-yl]-4-hydroxy-2-pyrrolidinyl)methyl ester
aaagagtagaggatgtgtaat

SEQ ID NO: 3522 - RNA, 21 nt, synthetic construct
  source 1..21: mol_type = other RNA
  modified_base 1: mod_base = OTHER; note = 2'-O-methyladenosine-3'-phosphorothioate
  modified_base 2: mod_base = OTHER; note = 2'-O-methylguanosine-3'-phosphorothioate
  modified_base 3: mod_base = OTHER; note = 2'-O-methyluridine-3'-phosphate
  modified_base 4: mod_base = OTHER; note = 2'-O-methyluridine-3'-phosphate
  modified_base 5: mod_base = OTHER; note = 2'-O-methyluridine-3'-phosphate
  modified_base 6: mod_base = OTHER; note = 2'-O-docosanyl-uridine-3'-phosphate
  modified_base 7: mod_base = OTHER; note = 2'-deoxy-2'-fluoroadenosine-3'-phosphate
  modified_base 8: mod_base = OTHER; note = 2'-O-methyladenosine-3'-phosphate
  modified_base 9: mod_base = OTHER; note = 2'-deoxy-2'-fluoroadenosine-3'-phosphate
  modified_base 10: mod_base = OTHER; note = 2'-deoxy-2'-fluoroadenosine-3'-phosphate
  modified_base 11: mod_base = OTHER; note = 2'-deoxy-2'-fluorocytidine-3'-phosphate
  modified_base 12: mod_base = OTHER; note = 2'-O-methyluridine-3'-phosphate
  modified_base 13: mod_base = OTHER; note = 2'-O-methylguanosine-3'-phosphate
  modified_base 14: mod_base = OTHER; note = 2'-O-methylcytidine-3'-phosphate
  modified_base 15: mod_base = OTHER; note = 2'-O-methyladenosine-3'-phosphate
  modified_base 16: mod_base = OTHER; note = 2'-O-methylcytidine-3'-phosphate
  modified_base 17: mod_base = OTHER; note = 2'-O-methyluridine-3'-phosphate
  modified_base 18: mod_base = OTHER; note = 2'-O-methylguanosine-3'-phosphate
  modified_base 19: mod_base = OTHER; note = 2'-O-methylcytidine-3'-phosphate
  modified_base 20: mod_base = OTHER; note = 2'-O-methylcytidine-3'-phosphate
  modified_base 21: mod_base = OTHER; note = 2'-O-methyluridine-3'-phosphate ((2S,4R)-1-[29-[[2-(acetylamino)-2-deoxy-beta-D-galactopyra nosyl]oxy]-14,14-bis[[3-[[3-[[5-[[2-(acetylamino)-2-deoxy-b eta-D-galactopyranosyl]oxy]-1-oxopentyl]amino]propyl]amino] -3-oxopropoxy]methyl]-1,12,19,25-tetraoxo-16-oxa-13,20,24-t riazanonacos-1-yl]-4-hydroxy-2-pyrrolidinyl)methyl ester
agttttaaaactgcactgcct

SEQ ID NO: 3523 - RNA, 21 nt, synthetic construct
  source 1..21: mol_type = other RNA
  modified_base 1: mod_base = OTHER; note = 2'-O-methyladenosine-3'-phosphorothioate
  modified_base 2: mod_base = OTHER; note = 2'-O-methyladenosine-3'-phosphorothioate
  modified_base 3: mod_base = OTHER; note = 2'-O-methylguanosine-3'-phosphate
  modified_base 4: mod_base = OTHER; note = 2'-O-methyladenosine-3'-phosphate
  modified_base 5: mod_base = OTHER; note = 2'-O-methyluridine-3'-phosphate
  modified_base 6: mod_base = OTHER; note = 2'-O-docosanyl-uridine-3'-phosphate
  modified_base 7: mod_base = OTHER; note = 2'-deoxy-2'-fluorouridine-3'-phosphate
  modified_base 8: mod_base = OTHER; note = 2'-O-methylcytidine-3'-phosphate
  modified_base 9: mod_base = OTHER; note = 2'-deoxy-2'-fluorocytidine-3'-phosphate
  modified_base 10: mod_base = OTHER; note = 2'-deoxy-2'-fluoroadenosine-3'-phosphate
  modified_base 11: mod_base = OTHER; note = 2'-deoxy-2'-fluoroguanosine-3'-phosphate
  modified_base 12: mod_base = OTHER; note = 2'-O-methyluridine-3'-phosphate
  modified_base 13: mod_base = OTHER; note = 2'-O-methylguanosine-3'-phosphate
  modified_base 14: mod_base = OTHER; note = 2'-O-methyladenosine-3'-phosphate
  modified_base 15: mod_base = OTHER; note = 2'-O-methylcytidine-3'-phosphate
  modified_base 16: mod_base = OTHER; note = 2'-O-methyladenosine-3'-phosphate
  modified_base 17: mod_base = OTHER; note = 2'-O-methylguanosine-3'-phosphate
  modified_base 18: mod_base = OTHER; note = 2'-O-methyladenosine-3'-phosphate
  modified_base 19: mod_base = OTHER; note = 2'-O-methyladenosine-3'-phosphate
  modified_base 20: mod_base = OTHER; note = 2'-O-methyladenosine-3'-phosphate
  modified_base 21: mod_base = OTHER; note = 2'-O-methyluridine-3'-phosphate ((2S,4R)-1-[29-[[2-(acetylamino)-2-deoxy-beta-D-galactopyra nosyl]oxy]-14,14-bis[[3-[[3-[[5-[[2-(acetylamino)-2-deoxy-b eta-D-galactopyranosyl]oxy]-1-oxopentyl]amino]propyl]amino] -3-oxopropoxy]methyl]-1,12,19,25-tetraoxo-16-oxa-13,20,24-t riazanonacos-1-yl]-4-hydroxy-2-pyrrolidinyl)methyl ester
aagatttccagtgacagaaat

SEQ ID NO: 3524 - RNA, 21 nt, synthetic construct
  source 1..21: mol_type = other RNA
  modified_base 1: mod_base = OTHER; note = 2'-O-methyladenosine-3'-phosphorothioate
  modified_base 2: mod_base = OTHER; note = 2'-O-methylcytidine-3'-phosphorothioate
  modified_base 3: mod_base = OTHER; note = 2'-O-methyluridine-3'-phosphate
  modified_base 4: mod_base = OTHER; note = 2'-O-methylguanosine-3'-phosphate
  modified_base 5: mod_base = OTHER; note = 2'-O-methylguanosine-3'-phosphate
  modified_base 6: mod_base = OTHER; note = 2'-O-docosanyl-uridine-3'-phosphate
  modified_base 7: mod_base = OTHER; note = 2'-deoxy-2'-fluoroguanosine-3'-phosphate
  modified_base 8: mod_base = OTHER; note = 2'-O-methylguanosine-3'-phosphate
  modified_base 9: mod_base = OTHER; note = 2'-deoxy-2'-fluorouridine-3'-phosphate
  modified_base 10: mod_base = OTHER; note = 2'-deoxy-2'-fluorouridine-3'-phosphate
  modified_base 11: mod_base = OTHER; note = 2'-deoxy-2'-fluoroadenosine-3'-phosphate
  modified_base 12: mod_base = OTHER; note = 2'-O-methyladenosine-3'-phosphate
  modified_base 13: mod_base = OTHER; note = 2'-O-methyluridine-3'-phosphate
  modified_base 14: mod_base = OTHER; note = 2'-O-methyladenosine-3'-phosphate
  modified_base 15: mod_base = OTHER; note = 2'-O-methyluridine-3'-phosphate
  modified_base 16: mod_base = OTHER; note = 2'-O-methylguanosine-3'-phosphate
  modified_base 17: mod_base = OTHER; note = 2'-O-methyluridine-3'-phosphate
  modified_base 18: mod_base = OTHER; note = 2'-O-methylguanosine-3'-phosphate
  modified_base 19: mod_base = OTHER; note = 2'-O-methyladenosine-3'-phosphate
  modified_base 20: mod_base = OTHER; note = 2'-O-methylcytidine-3'-phosphate
  modified_base 21: mod_base = OTHER; note = 2'-O-methyluridine-3'-phosphate ((2S,4R)-1-[29-[[2-(acetylamino)-2-deoxy-beta-D-galactopyra nosyl]oxy]-14,14-bis[[3-[[3-[[5-[[2-(acetylamino)-2-deoxy-b eta-D-galactopyranosyl]oxy]-1-oxopentyl]amino]propyl]amino] -3-oxopropoxy]methyl]-1,12,19,25-tetraoxo-16-oxa-13,20,24-t riazanonacos-1-yl]-4-hydroxy-2-pyrrolidinyl)methyl ester
actggtggttaatatgtgact

SEQ ID NO: 3525 - RNA, 21 nt, synthetic construct
  source 1..21: mol_type = other RNA
  modified_base 1: mod_base = OTHER; note = 2'-O-methyluridine-3'-phosphorothioate
  modified_base 2: mod_base = OTHER; note = 2'-O-methyluridine-3'-phosphorothioate
  modified_base 3: mod_base = OTHER; note = 2'-O-methylguanosine-3'-phosphate
  modified_base 4: mod_base = OTHER; note = 2'-O-methylcytidine-3'-phosphate
  modified_base 5: mod_base = OTHER; note = 2'-O-methyladenosine-3'-phosphate
  modified_base 6: mod_base = OTHER; note = 2'-O-docosanyl-adenosine-3'-phosphate
  modified_base 7: mod_base = OTHER; note = 2'-deoxy-2'-fluorouridine-3'-phosphate
  modified_base 8: mod_base = OTHER; note = 2'-O-methyluridine-3'-phosphate
  modified_base 9: mod_base = OTHER; note = 2'-deoxy-2'-fluorocytidine-3'-phosphate
  modified_base 10: mod_base = OTHER; note = 2'-deoxy-2'-fluoroadenosine-3'-phosphate
  modified_base 11: mod_base = OTHER; note = 2'-deoxy-2'-fluoroadenosine-3'-phosphate
  modified_base 12: mod_base = OTHER; note = 2'-O-methylguanosine-3'-phosphate
  modified_base 13: mod_base = OTHER; note = 2'-O-methylcytidine-3'-phosphate
  modified_base 14: mod_base = OTHER; note = 2'-O-methylcytidine-3'-phosphate
  modified_base 15: mod_base = OTHER; note = 2'-O-methylcytidine-3'-phosphate
  modified_base 16: mod_base = OTHER; note = 2'-O-methyluridine-3'-phosphate
  modified_base 17: mod_base = OTHER; note = 2'-O-methyluridine-3'-phosphate
  modified_base 18: mod_base = OTHER; note = 2'-O-methylguanosine-3'-phosphate
  modified_base 19: mod_base = OTHER; note = 2'-O-methyluridine-3'-phosphate
  modified_base 20: mod_base = OTHER; note = 2'-O-methyluridine-3'-phosphate
  modified_base 21: mod_base = OTHER; note = 2'-O-methyluridine-3'-phosphate ((2S,4R)-1-[29-[[2-(acetylamino)-2-deoxy-beta-D-galactopyra nosyl]oxy]-14,14-bis[[3-[[3-[[5-[[2-(acetylamino)-2-deoxy-b eta-D-galactopyranosyl]oxy]-1-oxopentyl]amino]propyl]amino] -3-oxopropoxy]methyl]-1,12,19,25-tetraoxo-16-oxa-13,20,24-t riazanonacos-1-yl]-4-hydroxy-2-pyrrolidinyl)methyl ester
ttgcaattcaagcccttgttt

SEQ ID NO: 3526 - RNA, 21 nt, synthetic construct
  source 1..21: mol_type = other RNA
  modified_base 1: mod_base = OTHER; note = 2'-O-methyladenosine-3'-phosphorothioate
  modified_base 2: mod_base = OTHER; note = 2'-O-methyladenosine-3'-phosphorothioate
  modified_base 3: mod_base = OTHER; note = 2'-O-methylguanosine-3'-phosphate
  modified_base 4: mod_base = OTHER; note = 2'-O-methyluridine-3'-phosphate
  modified_base 5: mod_base = OTHER; note = 2'-O-methylguanosine-3'-phosphate
  modified_base 6: mod_base = OTHER; note = 2'-O-docosanyl-adenosine-3'-phosphate
  modified_base 7: mod_base = OTHER; note = 2'-deoxy-2'-fluorocytidine-3'-phosphate
  modified_base 8: mod_base = OTHER; note = 2'-O-methylguanosine-3'-phosphate
  modified_base 9: mod_base = OTHER; note = 2'-deoxy-2'-fluorocytidine-3'-phosphate
  modified_base 10: mod_base = OTHER; note = 2'-deoxy-2'-fluorocytidine-3'-phosphate
  modified_base 11: mod_base = OTHER; note = 2'-deoxy-2'-fluorouridine-3'-phosphate
  modified_base 12: mod_base = OTHER; note = 2'-O-methylcytidine-3'-phosphate
  modified_base 13: mod_base = OTHER; note = 2'-O-methyladenosine-3'-phosphate
  modified_base 14: mod_base = OTHER; note = 2'-O-methyluridine-3'-phosphate
  modified_base 15: mod_base = OTHER; note = 2'-O-methylcytidine-3'-phosphate
  modified_base 16: mod_base = OTHER; note = 2'-O-methyluridine-3'-phosphate
  modified_base 17: mod_base = OTHER; note = 2'-O-methyladenosine-3'-phosphate
  modified_base 18: mod_base = OTHER; note = 2'-O-methylcytidine-3'-phosphate
  modified_base 19: mod_base = OTHER; note = 2'-O-methyladenosine-3'-phosphate
  modified_base 20: mod_base = OTHER; note = 2'-O-methyladenosine-3'-phosphate
  modified_base 21: mod_base = OTHER; note = 2'-O-methyluridine-3'-phosphate ((2S,4R)-1-[29-[[2-(acetylamino)-2-deoxy-beta-D-galactopyra nosyl]oxy]-14,14-bis[[3-[[3-[[5-[[2-(acetylamino)-2-deoxy-b eta-D-galactopyranosyl]oxy]-1-oxopentyl]amino]propyl]amino] -3-oxopropoxy]methyl]-1,12,19,25-tetraoxo-16-oxa-13,20,24-t riazanonacos-1-yl]-4-hydroxy-2-pyrrolidinyl)methyl ester
aagtgacgcctcatctacaat

SEQ ID NO: 3527 - RNA, 21 nt, synthetic construct
  source 1..21: mol_type = other RNA
  modified_base 1: mod_base = OTHER; note = 2'-O-methyladenosine-3'-phosphorothioate
  modified_base 2: mod_base = OTHER; note = 2'-O-methyluridine-3'-phosphorothioate
  modified_base 3: mod_base = OTHER; note = 2'-O-methyluridine-3'-phosphate
  modified_base 4: mod_base = OTHER; note = 2'-O-methyluridine-3'-phosphate
  modified_base 5: mod_base = OTHER; note = 2'-O-methyluridine-3'-phosphate
  modified_base 6: mod_base = OTHER; note = 2'-O-docosanyl-guanosine-3'-phosphate
  modified_base 7: mod_base = OTHER; note = 2'-deoxy-2'-fluorocytidine-3'-phosphate
  modified_base 8: mod_base = OTHER; note = 2'-O-methyladenosine-3'-phosphate
  modified_base 9: mod_base = OTHER; note = 2'-deoxy-2'-fluoroguanosine-3'-phosphate
  modified_base 10: mod_base = OTHER; note = 2'-deoxy-2'-fluoroguanosine-3'-phosphate
  modified_base 11: mod_base = OTHER; note = 2'-deoxy-2'-fluorouridine-3'-phosphate
  modified_base 12: mod_base = OTHER; note = 2'-O-methyluridine-3'-phosphate
  modified_base 13: mod_base = OTHER; note = 2'-O-methylguanosine-3'-phosphate
  modified_base 14: mod_base = OTHER; note = 2'-O-methyluridine-3'-phosphate
  modified_base 15: mod_base = OTHER; note = 2'-O-methylcytidine-3'-phosphate
  modified_base 16: mod_base = OTHER; note = 2'-O-methyluridine-3'-phosphate
  modified_base 17: mod_base = OTHER; note = 2'-O-methyluridine-3'-phosphate
  modified_base 18: mod_base = OTHER; note = 2'-O-methylcytidine-3'-phosphate
  modified_base 19: mod_base = OTHER; note = 2'-O-methylcytidine-3'-phosphate
  modified_base 20: mod_base = OTHER; note = 2'-O-methyladenosine-3'-phosphate
  modified_base 21: mod_base = OTHER; note = 2'-O-methyluridine-3'-phosphate ((2S,4R)-1-[29-[[2-(acetylamino)-2-deoxy-beta-D-galactopyra nosyl]oxy]-14,14-bis[[3-[[3-[[5-[[2-(acetylamino)-2-deoxy-b eta-D-galactopyranosyl]oxy]-1-oxopentyl]amino]propyl]amino] -3-oxopropoxy]methyl]-1,12,19,25-tetraoxo-16-oxa-13,20,24-t riazanonacos-1-yl]-4-hydroxy-2-pyrrolidinyl)methyl ester
attttgcaggttgtcttccat

SEQ ID NO: 3528 - RNA, 21 nt, synthetic construct
  source 1..21: mol_type = other RNA
  modified_base 1: mod_base = OTHER; note = 2'-O-methyladenosine-3'-phosphorothioate
  modified_base 2: mod_base = OTHER; note = 2'-O-methyluridine-3'-phosphorothioate
  modified_base 3: mod_base = OTHER; note = 2'-O-methylguanosine-3'-phosphate
  modified_base 4: mod_base = OTHER; note = 2'-O-methyluridine-3'-phosphate
  modified_base 5: mod_base = OTHER; note = 2'-O-methyladenosine-3'-phosphate
  modified_base 6: mod_base = OTHER; note = 2'-O-docosanyl-adenosine-3'-phosphate
  modified_base 7: mod_base = OTHER; note = 2'-deoxy-2'-fluorocytidine-3'-phosphate
  modified_base 8: mod_base = OTHER; note = 2'-O-methyladenosine-3'-phosphate
  modified_base 9: mod_base = OTHER; note = 2'-deoxy-2'-fluorouridine-3'-phosphate
  modified_base 10: mod_base = OTHER; note = 2'-deoxy-2'-fluorocytidine-3'-phosphate
  modified_base 11: mod_base = OTHER; note = 2'-deoxy-2'-fluoroadenosine-3'-phosphate
  modified_base 12: mod_base = OTHER; note = 2'-O-methyladenosine-3'-phosphate
  modified_base 13: mod_base = OTHER; note = 2'-O-methyluridine-3'-phosphate
  modified_base 14: mod_base = OTHER; note = 2'-O-methyladenosine-3'-phosphate
  modified_base 15: mod_base = OTHER; note = 2'-O-methyluridine-3'-phosphate
  modified_base 16: mod_base = OTHER; note = 2'-O-methyluridine-3'-phosphate
  modified_base 17: mod_base = OTHER; note = 2'-O-methylguanosine-3'-phosphate
  modified_base 18: mod_base = OTHER; note = 2'-O-methyladenosine-3'-phosphate
  modified_base 19: mod_base = OTHER; note = 2'-O-methylcytidine-3'-phosphate
  modified_base 20: mod_base = OTHER; note = 2'-O-methylcytidine-3'-phosphate
  modified_base 21: mod_base = OTHER; note = 2'-O-methyluridine-3'-phosphate ((2S,4R)-1-[29-[[2-(acetylamino)-2-deoxy-beta-D-galactopyra nosyl]oxy]-14,14-bis[[3-[[3-[[5-[[2-(acetylamino)-2-deoxy-b eta-D-galactopyranosyl]oxy]-1-oxopentyl]amino]propyl]amino] -3-oxopropoxy]methyl]-1,12,19,25-tetraoxo-16-oxa-13,20,24-t riazanonacos-1-yl]-4-hydroxy-2-pyrrolidinyl)methyl ester
atgtaacatcaatattgacct

SEQ ID NO: 3529 - RNA, 21 nt, synthetic construct
  source 1..21: mol_type = other RNA
  modified_base 1: mod_base = OTHER; note = 2'-O-methyladenosine-3'-phosphorothioate
  modified_base 2: mod_base = OTHER; note = 2'-O-methyladenosine-3'-phosphorothioate
  modified_base 3: mod_base = OTHER; note = 2'-O-methyladenosine-3'-phosphate
  modified_base 4: mod_base = OTHER; note = 2'-O-methylguanosine-3'-phosphate
  modified_base 5: mod_base = OTHER; note = 2'-O-methyladenosine-3'-phosphate
  modified_base 6: mod_base = OTHER; note = 2'-O-docosanyl-adenosine-3'-phosphate
  modified_base 7: mod_base = OTHER; note = 2'-deoxy-2'-fluorouridine-3'-phosphate
  modified_base 8: mod_base = OTHER; note = 2'-O-methyladenosine-3'-phosphate
  modified_base 9: mod_base = OTHER; note = 2'-deoxy-2'-fluorouridine-3'-phosphate
  modified_base 10: mod_base = OTHER; note = 2'-deoxy-2'-fluorouridine-3'-phosphate
  modified_base 11: mod_base = OTHER; note = 2'-deoxy-2'-fluorocytidine-3'-phosphate
  modified_base 12: mod_base = OTHER; note = 2'-O-methyladenosine-3'-phosphate
  modified_base 13: mod_base = OTHER; note = 2'-O-methyluridine-3'-phosphate
  modified_base 14: mod_base = OTHER; note = 2'-O-methylguanosine-3'-phosphate
  modified_base 15: mod_base = OTHER; note = 2'-O-methyluridine-3'-phosphate
  modified_base 16: mod_base = OTHER; note = 2'-O-methyladenosine-3'-phosphate
  modified_base 17: mod_base = OTHER; note = 2'-O-methyluridine-3'-phosphate
  modified_base 18: mod_base = OTHER; note = 2'-O-methyladenosine-3'-phosphate
  modified_base 19: mod_base = OTHER; note = 2'-O-methyladenosine-3'-phosphate
  modified_base 20: mod_base = OTHER; note = 2'-O-methylguanosine-3'-phosphate
  modified_base 21: mod_base = OTHER; note = 2'-O-methyluridine-3'-phosphate ((2S,4R)-1-[29-[[2-(acetylamino)-2-deoxy-beta-D-galactopyra nosyl]oxy]-14,14-bis[[3-[[3-[[5-[[2-(acetylamino)-2-deoxy-b eta-D-galactopyranosyl]oxy]-1-oxopentyl]amino]propyl]amino] -3-oxopropoxy]methyl]-1,12,19,25-tetraoxo-16-oxa-13,20,24-t riazanonacos-1-yl]-4-hydroxy-2-pyrrolidinyl)methyl ester
aaagaatattcatgtataagt

SEQ ID NO: 3530 - RNA, 21 nt, synthetic construct
  source 1..21: mol_type = other RNA
  modified_base 1: mod_base = OTHER; note = 2'-O-methyladenosine-3'-phosphorothioate
  modified_base 2: mod_base = OTHER; note = 2'-O-methyladenosine-3'-phosphorothioate
  modified_base 3: mod_base = OTHER; note = 2'-O-methylguanosine-3'-phosphate
  modified_base 4: mod_base = OTHER; note = 2'-O-methyluridine-3'-phosphate
  modified_base 5: mod_base = OTHER; note = 2'-O-methyladenosine-3'-phosphate
  modified_base 6: mod_base = OTHER; note = 2'-O-docosanyl-adenosine-3'-phosphate
  modified_base 7: mod_base = OTHER; note = 2'-deoxy-2'-fluorouridine-3'-phosphate
  modified_base 8: mod_base = OTHER; note = 2'-O-methyladenosine-3'-phosphate
  modified_base 9: mod_base = OTHER; note = 2'-deoxy-2'-fluoroadenosine-3'-phosphate
  modified_base 10: mod_base = OTHER; note = 2'-deoxy-2'-fluorocytidine-3'-phosphate
  modified_base 11: mod_base = OTHER; note = 2'-deoxy-2'-fluoroadenosine-3'-phosphate
  modified_base 12: mod_base = OTHER; note = 2'-O-methylcytidine-3'-phosphate
  modified_base 13: mod_base = OTHER; note = 2'-O-methyladenosine-3'-phosphate
  modified_base 14: mod_base = OTHER; note = 2'-O-methyladenosine-3'-phosphate
  modified_base 15: mod_base = OTHER; note = 2'-O-methyladenosine-3'-phosphate
  modified_base 16: mod_base = OTHER; note = 2'-O-methyluridine-3'-phosphate
  modified_base 17: mod_base = OTHER; note = 2'-O-methylguanosine-3'-phosphate
  modified_base 18: mod_base = OTHER; note = 2'-O-methyladenosine-3'-phosphate
  modified_base 19: mod_base = OTHER; note = 2'-O-methyladenosine-3'-phosphate
  modified_base 20: mod_base = OTHER; note = 2'-O-methylguanosine-3'-phosphate
  modified_base 21: mod_base = OTHER; note = 2'-O-methyluridine-3'-phosphate ((2S,4R)-1-[29-[[2-(acetylamino)-2-deoxy-beta-D-galactopyra nosyl]oxy]-14,14-bis[[3-[[3-[[5-[[2-(acetylamino)-2-deoxy-b eta-D-galactopyranosyl]oxy]-1-oxopentyl]amino]propyl]amino] -3-oxopropoxy]methyl]-1,12,19,25-tetraoxo-16-oxa-13,20,24-t riazanonacos-1-yl]-4-hydroxy-2-pyrrolidinyl)methyl ester
aagtaataacacaaatgaagt

SEQ ID NO: 3531 - RNA, 21 nt, synthetic construct
  source 1..21: mol_type = other RNA
  modified_base 1: mod_base = OTHER; note = 2'-O-methyluridine-3'-phosphorothioate
  modified_base 2: mod_base = OTHER; note = 2'-O-methyladenosine-3'-phosphorothioate
  modified_base 3: mod_base = OTHER; note = 2'-O-methylcytidine-3'-phosphate
  modified_base 4: mod_base = OTHER; note = 2'-O-methyladenosine-3'-phosphate
  modified_base 5: mod_base = OTHER; note = 2'-O-methylguanosine-3'-phosphate
  modified_base 6: mod_base = OTHER; note = 2'-O-docosanyl-cytidine-3'-phosphate
  modified_base 7: mod_base = OTHER; note = 2'-deoxy-2'-fluorouridine-3'-phosphate
  modified_base 8: mod_base = OTHER; note = 2'-O-methylguanosine-3'-phosphate
  modified_base 9: mod_base = OTHER; note = 2'-deoxy-2'-fluoroadenosine-3'-phosphate
  modified_base 10: mod_base = OTHER; note = 2'-deoxy-2'-fluorocytidine-3'-phosphate
  modified_base 11: mod_base = OTHER; note = 2'-deoxy-2'-fluorocytidine-3'-phosphate
  modified_base 12: mod_base = OTHER; note = 2'-O-methylcytidine-3'-phosphate
  modified_base 13: mod_base = OTHER; note = 2'-O-methyluridine-3'-phosphate
  modified_base 14: mod_base = OTHER; note = 2'-O-methyluridine-3'-phosphate
  modified_base 15: mod_base = OTHER; note = 2'-O-methylguanosine-3'-phosphate
  modified_base 16: mod_base = OTHER; note = 2'-O-methyladenosine-3'-phosphate
  modified_base 17: mod_base = OTHER; note = 2'-O-methyladenosine-3'-phosphate
  modified_base 18: mod_base = OTHER; note = 2'-O-methylcytidine-3'-phosphate
  modified_base 19: mod_base = OTHER; note = 2'-O-methyladenosine-3'-phosphate
  modified_base 20: mod_base = OTHER; note = 2'-O-methyluridine-3'-phosphate
  modified_base 21: mod_base = OTHER; note = 2'-O-methyluridine-3'-phosphate ((2S,4R)-1-[29-[[2-(acetylamino)-2-deoxy-beta-D-galactopyra nosyl]oxy]-14,14-bis[[3-[[3-[[5-[[2-(acetylamino)-2-deoxy-b eta-D-galactopyranosyl]oxy]-1-oxopentyl]amino]propyl]amino] -3-oxopropoxy]methyl]-1,12,19,25-tetraoxo-16-oxa-13,20,24-t riazanonacos-1-yl]-4-hydroxy-2-pyrrolidinyl)methyl ester
tacagctgacccttgaacatt

SEQ ID NO: 3532 - RNA, 21 nt, synthetic construct
  source 1..21: mol_type = other RNA
  modified_base 1: mod_base = OTHER; note = 2'-O-methyladenosine-3'-phosphorothioate
  modified_base 2: mod_base = OTHER; note = 2'-O-methyluridine-3'-phosphorothioate
  modified_base 3: mod_base = OTHER; note = 2'-O-methylguanosine-3'-phosphate
  modified_base 4: mod_base = OTHER; note = 2'-O-methylguanosine-3'-phosphate
  modified_base 5: mod_base = OTHER; note = 2'-O-methyladenosine-3'-phosphate
  modified_base 6: mod_base = OTHER; note = 2'-O-docosanyl-adenosine-3'-phosphate
  modified_base 7: mod_base = OTHER; note = 2'-deoxy-2'-fluoroadenosine-3'-phosphate
  modified_base 8: mod_base = OTHER; note = 2'-O-methyladenosine-3'-phosphate
  modified_base 9: mod_base = OTHER; note = 2'-deoxy-2'-fluoroguanosine-3'-phosphate
  modified_base 10: mod_base = OTHER; note = 2'-deoxy-2'-fluorouridine-3'-phosphate
  modified_base 11: mod_base = OTHER; note = 2'-deoxy-2'-fluoroadenosine-3'-phosphate
  modified_base 12: mod_base = OTHER; note = 2'-O-methyladenosine-3'-phosphate
  modified_base 13: mod_base = OTHER; note = 2'-O-methylguanosine-3'-phosphate
  modified_base 14: mod_base = OTHER; note = 2'-O-methylguanosine-3'-phosphate
  modified_base 15: mod_base = OTHER; note = 2'-O-methylcytidine-3'-phosphate
  modified_base 16: mod_base = OTHER; note = 2'-O-methylcytidine-3'-phosphate
  modified_base 17: mod_base = OTHER; note = 2'-O-methyladenosine-3'-phosphate
  modified_base 18: mod_base = OTHER; note = 2'-O-methyluridine-3'-phosphate
  modified_base 19: mod_base = OTHER; note = 2'-O-methyladenosine-3'-phosphate
  modified_base 20: mod_base = OTHER; note = 2'-O-methylcytidine-3'-phosphate
  modified_base 21: mod_base = OTHER; note = 2'-O-methyluridine-3'-phosphate ((2S,4R)-1-[29-[[2-(acetylamino)-2-deoxy-beta-D-galactopyra nosyl]oxy]-14,14-bis[[3-[[3-[[5-[[2-(acetylamino)-2-deoxy-b eta-D-galactopyranosyl]oxy]-1-oxopentyl]amino]propyl]amino] -3-oxopropoxy]methyl]-1,12,19,25-tetraoxo-16-oxa-13,20,24-t riazanonacos-1-yl]-4-hydroxy-2-pyrrolidinyl)methyl ester
atggaaaagtaaggccatact

SEQ ID NO: 3533 - RNA, 21 nt, synthetic construct
  source 1..21: mol_type = other RNA
  modified_base 1: mod_base = OTHER; note = 2'-O-methylguanosine-3'-phosphorothioate
  modified_base 2: mod_base = OTHER; note = 2'-O-methyladenosine-3'-phosphorothioate
  modified_base 3: mod_base = OTHER; note = 2'-O-methyladenosine-3'-phosphate
  modified_base 4: mod_base = OTHER; note = 2'-O-methylcytidine-3'-phosphate
  modified_base 5: mod_base = OTHER; note = 2'-O-methyluridine-3'-phosphate
  modified_base 6: mod_base = OTHER; note = 2'-O-docosanyl-uridine-3'-phosphate
  modified_base 7: mod_base = OTHER; note = 2'-deoxy-2'-fluoroguanosine-3'-phosphate
  modified_base 8: mod_base = OTHER; note = 2'-O-methyluridine-3'-phosphate
  modified_base 9: mod_base = OTHER; note = 2'-deoxy-2'-fluorouridine-3'-phosphate
  modified_base 10: mod_base = OTHER; note = 2'-deoxy-2'-fluoroguanosine-3'-phosphate
  modified_base 11: mod_base = OTHER; note = 2'-deoxy-2'-fluoroguanosine-3'-phosphate
  modified_base 12: mod_base = OTHER; note = 2'-O-methylcytidine-3'-phosphate
  modified_base 13: mod_base = OTHER; note = 2'-O-methylcytidine-3'-phosphate
  modified_base 14: mod_base = OTHER; note = 2'-O-methylcytidine-3'-phosphate
  modified_base 15: mod_base = OTHER; note = 2'-O-methyladenosine-3'-phosphate
  modified_base 16: mod_base = OTHER; note = 2'-O-methyluridine-3'-phosphate
  modified_base 17: mod_base = OTHER; note = 2'-O-methylcytidine-3'-phosphate
  modified_base 18: mod_base = OTHER; note = 2'-O-methyluridine-3'-phosphate
  modified_base 19: mod_base = OTHER; note = 2'-O-methyladenosine-3'-phosphate
  modified_base 20: mod_base = OTHER; note = 2'-O-methyluridine-3'-phosphate
  modified_base 21: mod_base = OTHER; note = 2'-O-methyluridine-3'-phosphate ((2S,4R)-1-[29-[[2-(acetylamino)-2-deoxy-beta-D-galactopyra nosyl]oxy]-14,14-bis[[3-[[3-[[5-[[2-(acetylamino)-2-deoxy-b eta-D-galactopyranosyl]oxy]-1-oxopentyl]amino]propyl]amino] -3-oxopropoxy]methyl]-1,12,19,25-tetraoxo-16-oxa-13,20,24-t riazanonacos-1-yl]-4-hydroxy-2-pyrrolidinyl)methyl ester
gaacttgttggcccatctatt

SEQ ID NO: 3534 - RNA, 23 nt, synthetic construct
  source 1..23: mol_type = other RNA
  modified_base 1: mod_base = OTHER; note = 2'-O-methyladenosine-3'-phosphorothioate
  modified_base 2: mod_base = OTHER; note = 2'-deoxy-2'-fluorouridine-3'-phosphorothioate
  modified_base 3: mod_base = OTHER; note = 2'-O-methylguanosine-3'-phosphate
  modified_base 4: mod_base = OTHER; note = 2'-O-methyladenosine-3'-phosphate
  modified_base 5: mod_base = OTHER; note = 2'-O-methyluridine-3'-phosphate
  modified_base 6: mod_base = OTHER; note = 2'-deoxy-2'-fluoroadenosine-3'-phosphate
  modified_base 7: mod_base = OTHER; note = 2'-O-methylguanosine-3'-phosphate
  modified_base 8: mod_base = OTHER; note = 2'-deoxy-2'-fluoroadenosine-3'-phosphate
  modified_base 9: mod_base = OTHER; note = 2'-deoxy-2'-fluoroguanosine-3'-phosphate
  modified_base 10: mod_base = OTHER; note = 2'-O-methylguanosine-3'-phosphate
  modified_base 11: mod_base = OTHER; note = 2'-O-methyladenosine-3'-phosphate
  modified_base 12: mod_base = OTHER; note = 2'-O-methyladenosine-3'-phosphate
  modified_base 13: mod_base = OTHER; note = 2'-O-methylguanosine-3'-phosphate
  modified_base 14: mod_base = OTHER; note = 2'-deoxy-2'-fluoroadenosine-3'-phosphate
  modified_base 15: mod_base = OTHER; note = 2'-O-methyladenosine-3'-phosphate
  modified_base 16: mod_base = OTHER; note = 2'-deoxy-2'-fluoroadenosine-3'-phosphate
  modified_base 17: mod_base = OTHER; note = 2'-O-methyladenosine-3'-phosphate
  modified_base 18: mod_base = OTHER; note = 2'-O-methyladenosine-3'-phosphate
  modified_base 19: mod_base = OTHER; note = 2'-O-methyluridine-3'-phosphate
  modified_base 20: mod_base = OTHER; note = 2'-O-methyladenosine-3'-phosphate
  modified_base 21: mod_base = OTHER; note = 2'-O-methylguanosine-3'-phosphorothioate
  modified_base 22: mod_base = OTHER; note = 2'-O-methylcytidine-3'-phosphorothioate
  modified_base 23: mod_base = OTHER; note = 2'-O-methyluridine
atgatagaggaagaaaaatagct

SEQ ID NO: 3535 - RNA, 23 nt, synthetic construct
  source 1..23: mol_type = other RNA
  modified_base 1: mod_base = OTHER; note = 2'-O-methyladenosine-3'-phosphorothioate
  modified_base 2: mod_base = OTHER; note = 2'-deoxy-2'-fluoroadenosine-3'-phosphorothioate
  modified_base 3: mod_base = OTHER; note = 2'-O-methylguanosine-3'-phosphate
  modified_base 4: mod_base = OTHER; note = 2'-O-methyladenosine-3'-phosphate
  modified_base 5: mod_base = OTHER; note = 2'-O-methyluridine-3'-phosphate
  modified_base 6: mod_base = OTHER; note = 2'-deoxy-2'-fluoroguanosine-3'-phosphate
  modified_base 7: mod_base = OTHER; note = 2'-O-methyladenosine-3'-phosphate
  modified_base 8: mod_base = OTHER; note = 2'-deoxy-2'-fluoroguanosine-3'-phosphate
  modified_base 9: mod_base = OTHER; note = 2'-deoxy-2'-fluoroadenosine-3'-phosphate
  modified_base 10: mod_base = OTHER; note = 2'-O-methylcytidine-3'-phosphate
  modified_base 11: mod_base = OTHER; note = 2'-O-methyladenosine-3'-phosphate
  modified_base 12: mod_base = OTHER; note = 2'-O-methylguanosine-3'-phosphate
  modified_base 13: mod_base = OTHER; note = 2'-O-methyladenosine-3'-phosphate
  modified_base 14: mod_base = OTHER; note = 2'-deoxy-2'-fluoroadenosine-3'-phosphate
  modified_base 15: mod_base = OTHER; note = 2'-O-methyladenosine-3'-phosphate
  modified_base 16: mod_base = OTHER; note = 2'-deoxy-2'-fluorouridine-3'-phosphate
  modified_base 17: mod_base = OTHER; note = 2'-O-methyluridine-3'-phosphate
  modified_base 18: mod_base = OTHER; note = 2'-O-methylguanosine-3'-phosphate
  modified_base 19: mod_base = OTHER; note = 2'-O-methyladenosine-3'-phosphate
  modified_base 20: mod_base = OTHER; note = 2'-O-methyluridine-3'-phosphate
  modified_base 21: mod_base = OTHER; note = 2'-O-methyladenosine-3'-phosphorothioate
  modified_base 22: mod_base = OTHER; note = 2'-O-methyladenosine-3'-phosphorothioate
  modified_base 23: mod_base = OTHER; note = 2'-O-methyladenosine
aagatgagacagaaattgataaa

SEQ ID NO: 3536 - RNA, 23 nt, synthetic construct
  source 1..23: mol_type = other RNA
  modified_base 1: mod_base = OTHER; note = 2'-O-methyladenosine-3'-phosphorothioate
  modified_base 2: mod_base = OTHER; note = 2'-deoxy-2'-fluoroadenosine-3'-phosphorothioate
  modified_base 3: mod_base = OTHER; note = 2'-O-methylguanosine-3'-phosphate
  modified_base 4: mod_base = OTHER; note = 2'-O-methyladenosine-3'-phosphate
  modified_base 5: mod_base = OTHER; note = 2'-O-methyladenosine-3'-phosphate
  modified_base 6: mod_base = OTHER; note = 2'-deoxy-2'-fluorouridine-3'-phosphate
  modified_base 7: mod_base = OTHER; note = 2'-O-methylguanosine-3'-phosphate
  modified_base 8: mod_base = OTHER; note = 2'-deoxy-2'-fluoroadenosine-3'-phosphate
  modified_base 9: mod_base = OTHER; note = 2'-deoxy-2'-fluoroadenosine-3'-phosphate
  modified_base 10: mod_base = OTHER; note = 2'-O-methylguanosine-3'-phosphate
  modified_base 11: mod_base = OTHER; note = 2'-O-methyladenosine-3'-phosphate
  modified_base 12: mod_base = OTHER; note = 2'-O-methylcytidine-3'-phosphate
  modified_base 13: mod_base = OTHER; note = 2'-O-methyluridine-3'-phosphate
  modified_base 14: mod_base = OTHER; note = 2'-deoxy-2'-fluorouridine-3'-phosphate
  modified_base 15: mod_base = OTHER; note = 2'-O-methyluridine-3'-phosphate
  modified_base 16: mod_base = OTHER; note = 2'-deoxy-2'-fluorouridine-3'-phosphate
  modified_base 17: mod_base = OTHER; note = 2'-O-methyladenosine-3'-phosphate
  modified_base 18: mod_base = OTHER; note = 2'-O-methyluridine-3'-phosphate
  modified_base 19: mod_base = OTHER; note = 2'-O-methylguanosine-3'-phosphate
  modified_base 20: mod_base = OTHER; note = 2'-O-methyluridine-3'-phosphate
  modified_base 21: mod_base = OTHER; note = 2'-O-methyluridine-3'-phosphorothioate
  modified_base 22: mod_base = OTHER; note = 2'-O-methylguanosine-3'-phosphorothioate
  modified_base 23: mod_base = OTHER; note = 2'-O-methyladenosine
aagaatgaagacttttatgttga

SEQ ID NO: 3537 - RNA, 23 nt, synthetic construct
  source 1..23: mol_type = other RNA
  modified_base 1: mod_base = OTHER; note = 2'-O-methyladenosine-3'-phosphorothioate
  modified_base 2: mod_base = OTHER; note = 2'-deoxy-2'-fluoroguanosine-3'-phosphorothioate
  modified_base 3: mod_base = OTHER; note = 2'-O-methyluridine-3'-phosphate
  modified_base 4: mod_base = OTHER; note = 2'-O-methyluridine-3'-phosphate
  modified_base 5: mod_base = OTHER; note = 2'-O-methyladenosine-3'-phosphate
  modified_base 6: mod_base = OTHER; note = 2'-deoxy-2'-fluorouridine-3'-phosphate
  modified_base 7: mod_base = OTHER; note = 2'-O-methyluridine-3'-phosphate
  modified_base 8: mod_base = OTHER; note = 2'-deoxy-2'-fluorouridine-3'-phosphate
  modified_base 9: mod_base = OTHER; note = 2'-deoxy-2'-fluorocytidine-3'-phosphate
  modified_base 10: mod_base = OTHER; note = 2'-O-methyluridine-3'-phosphate
  modified_base 11: mod_base = OTHER; note = 2'-O-methylguanosine-3'-phosphate
  modified_base 12: mod_base = OTHER; note = 2'-O-methyluridine-3'-phosphate
  modified_base 13: mod_base = OTHER; note = 2'-O-methyluridine-3'-phosphate
  modified_base 14: mod_base = OTHER; note = 2'-deoxy-2'-fluorouridine-3'-phosphate
  modified_base 15: mod_base = OTHER; note = 2'-O-methyladenosine-3'-phosphate
  modified_base 16: mod_base = OTHER; note = 2'-deoxy-2'-fluorocytidine-3'-phosphate
  modified_base 17: mod_base = OTHER; note = 2'-O-methyluridine-3'-phosphate
  modified_base 18: mod_base = OTHER; note = 2'-O-methylguanosine-3'-phosphate
  modified_base 19: mod_base = OTHER; note = 2'-O-methyladenosine-3'-phosphate
  modified_base 20: mod_base = OTHER; note = 2'-O-methylguanosine-3'-phosphate
  modified_base 21: mod_base = OTHER; note = 2'-O-methyladenosine-3'-phosphorothioate
  modified_base 22: mod_base = OTHER; note = 2'-O-methyladenosine-3'-phosphorothioate
  modified_base 23: mod_base = OTHER; note = 2'-O-methyladenosine
agttatttctgtttactgagaaa

SEQ ID NO: 3538 - RNA, 23 nt, synthetic construct
  source 1..23: mol_type = other RNA
  modified_base 1: mod_base = OTHER; note = 2'-O-methyladenosine-3'-phosphorothioate
  modified_base 2: mod_base = OTHER; note = 2'-deoxy-2'-fluoroadenosine-3'-phosphorothioate
  modified_base 3: mod_base = OTHER; note = 2'-O-methylguanosine-3'-phosphate
  modified_base 4: mod_base = OTHER; note = 2'-O-methylcytidine-3'-phosphate
  modified_base 5: mod_base = OTHER; note = 2'-O-methyladenosine-3'-phosphate
  modified_base 6: mod_base = OTHER; note = 2'-deoxy-2'-fluoroadenosine-3'-phosphate
  modified_base 7: mod_base = OTHER; note = 2'-O-methylguanosine-3'-phosphate
  modified_base 8: mod_base = OTHER; note = 2'-deoxy-2'-fluoroadenosine-3'-phosphate
  modified_base 9: mod_base = OTHER; note = 2'-deoxy-2'-fluoroguanosine-3'-phosphate
  modified_base 10: mod_base = OTHER; note = 2'-O-methyladenosine-3'-phosphate
  modified_base 11: mod_base = OTHER; note = 2'-O-methylcytidine-3'-phosphate
  modified_base 12: mod_base = OTHER; note = 2'-O-methyladenosine-3'-phosphate
  modified_base 13: mod_base = OTHER; note = 2'-O-methyluridine-3'-phosphate
  modified_base 14: mod_base = OTHER; note = 2'-deoxy-2'-fluoroadenosine-3'-phosphate
  modified_base 15: mod_base = OTHER; note = 2'-O-methyluridine-3'-phosphate
  modified_base 16: mod_base = OTHER; note = 2'-deoxy-2'-fluorouridine-3'-phosphate
  modified_base 17: mod_base = OTHER; note = 2'-O-methyladenosine-3'-phosphate
  modified_base 18: mod_base = OTHER; note = 2'-O-methyladenosine-3'-phosphate
  modified_base 19: mod_base = OTHER; note = 2'-O-methylguanosine-3'-phosphate
  modified_base 20: mod_base = OTHER; note = 2'-O-methyladenosine-3'-phosphate
  modified_base 21: mod_base = OTHER; note = 2'-O-methyluridine-3'-phosphorothioate
  modified_base 22: mod_base = OTHER; note = 2'-O-methylguanosine-3'-phosphorothioate
  modified_base 23: mod_base = OTHER; note = 2'-O-methyladenosine
aagcaagagacatattaagatga

SEQ ID NO: 3539 - RNA, 23 nt, synthetic construct
  source 1..23: mol_type = other RNA
  modified_base 1: mod_base = OTHER; note = 2'-O-methyladenosine-3'-phosphorothioate
  modified_base 2: mod_base = OTHER; note = 2'-deoxy-2'-fluoroadenosine-3'-phosphorothioate
  modified_base 3: mod_base = OTHER; note = 2'-O-methyluridine-3'-phosphate
  modified_base 4: mod_base = OTHER; note = 2'-O-methyluridine-3'-phosphate
  modified_base 5: mod_base = OTHER; note = 2'-O-methyluridine-3'-phosphate
  modified_base 6: mod_base = OTHER; note = 2'-deoxy-2'-fluoroguanosine-3'-phosphate
  modified_base 7: mod_base = OTHER; note = 2'-O-methylguanosine-3'-phosphate
  modified_base 8: mod_base = OTHER; note = 2'-deoxy-2'-fluoroguanosine-3'-phosphate
  modified_base 9: mod_base = OTHER; note = 2'-deoxy-2'-fluoroadenosine-3'-phosphate
  modified_base 10: mod_base = OTHER; note = 2'-O-methyluridine-3'-phosphate
  modified_base 11: mod_base = OTHER; note = 2'-O-methyladenosine-3'-phosphate
  modified_base 12: mod_base = OTHER; note = 2'-O-methylguanosine-3'-phosphate
  modified_base 13: mod_base = OTHER; note = 2'-O-methyladenosine-3'-phosphate
  modified_base 14: mod_base = OTHER; note = 2'-deoxy-2'-fluoroadenosine-3'-phosphate
  modified_base 15: mod_base = OTHER; note = 2'-O-methyladenosine-3'-phosphate
  modified_base 16: mod_base = OTHER; note = 2'-deoxy-2'-fluorouridine-3'-phosphate
  modified_base 17: mod_base = OTHER; note = 2'-O-methyluridine-3'-phosphate
  modified_base 18: mod_base = OTHER; note = 2'-O-methyluridine-3'-phosphate
  modified_base 19: mod_base = OTHER; note = 2'-O-methylguanosine-3'-phosphate
  modified_base 20: mod_base = OTHER; note = 2'-O-methyluridine-3'-phosphate
  modified_base 21: mod_base = OTHER; note = 2'-O-methylguanosine-3'-phosphorothioate
  modified_base 22: mod_base = OTHER; note = 2'-O-methyladenosine-3'-phosphorothioate
  modified_base 23: mod_base = OTHER; note = 2'-O-methylguanosine
aatttgggatagaaatttgtgag

SEQ ID NO: 3540 - RNA, 23 nt, synthetic construct
  source 1..23: mol_type = other RNA
  modified_base 1: mod_base = OTHER; note = 2'-O-methyladenosine-3'-phosphorothioate
  modified_base 2: mod_base = OTHER; note = 2'-deoxy-2'-fluoroguanosine-3'-phosphorothioate
  modified_base 3: mod_base = OTHER; note = 2'-O-methyluridine-3'-phosphate
  modified_base 4: mod_base = OTHER; note = 2'-O-methyluridine-3'-phosphate
  modified_base 5: mod_base = OTHER; note = 2'-O-methyluridine-3'-phosphate
  modified_base 6: mod_base = OTHER; note = 2'-deoxy-2'-fluorouridine-3'-phosphate
  modified_base 7: mod_base = OTHER; note = 2'-O-methyladenosine-3'-phosphate
  modified_base 8: mod_base = OTHER; note = 2'-deoxy-2'-fluorouridine-3'-phosphate
  modified_base 9: mod_base = OTHER; note = 2'-deoxy-2'-fluoroguanosine-3'-phosphate
  modified_base 10: mod_base = OTHER; note = 2'-O-methyladenosine-3'-phosphate
  modified_base 11: mod_base = OTHER; note = 2'-O-methylguanosine-3'-phosphate
  modified_base 12: mod_base = OTHER; note = 2'-O-methyluridine-3'-phosphate
  modified_base 13: mod_base = OTHER; note = 2'-O-methyluridine-3'-phosphate
  modified_base 14: mod_base = OTHER; note = 2'-deoxy-2'-fluoroadenosine-3'-phosphate
  modified_base 15: mod_base = OTHER; note = 2'-O-methyluridine-3'-phosphate
  modified_base 16: mod_base = OTHER; note = 2'-deoxy-2'-fluorouridine-3'-phosphate
  modified_base 17: mod_base = OTHER; note = 2'-O-methylguanosine-3'-phosphate
  modified_base 18: mod_base = OTHER; note = 2'-O-methylguanosine-3'-phosphate
  modified_base 19: mod_base = OTHER; note = 2'-O-methyladenosine-3'-phosphate
  modified_base 20: mod_base = OTHER; note = 2'-O-methyladenosine-3'-phosphate
  modified_base 21: mod_base = OTHER; note = 2'-O-methylguanosine-3'-phosphorothioate
  modified_base 22: mod_base = OTHER; note = 2'-O-methyladenosine-3'-phosphorothioate
  modified_base 23: mod_base = OTHER; note = 2'-O-methyluridine
agttttatgagttattggaagat

SEQ ID NO: 3541 - RNA, 23 nt, synthetic construct
  source 1..23: mol_type = other RNA
  modified_base 1: mod_base = OTHER; note = 2'-O-methyladenosine-3'-phosphorothioate
  modified_base 2: mod_base = OTHER; note = 2'-deoxy-2'-fluorouridine-3'-phosphorothioate
  modified_base 3: mod_base = OTHER; note = 2'-O-methyluridine-3'-phosphate
  modified_base 4: mod_base = OTHER; note = 2'-O-methyladenosine-3'-phosphate
  modified_base 5: mod_base = OTHER; note = 2'-O-methylguanosine-3'-phosphate
  modified_base 6: mod_base = OTHER; note = 2'-deoxy-2'-fluoroadenosine-3'-phosphate
  modified_base 7: mod_base = OTHER; note = 2'-O-methyladenosine-3'-phosphate
  modified_base 8: mod_base = OTHER; note = 2'-deoxy-2'-fluorouridine-3'-phosphate
  modified_base 9: mod_base = OTHER; note = 2'-deoxy-2'-fluoroguanosine-3'-phosphate
  modified_base 10: mod_base = OTHER; note = 2'-O-methyluridine-3'-phosphate
  modified_base 11: mod_base = OTHER; note = 2'-O-methyladenosine-3'-phosphate
  modified_base 12: mod_base = OTHER; note = 2'-O-methylguanosine-3'-phosphate
  modified_base 13: mod_base = OTHER; note = 2'-O-methyladenosine-3'-phosphate
  modified_base 14: mod_base = OTHER; note = 2'-deoxy-2'-fluorouridine-3'-phosphate
  modified_base 15: mod_base = OTHER; note = 2'-O-methyluridine-3'-phosphate
  modified_base 16: mod_base = OTHER; note = 2'-deoxy-2'-fluorocytidine-3'-phosphate
  modified_base 17: mod_base = OTHER; note = 2'-O-methyluridine-3'-phosphate
  modified_base 18: mod_base = OTHER; note = 2'-O-methylguanosine-3'-phosphate
  modified_base 19: mod_base = OTHER; note = 2'-O-methyladenosine-3'-phosphate
  modified_base 20: mod_base = OTHER; note = 2'-O-methyluridine-3'-phosphate
  modified_base 21: mod_base = OTHER; note = 2'-O-methyladenosine-3'-phosphorothioate
  modified_base 22: mod_base = OTHER; note = 2'-O-methylguanosine-3'-phosphorothioate
  modified_base 23: mod_base = OTHER; note = 2'-O-methyluridine
attagaatgtagattctgatagt

SEQ ID NO: 3542 - RNA, 23 nt, synthetic construct
  source 1..23: mol_type = other RNA
  modified_base 1: mod_base = OTHER; note = 2'-O-methyladenosine-3'-phosphorothioate
  modified_base 2: mod_base = OTHER; note = 2'-deoxy-2'-fluoroadenosine-3'-phosphorothioate
  modified_base 3: mod_base = OTHER; note = 2'-O-methyluridine-3'-phosphate
  modified_base 4: mod_base = OTHER; note = 2'-O-methyluridine-3'-phosphate
  modified_base 5: mod_base = OTHER; note = 2'-O-methyluridine-3'-phosphate
  modified_base 6: mod_base = OTHER; note = 2'-deoxy-2'-fluoroguanosine-3'-phosphate
  modified_base 7: mod_base = OTHER; note = 2'-O-methylguanosine-3'-phosphate
  modified_base 8: mod_base = OTHER; note = 2'-deoxy-2'-fluoroadenosine-3'-phosphate
  modified_base 9: mod_base = OTHER; note = 2'-deoxy-2'-fluoroguanosine-3'-phosphate
  modified_base 10: mod_base = OTHER; note = 2'-O-methyladenosine-3'-phosphate
  modified_base 11: mod_base = OTHER; note = 2'-O-methylguanosine-3'-phosphate
  modified_base 12: mod_base = OTHER; note = 2'-O-methyladenosine-3'-phosphate
  modified_base 13: mod_base = OTHER; note = 2'-O-methylguanosine-3'-phosphate
  modified_base 14: mod_base = OTHER; note = 2'-deoxy-2'-fluoroadenosine-3'-phosphate
  modified_base 15: mod_base = OTHER; note = 2'-O-methyladenosine-3'-phosphate
  modified_base 16: mod_base = OTHER; note = 2'-deoxy-2'-fluorouridine-3'-phosphate
  modified_base 17: mod_base = OTHER; note = 2'-O-methyluridine-3'-phosphate
  modified_base 18: mod_base = OTHER; note = 2'-O-methylcytidine-3'-phosphate
  modified_base 19: mod_base = OTHER; note = 2'-O-methyladenosine-3'-phosphate
  modified_base 20: mod_base = OTHER; note = 2'-O-methyluridine-3'-phosphate
  modified_base 21: mod_base = OTHER; note = 2'-O-methyladenosine-3'-phosphorothioate
  modified_base 22: mod_base = OTHER; note = 2'-O-methyluridine-3'-phosphorothioate
  modified_base 23: mod_base = OTHER; note = 2'-O-methyladenosine
aatttggagagagaattcatata

SEQ ID NO: 3543 - RNA, 23 nt, synthetic construct
  source 1..23: mol_type = other RNA
  modified_base 1: mod_base = OTHER; note = 2'-O-methyladenosine-3'-phosphorothioate
  modified_base 2: mod_base = OTHER; note = 2'-deoxy-2'-fluoroadenosine-3'-phosphorothioate
  modified_base 3: mod_base = OTHER; note = 2'-O-methyladenosine-3'-phosphate
  modified_base 4: mod_base = OTHER; note = 2'-O-methylguanosine-3'-phosphate
  modified_base 5: mod_base = OTHER; note = 2'-O-methyladenosine-3'-phosphate
  modified_base 6: mod_base = OTHER; note = 2'-deoxy-2'-fluorouridine-3'-phosphate
  modified_base 7: mod_base = OTHER; note = 2'-O-methyluridine-3'-phosphate
  modified_base 8: mod_base = OTHER; note = 2'-deoxy-2'-fluoroadenosine-3'-phosphate
  modified_base 9: mod_base = OTHER; note = 2'-deoxy-2'-fluoroguanosine-3'-phosphate
  modified_base 10: mod_base = OTHER; note = 2'-O-methyladenosine-3'-phosphate
  modified_base 11: mod_base = OTHER; note = 2'-O-methyluridine-3'-phosphate
  modified_base 12: mod_base = OTHER; note = 2'-O-methyluridine-3'-phosphate
  modified_base 13: mod_base = OTHER; note = 2'-O-methylcytidine-3'-phosphate
  modified_base 14: mod_base = OTHER; note = 2'-deoxy-2'-fluorouridine-3'-phosphate
  modified_base 15: mod_base = OTHER; note = 2'-O-methylguanosine-3'-phosphate
  modified_base 16: mod_base = OTHER; note = 2'-deoxy-2'-fluorouridine-3'-phosphate
  modified_base 17: mod_base = OTHER; note = 2'-O-methyluridine-3'-phosphate
  modified_base 18: mod_base = OTHER; note = 2'-O-methylguanosine-3'-phosphate
  modified_base 19: mod_base = OTHER; note = 2'-O-methyluridine-3'-phosphate
  modified_base 20: mod_base = OTHER; note = 2'-O-methyluridine-3'-phosphate
  modified_base 21: mod_base = OTHER; note = 2'-O-methyladenosine-3'-phosphorothioate
  modified_base 22: mod_base = OTHER; note = 2'-O-methylguanosine-3'-phosphorothioate
  modified_base 23: mod_base = OTHER; note = 2'-O-methyluridine
aaagattagattctgttgttagt

SEQ ID NO: 3544 - RNA, 23 nt, synthetic construct
  source 1..23: mol_type = other RNA
  modified_base 1: mod_base = OTHER; note = 2'-O-methyladenosine-3'-phosphorothioate
  modified_base 2: mod_base = OTHER; note = 2'-deoxy-2'-fluoroadenosine-3'-phosphorothioate
  modified_base 3: mod_base = OTHER; note = 2'-O-methyluridine-3'-phosphate
  modified_base 4: mod_base = OTHER; note = 2'-O-methyladenosine-3'-phosphate
  modified_base 5: mod_base = OTHER; note = 2'-O-methyladenosine-3'-phosphate
  modified_base 6: mod_base = OTHER; note = 2'-deoxy-2'-fluoroguanosine-3'-phosphate
  modified_base 7: mod_base = OTHER; note = 2'-O-methyladenosine-3'-phosphate
  modified_base 8: mod_base = OTHER; note = 2'-deoxy-2'-fluorouridine-3'-phosphate
  modified_base 9: mod_base = OTHER; note = 2'-deoxy-2'-fluoroadenosine-3'-phosphate
  modified_base 10: mod_base = OTHER; note = 2'-O-methyladenosine-3'-phosphate
  modified_base 11: mod_base = OTHER; note = 2'-O-methylcytidine-3'-phosphate
  modified_base 12: mod_base = OTHER; note = 2'-O-methyladenosine-3'-phosphate
  modified_base 13: mod_base = OTHER; note = 2'-O-methylguanosine-3'-phosphate
  modified_base 14: mod_base = OTHER; note = 2'-deoxy-2'-fluoroadenosine-3'-phosphate
  modified_base 15: mod_base = OTHER; note = 2'-O-methyluridine-3'-phosphate
  modified_base 16: mod_base = OTHER; note = 2'-deoxy-2'-fluoroguanosine-3'-phosphate
  modified_base 17: mod_base = OTHER; note = 2'-O-methyluridine-3'-phosphate
  modified_base 18: mod_base = OTHER; note = 2'-O-methylguanosine-3'-phosphate
  modified_base 19: mod_base = OTHER; note = 2'-O-methyladenosine-3'-phosphate
  modified_base 20: mod_base = OTHER; note = 2'-O-methylguanosine-3'-phosphate
  modified_base 21: mod_base = OTHER; note = 2'-O-methylguanosine-3'-phosphorothioate
  modified_base 22: mod_base = OTHER; note = 2'-O-methyladenosine-3'-phosphorothioate
  modified_base 23: mod_base = OTHER; note = 2'-O-methylguanosine
aataagataacagatgtgaggag

SEQ ID NO: 3545 - RNA, 23 nt, synthetic construct
  source 1..23: mol_type = other RNA
  modified_base 1: mod_base = OTHER; note = 2'-O-methyladenosine-3'-phosphorothioate
  modified_base 2: mod_base = OTHER; note = 2'-deoxy-2'-fluoroguanosine-3'-phosphorothioate
  modified_base 3: mod_base = OTHER; note = 2'-O-methyladenosine-3'-phosphate
  modified_base 4: mod_base = OTHER; note = 2'-O-methyladenosine-3'-phosphate
  modified_base 5: mod_base = OTHER; note = 2'-O-methylguanosine-3'-phosphate
  modified_base 6: mod_base = OTHER; note = 2'-deoxy-2'-fluorouridine-3'-phosphate
  modified_base 7: mod_base = OTHER; note = 2'-O-methylcytidine-3'-phosphate
  modified_base 8: mod_base = OTHER; note = 2'-deoxy-2'-fluorouridine-3'-phosphate
  modified_base 9: mod_base = OTHER; note = 2'-deoxy-2'-fluoroguanosine-3'-phosphate
  modified_base 10: mod_base = OTHER; note = 2'-O-methyladenosine-3'-phosphate
  modified_base 11: mod_base = OTHER; note = 2'-O-methyladenosine-3'-phosphate
  modified_base 12: mod_base = OTHER; note = 2'-O-methylguanosine-3'-phosphate
  modified_base 13: mod_base = OTHER; note = 2'-O-methyluridine-3'-phosphate
  modified_base 14: mod_base = OTHER; note = 2'-deoxy-2'-fluorouridine-3'-phosphate
  modified_base 15: mod_base = OTHER; note = 2'-O-methyluridine-3'-phosphate
  modified_base 16: mod_base = OTHER; note = 2'-deoxy-2'-fluorouridine-3'-phosphate
  modified_base 17: mod_base = OTHER; note = 2'-O-methyladenosine-3'-phosphate
  modified_base 18: mod_base = OTHER; note = 2'-O-methyladenosine-3'-phosphate
  modified_base 19: mod_base = OTHER; note = 2'-O-methylguanosine-3'-phosphate
  modified_base 20: mod_base = OTHER; note = 2'-O-methyluridine-3'-phosphate
  modified_base 21: mod_base = OTHER; note = 2'-O-methylguanosine-3'-phosphorothioate
  modified_base 22: mod_base = OTHER; note = 2'-O-methylguanosine-3'-phosphorothioate
  modified_base 23: mod_base = OTHER; note = 2'-O-methyluridine
agaagtctgaagttttaagtggt

SEQ ID NO: 3546 - RNA, 23 nt, synthetic construct
  source 1..23: mol_type = other RNA
  modified_base 1: mod_base = OTHER; note = 2'-O-methyladenosine-3'-phosphorothioate
  modified_base 2: mod_base = OTHER; note = 2'-deoxy-2'-fluoroadenosine-3'-phosphorothioate
  modified_base 3: mod_base = OTHER; note = 2'-O-methyluridine-3'-phosphate
  modified_base 4: mod_base = OTHER; note = 2'-O-methylguanosine-3'-phosphate
  modified_base 5: mod_base = OTHER; note = 2'-O-methyluridine-3'-phosphate
  modified_base 6: mod_base = OTHER; note = 2'-deoxy-2'-fluoroguanosine-3'-phosphate
  modified_base 7: mod_base = OTHER; note = 2'-O-methyladenosine-3'-phosphate
  modified_base 8: mod_base = OTHER; note = 2'-deoxy-2'-fluoroadenosine-3'-phosphate
  modified_base 9: mod_base = OTHER; note = 2'-deoxy-2'-fluoroguanosine-3'-phosphate
  modified_base 10: mod_base = OTHER; note = 2'-O-methyladenosine-3'-phosphate
  modified_base 11: mod_base = OTHER; note = 2'-O-methylcytidine-3'-phosphate
  modified_base 12: mod_base = OTHER; note = 2'-O-methyladenosine-3'-phosphate
  modified_base 13: mod_base = OTHER; note = 2'-O-methyladenosine-3'-phosphate
  modified_base 14: mod_base = OTHER; note = 2'-deoxy-2'-fluorouridine-3'-phosphate
  modified_base 15: mod_base = OTHER; note = 2'-O-methylguanosine-3'-phosphate
  modified_base 16: mod_base = OTHER; note = 2'-deoxy-2'-fluoroadenosine-3'-phosphate
  modified_base 17: mod_base = OTHER; note = 2'-O-methylguanosine-3'-phosphate
  modified_base 18: mod_base = OTHER; note = 2'-O-methyladenosine-3'-phosphate
  modified_base 19: mod_base = OTHER; note = 2'-O-methyladenosine-3'-phosphate
  modified_base 20: mod_base = OTHER; note = 2'-O-methyluridine-3'-phosphate
  modified_base 21: mod_base = OTHER; note = 2'-O-methylguanosine-3'-phosphorothioate
  modified_base 22: mod_base = OTHER; note = 2'-O-methyladenosine-3'-phosphorothioate
  modified_base 23: mod_base = OTHER; note = 2'-O-methyladenosine
aatgtgaagacaatgagaatgaa

SEQ ID NO: 3547 - RNA, 23 nt, synthetic construct
  source 1..23: mol_type = other RNA
  modified_base 1: mod_base = OTHER; note = 2'-O-methyladenosine-3'-phosphorothioate
  modified_base 2: mod_base = OTHER; note = 2'-deoxy-2'-fluoroguanosine-3'-phosphorothioate
  modified_base 3: mod_base = OTHER; note = 2'-O-methyladenosine-3'-phosphate
  modified_base 4: mod_base = OTHER; note = 2'-O-methyladenosine-3'-phosphate
  modified_base 5: mod_base = OTHER; note = 2'-O-methylguanosine-3'-phosphate
  modified_base 6: mod_base = OTHER; note = 2'-deoxy-2'-fluoroadenosine-3'-phosphate
  modified_base 7: mod_base = OTHER; note = 2'-O-methyluridine-3'-phosphate
  modified_base 8: mod_base = OTHER; note = 2'-deoxy-2'-fluoroguanosine-3'-phosphate
  modified_base 9: mod_base = OTHER; note = 2'-deoxy-2'-fluorouridine-3'-phosphate
  modified_base 10: mod_base = OTHER; note = 2'-O-methyluridine-3'-phosphate
  modified_base 11: mod_base = OTHER; note = 2'-O-methylcytidine-3'-phosphate
  modified_base 12: mod_base = OTHER; note = 2'-O-methyluridine-3'-phosphate
  modified_base 13: mod_base = OTHER; note = 2'-O-methylguanosine-3'-phosphate
  modified_base 14: mod_base = OTHER; note = 2'-deoxy-2'-fluoroadenosine-3'-phosphate
  modified_base 15: mod_base = OTHER; note = 2'-O-methyladenosine-3'-phosphate
  modified_base 16: mod_base = OTHER; note = 2'-deoxy-2'-fluoroadenosine-3'-phosphate
  modified_base 17: mod_base = OTHER; note = 2'-O-methyluridine-3'-phosphate
  modified_base 18: mod_base = OTHER; note = 2'-O-methylguanosine-3'-phosphate
  modified_base 19: mod_base = OTHER; note = 2'-O-methylguanosine-3'-phosphate
  modified_base 20: mod_base = OTHER; note = 2'-O-methyluridine-3'-phosphate
  modified_base 21: mod_base = OTHER; note = 2'-O-methylcytidine-3'-phosphorothioate
  modified_base 22: mod_base = OTHER; note = 2'-O-methyladenosine-3'-phosphorothioate
  modified_base 23: mod_base = OTHER; note = 2'-O-methylguanosine
agaagatgttctgaaatggtcag

SEQ ID NO: 3548 - RNA, 23 nt, synthetic construct
  source 1..23: mol_type = other RNA
  modified_base 1: mod_base = OTHER; note = 2'-O-methyladenosine-3'-phosphorothioate
  modified_base 2: mod_base = OTHER; note = 2'-deoxy-2'-fluorouridine-3'-phosphorothioate
  modified_base 3: mod_base = OTHER; note = 2'-O-methylguanosine-3'-phosphate
  modified_base 4: mod_base = OTHER; note = 2'-O-methyluridine-3'-phosphate
  modified_base 5: mod_base = OTHER; note = 2'-O-methyluridine-3'-phosphate
  modified_base 6: mod_base = OTHER; note = 2'-deoxy-2'-fluorouridine-3'-phosphate
  modified_base 7: mod_base = OTHER; note = 2'-O-methyladenosine-3'-phosphate
  modified_base 8: mod_base = OTHER; note = 2'-deoxy-2'-fluorouridine-3'-phosphate
  modified_base 9: mod_base = OTHER; note = 2'-deoxy-2'-fluoroguanosine-3'-phosphate
  modified_base 10: mod_base = OTHER; note = 2'-O-methyluridine-3'-phosphate
  modified_base 11: mod_base = OTHER; note = 2'-O-methyluridine-3'-phosphate
  modified_base 12: mod_base = OTHER; note = 2'-O-methyladenosine-3'-phosphate
  modified_base 13: mod_base = OTHER; note = 2'-O-methyluridine-3'-phosphate
  modified_base 14: mod_base = OTHER; note = 2'-deoxy-2'-fluorocytidine-3'-phosphate
  modified_base 15: mod_base = OTHER; note = 2'-O-methyladenosine-3'-phosphate
  modified_base 16: mod_base = OTHER; note = 2'-deoxy-2'-fluoroguanosine-3'-phosphate
  modified_base 17: mod_base = OTHER; note = 2'-O-methyluridine-3'-phosphate
  modified_base 18: mod_base = OTHER; note = 2'-O-methyladenosine-3'-phosphate
  modified_base 19: mod_base = OTHER; note = 2'-O-methyladenosine-3'-phosphate
  modified_base 20: mod_base = OTHER; note = 2'-O-methylguanosine-3'-phosphate
  modified_base 21: mod_base = OTHER; note = 2'-O-methylguanosine-3'-phosphorothioate
  modified_base 22: mod_base = OTHER; note = 2'-O-methyluridine-3'-phosphorothioate
  modified_base 23: mod_base = OTHER; note = 2'-O-methyluridine
atgtttatgttatcagtaaggtt

SEQ ID NO: 3549 - RNA, 23 nt, synthetic construct
  source 1..23: mol_type = other RNA
  modified_base 1: mod_base = OTHER; note = 2'-O-methyladenosine-3'-phosphorothioate
  modified_base 2: mod_base = OTHER; note = 2'-deoxy-2'-fluorouridine-3'-phosphorothioate
  modified_base 3: mod_base = OTHER; note = 2'-O-methyluridine-3'-phosphate
  modified_base 4: mod_base = OTHER; note = 2'-O-methylguanosine-3'-phosphate
  modified_base 5: mod_base = OTHER; note = 2'-O-methyluridine-3'-phosphate
  modified_base 6: mod_base = OTHER; note = 2'-deoxy-2'-fluoroadenosine-3'-phosphate
  modified_base 7: mod_base = OTHER; note = 2'-O-methylguanosine-3'-phosphate
  modified_base 8: mod_base = OTHER; note = 2'-deoxy-2'-fluorocytidine-3'-phosphate
  modified_base 9: mod_base = OTHER; note = 2'-deoxy-2'-fluoroadenosine-3'-phosphate
  modified_base 10: mod_base = OTHER; note = 2'-O-methylguanosine-3'-phosphate
  modified_base 11: mod_base = OTHER; note = 2'-O-methyladenosine-3'-phosphate
  modified_base 12: mod_base = OTHER; note = 2'-O-methyladenosine-3'-phosphate
  modified_base 13: mod_base = OTHER; note = 2'-O-methylcytidine-3'-phosphate
  modified_base 14: mod_base = OTHER; note = 2'-deoxy-2'-fluorouridine-3'-phosphate
  modified_base 15: mod_base = OTHER; note = 2'-O-methyluridine-3'-phosphate
  modified_base 16: mod_base = OTHER; note = 2'-deoxy-2'-fluorocytidine-3'-phosphate
  modified_base 17: mod_base = OTHER; note = 2'-O-methyladenosine-3'-phosphate
  modified_base 18: mod_base = OTHER; note = 2'-O-methylguanosine-3'-phosphate
  modified_base 19: mod_base = OTHER; note = 2'-O-methyladenosine-3'-phosphate
  modified_base 20: mod_base = OTHER; note = 2'-O-methylguanosine-3'-phosphate
  modified_base 21: mod_base = OTHER; note = 2'-O-methyladenosine-3'-phosphorothioate
  modified_base 22: mod_base = OTHER; note = 2'-O-methyladenosine-3'-phosphorothioate
  modified_base 23: mod_base = OTHER; note = 2'-O-methylguanosine
attgtagcagaacttcagagaag

SEQ ID NO: 3550 - RNA, 23 nt, synthetic construct
  source 1..23: mol_type = other RNA
  modified_base 1: mod_base = OTHER; note = 2'-O-methyladenosine-3'-phosphorothioate
  modified_base 2: mod_base = OTHER; note = 2'-deoxy-2'-fluorouridine-3'-phosphorothioate
  modified_base 3: mod_base = OTHER; note = 2'-O-methyluridine-3'-phosphate
  modified_base 4: mod_base = OTHER; note = 2'-O-methylguanosine-3'-phosphate
  modified_base 5: mod_base = OTHER; note = 2'-O-methyladenosine-3'-phosphate
  modified_base 6: mod_base = OTHER; note = 2'-deoxy-2'-fluorouridine-3'-phosphate
  modified_base 7: mod_base = OTHER; note = 2'-O-methyladenosine-3'-phosphate
  modified_base 8: mod_base = OTHER; note = 2'-deoxy-2'-fluoroadenosine-3'-phosphate
  modified_base 9: mod_base = OTHER; note = 2'-deoxy-2'-fluoroadenosine-3'-phosphate
  modified_base 10: mod_base = OTHER; note = 2'-O-methyluridine-3'-phosphate
  modified_base 11: mod_base = OTHER; note = 2'-O-methyladenosine-3'-phosphate
  modified_base 12: mod_base = OTHER; note = 2'-O-methylguanosine-3'-phosphate
  modified_base 13: mod_base = OTHER; note = 2'-O-methyladenosine-3'-phosphate
  modified_base 14: mod_base = OTHER; note = 2'-deoxy-2'-fluorouridine-3'-phosphate
  modified_base 15: mod_base = OTHER; note = 2'-O-methyluridine-3'-phosphate
  modified_base 16: mod_base = OTHER; note = 2'-deoxy-2'-fluorocytidine-3'-phosphate
  modified_base 17: mod_base = OTHER; note = 2'-O-methyluridine-3'-phosphate
  modified_base 18: mod_base = OTHER; note = 2'-O-methylguanosine-3'-phosphate
  modified_base 19: mod_base = OTHER; note = 2'-O-methyluridine-3'-phosphate
  modified_base 20: mod_base = OTHER; note = 2'-O-methyladenosine-3'-phosphate
  modified_base 21: mod_base = OTHER; note = 2'-O-methylguanosine-3'-phosphorothioate
  modified_base 22: mod_base = OTHER; note = 2'-O-methylcytidine-3'-phosphorothioate
  modified_base 23: mod_base = OTHER; note = 2'-O-methyluridine
attgataaatagattctgtagct

SEQ ID NO: 3551 - RNA, 23 nt, synthetic construct
  source 1..23: mol_type = other RNA
  modified_base 1: mod_base = OTHER; note = 2'-O-methyladenosine-3'-phosphorothioate
  modified_base 2: mod_base = OTHER; note = 2'-deoxy-2'-fluoroadenosine-3'-phosphorothioate
  modified_base 3: mod_base = OTHER; note = 2'-O-methyladenosine-3'-phosphate
  modified_base 4: mod_base = OTHER; note = 2'-O-methyladenosine-3'-phosphate
  modified_base 5: mod_base = OTHER; note = 2'-O-methyladenosine-3'-phosphate
  modified_base 6: mod_base = OTHER; note = 2'-deoxy-2'-fluorouridine-3'-phosphate
  modified_base 7: mod_base = OTHER; note = 2'-O-methylcytidine-3'-phosphate
  modified_base 8: mod_base = OTHER; note = 2'-deoxy-2'-fluoroadenosine-3'-phosphate
  modified_base 9: mod_base = OTHER; note = 2'-deoxy-2'-fluorouridine-3'-phosphate
  modified_base 10: mod_base = OTHER; note = 2'-O-methyluridine-3'-phosphate
  modified_base 11: mod_base = OTHER; note = 2'-O-methylcytidine-3'-phosphate
  modified_base 12: mod_base = OTHER; note = 2'-O-methyluridine-3'-phosphate
  modified_base 13: mod_base = OTHER; note = 2'-O-methylguanosine-3'-phosphate
  modified_base 14: mod_base = OTHER; note = 2'-deoxy-2'-fluoroadenosine-3'-phosphate
  modified_base 15: mod_base = OTHER; note = 2'-O-methyladenosine-3'-phosphate
  modified_base 16: mod_base = OTHER; note = 2'-deoxy-2'-fluoroguanosine-3'-phosphate
  modified_base 17: mod_base = OTHER; note = 2'-O-methyluridine-3'-phosphate
  modified_base 18: mod_base = OTHER; note = 2'-O-methylcytidine-3'-phosphate
  modified_base 19: mod_base = OTHER; note = 2'-O-methyluridine-3'-phosphate
  modified_base 20: mod_base = OTHER; note = 2'-O-methyluridine-3'-phosphate
  modified_base 21: mod_base = OTHER; note = 2'-O-methyladenosine-3'-phosphorothioate
  modified_base 22: mod_base = OTHER; note = 2'-O-methyladenosine-3'-phosphorothioate
  modified_base 23: mod_base = OTHER; note = 2'-O-methylguanosine
aaaaatcattctgaagtcttaag

SEQ ID NO: 3552 - RNA, 23 nt, synthetic construct
  source 1..23: mol_type = other RNA
  modified_base 1: mod_base = OTHER; note = 2'-O-methyladenosine-3'-phosphorothioate
  modified_base 2: mod_base = OTHER; note = 2'-deoxy-2'-fluorouridine-3'-phosphorothioate
  modified_base 3: mod_base = OTHER; note = 2'-O-methylguanosine-3'-phosphate
  modified_base 4: mod_base = OTHER; note = 2'-O-methyladenosine-3'-phosphate
  modified_base 5: mod_base = OTHER; note = 2'-O-methyladenosine-3'-phosphate
  modified_base 6: mod_base = OTHER; note = 2'-deoxy-2'-fluoroguanosine-3'-phosphate
  modified_base 7: mod_base = OTHER; note = 2'-O-methyladenosine-3'-phosphate
  modified_base 8: mod_base = OTHER; note = 2'-deoxy-2'-fluorocytidine-3'-phosphate
  modified_base 9: mod_base = OTHER; note = 2'-deoxy-2'-fluorocytidine-3'-phosphate
  modified_base 10: mod_base = OTHER; note = 2'-O-methyluridine-3'-phosphate
  modified_base 11: mod_base = OTHER; note = 2'-O-methylguanosine-3'-phosphate
  modified_base 12: mod_base = OTHER; note = 2'-O-methyladenosine-3'-phosphate
  modified_base 13: mod_base = OTHER; note = 2'-O-methyladenosine-3'-phosphate
  modified_base 14: mod_base = OTHER; note = 2'-deoxy-2'-fluoroadenosine-3'-phosphate
  modified_base 15: mod_base = OTHER; note = 2'-O-methyladenosine-3'-phosphate
  modified_base 16: mod_base = OTHER; note = 2'-deoxy-2'-fluoroadenosine-3'-phosphate
  modified_base 17: mod_base = OTHER; note = 2'-O-methyluridine-3'-phosphate
  modified_base 18: mod_base = OTHER; note = 2'-O-methyladenosine-3'-phosphate
  modified_base 19: mod_base = OTHER; note = 2'-O-methylcytidine-3'-phosphate
  modified_base 20: mod_base = OTHER; note = 2'-O-methyluridine-3'-phosphate
  modified_base 21: mod_base = OTHER; note = 2'-O-methyluridine-3'-phosphorothioate
  modified_base 22: mod_base = OTHER; note = 2'-O-methyladenosine-3'-phosphorothioate
  modified_base 23: mod_base = OTHER; note = 2'-O-methylguanosine
atgaagacctgaaaaatacttag

SEQ ID NO: 3553 - RNA, 23 nt, synthetic construct
  source 1..23: mol_type = other RNA
  modified_base 1: mod_base = OTHER; note = 2'-O-methyladenosine-3'-phosphorothioate
  modified_base 2: mod_base = OTHER; note = 2'-deoxy-2'-fluoroadenosine-3'-phosphorothioate
  modified_base 3: mod_base = OTHER; note = 2'-O-methyluridine-3'-phosphate
  modified_base 4: mod_base = OTHER; note = 2'-O-methylguanosine-3'-phosphate
  modified_base 5: mod_base = OTHER; note = 2'-O-methyluridine-3'-phosphate
  modified_base 6: mod_base = OTHER; note = 2'-deoxy-2'-fluorouridine-3'-phosphate
  modified_base 7: mod_base = OTHER; note = 2'-O-methylguanosine-3'-phosphate
  modified_base 8: mod_base = OTHER; note = 2'-deoxy-2'-fluoroadenosine-3'-phosphate
  modified_base 9: mod_base = OTHER; note = 2'-deoxy-2'-fluoroguanosine-3'-phosphate
  modified_base 10: mod_base = OTHER; note = 2'-O-methylguanosine-3'-phosphate
  modified_base 11: mod_base = OTHER; note = 2'-O-methyladenosine-3'-phosphate
  modified_base 12: mod_base = OTHER; note = 2'-O-methyladenosine-3'-phosphate
  modified_base 13: mod_base = OTHER; note = 2'-O-methyladenosine-3'-phosphate
  modified_base 14: mod_base = OTHER; note = 2'-deoxy-2'-fluorouridine-3'-phosphate
  modified_base 15: mod_base = OTHER; note = 2'-O-methylcytidine-3'-phosphate
  modified_base 16: mod_base = OTHER; note = 2'-deoxy-2'-fluoroadenosine-3'-phosphate
  modified_base 17: mod_base = OTHER; note = 2'-O-methyladenosine-3'-phosphate
  modified_base 18: mod_base = OTHER; note = 2'-O-methylcytidine-3'-phosphate
  modified_base 19: mod_base = OTHER; note = 2'-O-methyladenosine-3'-phosphate
  modified_base 20: mod_base = OTHER; note = 2'-O-methylguanosine-3'-phosphate
  modified_base 21: mod_base = OTHER; note = 2'-O-methyluridine-3'-phosphorothioate
  modified_base 22: mod_base = OTHER; note = 2'-O-methyluridine-3'-phosphorothioate
  modified_base 23: mod_base = OTHER; note = 2'-O-methylguanosine
aatgttgaggaaatcaacagttg

SEQ ID NO: 3554 - RNA, 23 nt, synthetic construct
  source 1..23: mol_type = other RNA
  modified_base 1: mod_base = OTHER; note = 2'-O-methyladenosine-3'-phosphorothioate
  modified_base 2: mod_base = OTHER; note = 2'-deoxy-2'-fluoroguanosine-3'-phosphorothioate
  modified_base 3: mod_base = OTHER; note = 2'-O-methyluridine-3'-phosphate
  modified_base 4: mod_base = OTHER; note = 2'-O-methyluridine-3'-phosphate
  modified_base 5: mod_base = OTHER; note = 2'-O-methylguanosine-3'-phosphate
  modified_base 6: mod_base = OTHER; note = 2'-deoxy-2'-fluoroguanosine-3'-phosphate
  modified_base 7: mod_base = OTHER; note = 2'-O-methyladenosine-3'-phosphate
  modified_base 8: mod_base = OTHER; note = 2'-deoxy-2'-fluorouridine-3'-phosphate
  modified_base 9: mod_base = OTHER; note = 2'-deoxy-2'-fluorouridine-3'-phosphate
  modified_base 10: mod_base = OTHER; note = 2'-O-methyladenosine-3'-phosphate
  modified_base 11: mod_base = OTHER; note = 2'-O-methyluridine-3'-phosphate
  modified_base 12: mod_base = OTHER; note = 2'-O-methylguanosine-3'-phosphate
  modified_base 13: mod_base = OTHER; note = 2'-O-methylcytidine-3'-phosphate
  modified_base 14: mod_base = OTHER; note = 2'-deoxy-2'-fluoroadenosine-3'-phosphate
  modified_base 15: mod_base = OTHER; note = 2'-O-methylguanosine-3'-phosphate
  modified_base 16: mod_base = OTHER; note = 2'-deoxy-2'-fluorouridine-3'-phosphate
  modified_base 17: mod_base = OTHER; note = 2'-O-methyladenosine-3'-phosphate
  modified_base 18: mod_base = OTHER; note = 2'-O-methyluridine-3'-phosphate
  modified_base 19: mod_base = OTHER; note = 2'-O-methyladenosine-3'-phosphate
  modified_base 20: mod_base = OTHER; note = 2'-O-methylguanosine-3'-phosphate
  modified_base 21: mod_base = OTHER; note = 2'-O-methylguanosine-3'-phosphorothioate
  modified_base 22: mod_base = OTHER; note = 2'-O-methyluridine-3'-phosphorothioate
  modified_base 23: mod_base = OTHER; note = 2'-O-methylguanosine
agttggattatgcagtataggtg

SEQ ID NO: 3555 - RNA, 23 nt, synthetic construct
  source 1..23: mol_type = other RNA
  modified_base 1: mod_base = OTHER; note = 2'-O-methyladenosine-3'-phosphorothioate
  modified_base 2: mod_base = OTHER; note = 2'-deoxy-2'-fluoroguanosine-3'-phosphorothioate
  modified_base 3: mod_base = OTHER; note = 2'-O-methyladenosine-3'-phosphate
  modified_base 4: mod_base = OTHER; note = 2'-O-methyluridine-3'-phosphate
  modified_base 5: mod_base = OTHER; note = 2'-O-methylcytidine-3'-phosphate
  modified_base 6: mod_base = OTHER; note = 2'-deoxy-2'-fluoroadenosine-3'-phosphate
  modified_base 7: mod_base = OTHER; note = 2'-O-methyluridine-3'-phosphate
  modified_base 8: mod_base = OTHER; note = 2'-deoxy-2'-fluoroadenosine-3'-phosphate
  modified_base 9: mod_base = OTHER; note = 2'-deoxy-2'-fluorouridine-3'-phosphate
  modified_base 10: mod_base = OTHER; note = 2'-O-methylguanosine-3'-phosphate
  modified_base 11: mod_base = OTHER; note = 2'-O-methyluridine-3'-phosphate
  modified_base 12: mod_base = OTHER; note = 2'-O-methylcytidine-3'-phosphate
  modified_base 13: mod_base = OTHER; note = 2'-O-methyluridine-3'-phosphate
  modified_base 14: mod_base = OTHER; note = 2'-deoxy-2'-fluorouridine-3'-phosphate
  modified_base 15: mod_base = OTHER; note = 2'-O-methyladenosine-3'-phosphate
  modified_base 16: mod_base = OTHER; note = 2'-deoxy-2'-fluoroguanosine-3'-phosphate
  modified_base 17: mod_base = OTHER; note = 2'-O-methyladenosine-3'-phosphate
  modified_base 18: mod_base = OTHER; note = 2'-O-methyladenosine-3'-phosphate
  modified_base 19: mod_base = OTHER; note = 2'-O-methylcytidine-3'-phosphate
  modified_base 20: mod_base = OTHER; note = 2'-O-methyladenosine-3'-phosphate
  modified_base 21: mod_base = OTHER; note = 2'-O-methylguanosine-3'-phosphorothioate
  modified_base 22: mod_base = OTHER; note = 2'-O-methyladenosine-3'-phosphorothioate
  modified_base 23: mod_base = OTHER; note = 2'-O-methyluridine
agatcatatgtcttagaacagat

SEQ ID NO: 3556 - RNA, 23 nt, synthetic construct
  source 1..23: mol_type = other RNA
  modified_base 1: mod_base = OTHER; note = 2'-O-methyladenosine-3'-phosphorothioate
  modified_base 2: mod_base = OTHER; note = 2'-deoxy-2'-fluoroadenosine-3'-phosphorothioate
  modified_base 3: mod_base = OTHER; note = 2'-O-methylguanosine-3'-phosphate
  modified_base 4: mod_base = OTHER; note = 2'-O-methyladenosine-3'-phosphate
  modified_base 5: mod_base = OTHER; note = 2'-O-methyladenosine-3'-phosphate
  modified_base 6: mod_base = OTHER; note = 2'-deoxy-2'-fluorocytidine-3'-phosphate
  modified_base 7: mod_base = OTHER; note = 2'-O-methyluridine-3'-phosphate
  modified_base 8: mod_base = OTHER; note = 2'-deoxy-2'-fluorouridine-3'-phosphate
  modified_base 9: mod_base = OTHER; note = 2'-deoxy-2'-fluoroadenosine-3'-phosphate
  modified_base 10: mod_base = OTHER; note = 2'-O-methyluridine-3'-phosphate
  modified_base 11: mod_base = OTHER; note = 2'-O-methyluridine-3'-phosphate
  modified_base 12: mod_base = OTHER; note = 2'-O-methylcytidine-3'-phosphate
  modified_base 13: mod_base = OTHER; note = 2'-O-methyluridine-3'-phosphate
  modified_base 14: mod_base = OTHER; note = 2'-deoxy-2'-fluoroadenosine-3'-phosphate
  modified_base 15: mod_base = OTHER; note = 2'-O-methyluridine-3'-phosphate
  modified_base 16: mod_base = OTHER; note = 2'-deoxy-2'-fluoroadenosine-3'-phosphate
  modified_base 17: mod_base = OTHER; note = 2'-O-methylguanosine-3'-phosphate
  modified_base 18: mod_base = OTHER; note = 2'-O-methyluridine-3'-phosphate
  modified_base 19: mod_base = OTHER; note = 2'-O-methyladenosine-3'-phosphate
  modified_base 20: mod_base = OTHER; note = 2'-O-methylguanosine-3'-phosphate
  modified_base 21: mod_base = OTHER; note = 2'-O-methyladenosine-3'-phosphorothioate
  modified_base 22: mod_base = OTHER; note = 2'-O-methyladenosine-3'-phosphorothioate
  modified_base 23: mod_base = OTHER; note = 2'-O-methylcytidine
aagaacttattctatagtagaac

SEQ ID NO: 3557 - RNA, 23 nt, synthetic construct
  source 1..23: mol_type = other RNA
  modified_base 1: mod_base = OTHER; note = 2'-O-methyladenosine-3'-phosphorothioate
  modified_base 2: mod_base = OTHER; note = 2'-deoxy-2'-fluoroadenosine-3'-phosphorothioate
  modified_base 3: mod_base = OTHER; note = 2'-O-methylguanosine-3'-phosphate
  modified_base 4: mod_base = OTHER; note = 2'-O-methyluridine-3'-phosphate
  modified_base 5: mod_base = OTHER; note = 2'-O-methyladenosine-3'-phosphate
  modified_base 6: mod_base = OTHER; note = 2'-deoxy-2'-fluoroguanosine-3'-phosphate
  modified_base 7: mod_base = OTHER; note = 2'-O-methyladenosine-3'-phosphate
  modified_base 8: mod_base = OTHER; note = 2'-deoxy-2'-fluoroadenosine-3'-phosphate
  modified_base 9: mod_base = OTHER; note = 2'-deoxy-2'-fluorocytidine-3'-phosphate
  modified_base 10: mod_base = OTHER; note = 2'-O-methyladenosine-3'-phosphate
  modified_base 11: mod_base = OTHER; note = 2'-O-methyluridine-3'-phosphate
  modified_base 12: mod_base = OTHER; note = 2'-O-methyladenosine-3'-phosphate
  modified_base 13: mod_base = OTHER; note = 2'-O-methyluridine-3'-phosphate
  modified_base 14: mod_base = OTHER; note = 2'-deoxy-2'-fluorouridine-3'-phosphate
  modified_base 15: mod_base = OTHER; note = 2'-O-methyluridine-3'-phosphate
  modified_base 16: mod_base = OTHER; note = 2'-deoxy-2'-fluoroguanosine-3'-phosphate
  modified_base 17: mod_base = OTHER; note = 2'-O-methyladenosine-3'-phosphate
  modified_base 18: mod_base = OTHER; note = 2'-O-methylguanosine-3'-phosphate
  modified_base 19: mod_base = OTHER; note = 2'-O-methylcytidine-3'-phosphate
  modified_base 20: mod_base = OTHER; note = 2'-O-methyladenosine-3'-phosphate
  modified_base 21: mod_base = OTHER; note = 2'-O-methyluridine-3'-phosphorothioate
  modified_base 22: mod_base = OTHER; note = 2'-O-methyluridine-3'-phosphorothioate
  modified_base 23: mod_base = OTHER; note = 2'-O-methyluridine
aagtagaacatatttgagcattt

SEQ ID NO: 3558 - RNA, 23 nt, synthetic construct
  source 1..23: mol_type = other RNA
  modified_base 1: mod_base = OTHER; note = 2'-O-methyladenosine-3'-phosphorothioate
  modified_base 2: mod_base = OTHER; note = 2'-deoxy-2'-fluorouridine-3'-phosphorothioate
  modified_base 3: mod_base = OTHER; note = 2'-O-methyluridine-3'-phosphate
  modified_base 4: mod_base = OTHER; note = 2'-O-methyladenosine-3'-phosphate
  modified_base 5: mod_base = OTHER; note = 2'-O-methylguanosine-3'-phosphate
  modified_base 6: mod_base = OTHER; note = 2'-deoxy-2'-fluorouridine-3'-phosphate
  modified_base 7: mod_base = OTHER; note = 2'-O-methyladenosine-3'-phosphate
  modified_base 8: mod_base = OTHER; note = 2'-deoxy-2'-fluoroadenosine-3'-phosphate
  modified_base 9: mod_base = OTHER; note = 2'-deoxy-2'-fluorocytidine-3'-phosphate
  modified_base 10: mod_base = OTHER; note = 2'-O-methylcytidine-3'-phosphate
  modified_base 11: mod_base = OTHER; note = 2'-O-methyladenosine-3'-phosphate
  modified_base 12: mod_base = OTHER; note = 2'-O-methyluridine-3'-phosphate
  modified_base 13: mod_base = OTHER; note = 2'-O-methylguanosine-3'-phosphate
  modified_base 14: mod_base = OTHER; note = 2'-deoxy-2'-fluorouridine-3'-phosphate
  modified_base 15: mod_base = OTHER; note = 2'-O-methyluridine-3'-phosphate
  modified_base 16: mod_base = OTHER; note = 2'-deoxy-2'-fluorouridine-3'-phosphate
  modified_base 17: mod_base = OTHER; note = 2'-O-methyluridine-3'-phosphate
  modified_base 18: mod_base = OTHER; note = 2'-O-methyladenosine-3'-phosphate
  modified_base 19: mod_base = OTHER; note = 2'-O-methylguanosine-3'-phosphate
  modified_base 20: mod_base = OTHER; note = 2'-O-methyladenosine-3'-phosphate
  modified_base 21: mod_base = OTHER; note = 2'-O-methyladenosine-3'-phosphorothioate
  modified_base 22: mod_base = OTHER; note = 2'-O-methylguanosine-3'-phosphorothioate
  modified_base 23: mod_base = OTHER; note = 2'-O-methyladenosine
attagtaaccatgttttagaaga

SEQ ID NO: 3559 - RNA, 23 nt, synthetic construct
  source 1..23: mol_type = other RNA
  modified_base 1: mod_base = OTHER; note = 2'-O-methyladenosine-3'-phosphorothioate
  modified_base 2: mod_base = OTHER; note = 2'-deoxy-2'-fluoroguanosine-3'-phosphorothioate
  modified_base 3: mod_base = OTHER; note = 2'-O-methyluridine-3'-phosphate
  modified_base 4: mod_base = OTHER; note = 2'-O-methyluridine-3'-phosphate
  modified_base 5: mod_base = OTHER; note = 2'-O-methyluridine-3'-phosphate
  modified_base 6: mod_base = OTHER; note = 2'-deoxy-2'-fluoroguanosine-3'-phosphate
  modified_base 7: mod_base = OTHER; note = 2'-O-methylguanosine-3'-phosphate
  modified_base 8: mod_base = OTHER; note = 2'-deoxy-2'-fluorouridine-3'-phosphate
  modified_base 9: mod_base = OTHER; note = 2'-deoxy-2'-fluoroguanosine-3'-phosphate
  modified_base 10: mod_base = OTHER; note = 2'-O-methyladenosine-3'-phosphate
  modified_base 11: mod_base = OTHER; note = 2'-O-methyladenosine-3'-phosphate
  modified_base 12: mod_base = OTHER; note = 2'-O-methyluridine-3'-phosphate
  modified_base 13: mod_base = OTHER; note = 2'-O-methyladenosine-3'-phosphate
  modified_base 14: mod_base = OTHER; note = 2'-deoxy-2'-fluorouridine-3'-phosphate
  modified_base 15: mod_base = OTHER; note = 2'-O-methyladenosine-3'-phosphate
  modified_base 16: mod_base = OTHER; note = 2'-deoxy-2'-fluorouridine-3'-phosphate
  modified_base 17: mod_base = OTHER; note = 2'-O-methyluridine-3'-phosphate
  modified_base 18: mod_base = OTHER; note = 2'-O-methyluridine-3'-phosphate
  modified_base 19: mod_base = OTHER; note = 2'-O-methyluridine-3'-phosphate
  modified_base 20: mod_base = OTHER; note = 2'-O-methylcytidine-3'-phosphate
  modified_base 21: mod_base = OTHER; note = 2'-O-methylcytidine-3'-phosphorothioate
  modified_base 22: mod_base = OTHER; note = 2'-O-methyladenosine-3'-phosphorothioate
  modified_base 23: mod_base = OTHER; note = 2'-O-methylguanosine
agtttggtgaatatattttccag

SEQ ID NO: 3560 - RNA, 23 nt, synthetic construct
  source 1..23: mol_type = other RNA
  modified_base 1: mod_base = OTHER; note = 2'-O-methyladenosine-3'-phosphorothioate
  modified_base 2: mod_base = OTHER; note = 2'-deoxy-2'-fluoroadenosine-3'-phosphorothioate
  modified_base 3: mod_base = OTHER; note = 2'-O-methyluridine-3'-phosphate
  modified_base 4: mod_base = OTHER; note = 2'-O-methyluridine-3'-phosphate
  modified_base 5: mod_base = OTHER; note = 2'-O-methyladenosine-3'-phosphate
  modified_base 6: mod_base = OTHER; note = 2'-deoxy-2'-fluoroguanosine-3'-phosphate
  modified_base 7: mod_base = OTHER; note = 2'-O-methylguanosine-3'-phosphate
  modified_base 8: mod_base = OTHER; note = 2'-deoxy-2'-fluorouridine-3'-phosphate
  modified_base 9: mod_base = OTHER; note = 2'-deoxy-2'-fluoroadenosine-3'-phosphate
  modified_base 10: mod_base = OTHER; note = 2'-O-methylguanosine-3'-phosphate
  modified_base 11: mod_base = OTHER; note = 2'-O-methyluridine-3'-phosphate
  modified_base 12: mod_base = OTHER; note = 2'-O-methyluridine-3'-phosphate
  modified_base 13: mod_base = OTHER; note = 2'-O-methyladenosine-3'-phosphate
  modified_base 14: mod_base = OTHER; note = 2'-deoxy-2'-fluoroadenosine-3'-phosphate
  modified_base 15: mod_base = OTHER; note = 2'-O-methylguanosine-3'-phosphate
  modified_base 16: mod_base = OTHER; note = 2'-deoxy-2'-fluoroadenosine-3'-phosphate
  modified_base 17: mod_base = OTHER; note = 2'-O-methyluridine-3'-phosphate
  modified_base 18: mod_base = OTHER; note = 2'-O-methyluridine-3'-phosphate
  modified_base 19: mod_base = OTHER; note = 2'-O-methyluridine-3'-phosphate
  modified_base 20: mod_base = OTHER; note = 2'-O-methyluridine-3'-phosphate
  modified_base 21: mod_base = OTHER; note = 2'-O-methylguanosine-3'-phosphorothioate
  modified_base 22: mod_base = OTHER; note = 2'-O-methylcytidine-3'-phosphorothioate
  modified_base 23: mod_base = OTHER; note = 2'-O-methylguanosine
aattaggtagttaagattttgcg

SEQ ID NO: 3561 - RNA, 23 nt, synthetic construct
  source 1..23: mol_type = other RNA
  modified_base 1: mod_base = OTHER; note = 2'-O-methyladenosine-3'-phosphorothioate
  modified_base 2: mod_base = OTHER; note = 2'-deoxy-2'-fluoroguanosine-3'-phosphorothioate
  modified_base 3: mod_base = OTHER; note = 2'-O-methyluridine-3'-phosphate
  modified_base 4: mod_base = OTHER; note = 2'-O-methylcytidine-3'-phosphate
  modified_base 5: mod_base = OTHER; note = 2'-O-methyladenosine-3'-phosphate
  modified_base 6: mod_base = OTHER; note = 2'-deoxy-2'-fluoroguanosine-3'-phosphate
  modified_base 7: mod_base = OTHER; note = 2'-O-methyladenosine-3'-phosphate
  modified_base 8: mod_base = OTHER; note = 2'-deoxy-2'-fluoroguanosine-3'-phosphate
  modified_base 9: mod_base = OTHER; note = 2'-deoxy-2'-fluoroguanosine-3'-phosphate
  modified_base 10: mod_base = OTHER; note = 2'-O-methyladenosine-3'-phosphate
  modified_base 11: mod_base = OTHER; note = 2'-O-methylguanosine-3'-phosphate
  modified_base 12: mod_base = OTHER; note = 2'-O-methyladenosine-3'-phosphate
  modified_base 13: mod_base = OTHER; note = 2'-O-methyladenosine-3'-phosphate
  modified_base 14: mod_base = OTHER; note = 2'-deoxy-2'-fluoroadenosine-3'-phosphate
  modified_base 15: mod_base = OTHER; note = 2'-O-methyluridine-3'-phosphate
  modified_base 16: mod_base = OTHER; note = 2'-deoxy-2'-fluorouridine-3'-phosphate
  modified_base 17: mod_base = OTHER; note = 2'-O-methylguanosine-3'-phosphate
  modified_base 18: mod_base = OTHER; note = 2'-O-methyladenosine-3'-phosphate
  modified_base 19: mod_base = OTHER; note = 2'-O-methyladenosine-3'-phosphate
  modified_base 20: mod_base = OTHER; note = 2'-O-methyladenosine-3'-phosphate
  modified_base 21: mod_base = OTHER; note = 2'-O-methyladenosine-3'-phosphorothioate
  modified_base 22: mod_base = OTHER; note = 2'-O-methyluridine-3'-phosphorothioate
  modified_base 23: mod_base = OTHER; note = 2'-O-methyluridine
agtcagaggagaaattgaaaatt

SEQ ID NO: 3562 - RNA, 23 nt, synthetic construct
  source 1..23: mol_type = other RNA
  modified_base 1: mod_base = OTHER; note = 2'-O-methyladenosine-3'-phosphorothioate
  modified_base 2: mod_base = OTHER; note = 2'-deoxy-2'-fluorouridine-3'-phosphorothioate
  modified_base 3: mod_base = OTHER; note = 2'-O-methyluridine-3'-phosphate
  modified_base 4: mod_base = OTHER; note = 2'-O-methyladenosine-3'-phosphate
  modified_base 5: mod_base = OTHER; note = 2'-O-methyladenosine-3'-phosphate
  modified_base 6: mod_base = OTHER; note = 2'-deoxy-2'-fluoroguanosine-3'-phosphate
  modified_base 7: mod_base = OTHER; note = 2'-O-methyluridine-3'-phosphate
  modified_base 8: mod_base = OTHER; note = 2'-deoxy-2'-fluoroguanosine-3'-phosphate
  modified_base 9: mod_base = OTHER; note = 2'-deoxy-2'-fluoroguanosine-3'-phosphate
  modified_base 10: mod_base = OTHER; note = 2'-O-methyluridine-3'-phosphate
  modified_base 11: mod_base = OTHER; note = 2'-O-methylcytidine-3'-phosphate
  modified_base 12: mod_base = OTHER; note = 2'-O-methylguanosine-3'-phosphate
  modified_base 13: mod_base = OTHER; note = 2'-O-methyladenosine-3'-phosphate
  modified_base 14: mod_base = OTHER; note = 2'-deoxy-2'-fluoroguanosine-3'-phosphate
  modified_base 15: mod_base = OTHER; note = 2'-O-methyladenosine-3'-phosphate
  modified_base 16: mod_base = OTHER; note = 2'-deoxy-2'-fluoroguanosine-3'-phosphate
  modified_base 17: mod_base = OTHER; note = 2'-O-methyladenosine-3'-phosphate
  modified_base 18: mod_base = OTHER; note = 2'-O-methyladenosine-3'-phosphate
  modified_base 19: mod_base = OTHER; note = 2'-O-methyladenosine-3'-phosphate
  modified_base 20: mod_base = OTHER; note = 2'-O-methylguanosine-3'-phosphate
  modified_base 21: mod_base = OTHER; note = 2'-O-methyladenosine-3'-phosphorothioate
  modified_base 22: mod_base = OTHER; note = 2'-O-methyluridine-3'-phosphorothioate
  modified_base 23: mod_base = OTHER; note = 2'-O-methyladenosine
attaagtggtcgagagaaagata

SEQ ID NO: 3563 - RNA, 23 nt, synthetic construct
  source 1..23: mol_type = other RNA
  modified_base 1: mod_base = OTHER; note = 2'-O-methyladenosine-3'-phosphorothioate
  modified_base 2: mod_base = OTHER; note = 2'-deoxy-2'-fluoroadenosine-3'-phosphorothioate
  modified_base 3: mod_base = OTHER; note = 2'-O-methyladenosine-3'-phosphate
  modified_base 4: mod_base = OTHER; note = 2'-O-methyladenosine-3'-phosphate
  modified_base 5: mod_base = OTHER; note = 2'-O-methylguanosine-3'-phosphate
  modified_base 6: mod_base = OTHER; note = 2'-deoxy-2'-fluoroadenosine-3'-phosphate
  modified_base 7: mod_base = OTHER; note = 2'-O-methyluridine-3'-phosphate
  modified_base 8: mod_base = OTHER; note = 2'-deoxy-2'-fluoroadenosine-3'-phosphate
  modified_base 9: mod_base = OTHER; note = 2'-deoxy-2'-fluorouridine-3'-phosphate
  modified_base 10: mod_base = OTHER; note = 2'-O-methyladenosine-3'-phosphate
  modified_base 11: mod_base = OTHER; note = 2'-O-methylguanosine-3'-phosphate
  modified_base 12: mod_base = OTHER; note = 2'-O-methyluridine-3'-phosphate
  modified_base 13: mod_base = OTHER; note = 2'-O-methyladenosine-3'-phosphate
  modified_base 14: mod_base = OTHER; note = 2'-deoxy-2'-fluorouridine-3'-phosphate
  modified_base 15: mod_base = OTHER; note = 2'-O-methylguanosine-3'-phosphate
  modified_base 16: mod_base = OTHER; note = 2'-deoxy-2'-fluoroguanosine-3'-phosphate
  modified_base 17: mod_base = OTHER; note = 2'-O-methyluridine-3'-phosphate
  modified_base 18: mod_base = OTHER; note = 2'-O-methyladenosine-3'-phosphate
  modified_base 19: mod_base = OTHER; note = 2'-O-methyladenosine-3'-phosphate
  modified_base 20: mod_base = OTHER; note = 2'-O-methylguanosine-3'-phosphate
  modified_base 21: mod_base = OTHER; note = 2'-O-methylcytidine-3'-phosphorothioate
  modified_base 22: mod_base = OTHER; note = 2'-O-methyluridine-3'-phosphorothioate
  modified_base 23: mod_base = OTHER; note = 2'-O-methyladenosine
aaaagatatagtatggtaagcta

SEQ ID NO: 3564 - RNA, 23 nt, synthetic construct
  source 1..23: mol_type = other RNA
  modified_base 1: mod_base = OTHER; note = 2'-O-methyladenosine-3'-phosphorothioate
  modified_base 2: mod_base = OTHER; note = 2'-deoxy-2'-fluorouridine-3'-phosphorothioate
  modified_base 3: mod_base = OTHER; note = 2'-O-methyluridine-3'-phosphate
  modified_base 4: mod_base = OTHER; note = 2'-O-methyladenosine-3'-phosphate
  modified_base 5: mod_base = OTHER; note = 2'-O-methylcytidine-3'-phosphate
  modified_base 6: mod_base = OTHER; note = 2'-deoxy-2'-fluorouridine-3'-phosphate
  modified_base 7: mod_base = OTHER; note = 2'-O-methyluridine-3'-phosphate
  modified_base 8: mod_base = OTHER; note = 2'-deoxy-2'-fluorouridine-3'-phosphate
  modified_base 9: mod_base = OTHER; note = 2'-deoxy-2'-fluoroguanosine-3'-phosphate
  modified_base 10: mod_base = OTHER; note = 2'-O-methyladenosine-3'-phosphate
  modified_base 11: mod_base = OTHER; note = 2'-O-methyluridine-3'-phosphate
  modified_base 12: mod_base = OTHER; note = 2'-O-methyladenosine-3'-phosphate
  modified_base 13: mod_base = OTHER; note = 2'-O-methylcytidine-3'-phosphate
  modified_base 14: mod_base = OTHER; note = 2'-deoxy-2'-fluorouridine-3'-phosphate
  modified_base 15: mod_base = OTHER; note = 2'-O-methyluridine-3'-phosphate
  modified_base 16: mod_base = OTHER; note = 2'-deoxy-2'-fluoroguanosine-3'-phosphate
  modified_base 17: mod_base = OTHER; note = 2'-O-methylguanosine-3'-phosphate
  modified_base 18: mod_base = OTHER; note = 2'-O-methyluridine-3'-phosphate
  modified_base 19: mod_base = OTHER; note = 2'-O-methylguanosine-3'-phosphate
  modified_base 20: mod_base = OTHER; note = 2'-O-methyladenosine-3'-phosphate
  modified_base 21: mod_base = OTHER; note = 2'-O-methyladenosine-3'-phosphorothioate
  modified_base 22: mod_base = OTHER; note = 2'-O-methylguanosine-3'-phosphorothioate
  modified_base 23: mod_base = OTHER; note = 2'-O-methyladenosine
attactttgatacttggtgaaga

SEQ ID NO: 3565 - RNA, 23 nt, synthetic construct
  source 1..23: mol_type = other RNA
  modified_base 1: mod_base = OTHER; note = 2'-O-methyladenosine-3'-phosphorothioate
  modified_base 2: mod_base = OTHER; note = 2'-deoxy-2'-fluorouridine-3'-phosphorothioate
  modified_base 3: mod_base = OTHER; note = 2'-O-methylguanosine-3'-phosphate
  modified_base 4: mod_base = OTHER; note = 2'-O-methyladenosine-3'-phosphate
  modified_base 5: mod_base = OTHER; note = 2'-O-methylcytidine-3'-phosphate
  modified_base 6: mod_base = OTHER; note = 2'-deoxy-2'-fluoroadenosine-3'-phosphate
  modified_base 7: mod_base = OTHER; note = 2'-O-methylguanosine-3'-phosphate
  modified_base 8: mod_base = OTHER; note = 2'-deoxy-2'-fluoroadenosine-3'-phosphate
  modified_base 9: mod_base = OTHER; note = 2'-deoxy-2'-fluorouridine-3'-phosphate
  modified_base 10: mod_base = OTHER; note = 2'-O-methyluridine-3'-phosphate
  modified_base 11: mod_base = OTHER; note = 2'-O-methyluridine-3'-phosphate
  modified_base 12: mod_base = OTHER; note = 2'-O-methyluridine-3'-phosphate
  modified_base 13: mod_base = OTHER; note = 2'-O-methyladenosine-3'-phosphate
  modified_base 14: mod_base = OTHER; note = 2'-deoxy-2'-fluoroadenosine-3'-phosphate
  modified_base 15: mod_base = OTHER; note = 2'-O-methylguanosine-3'-phosphate
  modified_base 16: mod_base = OTHER; note = 2'-deoxy-2'-fluorocytidine-3'-phosphate
  modified_base 17: mod_base = OTHER; note = 2'-O-methyluridine-3'-phosphate
  modified_base 18: mod_base = OTHER; note = 2'-O-methylguanosine-3'-phosphate
  modified_base 19: mod_base = OTHER; note = 2'-O-methyladenosine-3'-phosphate
  modified_base 20: mod_base = OTHER; note = 2'-O-methyluridine-3'-phosphate
  modified_base 21: mod_base = OTHER; note = 2'-O-methylguanosine-3'-phosphorothioate
  modified_base 22: mod_base = OTHER; note = 2'-O-methyluridine-3'-phosphorothioate
  modified_base 23: mod_base = OTHER; note = 2'-O-methylguanosine
atgacagattttaagctgatgtg

SEQ ID NO: 3566 - RNA, 23 nt, synthetic construct
  source 1..23: mol_type = other RNA
  modified_base 1: mod_base = OTHER; note = 2'-O-methyladenosine-3'-phosphorothioate
  modified_base 2: mod_base = OTHER; note = 2'-deoxy-2'-fluorouridine-3'-phosphorothioate
  modified_base 3: mod_base = OTHER; note = 2'-O-methyladenosine-3'-phosphate
  modified_base 4: mod_base = OTHER; note = 2'-O-methyladenosine-3'-phosphate
  modified_base 5: mod_base = OTHER; note = 2'-O-methylguanosine-3'-phosphate
  modified_base 6: mod_base = OTHER; note = 2'-deoxy-2'-fluoroguanosine-3'-phosphate
  modified_base 7: mod_base = OTHER; note = 2'-O-methyluridine-3'-phosphate
  modified_base 8: mod_base = OTHER; note = 2'-deoxy-2'-fluorouridine-3'-phosphate
  modified_base 9: mod_base = OTHER; note = 2'-deoxy-2'-fluorouridine-3'-phosphate
  modified_base 10: mod_base = OTHER; note = 2'-O-methyladenosine-3'-phosphate
  modified_base 11: mod_base = OTHER; note = 2'-O-methyluridine-3'-phosphate
  modified_base 12: mod_base = OTHER; note = 2'-O-methylguanosine-3'-phosphate
  modified_base 13: mod_base = OTHER; note = 2'-O-methylguanosine-3'-phosphate
  modified_base 14: mod_base = OTHER; note = 2'-deoxy-2'-fluorouridine-3'-phosphate
  modified_base 15: mod_base = OTHER; note = 2'-O-methylcytidine-3'-phosphate
  modified_base 16: mod_base = OTHER; note = 2'-deoxy-2'-fluoroadenosine-3'-phosphate
  modified_base 17: mod_base = OTHER; note = 2'-O-methyladenosine-3'-phosphate
  modified_base 18: mod_base = OTHER; note = 2'-O-methyluridine-3'-phosphate
  modified_base 19: mod_base = OTHER; note = 2'-O-methyladenosine-3'-phosphate
  modified_base 20: mod_base = OTHER; note = 2'-O-methylguanosine-3'-phosphate
  modified_base 21: mod_base = OTHER; note = 2'-O-methyluridine-3'-phosphorothioate
  modified_base 22: mod_base = OTHER; note = 2'-O-methyladenosine-3'-phosphorothioate
  modified_base 23: mod_base = OTHER; note = 2'-O-methylguanosine
ataaggtttatggtcaatagtag

SEQ ID NO: 3567 - RNA, 23 nt, synthetic construct
  source 1..23: mol_type = other RNA
  modified_base 1: mod_base = OTHER; note = 2'-O-methyladenosine-3'-phosphorothioate
  modified_base 2: mod_base = OTHER; note = 2'-deoxy-2'-fluoroadenosine-3'-phosphorothioate
  modified_base 3: mod_base = OTHER; note = 2'-O-methylcytidine-3'-phosphate
  modified_base 4: mod_base = OTHER; note = 2'-O-methyluridine-3'-phosphate
  modified_base 5: mod_base = OTHER; note = 2'-O-methyluridine-3'-phosphate
  modified_base 6: mod_base = OTHER; note = 2'-deoxy-2'-fluorouridine-3'-phosphate
  modified_base 7: mod_base = OTHER; note = 2'-O-methyladenosine-3'-phosphate
  modified_base 8: mod_base = OTHER; note = 2'-deoxy-2'-fluorouridine-3'-phosphate
  modified_base 9: mod_base = OTHER; note = 2'-deoxy-2'-fluorouridine-3'-phosphate
  modified_base 10: mod_base = OTHER; note = 2'-O-methylguanosine-3'-phosphate
  modified_base 11: mod_base = OTHER; note = 2'-O-methyluridine-3'-phosphate
  modified_base 12: mod_base = OTHER; note = 2'-O-methyladenosine-3'-phosphate
  modified_base 13: mod_base = OTHER; note = 2'-O-methylguanosine-3'-phosphate
  modified_base 14: mod_base = OTHER; note = 2'-deoxy-2'-fluoroguanosine-3'-phosphate
  modified_base 15: mod_base = OTHER; note = 2'-O-methyladenosine-3'-phosphate
  modified_base 16: mod_base = OTHER; note = 2'-deoxy-2'-fluoroadenosine-3'-phosphate
  modified_base 17: mod_base = OTHER; note = 2'-O-methyluridine-3'-phosphate
  modified_base 18: mod_base = OTHER; note = 2'-O-methyladenosine-3'-phosphate
  modified_base 19: mod_base = OTHER; note = 2'-O-methyluridine-3'-phosphate
  modified_base 20: mod_base = OTHER; note = 2'-O-methyladenosine-3'-phosphate
  modified_base 21: mod_base = OTHER; note = 2'-O-methylguanosine-3'-phosphorothioate
  modified_base 22: mod_base = OTHER; note = 2'-O-methyluridine-3'-phosphorothioate
  modified_base 23: mod_base = OTHER; note = 2'-O-methylguanosine
aactttattgtaggaatatagtg

SEQ ID NO: 3568 - RNA, 23 nt, synthetic construct
  source 1..23: mol_type = other RNA
  modified_base 1: mod_base = OTHER; note = 2'-O-methyladenosine-3'-phosphorothioate
  modified_base 2: mod_base = OTHER; note = 2'-deoxy-2'-fluorouridine-3'-phosphorothioate
  modified_base 3: mod_base = OTHER; note = 2'-O-methyluridine-3'-phosphate
  modified_base 4: mod_base = OTHER; note = 2'-O-methyladenosine-3'-phosphate
  modified_base 5: mod_base = OTHER; note = 2'-O-methylguanosine-3'-phosphate
  modified_base 6: mod_base = OTHER; note = 2'-deoxy-2'-fluoroguanosine-3'-phosphate
  modified_base 7: mod_base = OTHER; note = 2'-O-methyladenosine-3'-phosphate
  modified_base 8: mod_base = OTHER; note = 2'-deoxy-2'-fluoroadenosine-3'-phosphate
  modified_base 9: mod_base = OTHER; note = 2'-deoxy-2'-fluorouridine-3'-phosphate
  modified_base 10: mod_base = OTHER; note = 2'-O-methyluridine-3'-phosphate
  modified_base 11: mod_base = OTHER; note = 2'-O-methyluridine-3'-phosphate
  modified_base 12: mod_base = OTHER; note = 2'-O-methylcytidine-3'-phosphate
  modified_base 13: mod_base = OTHER; note = 2'-O-methylcytidine-3'-phosphate
  modified_base 14: mod_base = OTHER; note = 2'-deoxy-2'-fluoroadenosine-3'-phosphate
  modified_base 15: mod_base = OTHER; note = 2'-O-methylguanosine-3'-phosphate
  modified_base 16: mod_base = OTHER; note = 2'-deoxy-2'-fluorocytidine-3'-phosphate
  modified_base 17: mod_base = OTHER; note = 2'-O-methyluridine-3'-phosphate
  modified_base 18: mod_base = OTHER; note = 2'-O-methyluridine-3'-phosphate
  modified_base 19: mod_base = OTHER; note = 2'-O-methylguanosine-3'-phosphate
  modified_base 20: mod_base = OTHER; note = 2'-O-methyluridine-3'-phosphate
  modified_base 21: mod_base = OTHER; note = 2'-O-methyladenosine-3'-phosphorothioate
  modified_base 22: mod_base = OTHER; note = 2'-O-methylguanosine-3'-phosphorothioate
  modified_base 23: mod_base = OTHER; note = 2'-O-methyladenosine
attaggaatttccagcttgtaga

SEQ ID NO: 3569 - RNA, 23 nt, synthetic construct
  source 1..23: mol_type = other RNA
  modified_base 1: mod_base = OTHER; note = 2'-O-methyladenosine-3'-phosphorothioate
  modified_base 2: mod_base = OTHER; note = 2'-deoxy-2'-fluoroadenosine-3'-phosphorothioate
  modified_base 3: mod_base = OTHER; note = 2'-O-methyluridine-3'-phosphate
  modified_base 4: mod_base = OTHER; note = 2'-O-methylcytidine-3'-phosphate
  modified_base 5: mod_base = OTHER; note = 2'-O-methyluridine-3'-phosphate
  modified_base 6: mod_base = OTHER; note = 2'-deoxy-2'-fluoroadenosine-3'-phosphate
  modified_base 7: mod_base = OTHER; note = 2'-O-methyluridine-3'-phosphate
  modified_base 8: mod_base = OTHER; note = 2'-deoxy-2'-fluoroadenosine-3'-phosphate
  modified_base 9: mod_base = OTHER; note = 2'-deoxy-2'-fluoroadenosine-3'-phosphate
  modified_base 10: mod_base = OTHER; note = 2'-O-methyluridine-3'-phosphate
  modified_base 11: mod_base = OTHER; note = 2'-O-methyluridine-3'-phosphate
  modified_base 12: mod_base = OTHER; note = 2'-O-methyluridine-3'-phosphate
  modified_base 13: mod_base = OTHER; note = 2'-O-methyladenosine-3'-phosphate
  modified_base 14: mod_base = OTHER; note = 2'-deoxy-2'-fluoroguanosine-3'-phosphate
  modified_base 15: mod_base = OTHER; note = 2'-O-methylcytidine-3'-phosphate
  modified_base 16: mod_base = OTHER; note = 2'-deoxy-2'-fluorouridine-3'-phosphate
  modified_base 17: mod_base = OTHER; note = 2'-O-methylcytidine-3'-phosphate
  modified_base 18: mod_base = OTHER; note = 2'-O-methyladenosine-3'-phosphate
  modified_base 19: mod_base = OTHER; note = 2'-O-methylguanosine-3'-phosphate
  modified_base 20: mod_base = OTHER; note = 2'-O-methyluridine-3'-phosphate
  modified_base 21: mod_base = OTHER; note = 2'-O-methyladenosine-3'-phosphorothioate
  modified_base 22: mod_base = OTHER; note = 2'-O-methylguanosine-3'-phosphorothioate
  modified_base 23: mod_base = OTHER; note = 2'-O-methyladenosine
aatctataatttagctcagtaga

SEQ ID NO: 3570 - RNA, 23 nt, synthetic construct
  source 1..23: mol_type = other RNA
  modified_base 1: mod_base = OTHER; note = 2'-O-methyladenosine-3'-phosphorothioate
  modified_base 2: mod_base = OTHER; note = 2'-deoxy-2'-fluoroadenosine-3'-phosphorothioate
  modified_base 3: mod_base = OTHER; note = 2'-O-methyluridine-3'-phosphate
  modified_base 4: mod_base = OTHER; note = 2'-O-methylguanosine-3'-phosphate
  modified_base 5: mod_base = OTHER; note = 2'-O-methyladenosine-3'-phosphate
  modified_base 6: mod_base = OTHER; note = 2'-deoxy-2'-fluoroadenosine-3'-phosphate
  modified_base 7: mod_base = OTHER; note = 2'-O-methylguanosine-3'-phosphate
  modified_base 8: mod_base = OTHER; note = 2'-deoxy-2'-fluorouridine-3'-phosphate
  modified_base 9: mod_base = OTHER; note = 2'-deoxy-2'-fluoroguanosine-3'-phosphate
  modified_base 10: mod_base = OTHER; note = 2'-O-methyladenosine-3'-phosphate
  modified_base 11: mod_base = OTHER; note = 2'-O-methyladenosine-3'-phosphate
  modified_base 12: mod_base = OTHER; note = 2'-O-methylcytidine-3'-phosphate
  modified_base 13: mod_base = OTHER; note = 2'-O-methyluridine-3'-phosphate
  modified_base 14: mod_base = OTHER; note = 2'-deoxy-2'-fluorouridine-3'-phosphate
  modified_base 15: mod_base = OTHER; note = 2'-O-methylguanosine-3'-phosphate
  modified_base 16: mod_base = OTHER; note = 2'-deoxy-2'-fluorouridine-3'-phosphate
  modified_base 17: mod_base = OTHER; note = 2'-O-methyluridine-3'-phosphate
  modified_base 18: mod_base = OTHER; note = 2'-O-methylguanosine-3'-phosphate
  modified_base 19: mod_base = OTHER; note = 2'-O-methylguanosine-3'-phosphate
  modified_base 20: mod_base = OTHER; note = 2'-O-methylcytidine-3'-phosphate
  modified_base 21: mod_base = OTHER; note = 2'-O-methyladenosine-3'-phosphorothioate
  modified_base 22: mod_base = OTHER; note = 2'-O-methylguanosine-3'-phosphorothioate
  modified_base 23: mod_base = OTHER; note = 2'-O-methyluridine
aatgaagtgaacttgttggcagt

SEQ ID NO: 3571 - RNA, 23 nt, synthetic construct
  source 1..23: mol_type = other RNA
  modified_base 1: mod_base = OTHER; note = 2'-O-methyladenosine-3'-phosphorothioate
  modified_base 2: mod_base = OTHER; note = 2'-deoxy-2'-fluoroadenosine-3'-phosphorothioate
  modified_base 3: mod_base = OTHER; note = 2'-O-methyladenosine-3'-phosphate
  modified_base 4: mod_base = OTHER; note = 2'-O-methylcytidine-3'-phosphate
  modified_base 5: mod_base = OTHER; note = 2'-O-methyluridine-3'-phosphate
  modified_base 6: mod_base = OTHER; note = 2'-deoxy-2'-fluoroguanosine-3'-phosphate
  modified_base 7: mod_base = OTHER; note = 2'-O-methyluridine-3'-phosphate
  modified_base 8: mod_base = OTHER; note = 2'-deoxy-2'-fluorocytidine-3'-phosphate
  modified_base 9: mod_base = OTHER; note = 2'-deoxy-2'-fluorouridine-3'-phosphate
  modified_base 10: mod_base = OTHER; note = 2'-O-methyluridine-3'-phosphate
  modified_base 11: mod_base = OTHER; note = 2'-O-methylcytidine-3'-phosphate
  modified_base 12: mod_base = OTHER; note = 2'-O-methyluridine-3'-phosphate
  modified_base 13: mod_base = OTHER; note = 2'-O-methyluridine-3'-phosphate
  modified_base 14: mod_base = OTHER; note = 2'-deoxy-2'-fluorouridine-3'-phosphate
  modified_base 15: mod_base = OTHER; note = 2'-O-methyluridine-3'-phosphate
  modified_base 16: mod_base = OTHER; note = 2'-deoxy-2'-fluoroadenosine-3'-phosphate
  modified_base 17: mod_base = OTHER; note = 2'-O-methylguanosine-3'-phosphate
  modified_base 18: mod_base = OTHER; note = 2'-O-methylguanosine-3'-phosphate
  modified_base 19: mod_base = OTHER; note = 2'-O-methyluridine-3'-phosphate
  modified_base 20: mod_base = OTHER; note = 2'-O-methyladenosine-3'-phosphate
  modified_base 21: mod_base = OTHER; note = 2'-O-methylguanosine-3'-phosphorothioate
  modified_base 22: mod_base = OTHER; note = 2'-O-methylcytidine-3'-phosphorothioate
  modified_base 23: mod_base = OTHER; note = 2'-O-methylcytidine
aaactgtcttcttttaggtagcc

SEQ ID NO: 3572 - RNA, 23 nt, synthetic construct
  source 1..23: mol_type = other RNA
  modified_base 1: mod_base = OTHER; note = 2'-O-methyladenosine-3'-phosphorothioate
  modified_base 2: mod_base = OTHER; note = 2'-deoxy-2'-fluoroguanosine-3'-phosphorothioate
  modified_base 3: mod_base = OTHER; note = 2'-O-methyluridine-3'-phosphate
  modified_base 4: mod_base = OTHER; note = 2'-O-methyluridine-3'-phosphate
  modified_base 5: mod_base = OTHER; note = 2'-O-methyladenosine-3'-phosphate
  modified_base 6: mod_base = OTHER; note = 2'-deoxy-2'-fluorouridine-3'-phosphate
  modified_base 7: mod_base = OTHER; note = 2'-O-methyladenosine-3'-phosphate
  modified_base 8: mod_base = OTHER; note = 2'-deoxy-2'-fluorouridine-3'-phosphate
  modified_base 9: mod_base = OTHER; note = 2'-deoxy-2'-fluorouridine-3'-phosphate
  modified_base 10: mod_base = OTHER; note = 2'-O-methyladenosine-3'-phosphate
  modified_base 11: mod_base = OTHER; note = 2'-O-methylguanosine-3'-phosphate
  modified_base 12: mod_base = OTHER; note = 2'-O-methyluridine-3'-phosphate
  modified_base 13: mod_base = OTHER; note = 2'-O-methyladenosine-3'-phosphate
  modified_base 14: mod_base = OTHER; note = 2'-deoxy-2'-fluoroadenosine-3'-phosphate
  modified_base 15: mod_base = OTHER; note = 2'-O-methylcytidine-3'-phosphate
  modified_base 16: mod_base = OTHER; note = 2'-deoxy-2'-fluoroadenosine-3'-phosphate
  modified_base 17: mod_base = OTHER; note = 2'-O-methyluridine-3'-phosphate
  modified_base 18: mod_base = OTHER; note = 2'-O-methylguanosine-3'-phosphate
  modified_base 19: mod_base = OTHER; note = 2'-O-methyluridine-3'-phosphate
  modified_base 20: mod_base = OTHER; note = 2'-O-methylcytidine-3'-phosphate
  modified_base 21: mod_base = OTHER; note = 2'-O-methyluridine-3'-phosphorothioate
  modified_base 22: mod_base = OTHER; note = 2'-O-methyluridine-3'-phosphorothioate
  modified_base 23: mod_base = OTHER; note = 2'-O-methylcytidine
agttatattagtaacatgtcttc

SEQ ID NO: 3573 - RNA, 23 nt, synthetic construct
  source 1..23: mol_type = other RNA
  modified_base 1: mod_base = OTHER; note = 2'-O-methyladenosine-3'-phosphorothioate
  modified_base 2: mod_base = OTHER; note = 2'-deoxy-2'-fluoroadenosine-3'-phosphorothioate
  modified_base 3: mod_base = OTHER; note = 2'-O-methylguanosine-3'-phosphate
  modified_base 4: mod_base = OTHER; note = 2'-O-methyladenosine-3'-phosphate
  modified_base 5: mod_base = OTHER; note = 2'-O-methylguanosine-3'-phosphate
  modified_base 6: mod_base = OTHER; note = 2'-deoxy-2'-fluorouridine-3'-phosphate
  modified_base 7: mod_base = OTHER; note = 2'-O-methyladenosine-3'-phosphate
  modified_base 8: mod_base = OTHER; note = 2'-deoxy-2'-fluorouridine-3'-phosphate
  modified_base 9: mod_base = OTHER; note = 2'-deoxy-2'-fluorouridine-3'-phosphate
  modified_base 10: mod_base = OTHER; note = 2'-O-methylguanosine-3'-phosphate
  modified_base 11: mod_base = OTHER; note = 2'-O-methyluridine-3'-phosphate
  modified_base 12: mod_base = OTHER; note = 2'-O-methylguanosine-3'-phosphate
  modified_base 13: mod_base = OTHER; note = 2'-O-methyluridine-3'-phosphate
  modified_base 14: mod_base = OTHER; note = 2'-deoxy-2'-fluorouridine-3'-phosphate
  modified_base 15: mod_base = OTHER; note = 2'-O-methylguanosine-3'-phosphate
  modified_base 16: mod_base = OTHER; note = 2'-deoxy-2'-fluorouridine-3'-phosphate
  modified_base 17: mod_base = OTHER; note = 2'-O-methyladenosine-3'-phosphate
  modified_base 18: mod_base = OTHER; note = 2'-O-methyluridine-3'-phosphate
  modified_base 19: mod_base = OTHER; note = 2'-O-methylguanosine-3'-phosphate
  modified_base 20: mod_base = OTHER; note = 2'-O-methyladenosine-3'-phosphate
  modified_base 21: mod_base = OTHER; note = 2'-O-methyladenosine-3'-phosphorothioate
  modified_base 22: mod_base = OTHER; note = 2'-O-methylguanosine-3'-phosphorothioate
  modified_base 23: mod_base = OTHER; note = 2'-O-methyluridine
aagagtattgtgttgtatgaagt

SEQ ID NO: 3574 - RNA, 23 nt, synthetic construct
  source 1..23: mol_type = other RNA
  modified_base 1: mod_base = OTHER; note = 2'-O-methyladenosine-3'-phosphorothioate
  modified_base 2: mod_base = OTHER; note = 2'-deoxy-2'-fluoroadenosine-3'-phosphorothioate
  modified_base 3: mod_base = OTHER; note = 2'-O-methyladenosine-3'-phosphate
  modified_base 4: mod_base = OTHER; note = 2'-O-methyladenosine-3'-phosphate
  modified_base 5: mod_base = OTHER; note = 2'-O-methyladenosine-3'-phosphate
  modified_base 6: mod_base = OTHER; note = 2'-deoxy-2'-fluoroguanosine-3'-phosphate
  modified_base 7: mod_base = OTHER; note = 2'-O-methyladenosine-3'-phosphate
  modified_base 8: mod_base = OTHER; note = 2'-deoxy-2'-fluorouridine-3'-phosphate
  modified_base 9: mod_base = OTHER; note = 2'-deoxy-2'-fluoroguanosine-3'-phosphate
  modified_base 10: mod_base = OTHER; note = 2'-O-methyluridine-3'-phosphate
  modified_base 11: mod_base = OTHER; note = 2'-O-methyluridine-3'-phosphate
  modified_base 12: mod_base = OTHER; note = 2'-O-methyladenosine-3'-phosphate
  modified_base 13: mod_base = OTHER; note = 2'-O-methyladenosine-3'-phosphate
  modified_base 14: mod_base = OTHER; note = 2'-deoxy-2'-fluorouridine-3'-phosphate
  modified_base 15: mod_base = OTHER; note = 2'-O-methylguanosine-3'-phosphate
  modified_base 16: mod_base = OTHER; note = 2'-deoxy-2'-fluorouridine-3'-phosphate
  modified_base 17: mod_base = OTHER; note = 2'-O-methylguanosine-3'-phosphate
  modified_base 18: mod_base = OTHER; note = 2'-O-methylguanosine-3'-phosphate
  modified_base 19: mod_base = OTHER; note = 2'-O-methylcytidine-3'-phosphate
  modified_base 20: mod_base = OTHER; note = 2'-O-methyladenosine-3'-phosphate
  modified_base 21: mod_base = OTHER; note = 2'-O-methyluridine-3'-phosphorothioate
  modified_base 22: mod_base = OTHER; note = 2'-O-methyladenosine-3'-phosphorothioate
  modified_base 23: mod_base = OTHER; note = 2'-O-methylguanosine
aaaaagatgttaatgtggcatag

SEQ ID NO: 3575 - RNA, 23 nt, synthetic construct
  source 1..23: mol_type = other RNA
  modified_base 1: mod_base = OTHER; note = 2'-O-methyladenosine-3'-phosphorothioate
  modified_base 2: mod_base = OTHER; note = 2'-deoxy-2'-fluoroguanosine-3'-phosphorothioate
  modified_base 3: mod_base = OTHER; note = 2'-O-methyluridine-3'-phosphate
  modified_base 4: mod_base = OTHER; note = 2'-O-methyladenosine-3'-phosphate
  modified_base 5: mod_base = OTHER; note = 2'-O-methyladenosine-3'-phosphate
  modified_base 6: mod_base = OTHER; note = 2'-deoxy-2'-fluorouridine-3'-phosphate
  modified_base 7: mod_base = OTHER; note = 2'-O-methyluridine-3'-phosphate
  modified_base 8: mod_base = OTHER; note = 2'-deoxy-2'-fluorouridine-3'-phosphate
  modified_base 9: mod_base = OTHER; note = 2'-deoxy-2'-fluoroadenosine-3'-phosphate
  modified_base 10: mod_base = OTHER; note = 2'-O-methylcytidine-3'-phosphate
  modified_base 11: mod_base = OTHER; note = 2'-O-methyluridine-3'-phosphate
  modified_base 12: mod_base = OTHER; note = 2'-O-methyladenosine-3'-phosphate
  modified_base 13: mod_base = OTHER; note = 2'-O-methyladenosine-3'-phosphate
  modified_base 14: mod_base = OTHER; note = 2'-deoxy-2'-fluoroadenosine-3'-phosphate
  modified_base 15: mod_base = OTHER; note = 2'-O-methyladenosine-3'-phosphate
  modified_base 16: mod_base = OTHER; note = 2'-deoxy-2'-fluorocytidine-3'-phosphate
  modified_base 17: mod_base = OTHER; note = 2'-O-methylcytidine-3'-phosphate
  modified_base 18: mod_base = OTHER; note = 2'-O-methyladenosine-3'-phosphate
  modified_base 19: mod_base = OTHER; note = 2'-O-methylguanosine-3'-phosphate
  modified_base 20: mod_base = OTHER; note = 2'-O-methyluridine-3'-phosphate
  modified_base 21: mod_base = OTHER; note = 2'-O-methylguanosine-3'-phosphorothioate
  modified_base 22: mod_base = OTHER; note = 2'-O-methyladenosine-3'-phosphorothioate
  modified_base 23: mod_base = OTHER; note = 2'-O-methylguanosine
agtaatttactaaaaccagtgag

SEQ ID NO: 3576 - RNA, 23 nt, synthetic construct
  source 1..23: mol_type = other RNA
  modified_base 1: mod_base = OTHER; note = 2'-O-methyladenosine-3'-phosphorothioate
  modified_base 2: mod_base = OTHER; note = 2'-deoxy-2'-fluorouridine-3'-phosphorothioate
  modified_base 3: mod_base = OTHER; note = 2'-O-methylcytidine-3'-phosphate
  modified_base 4: mod_base = OTHER; note = 2'-O-methyluridine-3'-phosphate
  modified_base 5: mod_base = OTHER; note = 2'-O-methyluridine-3'-phosphate
  modified_base 6: mod_base = OTHER; note = 2'-deoxy-2'-fluorocytidine-3'-phosphate
  modified_base 7: mod_base = OTHER; note = 2'-O-methyluridine-3'-phosphate
  modified_base 8: mod_base = OTHER; note = 2'-deoxy-2'-fluorouridine-3'-phosphate
  modified_base 9: mod_base = OTHER; note = 2'-deoxy-2'-fluoroadenosine-3'-phosphate
  modified_base 10: mod_base = OTHER; note = 2'-O-methyluridine-3'-phosphate
  modified_base 11: mod_base = OTHER; note = 2'-O-methyladenosine-3'-phosphate
  modified_base 12: mod_base = OTHER; note = 2'-O-methylguanosine-3'-phosphate
  modified_base 13: mod_base = OTHER; note = 2'-O-methylcytidine-3'-phosphate
  modified_base 14: mod_base = OTHER; note = 2'-deoxy-2'-fluorouridine-3'-phosphate
  modified_base 15: mod_base = OTHER; note = 2'-O-methylguanosine-3'-phosphate
  modified_base 16: mod_base = OTHER; note = 2'-deoxy-2'-fluoroadenosine-3'-phosphate
  modified_base 17: mod_base = OTHER; note = 2'-O-methylguanosine-3'-phosphate
  modified_base 18: mod_base = OTHER; note = 2'-O-methylcytidine-3'-phosphate
  modified_base 19: mod_base = OTHER; note = 2'-O-methylguanosine-3'-phosphate
  modified_base 20: mod_base = OTHER; note = 2'-O-methyladenosine-3'-phosphate
  modified_base 21: mod_base = OTHER; note = 2'-O-methylguanosine-3'-phosphorothioate
  modified_base 22: mod_base = OTHER; note = 2'-O-methyluridine-3'-phosphorothioate
  modified_base 23: mod_base = OTHER; note = 2'-O-methylguanosine
atcttcttatagctgagcgagtg

SEQ ID NO: 3577 - RNA, 23 nt, synthetic construct
  source 1..23: mol_type = other RNA
  modified_base 1: mod_base = OTHER; note = 2'-O-methyladenosine-3'-phosphorothioate
  modified_base 2: mod_base = OTHER; note = 2'-deoxy-2'-fluorouridine-3'-phosphorothioate
  modified_base 3: mod_base = OTHER; note = 2'-O-methyluridine-3'-phosphate
  modified_base 4: mod_base = OTHER; note = 2'-O-methyluridine-3'-phosphate
  modified_base 5: mod_base = OTHER; note = 2'-O-methylcytidine-3'-phosphate
  modified_base 6: mod_base = OTHER; note = 2'-deoxy-2'-fluorouridine-3'-phosphate
  modified_base 7: mod_base = OTHER; note = 2'-O-methyladenosine-3'-phosphate
  modified_base 8: mod_base = OTHER; note = 2'-deoxy-2'-fluorouridine-3'-phosphate
  modified_base 9: mod_base = OTHER; note = 2'-deoxy-2'-fluorocytidine-3'-phosphate
  modified_base 10: mod_base = OTHER; note = 2'-O-methyladenosine-3'-phosphate
  modified_base 11: mod_base = OTHER; note = 2'-O-methyladenosine-3'-phosphate
  modified_base 12: mod_base = OTHER; note = 2'-O-methyladenosine-3'-phosphate
  modified_base 13: mod_base = OTHER; note = 2'-O-methylguanosine-3'-phosphate
  modified_base 14: mod_base = OTHER; note = 2'-deoxy-2'-fluoroadenosine-3'-phosphate
  modified_base 15: mod_base = OTHER; note = 2'-O-methyladenosine-3'-phosphate
  modified_base 16: mod_base = OTHER; note = 2'-deoxy-2'-fluorouridine-3'-phosphate
  modified_base 17: mod_base = OTHER; note = 2'-O-methylguanosine-3'-phosphate
  modified_base 18: mod_base = OTHER; note = 2'-O-methyladenosine-3'-phosphate
  modified_base 19: mod_base = OTHER; note = 2'-O-methyladenosine-3'-phosphate
  modified_base 20: mod_base = OTHER; note = 2'-O-methylguanosine-3'-phosphate
  modified_base 21: mod_base = OTHER; note = 2'-O-methyladenosine-3'-phosphorothioate
  modified_base 22: mod_base = OTHER; note = 2'-O-methyladenosine-3'-phosphorothioate
  modified_base 23: mod_base = OTHER; note = 2'-O-methylcytidine
atttctatcaaagaatgaagaac

SEQ ID NO: 3578 - RNA, 23 nt, synthetic construct
  source 1..23: mol_type = other RNA
  modified_base 1: mod_base = OTHER; note = 2'-O-methyladenosine-3'-phosphorothioate
  modified_base 2: mod_base = OTHER; note = 2'-deoxy-2'-fluoroadenosine-3'-phosphorothioate
  modified_base 3: mod_base = OTHER; note = 2'-O-methyladenosine-3'-phosphate
  modified_base 4: mod_base = OTHER; note = 2'-O-methylguanosine-3'-phosphate
  modified_base 5: mod_base = OTHER; note = 2'-O-methyluridine-3'-phosphate
  modified_base 6: mod_base = OTHER; note = 2'-deoxy-2'-fluorouridine-3'-phosphate
  modified_base 7: mod_base = OTHER; note = 2'-O-methyluridine-3'-phosphate
  modified_base 8: mod_base = OTHER; note = 2'-deoxy-2'-fluorouridine-3'-phosphate
  modified_base 9: mod_base = OTHER; note = 2'-deoxy-2'-fluoroadenosine-3'-phosphate
  modified_base 10: mod_base = OTHER; note = 2'-O-methylguanosine-3'-phosphate
  modified_base 11: mod_base = OTHER; note = 2'-O-methyluridine-3'-phosphate
  modified_base 12: mod_base = OTHER; note = 2'-O-methylcytidine-3'-phosphate
  modified_base 13: mod_base = OTHER; note = 2'-O-methyluridine-3'-phosphate
  modified_base 14: mod_base = OTHER; note = 2'-deoxy-2'-fluorouridine-3'-phosphate
  modified_base 15: mod_base = OTHER; note = 2'-O-methyladenosine-3'-phosphate
  modified_base 16: mod_base = OTHER; note = 2'-deoxy-2'-fluoroadenosine-3'-phosphate
  modified_base 17: mod_base = OTHER; note = 2'-O-methyluridine-3'-phosphate
  modified_base 18: mod_base = OTHER; note = 2'-O-methylcytidine-3'-phosphate
  modified_base 19: mod_base = OTHER; note = 2'-O-methyluridine-3'-phosphate
  modified_base 20: mod_base = OTHER; note = 2'-O-methyluridine-3'-phosphate
  modified_base 21: mod_base = OTHER; note = 2'-O-methylguanosine-3'-phosphorothioate
  modified_base 22: mod_base = OTHER; note = 2'-O-methyladenosine-3'-phosphorothioate
  modified_base 23: mod_base = OTHER; note = 2'-O-methylcytidine
aaagttttagtcttaatcttgac

SEQ ID NO: 3579 - RNA, 23 nt, synthetic construct
  source 1..23: mol_type = other RNA
  modified_base 1: mod_base = OTHER; note = 2'-O-methyladenosine-3'-phosphorothioate
  modified_base 2: mod_base = OTHER; note = 2'-deoxy-2'-fluoroadenosine-3'-phosphorothioate
  modified_base 3: mod_base = OTHER; note = 2'-O-methyladenosine-3'-phosphate
  modified_base 4: mod_base = OTHER; note = 2'-O-methyluridine-3'-phosphate
  modified_base 5: mod_base = OTHER; note = 2'-O-methyladenosine-3'-phosphate
  modified_base 6: mod_base = OTHER; note = 2'-deoxy-2'-fluoroadenosine-3'-phosphate
  modified_base 7: mod_base = OTHER; note = 2'-O-methylcytidine-3'-phosphate
  modified_base 8: mod_base = OTHER; note = 2'-deoxy-2'-fluoroadenosine-3'-phosphate
  modified_base 9: mod_base = OTHER; note = 2'-deoxy-2'-fluorouridine-3'-phosphate
  modified_base 10: mod_base = OTHER; note = 2'-O-methyluridine-3'-phosphate
  modified_base 11: mod_base = OTHER; note = 2'-O-methyluridine-3'-phosphate
  modified_base 12: mod_base = OTHER; note = 2'-O-methyluridine-3'-phosphate
  modified_base 13: mod_base = OTHER; note = 2'-O-methylcytidine-3'-phosphate
  modified_base 14: mod_base = OTHER; note = 2'-deoxy-2'-fluorouridine-3'-phosphate
  modified_base 15: mod_base = OTHER; note = 2'-O-methylcytidine-3'-phosphate
  modified_base 16: mod_base = OTHER; note = 2'-deoxy-2'-fluorouridine-3'-phosphate
  modified_base 17: mod_base = OTHER; note = 2'-O-methyladenosine-3'-phosphate
  modified_base 18: mod_base = OTHER; note = 2'-O-methylguanosine-3'-phosphate
  modified_base 19: mod_base = OTHER; note = 2'-O-methylcytidine-3'-phosphate
  modified_base 20: mod_base = OTHER; note = 2'-O-methyluridine-3'-phosphate
  modified_base 21: mod_base = OTHER; note = 2'-O-methyluridine-3'-phosphorothioate
  modified_base 22: mod_base = OTHER; note = 2'-O-methyladenosine-3'-phosphorothioate
  modified_base 23: mod_base = OTHER; note = 2'-O-methylcytidine
aaataacattttctctagcttac

SEQ ID NO: 3580 - RNA, 23 nt, synthetic construct
  source 1..23: mol_type = other RNA
  modified_base 1: mod_base = OTHER; note = 2'-O-methyladenosine-3'-phosphorothioate
  modified_base 2: mod_base = OTHER; note = 2'-deoxy-2'-fluoroadenosine-3'-phosphorothioate
  modified_base 3: mod_base = OTHER; note = 2'-O-methyladenosine-3'-phosphate
  modified_base 4: mod_base = OTHER; note = 2'-O-methylcytidine-3'-phosphate
  modified_base 5: mod_base = OTHER; note = 2'-O-methyluridine-3'-phosphate
  modified_base 6: mod_base = OTHER; note = 2'-deoxy-2'-fluorouridine-3'-phosphate
  modified_base 7: mod_base = OTHER; note = 2'-O-methyladenosine-3'-phosphate
  modified_base 8: mod_base = OTHER; note = 2'-deoxy-2'-fluoroadenosine-3'-phosphate
  modified_base 9: mod_base = OTHER; note = 2'-deoxy-2'-fluoroadenosine-3'-phosphate
  modified_base 10: mod_base = OTHER; note = 2'-O-methyluridine-3'-phosphate
  modified_base 11: mod_base = OTHER; note = 2'-O-methyluridine-3'-phosphate
  modified_base 12: mod_base = OTHER; note = 2'-O-methyladenosine-3'-phosphate
  modified_base 13: mod_base = OTHER; note = 2'-O-methylcytidine-3'-phosphate
  modified_base 14: mod_base = OTHER; note = 2'-deoxy-2'-fluorocytidine-3'-phosphate
  modified_base 15: mod_base = OTHER; note = 2'-O-methyladenosine-3'-phosphate
  modified_base 16: mod_base = OTHER; note = 2'-deoxy-2'-fluoroadenosine-3'-phosphate
  modified_base 17: mod_base = OTHER; note = 2'-O-methyladenosine-3'-phosphate
  modified_base 18: mod_base = OTHER; note = 2'-O-methylguanosine-3'-phosphate
  modified_base 19: mod_base = OTHER; note = 2'-O-methyluridine-3'-phosphate
  modified_base 20: mod_base = OTHER; note = 2'-O-methyluridine-3'-phosphate
  modified_base 21: mod_base = OTHER; note = 2'-O-methyluridine-3'-phosphorothioate
  modified_base 22: mod_base = OTHER; note = 2'-O-methylguanosine-3'-phosphorothioate
  modified_base 23: mod_base = OTHER; note = 2'-O-methylguanosine
aaacttaaattaccaaagtttgg

SEQ ID NO: 3581 - RNA, 23 nt, synthetic construct
  source 1..23: mol_type = other RNA
  modified_base 1: mod_base = OTHER; note = 2'-O-methyladenosine-3'-phosphorothioate
  modified_base 2: mod_base = OTHER; note = 2'-deoxy-2'-fluoroguanosine-3'-phosphorothioate
  modified_base 3: mod_base = OTHER; note = 2'-O-methyluridine-3'-phosphate
  modified_base 4: mod_base = OTHER; note = 2'-O-methyluridine-3'-phosphate
  modified_base 5: mod_base = OTHER; note = 2'-O-methyladenosine-3'-phosphate
  modified_base 6: mod_base = OTHER; note = 2'-deoxy-2'-fluoroguanosine-3'-phosphate
  modified_base 7: mod_base = OTHER; note = 2'-O-methyluridine-3'-phosphate
  modified_base 8: mod_base = OTHER; note = 2'-deoxy-2'-fluoroadenosine-3'-phosphate
  modified_base 9: mod_base = OTHER; note = 2'-deoxy-2'-fluorouridine-3'-phosphate
  modified_base 10: mod_base = OTHER; note = 2'-O-methyladenosine-3'-phosphate
  modified_base 11: mod_base = OTHER; note = 2'-O-methyluridine-3'-phosphate
  modified_base 12: mod_base = OTHER; note = 2'-O-methyluridine-3'-phosphate
  modified_base 13: mod_base = OTHER; note = 2'-O-methyladenosine-3'-phosphate
  modified_base 14: mod_base = OTHER; note = 2'-deoxy-2'-fluoroguanosine-3'-phosphate
  modified_base 15: mod_base = OTHER; note = 2'-O-methyluridine-3'-phosphate
  modified_base 16: mod_base = OTHER; note = 2'-deoxy-2'-fluoroguanosine-3'-phosphate
  modified_base 17: mod_base = OTHER; note = 2'-O-methyladenosine-3'-phosphate
  modified_base 18: mod_base = OTHER; note = 2'-O-methyluridine-3'-phosphate
  modified_base 19: mod_base = OTHER; note = 2'-O-methyladenosine-3'-phosphate
  modified_base 20: mod_base = OTHER; note = 2'-O-methyluridine-3'-phosphate
  modified_base 21: mod_base = OTHER; note = 2'-O-methylguanosine-3'-phosphorothioate
  modified_base 22: mod_base = OTHER; note = 2'-O-methyladenosine-3'-phosphorothioate
  modified_base 23: mod_base = OTHER; note = 2'-O-methylcytidine
agttagtatattagtgatatgac

SEQ ID NO: 3582 - RNA, 23 nt, synthetic construct
  source 1..23: mol_type = other RNA
  modified_base 1: mod_base = OTHER; note = 2'-O-methyladenosine-3'-phosphorothioate
  modified_base 2: mod_base = OTHER; note = 2'-deoxy-2'-fluoroadenosine-3'-phosphorothioate
  modified_base 3: mod_base = OTHER; note = 2'-O-methylcytidine-3'-phosphate
  modified_base 4: mod_base = OTHER; note = 2'-O-methylguanosine-3'-phosphate
  modified_base 5: mod_base = OTHER; note = 2'-O-methyladenosine-3'-phosphate
  modified_base 6: mod_base = OTHER; note = 2'-deoxy-2'-fluorouridine-3'-phosphate
  modified_base 7: mod_base = OTHER; note = 2'-O-methylguanosine-3'-phosphate
  modified_base 8: mod_base = OTHER; note = 2'-deoxy-2'-fluoroadenosine-3'-phosphate
  modified_base 9: mod_base = OTHER; note = 2'-deoxy-2'-fluorouridine-3'-phosphate
  modified_base 10: mod_base = OTHER; note = 2'-O-methyladenosine-3'-phosphate
  modified_base 11: mod_base = OTHER; note = 2'-O-methylcytidine-3'-phosphate
  modified_base 12: mod_base = OTHER; note = 2'-O-methyladenosine-3'-phosphate
  modified_base 13: mod_base = OTHER; note = 2'-O-methylguanosine-3'-phosphate
  modified_base 14: mod_base = OTHER; note = 2'-deoxy-2'-fluoroadenosine-3'-phosphate
  modified_base 15: mod_base = OTHER; note = 2'-O-methyluridine-3'-phosphate
  modified_base 16: mod_base = OTHER; note = 2'-deoxy-2'-fluorocytidine-3'-phosphate
  modified_base 17: mod_base = OTHER; note = 2'-O-methyladenosine-3'-phosphate
  modified_base 18: mod_base = OTHER; note = 2'-O-methylguanosine-3'-phosphate
  modified_base 19: mod_base = OTHER; note = 2'-O-methylcytidine-3'-phosphate
  modified_base 20: mod_base = OTHER; note = 2'-O-methyladenosine-3'-phosphate
  modified_base 21: mod_base = OTHER; note = 2'-O-methyladenosine-3'-phosphorothioate
  modified_base 22: mod_base = OTHER; note = 2'-O-methylguanosine-3'-phosphorothioate
  modified_base 23: mod_base = OTHER; note = 2'-O-methyladenosine
aacgatgatacagatcagcaaga

SEQ ID NO: 3583 - RNA, 23 nt, synthetic construct
  source 1..23: mol_type = other RNA
  modified_base 1: mod_base = OTHER; note = 2'-O-methyladenosine-3'-phosphorothioate
  modified_base 2: mod_base = OTHER; note = 2'-deoxy-2'-fluoroguanosine-3'-phosphorothioate
  modified_base 3: mod_base = OTHER; note = 2'-O-methyluridine-3'-phosphate
  modified_base 4: mod_base = OTHER; note = 2'-O-methyluridine-3'-phosphate
  modified_base 5: mod_base = OTHER; note = 2'-O-methyluridine-3'-phosphate
  modified_base 6: mod_base = OTHER; note = 2'-deoxy-2'-fluoroadenosine-3'-phosphate
  modified_base 7: mod_base = OTHER; note = 2'-O-methylcytidine-3'-phosphate
  modified_base 8: mod_base = OTHER; note = 2'-deoxy-2'-fluoroadenosine-3'-phosphate
  modified_base 9: mod_base = OTHER; note = 2'-deoxy-2'-fluoroadenosine-3'-phosphate
  modified_base 10: mod_base = OTHER; note = 2'-O-methylguanosine-3'-phosphate
  modified_base 11: mod_base = OTHER; note = 2'-O-methyladenosine-3'-phosphate
  modified_base 12: mod_base = OTHER; note = 2'-O-methyluridine-3'-phosphate
  modified_base 13: mod_base = OTHER; note = 2'-O-methylcytidine-3'-phosphate
  modified_base 14: mod_base = OTHER; note = 2'-deoxy-2'-fluorocytidine-3'-phosphate
  modified_base 15: mod_base = OTHER; note = 2'-O-methyladenosine-3'-phosphate
  modified_base 16: mod_base = OTHER; note = 2'-deoxy-2'-fluoroadenosine-3'-phosphate
  modified_base 17: mod_base = OTHER; note = 2'-O-methylcytidine-3'-phosphate
  modified_base 18: mod_base = OTHER; note = 2'-O-methyladenosine-3'-phosphate
  modified_base 19: mod_base = OTHER; note = 2'-O-methylguanosine-3'-phosphate
  modified_base 20: mod_base = OTHER; note = 2'-O-methyladenosine-3'-phosphate
  modified_base 21: mod_base = OTHER; note = 2'-O-methyluridine-3'-phosphorothioate
  modified_base 22: mod_base = OTHER; note = 2'-O-methylguanosine-3'-phosphorothioate
  modified_base 23: mod_base = OTHER; note = 2'-O-methyladenosine
agtttacaagatccaacagatga

SEQ ID NO: 3584 - RNA, 23 nt, synthetic construct
  source 1..23: mol_type = other RNA
  modified_base 1: mod_base = OTHER; note = 2'-O-methyladenosine-3'-phosphorothioate
  modified_base 2: mod_base = OTHER; note = 2'-deoxy-2'-fluoroguanosine-3'-phosphorothioate
  modified_base 3: mod_base = OTHER; note = 2'-O-methyladenosine-3'-phosphate
  modified_base 4: mod_base = OTHER; note = 2'-O-methyluridine-3'-phosphate
  modified_base 5: mod_base = OTHER; note = 2'-O-methyluridine-3'-phosphate
  modified_base 6: mod_base = OTHER; note = 2'-deoxy-2'-fluorouridine-3'-phosphate
  modified_base 7: mod_base = OTHER; note = 2'-O-methyladenosine-3'-phosphate
  modified_base 8: mod_base = OTHER; note = 2'-deoxy-2'-fluorouridine-3'-phosphate
  modified_base 9: mod_base = OTHER; note = 2'-deoxy-2'-fluoroguanosine-3'-phosphate
  modified_base 10: mod_base = OTHER; note = 2'-O-methyladenosine-3'-phosphate
  modified_base 11: mod_base = OTHER; note = 2'-O-methyluridine-3'-phosphate
  modified_base 12: mod_base = OTHER; note = 2'-O-methyluridine-3'-phosphate
  modified_base 13: mod_base = OTHER; note = 2'-O-methyluridine-3'-phosphate
  modified_base 14: mod_base = OTHER; note = 2'-deoxy-2'-fluoroadenosine-3'-phosphate
  modified_base 15: mod_base = OTHER; note = 2'-O-methylcytidine-3'-phosphate
  modified_base 16: mod_base = OTHER; note = 2'-deoxy-2'-fluorocytidine-3'-phosphate
  modified_base 17: mod_base = OTHER; note = 2'-O-methyluridine-3'-phosphate
  modified_base 18: mod_base = OTHER; note = 2'-O-methyladenosine-3'-phosphate
  modified_base 19: mod_base = OTHER; note = 2'-O-methylcytidine-3'-phosphate
  modified_base 20: mod_base = OTHER; note = 2'-O-methyladenosine-3'-phosphate
  modified_base 21: mod_base = OTHER; note = 2'-O-methyluridine-3'-phosphorothioate
  modified_base 22: mod_base = OTHER; note = 2'-O-methylguanosine-3'-phosphorothioate
  modified_base 23: mod_base = OTHER; note = 2'-O-methyluridine
agatttatgatttacctacatgt

SEQ ID NO: 3585 - RNA, 23 nt, synthetic construct
  source 1..23: mol_type = other RNA
  modified_base 1: mod_base = OTHER; note = 2'-O-methyladenosine-3'-phosphorothioate
  modified_base 2: mod_base = OTHER; note = 2'-deoxy-2'-fluoroadenosine-3'-phosphorothioate
  modified_base 3: mod_base = OTHER; note = 2'-O-methyladenosine-3'-phosphate
  modified_base 4: mod_base = OTHER; note = 2'-O-methyladenosine-3'-phosphate
  modified_base 5: mod_base = OTHER; note = 2'-O-methylguanosine-3'-phosphate
  modified_base 6: mod_base = OTHER; note = 2'-deoxy-2'-fluoroguanosine-3'-phosphate
  modified_base 7: mod_base = OTHER; note = 2'-O-methyladenosine-3'-phosphate
  modified_base 8: mod_base = OTHER; note = 2'-deoxy-2'-fluoroadenosine-3'-phosphate
  modified_base 9: mod_base = OTHER; note = 2'-deoxy-2'-fluorouridine-3'-phosphate
  modified_base 10: mod_base = OTHER; note = 2'-O-methyladenosine-3'-phosphate
  modified_base 11: mod_base = OTHER; note = 2'-O-methyluridine-3'-phosphate
  modified_base 12: mod_base = OTHER; note = 2'-O-methylguanosine-3'-phosphate
  modified_base 13: mod_base = OTHER; note = 2'-O-methyladenosine-3'-phosphate
  modified_base 14: mod_base = OTHER; note = 2'-deoxy-2'-fluorocytidine-3'-phosphate
  modified_base 15: mod_base = OTHER; note = 2'-O-methyluridine-3'-phosphate
  modified_base 16: mod_base = OTHER; note = 2'-deoxy-2'-fluoroadenosine-3'-phosphate
  modified_base 17: mod_base = OTHER; note = 2'-O-methyladenosine-3'-phosphate
  modified_base 18: mod_base = OTHER; note = 2'-O-methyluridine-3'-phosphate
  modified_base 19: mod_base = OTHER; note = 2'-O-methylcytidine-3'-phosphate
  modified_base 20: mod_base = OTHER; note = 2'-O-methyladenosine-3'-phosphate
  modified_base 21: mod_base = OTHER; note = 2'-O-methylguanosine-3'-phosphorothioate
  modified_base 22: mod_base = OTHER; note = 2'-O-methyluridine-3'-phosphorothioate
  modified_base 23: mod_base = OTHER; note = 2'-O-methyluridine
aaaaggaatatgactaatcagtt

SEQ ID NO: 3586 - RNA, 23 nt, synthetic construct
  source 1..23: mol_type = other RNA
  modified_base 1: mod_base = OTHER; note = 2'-O-methyladenosine-3'-phosphorothioate
  modified_base 2: mod_base = OTHER; note = 2'-deoxy-2'-fluoroadenosine-3'-phosphorothioate
  modified_base 3: mod_base = OTHER; note = 2'-O-methylguanosine-3'-phosphate
  modified_base 4: mod_base = OTHER; note = 2'-O-methylcytidine-3'-phosphate
  modified_base 5: mod_base = OTHER; note = 2'-O-methyluridine-3'-phosphate
  modified_base 6: mod_base = OTHER; note = 2'-deoxy-2'-fluoroguanosine-3'-phosphate
  modified_base 7: mod_base = OTHER; note = 2'-O-methyluridine-3'-phosphate
  modified_base 8: mod_base = OTHER; note = 2'-deoxy-2'-fluoroadenosine-3'-phosphate
  modified_base 9: mod_base = OTHER; note = 2'-deoxy-2'-fluoroguanosine-3'-phosphate
  modified_base 10: mod_base = OTHER; note = 2'-O-methyladenosine-3'-phosphate
  modified_base 11: mod_base = OTHER; note = 2'-O-methyluridine-3'-phosphate
  modified_base 12: mod_base = OTHER; note = 2'-O-methylguanosine-3'-phosphate
  modified_base 13: mod_base = OTHER; note = 2'-O-methyluridine-3'-phosphate
  modified_base 14: mod_base = OTHER; note = 2'-deoxy-2'-fluoroadenosine-3'-phosphate
  modified_base 15: mod_base = OTHER; note = 2'-O-methyladenosine-3'-phosphate
  modified_base 16: mod_base = OTHER; note = 2'-deoxy-2'-fluorouridine-3'-phosphate
  modified_base 17: mod_base = OTHER; note = 2'-O-methyladenosine-3'-phosphate
  modified_base 18: mod_base = OTHER; note = 2'-O-methylguanosine-3'-phosphate
  modified_base 19: mod_base = OTHER; note = 2'-O-methyladenosine-3'-phosphate
  modified_base 20: mod_base = OTHER; note = 2'-O-methyluridine-3'-phosphate
  modified_base 21: mod_base = OTHER; note = 2'-O-methylguanosine-3'-phosphorothioate
  modified_base 22: mod_base = OTHER; note = 2'-O-methylguanosine-3'-phosphorothioate
  modified_base 23: mod_base = OTHER; note = 2'-O-methylguanosine
aagctgtagatgtaatagatggg

SEQ ID NO: 3587 - RNA, 23 nt, synthetic construct
  source 1..23: mol_type = other RNA
  modified_base 1: mod_base = OTHER; note = 2'-O-methyladenosine-3'-phosphorothioate
  modified_base 2: mod_base = OTHER; note = 2'-deoxy-2'-fluoroguanosine-3'-phosphorothioate
  modified_base 3: mod_base = OTHER; note = 2'-O-methyluridine-3'-phosphate
  modified_base 4: mod_base = OTHER; note = 2'-O-methyladenosine-3'-phosphate
  modified_base 5: mod_base = OTHER; note = 2'-O-methyluridine-3'-phosphate
  modified_base 6: mod_base = OTHER; note = 2'-deoxy-2'-fluoroadenosine-3'-phosphate
  modified_base 7: mod_base = OTHER; note = 2'-O-methylguanosine-3'-phosphate
  modified_base 8: mod_base = OTHER; note = 2'-deoxy-2'-fluoroguanosine-3'-phosphate
  modified_base 9: mod_base = OTHER; note = 2'-deoxy-2'-fluorouridine-3'-phosphate
  modified_base 10: mod_base = OTHER; note = 2'-O-methylguanosine-3'-phosphate
  modified_base 11: mod_base = OTHER; note = 2'-O-methyluridine-3'-phosphate
  modified_base 12: mod_base = OTHER; note = 2'-O-methyladenosine-3'-phosphate
  modified_base 13: mod_base = OTHER; note = 2'-O-methyladenosine-3'-phosphate
  modified_base 14: mod_base = OTHER; note = 2'-deoxy-2'-fluoroadenosine-3'-phosphate
  modified_base 15: mod_base = OTHER; note = 2'-O-methylcytidine-3'-phosphate
  modified_base 16: mod_base = OTHER; note = 2'-deoxy-2'-fluorouridine-3'-phosphate
  modified_base 17: mod_base = OTHER; note = 2'-O-methyladenosine-3'-phosphate
  modified_base 18: mod_base = OTHER; note = 2'-O-methyluridine-3'-phosphate
  modified_base 19: mod_base = OTHER; note = 2'-O-methyluridine-3'-phosphate
  modified_base 20: mod_base = OTHER; note = 2'-O-methyluridine-3'-phosphate
  modified_base 21: mod_base = OTHER; note = 2'-O-methyluridine-3'-phosphorothioate
  modified_base 22: mod_base = OTHER; note = 2'-O-methyladenosine-3'-phosphorothioate
  modified_base 23: mod_base = OTHER; note = 2'-O-methylguanosine
agtataggtgtaaactattttag

SEQ ID NO: 3588 - RNA, 23 nt, synthetic construct
  source 1..23: mol_type = other RNA
  modified_base 1: mod_base = OTHER; note = 2'-O-methyladenosine-3'-phosphorothioate
  modified_base 2: mod_base = OTHER; note = 2'-deoxy-2'-fluoroguanosine-3'-phosphorothioate
  modified_base 3: mod_base = OTHER; note = 2'-O-methyladenosine-3'-phosphate
  modified_base 4: mod_base = OTHER; note = 2'-O-methyladenosine-3'-phosphate
  modified_base 5: mod_base = OTHER; note = 2'-O-methyladenosine-3'-phosphate
  modified_base 6: mod_base = OTHER; note = 2'-deoxy-2'-fluoroadenosine-3'-phosphate
  modified_base 7: mod_base = OTHER; note = 2'-O-methyluridine-3'-phosphate
  modified_base 8: mod_base = OTHER; note = 2'-deoxy-2'-fluorouridine-3'-phosphate
  modified_base 9: mod_base = OTHER; note = 2'-deoxy-2'-fluorouridine-3'-phosphate
  modified_base 10: mod_base = OTHER; note = 2'-O-methyladenosine-3'-phosphate
  modified_base 11: mod_base = OTHER; note = 2'-O-methyladenosine-3'-phosphate
  modified_base 12: mod_base = OTHER; note = 2'-O-methyluridine-3'-phosphate
  modified_base 13: mod_base = OTHER; note = 2'-O-methyladenosine-3'-phosphate
  modified_base 14: mod_base = OTHER; note = 2'-deoxy-2'-fluoroguanosine-3'-phosphate
  modified_base 15: mod_base = OTHER; note = 2'-O-methyluridine-3'-phosphate
  modified_base 16: mod_base = OTHER; note = 2'-deoxy-2'-fluoroguanosine-3'-phosphate
  modified_base 17: mod_base = OTHER; note = 2'-O-methyluridine-3'-phosphate
  modified_base 18: mod_base = OTHER; note = 2'-O-methylcytidine-3'-phosphate
  modified_base 19: mod_base = OTHER; note = 2'-O-methyluridine-3'-phosphate
  modified_base 20: mod_base = OTHER; note = 2'-O-methylcytidine-3'-phosphate
  modified_base 21: mod_base = OTHER; note = 2'-O-methylcytidine-3'-phosphorothioate
  modified_base 22: mod_base = OTHER; note = 2'-O-methyluridine-3'-phosphorothioate
  modified_base 23: mod_base = OTHER; note = 2'-O-methyluridine
agaaaatttaatagtgtctcctt

SEQ ID NO: 3589 - RNA, 23 nt, synthetic construct
  source 1..23: mol_type = other RNA
  modified_base 1: mod_base = OTHER; note = 2'-O-methyladenosine-3'-phosphorothioate
  modified_base 2: mod_base = OTHER; note = 2'-deoxy-2'-fluorouridine-3'-phosphorothioate
  modified_base 3: mod_base = OTHER; note = 2'-O-methyluridine-3'-phosphate
  modified_base 4: mod_base = OTHER; note = 2'-O-methylguanosine-3'-phosphate
  modified_base 5: mod_base = OTHER; note = 2'-O-methyluridine-3'-phosphate
  modified_base 6: mod_base = OTHER; note = 2'-deoxy-2'-fluorouridine-3'-phosphate
  modified_base 7: mod_base = OTHER; note = 2'-O-methyluridine-3'-phosphate
  modified_base 8: mod_base = OTHER; note = 2'-deoxy-2'-fluoroadenosine-3'-phosphate
  modified_base 9: mod_base = OTHER; note = 2'-deoxy-2'-fluorouridine-3'-phosphate
  modified_base 10: mod_base = OTHER; note = 2'-O-methyladenosine-3'-phosphate
  modified_base 11: mod_base = OTHER; note = 2'-O-methyladenosine-3'-phosphate
  modified_base 12: mod_base = OTHER; note = 2'-O-methylguanosine-3'-phosphate
  modified_base 13: mod_base = OTHER; note = 2'-O-methylcytidine-3'-phosphate
  modified_base 14: mod_base = OTHER; note = 2'-deoxy-2'-fluorouridine-3'-phosphate
  modified_base 15: mod_base = OTHER; note = 2'-O-methyluridine-3'-phosphate
  modified_base 16: mod_base = OTHER; note = 2'-deoxy-2'-fluorouridine-3'-phosphate
  modified_base 17: mod_base = OTHER; note = 2'-O-methylcytidine-3'-phosphate
  modified_base 18: mod_base = OTHER; note = 2'-O-methyluridine-3'-phosphate
  modified_base 19: mod_base = OTHER; note = 2'-O-methyladenosine-3'-phosphate
  modified_base 20: mod_base = OTHER; note = 2'-O-methylcytidine-3'-phosphate
  modified_base 21: mod_base = OTHER; note = 2'-O-methyluridine-3'-phosphorothioate
  modified_base 22: mod_base = OTHER; note = 2'-O-methyluridine-3'-phosphorothioate
  modified_base 23: mod_base = OTHER; note = 2'-O-methylguanosine
attgtttataagctttctacttg

SEQ ID NO: 3590 - RNA, 23 nt, synthetic construct
  source 1..23: mol_type = other RNA
  modified_base 1: mod_base = OTHER; note = 2'-O-methyladenosine-3'-phosphorothioate
  modified_base 2: mod_base = OTHER; note = 2'-deoxy-2'-fluorouridine-3'-phosphorothioate
  modified_base 3: mod_base = OTHER; note = 2'-O-methyluridine-3'-phosphate
  modified_base 4: mod_base = OTHER; note = 2'-O-methyladenosine-3'-phosphate
  modified_base 5: mod_base = OTHER; note = 2'-O-methylguanosine-3'-phosphate
  modified_base 6: mod_base = OTHER; note = 2'-deoxy-2'-fluorocytidine-3'-phosphate
  modified_base 7: mod_base = OTHER; note = 2'-O-methyladenosine-3'-phosphate
  modified_base 8: mod_base = OTHER; note = 2'-deoxy-2'-fluoroadenosine-3'-phosphate
  modified_base 9: mod_base = OTHER; note = 2'-deoxy-2'-fluorocytidine-3'-phosphate
  modified_base 10: mod_base = OTHER; note = 2'-O-methyladenosine-3'-phosphate
  modified_base 11: mod_base = OTHER; note = 2'-O-methylcytidine-3'-phosphate
  modified_base 12: mod_base = OTHER; note = 2'-O-methyluridine-3'-phosphate
  modified_base 13: mod_base = OTHER; note = 2'-O-methyluridine-3'-phosphate
  modified_base 14: mod_base = OTHER; note = 2'-deoxy-2'-fluoroguanosine-3'-phosphate
  modified_base 15: mod_base = OTHER; note = 2'-O-methyluridine-3'-phosphate
  modified_base 16: mod_base = OTHER; note = 2'-deoxy-2'-fluoroguanosine-3'-phosphate
  modified_base 17: mod_base = OTHER; note = 2'-O-methyluridine-3'-phosphate
  modified_base 18: mod_base = OTHER; note = 2'-O-methyladenosine-3'-phosphate
  modified_base 19: mod_base = OTHER; note = 2'-O-methyladenosine-3'-phosphate
  modified_base 20: mod_base = OTHER; note = 2'-O-methylguanosine-3'-phosphate
  modified_base 21: mod_base = OTHER; note = 2'-O-methyladenosine-3'-phosphorothioate
  modified_base 22: mod_base = OTHER; note = 2'-O-methyladenosine-3'-phosphorothioate
  modified_base 23: mod_base = OTHER; note = 2'-O-methyladenosine
attagcaacacttgtgtaagaaa

SEQ ID NO: 3591 - RNA, 23 nt, synthetic construct
  source 1..23: mol_type = other RNA
  modified_base 1: mod_base = OTHER; note = 2'-O-methyladenosine-3'-phosphorothioate
  modified_base 2: mod_base = OTHER; note = 2'-deoxy-2'-fluoroguanosine-3'-phosphorothioate
  modified_base 3: mod_base = OTHER; note = 2'-O-methyladenosine-3'-phosphate
  modified_base 4: mod_base = OTHER; note = 2'-O-methyluridine-3'-phosphate
  modified_base 5: mod_base = OTHER; note = 2'-O-methyladenosine-3'-phosphate
  modified_base 6: mod_base = OTHER; note = 2'-deoxy-2'-fluoroguanosine-3'-phosphate
  modified_base 7: mod_base = OTHER; note = 2'-O-methyluridine-3'-phosphate
  modified_base 8: mod_base = OTHER; note = 2'-deoxy-2'-fluorouridine-3'-phosphate
  modified_base 9: mod_base = OTHER; note = 2'-deoxy-2'-fluoroadenosine-3'-phosphate
  modified_base 10: mod_base = OTHER; note = 2'-O-methylcytidine-3'-phosphate
  modified_base 11: mod_base = OTHER; note = 2'-O-methyluridine-3'-phosphate
  modified_base 12: mod_base = OTHER; note = 2'-O-methyladenosine-3'-phosphate
  modified_base 13: mod_base = OTHER; note = 2'-O-methylcytidine-3'-phosphate
  modified_base 14: mod_base = OTHER; note = 2'-deoxy-2'-fluoroadenosine-3'-phosphate
  modified_base 15: mod_base = OTHER; note = 2'-O-methyladenosine-3'-phosphate
  modified_base 16: mod_base = OTHER; note = 2'-deoxy-2'-fluoroadenosine-3'-phosphate
  modified_base 17: mod_base = OTHER; note = 2'-O-methyluridine-3'-phosphate
  modified_base 18: mod_base = OTHER; note = 2'-O-methyladenosine-3'-phosphate
  modified_base 19: mod_base = OTHER; note = 2'-O-methylguanosine-3'-phosphate
  modified_base 20: mod_base = OTHER; note = 2'-O-methyluridine-3'-phosphate
  modified_base 21: mod_base = OTHER; note = 2'-O-methyluridine-3'-phosphorothioate
  modified_base 22: mod_base = OTHER; note = 2'-O-methylcytidine-3'-phosphorothioate
  modified_base 23: mod_base = OTHER; note = 2'-O-methyluridine
agatagttactacaaatagttct

SEQ ID NO: 3592 - RNA, 23 nt, synthetic construct
  source 1..23: mol_type = other RNA
  modified_base 1: mod_base = OTHER; note = 2'-O-methyladenosine-3'-phosphorothioate
  modified_base 2: mod_base = OTHER; note = 2'-deoxy-2'-fluoroguanosine-3'-phosphorothioate
  modified_base 3: mod_base = OTHER; note = 2'-O-methyluridine-3'-phosphate
  modified_base 4: mod_base = OTHER; note = 2'-O-methyluridine-3'-phosphate
  modified_base 5: mod_base = OTHER; note = 2'-O-methyladenosine-3'-phosphate
  modified_base 6: mod_base = OTHER; note = 2'-deoxy-2'-fluorocytidine-3'-phosphate
  modified_base 7: mod_base = OTHER; note = 2'-O-methyladenosine-3'-phosphate
  modified_base 8: mod_base = OTHER; note = 2'-deoxy-2'-fluorouridine-3'-phosphate
  modified_base 9: mod_base = OTHER; note = 2'-deoxy-2'-fluoroadenosine-3'-phosphate
  modified_base 10: mod_base = OTHER; note = 2'-O-methyluridine-3'-phosphate
  modified_base 11: mod_base = OTHER; note = 2'-O-methyluridine-3'-phosphate
  modified_base 12: mod_base = OTHER; note = 2'-O-methylcytidine-3'-phosphate
  modified_base 13: mod_base = OTHER; note = 2'-O-methyluridine-3'-phosphate
  modified_base 14: mod_base = OTHER; note = 2'-deoxy-2'-fluorouridine-3'-phosphate
  modified_base 15: mod_base = OTHER; note = 2'-O-methyluridine-3'-phosphate
  modified_base 16: mod_base = OTHER; note = 2'-deoxy-2'-fluorouridine-3'-phosphate
  modified_base 17: mod_base = OTHER; note = 2'-O-methyladenosine-3'-phosphate
  modified_base 18: mod_base = OTHER; note = 2'-O-methylguanosine-3'-phosphate
  modified_base 19: mod_base = OTHER; note = 2'-O-methyluridine-3'-phosphate
  modified_base 20: mod_base = OTHER; note = 2'-O-methyladenosine-3'-phosphate
  modified_base 21: mod_base = OTHER; note = 2'-O-methyladenosine-3'-phosphorothioate
  modified_base 22: mod_base = OTHER; note = 2'-O-methylcytidine-3'-phosphorothioate
  modified_base 23: mod_base = OTHER; note = 2'-O-methylcytidine
agttacatattcttttagtaacc

SEQ ID NO: 3593 - RNA, 23 nt, synthetic construct
  source 1..23: mol_type = other RNA
  modified_base 1: mod_base = OTHER; note = 2'-O-methyladenosine-3'-phosphorothioate
  modified_base 2: mod_base = OTHER; note = 2'-deoxy-2'-fluoroguanosine-3'-phosphorothioate
  modified_base 3: mod_base = OTHER; note = 2'-O-methyladenosine-3'-phosphate
  modified_base 4: mod_base = OTHER; note = 2'-O-methylguanosine-3'-phosphate
  modified_base 5: mod_base = OTHER; note = 2'-O-methyluridine-3'-phosphate
  modified_base 6: mod_base = OTHER; note = 2'-deoxy-2'-fluorocytidine-3'-phosphate
  modified_base 7: mod_base = OTHER; note = 2'-O-methyladenosine-3'-phosphate
  modified_base 8: mod_base = OTHER; note = 2'-deoxy-2'-fluoroguanosine-3'-phosphate
  modified_base 9: mod_base = OTHER; note = 2'-deoxy-2'-fluorouridine-3'-phosphate
  modified_base 10: mod_base = OTHER; note = 2'-O-methylguanosine-3'-phosphate
  modified_base 11: mod_base = OTHER; note = 2'-O-methylguanosine-3'-phosphate
  modified_base 12: mod_base = OTHER; note = 2'-O-methyladenosine-3'-phosphate
  modified_base 13: mod_base = OTHER; note = 2'-O-methylcytidine-3'-phosphate
  modified_base 14: mod_base = OTHER; note = 2'-deoxy-2'-fluorouridine-3'-phosphate
  modified_base 15: mod_base = OTHER; note = 2'-O-methyladenosine-3'-phosphate
  modified_base 16: mod_base = OTHER; note = 2'-deoxy-2'-fluorouridine-3'-phosphate
  modified_base 17: mod_base = OTHER; note = 2'-O-methyluridine-3'-phosphate
  modified_base 18: mod_base = OTHER; note = 2'-O-methyluridine-3'-phosphate
  modified_base 19: mod_base = OTHER; note = 2'-O-methyluridine-3'-phosphate
  modified_base 20: mod_base = OTHER; note = 2'-O-methylguanosine-3'-phosphate
  modified_base 21: mod_base = OTHER; note = 2'-O-methyladenosine-3'-phosphorothioate
  modified_base 22: mod_base = OTHER; note = 2'-O-methyladenosine-3'-phosphorothioate
  modified_base 23: mod_base = OTHER; note = 2'-O-methyluridine
agagtcagtggactattttgaat

SEQ ID NO: 3594 - RNA, 23 nt, synthetic construct
  source 1..23: mol_type = other RNA
  modified_base 1: mod_base = OTHER; note = 2'-O-methyladenosine-3'-phosphorothioate
  modified_base 2: mod_base = OTHER; note = 2'-deoxy-2'-fluoroadenosine-3'-phosphorothioate
  modified_base 3: mod_base = OTHER; note = 2'-O-methyluridine-3'-phosphate
  modified_base 4: mod_base = OTHER; note = 2'-O-methyladenosine-3'-phosphate
  modified_base 5: mod_base = OTHER; note = 2'-O-methylcytidine-3'-phosphate
  modified_base 6: mod_base = OTHER; note = 2'-deoxy-2'-fluoroadenosine-3'-phosphate
  modified_base 7: mod_base = OTHER; note = 2'-O-methyladenosine-3'-phosphate
  modified_base 8: mod_base = OTHER; note = 2'-deoxy-2'-fluorouridine-3'-phosphate
  modified_base 9: mod_base = OTHER; note = 2'-deoxy-2'-fluoroadenosine-3'-phosphate
  modified_base 10: mod_base = OTHER; note = 2'-O-methyluridine-3'-phosphate
  modified_base 11: mod_base = OTHER; note = 2'-O-methyluridine-3'-phosphate
  modified_base 12: mod_base = OTHER; note = 2'-O-methylguanosine-3'-phosphate
  modified_base 13: mod_base = OTHER; note = 2'-O-methyluridine-3'-phosphate
  modified_base 14: mod_base = OTHER; note = 2'-deoxy-2'-fluorouridine-3'-phosphate
  modified_base 15: mod_base = OTHER; note = 2'-O-methyluridine-3'-phosphate
  modified_base 16: mod_base = OTHER; note = 2'-deoxy-2'-fluorouridine-3'-phosphate
  modified_base 17: mod_base = OTHER; note = 2'-O-methylcytidine-3'-phosphate
  modified_base 18: mod_base = OTHER; note = 2'-O-methylcytidine-3'-phosphate
  modified_base 19: mod_base = OTHER; note = 2'-O-methyluridine-3'-phosphate
  modified_base 20: mod_base = OTHER; note = 2'-O-methylguanosine-3'-phosphate
  modified_base 21: mod_base = OTHER; note = 2'-O-methyluridine-3'-phosphorothioate
  modified_base 22: mod_base = OTHER; note = 2'-O-methylcytidine-3'-phosphorothioate
  modified_base 23: mod_base = OTHER; note = 2'-O-methyluridine
aatacaatattgttttcctgtct

SEQ ID NO: 3595 - RNA, 23 nt, synthetic construct
  source 1..23: mol_type = other RNA
  modified_base 1: mod_base = OTHER; note = 2'-O-methyladenosine-3'-phosphorothioate
  modified_base 2: mod_base = OTHER; note = 2'-deoxy-2'-fluoroadenosine-3'-phosphorothioate
  modified_base 3: mod_base = OTHER; note = 2'-O-methyladenosine-3'-phosphate
  modified_base 4: mod_base = OTHER; note = 2'-O-methylcytidine-3'-phosphate
  modified_base 5: mod_base = OTHER; note = 2'-O-methyladenosine-3'-phosphate
  modified_base 6: mod_base = OTHER; note = 2'-deoxy-2'-fluoroguanosine-3'-phosphate
  modified_base 7: mod_base = OTHER; note = 2'-O-methyluridine-3'-phosphate
  modified_base 8: mod_base = OTHER; note = 2'-deoxy-2'-fluorouridine-3'-phosphate
  modified_base 9: mod_base = OTHER; note = 2'-deoxy-2'-fluoroguanosine-3'-phosphate
  modified_base 10: mod_base = OTHER; note = 2'-O-methylcytidine-3'-phosphate
  modified_base 11: mod_base = OTHER; note = 2'-O-methyladenosine-3'-phosphate
  modified_base 12: mod_base = OTHER; note = 2'-O-methyluridine-3'-phosphate
  modified_base 13: mod_base = OTHER; note = 2'-O-methyluridine-3'-phosphate
  modified_base 14: mod_base = OTHER; note = 2'-deoxy-2'-fluorouridine-3'-phosphate
  modified_base 15: mod_base = OTHER; note = 2'-O-methyluridine-3'-phosphate
  modified_base 16: mod_base = OTHER; note = 2'-deoxy-2'-fluoroadenosine-3'-phosphate
  modified_base 17: mod_base = OTHER; note = 2'-O-methyluridine-3'-phosphate
  modified_base 18: mod_base = OTHER; note = 2'-O-methyladenosine-3'-phosphate
  modified_base 19: mod_base = OTHER; note = 2'-O-methylcytidine-3'-phosphate
  modified_base 20: mod_base = OTHER; note = 2'-O-methyladenosine-3'-phosphate
  modified_base 21: mod_base = OTHER; note = 2'-O-methylcytidine-3'-phosphorothioate
  modified_base 22: mod_base = OTHER; note = 2'-O-methyluridine-3'-phosphorothioate
  modified_base 23: mod_base = OTHER; note = 2'-O-methyluridine
aaacagttgcattttatacactt

SEQ ID NO: 3596 - RNA, 23 nt, synthetic construct
  source 1..23: mol_type = other RNA
  modified_base 1: mod_base = OTHER; note = 2'-O-methyladenosine-3'-phosphorothioate
  modified_base 2: mod_base = OTHER; note = 2'-deoxy-2'-fluorocytidine-3'-phosphorothioate
  modified_base 3: mod_base = OTHER; note = 2'-O-methyluridine-3'-phosphate
  modified_base 4: mod_base = OTHER; note = 2'-O-methylguanosine-3'-phosphate
  modified_base 5: mod_base = OTHER; note = 2'-O-methyluridine-3'-phosphate
  modified_base 6: mod_base = OTHER; note = 2'-deoxy-2'-fluoroguanosine-3'-phosphate
  modified_base 7: mod_base = OTHER; note = 2'-O-methyladenosine-3'-phosphate
  modified_base 8: mod_base = OTHER; note = 2'-deoxy-2'-fluorouridine-3'-phosphate
  modified_base 9: mod_base = OTHER; note = 2'-deoxy-2'-fluorocytidine-3'-phosphate
  modified_base 10: mod_base = OTHER; note = 2'-O-methyladenosine-3'-phosphate
  modified_base 11: mod_base = OTHER; note = 2'-O-methyluridine-3'-phosphate
  modified_base 12: mod_base = OTHER; note = 2'-O-methylcytidine-3'-phosphate
  modified_base 13: mod_base = OTHER; note = 2'-O-methyladenosine-3'-phosphate
  modified_base 14: mod_base = OTHER; note = 2'-deoxy-2'-fluorocytidine-3'-phosphate
  modified_base 15: mod_base = OTHER; note = 2'-O-methyladenosine-3'-phosphate
  modified_base 16: mod_base = OTHER; note = 2'-deoxy-2'-fluoroguanosine-3'-phosphate
  modified_base 17: mod_base = OTHER; note = 2'-O-methyluridine-3'-phosphate
  modified_base 18: mod_base = OTHER; note = 2'-O-methyladenosine-3'-phosphate
  modified_base 19: mod_base = OTHER; note = 2'-O-methyluridine-3'-phosphate
  modified_base 20: mod_base = OTHER; note = 2'-O-methyladenosine-3'-phosphate
  modified_base 21: mod_base = OTHER; note = 2'-O-methylguanosine-3'-phosphorothioate
  modified_base 22: mod_base = OTHER; note = 2'-O-methyladenosine-3'-phosphorothioate
  modified_base 23: mod_base = OTHER; note = 2'-O-methylguanosine
actgtgatcatcacagtatagag

SEQ ID NO: 3597 - RNA, 23 nt, synthetic construct
  source 1..23: mol_type = other RNA
  modified_base 1: mod_base = OTHER; note = 2'-O-methyladenosine-3'-phosphorothioate
  modified_base 2: mod_base = OTHER; note = 2'-deoxy-2'-fluorouridine-3'-phosphorothioate
  modified_base 3: mod_base = OTHER; note = 2'-O-methyluridine-3'-phosphate
  modified_base 4: mod_base = OTHER; note = 2'-O-methyladenosine-3'-phosphate
  modified_base 5: mod_base = OTHER; note = 2'-O-methyluridine-3'-phosphate
  modified_base 6: mod_base = OTHER; note = 2'-deoxy-2'-fluorouridine-3'-phosphate
  modified_base 7: mod_base = OTHER; note = 2'-O-methyladenosine-3'-phosphate
  modified_base 8: mod_base = OTHER; note = 2'-deoxy-2'-fluorouridine-3'-phosphate
  modified_base 9: mod_base = OTHER; note = 2'-deoxy-2'-fluoroguanosine-3'-phosphate
  modified_base 10: mod_base = OTHER; note = 2'-O-methyluridine-3'-phosphate
  modified_base 11: mod_base = OTHER; note = 2'-O-methyladenosine-3'-phosphate
  modified_base 12: mod_base = OTHER; note = 2'-O-methyladenosine-3'-phosphate
  modified_base 13: mod_base = OTHER; note = 2'-O-methylguanosine-3'-phosphate
  modified_base 14: mod_base = OTHER; note = 2'-deoxy-2'-fluoroadenosine-3'-phosphate
  modified_base 15: mod_base = OTHER; note = 2'-O-methylguanosine-3'-phosphate
  modified_base 16: mod_base = OTHER; note = 2'-deoxy-2'-fluorouridine-3'-phosphate
  modified_base 17: mod_base = OTHER; note = 2'-O-methyladenosine-3'-phosphate
  modified_base 18: mod_base = OTHER; note = 2'-O-methyluridine-3'-phosphate
  modified_base 19: mod_base = OTHER; note = 2'-O-methylguanosine-3'-phosphate
  modified_base 20: mod_base = OTHER; note = 2'-O-methylguanosine-3'-phosphate
  modified_base 21: mod_base = OTHER; note = 2'-O-methylcytidine-3'-phosphorothioate
  modified_base 22: mod_base = OTHER; note = 2'-O-methylcytidine-3'-phosphorothioate
  modified_base 23: mod_base = OTHER; note = 2'-O-methyluridine
attattatgtaagagtatggcct

SEQ ID NO: 3598 - RNA, 23 nt, synthetic construct
  source 1..23: mol_type = other RNA
  modified_base 1: mod_base = OTHER; note = 2'-O-methyladenosine-3'-phosphorothioate
  modified_base 2: mod_base = OTHER; note = 2'-deoxy-2'-fluoroguanosine-3'-phosphorothioate
  modified_base 3: mod_base = OTHER; note = 2'-O-methyluridine-3'-phosphate
  modified_base 4: mod_base = OTHER; note = 2'-O-methyladenosine-3'-phosphate
  modified_base 5: mod_base = OTHER; note = 2'-O-methylcytidine-3'-phosphate
  modified_base 6: mod_base = OTHER; note = 2'-deoxy-2'-fluorouridine-3'-phosphate
  modified_base 7: mod_base = OTHER; note = 2'-O-methyladenosine-3'-phosphate
  modified_base 8: mod_base = OTHER; note = 2'-deoxy-2'-fluoroguanosine-3'-phosphate
  modified_base 9: mod_base = OTHER; note = 2'-deoxy-2'-fluoroadenosine-3'-phosphate
  modified_base 10: mod_base = OTHER; note = 2'-O-methyladenosine-3'-phosphate
  modified_base 11: mod_base = OTHER; note = 2'-O-methyluridine-3'-phosphate
  modified_base 12: mod_base = OTHER; note = 2'-O-methyluridine-3'-phosphate
  modified_base 13: mod_base = OTHER; note = 2'-O-methylcytidine-3'-phosphate
  modified_base 14: mod_base = OTHER; note = 2'-deoxy-2'-fluorouridine-3'-phosphate
  modified_base 15: mod_base = OTHER; note = 2'-O-methylguanosine-3'-phosphate
  modified_base 16: mod_base = OTHER; note = 2'-deoxy-2'-fluorouridine-3'-phosphate
  modified_base 17: mod_base = OTHER; note = 2'-O-methylguanosine-3'-phosphate
  modified_base 18: mod_base = OTHER; note = 2'-O-methyladenosine-3'-phosphate
  modified_base 19: mod_base = OTHER; note = 2'-O-methyluridine-3'-phosphate
  modified_base 20: mod_base = OTHER; note = 2'-O-methyluridine-3'-phosphate
  modified_base 21: mod_base = OTHER; note = 2'-O-methylcytidine-3'-phosphorothioate
  modified_base 22: mod_base = OTHER; note = 2'-O-methyluridine-3'-phosphorothioate
  modified_base 23: mod_base = OTHER; note = 2'-O-methyluridine
agtactagaattctgtgattctt

SEQ ID NO: 3599 - RNA, 23 nt, synthetic construct
  source 1..23: mol_type = other RNA
  modified_base 1: mod_base = OTHER; note = 2'-O-methyladenosine-3'-phosphorothioate
  modified_base 2: mod_base = OTHER; note = 2'-deoxy-2'-fluoroadenosine-3'-phosphorothioate
  modified_base 3: mod_base = OTHER; note = 2'-O-methyluridine-3'-phosphate
  modified_base 4: mod_base = OTHER; note = 2'-O-methyladenosine-3'-phosphate
  modified_base 5: mod_base = OTHER; note = 2'-O-methyladenosine-3'-phosphate
  modified_base 6: mod_base = OTHER; note = 2'-deoxy-2'-fluorocytidine-3'-phosphate
  modified_base 7: mod_base = OTHER; note = 2'-O-methyladenosine-3'-phosphate
  modified_base 8: mod_base = OTHER; note = 2'-deoxy-2'-fluorocytidine-3'-phosphate
  modified_base 9: mod_base = OTHER; note = 2'-deoxy-2'-fluoroguanosine-3'-phosphate
  modified_base 10: mod_base = OTHER; note = 2'-O-methylcytidine-3'-phosphate
  modified_base 11: mod_base = OTHER; note = 2'-O-methyladenosine-3'-phosphate
  modified_base 12: mod_base = OTHER; note = 2'-O-methyladenosine-3'-phosphate
  modified_base 13: mod_base = OTHER; note = 2'-O-methyladenosine-3'-phosphate
  modified_base 14: mod_base = OTHER; note = 2'-deoxy-2'-fluoroadenosine-3'-phosphate
  modified_base 15: mod_base = OTHER; note = 2'-O-methyluridine-3'-phosphate
  modified_base 16: mod_base = OTHER; note = 2'-deoxy-2'-fluoroadenosine-3'-phosphate
  modified_base 17: mod_base = OTHER; note = 2'-O-methyluridine-3'-phosphate
  modified_base 18: mod_base = OTHER; note = 2'-O-methylguanosine-3'-phosphate
  modified_base 19: mod_base = OTHER; note = 2'-O-methyluridine-3'-phosphate
  modified_base 20: mod_base = OTHER; note = 2'-O-methylguanosine-3'-phosphate
  modified_base 21: mod_base = OTHER; note = 2'-O-methyluridine-3'-phosphorothioate
  modified_base 22: mod_base = OTHER; note = 2'-O-methyluridine-3'-phosphorothioate
  modified_base 23: mod_base = OTHER; note = 2'-O-methyladenosine
aataacacgcaaaatatgtgtta

SEQ ID NO: 3600 - RNA, 23 nt, synthetic construct
  source 1..23: mol_type = other RNA
  modified_base 1: mod_base = OTHER; note = 2'-O-methyladenosine-3'-phosphorothioate
  modified_base 2: mod_base = OTHER; note = 2'-deoxy-2'-fluoroguanosine-3'-phosphorothioate
  modified_base 3: mod_base = OTHER; note = 2'-O-methyluridine-3'-phosphate
  modified_base 4: mod_base = OTHER; note = 2'-O-methyladenosine-3'-phosphate
  modified_base 5: mod_base = OTHER; note = 2'-O-methyladenosine-3'-phosphate
  modified_base 6: mod_base = OTHER; note = 2'-deoxy-2'-fluorocytidine-3'-phosphate
  modified_base 7: mod_base = OTHER; note = 2'-O-methyladenosine-3'-phosphate
  modified_base 8: mod_base = OTHER; note = 2'-deoxy-2'-fluoroadenosine-3'-phosphate
  modified_base 9: mod_base = OTHER; note = 2'-deoxy-2'-fluoroadenosine-3'-phosphate
  modified_base 10: mod_base = OTHER; note = 2'-O-methylcytidine-3'-phosphate
  modified_base 11: mod_base = OTHER; note = 2'-O-methyladenosine-3'-phosphate
  modified_base 12: mod_base = OTHER; note = 2'-O-methylguanosine-3'-phosphate
  modified_base 13: mod_base = OTHER; note = 2'-O-methyluridine-3'-phosphate
  modified_base 14: mod_base = OTHER; note = 2'-deoxy-2'-fluoroguanosine-3'-phosphate
  modified_base 15: mod_base = OTHER; note = 2'-O-methyluridine-3'-phosphate
  modified_base 16: mod_base = OTHER; note = 2'-deoxy-2'-fluoroadenosine-3'-phosphate
  modified_base 17: mod_base = OTHER; note = 2'-O-methyladenosine-3'-phosphate
  modified_base 18: mod_base = OTHER; note = 2'-O-methyluridine-3'-phosphate
  modified_base 19: mod_base = OTHER; note = 2'-O-methylcytidine-3'-phosphate
  modified_base 20: mod_base = OTHER; note = 2'-O-methyladenosine-3'-phosphate
  modified_base 21: mod_base = OTHER; note = 2'-O-methyladenosine-3'-phosphorothioate
  modified_base 22: mod_base = OTHER; note = 2'-O-methyladenosine-3'-phosphorothioate
  modified_base 23: mod_base = OTHER; note = 2'-O-methylguanosine
agtaacaaacagtgtaatcaaag

SEQ ID NO: 3601 - RNA, 23 nt, synthetic construct
  source 1..23: mol_type = other RNA
  modified_base 1: mod_base = OTHER; note = 2'-O-methyladenosine-3'-phosphorothioate
  modified_base 2: mod_base = OTHER; note = 2'-deoxy-2'-fluoroadenosine-3'-phosphorothioate
  modified_base 3: mod_base = OTHER; note = 2'-O-methyluridine-3'-phosphate
  modified_base 4: mod_base = OTHER; note = 2'-O-methyluridine-3'-phosphate
  modified_base 5: mod_base = OTHER; note = 2'-O-methyladenosine-3'-phosphate
  modified_base 6: mod_base = OTHER; note = 2'-deoxy-2'-fluorouridine-3'-phosphate
  modified_base 7: mod_base = OTHER; note = 2'-O-methyladenosine-3'-phosphate
  modified_base 8: mod_base = OTHER; note = 2'-deoxy-2'-fluoroadenosine-3'-phosphate
  modified_base 9: mod_base = OTHER; note = 2'-deoxy-2'-fluoroadenosine-3'-phosphate
  modified_base 10: mod_base = OTHER; note = 2'-O-methyluridine-3'-phosphate
  modified_base 11: mod_base = OTHER; note = 2'-O-methyladenosine-3'-phosphate
  modified_base 12: mod_base = OTHER; note = 2'-O-methylguanosine-3'-phosphate
  modified_base 13: mod_base = OTHER; note = 2'-O-methylcytidine-3'-phosphate
  modified_base 14: mod_base = OTHER; note = 2'-deoxy-2'-fluoroadenosine-3'-phosphate
  modified_base 15: mod_base = OTHER; note = 2'-O-methyluridine-3'-phosphate
  modified_base 16: mod_base = OTHER; note = 2'-deoxy-2'-fluoroadenosine-3'-phosphate
  modified_base 17: mod_base = OTHER; note = 2'-O-methylguanosine-3'-phosphate
  modified_base 18: mod_base = OTHER; note = 2'-O-methylcytidine-3'-phosphate
  modified_base 19: mod_base = OTHER; note = 2'-O-methyluridine-3'-phosphate
  modified_base 20: mod_base = OTHER; note = 2'-O-methylguanosine-3'-phosphate
  modified_base 21: mod_base = OTHER; note = 2'-O-methylguanosine-3'-phosphorothioate
  modified_base 22: mod_base = OTHER; note = 2'-O-methyladenosine-3'-phosphorothioate
  modified_base 23: mod_base = OTHER; note = 2'-O-methyluridine
aattataaatagcatagctggat

SEQ ID NO: 3602 - RNA, 23 nt, synthetic construct
  source 1..23: mol_type = other RNA
  modified_base 1: mod_base = OTHER; note = 2'-O-methyladenosine-3'-phosphorothioate
  modified_base 2: mod_base = OTHER; note = 2'-deoxy-2'-fluoroadenosine-3'-phosphorothioate
  modified_base 3: mod_base = OTHER; note = 2'-O-methylcytidine-3'-phosphate
  modified_base 4: mod_base = OTHER; note = 2'-O-methyluridine-3'-phosphate
  modified_base 5: mod_base = OTHER; note = 2'-O-methylcytidine-3'-phosphate
  modified_base 6: mod_base = OTHER; note = 2'-deoxy-2'-fluoroadenosine-3'-phosphate
  modified_base 7: mod_base = OTHER; note = 2'-O-methyladenosine-3'-phosphate
  modified_base 8: mod_base = OTHER; note = 2'-deoxy-2'-fluorouridine-3'-phosphate
  modified_base 9: mod_base = OTHER; note = 2'-deoxy-2'-fluorouridine-3'-phosphate
  modified_base 10: mod_base = OTHER; note = 2'-O-methyluridine-3'-phosphate
  modified_base 11: mod_base = OTHER; note = 2'-O-methyluridine-3'-phosphate
  modified_base 12: mod_base = OTHER; note = 2'-O-methyladenosine-3'-phosphate
  modified_base 13: mod_base = OTHER; note = 2'-O-methylcytidine-3'-phosphate
  modified_base 14: mod_base = OTHER; note = 2'-deoxy-2'-fluorouridine-3'-phosphate
  modified_base 15: mod_base = OTHER; note = 2'-O-methyluridine-3'-phosphate
  modified_base 16: mod_base = OTHER; note = 2'-deoxy-2'-fluorocytidine-3'-phosphate
  modified_base 17: mod_base = OTHER; note = 2'-O-methyladenosine-3'-phosphate
  modified_base 18: mod_base = OTHER; note = 2'-O-methylguanosine-3'-phosphate
  modified_base 19: mod_base = OTHER; note = 2'-O-methyluridine-3'-phosphate
  modified_base 20: mod_base = OTHER; note = 2'-O-methyluridine-3'-phosphate
  modified_base 21: mod_base = OTHER; note = 2'-O-methylguanosine-3'-phosphorothioate
  modified_base 22: mod_base = OTHER; note = 2'-O-methyluridine-3'-phosphorothioate
  modified_base 23: mod_base = OTHER; note = 2'-O-methyluridine
aactcaattttacttcagttgtt

SEQ ID NO: 3603 - RNA, 23 nt, synthetic construct
  source 1..23: mol_type = other RNA
  modified_base 1: mod_base = OTHER; note = 2'-O-methyladenosine-3'-phosphorothioate
  modified_base 2: mod_base = OTHER; note = 2'-deoxy-2'-fluoroguanosine-3'-phosphorothioate
  modified_base 3: mod_base = OTHER; note = 2'-O-methyladenosine-3'-phosphate
  modified_base 4: mod_base = OTHER; note = 2'-O-methyladenosine-3'-phosphate
  modified_base 5: mod_base = OTHER; note = 2'-O-methylguanosine-3'-phosphate
  modified_base 6: mod_base = OTHER; note = 2'-deoxy-2'-fluoroadenosine-3'-phosphate
  modified_base 7: mod_base = OTHER; note = 2'-O-methyluridine-3'-phosphate
  modified_base 8: mod_base = OTHER; note = 2'-deoxy-2'-fluoroadenosine-3'-phosphate
  modified_base 9: mod_base = OTHER; note = 2'-deoxy-2'-fluorouridine-3'-phosphate
  modified_base 10: mod_base = OTHER; note = 2'-O-methylguanosine-3'-phosphate
  modified_base 11: mod_base = OTHER; note = 2'-O-methylguanosine-3'-phosphate
  modified_base 12: mod_base = OTHER; note = 2'-O-methyluridine-3'-phosphate
  modified_base 13: mod_base = OTHER; note = 2'-O-methyluridine-3'-phosphate
  modified_base 14: mod_base = OTHER; note = 2'-deoxy-2'-fluoroadenosine-3'-phosphate
  modified_base 15: mod_base = OTHER; note = 2'-O-methyladenosine-3'-phosphate
  modified_base 16: mod_base = OTHER; note = 2'-deoxy-2'-fluorouridine-3'-phosphate
  modified_base 17: mod_base = OTHER; note = 2'-O-methyluridine-3'-phosphate
  modified_base 18: mod_base = OTHER; note = 2'-O-methyladenosine-3'-phosphate
  modified_base 19: mod_base = OTHER; note = 2'-O-methylcytidine-3'-phosphate
  modified_base 20: mod_base = OTHER; note = 2'-O-methyladenosine-3'-phosphate
  modified_base 21: mod_base = OTHER; note = 2'-O-methylcytidine-3'-phosphorothioate
  modified_base 22: mod_base = OTHER; note = 2'-O-methyladenosine-3'-phosphorothioate
  modified_base 23: mod_base = OTHER; note = 2'-O-methyluridine
agaagatatggttaattacacat

SEQ ID NO: 3604 - RNA, 23 nt, synthetic construct
  source 1..23: mol_type = other RNA
  modified_base 1: mod_base = OTHER; note = 2'-O-methyladenosine-3'-phosphorothioate
  modified_base 2: mod_base = OTHER; note = 2'-deoxy-2'-fluorocytidine-3'-phosphorothioate
  modified_base 3: mod_base = OTHER; note = 2'-O-methyluridine-3'-phosphate
  modified_base 4: mod_base = OTHER; note = 2'-O-methyluridine-3'-phosphate
  modified_base 5: mod_base = OTHER; note = 2'-O-methyladenosine-3'-phosphate
  modified_base 6: mod_base = OTHER; note = 2'-deoxy-2'-fluorocytidine-3'-phosphate
  modified_base 7: mod_base = OTHER; note = 2'-O-methylcytidine-3'-phosphate
  modified_base 8: mod_base = OTHER; note = 2'-deoxy-2'-fluoroadenosine-3'-phosphate
  modified_base 9: mod_base = OTHER; note = 2'-deoxy-2'-fluorouridine-3'-phosphate
  modified_base 10: mod_base = OTHER; note = 2'-O-methyluridine-3'-phosphate
  modified_base 11: mod_base = OTHER; note = 2'-O-methyluridine-3'-phosphate
  modified_base 12: mod_base = OTHER; note = 2'-O-methylguanosine-3'-phosphate
  modified_base 13: mod_base = OTHER; note = 2'-O-methylguanosine-3'-phosphate
  modified_base 14: mod_base = OTHER; note = 2'-deoxy-2'-fluorouridine-3'-phosphate
  modified_base 15: mod_base = OTHER; note = 2'-O-methyluridine-3'-phosphate
  modified_base 16: mod_base = OTHER; note = 2'-deoxy-2'-fluoroguanosine-3'-phosphate
  modified_base 17: mod_base = OTHER; note = 2'-O-methyladenosine-3'-phosphate
  modified_base 18: mod_base = OTHER; note = 2'-O-methyluridine-3'-phosphate
  modified_base 19: mod_base = OTHER; note = 2'-O-methyladenosine-3'-phosphate
  modified_base 20: mod_base = OTHER; note = 2'-O-methylguanosine-3'-phosphate
  modified_base 21: mod_base = OTHER; note = 2'-O-methyladenosine-3'-phosphorothioate
  modified_base 22: mod_base = OTHER; note = 2'-O-methylguanosine-3'-phosphorothioate
  modified_base 23: mod_base = OTHER; note = 2'-O-methylguanosine
acttaccatttggttgatagagg

SEQ ID NO: 3605 - RNA, 23 nt, synthetic construct
  source 1..23: mol_type = other RNA
  modified_base 1: mod_base = OTHER; note = 2'-O-methyladenosine-3'-phosphorothioate
  modified_base 2: mod_base = OTHER; note = 2'-deoxy-2'-fluoroadenosine-3'-phosphorothioate
  modified_base 3: mod_base = OTHER; note = 2'-O-methyluridine-3'-phosphate
  modified_base 4: mod_base = OTHER; note = 2'-O-methyladenosine-3'-phosphate
  modified_base 5: mod_base = OTHER; note = 2'-O-methylguanosine-3'-phosphate
  modified_base 6: mod_base = OTHER; note = 2'-deoxy-2'-fluorouridine-3'-phosphate
  modified_base 7: mod_base = OTHER; note = 2'-O-methyladenosine-3'-phosphate
  modified_base 8: mod_base = OTHER; note = 2'-deoxy-2'-fluorouridine-3'-phosphate
  modified_base 9: mod_base = OTHER; note = 2'-deoxy-2'-fluorouridine-3'-phosphate
  modified_base 10: mod_base = OTHER; note = 2'-O-methylcytidine-3'-phosphate
  modified_base 11: mod_base = OTHER; note = 2'-O-methyluridine-3'-phosphate
  modified_base 12: mod_base = OTHER; note = 2'-O-methylguanosine-3'-phosphate
  modified_base 13: mod_base = OTHER; note = 2'-O-methyluridine-3'-phosphate
  modified_base 14: mod_base = OTHER; note = 2'-deoxy-2'-fluoroadenosine-3'-phosphate
  modified_base 15: mod_base = OTHER; note = 2'-O-methyladenosine-3'-phosphate
  modified_base 16: mod_base = OTHER; note = 2'-deoxy-2'-fluorouridine-3'-phosphate
  modified_base 17: mod_base = OTHER; note = 2'-O-methylcytidine-3'-phosphate
  modified_base 18: mod_base = OTHER; note = 2'-O-methylcytidine-3'-phosphate
  modified_base 19: mod_base = OTHER; note = 2'-O-methyluridine-3'-phosphate
  modified_base 20: mod_base = OTHER; note = 2'-O-methylcytidine-3'-phosphate
  modified_base 21: mod_base = OTHER; note = 2'-O-methyladenosine-3'-phosphorothioate
  modified_base 22: mod_base = OTHER; note = 2'-O-methylcytidine-3'-phosphorothioate
  modified_base 23: mod_base = OTHER; note = 2'-O-methyladenosine
aatagtattctgtaatcctcaca

SEQ ID NO: 3606 - RNA, 23 nt, synthetic construct
  source 1..23: mol_type = other RNA
  modified_base 1: mod_base = OTHER; note = 2'-O-methyladenosine-3'-phosphorothioate
  modified_base 2: mod_base = OTHER; note = 2'-deoxy-2'-fluoroadenosine-3'-phosphorothioate
  modified_base 3: mod_base = OTHER; note = 2'-O-methyladenosine-3'-phosphate
  modified_base 4: mod_base = OTHER; note = 2'-O-methyluridine-3'-phosphate
  modified_base 5: mod_base = OTHER; note = 2'-O-methylcytidine-3'-phosphate
  modified_base 6: mod_base = OTHER; note = 2'-deoxy-2'-fluoroadenosine-3'-phosphate
  modified_base 7: mod_base = OTHER; note = 2'-O-methylguanosine-3'-phosphate
  modified_base 8: mod_base = OTHER; note = 2'-deoxy-2'-fluorouridine-3'-phosphate
  modified_base 9: mod_base = OTHER; note = 2'-deoxy-2'-fluorouridine-3'-phosphate
  modified_base 10: mod_base = OTHER; note = 2'-O-methylcytidine-3'-phosphate
  modified_base 11: mod_base = OTHER; note = 2'-O-methyladenosine-3'-phosphate
  modified_base 12: mod_base = OTHER; note = 2'-O-methyladenosine-3'-phosphate
  modified_base 13: mod_base = OTHER; note = 2'-O-methyladenosine-3'-phosphate
  modified_base 14: mod_base = OTHER; note = 2'-deoxy-2'-fluorouridine-3'-phosphate
  modified_base 15: mod_base = OTHER; note = 2'-O-methyluridine-3'-phosphate
  modified_base 16: mod_base = OTHER; note = 2'-deoxy-2'-fluorouridine-3'-phosphate
  modified_base 17: mod_base = OTHER; note = 2'-O-methyluridine-3'-phosphate
  modified_base 18: mod_base = OTHER; note = 2'-O-methylcytidine-3'-phosphate
  modified_base 19: mod_base = OTHER; note = 2'-O-methylcytidine-3'-phosphate
  modified_base 20: mod_base = OTHER; note = 2'-O-methyladenosine-3'-phosphate
  modified_base 21: mod_base = OTHER; note = 2'-O-methylcytidine-3'-phosphorothioate
  modified_base 22: mod_base = OTHER; note = 2'-O-methyluridine-3'-phosphorothioate
  modified_base 23: mod_base = OTHER; note = 2'-O-methyluridine
aaatcagttcaaattttccactt

SEQ ID NO: 3607 - RNA, 23 nt, synthetic construct
  source 1..23: mol_type = other RNA
  modified_base 1: mod_base = OTHER; note = 2'-O-methyladenosine-3'-phosphorothioate
  modified_base 2: mod_base = OTHER; note = 2'-deoxy-2'-fluoroadenosine-3'-phosphorothioate
  modified_base 3: mod_base = OTHER; note = 2'-O-methylguanosine-3'-phosphate
  modified_base 4: mod_base = OTHER; note = 2'-O-methylguanosine-3'-phosphate
  modified_base 5: mod_base = OTHER; note = 2'-O-methyluridine-3'-phosphate
  modified_base 6: mod_base = OTHER; note = 2'-deoxy-2'-fluoroadenosine-3'-phosphate
  modified_base 7: mod_base = OTHER; note = 2'-O-methyluridine-3'-phosphate
  modified_base 8: mod_base = OTHER; note = 2'-deoxy-2'-fluorouridine-3'-phosphate
  modified_base 9: mod_base = OTHER; note = 2'-deoxy-2'-fluoroguanosine-3'-phosphate
  modified_base 10: mod_base = OTHER; note = 2'-O-methylguanosine-3'-phosphate
  modified_base 11: mod_base = OTHER; note = 2'-O-methyladenosine-3'-phosphate
  modified_base 12: mod_base = OTHER; note = 2'-O-methylcytidine-3'-phosphate
  modified_base 13: mod_base = OTHER; note = 2'-O-methyluridine-3'-phosphate
  modified_base 14: mod_base = OTHER; note = 2'-deoxy-2'-fluorouridine-3'-phosphate
  modified_base 15: mod_base = OTHER; note = 2'-O-methyluridine-3'-phosphate
  modified_base 16: mod_base = OTHER; note = 2'-deoxy-2'-fluorocytidine-3'-phosphate
  modified_base 17: mod_base = OTHER; note = 2'-O-methyluridine-3'-phosphate
  modified_base 18: mod_base = OTHER; note = 2'-O-methylcytidine-3'-phosphate
  modified_base 19: mod_base = OTHER; note = 2'-O-methylcytidine-3'-phosphate
  modified_base 20: mod_base = OTHER; note = 2'-O-methyladenosine-3'-phosphate
  modified_base 21: mod_base = OTHER; note = 2'-O-methyluridine-3'-phosphorothioate
  modified_base 22: mod_base = OTHER; note = 2'-O-methylguanosine-3'-phosphorothioate
  modified_base 23: mod_base = OTHER; note = 2'-O-methyladenosine
aaggtattggactttctccatga

SEQ ID NO: 3608 - RNA, 23 nt, synthetic construct
  source 1..23: mol_type = other RNA
  modified_base 1: mod_base = OTHER; note = 2'-O-methyladenosine-3'-phosphorothioate
  modified_base 2: mod_base = OTHER; note = 2'-deoxy-2'-fluorouridine-3'-phosphorothioate
  modified_base 3: mod_base = OTHER; note = 2'-O-methyladenosine-3'-phosphate
  modified_base 4: mod_base = OTHER; note = 2'-O-methyladenosine-3'-phosphate
  modified_base 5: mod_base = OTHER; note = 2'-O-methyluridine-3'-phosphate
  modified_base 6: mod_base = OTHER; note = 2'-deoxy-2'-fluoroadenosine-3'-phosphate
  modified_base 7: mod_base = OTHER; note = 2'-O-methyluridine-3'-phosphate
  modified_base 8: mod_base = OTHER; note = 2'-deoxy-2'-fluoroadenosine-3'-phosphate
  modified_base 9: mod_base = OTHER; note = 2'-deoxy-2'-fluoroguanosine-3'-phosphate
  modified_base 10: mod_base = OTHER; note = 2'-O-methyluridine-3'-phosphate
  modified_base 11: mod_base = OTHER; note = 2'-O-methylguanosine-3'-phosphate
  modified_base 12: mod_base = OTHER; note = 2'-O-methyladenosine-3'-phosphate
  modified_base 13: mod_base = OTHER; note = 2'-O-methyluridine-3'-phosphate
  modified_base 14: mod_base = OTHER; note = 2'-deoxy-2'-fluorouridine-3'-phosphate
  modified_base 15: mod_base = OTHER; note = 2'-O-methylcytidine-3'-phosphate
  modified_base 16: mod_base = OTHER; note = 2'-deoxy-2'-fluorouridine-3'-phosphate
  modified_base 17: mod_base = OTHER; note = 2'-O-methylguanosine-3'-phosphate
  modified_base 18: mod_base = OTHER; note = 2'-O-methyladenosine-3'-phosphate
  modified_base 19: mod_base = OTHER; note = 2'-O-methyluridine-3'-phosphate
  modified_base 20: mod_base = OTHER; note = 2'-O-methyluridine-3'-phosphate
  modified_base 21: mod_base = OTHER; note = 2'-O-methyluridine-3'-phosphorothioate
  modified_base 22: mod_base = OTHER; note = 2'-O-methylguanosine-3'-phosphorothioate
  modified_base 23: mod_base = OTHER; note = 2'-O-methylcytidine
ataatatagtgattctgatttgc

SEQ ID NO: 3609 - RNA, 23 nt, synthetic construct
  source 1..23: mol_type = other RNA
  modified_base 1: mod_base = OTHER; note = 2'-O-methyladenosine-3'-phosphorothioate
  modified_base 2: mod_base = OTHER; note = 2'-deoxy-2'-fluoroadenosine-3'-phosphorothioate
  modified_base 3: mod_base = OTHER; note = 2'-O-methyluridine-3'-phosphate
  modified_base 4: mod_base = OTHER; note = 2'-O-methylguanosine-3'-phosphate
  modified_base 5: mod_base = OTHER; note = 2'-O-methyluridine-3'-phosphate
  modified_base 6: mod_base = OTHER; note = 2'-deoxy-2'-fluorouridine-3'-phosphate
  modified_base 7: mod_base = OTHER; note = 2'-O-methyladenosine-3'-phosphate
  modified_base 8: mod_base = OTHER; note = 2'-deoxy-2'-fluoroguanosine-3'-phosphate
  modified_base 9: mod_base = OTHER; note = 2'-deoxy-2'-fluoroguanosine-3'-phosphate
  modified_base 10: mod_base = OTHER; note = 2'-O-methylcytidine-3'-phosphate
  modified_base 11: mod_base = OTHER; note = 2'-O-methyluridine-3'-phosphate
  modified_base 12: mod_base = OTHER; note = 2'-O-methylguanosine-3'-phosphate
  modified_base 13: mod_base = OTHER; note = 2'-O-methylguanosine-3'-phosphate
  modified_base 14: mod_base = OTHER; note = 2'-deoxy-2'-fluoroadenosine-3'-phosphate
  modified_base 15: mod_base = OTHER; note = 2'-O-methyladenosine-3'-phosphate
  modified_base 16: mod_base = OTHER; note = 2'-deoxy-2'-fluorouridine-3'-phosphate
  modified_base 17: mod_base = OTHER; note = 2'-O-methylguanosine-3'-phosphate
  modified_base 18: mod_base = OTHER; note = 2'-O-methylguanosine-3'-phosphate
  modified_base 19: mod_base = OTHER; note = 2'-O-methyladenosine-3'-phosphate
  modified_base 20: mod_base = OTHER; note = 2'-O-methyladenosine-3'-phosphate
  modified_base 21: mod_base = OTHER; note = 2'-O-methylguanosine-3'-phosphorothioate
  modified_base 22: mod_base = OTHER; note = 2'-O-methyladenosine-3'-phosphorothioate
  modified_base 23: mod_base = OTHER; note = 2'-O-methylcytidine
aatgttaggctggaatggaagac

SEQ ID NO: 3610 - RNA, 23 nt, synthetic construct
  source 1..23: mol_type = other RNA
  modified_base 1: mod_base = OTHER; note = 2'-O-methyladenosine-3'-phosphorothioate
  modified_base 2: mod_base = OTHER; note = 2'-deoxy-2'-fluorouridine-3'-phosphorothioate
  modified_base 3: mod_base = OTHER; note = 2'-O-methyluridine-3'-phosphate
  modified_base 4: mod_base = OTHER; note = 2'-O-methylguanosine-3'-phosphate
  modified_base 5: mod_base = OTHER; note = 2'-O-methyladenosine-3'-phosphate
  modified_base 6: mod_base = OTHER; note = 2'-deoxy-2'-fluoroadenosine-3'-phosphate
  modified_base 7: mod_base = OTHER; note = 2'-O-methyluridine-3'-phosphate
  modified_base 8: mod_base = OTHER; note = 2'-deoxy-2'-fluoroadenosine-3'-phosphate
  modified_base 9: mod_base = OTHER; note = 2'-deoxy-2'-fluoroadenosine-3'-phosphate
  modified_base 10: mod_base = OTHER; note = 2'-O-methyluridine-3'-phosphate
  modified_base 11: mod_base = OTHER; note = 2'-O-methylguanosine-3'-phosphate
  modified_base 12: mod_base = OTHER; note = 2'-O-methyladenosine-3'-phosphate
  modified_base 13: mod_base = OTHER; note = 2'-O-methylcytidine-3'-phosphate
  modified_base 14: mod_base = OTHER; note = 2'-deoxy-2'-fluoroadenosine-3'-phosphate
  modified_base 15: mod_base = OTHER; note = 2'-O-methylcytidine-3'-phosphate
  modified_base 16: mod_base = OTHER; note = 2'-deoxy-2'-fluorouridine-3'-phosphate
  modified_base 17: mod_base = OTHER; note = 2'-O-methyluridine-3'-phosphate
  modified_base 18: mod_base = OTHER; note = 2'-O-methylcytidine-3'-phosphate
  modified_base 19: mod_base = OTHER; note = 2'-O-methyladenosine-3'-phosphate
  modified_base 20: mod_base = OTHER; note = 2'-O-methyluridine-3'-phosphate
  modified_base 21: mod_base = OTHER; note = 2'-O-methyluridine-3'-phosphorothioate
  modified_base 22: mod_base = OTHER; note = 2'-O-methyluridine-3'-phosphorothioate
  modified_base 23: mod_base = OTHER; note = 2'-O-methylguanosine
attgaataatgacacttcatttg

SEQ ID NO: 3611 - RNA, 23 nt, synthetic construct
  source 1..23: mol_type = other RNA
  modified_base 1: mod_base = OTHER; note = 2'-O-methyladenosine-3'-phosphorothioate
  modified_base 2: mod_base = OTHER; note = 2'-deoxy-2'-fluorocytidine-3'-phosphorothioate
  modified_base 3: mod_base = OTHER; note = 2'-O-methyluridine-3'-phosphate
  modified_base 4: mod_base = OTHER; note = 2'-O-methyluridine-3'-phosphate
  modified_base 5: mod_base = OTHER; note = 2'-O-methyluridine-3'-phosphate
  modified_base 6: mod_base = OTHER; note = 2'-deoxy-2'-fluoroadenosine-3'-phosphate
  modified_base 7: mod_base = OTHER; note = 2'-O-methylcytidine-3'-phosphate
  modified_base 8: mod_base = OTHER; note = 2'-deoxy-2'-fluoroadenosine-3'-phosphate
  modified_base 9: mod_base = OTHER; note = 2'-deoxy-2'-fluorocytidine-3'-phosphate
  modified_base 10: mod_base = OTHER; note = 2'-O-methyluridine-3'-phosphate
  modified_base 11: mod_base = OTHER; note = 2'-O-methyluridine-3'-phosphate
  modified_base 12: mod_base = OTHER; note = 2'-O-methyluridine-3'-phosphate
  modified_base 13: mod_base = OTHER; note = 2'-O-methyladenosine-3'-phosphate
  modified_base 14: mod_base = OTHER; note = 2'-deoxy-2'-fluorouridine-3'-phosphate
  modified_base 15: mod_base = OTHER; note = 2'-O-methylguanosine-3'-phosphate
  modified_base 16: mod_base = OTHER; note = 2'-deoxy-2'-fluoroadenosine-3'-phosphate
  modified_base 17: mod_base = OTHER; note = 2'-O-methyluridine-3'-phosphate
  modified_base 18: mod_base = OTHER; note = 2'-O-methylguanosine-3'-phosphate
  modified_base 19: mod_base = OTHER; note = 2'-O-methyladenosine-3'-phosphate
  modified_base 20: mod_base = OTHER; note = 2'-O-methyladenosine-3'-phosphate
  modified_base 21: mod_base = OTHER; note = 2'-O-methylguanosine-3'-phosphorothioate
  modified_base 22: mod_base = OTHER; note = 2'-O-methyladenosine-3'-phosphorothioate
  modified_base 23: mod_base = OTHER; note = 2'-O-methyladenosine
actttacactttatgatgaagaa

SEQ ID NO: 3612 - RNA, 23 nt, synthetic construct
  source 1..23: mol_type = other RNA
  modified_base 1: mod_base = OTHER; note = 2'-O-methyladenosine-3'-phosphorothioate
  modified_base 2: mod_base = OTHER; note = 2'-deoxy-2'-fluorocytidine-3'-phosphorothioate
  modified_base 3: mod_base = OTHER; note = 2'-O-methyladenosine-3'-phosphate
  modified_base 4: mod_base = OTHER; note = 2'-O-methyluridine-3'-phosphate
  modified_base 5: mod_base = OTHER; note = 2'-O-methylcytidine-3'-phosphate
  modified_base 6: mod_base = OTHER; note = 2'-deoxy-2'-fluorouridine-3'-phosphate
  modified_base 7: mod_base = OTHER; note = 2'-O-methyluridine-3'-phosphate
  modified_base 8: mod_base = OTHER; note = 2'-deoxy-2'-fluorocytidine-3'-phosphate
  modified_base 9: mod_base = OTHER; note = 2'-deoxy-2'-fluoroadenosine-3'-phosphate
  modified_base 10: mod_base = OTHER; note = 2'-O-methylguanosine-3'-phosphate
  modified_base 11: mod_base = OTHER; note = 2'-O-methyladenosine-3'-phosphate
  modified_base 12: mod_base = OTHER; note = 2'-O-methyladenosine-3'-phosphate
  modified_base 13: mod_base = OTHER; note = 2'-O-methyladenosine-3'-phosphate
  modified_base 14: mod_base = OTHER; note = 2'-deoxy-2'-fluoroadenosine-3'-phosphate
  modified_base 15: mod_base = OTHER; note = 2'-O-methylguanosine-3'-phosphate
  modified_base 16: mod_base = OTHER; note = 2'-deoxy-2'-fluoroadenosine-3'-phosphate
  modified_base 17: mod_base = OTHER; note = 2'-O-methyluridine-3'-phosphate
  modified_base 18: mod_base = OTHER; note = 2'-O-methyluridine-3'-phosphate
  modified_base 19: mod_base = OTHER; note = 2'-O-methyluridine-3'-phosphate
  modified_base 20: mod_base = OTHER; note = 2'-O-methylguanosine-3'-phosphate
  modified_base 21: mod_base = OTHER; note = 2'-O-methylguanosine-3'-phosphorothioate
  modified_base 22: mod_base = OTHER; note = 2'-O-methylguanosine-3'-phosphorothioate
  modified_base 23: mod_base = OTHER; note = 2'-O-methyladenosine
acatcttcagaaaagatttggga

SEQ ID NO: 3613 - RNA, 23 nt, synthetic construct
  source 1..23: mol_type = other RNA
  modified_base 1: mod_base = OTHER; note = 2'-O-methyladenosine-3'-phosphorothioate
  modified_base 2: mod_base = OTHER; note = 2'-deoxy-2'-fluorouridine-3'-phosphorothioate
  modified_base 3: mod_base = OTHER; note = 2'-O-methyladenosine-3'-phosphate
  modified_base 4: mod_base = OTHER; note = 2'-O-methyladenosine-3'-phosphate
  modified_base 5: mod_base = OTHER; note = 2'-O-methylguanosine-3'-phosphate
  modified_base 6: mod_base = OTHER; note = 2'-deoxy-2'-fluoroguanosine-3'-phosphate
  modified_base 7: mod_base = OTHER; note = 2'-O-methyluridine-3'-phosphate
  modified_base 8: mod_base = OTHER; note = 2'-deoxy-2'-fluorouridine-3'-phosphate
  modified_base 9: mod_base = OTHER; note = 2'-deoxy-2'-fluorouridine-3'-phosphate
  modified_base 10: mod_base = OTHER; note = 2'-O-methylcytidine-3'-phosphate
  modified_base 11: mod_base = OTHER; note = 2'-O-methyladenosine-3'-phosphate
  modified_base 12: mod_base = OTHER; note = 2'-O-methyluridine-3'-phosphate
  modified_base 13: mod_base = OTHER; note = 2'-O-methylguanosine-3'-phosphate
  modified_base 14: mod_base = OTHER; note = 2'-deoxy-2'-fluoroadenosine-3'-phosphate
  modified_base 15: mod_base = OTHER; note = 2'-O-methyluridine-3'-phosphate
  modified_base 16: mod_base = OTHER; note = 2'-deoxy-2'-fluorouridine-3'-phosphate
  modified_base 17: mod_base = OTHER; note = 2'-O-methylcytidine-3'-phosphate
  modified_base 18: mod_base = OTHER; note = 2'-O-methylcytidine-3'-phosphate
  modified_base 19: mod_base = OTHER; note = 2'-O-methyladenosine-3'-phosphate
  modified_base 20: mod_base = OTHER; note = 2'-O-methyladenosine-3'-phosphate
  modified_base 21: mod_base = OTHER; note = 2'-O-methyladenosine-3'-phosphorothioate
  modified_base 22: mod_base = OTHER; note = 2'-O-methylguanosine-3'-phosphorothioate
  modified_base 23: mod_base = OTHER; note = 2'-O-methyladenosine
ataaggtttcatgattccaaaga

SEQ ID NO: 3614 - RNA, 23 nt, synthetic construct
  source 1..23: mol_type = other RNA
  modified_base 1: mod_base = OTHER; note = 2'-O-methyladenosine-3'-phosphorothioate
  modified_base 2: mod_base = OTHER; note = 2'-deoxy-2'-fluoroadenosine-3'-phosphorothioate
  modified_base 3: mod_base = OTHER; note = 2'-O-methyluridine-3'-phosphate
  modified_base 4: mod_base = OTHER; note = 2'-O-methylguanosine-3'-phosphate
  modified_base 5: mod_base = OTHER; note = 2'-O-methyladenosine-3'-phosphate
  modified_base 6: mod_base = OTHER; note = 2'-deoxy-2'-fluoroadenosine-3'-phosphate
  modified_base 7: mod_base = OTHER; note = 2'-O-methylguanosine-3'-phosphate
  modified_base 8: mod_base = OTHER; note = 2'-deoxy-2'-fluorouridine-3'-phosphate
  modified_base 9: mod_base = OTHER; note = 2'-deoxy-2'-fluorocytidine-3'-phosphate
  modified_base 10: mod_base = OTHER; note = 2'-O-methyluridine-3'-phosphate
  modified_base 11: mod_base = OTHER; note = 2'-O-methyluridine-3'-phosphate
  modified_base 12: mod_base = OTHER; note = 2'-O-methyladenosine-3'-phosphate
  modified_base 13: mod_base = OTHER; note = 2'-O-methylcytidine-3'-phosphate
  modified_base 14: mod_base = OTHER; note = 2'-deoxy-2'-fluoroguanosine-3'-phosphate
  modified_base 15: mod_base = OTHER; note = 2'-O-methylguanosine-3'-phosphate
  modified_base 16: mod_base = OTHER; note = 2'-deoxy-2'-fluoroguanosine-3'-phosphate
  modified_base 17: mod_base = OTHER; note = 2'-O-methyluridine-3'-phosphate
  modified_base 18: mod_base = OTHER; note = 2'-O-methylguanosine-3'-phosphate
  modified_base 19: mod_base = OTHER; note = 2'-O-methyluridine-3'-phosphate
  modified_base 20: mod_base = OTHER; note = 2'-O-methyluridine-3'-phosphate
  modified_base 21: mod_base = OTHER; note = 2'-O-methyluridine-3'-phosphorothioate
  modified_base 22: mod_base = OTHER; note = 2'-O-methyladenosine-3'-phosphorothioate
  modified_base 23: mod_base = OTHER; note = 2'-O-methylguanosine
aatgaagtcttacgggtgtttag

SEQ ID NO: 3615 - RNA, 23 nt, synthetic construct
  source 1..23: mol_type = other RNA
  modified_base 1: mod_base = OTHER; note = 2'-O-methyladenosine-3'-phosphorothioate
  modified_base 2: mod_base = OTHER; note = 2'-deoxy-2'-fluoroguanosine-3'-phosphorothioate
  modified_base 3: mod_base = OTHER; note = 2'-O-methyluridine-3'-phosphate
  modified_base 4: mod_base = OTHER; note = 2'-O-methylcytidine-3'-phosphate
  modified_base 5: mod_base = OTHER; note = 2'-O-methyluridine-3'-phosphate
  modified_base 6: mod_base = OTHER; note = 2'-deoxy-2'-fluorocytidine-3'-phosphate
  modified_base 7: mod_base = OTHER; note = 2'-O-methylcytidine-3'-phosphate
  modified_base 8: mod_base = OTHER; note = 2'-deoxy-2'-fluorouridine-3'-phosphate
  modified_base 9: mod_base = OTHER; note = 2'-deoxy-2'-fluorouridine-3'-phosphate
  modified_base 10: mod_base = OTHER; note = 2'-O-methylcytidine-3'-phosphate
  modified_base 11: mod_base = OTHER; note = 2'-O-methyladenosine-3'-phosphate
  modified_base 12: mod_base = OTHER; note = 2'-O-methylcytidine-3'-phosphate
  modified_base 13: mod_base = OTHER; note = 2'-O-methyluridine-3'-phosphate
  modified_base 14: mod_base = OTHER; note = 2'-deoxy-2'-fluoroadenosine-3'-phosphate
  modified_base 15: mod_base = OTHER; note = 2'-O-methyluridine-3'-phosphate
  modified_base 16: mod_base = OTHER; note = 2'-deoxy-2'-fluorouridine-3'-phosphate
  modified_base 17: mod_base = OTHER; note = 2'-O-methylguanosine-3'-phosphate
  modified_base 18: mod_base = OTHER; note = 2'-O-methyladenosine-3'-phosphate
  modified_base 19: mod_base = OTHER; note = 2'-O-methylguanosine-3'-phosphate
  modified_base 20: mod_base = OTHER; note = 2'-O-methyluridine-3'-phosphate
  modified_base 21: mod_base = OTHER; note = 2'-O-methyluridine-3'-phosphorothioate
  modified_base 22: mod_base = OTHER; note = 2'-O-methyladenosine-3'-phosphorothioate
  modified_base 23: mod_base = OTHER; note = 2'-O-methylguanosine
agtctccttcactattgagttag

SEQ ID NO: 3616 - RNA, 23 nt, synthetic construct
  source 1..23: mol_type = other RNA
  modified_base 1: mod_base = OTHER; note = 2'-O-methyladenosine-3'-phosphorothioate
  modified_base 2: mod_base = OTHER; note = 2'-deoxy-2'-fluorouridine-3'-phosphorothioate
  modified_base 3: mod_base = OTHER; note = 2'-O-methyladenosine-3'-phosphate
  modified_base 4: mod_base = OTHER; note = 2'-O-methylcytidine-3'-phosphate
  modified_base 5: mod_base = OTHER; note = 2'-O-methyladenosine-3'-phosphate
  modified_base 6: mod_base = OTHER; note = 2'-deoxy-2'-fluoroguanosine-3'-phosphate
  modified_base 7: mod_base = OTHER; note = 2'-O-methyluridine-3'-phosphate
  modified_base 8: mod_base = OTHER; note = 2'-deoxy-2'-fluoroguanosine-3'-phosphate
  modified_base 9: mod_base = OTHER; note = 2'-deoxy-2'-fluorocytidine-3'-phosphate
  modified_base 10: mod_base = OTHER; note = 2'-O-methylcytidine-3'-phosphate
  modified_base 11: mod_base = OTHER; note = 2'-O-methyluridine-3'-phosphate
  modified_base 12: mod_base = OTHER; note = 2'-O-methyluridine-3'-phosphate
  modified_base 13: mod_base = OTHER; note = 2'-O-methyladenosine-3'-phosphate
  modified_base 14: mod_base = OTHER; note = 2'-deoxy-2'-fluoroadenosine-3'-phosphate
  modified_base 15: mod_base = OTHER; note = 2'-O-methyladenosine-3'-phosphate
  modified_base 16: mod_base = OTHER; note = 2'-deoxy-2'-fluorouridine-3'-phosphate
  modified_base 17: mod_base = OTHER; note = 2'-O-methylguanosine-3'-phosphate
  modified_base 18: mod_base = OTHER; note = 2'-O-methyladenosine-3'-phosphate
  modified_base 19: mod_base = OTHER; note = 2'-O-methyladenosine-3'-phosphate
  modified_base 20: mod_base = OTHER; note = 2'-O-methylguanosine-3'-phosphate
  modified_base 21: mod_base = OTHER; note = 2'-O-methyladenosine-3'-phosphorothioate
  modified_base 22: mod_base = OTHER; note = 2'-O-methyluridine-3'-phosphorothioate
  modified_base 23: mod_base = OTHER; note = 2'-O-methyluridine
atacagtgccttaaatgaagatt

SEQ ID NO: 3617 - RNA, 23 nt, synthetic construct
  source 1..23: mol_type = other RNA
  modified_base 1: mod_base = OTHER; note = 2'-O-methyladenosine-3'-phosphorothioate
  modified_base 2: mod_base = OTHER; note = 2'-deoxy-2'-fluorouridine-3'-phosphorothioate
  modified_base 3: mod_base = OTHER; note = 2'-O-methyladenosine-3'-phosphate
  modified_base 4: mod_base = OTHER; note = 2'-O-methyladenosine-3'-phosphate
  modified_base 5: mod_base = OTHER; note = 2'-O-methylguanosine-3'-phosphate
  modified_base 6: mod_base = OTHER; note = 2'-deoxy-2'-fluoroadenosine-3'-phosphate
  modified_base 7: mod_base = OTHER; note = 2'-O-methylcytidine-3'-phosphate
  modified_base 8: mod_base = OTHER; note = 2'-deoxy-2'-fluoroadenosine-3'-phosphate
  modified_base 9: mod_base = OTHER; note = 2'-deoxy-2'-fluoroadenosine-3'-phosphate
  modified_base 10: mod_base = OTHER; note = 2'-O-methylguanosine-3'-phosphate
  modified_base 11: mod_base = OTHER; note = 2'-O-methyladenosine-3'-phosphate
  modified_base 12: mod_base = OTHER; note = 2'-O-methylcytidine-3'-phosphate
  modified_base 13: mod_base = OTHER; note = 2'-O-methyluridine-3'-phosphate
  modified_base 14: mod_base = OTHER; note = 2'-deoxy-2'-fluoroguanosine-3'-phosphate
  modified_base 15: mod_base = OTHER; note = 2'-O-methylcytidine-3'-phosphate
  modified_base 16: mod_base = OTHER; note = 2'-deoxy-2'-fluoroadenosine-3'-phosphate
  modified_base 17: mod_base = OTHER; note = 2'-O-methyladenosine-3'-phosphate
  modified_base 18: mod_base = OTHER; note = 2'-O-methylguanosine-3'-phosphate
  modified_base 19: mod_base = OTHER; note = 2'-O-methyladenosine-3'-phosphate
  modified_base 20: mod_base = OTHER; note = 2'-O-methylcytidine-3'-phosphate
  modified_base 21: mod_base = OTHER; note = 2'-O-methylcytidine-3'-phosphorothioate
  modified_base 22: mod_base = OTHER; note = 2'-O-methyladenosine-3'-phosphorothioate
  modified_base 23: mod_base = OTHER; note = 2'-O-methyladenosine
ataagacaagactgcaagaccaa

SEQ ID NO: 3618 - RNA, 23 nt, synthetic construct
  source 1..23: mol_type = other RNA
  modified_base 1: mod_base = OTHER; note = 2'-O-methyladenosine-3'-phosphorothioate
  modified_base 2: mod_base = OTHER; note = 2'-deoxy-2'-fluoroadenosine-3'-phosphorothioate
  modified_base 3: mod_base = OTHER; note = 2'-O-methylguanosine-3'-phosphate
  modified_base 4: mod_base = OTHER; note = 2'-O-methylguanosine-3'-phosphate
  modified_base 5: mod_base = OTHER; note = 2'-O-methyluridine-3'-phosphate
  modified_base 6: mod_base = OTHER; note = 2'-deoxy-2'-fluoroadenosine-3'-phosphate
  modified_base 7: mod_base = OTHER; note = 2'-O-methyladenosine-3'-phosphate
  modified_base 8: mod_base = OTHER; note = 2'-deoxy-2'-fluorocytidine-3'-phosphate
  modified_base 9: mod_base = OTHER; note = 2'-deoxy-2'-fluorouridine-3'-phosphate
  modified_base 10: mod_base = OTHER; note = 2'-O-methylcytidine-3'-phosphate
  modified_base 11: mod_base = OTHER; note = 2'-O-methyluridine-3'-phosphate
  modified_base 12: mod_base = OTHER; note = 2'-O-methyladenosine-3'-phosphate
  modified_base 13: mod_base = OTHER; note = 2'-O-methylguanosine-3'-phosphate
  modified_base 14: mod_base = OTHER; note = 2'-deoxy-2'-fluorocytidine-3'-phosphate
  modified_base 15: mod_base = OTHER; note = 2'-O-methyluridine-3'-phosphate
  modified_base 16: mod_base = OTHER; note = 2'-deoxy-2'-fluorocytidine-3'-phosphate
  modified_base 17: mod_base = OTHER; note = 2'-O-methyladenosine-3'-phosphate
  modified_base 18: mod_base = OTHER; note = 2'-O-methylguanosine-3'-phosphate
  modified_base 19: mod_base = OTHER; note = 2'-O-methyladenosine-3'-phosphate
  modified_base 20: mod_base = OTHER; note = 2'-O-methyluridine-3'-phosphate
  modified_base 21: mod_base = OTHER; note = 2'-O-methyladenosine-3'-phosphorothioate
  modified_base 22: mod_base = OTHER; note = 2'-O-methyladenosine-3'-phosphorothioate
  modified_base 23: mod_base = OTHER; note = 2'-O-methyluridine
aaggtaactctagctcagataat

SEQ ID NO: 3619 - RNA, 23 nt, synthetic construct
  source 1..23: mol_type = other RNA
  modified_base 1: mod_base = OTHER; note = 2'-O-methyladenosine-3'-phosphorothioate
  modified_base 2: mod_base = OTHER; note = 2'-deoxy-2'-fluoroadenosine-3'-phosphorothioate
  modified_base 3: mod_base = OTHER; note = 2'-O-methylguanosine-3'-phosphate
  modified_base 4: mod_base = OTHER; note = 2'-O-methylcytidine-3'-phosphate
  modified_base 5: mod_base = OTHER; note = 2'-O-methyluridine-3'-phosphate
  modified_base 6: mod_base = OTHER; note = 2'-deoxy-2'-fluoroadenosine-3'-phosphate
  modified_base 7: mod_base = OTHER; note = 2'-O-methyluridine-3'-phosphate
  modified_base 8: mod_base = OTHER; note = 2'-deoxy-2'-fluoroadenosine-3'-phosphate
  modified_base 9: mod_base = OTHER; note = 2'-deoxy-2'-fluorouridine-3'-phosphate
  modified_base 10: mod_base = OTHER; note = 2'-O-methylcytidine-3'-phosphate
  modified_base 11: mod_base = OTHER; note = 2'-O-methylcytidine-3'-phosphate
  modified_base 12: mod_base = OTHER; note = 2'-O-methyluridine-3'-phosphate
  modified_base 13: mod_base = OTHER; note = 2'-O-methyladenosine-3'-phosphate
  modified_base 14: mod_base = OTHER; note = 2'-deoxy-2'-fluorouridine-3'-phosphate
  modified_base 15: mod_base = OTHER; note = 2'-O-methyluridine-3'-phosphate
  modified_base 16: mod_base = OTHER; note = 2'-deoxy-2'-fluoroadenosine-3'-phosphate
  modified_base 17: mod_base = OTHER; note = 2'-O-methylcytidine-3'-phosphate
  modified_base 18: mod_base = OTHER; note = 2'-O-methyladenosine-3'-phosphate
  modified_base 19: mod_base = OTHER; note = 2'-O-methylguanosine-3'-phosphate
  modified_base 20: mod_base = OTHER; note = 2'-O-methyluridine-3'-phosphate
  modified_base 21: mod_base = OTHER; note = 2'-O-methyluridine-3'-phosphorothioate
  modified_base 22: mod_base = OTHER; note = 2'-O-methylguanosine-3'-phosphorothioate
  modified_base 23: mod_base = OTHER; note = 2'-O-methyladenosine
aagctatatcctattacagttga

SEQ ID NO: 3620 - RNA, 23 nt, synthetic construct
  source 1..23: mol_type = other RNA
  modified_base 1: mod_base = OTHER; note = 2'-O-methyladenosine-3'-phosphorothioate
  modified_base 2: mod_base = OTHER; note = 2'-deoxy-2'-fluoroguanosine-3'-phosphorothioate
  modified_base 3: mod_base = OTHER; note = 2'-O-methyladenosine-3'-phosphate
  modified_base 4: mod_base = OTHER; note = 2'-O-methyladenosine-3'-phosphate
  modified_base 5: mod_base = OTHER; note = 2'-O-methyladenosine-3'-phosphate
  modified_base 6: mod_base = OTHER; note = 2'-deoxy-2'-fluoroadenosine-3'-phosphate
  modified_base 7: mod_base = OTHER; note = 2'-O-methyluridine-3'-phosphate
  modified_base 8: mod_base = OTHER; note = 2'-deoxy-2'-fluoroadenosine-3'-phosphate
  modified_base 9: mod_base = OTHER; note = 2'-deoxy-2'-fluoroadenosine-3'-phosphate
  modified_base 10: mod_base = OTHER; note = 2'-O-methyladenosine-3'-phosphate
  modified_base 11: mod_base = OTHER; note = 2'-O-methylguanosine-3'-phosphate
  modified_base 12: mod_base = OTHER; note = 2'-O-methylcytidine-3'-phosphate
  modified_base 13: mod_base = OTHER; note = 2'-O-methylcytidine-3'-phosphate
  modified_base 14: mod_base = OTHER; note = 2'-deoxy-2'-fluorocytidine-3'-phosphate
  modified_base 15: mod_base = OTHER; note = 2'-O-methyluridine-3'-phosphate
  modified_base 16: mod_base = OTHER; note = 2'-deoxy-2'-fluorouridine-3'-phosphate
  modified_base 17: mod_base = OTHER; note = 2'-O-methyluridine-3'-phosphate
  modified_base 18: mod_base = OTHER; note = 2'-O-methyluridine-3'-phosphate
  modified_base 19: mod_base = OTHER; note = 2'-O-methylcytidine-3'-phosphate
  modified_base 20: mod_base = OTHER; note = 2'-O-methyladenosine-3'-phosphate
  modified_base 21: mod_base = OTHER; note = 2'-O-methyluridine-3'-phosphorothioate
  modified_base 22: mod_base = OTHER; note = 2'-O-methylguanosine-3'-phosphorothioate
  modified_base 23: mod_base = OTHER; note = 2'-O-methyluridine
agaaaataaagcccttttcatgt

SEQ ID NO: 3621 - RNA, 23 nt, synthetic construct
  source 1..23: mol_type = other RNA
  modified_base 1: mod_base = OTHER; note = 2'-O-methyladenosine-3'-phosphorothioate
  modified_base 2: mod_base = OTHER; note = 2'-deoxy-2'-fluoroadenosine-3'-phosphorothioate
  modified_base 3: mod_base = OTHER; note = 2'-O-methyladenosine-3'-phosphate
  modified_base 4: mod_base = OTHER; note = 2'-O-methylguanosine-3'-phosphate
  modified_base 5: mod_base = OTHER; note = 2'-O-methyladenosine-3'-phosphate
  modified_base 6: mod_base = OTHER; note = 2'-deoxy-2'-fluorocytidine-3'-phosphate
  modified_base 7: mod_base = OTHER; note = 2'-O-methyluridine-3'-phosphate
  modified_base 8: mod_base = OTHER; note = 2'-deoxy-2'-fluoroadenosine-3'-phosphate
  modified_base 9: mod_base = OTHER; note = 2'-deoxy-2'-fluoroguanosine-3'-phosphate
  modified_base 10: mod_base = OTHER; note = 2'-O-methylguanosine-3'-phosphate
  modified_base 11: mod_base = OTHER; note = 2'-O-methylguanosine-3'-phosphate
  modified_base 12: mod_base = OTHER; note = 2'-O-methyladenosine-3'-phosphate
  modified_base 13: mod_base = OTHER; note = 2'-O-methyluridine-3'-phosphate
  modified_base 14: mod_base = OTHER; note = 2'-deoxy-2'-fluoroadenosine-3'-phosphate
  modified_base 15: mod_base = OTHER; note = 2'-O-methylcytidine-3'-phosphate
  modified_base 16: mod_base = OTHER; note = 2'-deoxy-2'-fluorouridine-3'-phosphate
  modified_base 17: mod_base = OTHER; note = 2'-O-methyluridine-3'-phosphate
  modified_base 18: mod_base = OTHER; note = 2'-O-methyluridine-3'-phosphate
  modified_base 19: mod_base = OTHER; note = 2'-O-methylcytidine-3'-phosphate
  modified_base 20: mod_base = OTHER; note = 2'-O-methyluridine-3'-phosphate
  modified_base 21: mod_base = OTHER; note = 2'-O-methylguanosine-3'-phosphorothioate
  modified_base 22: mod_base = OTHER; note = 2'-O-methyluridine-3'-phosphorothioate
  modified_base 23: mod_base = OTHER; note = 2'-O-methyladenosine
aaagactagggatactttctgta

SEQ ID NO: 3622 - RNA, 23 nt, synthetic construct
  source 1..23: mol_type = other RNA
  modified_base 1: mod_base = OTHER; note = 2'-O-methyladenosine-3'-phosphorothioate
  modified_base 2: mod_base = OTHER; note = 2'-deoxy-2'-fluoroadenosine-3'-phosphorothioate
  modified_base 3: mod_base = OTHER; note = 2'-O-methylguanosine-3'-phosphate
  modified_base 4: mod_base = OTHER; note = 2'-O-methyladenosine-3'-phosphate
  modified_base 5: mod_base = OTHER; note = 2'-O-methyladenosine-3'-phosphate
  modified_base 6: mod_base = OTHER; note = 2'-deoxy-2'-fluoroadenosine-3'-phosphate
  modified_base 7: mod_base = OTHER; note = 2'-O-methylguanosine-3'-phosphate
  modified_base 8: mod_base = OTHER; note = 2'-deoxy-2'-fluoroadenosine-3'-phosphate
  modified_base 9: mod_base = OTHER; note = 2'-deoxy-2'-fluorouridine-3'-phosphate
  modified_base 10: mod_base = OTHER; note = 2'-O-methyladenosine-3'-phosphate
  modified_base 11: mod_base = OTHER; note = 2'-O-methyladenosine-3'-phosphate
  modified_base 12: mod_base = OTHER; note = 2'-O-methyladenosine-3'-phosphate
  modified_base 13: mod_base = OTHER; note = 2'-O-methyladenosine-3'-phosphate
  modified_base 14: mod_base = OTHER; note = 2'-deoxy-2'-fluoroadenosine-3'-phosphate
  modified_base 15: mod_base = OTHER; note = 2'-O-methylguanosine-3'-phosphate
  modified_base 16: mod_base = OTHER; note = 2'-deoxy-2'-fluorocytidine-3'-phosphate
  modified_base 17: mod_base = OTHER; note = 2'-O-methyluridine-3'-phosphate
  modified_base 18: mod_base = OTHER; note = 2'-O-methylguanosine-3'-phosphate
  modified_base 19: mod_base = OTHER; note = 2'-O-methylguanosine-3'-phosphate
  modified_base 20: mod_base = OTHER; note = 2'-O-methylcytidine-3'-phosphate
  modified_base 21: mod_base = OTHER; note = 2'-O-methyladenosine-3'-phosphorothioate
  modified_base 22: mod_base = OTHER; note = 2'-O-methylguanosine-3'-phosphorothioate
  modified_base 23: mod_base = OTHER; note = 2'-O-methylcytidine
aagaaagataaaaagctggcagc

SEQ ID NO: 3623 - RNA, 23 nt, synthetic construct
  source 1..23: mol_type = other RNA
  modified_base 1: mod_base = OTHER; note = 2'-O-methyladenosine-3'-phosphorothioate
  modified_base 2: mod_base = OTHER; note = 2'-deoxy-2'-fluoroadenosine-3'-phosphorothioate
  modified_base 3: mod_base = OTHER; note = 2'-O-methyladenosine-3'-phosphate
  modified_base 4: mod_base = OTHER; note = 2'-O-methyluridine-3'-phosphate
  modified_base 5: mod_base = OTHER; note = 2'-O-methyluridine-3'-phosphate
  modified_base 6: mod_base = OTHER; note = 2'-deoxy-2'-fluoroadenosine-3'-phosphate
  modified_base 7: mod_base = OTHER; note = 2'-O-methyluridine-3'-phosphate
  modified_base 8: mod_base = OTHER; note = 2'-deoxy-2'-fluoroadenosine-3'-phosphate
  modified_base 9: mod_base = OTHER; note = 2'-deoxy-2'-fluorouridine-3'-phosphate
  modified_base 10: mod_base = OTHER; note = 2'-O-methyluridine-3'-phosphate
  modified_base 11: mod_base = OTHER; note = 2'-O-methylcytidine-3'-phosphate
  modified_base 12: mod_base = OTHER; note = 2'-O-methyladenosine-3'-phosphate
  modified_base 13: mod_base = OTHER; note = 2'-O-methylcytidine-3'-phosphate
  modified_base 14: mod_base = OTHER; note = 2'-deoxy-2'-fluorocytidine-3'-phosphate
  modified_base 15: mod_base = OTHER; note = 2'-O-methyluridine-3'-phosphate
  modified_base 16: mod_base = OTHER; note = 2'-deoxy-2'-fluorocytidine-3'-phosphate
  modified_base 17: mod_base = OTHER; note = 2'-O-methyladenosine-3'-phosphate
  modified_base 18: mod_base = OTHER; note = 2'-O-methyladenosine-3'-phosphate
  modified_base 19: mod_base = OTHER; note = 2'-O-methyladenosine-3'-phosphate
  modified_base 20: mod_base = OTHER; note = 2'-O-methyladenosine-3'-phosphate
  modified_base 21: mod_base = OTHER; note = 2'-O-methylguanosine-3'-phosphorothioate
  modified_base 22: mod_base = OTHER; note = 2'-O-methyladenosine-3'-phosphorothioate
  modified_base 23: mod_base = OTHER; note = 2'-O-methylguanosine
aaattatattcacctcaaaagag

SEQ ID NO: 3624 - RNA, 23 nt, synthetic construct
  source 1..23: mol_type = other RNA
  modified_base 1: mod_base = OTHER; note = 2'-O-methyladenosine-3'-phosphorothioate
  modified_base 2: mod_base = OTHER; note = 2'-deoxy-2'-fluorouridine-3'-phosphorothioate
  modified_base 3: mod_base = OTHER; note = 2'-O-methylguanosine-3'-phosphate
  modified_base 4: mod_base = OTHER; note = 2'-O-methyluridine-3'-phosphate
  modified_base 5: mod_base = OTHER; note = 2'-O-methyluridine-3'-phosphate
  modified_base 6: mod_base = OTHER; note = 2'-deoxy-2'-fluorocytidine-3'-phosphate
  modified_base 7: mod_base = OTHER; note = 2'-O-methyluridine-3'-phosphate
  modified_base 8: mod_base = OTHER; note = 2'-deoxy-2'-fluorouridine-3'-phosphate
  modified_base 9: mod_base = OTHER; note = 2'-deoxy-2'-fluorocytidine-3'-phosphate
  modified_base 10: mod_base = OTHER; note = 2'-O-methyladenosine-3'-phosphate
  modified_base 11: mod_base = OTHER; note = 2'-O-methylguanosine-3'-phosphate
  modified_base 12: mod_base = OTHER; note = 2'-O-methyladenosine-3'-phosphate
  modified_base 13: mod_base = OTHER; note = 2'-O-methyluridine-3'-phosphate
  modified_base 14: mod_base = OTHER; note = 2'-deoxy-2'-fluoroadenosine-3'-phosphate
  modified_base 15: mod_base = OTHER; note = 2'-O-methyluridine-3'-phosphate
  modified_base 16: mod_base = OTHER; note = 2'-deoxy-2'-fluorocytidine-3'-phosphate
  modified_base 17: mod_base = OTHER; note = 2'-O-methylcytidine-3'-phosphate
  modified_base 18: mod_base = OTHER; note = 2'-O-methylcytidine-3'-phosphate
  modified_base 19: mod_base = OTHER; note = 2'-O-methyluridine-3'-phosphate
  modified_base 20: mod_base = OTHER; note = 2'-O-methylguanosine-3'-phosphate
  modified_base 21: mod_base = OTHER; note = 2'-O-methyladenosine-3'-phosphorothioate
  modified_base 22: mod_base = OTHER; note = 2'-O-methyladenosine-3'-phosphorothioate
  modified_base 23: mod_base = OTHER; note = 2'-O-methylcytidine
atgttcttcagatatccctgaac

SEQ ID NO: 3625 - RNA, 23 nt, synthetic construct
  source 1..23: mol_type = other RNA
  modified_base 1: mod_base = OTHER; note = 2'-O-methyladenosine-3'-phosphorothioate
  modified_base 2: mod_base = OTHER; note = 2'-deoxy-2'-fluoroadenosine-3'-phosphorothioate
  modified_base 3: mod_base = OTHER; note = 2'-O-methylguanosine-3'-phosphate
  modified_base 4: mod_base = OTHER; note = 2'-O-methylcytidine-3'-phosphate
  modified_base 5: mod_base = OTHER; note = 2'-O-methyluridine-3'-phosphate
  modified_base 6: mod_base = OTHER; note = 2'-deoxy-2'-fluorouridine-3'-phosphate
  modified_base 7: mod_base = OTHER; note = 2'-O-methyluridine-3'-phosphate
  modified_base 8: mod_base = OTHER; note = 2'-deoxy-2'-fluorouridine-3'-phosphate
  modified_base 9: mod_base = OTHER; note = 2'-deoxy-2'-fluoroguanosine-3'-phosphate
  modified_base 10: mod_base = OTHER; note = 2'-O-methyladenosine-3'-phosphate
  modified_base 11: mod_base = OTHER; note = 2'-O-methylcytidine-3'-phosphate
  modified_base 12: mod_base = OTHER; note = 2'-O-methylguanosine-3'-phosphate
  modified_base 13: mod_base = OTHER; note = 2'-O-methyluridine-3'-phosphate
  modified_base 14: mod_base = OTHER; note = 2'-deoxy-2'-fluoroguanosine-3'-phosphate
  modified_base 15: mod_base = OTHER; note = 2'-O-methylcytidine-3'-phosphate
  modified_base 16: mod_base = OTHER; note = 2'-deoxy-2'-fluorouridine-3'-phosphate
  modified_base 17: mod_base = OTHER; note = 2'-O-methyluridine-3'-phosphate
  modified_base 18: mod_base = OTHER; note = 2'-O-methylguanosine-3'-phosphate
  modified_base 19: mod_base = OTHER; note = 2'-O-methyluridine-3'-phosphate
  modified_base 20: mod_base = OTHER; note = 2'-O-methyluridine-3'-phosphate
  modified_base 21: mod_base = OTHER; note = 2'-O-methylguanosine-3'-phosphorothioate
  modified_base 22: mod_base = OTHER; note = 2'-O-methyladenosine-3'-phosphorothioate
  modified_base 23: mod_base = OTHER; note = 2'-O-methylguanosine
aagcttttgacgtgcttgttgag

SEQ ID NO: 3626 - RNA, 23 nt, synthetic construct
  source 1..23: mol_type = other RNA
  modified_base 1: mod_base = OTHER; note = 2'-O-methyladenosine-3'-phosphorothioate
  modified_base 2: mod_base = OTHER; note = 2'-deoxy-2'-fluoroguanosine-3'-phosphorothioate
  modified_base 3: mod_base = OTHER; note = 2'-O-methyladenosine-3'-phosphate
  modified_base 4: mod_base = OTHER; note = 2'-O-methyladenosine-3'-phosphate
  modified_base 5: mod_base = OTHER; note = 2'-O-methylguanosine-3'-phosphate
  modified_base 6: mod_base = OTHER; note = 2'-deoxy-2'-fluorouridine-3'-phosphate
  modified_base 7: mod_base = OTHER; note = 2'-O-methylguanosine-3'-phosphate
  modified_base 8: mod_base = OTHER; note = 2'-deoxy-2'-fluoroguanosine-3'-phosphate
  modified_base 9: mod_base = OTHER; note = 2'-deoxy-2'-fluorouridine-3'-phosphate
  modified_base 10: mod_base = OTHER; note = 2'-O-methylcytidine-3'-phosphate
  modified_base 11: mod_base = OTHER; note = 2'-O-methyluridine-3'-phosphate
  modified_base 12: mod_base = OTHER; note = 2'-O-methylguanosine-3'-phosphate
  modified_base 13: mod_base = OTHER; note = 2'-O-methyluridine-3'-phosphate
  modified_base 14: mod_base = OTHER; note = 2'-deoxy-2'-fluorouridine-3'-phosphate
  modified_base 15: mod_base = OTHER; note = 2'-O-methyladenosine-3'-phosphate
  modified_base 16: mod_base = OTHER; note = 2'-deoxy-2'-fluorouridine-3'-phosphate
  modified_base 17: mod_base = OTHER; note = 2'-O-methyladenosine-3'-phosphate
  modified_base 18: mod_base = OTHER; note = 2'-O-methylcytidine-3'-phosphate
  modified_base 19: mod_base = OTHER; note = 2'-O-methyladenosine-3'-phosphate
  modified_base 20: mod_base = OTHER; note = 2'-O-methyladenosine-3'-phosphate
  modified_base 21: mod_base = OTHER; note = 2'-O-methyluridine-3'-phosphorothioate
  modified_base 22: mod_base = OTHER; note = 2'-O-methyladenosine-3'-phosphorothioate
  modified_base 23: mod_base = OTHER; note = 2'-O-methyluridine
agaagtggtctgttatacaatat

SEQ ID NO: 3627 - RNA, 23 nt, synthetic construct
  source 1..23: mol_type = other RNA
  modified_base 1: mod_base = OTHER; note = 2'-O-methyladenosine-3'-phosphorothioate
  modified_base 2: mod_base = OTHER; note = 2'-deoxy-2'-fluoroadenosine-3'-phosphorothioate
  modified_base 3: mod_base = OTHER; note = 2'-O-methyladenosine-3'-phosphate
  modified_base 4: mod_base = OTHER; note = 2'-O-methyluridine-3'-phosphate
  modified_base 5: mod_base = OTHER; note = 2'-O-methyladenosine-3'-phosphate
  modified_base 6: mod_base = OTHER; note = 2'-deoxy-2'-fluorouridine-3'-phosphate
  modified_base 7: mod_base = OTHER; note = 2'-O-methyladenosine-3'-phosphate
  modified_base 8: mod_base = OTHER; note = 2'-deoxy-2'-fluoroadenosine-3'-phosphate
  modified_base 9: mod_base = OTHER; note = 2'-deoxy-2'-fluoroadenosine-3'-phosphate
  modified_base 10: mod_base = OTHER; note = 2'-O-methyladenosine-3'-phosphate
  modified_base 11: mod_base = OTHER; note = 2'-O-methylguanosine-3'-phosphate
  modified_base 12: mod_base = OTHER; note = 2'-O-methylguanosine-3'-phosphate
  modified_base 13: mod_base = OTHER; note = 2'-O-methylcytidine-3'-phosphate
  modified_base 14: mod_base = OTHER; note = 2'-deoxy-2'-fluoroadenosine-3'-phosphate
  modified_base 15: mod_base = OTHER; note = 2'-O-methyladenosine-3'-phosphate
  modified_base 16: mod_base = OTHER; note = 2'-deoxy-2'-fluorocytidine-3'-phosphate
  modified_base 17: mod_base = OTHER; note = 2'-O-methyladenosine-3'-phosphate
  modified_base 18: mod_base = OTHER; note = 2'-O-methyluridine-3'-phosphate
  modified_base 19: mod_base = OTHER; note = 2'-O-methyluridine-3'-phosphate
  modified_base 20: mod_base = OTHER; note = 2'-O-methyladenosine-3'-phosphate
  modified_base 21: mod_base = OTHER; note = 2'-O-methyladenosine-3'-phosphorothioate
  modified_base 22: mod_base = OTHER; note = 2'-O-methylguanosine-3'-phosphorothioate
  modified_base 23: mod_base = OTHER; note = 2'-O-methylcytidine
aaatataaaaggcaacattaagc

SEQ ID NO: 3628 - RNA, 23 nt, synthetic construct
  source 1..23: mol_type = other RNA
  modified_base 1: mod_base = OTHER; note = 2'-O-methyladenosine-3'-phosphorothioate
  modified_base 2: mod_base = OTHER; note = 2'-deoxy-2'-fluorouridine-3'-phosphorothioate
  modified_base 3: mod_base = OTHER; note = 2'-O-methylguanosine-3'-phosphate
  modified_base 4: mod_base = OTHER; note = 2'-O-methyluridine-3'-phosphate
  modified_base 5: mod_base = OTHER; note = 2'-O-methyladenosine-3'-phosphate
  modified_base 6: mod_base = OTHER; note = 2'-deoxy-2'-fluoroadenosine-3'-phosphate
  modified_base 7: mod_base = OTHER; note = 2'-O-methylguanosine-3'-phosphate
  modified_base 8: mod_base = OTHER; note = 2'-deoxy-2'-fluoroadenosine-3'-phosphate
  modified_base 9: mod_base = OTHER; note = 2'-deoxy-2'-fluoroadenosine-3'-phosphate
  modified_base 10: mod_base = OTHER; note = 2'-O-methyladenosine-3'-phosphate
  modified_base 11: mod_base = OTHER; note = 2'-O-methylcytidine-3'-phosphate
  modified_base 12: mod_base = OTHER; note = 2'-O-methylcytidine-3'-phosphate
  modified_base 13: mod_base = OTHER; note = 2'-O-methyladenosine-3'-phosphate
  modified_base 14: mod_base = OTHER; note = 2'-deoxy-2'-fluoroadenosine-3'-phosphate
  modified_base 15: mod_base = OTHER; note = 2'-O-methylguanosine-3'-phosphate
  modified_base 16: mod_base = OTHER; note = 2'-deoxy-2'-fluoroguanosine-3'-phosphate
  modified_base 17: mod_base = OTHER; note = 2'-O-methyluridine-3'-phosphate
  modified_base 18: mod_base = OTHER; note = 2'-O-methylcytidine-3'-phosphate
  modified_base 19: mod_base = OTHER; note = 2'-O-methyladenosine-3'-phosphate
  modified_base 20: mod_base = OTHER; note = 2'-O-methyladenosine-3'-phosphate
  modified_base 21: mod_base = OTHER; note = 2'-O-methyluridine-3'-phosphorothioate
  modified_base 22: mod_base = OTHER; note = 2'-O-methyladenosine-3'-phosphorothioate
  modified_base 23: mod_base = OTHER; note = 2'-O-methyluridine
atgtaagaaaccaaggtcaatat

SEQ ID NO: 3629 - RNA, 23 nt, synthetic construct
  source 1..23: mol_type = other RNA
  modified_base 1: mod_base = OTHER; note = 2'-O-methyladenosine-3'-phosphorothioate
  modified_base 2: mod_base = OTHER; note = 2'-deoxy-2'-fluoroguanosine-3'-phosphorothioate
  modified_base 3: mod_base = OTHER; note = 2'-O-methyluridine-3'-phosphate
  modified_base 4: mod_base = OTHER; note = 2'-O-methyluridine-3'-phosphate
  modified_base 5: mod_base = OTHER; note = 2'-O-methylcytidine-3'-phosphate
  modified_base 6: mod_base = OTHER; note = 2'-deoxy-2'-fluorouridine-3'-phosphate
  modified_base 7: mod_base = OTHER; note = 2'-O-methylcytidine-3'-phosphate
  modified_base 8: mod_base = OTHER; note = 2'-deoxy-2'-fluoroadenosine-3'-phosphate
  modified_base 9: mod_base = OTHER; note = 2'-deoxy-2'-fluorouridine-3'-phosphate
  modified_base 10: mod_base = OTHER; note = 2'-O-methylcytidine-3'-phosphate
  modified_base 11: mod_base = OTHER; note = 2'-O-methyluridine-3'-phosphate
  modified_base 12: mod_base = OTHER; note = 2'-O-methylguanosine-3'-phosphate
  modified_base 13: mod_base = OTHER; note = 2'-O-methyluridine-3'-phosphate
  modified_base 14: mod_base = OTHER; note = 2'-deoxy-2'-fluorouridine-3'-phosphate
  modified_base 15: mod_base = OTHER; note = 2'-O-methylguanosine-3'-phosphate
  modified_base 16: mod_base = OTHER; note = 2'-deoxy-2'-fluoroadenosine-3'-phosphate
  modified_base 17: mod_base = OTHER; note = 2'-O-methyluridine-3'-phosphate
  modified_base 18: mod_base = OTHER; note = 2'-O-methylcytidine-3'-phosphate
  modified_base 19: mod_base = OTHER; note = 2'-O-methyladenosine-3'-phosphate
  modified_base 20: mod_base = OTHER; note = 2'-O-methyluridine-3'-phosphate
  modified_base 21: mod_base = OTHER; note = 2'-O-methyladenosine-3'-phosphorothioate
  modified_base 22: mod_base = OTHER; note = 2'-O-methyluridine-3'-phosphorothioate
  modified_base 23: mod_base = OTHER; note = 2'-O-methylguanosine
agttctcatctgttgatcatatg

SEQ ID NO: 3630 - RNA, 23 nt, synthetic construct
  source 1..23: mol_type = other RNA
  modified_base 1: mod_base = OTHER; note = 2'-O-methyladenosine-3'-phosphorothioate
  modified_base 2: mod_base = OTHER; note = 2'-deoxy-2'-fluoroguanosine-3'-phosphorothioate
  modified_base 3: mod_base = OTHER; note = 2'-O-methyluridine-3'-phosphate
  modified_base 4: mod_base = OTHER; note = 2'-O-methylcytidine-3'-phosphate
  modified_base 5: mod_base = OTHER; note = 2'-O-methyladenosine-3'-phosphate
  modified_base 6: mod_base = OTHER; note = 2'-deoxy-2'-fluorocytidine-3'-phosphate
  modified_base 7: mod_base = OTHER; note = 2'-O-methyluridine-3'-phosphate
  modified_base 8: mod_base = OTHER; note = 2'-deoxy-2'-fluorouridine-3'-phosphate
  modified_base 9: mod_base = OTHER; note = 2'-deoxy-2'-fluoroadenosine-3'-phosphate
  modified_base 10: mod_base = OTHER; note = 2'-O-methyladenosine-3'-phosphate
  modified_base 11: mod_base = OTHER; note = 2'-O-methylguanosine-3'-phosphate
  modified_base 12: mod_base = OTHER; note = 2'-O-methyladenosine-3'-phosphate
  modified_base 13: mod_base = OTHER; note = 2'-O-methyladenosine-3'-phosphate
  modified_base 14: mod_base = OTHER; note = 2'-deoxy-2'-fluoroadenosine-3'-phosphate
  modified_base 15: mod_base = OTHER; note = 2'-O-methyluridine-3'-phosphate
  modified_base 16: mod_base = OTHER; note = 2'-deoxy-2'-fluorocytidine-3'-phosphate
  modified_base 17: mod_base = OTHER; note = 2'-O-methyluridine-3'-phosphate
  modified_base 18: mod_base = OTHER; note = 2'-O-methylcytidine-3'-phosphate
  modified_base 19: mod_base = OTHER; note = 2'-O-methyluridine-3'-phosphate
  modified_base 20: mod_base = OTHER; note = 2'-O-methylguanosine-3'-phosphate
  modified_base 21: mod_base = OTHER; note = 2'-O-methylcytidine-3'-phosphorothioate
  modified_base 22: mod_base = OTHER; note = 2'-O-methylcytidine-3'-phosphorothioate
  modified_base 23: mod_base = OTHER; note = 2'-O-methylcytidine
agtcacttaagaaatctctgccc

SEQ ID NO: 3631 - RNA, 23 nt, synthetic construct
  source 1..23: mol_type = other RNA
  modified_base 1: mod_base = OTHER; note = 2'-O-methyladenosine-3'-phosphorothioate
  modified_base 2: mod_base = OTHER; note = 2'-deoxy-2'-fluorouridine-3'-phosphorothioate
  modified_base 3: mod_base = OTHER; note = 2'-O-methyluridine-3'-phosphate
  modified_base 4: mod_base = OTHER; note = 2'-O-methyluridine-3'-phosphate
  modified_base 5: mod_base = OTHER; note = 2'-O-methyluridine-3'-phosphate
  modified_base 6: mod_base = OTHER; note = 2'-deoxy-2'-fluorocytidine-3'-phosphate
  modified_base 7: mod_base = OTHER; note = 2'-O-methyladenosine-3'-phosphate
  modified_base 8: mod_base = OTHER; note = 2'-deoxy-2'-fluorocytidine-3'-phosphate
  modified_base 9: mod_base = OTHER; note = 2'-deoxy-2'-fluoroadenosine-3'-phosphate
  modified_base 10: mod_base = OTHER; note = 2'-O-methyladenosine-3'-phosphate
  modified_base 11: mod_base = OTHER; note = 2'-O-methyladenosine-3'-phosphate
  modified_base 12: mod_base = OTHER; note = 2'-O-methylguanosine-3'-phosphate
  modified_base 13: mod_base = OTHER; note = 2'-O-methyladenosine-3'-phosphate
  modified_base 14: mod_base = OTHER; note = 2'-deoxy-2'-fluoroadenosine-3'-phosphate
  modified_base 15: mod_base = OTHER; note = 2'-O-methyladenosine-3'-phosphate
  modified_base 16: mod_base = OTHER; note = 2'-deoxy-2'-fluorocytidine-3'-phosphate
  modified_base 17: mod_base = OTHER; note = 2'-O-methyluridine-3'-phosphate
  modified_base 18: mod_base = OTHER; note = 2'-O-methylcytidine-3'-phosphate
  modified_base 19: mod_base = OTHER; note = 2'-O-methyluridine-3'-phosphate
  modified_base 20: mod_base = OTHER; note = 2'-O-methyluridine-3'-phosphate
  modified_base 21: mod_base = OTHER; note = 2'-O-methylcytidine-3'-phosphorothioate
  modified_base 22: mod_base = OTHER; note = 2'-O-methyluridine-3'-phosphorothioate
  modified_base 23: mod_base = OTHER; note = 2'-O-methyladenosine
attttcacaaagaaactcttcta

SEQ ID NO: 3632 - RNA, 23 nt, synthetic construct
  source 1..23: mol_type = other RNA
  modified_base 1: mod_base = OTHER; note = 2'-O-methyladenosine-3'-phosphorothioate
  modified_base 2: mod_base = OTHER; note = 2'-deoxy-2'-fluorouridine-3'-phosphorothioate
  modified_base 3: mod_base = OTHER; note = 2'-O-methyluridine-3'-phosphate
  modified_base 4: mod_base = OTHER; note = 2'-O-methylguanosine-3'-phosphate
  modified_base 5: mod_base = OTHER; note = 2'-O-methyladenosine-3'-phosphate
  modified_base 6: mod_base = OTHER; note = 2'-deoxy-2'-fluoroguanosine-3'-phosphate
  modified_base 7: mod_base = OTHER; note = 2'-O-methylguanosine-3'-phosphate
  modified_base 8: mod_base = OTHER; note = 2'-deoxy-2'-fluorocytidine-3'-phosphate
  modified_base 9: mod_base = OTHER; note = 2'-deoxy-2'-fluoroadenosine-3'-phosphate
  modified_base 10: mod_base = OTHER; note = 2'-O-methyluridine-3'-phosphate
  modified_base 11: mod_base = OTHER; note = 2'-O-methyluridine-3'-phosphate
  modified_base 12: mod_base = OTHER; note = 2'-O-methyluridine-3'-phosphate
  modified_base 13: mod_base = OTHER; note = 2'-O-methylcytidine-3'-phosphate
  modified_base 14: mod_base = OTHER; note = 2'-deoxy-2'-fluoroadenosine-3'-phosphate
  modified_base 15: mod_base = OTHER; note = 2'-O-methyladenosine-3'-phosphate
  modified_base 16: mod_base = OTHER; note = 2'-deoxy-2'-fluorouridine-3'-phosphate
  modified_base 17: mod_base = OTHER; note = 2'-O-methylguanosine-3'-phosphate
  modified_base 18: mod_base = OTHER; note = 2'-O-methylguanosine-3'-phosphate
  modified_base 19: mod_base = OTHER; note = 2'-O-methyluridine-3'-phosphate
  modified_base 20: mod_base = OTHER; note = 2'-O-methyluridine-3'-phosphate
  modified_base 21: mod_base = OTHER; note = 2'-O-methylguanosine-3'-phosphorothioate
  modified_base 22: mod_base = OTHER; note = 2'-O-methyladenosine-3'-phosphorothioate
  modified_base 23: mod_base = OTHER; note = 2'-O-methylguanosine
attgaggcatttcaatggttgag

SEQ ID NO: 3633 - RNA, 23 nt, synthetic construct
  source 1..23: mol_type = other RNA
  modified_base 1: mod_base = OTHER; note = 2'-O-methyladenosine-3'-phosphorothioate
  modified_base 2: mod_base = OTHER; note = 2'-deoxy-2'-fluoroguanosine-3'-phosphorothioate
  modified_base 3: mod_base = OTHER; note = 2'-O-methyladenosine-3'-phosphate
  modified_base 4: mod_base = OTHER; note = 2'-O-methylguanosine-3'-phosphate
  modified_base 5: mod_base = OTHER; note = 2'-O-methyluridine-3'-phosphate
  modified_base 6: mod_base = OTHER; note = 2'-deoxy-2'-fluoroguanosine-3'-phosphate
  modified_base 7: mod_base = OTHER; note = 2'-O-methylguanosine-3'-phosphate
  modified_base 8: mod_base = OTHER; note = 2'-deoxy-2'-fluoroadenosine-3'-phosphate
  modified_base 9: mod_base = OTHER; note = 2'-deoxy-2'-fluorocytidine-3'-phosphate
  modified_base 10: mod_base = OTHER; note = 2'-O-methyluridine-3'-phosphate
  modified_base 11: mod_base = OTHER; note = 2'-O-methylguanosine-3'-phosphate
  modified_base 12: mod_base = OTHER; note = 2'-O-methylcytidine-3'-phosphate
  modified_base 13: mod_base = OTHER; note = 2'-O-methyladenosine-3'-phosphate
  modified_base 14: mod_base = OTHER; note = 2'-deoxy-2'-fluoroadenosine-3'-phosphate
  modified_base 15: mod_base = OTHER; note = 2'-O-methyladenosine-3'-phosphate
  modified_base 16: mod_base = OTHER; note = 2'-deoxy-2'-fluoroadenosine-3'-phosphate
  modified_base 17: mod_base = OTHER; note = 2'-O-methyluridine-3'-phosphate
  modified_base 18: mod_base = OTHER; note = 2'-O-methyladenosine-3'-phosphate
  modified_base 19: mod_base = OTHER; note = 2'-O-methylguanosine-3'-phosphate
  modified_base 20: mod_base = OTHER; note = 2'-O-methyladenosine-3'-phosphate
  modified_base 21: mod_base = OTHER; note = 2'-O-methyluridine-3'-phosphorothioate
  modified_base 22: mod_base = OTHER; note = 2'-O-methylguanosine-3'-phosphorothioate
  modified_base 23: mod_base = OTHER; note = 2'-O-methylcytidine
agagtggactgcaaaatagatgc

SEQ ID NO: 3634 - RNA, 23 nt, synthetic construct
  source 1..23: mol_type = other RNA
  modified_base 1: mod_base = OTHER; note = 2'-O-methyladenosine-3'-phosphorothioate
  modified_base 2: mod_base = OTHER; note = 2'-deoxy-2'-fluoroadenosine-3'-phosphorothioate
  modified_base 3: mod_base = OTHER; note = 2'-O-methylguanosine-3'-phosphate
  modified_base 4: mod_base = OTHER; note = 2'-O-methyladenosine-3'-phosphate
  modified_base 5: mod_base = OTHER; note = 2'-O-methyluridine-3'-phosphate
  modified_base 6: mod_base = OTHER; note = 2'-deoxy-2'-fluoroguanosine-3'-phosphate
  modified_base 7: mod_base = OTHER; note = 2'-O-methyladenosine-3'-phosphate
  modified_base 8: mod_base = OTHER; note = 2'-deoxy-2'-fluoroadenosine-3'-phosphate
  modified_base 9: mod_base = OTHER; note = 2'-deoxy-2'-fluorouridine-3'-phosphate
  modified_base 10: mod_base = OTHER; note = 2'-O-methyladenosine-3'-phosphate
  modified_base 11: mod_base = OTHER; note = 2'-O-methylcytidine-3'-phosphate
  modified_base 12: mod_base = OTHER; note = 2'-O-methyladenosine-3'-phosphate
  modified_base 13: mod_base = OTHER; note = 2'-O-methyluridine-3'-phosphate
  modified_base 14: mod_base = OTHER; note = 2'-deoxy-2'-fluoroadenosine-3'-phosphate
  modified_base 15: mod_base = OTHER; note = 2'-O-methyluridine-3'-phosphate
  modified_base 16: mod_base = OTHER; note = 2'-deoxy-2'-fluoroguanosine-3'-phosphate
  modified_base 17: mod_base = OTHER; note = 2'-O-methylguanosine-3'-phosphate
  modified_base 18: mod_base = OTHER; note = 2'-O-methyluridine-3'-phosphate
  modified_base 19: mod_base = OTHER; note = 2'-O-methyladenosine-3'-phosphate
  modified_base 20: mod_base = OTHER; note = 2'-O-methyladenosine-3'-phosphate
  modified_base 21: mod_base = OTHER; note = 2'-O-methylcytidine-3'-phosphorothioate
  modified_base 22: mod_base = OTHER; note = 2'-O-methyladenosine-3'-phosphorothioate
  modified_base 23: mod_base = OTHER; note = 2'-O-methyladenosine
aagatgaatacatatggtaacaa

SEQ ID NO: 3635 - RNA, 23 nt, synthetic construct
  source 1..23: mol_type = other RNA
  modified_base 1: mod_base = OTHER; note = 2'-O-methyladenosine-3'-phosphorothioate
  modified_base 2: mod_base = OTHER; note = 2'-deoxy-2'-fluorocytidine-3'-phosphorothioate
  modified_base 3: mod_base = OTHER; note = 2'-O-methylcytidine-3'-phosphate
  modified_base 4: mod_base = OTHER; note = 2'-O-methyluridine-3'-phosphate
  modified_base 5: mod_base = OTHER; note = 2'-O-methylguanosine-3'-phosphate
  modified_base 6: mod_base = OTHER; note = 2'-deoxy-2'-fluorouridine-3'-phosphate
  modified_base 7: mod_base = OTHER; note = 2'-O-methyladenosine-3'-phosphate
  modified_base 8: mod_base = OTHER; note = 2'-deoxy-2'-fluoroadenosine-3'-phosphate
  modified_base 9: mod_base = OTHER; note = 2'-deoxy-2'-fluoroadenosine-3'-phosphate
  modified_base 10: mod_base = OTHER; note = 2'-O-methyluridine-3'-phosphate
  modified_base 11: mod_base = OTHER; note = 2'-O-methyluridine-3'-phosphate
  modified_base 12: mod_base = OTHER; note = 2'-O-methyladenosine-3'-phosphate
  modified_base 13: mod_base = OTHER; note = 2'-O-methyladenosine-3'-phosphate
  modified_base 14: mod_base = OTHER; note = 2'-deoxy-2'-fluoroguanosine-3'-phosphate
  modified_base 15: mod_base = OTHER; note = 2'-O-methyladenosine-3'-phosphate
  modified_base 16: mod_base = OTHER; note = 2'-deoxy-2'-fluorouridine-3'-phosphate
  modified_base 17: mod_base = OTHER; note = 2'-O-methyladenosine-3'-phosphate
  modified_base 18: mod_base = OTHER; note = 2'-O-methyladenosine-3'-phosphate
  modified_base 19: mod_base = OTHER; note = 2'-O-methylguanosine-3'-phosphate
  modified_base 20: mod_base = OTHER; note = 2'-O-methyladenosine-3'-phosphate
  modified_base 21: mod_base = OTHER; note = 2'-O-methyladenosine-3'-phosphorothioate
  modified_base 22: mod_base = OTHER; note = 2'-O-methylcytidine-3'-phosphorothioate
  modified_base 23: mod_base = OTHER; note = 2'-O-methyluridine
acctgtaaattaagataagaact

SEQ ID NO: 3636 - RNA, 23 nt, synthetic construct
  source 1..23: mol_type = other RNA
  modified_base 1: mod_base = OTHER; note = 2'-O-methyladenosine-3'-phosphorothioate
  modified_base 2: mod_base = OTHER; note = 2'-deoxy-2'-fluoroguanosine-3'-phosphorothioate
  modified_base 3: mod_base = OTHER; note = 2'-O-methylcytidine-3'-phosphate
  modified_base 4: mod_base = OTHER; note = 2'-O-methylcytidine-3'-phosphate
  modified_base 5: mod_base = OTHER; note = 2'-O-methyladenosine-3'-phosphate
  modified_base 6: mod_base = OTHER; note = 2'-deoxy-2'-fluoroadenosine-3'-phosphate
  modified_base 7: mod_base = OTHER; note = 2'-O-methyladenosine-3'-phosphate
  modified_base 8: mod_base = OTHER; note = 2'-deoxy-2'-fluorouridine-3'-phosphate
  modified_base 9: mod_base = OTHER; note = 2'-deoxy-2'-fluoroadenosine-3'-phosphate
  modified_base 10: mod_base = OTHER; note = 2'-O-methyluridine-3'-phosphate
  modified_base 11: mod_base = OTHER; note = 2'-O-methylguanosine-3'-phosphate
  modified_base 12: mod_base = OTHER; note = 2'-O-methyladenosine-3'-phosphate
  modified_base 13: mod_base = OTHER; note = 2'-O-methylguanosine-3'-phosphate
  modified_base 14: mod_base = OTHER; note = 2'-deoxy-2'-fluoroadenosine-3'-phosphate
  modified_base 15: mod_base = OTHER; note = 2'-O-methyluridine-3'-phosphate
  modified_base 16: mod_base = OTHER; note = 2'-deoxy-2'-fluoroadenosine-3'-phosphate
  modified_base 17: mod_base = OTHER; note = 2'-O-methyladenosine-3'-phosphate
  modified_base 18: mod_base = OTHER; note = 2'-O-methylcytidine-3'-phosphate
  modified_base 19: mod_base = OTHER; note = 2'-O-methyluridine-3'-phosphate
  modified_base 20: mod_base = OTHER; note = 2'-O-methylguanosine-3'-phosphate
  modified_base 21: mod_base = OTHER; note = 2'-O-methyluridine-3'-phosphorothioate
  modified_base 22: mod_base = OTHER; note = 2'-O-methylcytidine-3'-phosphorothioate
  modified_base 23: mod_base = OTHER; note = 2'-O-methyluridine
agccaaatatgagataactgtct

SEQ ID NO: 3637 - RNA, 23 nt, synthetic construct
  source 1..23: mol_type = other RNA
  modified_base 1: mod_base = OTHER; note = 2'-O-methyladenosine-3'-phosphorothioate
  modified_base 2: mod_base = OTHER; note = 2'-deoxy-2'-fluorocytidine-3'-phosphorothioate
  modified_base 3: mod_base = OTHER; note = 2'-O-methyladenosine-3'-phosphate
  modified_base 4: mod_base = OTHER; note = 2'-O-methyladenosine-3'-phosphate
  modified_base 5: mod_base = OTHER; note = 2'-O-methylcytidine-3'-phosphate
  modified_base 6: mod_base = OTHER; note = 2'-deoxy-2'-fluorouridine-3'-phosphate
  modified_base 7: mod_base = OTHER; note = 2'-O-methylguanosine-3'-phosphate
  modified_base 8: mod_base = OTHER; note = 2'-deoxy-2'-fluoroadenosine-3'-phosphate
  modified_base 9: mod_base = OTHER; note = 2'-deoxy-2'-fluoroadenosine-3'-phosphate
  modified_base 10: mod_base = OTHER; note = 2'-O-methyladenosine-3'-phosphate
  modified_base 11: mod_base = OTHER; note = 2'-O-methyluridine-3'-phosphate
  modified_base 12: mod_base = OTHER; note = 2'-O-methyluridine-3'-phosphate
  modified_base 13: mod_base = OTHER; note = 2'-O-methyladenosine-3'-phosphate
  modified_base 14: mod_base = OTHER; note = 2'-deoxy-2'-fluoroadenosine-3'-phosphate
  modified_base 15: mod_base = OTHER; note = 2'-O-methyladenosine-3'-phosphate
  modified_base 16: mod_base = OTHER; note = 2'-deoxy-2'-fluoroadenosine-3'-phosphate
  modified_base 17: mod_base = OTHER; note = 2'-O-methyluridine-3'-phosphate
  modified_base 18: mod_base = OTHER; note = 2'-O-methyluridine-3'-phosphate
  modified_base 19: mod_base = OTHER; note = 2'-O-methylguanosine-3'-phosphate
  modified_base 20: mod_base = OTHER; note = 2'-O-methyluridine-3'-phosphate
  modified_base 21: mod_base = OTHER; note = 2'-O-methyluridine-3'-phosphorothioate
  modified_base 22: mod_base = OTHER; note = 2'-O-methylguanosine-3'-phosphorothioate
  modified_base 23: mod_base = OTHER; note = 2'-O-methylguanosine
acaactgaaattaaaattgttgg

SEQ ID NO: 3638 - RNA, 23 nt, synthetic construct
  source 1..23: mol_type = other RNA
  modified_base 1: mod_base = OTHER; note = 2'-O-methyladenosine-3'-phosphorothioate
  modified_base 2: mod_base = OTHER; note = 2'-deoxy-2'-fluoroadenosine-3'-phosphorothioate
  modified_base 3: mod_base = OTHER; note = 2'-O-methyladenosine-3'-phosphate
  modified_base 4: mod_base = OTHER; note = 2'-O-methyluridine-3'-phosphate
  modified_base 5: mod_base = OTHER; note = 2'-O-methylcytidine-3'-phosphate
  modified_base 6: mod_base = OTHER; note = 2'-deoxy-2'-fluorouridine-3'-phosphate
  modified_base 7: mod_base = OTHER; note = 2'-O-methyluridine-3'-phosphate
  modified_base 8: mod_base = OTHER; note = 2'-deoxy-2'-fluorouridine-3'-phosphate
  modified_base 9: mod_base = OTHER; note = 2'-deoxy-2'-fluorouridine-3'-phosphate
  modified_base 10: mod_base = OTHER; note = 2'-O-methyladenosine-3'-phosphate
  modified_base 11: mod_base = OTHER; note = 2'-O-methyluridine-3'-phosphate
  modified_base 12: mod_base = OTHER; note = 2'-O-methyluridine-3'-phosphate
  modified_base 13: mod_base = OTHER; note = 2'-O-methyluridine-3'-phosphate
  modified_base 14: mod_base = OTHER; note = 2'-deoxy-2'-fluorouridine-3'-phosphate
  modified_base 15: mod_base = OTHER; note = 2'-O-methylcytidine-3'-phosphate
  modified_base 16: mod_base = OTHER; note = 2'-deoxy-2'-fluorocytidine-3'-phosphate
  modified_base 17: mod_base = OTHER; note = 2'-O-methyluridine-3'-phosphate
  modified_base 18: mod_base = OTHER; note = 2'-O-methyluridine-3'-phosphate
  modified_base 19: mod_base = OTHER; note = 2'-O-methylguanosine-3'-phosphate
  modified_base 20: mod_base = OTHER; note = 2'-O-methylcytidine-3'-phosphate
  modified_base 21: mod_base = OTHER; note = 2'-O-methylcytidine-3'-phosphorothioate
  modified_base 22: mod_base = OTHER; note = 2'-O-methyluridine-3'-phosphorothioate
  modified_base 23: mod_base = OTHER; note = 2'-O-methylguanosine
aaatcttttattttccttgcctg

SEQ ID NO: 3639 - RNA, 23 nt, synthetic construct
  source 1..23: mol_type = other RNA
  modified_base 1: mod_base = OTHER; note = 2'-O-methyladenosine-3'-phosphorothioate
  modified_base 2: mod_base = OTHER; note = 2'-deoxy-2'-fluorouridine-3'-phosphorothioate
  modified_base 3: mod_base = OTHER; note = 2'-O-methylcytidine-3'-phosphate
  modified_base 4: mod_base = OTHER; note = 2'-O-methyladenosine-3'-phosphate
  modified_base 5: mod_base = OTHER; note = 2'-O-methylguanosine-3'-phosphate
  modified_base 6: mod_base = OTHER; note = 2'-deoxy-2'-fluoroadenosine-3'-phosphate
  modified_base 7: mod_base = OTHER; note = 2'-O-methylguanosine-3'-phosphate
  modified_base 8: mod_base = OTHER; note = 2'-deoxy-2'-fluoroadenosine-3'-phosphate
  modified_base 9: mod_base = OTHER; note = 2'-deoxy-2'-fluoroadenosine-3'-phosphate
  modified_base 10: mod_base = OTHER; note = 2'-O-methylguanosine-3'-phosphate
  modified_base 11: mod_base = OTHER; note = 2'-O-methylcytidine-3'-phosphate
  modified_base 12: mod_base = OTHER; note = 2'-O-methyladenosine-3'-phosphate
  modified_base 13: mod_base = OTHER; note = 2'-O-methyluridine-3'-phosphate
  modified_base 14: mod_base = OTHER; note = 2'-deoxy-2'-fluorocytidine-3'-phosphate
  modified_base 15: mod_base = OTHER; note = 2'-O-methyladenosine-3'-phosphate
  modified_base 16: mod_base = OTHER; note = 2'-deoxy-2'-fluorocytidine-3'-phosphate
  modified_base 17: mod_base = OTHER; note = 2'-O-methylguanosine-3'-phosphate
  modified_base 18: mod_base = OTHER; note = 2'-O-methyladenosine-3'-phosphate
  modified_base 19: mod_base = OTHER; note = 2'-O-methyluridine-3'-phosphate
  modified_base 20: mod_base = OTHER; note = 2'-O-methylguanosine-3'-phosphate
  modified_base 21: mod_base = OTHER; note = 2'-O-methyladenosine-3'-phosphorothioate
  modified_base 22: mod_base = OTHER; note = 2'-O-methyluridine-3'-phosphorothioate
  modified_base 23: mod_base = OTHER; note = 2'-O-methyladenosine
atcagagaagcatcacgatgata

SEQ ID NO: 3640 - RNA, 23 nt, synthetic construct
  source 1..23: mol_type = other RNA
  modified_base 1: mod_base = OTHER; note = 2'-O-methyladenosine-3'-phosphorothioate
  modified_base 2: mod_base = OTHER; note = 2'-deoxy-2'-fluoroadenosine-3'-phosphorothioate
  modified_base 3: mod_base = OTHER; note = 2'-O-methyladenosine-3'-phosphate
  modified_base 4: mod_base = OTHER; note = 2'-O-methyladenosine-3'-phosphate
  modified_base 5: mod_base = OTHER; note = 2'-O-methyladenosine-3'-phosphate
  modified_base 6: mod_base = OTHER; note = 2'-deoxy-2'-fluorocytidine-3'-phosphate
  modified_base 7: mod_base = OTHER; note = 2'-O-methyluridine-3'-phosphate
  modified_base 8: mod_base = OTHER; note = 2'-deoxy-2'-fluoroadenosine-3'-phosphate
  modified_base 9: mod_base = OTHER; note = 2'-deoxy-2'-fluoroadenosine-3'-phosphate
  modified_base 10: mod_base = OTHER; note = 2'-O-methyladenosine-3'-phosphate
  modified_base 11: mod_base = OTHER; note = 2'-O-methylcytidine-3'-phosphate
  modified_base 12: mod_base = OTHER; note = 2'-O-methyluridine-3'-phosphate
  modified_base 13: mod_base = OTHER; note = 2'-O-methylcytidine-3'-phosphate
  modified_base 14: mod_base = OTHER; note = 2'-deoxy-2'-fluorouridine-3'-phosphate
  modified_base 15: mod_base = OTHER; note = 2'-O-methyluridine-3'-phosphate
  modified_base 16: mod_base = OTHER; note = 2'-deoxy-2'-fluorocytidine-3'-phosphate
  modified_base 17: mod_base = OTHER; note = 2'-O-methyladenosine-3'-phosphate
  modified_base 18: mod_base = OTHER; note = 2'-O-methyluridine-3'-phosphate
  modified_base 19: mod_base = OTHER; note = 2'-O-methylcytidine-3'-phosphate
  modified_base 20: mod_base = OTHER; note = 2'-O-methyluridine-3'-phosphate
  modified_base 21: mod_base = OTHER; note = 2'-O-methyluridine-3'-phosphorothioate
  modified_base 22: mod_base = OTHER; note = 2'-O-methylcytidine-3'-phosphorothioate
  modified_base 23: mod_base = OTHER; note = 2'-O-methyladenosine
aaaaactaaactcttcatcttca

SEQ ID NO: 3641 - RNA, 23 nt, synthetic construct
  source 1..23: mol_type = other RNA
  modified_base 1: mod_base = OTHER; note = 2'-O-methyladenosine-3'-phosphorothioate
  modified_base 2: mod_base = OTHER; note = 2'-deoxy-2'-fluorouridine-3'-phosphorothioate
  modified_base 3: mod_base = OTHER; note = 2'-O-methylcytidine-3'-phosphate
  modified_base 4: mod_base = OTHER; note = 2'-O-methyladenosine-3'-phosphate
  modified_base 5: mod_base = OTHER; note = 2'-O-methylguanosine-3'-phosphate
  modified_base 6: mod_base = OTHER; note = 2'-deoxy-2'-fluoroadenosine-3'-phosphate
  modified_base 7: mod_base = OTHER; note = 2'-O-methyluridine-3'-phosphate
  modified_base 8: mod_base = OTHER; note = 2'-deoxy-2'-fluoroadenosine-3'-phosphate
  modified_base 9: mod_base = OTHER; note = 2'-deoxy-2'-fluoroadenosine-3'-phosphate
  modified_base 10: mod_base = OTHER; note = 2'-O-methyluridine-3'-phosphate
  modified_base 11: mod_base = OTHER; note = 2'-O-methyluridine-3'-phosphate
  modified_base 12: mod_base = OTHER; note = 2'-O-methylcytidine-3'-phosphate
  modified_base 13: mod_base = OTHER; note = 2'-O-methyladenosine-3'-phosphate
  modified_base 14: mod_base = OTHER; note = 2'-deoxy-2'-fluorocytidine-3'-phosphate
  modified_base 15: mod_base = OTHER; note = 2'-O-methyluridine-3'-phosphate
  modified_base 16: mod_base = OTHER; note = 2'-deoxy-2'-fluoroadenosine-3'-phosphate
  modified_base 17: mod_base = OTHER; note = 2'-O-methylcytidine-3'-phosphate
  modified_base 18: mod_base = OTHER; note = 2'-O-methyladenosine-3'-phosphate
  modified_base 19: mod_base = OTHER; note = 2'-O-methylguanosine-3'-phosphate
  modified_base 20: mod_base = OTHER; note = 2'-O-methyluridine-3'-phosphate
  modified_base 21: mod_base = OTHER; note = 2'-O-methylguanosine-3'-phosphorothioate
  modified_base 22: mod_base = OTHER; note = 2'-O-methylcytidine-3'-phosphorothioate
  modified_base 23: mod_base = OTHER; note = 2'-O-methylcytidine
atcagataattcactacagtgcc

SEQ ID NO: 3642 - RNA, 23 nt, synthetic construct
  source 1..23: mol_type = other RNA
  modified_base 1: mod_base = OTHER; note = 2'-O-methyladenosine-3'-phosphorothioate
  modified_base 2: mod_base = OTHER; note = 2'-deoxy-2'-fluorouridine-3'-phosphorothioate
  modified_base 3: mod_base = OTHER; note = 2'-O-methylguanosine-3'-phosphate
  modified_base 4: mod_base = OTHER; note = 2'-O-methylcytidine-3'-phosphate
  modified_base 5: mod_base = OTHER; note = 2'-O-methyladenosine-3'-phosphate
  modified_base 6: mod_base = OTHER; note = 2'-deoxy-2'-fluoroguanosine-3'-phosphate
  modified_base 7: mod_base = OTHER; note = 2'-O-methyladenosine-3'-phosphate
  modified_base 8: mod_base = OTHER; note = 2'-deoxy-2'-fluorouridine-3'-phosphate
  modified_base 9: mod_base = OTHER; note = 2'-deoxy-2'-fluorocytidine-3'-phosphate
  modified_base 10: mod_base = OTHER; note = 2'-O-methyluridine-3'-phosphate
  modified_base 11: mod_base = OTHER; note = 2'-O-methyladenosine-3'-phosphate
  modified_base 12: mod_base = OTHER; note = 2'-O-methylguanosine-3'-phosphate
  modified_base 13: mod_base = OTHER; note = 2'-O-methyladenosine-3'-phosphate
  modified_base 14: mod_base = OTHER; note = 2'-deoxy-2'-fluoroguanosine-3'-phosphate
  modified_base 15: mod_base = OTHER; note = 2'-O-methylguanosine-3'-phosphate
  modified_base 16: mod_base = OTHER; note = 2'-deoxy-2'-fluorouridine-3'-phosphate
  modified_base 17: mod_base = OTHER; note = 2'-O-methyluridine-3'-phosphate
  modified_base 18: mod_base = OTHER; note = 2'-O-methylguanosine-3'-phosphate
  modified_base 19: mod_base = OTHER; note = 2'-O-methyluridine-3'-phosphate
  modified_base 20: mod_base = OTHER; note = 2'-O-methyladenosine-3'-phosphate
  modified_base 21: mod_base = OTHER; note = 2'-O-methylguanosine-3'-phosphorothioate
  modified_base 22: mod_base = OTHER; note = 2'-O-methylcytidine-3'-phosphorothioate
  modified_base 23: mod_base = OTHER; note = 2'-O-methyladenosine
atgcagatctagaggttgtagca

SEQ ID NO: 3643 - RNA, 23 nt, synthetic construct
  source 1..23: mol_type = other RNA
  modified_base 1: mod_base = OTHER; note = 2'-O-methyladenosine-3'-phosphorothioate
  modified_base 2: mod_base = OTHER; note = 2'-deoxy-2'-fluorouridine-3'-phosphorothioate
  modified_base 3: mod_base = OTHER; note = 2'-O-methyluridine-3'-phosphate
  modified_base 4: mod_base = OTHER; note = 2'-O-methyluridine-3'-phosphate
  modified_base 5: mod_base = OTHER; note = 2'-O-methylcytidine-3'-phosphate
  modified_base 6: mod_base = OTHER; note = 2'-deoxy-2'-fluorocytidine-3'-phosphate
  modified_base 7: mod_base = OTHER; note = 2'-O-methyladenosine-3'-phosphate
  modified_base 8: mod_base = OTHER; note = 2'-deoxy-2'-fluorouridine-3'-phosphate
  modified_base 9: mod_base = OTHER; note = 2'-deoxy-2'-fluoroadenosine-3'-phosphate
  modified_base 10: mod_base = OTHER; note = 2'-O-methylcytidine-3'-phosphate
  modified_base 11: mod_base = OTHER; note = 2'-O-methyluridine-3'-phosphate
  modified_base 12: mod_base = OTHER; note = 2'-O-methyluridine-3'-phosphate
  modified_base 13: mod_base = OTHER; note = 2'-O-methylguanosine-3'-phosphate
  modified_base 14: mod_base = OTHER; note = 2'-deoxy-2'-fluoroadenosine-3'-phosphate
  modified_base 15: mod_base = OTHER; note = 2'-O-methyluridine-3'-phosphate
  modified_base 16: mod_base = OTHER; note = 2'-deoxy-2'-fluorouridine-3'-phosphate
  modified_base 17: mod_base = OTHER; note = 2'-O-methylcytidine-3'-phosphate
  modified_base 18: mod_base = OTHER; note = 2'-O-methyluridine-3'-phosphate
  modified_base 19: mod_base = OTHER; note = 2'-O-methylcytidine-3'-phosphate
  modified_base 20: mod_base = OTHER; note = 2'-O-methyladenosine-3'-phosphate
  modified_base 21: mod_base = OTHER; note = 2'-O-methyluridine-3'-phosphorothioate
  modified_base 22: mod_base = OTHER; note = 2'-O-methylcytidine-3'-phosphorothioate
  modified_base 23: mod_base = OTHER; note = 2'-O-methyladenosine
atttccatacttgattctcatca

SEQ ID NO: 3644 - RNA, 23 nt, synthetic construct
  source 1..23: mol_type = other RNA
  modified_base 1: mod_base = OTHER; note = 2'-O-methyladenosine-3'-phosphorothioate
  modified_base 2: mod_base = OTHER; note = 2'-deoxy-2'-fluorouridine-3'-phosphorothioate
  modified_base 3: mod_base = OTHER; note = 2'-O-methyladenosine-3'-phosphate
  modified_base 4: mod_base = OTHER; note = 2'-O-methylcytidine-3'-phosphate
  modified_base 5: mod_base = OTHER; note = 2'-O-methyladenosine-3'-phosphate
  modified_base 6: mod_base = OTHER; note = 2'-deoxy-2'-fluoroguanosine-3'-phosphate
  modified_base 7: mod_base = OTHER; note = 2'-O-methyluridine-3'-phosphate
  modified_base 8: mod_base = OTHER; note = 2'-deoxy-2'-fluorouridine-3'-phosphate
  modified_base 9: mod_base = OTHER; note = 2'-deoxy-2'-fluoroguanosine-3'-phosphate
  modified_base 10: mod_base = OTHER; note = 2'-O-methyladenosine-3'-phosphate
  modified_base 11: mod_base = OTHER; note = 2'-O-methylcytidine-3'-phosphate
  modified_base 12: mod_base = OTHER; note = 2'-O-methylcytidine-3'-phosphate
  modified_base 13: mod_base = OTHER; note = 2'-O-methylcytidine-3'-phosphate
  modified_base 14: mod_base = OTHER; note = 2'-deoxy-2'-fluorouridine-3'-phosphate
  modified_base 15: mod_base = OTHER; note = 2'-O-methyluridine-3'-phosphate
  modified_base 16: mod_base = OTHER; note = 2'-deoxy-2'-fluoroguanosine-3'-phosphate
  modified_base 17: mod_base = OTHER; note = 2'-O-methyladenosine-3'-phosphate
  modified_base 18: mod_base = OTHER; note = 2'-O-methyladenosine-3'-phosphate
  modified_base 19: mod_base = OTHER; note = 2'-O-methylcytidine-3'-phosphate
  modified_base 20: mod_base = OTHER; note = 2'-O-methyladenosine-3'-phosphate
  modified_base 21: mod_base = OTHER; note = 2'-O-methyladenosine-3'-phosphorothioate
  modified_base 22: mod_base = OTHER; note = 2'-O-methylcytidine-3'-phosphorothioate
  modified_base 23: mod_base = OTHER; note = 2'-O-methyladenosine
atacagttgacccttgaacaaca

SEQ ID NO: 3645 - RNA, 23 nt, synthetic construct
  source 1..23: mol_type = other RNA
  modified_base 1: mod_base = OTHER; note = 2'-O-methyladenosine-3'-phosphorothioate
  modified_base 2: mod_base = OTHER; note = 2'-deoxy-2'-fluorocytidine-3'-phosphorothioate
  modified_base 3: mod_base = OTHER; note = 2'-O-methyluridine-3'-phosphate
  modified_base 4: mod_base = OTHER; note = 2'-O-methyladenosine-3'-phosphate
  modified_base 5: mod_base = OTHER; note = 2'-O-methylguanosine-3'-phosphate
  modified_base 6: mod_base = OTHER; note = 2'-deoxy-2'-fluorouridine-3'-phosphate
  modified_base 7: mod_base = OTHER; note = 2'-O-methyladenosine-3'-phosphate
  modified_base 8: mod_base = OTHER; note = 2'-deoxy-2'-fluorouridine-3'-phosphate
  modified_base 9: mod_base = OTHER; note = 2'-deoxy-2'-fluorocytidine-3'-phosphate
  modified_base 10: mod_base = OTHER; note = 2'-O-methyluridine-3'-phosphate
  modified_base 11: mod_base = OTHER; note = 2'-O-methylcytidine-3'-phosphate
  modified_base 12: mod_base = OTHER; note = 2'-O-methyluridine-3'-phosphate
  modified_base 13: mod_base = OTHER; note = 2'-O-methylcytidine-3'-phosphate
  modified_base 14: mod_base = OTHER; note = 2'-deoxy-2'-fluoroadenosine-3'-phosphate
  modified_base 15: mod_base = OTHER; note = 2'-O-methyluridine-3'-phosphate
  modified_base 16: mod_base = OTHER; note = 2'-deoxy-2'-fluoroguanosine-3'-phosphate
  modified_base 17: mod_base = OTHER; note = 2'-O-methylguanosine-3'-phosphate
  modified_base 18: mod_base = OTHER; note = 2'-O-methylguanosine-3'-phosphate
  modified_base 19: mod_base = OTHER; note = 2'-O-methyluridine-3'-phosphate
  modified_base 20: mod_base = OTHER; note = 2'-O-methyluridine-3'-phosphate
  modified_base 21: mod_base = OTHER; note = 2'-O-methylcytidine-3'-phosphorothioate
  modified_base 22: mod_base = OTHER; note = 2'-O-methyladenosine-3'-phosphorothioate
  modified_base 23: mod_base = OTHER; note = 2'-O-methylguanosine
actagtatctctcatgggttcag

SEQ ID NO: 3646 - RNA, 23 nt, synthetic construct
  source 1..23: mol_type = other RNA
  modified_base 1: mod_base = OTHER; note = 2'-O-methyladenosine-3'-phosphorothioate
  modified_base 2: mod_base = OTHER; note = 2'-deoxy-2'-fluoroguanosine-3'-phosphorothioate
  modified_base 3: mod_base = OTHER; note = 2'-O-methyladenosine-3'-phosphate
  modified_base 4: mod_base = OTHER; note = 2'-O-methylcytidine-3'-phosphate
  modified_base 5: mod_base = OTHER; note = 2'-O-methyluridine-3'-phosphate
  modified_base 6: mod_base = OTHER; note = 2'-deoxy-2'-fluoroadenosine-3'-phosphate
  modified_base 7: mod_base = OTHER; note = 2'-O-methyladenosine-3'-phosphate
  modified_base 8: mod_base = OTHER; note = 2'-deoxy-2'-fluorouridine-3'-phosphate
  modified_base 9: mod_base = OTHER; note = 2'-deoxy-2'-fluorocytidine-3'-phosphate
  modified_base 10: mod_base = OTHER; note = 2'-O-methyluridine-3'-phosphate
  modified_base 11: mod_base = OTHER; note = 2'-O-methylcytidine-3'-phosphate
  modified_base 12: mod_base = OTHER; note = 2'-O-methyladenosine-3'-phosphate
  modified_base 13: mod_base = OTHER; note = 2'-O-methylcytidine-3'-phosphate
  modified_base 14: mod_base = OTHER; note = 2'-deoxy-2'-fluorouridine-3'-phosphate
  modified_base 15: mod_base = OTHER; note = 2'-O-methylguanosine-3'-phosphate
  modified_base 16: mod_base = OTHER; note = 2'-deoxy-2'-fluorouridine-3'-phosphate
  modified_base 17: mod_base = OTHER; note = 2'-O-methylcytidine-3'-phosphate
  modified_base 18: mod_base = OTHER; note = 2'-O-methyladenosine-3'-phosphate
  modified_base 19: mod_base = OTHER; note = 2'-O-methylcytidine-3'-phosphate
  modified_base 20: mod_base = OTHER; note = 2'-O-methyladenosine-3'-phosphate
  modified_base 21: mod_base = OTHER; note = 2'-O-methyluridine-3'-phosphorothioate
  modified_base 22: mod_base = OTHER; note = 2'-O-methyladenosine-3'-phosphorothioate
  modified_base 23: mod_base = OTHER; note = 2'-O-methyluridine
agactaatctcactgtcacatat

SEQ ID NO: 3647 - RNA, 23 nt, synthetic construct
  source 1..23: mol_type = other RNA
  modified_base 1: mod_base = OTHER; note = 2'-O-methyladenosine-3'-phosphorothioate
  modified_base 2: mod_base = OTHER; note = 2'-deoxy-2'-fluorocytidine-3'-phosphorothioate
  modified_base 3: mod_base = OTHER; note = 2'-O-methyladenosine-3'-phosphate
  modified_base 4: mod_base = OTHER; note = 2'-O-methylcytidine-3'-phosphate
  modified_base 5: mod_base = OTHER; note = 2'-O-methyluridine-3'-phosphate
  modified_base 6: mod_base = OTHER; note = 2'-deoxy-2'-fluorouridine-3'-phosphate
  modified_base 7: mod_base = OTHER; note = 2'-O-methylcytidine-3'-phosphate
  modified_base 8: mod_base = OTHER; note = 2'-deoxy-2'-fluorocytidine-3'-phosphate
  modified_base 9: mod_base = OTHER; note = 2'-deoxy-2'-fluoroadenosine-3'-phosphate
  modified_base 10: mod_base = OTHER; note = 2'-O-methyluridine-3'-phosphate
  modified_base 11: mod_base = OTHER; note = 2'-O-methyluridine-3'-phosphate
  modified_base 12: mod_base = OTHER; note = 2'-O-methyluridine-3'-phosphate
  modified_base 13: mod_base = OTHER; note = 2'-O-methyladenosine-3'-phosphate
  modified_base 14: mod_base = OTHER; note = 2'-deoxy-2'-fluoroadenosine-3'-phosphate
  modified_base 15: mod_base = OTHER; note = 2'-O-methyluridine-3'-phosphate
  modified_base 16: mod_base = OTHER; note = 2'-deoxy-2'-fluoroguanosine-3'-phosphate
  modified_base 17: mod_base = OTHER; note = 2'-O-methyladenosine-3'-phosphate
  modified_base 18: mod_base = OTHER; note = 2'-O-methyladenosine-3'-phosphate
  modified_base 19: mod_base = OTHER; note = 2'-O-methyluridine-3'-phosphate
  modified_base 20: mod_base = OTHER; note = 2'-O-methyladenosine-3'-phosphate
  modified_base 21: mod_base = OTHER; note = 2'-O-methylguanosine-3'-phosphorothioate
  modified_base 22: mod_base = OTHER; note = 2'-O-methyluridine-3'-phosphorothioate
  modified_base 23: mod_base = OTHER; note = 2'-O-methyladenosine
acacttccatttaatgaatagta

SEQ ID NO: 3648 - RNA, 23 nt, synthetic construct
  source 1..23: mol_type = other RNA
  modified_base 1: mod_base = OTHER; note = 2'-O-methyladenosine-3'-phosphorothioate
  modified_base 2: mod_base = OTHER; note = 2'-deoxy-2'-fluorouridine-3'-phosphorothioate
  modified_base 3: mod_base = OTHER; note = 2'-O-methyluridine-3'-phosphate
  modified_base 4: mod_base = OTHER; note = 2'-O-methylcytidine-3'-phosphate
  modified_base 5: mod_base = OTHER; note = 2'-O-methyluridine-3'-phosphate
  modified_base 6: mod_base = OTHER; note = 2'-deoxy-2'-fluorocytidine-3'-phosphate
  modified_base 7: mod_base = OTHER; note = 2'-O-methyladenosine-3'-phosphate
  modified_base 8: mod_base = OTHER; note = 2'-deoxy-2'-fluorouridine-3'-phosphate
  modified_base 9: mod_base = OTHER; note = 2'-deoxy-2'-fluorocytidine-3'-phosphate
  modified_base 10: mod_base = OTHER; note = 2'-O-methyladenosine-3'-phosphate
  modified_base 11: mod_base = OTHER; note = 2'-O-methyladenosine-3'-phosphate
  modified_base 12: mod_base = OTHER; note = 2'-O-methylcytidine-3'-phosphate
  modified_base 13: mod_base = OTHER; note = 2'-O-methyluridine-3'-phosphate
  modified_base 14: mod_base = OTHER; note = 2'-deoxy-2'-fluorouridine-3'-phosphate
  modified_base 15: mod_base = OTHER; note = 2'-O-methyluridine-3'-phosphate
  modified_base 16: mod_base = OTHER; note = 2'-deoxy-2'-fluoroadenosine-3'-phosphate
  modified_base 17: mod_base = OTHER; note = 2'-O-methyladenosine-3'-phosphate
  modified_base 18: mod_base = OTHER; note = 2'-O-methyladenosine-3'-phosphate
  modified_base 19: mod_base = OTHER; note = 2'-O-methyladenosine-3'-phosphate
  modified_base 20: mod_base = OTHER; note = 2'-O-methylguanosine-3'-phosphate
  modified_base 21: mod_base = OTHER; note = 2'-O-methyladenosine-3'-phosphorothioate
  modified_base 22: mod_base = OTHER; note = 2'-O-methyluridine-3'-phosphorothioate
  modified_base 23: mod_base = OTHER; note = 2'-O-methylguanosine
attctcatcaactttaaaagatg

SEQ ID NO: 3649 - RNA, 23 nt, synthetic construct
  source 1..23: mol_type = other RNA
  modified_base 1: mod_base = OTHER; note = 2'-O-methyladenosine-3'-phosphorothioate
  modified_base 2: mod_base = OTHER; note = 2'-deoxy-2'-fluoroadenosine-3'-phosphorothioate
  modified_base 3: mod_base = OTHER; note = 2'-O-methylguanosine-3'-phosphate
  modified_base 4: mod_base = OTHER; note = 2'-O-methyluridine-3'-phosphate
  modified_base 5: mod_base = OTHER; note = 2'-O-methyluridine-3'-phosphate
  modified_base 6: mod_base = OTHER; note = 2'-deoxy-2'-fluorouridine-3'-phosphate
  modified_base 7: mod_base = OTHER; note = 2'-O-methyluridine-3'-phosphate
  modified_base 8: mod_base = OTHER; note = 2'-deoxy-2'-fluorocytidine-3'-phosphate
  modified_base 9: mod_base = OTHER; note = 2'-deoxy-2'-fluorouridine-3'-phosphate
  modified_base 10: mod_base = OTHER; note = 2'-O-methylguanosine-3'-phosphate
  modified_base 11: mod_base = OTHER; note = 2'-O-methyladenosine-3'-phosphate
  modified_base 12: mod_base = OTHER; note = 2'-O-methylcytidine-3'-phosphate
  modified_base 13: mod_base = OTHER; note = 2'-O-methyluridine-3'-phosphate
  modified_base 14: mod_base = OTHER; note = 2'-deoxy-2'-fluorocytidine-3'-phosphate
  modified_base 15: mod_base = OTHER; note = 2'-O-methyluridine-3'-phosphate
  modified_base 16: mod_base = OTHER; note = 2'-deoxy-2'-fluoroguanosine-3'-phosphate
  modified_base 17: mod_base = OTHER; note = 2'-O-methyluridine-3'-phosphate
  modified_base 18: mod_base = OTHER; note = 2'-O-methylcytidine-3'-phosphate
  modified_base 19: mod_base = OTHER; note = 2'-O-methyladenosine-3'-phosphate
  modified_base 20: mod_base = OTHER; note = 2'-O-methylcytidine-3'-phosphate
  modified_base 21: mod_base = OTHER; note = 2'-O-methylcytidine-3'-phosphorothioate
  modified_base 22: mod_base = OTHER; note = 2'-O-methylcytidine-3'-phosphorothioate
  modified_base 23: mod_base = OTHER; note = 2'-O-methyladenosine
aagttttctgactctgtcaccca

SEQ ID NO: 3650 - RNA, 23 nt, synthetic construct
  source 1..23: mol_type = other RNA
  modified_base 1: mod_base = OTHER; note = 2'-O-methyladenosine-3'-phosphorothioate
  modified_base 2: mod_base = OTHER; note = 2'-deoxy-2'-fluoroguanosine-3'-phosphorothioate
  modified_base 3: mod_base = OTHER; note = 2'-O-methyladenosine-3'-phosphate
  modified_base 4: mod_base = OTHER; note = 2'-O-methylguanosine-3'-phosphate
  modified_base 5: mod_base = OTHER; note = 2'-O-methyluridine-3'-phosphate
  modified_base 6: mod_base = OTHER; note = 2'-deoxy-2'-fluoroguanosine-3'-phosphate
  modified_base 7: mod_base = OTHER; note = 2'-O-methyluridine-3'-phosphate
  modified_base 8: mod_base = OTHER; note = 2'-deoxy-2'-fluoroadenosine-3'-phosphate
  modified_base 9: mod_base = OTHER; note = 2'-deoxy-2'-fluorouridine-3'-phosphate
  modified_base 10: mod_base = OTHER; note = 2'-O-methylcytidine-3'-phosphate
  modified_base 11: mod_base = OTHER; note = 2'-O-methyladenosine-3'-phosphate
  modified_base 12: mod_base = OTHER; note = 2'-O-methylcytidine-3'-phosphate
  modified_base 13: mod_base = OTHER; note = 2'-O-methylcytidine-3'-phosphate
  modified_base 14: mod_base = OTHER; note = 2'-deoxy-2'-fluorouridine-3'-phosphate
  modified_base 15: mod_base = OTHER; note = 2'-O-methylguanosine-3'-phosphate
  modified_base 16: mod_base = OTHER; note = 2'-deoxy-2'-fluorouridine-3'-phosphate
  modified_base 17: mod_base = OTHER; note = 2'-O-methyluridine-3'-phosphate
  modified_base 18: mod_base = OTHER; note = 2'-O-methylguanosine-3'-phosphate
  modified_base 19: mod_base = OTHER; note = 2'-O-methyluridine-3'-phosphate
  modified_base 20: mod_base = OTHER; note = 2'-O-methyluridine-3'-phosphate
  modified_base 21: mod_base = OTHER; note = 2'-O-methyluridine-3'-phosphorothioate
  modified_base 22: mod_base = OTHER; note = 2'-O-methyladenosine-3'-phosphorothioate
  modified_base 23: mod_base = OTHER; note = 2'-O-methyluridine
agagtgtatcacctgttgtttat

SEQ ID NO: 3651 - RNA, 23 nt, synthetic construct
  source 1..23: mol_type = other RNA
  modified_base 1: mod_base = OTHER; note = 2'-O-methyladenosine-3'-phosphorothioate
  modified_base 2: mod_base = OTHER; note = 2'-deoxy-2'-fluorocytidine-3'-phosphorothioate
  modified_base 3: mod_base = OTHER; note = 2'-O-methyluridine-3'-phosphate
  modified_base 4: mod_base = OTHER; note = 2'-O-methylcytidine-3'-phosphate
  modified_base 5: mod_base = OTHER; note = 2'-O-methyluridine-3'-phosphate
  modified_base 6: mod_base = OTHER; note = 2'-deoxy-2'-fluorouridine-3'-phosphate
  modified_base 7: mod_base = OTHER; note = 2'-O-methylcytidine-3'-phosphate
  modified_base 8: mod_base = OTHER; note = 2'-deoxy-2'-fluorouridine-3'-phosphate
  modified_base 9: mod_base = OTHER; note = 2'-deoxy-2'-fluoroadenosine-3'-phosphate
  modified_base 10: mod_base = OTHER; note = 2'-O-methylcytidine-3'-phosphate
  modified_base 11: mod_base = OTHER; note = 2'-O-methyluridine-3'-phosphate
  modified_base 12: mod_base = OTHER; note = 2'-O-methylcytidine-3'-phosphate
  modified_base 13: mod_base = OTHER; note = 2'-O-methyladenosine-3'-phosphate
  modified_base 14: mod_base = OTHER; note = 2'-deoxy-2'-fluoroguanosine-3'-phosphate
  modified_base 15: mod_base = OTHER; note = 2'-O-methylguanosine-3'-phosphate
  modified_base 16: mod_base = OTHER; note = 2'-deoxy-2'-fluoroadenosine-3'-phosphate
  modified_base 17: mod_base = OTHER; note = 2'-O-methyladenosine-3'-phosphate
  modified_base 18: mod_base = OTHER; note = 2'-O-methylguanosine-3'-phosphate
  modified_base 19: mod_base = OTHER; note = 2'-O-methyluridine-3'-phosphate
  modified_base 20: mod_base = OTHER; note = 2'-O-methylguanosine-3'-phosphate
  modified_base 21: mod_base = OTHER; note = 2'-O-methylguanosine-3'-phosphorothioate
  modified_base 22: mod_base = OTHER; note = 2'-O-methyluridine-3'-phosphorothioate
  modified_base 23: mod_base = OTHER; note = 2'-O-methylcytidine
actcttctactcaggaagtggtc

SEQ ID NO: 3652 - RNA, 23 nt, synthetic construct
  source 1..23: mol_type = other RNA
  modified_base 1: mod_base = OTHER; note = 2'-O-methyladenosine-3'-phosphorothioate
  modified_base 2: mod_base = OTHER; note = 2'-deoxy-2'-fluoroadenosine-3'-phosphorothioate
  modified_base 3: mod_base = OTHER; note = 2'-O-methyluridine-3'-phosphate
  modified_base 4: mod_base = OTHER; note = 2'-O-methylcytidine-3'-phosphate
  modified_base 5: mod_base = OTHER; note = 2'-O-methylcytidine-3'-phosphate
  modified_base 6: mod_base = OTHER; note = 2'-deoxy-2'-fluorouridine-3'-phosphate
  modified_base 7: mod_base = OTHER; note = 2'-O-methylcytidine-3'-phosphate
  modified_base 8: mod_base = OTHER; note = 2'-deoxy-2'-fluoroadenosine-3'-phosphate
  modified_base 9: mod_base = OTHER; note = 2'-deoxy-2'-fluorocytidine-3'-phosphate
  modified_base 10: mod_base = OTHER; note = 2'-O-methyladenosine-3'-phosphate
  modified_base 11: mod_base = OTHER; note = 2'-O-methylguanosine-3'-phosphate
  modified_base 12: mod_base = OTHER; note = 2'-O-methyladenosine-3'-phosphate
  modified_base 13: mod_base = OTHER; note = 2'-O-methyladenosine-3'-phosphate
  modified_base 14: mod_base = OTHER; note = 2'-deoxy-2'-fluorouridine-3'-phosphate
  modified_base 15: mod_base = OTHER; note = 2'-O-methyladenosine-3'-phosphate
  modified_base 16: mod_base = OTHER; note = 2'-deoxy-2'-fluoroadenosine-3'-phosphate
  modified_base 17: mod_base = OTHER; note = 2'-O-methylguanosine-3'-phosphate
  modified_base 18: mod_base = OTHER; note = 2'-O-methyladenosine-3'-phosphate
  modified_base 19: mod_base = OTHER; note = 2'-O-methyluridine-3'-phosphate
  modified_base 20: mod_base = OTHER; note = 2'-O-methyluridine-3'-phosphate
  modified_base 21: mod_base = OTHER; note = 2'-O-methyluridine-3'-phosphorothioate
  modified_base 22: mod_base = OTHER; note = 2'-O-methyluridine-3'-phosphorothioate
  modified_base 23: mod_base = OTHER; note = 2'-O-methyladenosine
aatcctcacagaataagatttta

SEQ ID NO: 3653 - RNA, 23 nt, synthetic construct
  source 1..23: mol_type = other RNA
  modified_base 1: mod_base = OTHER; note = 2'-O-methyladenosine-3'-phosphorothioate
  modified_base 2: mod_base = OTHER; note = 2'-deoxy-2'-fluorouridine-3'-phosphorothioate
  modified_base 3: mod_base = OTHER; note = 2'-O-methylguanosine-3'-phosphate
  modified_base 4: mod_base = OTHER; note = 2'-O-methyladenosine-3'-phosphate
  modified_base 5: mod_base = OTHER; note = 2'-O-methyladenosine-3'-phosphate
  modified_base 6: mod_base = OTHER; note = 2'-deoxy-2'-fluorocytidine-3'-phosphate
  modified_base 7: mod_base = OTHER; note = 2'-O-methylcytidine-3'-phosphate
  modified_base 8: mod_base = OTHER; note = 2'-deoxy-2'-fluoroadenosine-3'-phosphate
  modified_base 9: mod_base = OTHER; note = 2'-deoxy-2'-fluoroadenosine-3'-phosphate
  modified_base 10: mod_base = OTHER; note = 2'-O-methyladenosine-3'-phosphate
  modified_base 11: mod_base = OTHER; note = 2'-O-methylcytidine-3'-phosphate
  modified_base 12: mod_base = OTHER; note = 2'-O-methyladenosine-3'-phosphate
  modified_base 13: mod_base = OTHER; note = 2'-O-methylcytidine-3'-phosphate
  modified_base 14: mod_base = OTHER; note = 2'-deoxy-2'-fluorouridine-3'-phosphate
  modified_base 15: mod_base = OTHER; note = 2'-O-methyluridine-3'-phosphate
  modified_base 16: mod_base = OTHER; note = 2'-deoxy-2'-fluorouridine-3'-phosphate
  modified_base 17: mod_base = OTHER; note = 2'-O-methylcytidine-3'-phosphate
  modified_base 18: mod_base = OTHER; note = 2'-O-methylcytidine-3'-phosphate
  modified_base 19: mod_base = OTHER; note = 2'-O-methyladenosine-3'-phosphate
  modified_base 20: mod_base = OTHER; note = 2'-O-methylcytidine-3'-phosphate
  modified_base 21: mod_base = OTHER; note = 2'-O-methyluridine-3'-phosphorothioate
  modified_base 22: mod_base = OTHER; note = 2'-O-methylcytidine-3'-phosphorothioate
  modified_base 23: mod_base = OTHER; note = 2'-O-methylcytidine
atgaaccaaacactttccactcc

SEQ ID NO: 3654 - RNA, 23 nt, synthetic construct
  source 1..23: mol_type = other RNA
  modified_base 1: mod_base = OTHER; note = 2'-O-methyladenosine-3'-phosphorothioate
  modified_base 2: mod_base = OTHER; note = 2'-deoxy-2'-fluoroguanosine-3'-phosphorothioate
  modified_base 3: mod_base = OTHER; note = 2'-O-methyluridine-3'-phosphate
  modified_base 4: mod_base = OTHER; note = 2'-O-methylguanosine-3'-phosphate
  modified_base 5: mod_base = OTHER; note = 2'-O-methylguanosine-3'-phosphate
  modified_base 6: mod_base = OTHER; note = 2'-deoxy-2'-fluorocytidine-3'-phosphate
  modified_base 7: mod_base = OTHER; note = 2'-O-methyladenosine-3'-phosphate
  modified_base 8: mod_base = OTHER; note = 2'-deoxy-2'-fluorouridine-3'-phosphate
  modified_base 9: mod_base = OTHER; note = 2'-deoxy-2'-fluoroadenosine-3'-phosphate
  modified_base 10: mod_base = OTHER; note = 2'-O-methylguanosine-3'-phosphate
  modified_base 11: mod_base = OTHER; note = 2'-O-methyladenosine-3'-phosphate
  modified_base 12: mod_base = OTHER; note = 2'-O-methyladenosine-3'-phosphate
  modified_base 13: mod_base = OTHER; note = 2'-O-methyladenosine-3'-phosphate
  modified_base 14: mod_base = OTHER; note = 2'-deoxy-2'-fluoroadenosine-3'-phosphate
  modified_base 15: mod_base = OTHER; note = 2'-O-methyladenosine-3'-phosphate
  modified_base 16: mod_base = OTHER; note = 2'-deoxy-2'-fluoroadenosine-3'-phosphate
  modified_base 17: mod_base = OTHER; note = 2'-O-methyluridine-3'-phosphate
  modified_base 18: mod_base = OTHER; note = 2'-O-methyladenosine-3'-phosphate
  modified_base 19: mod_base = OTHER; note = 2'-O-methylcytidine-3'-phosphate
  modified_base 20: mod_base = OTHER; note = 2'-O-methyladenosine-3'-phosphate
  modified_base 21: mod_base = OTHER; note = 2'-O-methyladenosine-3'-phosphorothioate
  modified_base 22: mod_base = OTHER; note = 2'-O-methyluridine-3'-phosphorothioate
  modified_base 23: mod_base = OTHER; note = 2'-O-methyluridine
agtggcatagaaaaaatacaatt

SEQ ID NO: 3655 - RNA, 23 nt, synthetic construct
  source 1..23: mol_type = other RNA
  modified_base 1: mod_base = OTHER; note = 2'-O-methyladenosine-3'-phosphorothioate
  modified_base 2: mod_base = OTHER; note = 2'-deoxy-2'-fluoroguanosine-3'-phosphorothioate
  modified_base 3: mod_base = OTHER; note = 2'-O-methyluridine-3'-phosphate
  modified_base 4: mod_base = OTHER; note = 2'-O-methylguanosine-3'-phosphate
  modified_base 5: mod_base = OTHER; note = 2'-O-methyluridine-3'-phosphate
  modified_base 6: mod_base = OTHER; note = 2'-deoxy-2'-fluoroadenosine-3'-phosphate
  modified_base 7: mod_base = OTHER; note = 2'-O-methyluridine-3'-phosphate
  modified_base 8: mod_base = OTHER; note = 2'-deoxy-2'-fluoroadenosine-3'-phosphate
  modified_base 9: mod_base = OTHER; note = 2'-deoxy-2'-fluoroadenosine-3'-phosphate
  modified_base 10: mod_base = OTHER; note = 2'-O-methyluridine-3'-phosphate
  modified_base 11: mod_base = OTHER; note = 2'-O-methyladenosine-3'-phosphate
  modified_base 12: mod_base = OTHER; note = 2'-O-methylcytidine-3'-phosphate
  modified_base 13: mod_base = OTHER; note = 2'-O-methyladenosine-3'-phosphate
  modified_base 14: mod_base = OTHER; note = 2'-deoxy-2'-fluorouridine-3'-phosphate
  modified_base 15: mod_base = OTHER; note = 2'-O-methyladenosine-3'-phosphate
  modified_base 16: mod_base = OTHER; note = 2'-deoxy-2'-fluorouridine-3'-phosphate
  modified_base 17: mod_base = OTHER; note = 2'-O-methyladenosine-3'-phosphate
  modified_base 18: mod_base = OTHER; note = 2'-O-methyladenosine-3'-phosphate
  modified_base 19: mod_base = OTHER; note = 2'-O-methylcytidine-3'-phosphate
  modified_base 20: mod_base = OTHER; note = 2'-O-methyladenosine-3'-phosphate
  modified_base 21: mod_base = OTHER; note = 2'-O-methylcytidine-3'-phosphorothioate
  modified_base 22: mod_base = OTHER; note = 2'-O-methylguanosine-3'-phosphorothioate
  modified_base 23: mod_base = OTHER; note = 2'-O-methylcytidine
agtgtataatacatataacacgc

SEQ ID NO: 3656 - RNA, 23 nt, synthetic construct
  source 1..23: mol_type = other RNA
  modified_base 1: mod_base = OTHER; note = 2'-O-methyladenosine-3'-phosphorothioate
  modified_base 2: mod_base = OTHER; note = 2'-deoxy-2'-fluorouridine-3'-phosphorothioate
  modified_base 3: mod_base = OTHER; note = 2'-O-methyluridine-3'-phosphate
  modified_base 4: mod_base = OTHER; note = 2'-O-methyladenosine-3'-phosphate
  modified_base 5: mod_base = OTHER; note = 2'-O-methylcytidine-3'-phosphate
  modified_base 6: mod_base = OTHER; note = 2'-deoxy-2'-fluoroadenosine-3'-phosphate
  modified_base 7: mod_base = OTHER; note = 2'-O-methylcytidine-3'-phosphate
  modified_base 8: mod_base = OTHER; note = 2'-deoxy-2'-fluoroadenosine-3'-phosphate
  modified_base 9: mod_base = OTHER; note = 2'-deoxy-2'-fluorouridine-3'-phosphate
  modified_base 10: mod_base = OTHER; note = 2'-O-methylcytidine-3'-phosphate
  modified_base 11: mod_base = OTHER; note = 2'-O-methylcytidine-3'-phosphate
  modified_base 12: mod_base = OTHER; note = 2'-O-methyluridine-3'-phosphate
  modified_base 13: mod_base = OTHER; note = 2'-O-methylcytidine-3'-phosphate
  modified_base 14: mod_base = OTHER; note = 2'-deoxy-2'-fluorouridine-3'-phosphate
  modified_base 15: mod_base = OTHER; note = 2'-O-methyladenosine-3'-phosphate
  modified_base 16: mod_base = OTHER; note = 2'-deoxy-2'-fluorocytidine-3'-phosphate
  modified_base 17: mod_base = OTHER; note = 2'-O-methyluridine-3'-phosphate
  modified_base 18: mod_base = OTHER; note = 2'-O-methylcytidine-3'-phosphate
  modified_base 19: mod_base = OTHER; note = 2'-O-methyluridine-3'-phosphate
  modified_base 20: mod_base = OTHER; note = 2'-O-methyluridine-3'-phosphate
  modified_base 21: mod_base = OTHER; note = 2'-O-methyluridine-3'-phosphorothioate
  modified_base 22: mod_base = OTHER; note = 2'-O-methyluridine-3'-phosphorothioate
  modified_base 23: mod_base = OTHER; note = 2'-O-methyladenosine
attacacatcctctactctttta

SEQ ID NO: 3657 - RNA, 23 nt, synthetic construct
  source 1..23: mol_type = other RNA
  modified_base 1: mod_base = OTHER; note = 2'-O-methyladenosine-3'-phosphorothioate
  modified_base 2: mod_base = OTHER; note = 2'-deoxy-2'-fluoroguanosine-3'-phosphorothioate
  modified_base 3: mod_base = OTHER; note = 2'-O-methylguanosine-3'-phosphate
  modified_base 4: mod_base = OTHER; note = 2'-O-methylcytidine-3'-phosphate
  modified_base 5: mod_base = OTHER; note = 2'-O-methyladenosine-3'-phosphate
  modified_base 6: mod_base = OTHER; note = 2'-deoxy-2'-fluoroguanosine-3'-phosphate
  modified_base 7: mod_base = OTHER; note = 2'-O-methyluridine-3'-phosphate
  modified_base 8: mod_base = OTHER; note = 2'-deoxy-2'-fluoroguanosine-3'-phosphate
  modified_base 9: mod_base = OTHER; note = 2'-deoxy-2'-fluorocytidine-3'-phosphate
  modified_base 10: mod_base = OTHER; note = 2'-O-methyladenosine-3'-phosphate
  modified_base 11: mod_base = OTHER; note = 2'-O-methylguanosine-3'-phosphate
  modified_base 12: mod_base = OTHER; note = 2'-O-methyluridine-3'-phosphate
  modified_base 13: mod_base = OTHER; note = 2'-O-methyluridine-3'-phosphate
  modified_base 14: mod_base = OTHER; note = 2'-deoxy-2'-fluorouridine-3'-phosphate
  modified_base 15: mod_base = OTHER; note = 2'-O-methyluridine-3'-phosphate
  modified_base 16: mod_base = OTHER; note = 2'-deoxy-2'-fluoroadenosine-3'-phosphate
  modified_base 17: mod_base = OTHER; note = 2'-O-methyladenosine-3'-phosphate
  modified_base 18: mod_base = OTHER; note = 2'-O-methyladenosine-3'-phosphate
  modified_base 19: mod_base = OTHER; note = 2'-O-methyladenosine-3'-phosphate
  modified_base 20: mod_base = OTHER; note = 2'-O-methylcytidine-3'-phosphate
  modified_base 21: mod_base = OTHER; note = 2'-O-methyluridine-3'-phosphorothioate
  modified_base 22: mod_base = OTHER; note = 2'-O-methyladenosine-3'-phosphorothioate
  modified_base 23: mod_base = OTHER; note = 2'-O-methyladenosine
aggcagtgcagttttaaaactaa

SEQ ID NO: 3658 - RNA, 23 nt, synthetic construct
  source 1..23: mol_type = other RNA
  modified_base 1: mod_base = OTHER; note = 2'-O-methyladenosine-3'-phosphorothioate
  modified_base 2: mod_base = OTHER; note = 2'-deoxy-2'-fluorouridine-3'-phosphorothioate
  modified_base 3: mod_base = OTHER; note = 2'-O-methyluridine-3'-phosphate
  modified_base 4: mod_base = OTHER; note = 2'-O-methyluridine-3'-phosphate
  modified_base 5: mod_base = OTHER; note = 2'-O-methylcytidine-3'-phosphate
  modified_base 6: mod_base = OTHER; note = 2'-deoxy-2'-fluorouridine-3'-phosphate
  modified_base 7: mod_base = OTHER; note = 2'-O-methylguanosine-3'-phosphate
  modified_base 8: mod_base = OTHER; note = 2'-deoxy-2'-fluorouridine-3'-phosphate
  modified_base 9: mod_base = OTHER; note = 2'-deoxy-2'-fluorocytidine-3'-phosphate
  modified_base 10: mod_base = OTHER; note = 2'-O-methyladenosine-3'-phosphate
  modified_base 11: mod_base = OTHER; note = 2'-O-methylcytidine-3'-phosphate
  modified_base 12: mod_base = OTHER; note = 2'-O-methyluridine-3'-phosphate
  modified_base 13: mod_base = OTHER; note = 2'-O-methylguanosine-3'-phosphate
  modified_base 14: mod_base = OTHER; note = 2'-deoxy-2'-fluoroguanosine-3'-phosphate
  modified_base 15: mod_base = OTHER; note = 2'-O-methyladenosine-3'-phosphate
  modified_base 16: mod_base = OTHER; note = 2'-deoxy-2'-fluoroadenosine-3'-phosphate
  modified_base 17: mod_base = OTHER; note = 2'-O-methyladenosine-3'-phosphate
  modified_base 18: mod_base = OTHER; note = 2'-O-methyluridine-3'-phosphate
  modified_base 19: mod_base = OTHER; note = 2'-O-methylcytidine-3'-phosphate
  modified_base 20: mod_base = OTHER; note = 2'-O-methyluridine-3'-phosphate
  modified_base 21: mod_base = OTHER; note = 2'-O-methyluridine-3'-phosphorothioate
  modified_base 22: mod_base = OTHER; note = 2'-O-methyluridine-3'-phosphorothioate
  modified_base 23: mod_base = OTHER; note = 2'-O-methyluridine
atttctgtcactggaaatctttt

SEQ ID NO: 3659 - RNA, 23 nt, synthetic construct
  source 1..23: mol_type = other RNA
  modified_base 1: mod_base = OTHER; note = 2'-O-methyladenosine-3'-phosphorothioate
  modified_base 2: mod_base = OTHER; note = 2'-deoxy-2'-fluoroguanosine-3'-phosphorothioate
  modified_base 3: mod_base = OTHER; note = 2'-O-methyluridine-3'-phosphate
  modified_base 4: mod_base = OTHER; note = 2'-O-methylcytidine-3'-phosphate
  modified_base 5: mod_base = OTHER; note = 2'-O-methyladenosine-3'-phosphate
  modified_base 6: mod_base = OTHER; note = 2'-deoxy-2'-fluorocytidine-3'-phosphate
  modified_base 7: mod_base = OTHER; note = 2'-O-methyladenosine-3'-phosphate
  modified_base 8: mod_base = OTHER; note = 2'-deoxy-2'-fluorouridine-3'-phosphate
  modified_base 9: mod_base = OTHER; note = 2'-deoxy-2'-fluoroadenosine-3'-phosphate
  modified_base 10: mod_base = OTHER; note = 2'-O-methyluridine-3'-phosphate
  modified_base 11: mod_base = OTHER; note = 2'-O-methyluridine-3'-phosphate
  modified_base 12: mod_base = OTHER; note = 2'-O-methyladenosine-3'-phosphate
  modified_base 13: mod_base = OTHER; note = 2'-O-methyladenosine-3'-phosphate
  modified_base 14: mod_base = OTHER; note = 2'-deoxy-2'-fluorocytidine-3'-phosphate
  modified_base 15: mod_base = OTHER; note = 2'-O-methylcytidine-3'-phosphate
  modified_base 16: mod_base = OTHER; note = 2'-deoxy-2'-fluoroadenosine-3'-phosphate
  modified_base 17: mod_base = OTHER; note = 2'-O-methylcytidine-3'-phosphate
  modified_base 18: mod_base = OTHER; note = 2'-O-methylcytidine-3'-phosphate
  modified_base 19: mod_base = OTHER; note = 2'-O-methyladenosine-3'-phosphate
  modified_base 20: mod_base = OTHER; note = 2'-O-methylguanosine-3'-phosphate
  modified_base 21: mod_base = OTHER; note = 2'-O-methyluridine-3'-phosphorothioate
  modified_base 22: mod_base = OTHER; note = 2'-O-methyluridine-3'-phosphorothioate
  modified_base 23: mod_base = OTHER; note = 2'-O-methylcytidine
agtcacatattaaccaccagttc

SEQ ID NO: 3660 - RNA, 23 nt, synthetic construct
  source 1..23: mol_type = other RNA
  modified_base 1: mod_base = OTHER; note = 2'-O-methyladenosine-3'-phosphorothioate
  modified_base 2: mod_base = OTHER; note = 2'-deoxy-2'-fluoroadenosine-3'-phosphorothioate
  modified_base 3: mod_base = OTHER; note = 2'-O-methyladenosine-3'-phosphate
  modified_base 4: mod_base = OTHER; note = 2'-O-methylcytidine-3'-phosphate
  modified_base 5: mod_base = OTHER; note = 2'-O-methyladenosine-3'-phosphate
  modified_base 6: mod_base = OTHER; note = 2'-deoxy-2'-fluoroadenosine-3'-phosphate
  modified_base 7: mod_base = OTHER; note = 2'-O-methylguanosine-3'-phosphate
  modified_base 8: mod_base = OTHER; note = 2'-deoxy-2'-fluoroguanosine-3'-phosphate
  modified_base 9: mod_base = OTHER; note = 2'-deoxy-2'-fluoroguanosine-3'-phosphate
  modified_base 10: mod_base = OTHER; note = 2'-O-methylcytidine-3'-phosphate
  modified_base 11: mod_base = OTHER; note = 2'-O-methyluridine-3'-phosphate
  modified_base 12: mod_base = OTHER; note = 2'-O-methyluridine-3'-phosphate
  modified_base 13: mod_base = OTHER; note = 2'-O-methylguanosine-3'-phosphate
  modified_base 14: mod_base = OTHER; note = 2'-deoxy-2'-fluoroadenosine-3'-phosphate
  modified_base 15: mod_base = OTHER; note = 2'-O-methyladenosine-3'-phosphate
  modified_base 16: mod_base = OTHER; note = 2'-deoxy-2'-fluorouridine-3'-phosphate
  modified_base 17: mod_base = OTHER; note = 2'-O-methyluridine-3'-phosphate
  modified_base 18: mod_base = OTHER; note = 2'-O-methylguanosine-3'-phosphate
  modified_base 19: mod_base = OTHER; note = 2'-O-methylcytidine-3'-phosphate
  modified_base 20: mod_base = OTHER; note = 2'-O-methyladenosine-3'-phosphate
  modified_base 21: mod_base = OTHER; note = 2'-O-methyladenosine-3'-phosphorothioate
  modified_base 22: mod_base = OTHER; note = 2'-O-methylguanosine-3'-phosphorothioate
  modified_base 23: mod_base = OTHER; note = 2'-O-methylguanosine
aaacaagggcttgaattgcaagg

SEQ ID NO: 3661 - RNA, 23 nt, synthetic construct
  source 1..23: mol_type = other RNA
  modified_base 1: mod_base = OTHER; note = 2'-O-methyladenosine-3'-phosphorothioate
  modified_base 2: mod_base = OTHER; note = 2'-deoxy-2'-fluorouridine-3'-phosphorothioate
  modified_base 3: mod_base = OTHER; note = 2'-O-methyluridine-3'-phosphate
  modified_base 4: mod_base = OTHER; note = 2'-O-methylguanosine-3'-phosphate
  modified_base 5: mod_base = OTHER; note = 2'-O-methyluridine-3'-phosphate
  modified_base 6: mod_base = OTHER; note = 2'-deoxy-2'-fluoroadenosine-3'-phosphate
  modified_base 7: mod_base = OTHER; note = 2'-O-methylguanosine-3'-phosphate
  modified_base 8: mod_base = OTHER; note = 2'-deoxy-2'-fluoroadenosine-3'-phosphate
  modified_base 9: mod_base = OTHER; note = 2'-deoxy-2'-fluorouridine-3'-phosphate
  modified_base 10: mod_base = OTHER; note = 2'-O-methylguanosine-3'-phosphate
  modified_base 11: mod_base = OTHER; note = 2'-O-methyladenosine-3'-phosphate
  modified_base 12: mod_base = OTHER; note = 2'-O-methylguanosine-3'-phosphate
  modified_base 13: mod_base = OTHER; note = 2'-O-methylguanosine-3'-phosphate
  modified_base 14: mod_base = OTHER; note = 2'-deoxy-2'-fluorocytidine-3'-phosphate
  modified_base 15: mod_base = OTHER; note = 2'-O-methylguanosine-3'-phosphate
  modified_base 16: mod_base = OTHER; note = 2'-deoxy-2'-fluorouridine-3'-phosphate
  modified_base 17: mod_base = OTHER; note = 2'-O-methylcytidine-3'-phosphate
  modified_base 18: mod_base = OTHER; note = 2'-O-methyladenosine-3'-phosphate
  modified_base 19: mod_base = OTHER; note = 2'-O-methylcytidine-3'-phosphate
  modified_base 20: mod_base = OTHER; note = 2'-O-methyluridine-3'-phosphate
  modified_base 21: mod_base = OTHER; note = 2'-O-methyluridine-3'-phosphorothioate
  modified_base 22: mod_base = OTHER; note = 2'-O-methyladenosine-3'-phosphorothioate
  modified_base 23: mod_base = OTHER; note = 2'-O-methyladenosine
attgtagatgaggcgtcacttaa

SEQ ID NO: 3662 - RNA, 23 nt, synthetic construct
  source 1..23: mol_type = other RNA
  modified_base 1: mod_base = OTHER; note = 2'-O-methyladenosine-3'-phosphorothioate
  modified_base 2: mod_base = OTHER; note = 2'-deoxy-2'-fluorouridine-3'-phosphorothioate
  modified_base 3: mod_base = OTHER; note = 2'-O-methylguanosine-3'-phosphate
  modified_base 4: mod_base = OTHER; note = 2'-O-methylguanosine-3'-phosphate
  modified_base 5: mod_base = OTHER; note = 2'-O-methyladenosine-3'-phosphate
  modified_base 6: mod_base = OTHER; note = 2'-deoxy-2'-fluoroadenosine-3'-phosphate
  modified_base 7: mod_base = OTHER; note = 2'-O-methylguanosine-3'-phosphate
  modified_base 8: mod_base = OTHER; note = 2'-deoxy-2'-fluoroadenosine-3'-phosphate
  modified_base 9: mod_base = OTHER; note = 2'-deoxy-2'-fluorocytidine-3'-phosphate
  modified_base 10: mod_base = OTHER; note = 2'-O-methyladenosine-3'-phosphate
  modified_base 11: mod_base = OTHER; note = 2'-O-methyladenosine-3'-phosphate
  modified_base 12: mod_base = OTHER; note = 2'-O-methylcytidine-3'-phosphate
  modified_base 13: mod_base = OTHER; note = 2'-O-methylcytidine-3'-phosphate
  modified_base 14: mod_base = OTHER; note = 2'-deoxy-2'-fluorouridine-3'-phosphate
  modified_base 15: mod_base = OTHER; note = 2'-O-methylguanosine-3'-phosphate
  modified_base 16: mod_base = OTHER; note = 2'-deoxy-2'-fluorocytidine-3'-phosphate
  modified_base 17: mod_base = OTHER; note = 2'-O-methyladenosine-3'-phosphate
  modified_base 18: mod_base = OTHER; note = 2'-O-methyladenosine-3'-phosphate
  modified_base 19: mod_base = OTHER; note = 2'-O-methyladenosine-3'-phosphate
  modified_base 20: mod_base = OTHER; note = 2'-O-methyladenosine-3'-phosphate
  modified_base 21: mod_base = OTHER; note = 2'-O-methyluridine-3'-phosphorothioate
  modified_base 22: mod_base = OTHER; note = 2'-O-methylcytidine-3'-phosphorothioate
  modified_base 23: mod_base = OTHER; note = 2'-O-methyladenosine
atggaagacaacctgcaaaatca

SEQ ID NO: 3663 - RNA, 23 nt, synthetic construct
  source 1..23: mol_type = other RNA
  modified_base 1: mod_base = OTHER; note = 2'-O-methyladenosine-3'-phosphorothioate
  modified_base 2: mod_base = OTHER; note = 2'-deoxy-2'-fluoroguanosine-3'-phosphorothioate
  modified_base 3: mod_base = OTHER; note = 2'-O-methylguanosine-3'-phosphate
  modified_base 4: mod_base = OTHER; note = 2'-O-methyluridine-3'-phosphate
  modified_base 5: mod_base = OTHER; note = 2'-O-methylcytidine-3'-phosphate
  modified_base 6: mod_base = OTHER; note = 2'-deoxy-2'-fluoroadenosine-3'-phosphate
  modified_base 7: mod_base = OTHER; note = 2'-O-methyladenosine-3'-phosphate
  modified_base 8: mod_base = OTHER; note = 2'-deoxy-2'-fluorouridine-3'-phosphate
  modified_base 9: mod_base = OTHER; note = 2'-deoxy-2'-fluoroadenosine-3'-phosphate
  modified_base 10: mod_base = OTHER; note = 2'-O-methyluridine-3'-phosphate
  modified_base 11: mod_base = OTHER; note = 2'-O-methyluridine-3'-phosphate
  modified_base 12: mod_base = OTHER; note = 2'-O-methylguanosine-3'-phosphate
  modified_base 13: mod_base = OTHER; note = 2'-O-methyladenosine-3'-phosphate
  modified_base 14: mod_base = OTHER; note = 2'-deoxy-2'-fluorouridine-3'-phosphate
  modified_base 15: mod_base = OTHER; note = 2'-O-methylguanosine-3'-phosphate
  modified_base 16: mod_base = OTHER; note = 2'-deoxy-2'-fluorouridine-3'-phosphate
  modified_base 17: mod_base = OTHER; note = 2'-O-methyluridine-3'-phosphate
  modified_base 18: mod_base = OTHER; note = 2'-O-methyladenosine-3'-phosphate
  modified_base 19: mod_base = OTHER; note = 2'-O-methylcytidine-3'-phosphate
  modified_base 20: mod_base = OTHER; note = 2'-O-methyladenosine-3'-phosphate
  modified_base 21: mod_base = OTHER; note = 2'-O-methyluridine-3'-phosphorothioate
  modified_base 22: mod_base = OTHER; note = 2'-O-methyladenosine-3'-phosphorothioate
  modified_base 23: mod_base = OTHER; note = 2'-O-methyluridine
aggtcaatattgatgttacatat

SEQ ID NO: 3664 - RNA, 23 nt, synthetic construct
  source 1..23: mol_type = other RNA
  modified_base 1: mod_base = OTHER; note = 2'-O-methyladenosine-3'-phosphorothioate
  modified_base 2: mod_base = OTHER; note = 2'-deoxy-2'-fluorocytidine-3'-phosphorothioate
  modified_base 3: mod_base = OTHER; note = 2'-O-methyluridine-3'-phosphate
  modified_base 4: mod_base = OTHER; note = 2'-O-methyluridine-3'-phosphate
  modified_base 5: mod_base = OTHER; note = 2'-O-methyladenosine-3'-phosphate
  modified_base 6: mod_base = OTHER; note = 2'-deoxy-2'-fluorouridine-3'-phosphate
  modified_base 7: mod_base = OTHER; note = 2'-O-methyladenosine-3'-phosphate
  modified_base 8: mod_base = OTHER; note = 2'-deoxy-2'-fluorocytidine-3'-phosphate
  modified_base 9: mod_base = OTHER; note = 2'-deoxy-2'-fluoroadenosine-3'-phosphate
  modified_base 10: mod_base = OTHER; note = 2'-O-methyluridine-3'-phosphate
  modified_base 11: mod_base = OTHER; note = 2'-O-methylguanosine-3'-phosphate
  modified_base 12: mod_base = OTHER; note = 2'-O-methyladenosine-3'-phosphate
  modified_base 13: mod_base = OTHER; note = 2'-O-methyladenosine-3'-phosphate
  modified_base 14: mod_base = OTHER; note = 2'-deoxy-2'-fluorouridine-3'-phosphate
  modified_base 15: mod_base = OTHER; note = 2'-O-methyladenosine-3'-phosphate
  modified_base 16: mod_base = OTHER; note = 2'-deoxy-2'-fluorouridine-3'-phosphate
  modified_base 17: mod_base = OTHER; note = 2'-O-methyluridine-3'-phosphate
  modified_base 18: mod_base = OTHER; note = 2'-O-methylcytidine-3'-phosphate
  modified_base 19: mod_base = OTHER; note = 2'-O-methyluridine-3'-phosphate
  modified_base 20: mod_base = OTHER; note = 2'-O-methyluridine-3'-phosphate
  modified_base 21: mod_base = OTHER; note = 2'-O-methyluridine-3'-phosphorothioate
  modified_base 22: mod_base = OTHER; note = 2'-O-methylcytidine-3'-phosphorothioate
  modified_base 23: mod_base = OTHER; note = 2'-O-methylcytidine
acttatacatgaatattctttcc

SEQ ID NO: 3665 - RNA, 23 nt, synthetic construct
  source 1..23: mol_type = other RNA
  modified_base 1: mod_base = OTHER; note = 2'-O-methyladenosine-3'-phosphorothioate
  modified_base 2: mod_base = OTHER; note = 2'-deoxy-2'-fluorocytidine-3'-phosphorothioate
  modified_base 3: mod_base = OTHER; note = 2'-O-methyluridine-3'-phosphate
  modified_base 4: mod_base = OTHER; note = 2'-O-methyluridine-3'-phosphate
  modified_base 5: mod_base = OTHER; note = 2'-O-methylcytidine-3'-phosphate
  modified_base 6: mod_base = OTHER; note = 2'-deoxy-2'-fluoroadenosine-3'-phosphate
  modified_base 7: mod_base = OTHER; note = 2'-O-methyluridine-3'-phosphate
  modified_base 8: mod_base = OTHER; note = 2'-deoxy-2'-fluorouridine-3'-phosphate
  modified_base 9: mod_base = OTHER; note = 2'-deoxy-2'-fluorouridine-3'-phosphate
  modified_base 10: mod_base = OTHER; note = 2'-O-methylguanosine-3'-phosphate
  modified_base 11: mod_base = OTHER; note = 2'-O-methyluridine-3'-phosphate
  modified_base 12: mod_base = OTHER; note = 2'-O-methylguanosine-3'-phosphate
  modified_base 13: mod_base = OTHER; note = 2'-O-methyluridine-3'-phosphate
  modified_base 14: mod_base = OTHER; note = 2'-deoxy-2'-fluorouridine-3'-phosphate
  modified_base 15: mod_base = OTHER; note = 2'-O-methyladenosine-3'-phosphate
  modified_base 16: mod_base = OTHER; note = 2'-deoxy-2'-fluorouridine-3'-phosphate
  modified_base 17: mod_base = OTHER; note = 2'-O-methyluridine-3'-phosphate
  modified_base 18: mod_base = OTHER; note = 2'-O-methyladenosine-3'-phosphate
  modified_base 19: mod_base = OTHER; note = 2'-O-methylcytidine-3'-phosphate
  modified_base 20: mod_base = OTHER; note = 2'-O-methyluridine-3'-phosphate
  modified_base 21: mod_base = OTHER; note = 2'-O-methyluridine-3'-phosphorothioate
  modified_base 22: mod_base = OTHER; note = 2'-O-methyluridine-3'-phosphorothioate
  modified_base 23: mod_base = OTHER; note = 2'-O-methylguanosine
acttcatttgtgttattactttg

SEQ ID NO: 3666 - RNA, 23 nt, synthetic construct
  source 1..23: mol_type = other RNA
  modified_base 1: mod_base = OTHER; note = 2'-O-methyladenosine-3'-phosphorothioate
  modified_base 2: mod_base = OTHER; note = 2'-deoxy-2'-fluoroadenosine-3'-phosphorothioate
  modified_base 3: mod_base = OTHER; note = 2'-O-methyluridine-3'-phosphate
  modified_base 4: mod_base = OTHER; note = 2'-O-methylguanosine-3'-phosphate
  modified_base 5: mod_base = OTHER; note = 2'-O-methyluridine-3'-phosphate
  modified_base 6: mod_base = OTHER; note = 2'-deoxy-2'-fluorouridine-3'-phosphate
  modified_base 7: mod_base = OTHER; note = 2'-O-methylcytidine-3'-phosphate
  modified_base 8: mod_base = OTHER; note = 2'-deoxy-2'-fluoroadenosine-3'-phosphate
  modified_base 9: mod_base = OTHER; note = 2'-deoxy-2'-fluoroadenosine-3'-phosphate
  modified_base 10: mod_base = OTHER; note = 2'-O-methylguanosine-3'-phosphate
  modified_base 11: mod_base = OTHER; note = 2'-O-methylguanosine-3'-phosphate
  modified_base 12: mod_base = OTHER; note = 2'-O-methylguanosine-3'-phosphate
  modified_base 13: mod_base = OTHER; note = 2'-O-methyluridine-3'-phosphate
  modified_base 14: mod_base = OTHER; note = 2'-deoxy-2'-fluorocytidine-3'-phosphate
  modified_base 15: mod_base = OTHER; note = 2'-O-methyladenosine-3'-phosphate
  modified_base 16: mod_base = OTHER; note = 2'-deoxy-2'-fluoroguanosine-3'-phosphate
  modified_base 17: mod_base = OTHER; note = 2'-O-methylcytidine-3'-phosphate
  modified_base 18: mod_base = OTHER; note = 2'-O-methyluridine-3'-phosphate
  modified_base 19: mod_base = OTHER; note = 2'-O-methylguanosine-3'-phosphate
  modified_base 20: mod_base = OTHER; note = 2'-O-methyluridine-3'-phosphate
  modified_base 21: mod_base = OTHER; note = 2'-O-methyladenosine-3'-phosphorothioate
  modified_base 22: mod_base = OTHER; note = 2'-O-methylguanosine-3'-phosphorothioate
  modified_base 23: mod_base = OTHER; note = 2'-O-methyladenosine
aatgttcaagggtcagctgtaga

SEQ ID NO: 3667 - RNA, 23 nt, synthetic construct
  source 1..23: mol_type = other RNA
  modified_base 1: mod_base = OTHER; note = 2'-O-methyladenosine-3'-phosphorothioate
  modified_base 2: mod_base = OTHER; note = 2'-deoxy-2'-fluoroguanosine-3'-phosphorothioate
  modified_base 3: mod_base = OTHER; note = 2'-O-methyluridine-3'-phosphate
  modified_base 4: mod_base = OTHER; note = 2'-O-methyladenosine-3'-phosphate
  modified_base 5: mod_base = OTHER; note = 2'-O-methyluridine-3'-phosphate
  modified_base 6: mod_base = OTHER; note = 2'-deoxy-2'-fluoroguanosine-3'-phosphate
  modified_base 7: mod_base = OTHER; note = 2'-O-methylguanosine-3'-phosphate
  modified_base 8: mod_base = OTHER; note = 2'-deoxy-2'-fluorocytidine-3'-phosphate
  modified_base 9: mod_base = OTHER; note = 2'-deoxy-2'-fluorocytidine-3'-phosphate
  modified_base 10: mod_base = OTHER; note = 2'-O-methyluridine-3'-phosphate
  modified_base 11: mod_base = OTHER; note = 2'-O-methyluridine-3'-phosphate
  modified_base 12: mod_base = OTHER; note = 2'-O-methyladenosine-3'-phosphate
  modified_base 13: mod_base = OTHER; note = 2'-O-methylcytidine-3'-phosphate
  modified_base 14: mod_base = OTHER; note = 2'-deoxy-2'-fluorouridine-3'-phosphate
  modified_base 15: mod_base = OTHER; note = 2'-O-methyluridine-3'-phosphate
  modified_base 16: mod_base = OTHER; note = 2'-deoxy-2'-fluorouridine-3'-phosphate
  modified_base 17: mod_base = OTHER; note = 2'-O-methyluridine-3'-phosphate
  modified_base 18: mod_base = OTHER; note = 2'-O-methylcytidine-3'-phosphate
  modified_base 19: mod_base = OTHER; note = 2'-O-methylcytidine-3'-phosphate
  modified_base 20: mod_base = OTHER; note = 2'-O-methyladenosine-3'-phosphate
  modified_base 21: mod_base = OTHER; note = 2'-O-methyluridine-3'-phosphorothioate
  modified_base 22: mod_base = OTHER; note = 2'-O-methyladenosine-3'-phosphorothioate
  modified_base 23: mod_base = OTHER; note = 2'-O-methylcytidine
agtatggccttacttttccatac

SEQ ID NO: 3668 - RNA, 23 nt, synthetic construct
  source 1..23: mol_type = other RNA
  modified_base 1: mod_base = OTHER; note = 2'-O-methyladenosine-3'-phosphorothioate
  modified_base 2: mod_base = OTHER; note = 2'-deoxy-2'-fluoroadenosine-3'-phosphorothioate
  modified_base 3: mod_base = OTHER; note = 2'-O-methyluridine-3'-phosphate
  modified_base 4: mod_base = OTHER; note = 2'-O-methyladenosine-3'-phosphate
  modified_base 5: mod_base = OTHER; note = 2'-O-methylguanosine-3'-phosphate
  modified_base 6: mod_base = OTHER; note = 2'-deoxy-2'-fluoroadenosine-3'-phosphate
  modified_base 7: mod_base = OTHER; note = 2'-O-methyluridine-3'-phosphate
  modified_base 8: mod_base = OTHER; note = 2'-deoxy-2'-fluoroguanosine-3'-phosphate
  modified_base 9: mod_base = OTHER; note = 2'-deoxy-2'-fluoroguanosine-3'-phosphate
  modified_base 10: mod_base = OTHER; note = 2'-O-methylguanosine-3'-phosphate
  modified_base 11: mod_base = OTHER; note = 2'-O-methylcytidine-3'-phosphate
  modified_base 12: mod_base = OTHER; note = 2'-O-methylcytidine-3'-phosphate
  modified_base 13: mod_base = OTHER; note = 2'-O-methyladenosine-3'-phosphate
  modified_base 14: mod_base = OTHER; note = 2'-deoxy-2'-fluoroadenosine-3'-phosphate
  modified_base 15: mod_base = OTHER; note = 2'-O-methylcytidine-3'-phosphate
  modified_base 16: mod_base = OTHER; note = 2'-deoxy-2'-fluoroadenosine-3'-phosphate
  modified_base 17: mod_base = OTHER; note = 2'-O-methyladenosine-3'-phosphate
  modified_base 18: mod_base = OTHER; note = 2'-O-methylguanosine-3'-phosphate
  modified_base 19: mod_base = OTHER; note = 2'-O-methyluridine-3'-phosphate
  modified_base 20: mod_base = OTHER; note = 2'-O-methyluridine-3'-phosphate
  modified_base 21: mod_base = OTHER; note = 2'-O-methylcytidine-3'-phosphorothioate
  modified_base 22: mod_base = OTHER; note = 2'-O-methyladenosine-3'-phosphorothioate
  modified_base 23: mod_base = OTHER; note = 2'-O-methyluridine
aatagatgggccaacaagttcat

SEQ ID NO: 3669 - RNA, 23 nt, synthetic construct
  source 1..23: mol_type = other RNA
agctatttttcttcctctatcaa

SEQ ID NO: 3670 - RNA, 23 nt, synthetic construct
  source 1..23: mol_type = other RNA
tttatcaatttctgtctcatctt

SEQ ID NO: 3671 - RNA, 23 nt, synthetic construct
  source 1..23: mol_type = other RNA
tcaacataaaagtcttcattctc

SEQ ID NO: 3672 - RNA, 23 nt, synthetic construct
  source 1..23: mol_type = other RNA
tttctcagtaaacagaaataact

SEQ ID NO: 3673 - RNA, 23 nt, synthetic construct
  source 1..23: mol_type = other RNA
tcatcttaatatgtctcttgctg

SEQ ID NO: 3674 - RNA, 23 nt, synthetic construct
  source 1..23: mol_type = other RNA
ctcacaaatttctatcccaaatc

SEQ ID NO: 3675 - RNA, 23 nt, synthetic construct
  source 1..23: mol_type = other RNA
atcttccaataactcataaaaca

SEQ ID NO: 3676 - RNA, 23 nt, synthetic construct
  source 1..23: mol_type = other RNA
actatcagaatctacattctaaa

SEQ ID NO: 3677 - RNA, 23 nt, synthetic construct
  source 1..23: mol_type = other RNA
tatatgaattctctctccaaata

SEQ ID NO: 3678 - RNA, 23 nt, synthetic construct
  source 1..23: mol_type = other RNA
actaacaacagaatctaatcttc

SEQ ID NO: 3679 - RNA, 23 nt, synthetic construct
  source 1..23: mol_type = other RNA
ctcctcacatctgttatcttatt

SEQ ID NO: 3680 - RNA, 23 nt, synthetic construct
  source 1..23: mol_type = other RNA
accacttaaaacttcagacttcc

SEQ ID NO: 3681 - RNA, 23 nt, synthetic construct
  source 1..23: mol_type = other RNA
ttcattctcattgtcttcacatt

SEQ ID NO: 3682 - RNA, 23 nt, synthetic construct
  source 1..23: mol_type = other RNA
ctgaccatttcagaacatcttcc

SEQ ID NO: 3683 - RNA, 23 nt, synthetic construct
  source 1..23: mol_type = other RNA
aaccttactgataacataaacag

SEQ ID NO: 3684 - RNA, 23 nt, synthetic construct
  source 1..23: mol_type = other RNA
cttctctgaagttctgctacaac

SEQ ID NO: 3685 - RNA, 23 nt, synthetic construct
  source 1..23: mol_type = other RNA
agctacagaatctatttatcaat

SEQ ID NO: 3686 - RNA, 23 nt, synthetic construct
  source 1..23: mol_type = other RNA
cttaagacttcagaatgattttg

SEQ ID NO: 3687 - RNA, 23 nt, synthetic construct
  source 1..23: mol_type = other RNA
ctaagtatttttcaggtcttcac

SEQ ID NO: 3688 - RNA, 23 nt, synthetic construct
  source 1..23: mol_type = other RNA
caactgttgatttcctcaacatg

SEQ ID NO: 3689 - RNA, 23 nt, synthetic construct
  source 1..23: mol_type = other RNA
cacctatactgcataatccaaca

SEQ ID NO: 3690 - RNA, 23 nt, synthetic construct
  source 1..23: mol_type = other RNA
atctgttctaagacatatgatca

SEQ ID NO: 3691 - RNA, 23 nt, synthetic construct
  source 1..23: mol_type = other RNA
gttctactatagaataagttctt

SEQ ID NO: 3692 - RNA, 23 nt, synthetic construct
  source 1..23: mol_type = other RNA
aaatgctcaaatatgttctacta

SEQ ID NO: 3693 - RNA, 23 nt, synthetic construct
  source 1..23: mol_type = other RNA
tcttctaaaacatggttactaaa

SEQ ID NO: 3694 - RNA, 23 nt, synthetic construct
  source 1..23: mol_type = other RNA
ctggaaaatatattcaccaaact

SEQ ID NO: 3695 - RNA, 23 nt, synthetic construct
  source 1..23: mol_type = other RNA
cgcaaaatcttaactacctaata

SEQ ID NO: 3696 - RNA, 23 nt, synthetic construct
  source 1..23: mol_type = other RNA
aattttcaatttctcctctgacc

SEQ ID NO: 3697 - RNA, 23 nt, synthetic construct
  source 1..23: mol_type = other RNA
tatctttctctcgaccacttaaa

SEQ ID NO: 3698 - RNA, 23 nt, synthetic construct
  source 1..23: mol_type = other RNA
tagcttaccatactatatctttg

SEQ ID NO: 3699 - RNA, 23 nt, synthetic construct
  source 1..23: mol_type = other RNA
tcttcaccaagtatcaaagtaat

SEQ ID NO: 3700 - RNA, 23 nt, synthetic construct
  source 1..23: mol_type = other RNA
cacatcagcttaaaatctgtcat

SEQ ID NO: 3701 - RNA, 23 nt, synthetic construct
  source 1..23: mol_type = other RNA
ctactattgaccataaaccttac

SEQ ID NO: 3702 - RNA, 23 nt, synthetic construct
  source 1..23: mol_type = other RNA
cactatattcctacaataaagta

SEQ ID NO: 3703 - RNA, 23 nt, synthetic construct
  source 1..23: mol_type = other RNA
tctacaagctggaaattcctaaa

SEQ ID NO: 3704 - RNA, 23 nt, synthetic construct
  source 1..23: mol_type = other RNA
tctactgagctaaattatagatc

SEQ ID NO: 3705 - RNA, 23 nt, synthetic construct
  source 1..23: mol_type = other RNA
actgccaacaagttcacttcata

SEQ ID NO: 3706 - RNA, 23 nt, synthetic construct
  source 1..23: mol_type = other RNA
ggctacctaaaagaagacagtta

SEQ ID NO: 3707 - RNA, 23 nt, synthetic construct
  source 1..23: mol_type = other RNA
gaagacatgttactaatataact

SEQ ID NO: 3708 - RNA, 23 nt, synthetic construct
  source 1..23: mol_type = other RNA
acttcatacaacacaatactcta

SEQ ID NO: 3709 - RNA, 23 nt, synthetic construct
  source 1..23: mol_type = other RNA
ctatgccacattaacatctttta

SEQ ID NO: 3710 - RNA, 23 nt, synthetic construct
  source 1..23: mol_type = other RNA
ctcactggttttagtaaattacc

SEQ ID NO: 3711 - RNA, 23 nt, synthetic construct
  source 1..23: mol_type = other RNA
cactcgctcagctataagaagag

SEQ ID NO: 3712 - RNA, 23 nt, synthetic construct
  source 1..23: mol_type = other RNA
gttcttcattctttgatagaaat

SEQ ID NO: 3713 - RNA, 23 nt, synthetic construct
  source 1..23: mol_type = other RNA
gtcaagattaagactaaaactta

SEQ ID NO: 3714 - RNA, 23 nt, synthetic construct
  source 1..23: mol_type = other RNA
gtaagctagagaaaatgttattt

SEQ ID NO: 3715 - RNA, 23 nt, synthetic construct
  source 1..23: mol_type = other RNA
ccaaactttggtaatttaagttg

SEQ ID NO: 3716 - RNA, 23 nt, synthetic construct
  source 1..23: mol_type = other RNA
gtcatatcactaatatactaaca

SEQ ID NO: 3717 - RNA, 23 nt, synthetic construct
  source 1..23: mol_type = other RNA
tcttgctgatctgtatcatcgtg

SEQ ID NO: 3718 - RNA, 23 nt, synthetic construct
  source 1..23: mol_type = other RNA
tcatctgttggatcttgtaaaca

SEQ ID NO: 3719 - RNA, 23 nt, synthetic construct
  source 1..23: mol_type = other RNA
acatgtaggtaaatcataaatct

SEQ ID NO: 3720 - RNA, 23 nt, synthetic construct
  source 1..23: mol_type = other RNA
aactgattagtcatattcctttg

SEQ ID NO: 3721 - RNA, 23 nt, synthetic construct
  source 1..23: mol_type = other RNA
cccatctattacatctacagctg

SEQ ID NO: 3722 - RNA, 23 nt, synthetic construct
  source 1..23: mol_type = other RNA
ctaaaatagtttacacctatact

SEQ ID NO: 3723 - RNA, 23 nt, synthetic construct
  source 1..23: mol_type = other RNA
aaggagacactattaaattttct

SEQ ID NO: 3724 - RNA, 23 nt, synthetic construct
  source 1..23: mol_type = other RNA
caagtagaaagcttataaacaac

SEQ ID NO: 3725 - RNA, 23 nt, synthetic construct
  source 1..23: mol_type = other RNA
tttcttacacaagtgttgctaac

SEQ ID NO: 3726 - RNA, 23 nt, synthetic construct
  source 1..23: mol_type = other RNA
agaactatttgtagtaactatca

SEQ ID NO: 3727 - RNA, 23 nt, synthetic construct
  source 1..23: mol_type = other RNA
ggttactaaaagaatatgtaaca

SEQ ID NO: 3728 - RNA, 23 nt, synthetic construct
  source 1..23: mol_type = other RNA
attcaaaatagtccactgactcc

SEQ ID NO: 3729 - RNA, 23 nt, synthetic construct
  source 1..23: mol_type = other RNA
agacaggaaaacaatattgtata

SEQ ID NO: 3730 - RNA, 23 nt, synthetic construct
  source 1..23: mol_type = other RNA
aagtgtataaaatgcaactgttg

SEQ ID NO: 3731 - RNA, 23 nt, synthetic construct
  source 1..23: mol_type = other RNA
ctctatactgtgatgatcacagc

SEQ ID NO: 3732 - RNA, 23 nt, synthetic construct
  source 1..23: mol_type = other RNA
aggccatactcttacataataaa

SEQ ID NO: 3733 - RNA, 23 nt, synthetic construct
  source 1..23: mol_type = other RNA
aagaatcacagaattctagtaca

SEQ ID NO: 3734 - RNA, 23 nt, synthetic construct
  source 1..23: mol_type = other RNA
taacacatattttgcgtgttata

SEQ ID NO: 3735 - RNA, 23 nt, synthetic construct
  source 1..23: mol_type = other RNA
ctttgattacactgtttgttaca

SEQ ID NO: 3736 - RNA, 23 nt, synthetic construct
  source 1..23: mol_type = other RNA
atccagctatgctatttataatt

SEQ ID NO: 3737 - RNA, 23 nt, synthetic construct
  source 1..23: mol_type = other RNA
aacaactgaagtaaaattgagtg

SEQ ID NO: 3738 - RNA, 23 nt, synthetic construct
  source 1..23: mol_type = other RNA
atgtgtaattaaccatatcttct

SEQ ID NO: 3739 - RNA, 23 nt, synthetic construct
  source 1..23: mol_type = other RNA
cctctatcaaccaaatggtaagc

SEQ ID NO: 3740 - RNA, 23 nt, synthetic construct
  source 1..23: mol_type = other RNA
tgtgaggattacagaatactata

SEQ ID NO: 3741 - RNA, 23 nt, synthetic construct
  source 1..23: mol_type = other RNA
aagtggaaaatttgaactgatta

SEQ ID NO: 3742 - RNA, 23 nt, synthetic construct
  source 1..23: mol_type = other RNA
tcatggagaaagtccaatacctc

SEQ ID NO: 3743 - RNA, 23 nt, synthetic construct
  source 1..23: mol_type = other RNA
gcaaatcagaatcactatattaa

SEQ ID NO: 3744 - RNA, 23 nt, synthetic construct
  source 1..23: mol_type = other RNA
gtcttccattccagcctaacatc

SEQ ID NO: 3745 - RNA, 23 nt, synthetic construct
  source 1..23: mol_type = other RNA
caaatgaagtgtcattattcaaa

SEQ ID NO: 3746 - RNA, 23 nt, synthetic construct
  source 1..23: mol_type = other RNA
ttcttcatcataaagtgtaaaga

SEQ ID NO: 3747 - RNA, 23 nt, synthetic construct
  source 1..23: mol_type = other RNA
tcccaaatcttttctgaagatga

SEQ ID NO: 3748 - RNA, 23 nt, synthetic construct
  source 1..23: mol_type = other RNA
tctttggaatcatgaaaccttaa

SEQ ID NO: 3749 - RNA, 23 nt, synthetic construct
  source 1..23: mol_type = other RNA
ctaaacacccgtaagacttcata

SEQ ID NO: 3750 - RNA, 23 nt, synthetic construct
  source 1..23: mol_type = other RNA
ctaactcaatagtgaaggagaca

SEQ ID NO: 3751 - RNA, 23 nt, synthetic construct
  source 1..23: mol_type = other RNA
aatcttcatttaaggcactgtag

SEQ ID NO: 3752 - RNA, 23 nt, synthetic construct
  source 1..23: mol_type = other RNA
ttggtcttgcagtcttgtcttag

SEQ ID NO: 3753 - RNA, 23 nt, synthetic construct
  source 1..23: mol_type = other RNA
attatctgagctagagttaccta

SEQ ID NO: 3754 - RNA, 23 nt, synthetic construct
  source 1..23: mol_type = other RNA
tcaactgtaataggatatagcta

SEQ ID NO: 3755 - RNA, 23 nt, synthetic construct
  source 1..23: mol_type = other RNA
acatgaaaagggctttattttca

SEQ ID NO: 3756 - RNA, 23 nt, synthetic construct
  source 1..23: mol_type = other RNA
tacagaaagtatccctagtctta

SEQ ID NO: 3757 - RNA, 23 nt, synthetic construct
  source 1..23: mol_type = other RNA
gctgccagctttttatctttctc

SEQ ID NO: 3758 - RNA, 23 nt, synthetic construct
  source 1..23: mol_type = other RNA
ctcttttgaggtgaatataattt

SEQ ID NO: 3759 - RNA, 23 nt, synthetic construct
  source 1..23: mol_type = other RNA
gttcagggatatctgaagaacag

SEQ ID NO: 3760 - RNA, 23 nt, synthetic construct
  source 1..23: mol_type = other RNA
ctcaacaagcacgtcaaaagcta

SEQ ID NO: 3761 - RNA, 23 nt, synthetic construct
  source 1..23: mol_type = other RNA
atattgtataacagaccacttcc

SEQ ID NO: 3762 - RNA, 23 nt, synthetic construct
  source 1..23: mol_type = other RNA
gcttaatgttgccttttatattt

SEQ ID NO: 3763 - RNA, 23 nt, synthetic construct
  source 1..23: mol_type = other RNA
atattgaccttggtttcttacac

SEQ ID NO: 3764 - RNA, 23 nt, synthetic construct
  source 1..23: mol_type = other RNA
catatgatcaacagatgagaact

SEQ ID NO: 3765 - RNA, 23 nt, synthetic construct
  source 1..23: mol_type = other RNA
gggcagagatttcttaagtgacg

SEQ ID NO: 3766 - RNA, 23 nt, synthetic construct
  source 1..23: mol_type = other RNA
tagaagagtttctttgtgaaaag

SEQ ID NO: 3767 - RNA, 23 nt, synthetic construct
  source 1..23: mol_type = other RNA
ctcaaccattgaaatgcctcaac

SEQ ID NO: 3768 - RNA, 23 nt, synthetic construct
  source 1..23: mol_type = other RNA
gcatctattttgcagtccactct

SEQ ID NO: 3769 - RNA, 23 nt, synthetic construct
  source 1..23: mol_type = other RNA
ttgttaccatatgtattcatctg

SEQ ID NO: 3770 - RNA, 23 nt, synthetic construct
  source 1..23: mol_type = other RNA
agttcttatcttaatttacaggg

SEQ ID NO: 3771 - RNA, 23 nt, synthetic construct
  source 1..23: mol_type = other RNA
agacagttatctcatatttggct

SEQ ID NO: 3772 - RNA, 23 nt, synthetic construct
  source 1..23: mol_type = other RNA
ccaacaattttaatttcagttga

SEQ ID NO: 3773 - RNA, 23 nt, synthetic construct
  source 1..23: mol_type = other RNA
caggcaaggaaaataaaagattt

SEQ ID NO: 3774 - RNA, 23 nt, synthetic construct
  source 1..23: mol_type = other RNA
tatcatcgtgatgcttctctgaa

SEQ ID NO: 3775 - RNA, 23 nt, synthetic construct
  source 1..23: mol_type = other RNA
tgaagatgaagagtttagtttta

SEQ ID NO: 3776 - RNA, 23 nt, synthetic construct
  source 1..23: mol_type = other RNA
ggcactgtagtgaattatctgag

SEQ ID NO: 3777 - RNA, 23 nt, synthetic construct
  source 1..23: mol_type = other RNA
tgctacaacctctagatctgcag

SEQ ID NO: 3778 - RNA, 23 nt, synthetic construct
  source 1..23: mol_type = other RNA
tgatgagaatcaagtatggaaaa

SEQ ID NO: 3779 - RNA, 23 nt, synthetic construct
  source 1..23: mol_type = other RNA
tgttgttcaagggtcaactgtaa

SEQ ID NO: 3780 - RNA, 23 nt, synthetic construct
  source 1..23: mol_type = other RNA
ctgaacccatgagagatactaga

SEQ ID NO: 3781 - RNA, 23 nt, synthetic construct
  source 1..23: mol_type = other RNA
atatgtgacagtgagattagtca

SEQ ID NO: 3782 - RNA, 23 nt, synthetic construct
  source 1..23: mol_type = other RNA
tactattcattaaatggaagtgg

SEQ ID NO: 3783 - RNA, 23 nt, synthetic construct
  source 1..23: mol_type = other RNA
catcttttaaagttgatgagaat

SEQ ID NO: 3784 - RNA, 23 nt, synthetic construct
  source 1..23: mol_type = other RNA
tgggtgacagagtcagaaaactc

SEQ ID NO: 3785 - RNA, 23 nt, synthetic construct
  source 1..23: mol_type = other RNA
ataaacaacaggtgatacactca

SEQ ID NO: 3786 - RNA, 23 nt, synthetic construct
  source 1..23: mol_type = other RNA
gaccacttcctgagtagaagagt

SEQ ID NO: 3787 - RNA, 23 nt, synthetic construct
  source 1..23: mol_type = other RNA
taaaatcttattctgtgaggatt

SEQ ID NO: 3788 - RNA, 23 nt, synthetic construct
  source 1..23: mol_type = other RNA
ggagtggaaagtgtttggttcag

SEQ ID NO: 3789 - RNA, 23 nt, synthetic construct
  source 1..23: mol_type = other RNA
aattgtattttttctatgccaca

SEQ ID NO: 3790 - RNA, 23 nt, synthetic construct
  source 1..23: mol_type = other RNA
gcgtgttatatgtattatacact

SEQ ID NO: 3791 - RNA, 23 nt, synthetic construct
  source 1..23: mol_type = other RNA
taaaagagtagaggatgtgtaat

SEQ ID NO: 3792 - RNA, 23 nt, synthetic construct
  source 1..23: mol_type = other RNA
ttagttttaaaactgcactgcca

SEQ ID NO: 3793 - RNA, 23 nt, synthetic construct
  source 1..23: mol_type = other RNA
aaaagatttccagtgacagaaaa

SEQ ID NO: 3794 - RNA, 23 nt, synthetic construct
  source 1..23: mol_type = other RNA
gaactggtggttaatatgtgaca

SEQ ID NO: 3795 - RNA, 23 nt, synthetic construct
  source 1..23: mol_type = other RNA
ccttgcaattcaagcccttgttg

SEQ ID NO: 3796 - RNA, 23 nt, synthetic construct
  source 1..23: mol_type = other RNA
ttaagtgacgcctcatctacaag

SEQ ID NO: 3797 - RNA, 23 nt, synthetic construct
  source 1..23: mol_type = other RNA
tgattttgcaggttgtcttccat

SEQ ID NO: 3798 - RNA, 23 nt, synthetic construct
  source 1..23: mol_type = other RNA
atatgtaacatcaatattgacct

SEQ ID NO: 3799 - RNA, 23 nt, synthetic construct
  source 1..23: mol_type = other RNA
ggaaagaatattcatgtataagt

SEQ ID NO: 3800 - RNA, 23 nt, synthetic construct
  source 1..23: mol_type = other RNA
caaagtaataacacaaatgaagt

SEQ ID NO: 3801 - RNA, 23 nt, synthetic construct
  source 1..23: mol_type = other RNA
tctacagctgacccttgaacatg

SEQ ID NO: 3802 - RNA, 23 nt, synthetic construct
  source 1..23: mol_type = other RNA
gtatggaaaagtaaggccatact

SEQ ID NO: 3803 - RNA, 23 nt, synthetic construct
  source 1..23: mol_type = other RNA
atgaacttgttggcccatctatt

SEQ ID NO: 3804 - RNA, 21 nt, synthetic construct
  source 1..21: mol_type = other RNA
ggtgacagagtcagaaaactt

SEQ ID NO: 3805 - RNA, 21 nt, synthetic construct
  source 1..21: mol_type = other RNA
aaacacccgtaagacttcatt

SEQ ID NO: 3806 - RNA, 21 nt, synthetic construct
  source 1..21: mol_type = other RNA
ttcatacaacacaatactctt

SEQ ID NO: 3807 - RNA, 21 nt, synthetic construct
  source 1..21: mol_type = other RNA
ctatactgtgatgatcacagt

SEQ ID NO: 3808 - RNA, 21 nt, synthetic construct
  source 1..21: mol_type = other RNA
ctacctaaaagaagacagttt

SEQ ID NO: 3809 - RNA, 21 nt, synthetic construct
  source 1..21: mol_type = other RNA
acagttatctcatatttggct

SEQ ID NO: 3810 - RNA, 21 nt, synthetic construct
  source 1..21: mol_type = other RNA
tgccagctttttatctttctt

SEQ ID NO: 3811 - RNA, 21 nt, synthetic construct
  source 1..21: mol_type = other RNA
tctttctctcgaccacttaat

SEQ ID NO: 3812 - RNA, 21 nt, synthetic construct
  source 1..21: mol_type = other RNA
cacttaaaacttcagacttct

SEQ ID NO: 3813 - RNA, 21 nt, synthetic construct
  source 1..21: mol_type = other RNA
atggagaaagtccaatacctt

SEQ ID NO: 3814 - RNA, 21 nt, synthetic construct
  source 1..21: mol_type = other RNA
ctcgctcagctataagaagat

SEQ ID NO: 3815 - RNA, 21 nt, synthetic construct
  source 1..21: mol_type = other RNA
caaccattgaaatgcctcaat

SEQ ID NO: 3816 - RNA, 21 nt, synthetic construct
  source 1..21: mol_type = other RNA
caacaagcacgtcaaaagctt

SEQ ID NO: 3817 - RNA, 21 nt, synthetic construct
  source 1..21: mol_type = other RNA
ctacagaatctatttatcaat

SEQ ID NO: 3818 - RNA, 21 nt, synthetic construct
  source 1..21: mol_type = other RNA
tatcaatttctgtctcatctt

SEQ ID NO: 3819 - RNA, 21 nt, synthetic construct
  source 1..21: mol_type = other RNA
atcttaatatgtctcttgctt

SEQ ID NO: 3820 - RNA, 21 nt, synthetic construct
  source 1..21: mol_type = other RNA
ttgctgatctgtatcatcgtt

SEQ ID NO: 3821 - RNA, 21 nt, synthetic construct
  source 1..21: mol_type = other RNA
tcatcgtgatgcttctctgat

SEQ ID NO: 3822 - RNA, 21 nt, synthetic construct
  source 1..21: mol_type = other RNA
tctctgaagttctgctacaat

SEQ ID NO: 3823 - RNA, 21 nt, synthetic construct
  source 1..21: mol_type = other RNA
ctacaacctctagatctgcat

SEQ ID NO: 3824 - RNA, 21 nt, synthetic construct
  source 1..21: mol_type = other RNA
catcagcttaaaatctgtcat

SEQ ID NO: 3825 - RNA, 21 nt, synthetic construct
  source 1..21: mol_type = other RNA
acaggaaaacaatattgtatt

SEQ ID NO: 3826 - RNA, 21 nt, synthetic construct
  source 1..21: mol_type = other RNA
attgtataacagaccacttct

SEQ ID NO: 3827 - RNA, 21 nt, synthetic construct
  source 1..21: mol_type = other RNA
ccacttcctgagtagaagagt

SEQ ID NO: 3828 - RNA, 21 nt, synthetic construct
  source 1..21: mol_type = other RNA
gaagagtttctttgtgaaaat

SEQ ID NO: 3829 - RNA, 21 nt, synthetic construct
  source 1..21: mol_type = other RNA
caagattaagactaaaacttt

SEQ ID NO: 3830 - RNA, 21 nt, synthetic construct
  source 1..21: mol_type = other RNA
gttaccatatgtattcatctt

SEQ ID NO: 3831 - RNA, 21 nt, synthetic construct
  source 1..21: mol_type = other RNA
atctgttggatcttgtaaact

SEQ ID NO: 3832 - RNA, 21 nt, synthetic construct
  source 1..21: mol_type = other RNA
atgaaaagggctttattttct

SEQ ID NO: 3833 - RNA, 21 nt, synthetic construct
  source 1..21: mol_type = other RNA
gtgtataaaatgcaactgttt

SEQ ID NO: 3834 - RNA, 21 nt, synthetic construct
  source 1..21: mol_type = other RNA
actgttgatttcctcaacatt

SEQ ID NO: 3835 - RNA, 21 nt, synthetic construct
  source 1..21: mol_type = other RNA
cacaaatttctatcccaaatt

SEQ ID NO: 3836 - RNA, 21 nt, synthetic construct
  source 1..21: mol_type = other RNA
ccaaatcttttctgaagatgt

SEQ ID NO: 3837 - RNA, 21 nt, synthetic construct
  source 1..21: mol_type = other RNA
aagatgaagagtttagttttt

SEQ ID NO: 3838 - RNA, 21 nt, synthetic construct
  source 1..21: mol_type = other RNA
agttttaaaactgcactgcct

SEQ ID NO: 3839 - RNA, 21 nt, synthetic construct
  source 1..21: mol_type = other RNA
tgccaacaagttcacttcatt

SEQ ID NO: 3840 - RNA, 21 nt, synthetic construct
  source 1..21: mol_type = other RNA
cttttgaggtgaatataattt

SEQ ID NO: 3841 - RNA, 21 nt, synthetic construct
  source 1..21: mol_type = other RNA
aagtatttttcaggtcttcat

SEQ ID NO: 3842 - RNA, 21 nt, synthetic construct
  source 1..21: mol_type = other RNA
ttcaccaagtatcaaagtaat

SEQ ID NO: 3843 - RNA, 21 nt, synthetic construct
  source 1..21: mol_type = other RNA
aagtaataacacaaatgaagt

SEQ ID NO: 3844 - RNA, 21 nt, synthetic construct
  source 1..21: mol_type = other RNA
aatgaagtgtcattattcaat

SEQ ID NO: 3845 - RNA, 21 nt, synthetic construct
  source 1..21: mol_type = other RNA
tcaaaatagtccactgactct

SEQ ID NO: 3846 - RNA, 21 nt, synthetic construct
  source 1..21: mol_type = other RNA
cctcacatctgttatcttatt

SEQ ID NO: 3847 - RNA, 21 nt, synthetic construct
  source 1..21: mol_type = other RNA
aactatttgtagtaactatct

SEQ ID NO: 3848 - RNA, 21 nt, synthetic construct
  source 1..21: mol_type = other RNA
tatcagaatctacattctaat

SEQ ID NO: 3849 - RNA, 21 nt, synthetic construct
  source 1..21: mol_type = other RNA
ttgtattttttctatgccact

SEQ ID NO: 3850 - RNA, 21 nt, synthetic construct
  source 1..21: mol_type = other RNA
atgccacattaacatcttttt

SEQ ID NO: 3851 - RNA, 21 nt, synthetic construct
  source 1..21: mol_type = other RNA
tcttttaaagttgatgagaat

SEQ ID NO: 3852 - RNA, 21 nt, synthetic construct
  source 1..21: mol_type = other RNA
atgagaatcaagtatggaaat

SEQ ID NO: 3853 - RNA, 21 nt, synthetic construct
  source 1..21: mol_type = other RNA
atggaaaagtaaggccatact

SEQ ID NO: 3854 - RNA, 21 nt, synthetic construct
  source 1..21: mol_type = other RNA
gccatactcttacataataat

SEQ ID NO: 3855 - RNA, 21 nt, synthetic construct
  source 1..21: mol_type = other RNA
gaatcacagaattctagtact

SEQ ID NO: 3856 - RNA, 21 nt, synthetic construct
  source 1..21: mol_type = other RNA
atgtaggtaaatcataaatct

SEQ ID NO: 3857 - RNA, 21 nt, synthetic construct
  source 1..21: mol_type = other RNA
ctgttctaagacatatgatct

SEQ ID NO: 3858 - RNA, 21 nt, synthetic construct
  source 1..21: mol_type = other RNA
tatgatcaacagatgagaact

SEQ ID NO: 3859 - RNA, 21 nt, synthetic construct
  source 1..21: mol_type = other RNA
actggtggttaatatgtgact

SEQ ID NO: 3860 - RNA, 21 nt, synthetic construct
  source 1..21: mol_type = other RNA
atgtgacagtgagattagtct

SEQ ID NO: 3861 - RNA, 21 nt, synthetic construct
  source 1..21: mol_type = other RNA
catatcactaatatactaact

SEQ ID NO: 3862 - RNA, 21 nt, synthetic construct
  source 1..21: mol_type = other RNA
taacaacagaatctaatcttt

SEQ ID NO: 3863 - RNA, 21 nt, synthetic construct
  source 1..21: mol_type = other RNA
tcttcatttaaggcactgtat

SEQ ID NO: 3864 - RNA, 21 nt, synthetic construct
  source 1..21: mol_type = other RNA
cactgtagtgaattatctgat

SEQ ID NO: 3865 - RNA, 21 nt, synthetic construct
  source 1..21: mol_type = other RNA
tatctgagctagagttacctt

SEQ ID NO: 3866 - RNA, 21 nt, synthetic construct
  source 1..21: mol_type = other RNA
gcttaccatactatatctttt

SEQ ID NO: 3867 - RNA, 21 nt, synthetic construct
  source 1..21: mol_type = other RNA
tttggaatcatgaaaccttat

SEQ ID NO: 3868 - RNA, 21 nt, synthetic construct
  source 1..21: mol_type = other RNA
taagacttcagaatgattttt

SEQ ID NO: 3869 - RNA, 21 nt, synthetic construct
  source 1..21: mol_type = other RNA
attttgcaggttgtcttccat

SEQ ID NO: 3870 - RNA, 21 nt, synthetic construct
  source 1..21: mol_type = other RNA
cttccattccagcctaacatt

SEQ ID NO: 3871 - RNA, 21 nt, synthetic construct
  source 1..21: mol_type = other RNA
ggcaaggaaaataaaagattt

SEQ ID NO: 3872 - RNA, 21 nt, synthetic construct
  source 1..21: mol_type = other RNA
aagatttccagtgacagaaat

SEQ ID NO: 3873 - RNA, 21 nt, synthetic construct
  source 1..21: mol_type = other RNA
tatgaattctctctccaaatt

SEQ ID NO: 3874 - RNA, 21 nt, synthetic construct
  source 1..21: mol_type = other RNA
gaacttgttggcccatctatt

SEQ ID NO: 3875 - RNA, 21 nt, synthetic construct
  source 1..21: mol_type = other RNA
catctattacatctacagctt

SEQ ID NO: 3876 - RNA, 21 nt, synthetic construct
  source 1..21: mol_type = other RNA
tacagctgacccttgaacatt

SEQ ID NO: 3877 - RNA, 21 nt, synthetic construct
  source 1..21: mol_type = other RNA
caaaatcttaactacctaatt

SEQ ID NO: 3878 - RNA, 21 nt, synthetic construct
  source 1..21: mol_type = other RNA
actattgaccataaaccttat

SEQ ID NO: 3879 - RNA, 21 nt, synthetic construct
  source 1..21: mol_type = other RNA
ccttactgataacataaacat

SEQ ID NO: 3880 - RNA, 21 nt, synthetic construct
  source 1..21: mol_type = other RNA
acacatattttgcgtgttatt

SEQ ID NO: 3881 - RNA, 21 nt, synthetic construct
  source 1..21: mol_type = other RNA
gtgttatatgtattatacact

SEQ ID NO: 3882 - RNA, 21 nt, synthetic construct
  source 1..21: mol_type = other RNA
ctatattcctacaataaagtt

SEQ ID NO: 3883 - RNA, 21 nt, synthetic construct
  source 1..21: mol_type = other RNA
aagctagagaaaatgttattt

SEQ ID NO: 3884 - RNA, 21 nt, synthetic construct
  source 1..21: mol_type = other RNA
ctattcattaaatggaagtgt

SEQ ID NO: 3885 - RNA, 21 nt, synthetic construct
  source 1..21: mol_type = other RNA
aacataaaagtcttcattctt

SEQ ID NO: 3886 - RNA, 21 nt, synthetic construct
  source 1..21: mol_type = other RNA
cattctcattgtcttcacatt

SEQ ID NO: 3887 - RNA, 21 nt, synthetic construct
  source 1..21: mol_type = other RNA
ggtcttgcagtcttgtcttat

SEQ ID NO: 3888 - RNA, 21 nt, synthetic construct
  source 1..21: mol_type = other RNA
aaagaatattcatgtataagt

SEQ ID NO: 3889 - RNA, 21 nt, synthetic construct
  source 1..21: mol_type = other RNA
ttgcaattcaagcccttgttt

SEQ ID NO: 3890 - RNA, 21 nt, synthetic construct
  source 1..21: mol_type = other RNA
ttgttcaagggtcaactgtat

SEQ ID NO: 3891 - RNA, 21 nt, synthetic construct
  source 1..21: mol_type = other RNA
aactgtaataggatatagctt

SEQ ID NO: 3892 - RNA, 21 nt, synthetic construct
  source 1..21: mol_type = other RNA
ctatttttcttcctctatcat

SEQ ID NO: 3893 - RNA, 21 nt, synthetic construct
  source 1..21: mol_type = other RNA
tctatcaaccaaatggtaagt

SEQ ID NO: 3894 - RNA, 21 nt, synthetic construct
  source 1..21: mol_type = other RNA
atctattttgcagtccactct

SEQ ID NO: 3895 - RNA, 21 nt, synthetic construct
  source 1..21: mol_type = other RNA
tactgagctaaattatagatt

SEQ ID NO: 3896 - RNA, 21 nt, synthetic construct
  source 1..21: mol_type = other RNA
ccagctatgctatttataatt

SEQ ID NO: 3897 - RNA, 21 nt, synthetic construct
  source 1..21: mol_type = other RNA
ttttcaatttctcctctgact

SEQ ID NO: 3898 - RNA, 21 nt, synthetic construct
  source 1..21: mol_type = other RNA
gaccatttcagaacatcttct

SEQ ID NO: 3899 - RNA, 21 nt, synthetic construct
  source 1..21: mol_type = other RNA
cttccaataactcataaaact

SEQ ID NO: 3900 - RNA, 21 nt, synthetic construct
  source 1..21: mol_type = other RNA
caactgaagtaaaattgagtt

SEQ ID NO: 3901 - RNA, 21 nt, synthetic construct
  source 1..21: mol_type = other RNA
ggaaaatatattcaccaaact

SEQ ID NO: 3902 - RNA, 21 nt, synthetic construct
  source 1..21: mol_type = other RNA
aaactttggtaatttaagttt

SEQ ID NO: 3903 - RNA, 21 nt, synthetic construct
  source 1..21: mol_type = other RNA
aaaatagtttacacctatact

SEQ ID NO: 3904 - RNA, 21 nt, synthetic construct
  source 1..21: mol_type = other RNA
cctatactgcataatccaact

SEQ ID NO: 3905 - RNA, 21 nt, synthetic construct
  source 1..21: mol_type = other RNA
aacaattttaatttcagttgt

SEQ ID NO: 3906 - RNA, 21 nt, synthetic construct
  source 1..21: mol_type = other RNA
agacatgttactaatataact

SEQ ID NO: 3907 - RNA, 21 nt, synthetic construct
  source 1..21: mol_type = other RNA
aaagagtagaggatgtgtaat

SEQ ID NO: 3908 - RNA, 21 nt, synthetic construct
  source 1..21: mol_type = other RNA
gtgtaattaaccatatcttct

SEQ ID NO: 3909 - RNA, 21 nt, synthetic construct
  source 1..21: mol_type = other RNA
ttctaaaacatggttactaat

SEQ ID NO: 3910 - RNA, 21 nt, synthetic construct
  source 1..21: mol_type = other RNA
ttactaaaagaatatgtaact

SEQ ID NO: 3911 - RNA, 21 nt, synthetic construct
  source 1..21: mol_type = other RNA
atgtaacatcaatattgacct

SEQ ID NO: 3912 - RNA, 21 nt, synthetic construct
  source 1..21: mol_type = other RNA
attgaccttggtttcttacat

SEQ ID NO: 3913 - RNA, 21 nt, synthetic construct
  source 1..21: mol_type = other RNA
tcttacacaagtgttgctaat

SEQ ID NO: 3914 - RNA, 21 nt, synthetic construct
  source 1..21: mol_type = other RNA
aactcaatagtgaaggagact

SEQ ID NO: 3915 - RNA, 21 nt, synthetic construct
  source 1..21: mol_type = other RNA
ggagacactattaaattttct

SEQ ID NO: 3916 - RNA, 21 nt, synthetic construct
  source 1..21: mol_type = other RNA
gaacccatgagagatactagt

SEQ ID NO: 3917 - RNA, 21 nt, synthetic construct
  source 1..21: mol_type = other RNA
agtggaaagtgtttggttcat

SEQ ID NO: 3918 - RNA, 21 nt, synthetic construct
  source 1..21: mol_type = other RNA
tcagggatatctgaagaacat

SEQ ID NO: 3919 - RNA, 21 nt, synthetic construct
  source 1..21: mol_type = other RNA
gcagagatttcttaagtgact

SEQ ID NO: 3920 - RNA, 21 nt, synthetic construct
  source 1..21: mol_type = other RNA
aagtgacgcctcatctacaat

SEQ ID NO: 3921 - RNA, 21 nt, synthetic construct
  source 1..21: mol_type = other RNA
tacaagctggaaattcctaat

SEQ ID NO: 3922 - RNA, 21 nt, synthetic construct
  source 1..21: mol_type = other RNA
agtagaaagcttataaacaat

SEQ ID NO: 3923 - RNA, 21 nt, synthetic construct
  source 1..21: mol_type = other RNA
aaacaacaggtgatacactct

SEQ ID NO: 3924 - RNA, 21 nt, synthetic construct
  source 1..21: mol_type = other RNA
cactggttttagtaaattact

SEQ ID NO: 3925 - RNA, 21 nt, synthetic construct
  source 1..21: mol_type = other RNA
cagaaagtatccctagtcttt

SEQ ID NO: 3926 - RNA, 21 nt, synthetic construct
  source 1..21: mol_type = other RNA
gtggaaaatttgaactgattt

SEQ ID NO: 3927 - RNA, 21 nt, synthetic construct
  source 1..21: mol_type = other RNA
ctgattagtcatattcctttt

SEQ ID NO: 3928 - RNA, 21 nt, synthetic construct
  source 1..21: mol_type = other RNA
ttgattacactgtttgttact

SEQ ID NO: 3929 - RNA, 21 nt, synthetic construct
  source 1..21: mol_type = other RNA
tctcagtaaacagaaataact

SEQ ID NO: 3930 - RNA, 21 nt, synthetic construct
  source 1..21: mol_type = other RNA
tcttcattctttgatagaaat

SEQ ID NO: 3931 - RNA, 21 nt, synthetic construct
  source 1..21: mol_type = other RNA
aaatcttattctgtgaggatt

SEQ ID NO: 3932 - RNA, 21 nt, synthetic construct
  source 1..21: mol_type = other RNA
tgaggattacagaatactatt

SEQ ID NO: 3933 - RNA, 21 nt, synthetic construct
  source 1..21: mol_type = other RNA
cttcatcataaagtgtaaagt

SEQ ID NO: 3934 - RNA, 21 nt, synthetic construct
  source 1..21: mol_type = other RNA
atgctcaaatatgttctactt

SEQ ID NO: 3935 - RNA, 21 nt, synthetic construct
  source 1..21: mol_type = other RNA
tctactatagaataagttctt

SEQ ID NO: 3936 - RNA, 21 nt, synthetic construct
  source 1..21: mol_type = other RNA
ttcttatcttaatttacaggt

SEQ ID NO: 3937 - RNA, 21 nt, synthetic construct
  source 1..21: mol_type = other RNA
ttaatgttgccttttatattt

SEQ ID NO: 3938 - RNA, 21 nt, synthetic construct
  source 1..21: mol_type = other RNA
aaatcagaatcactatattat

SEQ ID NO: 3939 - RNA, 23 nt, synthetic construct
  source 1..23: mol_type = other RNA
aagttttctgactctgtcaccca

SEQ ID NO: 3940 - RNA, 23 nt, synthetic construct
  source 1..23: mol_type = other RNA
aatgaagtcttacgggtgtttag

SEQ ID NO: 3941 - RNA, 23 nt, synthetic construct
  source 1..23: mol_type = other RNA
aagagtattgtgttgtatgaagt

SEQ ID NO: 3942 - RNA, 23 nt, synthetic construct
  source 1..23: mol_type = other RNA
actgtgatcatcacagtatagag

SEQ ID NO: 3943 - RNA, 23 nt, synthetic construct
  source 1..23: mol_type = other RNA
aaactgtcttcttttaggtagcc

SEQ ID NO: 3944 - RNA, 23 nt, synthetic construct
  source 1..23: mol_type = other RNA
agccaaatatgagataactgtct

SEQ ID NO: 3945 - RNA, 23 nt, synthetic construct
  source 1..23: mol_type = other RNA
aagaaagataaaaagctggcagc

SEQ ID NO: 3946 - RNA, 23 nt, synthetic construct
  source 1..23: mol_type = other RNA
attaagtggtcgagagaaagata

SEQ ID NO: 3947 - RNA, 23 nt, synthetic construct
  source 1..23: mol_type = other RNA
agaagtctgaagttttaagtggt

SEQ ID NO: 3948 - RNA, 23 nt, synthetic construct
  source 1..23: mol_type = other RNA
aaggtattggactttctccatga

SEQ ID NO: 3949 - RNA, 23 nt, synthetic construct
  source 1..23: mol_type = other RNA
atcttcttatagctgagcgagtg

SEQ ID NO: 3950 - RNA, 23 nt, synthetic construct
  source 1..23: mol_type = other RNA
attgaggcatttcaatggttgag

SEQ ID NO: 3951 - RNA, 23 nt, synthetic construct
  source 1..23: mol_type = other RNA
aagcttttgacgtgcttgttgag

SEQ ID NO: 3952 - RNA, 23 nt, synthetic construct
  source 1..23: mol_type = other RNA
attgataaatagattctgtagct

SEQ ID NO: 3953 - RNA, 23 nt, synthetic construct
  source 1..23: mol_type = other RNA
aagatgagacagaaattgataaa

SEQ ID NO: 3954 - RNA, 23 nt, synthetic construct
  source 1..23: mol_type = other RNA
aagcaagagacatattaagatga

SEQ ID NO: 3955 - RNA, 23 nt, synthetic construct
  source 1..23: mol_type = other RNA
aacgatgatacagatcagcaaga

SEQ ID NO: 3956 - RNA, 23 nt, synthetic construct
  source 1..23: mol_type = other RNA
atcagagaagcatcacgatgata

SEQ ID NO: 3957 - RNA, 23 nt, synthetic construct
  source 1..23: mol_type = other RNA
attgtagcagaacttcagagaag

SEQ ID NO: 3958 - RNA, 23 nt, synthetic construct
  source 1..23: mol_type = other RNA
atgcagatctagaggttgtagca

SEQ ID NO: 3959 - RNA, 23 nt, synthetic construct
  source 1..23: mol_type = other RNA
atgacagattttaagctgatgtg

SEQ ID NO: 3960 - RNA, 23 nt, synthetic construct
  source 1..23: mol_type = other RNA
aatacaatattgttttcctgtct

SEQ ID NO: 3961 - RNA, 23 nt, synthetic construct
  source 1..23: mol_type = other RNA
agaagtggtctgttatacaatat

SEQ ID NO: 3962 - RNA, 23 nt, synthetic construct
  source 1..23: mol_type = other RNA
actcttctactcaggaagtggtc

SEQ ID NO: 3963 - RNA, 23 nt, synthetic construct
  source 1..23: mol_type = other RNA
attttcacaaagaaactcttcta

SEQ ID NO: 3964 - RNA, 23 nt, synthetic construct
  source 1..23: mol_type = other RNA
aaagttttagtcttaatcttgac

SEQ ID NO: 3965 - RNA, 23 nt, synthetic construct
  source 1..23: mol_type = other RNA
aagatgaatacatatggtaacaa

SEQ ID NO: 3966 - RNA, 23 nt, synthetic construct
  source 1..23: mol_type = other RNA
agtttacaagatccaacagatga

SEQ ID NO: 3967 - RNA, 23 nt, synthetic construct
  source 1..23: mol_type = other RNA
agaaaataaagcccttttcatgt

SEQ ID NO: 3968 - RNA, 23 nt, synthetic construct
  source 1..23: mol_type = other RNA
aaacagttgcattttatacactt

SEQ ID NO: 3969 - RNA, 23 nt, synthetic construct
  source 1..23: mol_type = other RNA
aatgttgaggaaatcaacagttg

SEQ ID NO: 3970 - RNA, 23 nt, synthetic construct
  source 1..23: mol_type = other RNA
aatttgggatagaaatttgtgag

SEQ ID NO: 3971 - RNA, 23 nt, synthetic construct
  source 1..23: mol_type = other RNA
acatcttcagaaaagatttggga

SEQ ID NO: 3972 - RNA, 23 nt, synthetic construct
  source 1..23: mol_type = other RNA
aaaaactaaactcttcatcttca

SEQ ID NO: 3973 - RNA, 23 nt, synthetic construct
  source 1..23: mol_type = other RNA
aggcagtgcagttttaaaactaa

SEQ ID NO: 3974 - RNA, 23 nt, synthetic construct
  source 1..23: mol_type = other RNA
aatgaagtgaacttgttggcagt

SEQ ID NO: 3975 - RNA, 23 nt, synthetic construct
  source 1..23: mol_type = other RNA
aaattatattcacctcaaaagag

SEQ ID NO: 3976 - RNA, 23 nt, synthetic construct
  source 1..23: mol_type = other RNA
atgaagacctgaaaaatacttag

SEQ ID NO: 3977 - RNA, 23 nt, synthetic construct
  source 1..23: mol_type = other RNA
attactttgatacttggtgaaga

SEQ ID NO: 3978 - RNA, 23 nt, synthetic construct
  source 1..23: mol_type = other RNA
acttcatttgtgttattactttg

SEQ ID NO: 3979 - RNA, 23 nt, synthetic construct
  source 1..23: mol_type = other RNA
attgaataatgacacttcatttg

SEQ ID NO: 3980 - RNA, 23 nt, synthetic construct
  source 1..23: mol_type = other RNA
agagtcagtggactattttgaat

SEQ ID NO: 3981 - RNA, 23 nt, synthetic construct
  source 1..23: mol_type = other RNA
aataagataacagatgtgaggag

SEQ ID NO: 3982 - RNA, 23 nt, synthetic construct
  source 1..23: mol_type = other RNA
agatagttactacaaatagttct

SEQ ID NO: 3983 - RNA, 23 nt, synthetic construct
  source 1..23: mol_type = other RNA
attagaatgtagattctgatagt

SEQ ID NO: 3984 - RNA, 23 nt, synthetic construct
  source 1..23: mol_type = other RNA
agtggcatagaaaaaatacaatt

SEQ ID NO: 3985 - RNA, 23 nt, synthetic construct
  source 1..23: mol_type = other RNA
aaaaagatgttaatgtggcatag

SEQ ID NO: 3986 - RNA, 23 nt, synthetic construct
  source 1..23: mol_type = other RNA
attctcatcaactttaaaagatg

SEQ ID NO: 3987 - RNA, 23 nt, synthetic construct
  source 1..23: mol_type = other RNA
atttccatacttgattctcatca

SEQ ID NO: 3988 - RNA, 23 nt, synthetic construct
  source 1..23: mol_type = other RNA
agtatggccttacttttccatac

SEQ ID NO: 3989 - RNA, 23 nt, synthetic construct
  source 1..23: mol_type = other RNA
attattatgtaagagtatggcct

SEQ ID NO: 3990 - RNA, 23 nt, synthetic construct
  source 1..23: mol_type = other RNA
agtactagaattctgtgattctt

SEQ ID NO: 3991 - RNA, 23 nt, synthetic construct
  source 1..23: mol_type = other RNA
agatttatgatttacctacatgt

SEQ ID NO: 3992 - RNA, 23 nt, synthetic construct
  source 1..23: mol_type = other RNA
agatcatatgtcttagaacagat

SEQ ID NO: 3993 - RNA, 23 nt, synthetic construct
  source 1..23: mol_type = other RNA
agttctcatctgttgatcatatg

SEQ ID NO: 3994 - RNA, 23 nt, synthetic construct
  source 1..23: mol_type = other RNA
agtcacatattaaccaccagttc

SEQ ID NO: 3995 - RNA, 23 nt, synthetic construct
  source 1..23: mol_type = other RNA
agactaatctcactgtcacatat

SEQ ID NO: 3996 - RNA, 23 nt, synthetic construct
  source 1..23: mol_type = other RNA
agttagtatattagtgatatgac

SEQ ID NO: 3997 - RNA, 23 nt, synthetic construct
  source 1..23: mol_type = other RNA
aaagattagattctgttgttagt

SEQ ID NO: 3998 - RNA, 23 nt, synthetic construct
  source 1..23: mol_type = other RNA
atacagtgccttaaatgaagatt

SEQ ID NO: 3999 - RNA, 23 nt, synthetic construct
  source 1..23: mol_type = other RNA
atcagataattcactacagtgcc

SEQ ID NO: 4000 - RNA, 23 nt, synthetic construct
  source 1..23: mol_type = other RNA
aaggtaactctagctcagataat

SEQ ID NO: 4001 - RNA, 23 nt, synthetic construct
  source 1..23: mol_type = other RNA
aaaagatatagtatggtaagcta

SEQ ID NO: 4002 - RNA, 23 nt, synthetic construct
  source 1..23: mol_type = other RNA
ataaggtttcatgattccaaaga

SEQ ID NO: 4003 - RNA, 23 nt, synthetic construct
  source 1..23: mol_type = other RNA
aaaaatcattctgaagtcttaag

SEQ ID NO: 4004 - RNA, 23 nt, synthetic construct
  source 1..23: mol_type = other RNA
atggaagacaacctgcaaaatca

SEQ ID NO: 4005 - RNA, 23 nt, synthetic construct
  source 1..23: mol_type = other RNA
aatgttaggctggaatggaagac

SEQ ID NO: 4006 - RNA, 23 nt, synthetic construct
  source 1..23: mol_type = other RNA
aaatcttttattttccttgcctg

SEQ ID NO: 4007 - RNA, 23 nt, synthetic construct
  source 1..23: mol_type = other RNA
atttctgtcactggaaatctttt

SEQ ID NO: 4008 - RNA, 23 nt, synthetic construct
  source 1..23: mol_type = other RNA
aatttggagagagaattcatata

SEQ ID NO: 4009 - RNA, 23 nt, synthetic construct
  source 1..23: mol_type = other RNA
aatagatgggccaacaagttcat

SEQ ID NO: 4010 - RNA, 23 nt, synthetic construct
  source 1..23: mol_type = other RNA
aagctgtagatgtaatagatggg

SEQ ID NO: 4011 - RNA, 23 nt, synthetic construct
  source 1..23: mol_type = other RNA
aatgttcaagggtcagctgtaga

SEQ ID NO: 4012 - RNA, 23 nt, synthetic construct
  source 1..23: mol_type = other RNA
aattaggtagttaagattttgcg

SEQ ID NO: 4013 - RNA, 23 nt, synthetic construct
  source 1..23: mol_type = other RNA
ataaggtttatggtcaatagtag

SEQ ID NO: 4014 - RNA, 23 nt, synthetic construct
  source 1..23: mol_type = other RNA
atgtttatgttatcagtaaggtt

SEQ ID NO: 4015 - RNA, 23 nt, synthetic construct
  source 1..23: mol_type = other RNA
aataacacgcaaaatatgtgtta

SEQ ID NO: 4016 - RNA, 23 nt, synthetic construct
  source 1..23: mol_type = other RNA
agtgtataatacatataacacgc

SEQ ID NO: 4017 - RNA, 23 nt, synthetic construct
  source 1..23: mol_type = other RNA
aactttattgtaggaatatagtg

SEQ ID NO: 4018 - RNA, 23 nt, synthetic construct
  source 1..23: mol_type = other RNA
aaataacattttctctagcttac

SEQ ID NO: 4019 - RNA, 23 nt, synthetic construct
  source 1..23: mol_type = other RNA
acacttccatttaatgaatagta

SEQ ID NO: 4020 - RNA, 23 nt, synthetic construct
  source 1..23: mol_type = other RNA
aagaatgaagacttttatgttga

SEQ ID NO: 4021 - RNA, 23 nt, synthetic construct
  source 1..23: mol_type = other RNA
aatgtgaagacaatgagaatgaa

SEQ ID NO: 4022 - RNA, 23 nt, synthetic construct
  source 1..23: mol_type = other RNA
ataagacaagactgcaagaccaa

SEQ ID NO: 4023 - RNA, 23 nt, synthetic construct
  source 1..23: mol_type = other RNA
acttatacatgaatattctttcc

SEQ ID NO: 4024 - RNA, 23 nt, synthetic construct
  source 1..23: mol_type = other RNA
aaacaagggcttgaattgcaagg

SEQ ID NO: 4025 - RNA, 23 nt, synthetic construct
  source 1..23: mol_type = other RNA
atacagttgacccttgaacaaca

SEQ ID NO: 4026 - RNA, 23 nt, synthetic construct
  source 1..23: mol_type = other RNA
aagctatatcctattacagttga

SEQ ID NO: 4027 - RNA, 23 nt, synthetic construct
  source 1..23: mol_type = other RNA
atgatagaggaagaaaaatagct

SEQ ID NO: 4028 - RNA, 23 nt, synthetic construct
  source 1..23: mol_type = other RNA
acttaccatttggttgatagagg

SEQ ID NO: 4029 - RNA, 23 nt, synthetic construct
  source 1..23: mol_type = other RNA
agagtggactgcaaaatagatgc

SEQ ID NO: 4030 - RNA, 23 nt, synthetic construct
  source 1..23: mol_type = other RNA
aatctataatttagctcagtaga

SEQ ID NO: 4031 - RNA, 23 nt, synthetic construct
  source 1..23: mol_type = other RNA
aattataaatagcatagctggat

SEQ ID NO: 4032 - RNA, 23 nt, synthetic construct
  source 1..23: mol_type = other RNA
agtcagaggagaaattgaaaatt

SEQ ID NO: 4033 - RNA, 23 nt, synthetic construct
  source 1..23: mol_type = other RNA
agaagatgttctgaaatggtcag

SEQ ID NO: 4034 - RNA, 23 nt, synthetic construct
  source 1..23: mol_type = other RNA
agttttatgagttattggaagat

SEQ ID NO: 4035 - RNA, 23 nt, synthetic construct
  source 1..23: mol_type = other RNA
aactcaattttacttcagttgtt

SEQ ID NO: 4036 - RNA, 23 nt, synthetic construct
  source 1..23: mol_type = other RNA
agtttggtgaatatattttccag

SEQ ID NO: 4037 - RNA, 23 nt, synthetic construct
  source 1..23: mol_type = other RNA
aaacttaaattaccaaagtttgg

SEQ ID NO: 4038 - RNA, 23 nt, synthetic construct
  source 1..23: mol_type = other RNA
agtataggtgtaaactattttag

SEQ ID NO: 4039 - RNA, 23 nt, synthetic construct
  source 1..23: mol_type = other RNA
agttggattatgcagtataggtg

SEQ ID NO: 4040 - RNA, 23 nt, synthetic construct
  source 1..23: mol_type = other RNA
acaactgaaattaaaattgttgg

SEQ ID NO: 4041 - RNA, 23 nt, synthetic construct
  source 1..23: mol_type = other RNA
agttatattagtaacatgtcttc

SEQ ID NO: 4042 - RNA, 23 nt, synthetic construct
  source 1..23: mol_type = other RNA
attacacatcctctactctttta

SEQ ID NO: 4043 - RNA, 23 nt, synthetic construct
  source 1..23: mol_type = other RNA
agaagatatggttaattacacat

SEQ ID NO: 4044 - RNA, 23 nt, synthetic construct
  source 1..23: mol_type = other RNA
attagtaaccatgttttagaaga

SEQ ID NO: 4045 - RNA, 23 nt, synthetic construct
  source 1..23: mol_type = other RNA
agttacatattcttttagtaacc

SEQ ID NO: 4046 - RNA, 23 nt, synthetic construct
  source 1..23: mol_type = other RNA
aggtcaatattgatgttacatat

SEQ ID NO: 4047 - RNA, 23 nt, synthetic construct
  source 1..23: mol_type = other RNA
atgtaagaaaccaaggtcaatat

SEQ ID NO: 4048 - RNA, 23 nt, synthetic construct
  source 1..23: mol_type = other RNA
attagcaacacttgtgtaagaaa

SEQ ID NO: 4049 - RNA, 23 nt, synthetic construct
  source 1..23: mol_type = other RNA
agtctccttcactattgagttag

SEQ ID NO: 4050 - RNA, 23 nt, synthetic construct
  source 1..23: mol_type = other RNA
agaaaatttaatagtgtctcctt

SEQ ID NO: 4051 - RNA, 23 nt, synthetic construct
  source 1..23: mol_type = other RNA
actagtatctctcatgggttcag

SEQ ID NO: 4052 - RNA, 23 nt, synthetic construct
  source 1..23: mol_type = other RNA
atgaaccaaacactttccactcc

SEQ ID NO: 4053 - RNA, 23 nt, synthetic construct
  source 1..23: mol_type = other RNA
atgttcttcagatatccctgaac

SEQ ID NO: 4054 - RNA, 23 nt, synthetic construct
  source 1..23: mol_type = other RNA
agtcacttaagaaatctctgccc

SEQ ID NO: 4055 - RNA, 23 nt, synthetic construct
  source 1..23: mol_type = other RNA
attgtagatgaggcgtcacttaa

SEQ ID NO: 4056 - RNA, 23 nt, synthetic construct
  source 1..23: mol_type = other RNA
attaggaatttccagcttgtaga

SEQ ID NO: 4057 - RNA, 23 nt, synthetic construct
  source 1..23: mol_type = other RNA
attgtttataagctttctacttg

SEQ ID NO: 4058 - RNA, 23 nt, synthetic construct
  source 1..23: mol_type = other RNA
agagtgtatcacctgttgtttat

SEQ ID NO: 4059 - RNA, 23 nt, synthetic construct
  source 1..23: mol_type = other RNA
agtaatttactaaaaccagtgag

SEQ ID NO: 4060 - RNA, 23 nt, synthetic construct
  source 1..23: mol_type = other RNA
aaagactagggatactttctgta

SEQ ID NO: 4061 - RNA, 23 nt, synthetic construct
  source 1..23: mol_type = other RNA
aaatcagttcaaattttccactt

SEQ ID NO: 4062 - RNA, 23 nt, synthetic construct
  source 1..23: mol_type = other RNA
aaaaggaatatgactaatcagtt

SEQ ID NO: 4063 - RNA, 23 nt, synthetic construct
  source 1..23: mol_type = other RNA
agtaacaaacagtgtaatcaaag

SEQ ID NO: 4064 - RNA, 23 nt, synthetic construct
  source 1..23: mol_type = other RNA
agttatttctgtttactgagaaa

SEQ ID NO: 4065 - RNA, 23 nt, synthetic construct
  source 1..23: mol_type = other RNA
atttctatcaaagaatgaagaac

SEQ ID NO: 4066 - RNA, 23 nt, synthetic construct
  source 1..23: mol_type = other RNA
aatcctcacagaataagatttta

SEQ ID NO: 4067 - RNA, 23 nt, synthetic construct
  source 1..23: mol_type = other RNA
aatagtattctgtaatcctcaca

SEQ ID NO: 4068 - RNA, 23 nt, synthetic construct
  source 1..23: mol_type = other RNA
actttacactttatgatgaagaa

SEQ ID NO: 4069 - RNA, 23 nt, synthetic construct
  source 1..23: mol_type = other RNA
aagtagaacatatttgagcattt

SEQ ID NO: 4070 - RNA, 23 nt, synthetic construct
  source 1..23: mol_type = other RNA
aagaacttattctatagtagaac

SEQ ID NO: 4071 - RNA, 23 nt, synthetic construct
  source 1..23: mol_type = other RNA
acctgtaaattaagataagaact

SEQ ID NO: 4072 - RNA, 23 nt, synthetic construct
  source 1..23: mol_type = other RNA
aaatataaaaggcaacattaagc

SEQ ID NO: 4073 - RNA, 23 nt, synthetic construct
  source 1..23: mol_type = other RNA
ataatatagtgattctgatttgc

SEQ ID NO: 4074 - RNA, 21 nt, synthetic construct
  source 1..21: mol_type = other RNA
  modified_base 1: mod_base = OTHER; note = 2'-O-methylguanosine-3'-phosphorothioate
  modified_base 2: mod_base = OTHER; note = 2'-O-methylguanosine-3'-phosphorothioate
  modified_base 3: mod_base = OTHER; note = 2'-O-methyluridine-3'-phosphate
  modified_base 4: mod_base = OTHER; note = 2'-O-methylguanosine-3'-phosphate
  modified_base 5: mod_base = OTHER; note = 2'-O-methyladenosine-3'-phosphate
  modified_base 6: mod_base = OTHER; note = 2'-O-methylcytidine-3'-phosphate
  modified_base 7: mod_base = OTHER; note = 2'-deoxy-2'-fluoroadenosine-3'-phosphate
  modified_base 8: mod_base = OTHER; note = 2'-O-methylguanosine-3'-phosphate
  modified_base 9: mod_base = OTHER; note = 2'-deoxy-2'-fluoroadenosine-3'-phosphate
  modified_base 10: mod_base = OTHER; note = 2'-deoxy-2'-fluoroguanosine-3'-phosphate
  modified_base 11: mod_base = OTHER; note = 2'-deoxy-2'-fluorouridine-3'-phosphate
  modified_base 12: mod_base = OTHER; note = 2'-O-methylcytidine-3'-phosphate
  modified_base 13: mod_base = OTHER; note = 2'-O-methyladenosine-3'-phosphate
  modified_base 14: mod_base = OTHER; note = 2'-O-methylguanosine-3'-phosphate
  modified_base 15: mod_base = OTHER; note = 2'-O-methyladenosine-3'-phosphate
  modified_base 16: mod_base = OTHER; note = 2'-O-methyladenosine-3'-phosphate
  modified_base 17: mod_base = OTHER; note = 2'-O-methyladenosine-3'-phosphate
  modified_base 18: mod_base = OTHER; note = 2'-O-methyladenosine-3'-phosphate
  modified_base 19: mod_base = OTHER; note = 2'-O-methylcytidine-3'-phosphate
  modified_base 20: mod_base = OTHER; note = 2'-O-methyluridine-3'-phosphate
  modified_base 21: mod_base = OTHER; note = 2'-O-methyluridine-3'-phosphate ((2S,4R)-1-[29-[[2-(acetylamino)-2-deoxy-beta-D-galactopyra nosyl]oxy]-14,14-bis[[3-[[3-[[5-[[2-(acetylamino)-2-deoxy-b eta-D-galactopyranosyl]oxy]-1-oxopentyl]amino]propyl]amino] -3-oxopropoxy]methyl]-1,12,19,25-tetraoxo-16-oxa-13,20,24-t riazanonacos-1-yl]-4-hydroxy-2-pyrrolidinyl)methyl ester
ggtgacagagtcagaaaactt

SEQ ID NO: 4075 - RNA, 21 nt, synthetic construct
  source 1..21: mol_type = other RNA
  modified_base 1: mod_base = OTHER; note = 2'-O-methyladenosine-3'-phosphorothioate
  modified_base 2: mod_base = OTHER; note = 2'-O-methyladenosine-3'-phosphorothioate
  modified_base 3: mod_base = OTHER; note = 2'-O-methyladenosine-3'-phosphate
  modified_base 4: mod_base = OTHER; note = 2'-O-methylcytidine-3'-phosphate
  modified_base 5: mod_base = OTHER; note = 2'-O-methyladenosine-3'-phosphate
  modified_base 6: mod_base = OTHER; note = 2'-O-methylcytidine-3'-phosphate
  modified_base 7: mod_base = OTHER; note = 2'-deoxy-2'-fluorocytidine-3'-phosphate
  modified_base 8: mod_base = OTHER; note = 2'-O-methylcytidine-3'-phosphate
  modified_base 9: mod_base = OTHER; note = 2'-deoxy-2'-fluoroguanosine-3'-phosphate
  modified_base 10: mod_base = OTHER; note = 2'-deoxy-2'-fluorouridine-3'-phosphate
  modified_base 11: mod_base = OTHER; note = 2'-deoxy-2'-fluoroadenosine-3'-phosphate
  modified_base 12: mod_base = OTHER; note = 2'-O-methyladenosine-3'-phosphate
  modified_base 13: mod_base = OTHER; note = 2'-O-methylguanosine-3'-phosphate
  modified_base 14: mod_base = OTHER; note = 2'-O-methyladenosine-3'-phosphate
  modified_base 15: mod_base = OTHER; note = 2'-O-methylcytidine-3'-phosphate
  modified_base 16: mod_base = OTHER; note = 2'-O-methyluridine-3'-phosphate
  modified_base 17: mod_base = OTHER; note = 2'-O-methyluridine-3'-phosphate
  modified_base 18: mod_base = OTHER; note = 2'-O-methylcytidine-3'-phosphate
  modified_base 19: mod_base = OTHER; note = 2'-O-methyladenosine-3'-phosphate
  modified_base 20: mod_base = OTHER; note = 2'-O-methyluridine-3'-phosphate
  modified_base 21: mod_base = OTHER; note = 2'-O-methyluridine-3'-phosphate ((2S,4R)-1-[29-[[2-(acetylamino)-2-deoxy-beta-D-galactopyra nosyl]oxy]-14,14-bis[[3-[[3-[[5-[[2-(acetylamino)-2-deoxy-b eta-D-galactopyranosyl]oxy]-1-oxopentyl]amino]propyl]amino] -3-oxopropoxy]methyl]-1,12,19,25-tetraoxo-16-oxa-13,20,24-t riazanonacos-1-yl]-4-hydroxy-2-pyrrolidinyl)methyl ester
aaacacccgtaagacttcatt

SEQ ID NO: 4076 - RNA, 21 nt, synthetic construct
  source 1..21: mol_type = other RNA
  modified_base 1: mod_base = OTHER; note = 2'-O-methyluridine-3'-phosphorothioate
  modified_base 2: mod_base = OTHER; note = 2'-O-methyluridine-3'-phosphorothioate
  modified_base 3: mod_base = OTHER; note = 2'-O-methylcytidine-3'-phosphate
  modified_base 4: mod_base = OTHER; note = 2'-O-methyladenosine-3'-phosphate
  modified_base 5: mod_base = OTHER; note = 2'-O-methyluridine-3'-phosphate
  modified_base 6: mod_base = OTHER; note = 2'-O-methyladenosine-3'-phosphate
  modified_base 7: mod_base = OTHER; note = 2'-deoxy-2'-fluorocytidine-3'-phosphate
  modified_base 8: mod_base = OTHER; note = 2'-O-methyladenosine-3'-phosphate
  modified_base 9: mod_base = OTHER; note = 2'-deoxy-2'-fluoroadenosine-3'-phosphate
  modified_base 10: mod_base = OTHER; note = 2'-deoxy-2'-fluorocytidine-3'-phosphate
  modified_base 11: mod_base = OTHER; note = 2'-deoxy-2'-fluoroadenosine-3'-phosphate
  modified_base 12: mod_base = OTHER; note = 2'-O-methylcytidine-3'-phosphate
  modified_base 13: mod_base = OTHER; note = 2'-O-methyladenosine-3'-phosphate
  modified_base 14: mod_base = OTHER; note = 2'-O-methyladenosine-3'-phosphate
  modified_base 15: mod_base = OTHER; note = 2'-O-methyluridine-3'-phosphate
  modified_base 16: mod_base = OTHER; note = 2'-O-methyladenosine-3'-phosphate
  modified_base 17: mod_base = OTHER; note = 2'-O-methylcytidine-3'-phosphate
  modified_base 18: mod_base = OTHER; note = 2'-O-methyluridine-3'-phosphate
  modified_base 19: mod_base = OTHER; note = 2'-O-methylcytidine-3'-phosphate
  modified_base 20: mod_base = OTHER; note = 2'-O-methyluridine-3'-phosphate
  modified_base 21: mod_base = OTHER; note = 2'-O-methyluridine-3'-phosphate ((2S,4R)-1-[29-[[2-(acetylamino)-2-deoxy-beta-D-galactopyra nosyl]oxy]-14,14-bis[[3-[[3-[[5-[[2-(acetylamino)-2-deoxy-b eta-D-galactopyranosyl]oxy]-1-oxopentyl]amino]propyl]amino] -3-oxopropoxy]methyl]-1,12,19,25-tetraoxo-16-oxa-13,20,24-t riazanonacos-1-yl]-4-hydroxy-2-pyrrolidinyl)methyl ester
ttcatacaacacaatactctt

SEQ ID NO: 4077 - RNA, 21 nt, synthetic construct
  source 1..21: mol_type = other RNA
  modified_base 1: mod_base = OTHER; note = 2'-O-methylcytidine-3'-phosphorothioate
  modified_base 2: mod_base = OTHER; note = 2'-O-methyluridine-3'-phosphorothioate
  modified_base 3: mod_base = OTHER; note = 2'-O-methyladenosine-3'-phosphate
  modified_base 4: mod_base = OTHER; note = 2'-O-methyluridine-3'-phosphate
  modified_base 5: mod_base = OTHER; note = 2'-O-methyladenosine-3'-phosphate
  modified_base 6: mod_base = OTHER; note = 2'-O-methylcytidine-3'-phosphate
  modified_base 7: mod_base = OTHER; note = 2'-deoxy-2'-fluorouridine-3'-phosphate
  modified_base 8: mod_base = OTHER; note = 2'-O-methylguanosine-3'-phosphate
  modified_base 9: mod_base = OTHER; note = 2'-deoxy-2'-fluorouridine-3'-phosphate
  modified_base 10: mod_base = OTHER; note = 2'-deoxy-2'-fluoroguanosine-3'-phosphate
  modified_base 11: mod_base = OTHER; note = 2'-deoxy-2'-fluoroadenosine-3'-phosphate
  modified_base 12: mod_base = OTHER; note = 2'-O-methyluridine-3'-phosphate
  modified_base 13: mod_base = OTHER; note = 2'-O-methylguanosine-3'-phosphate
  modified_base 14: mod_base = OTHER; note = 2'-O-methyladenosine-3'-phosphate
  modified_base 15: mod_base = OTHER; note = 2'-O-methyluridine-3'-phosphate
  modified_base 16: mod_base = OTHER; note = 2'-O-methylcytidine-3'-phosphate
  modified_base 17: mod_base = OTHER; note = 2'-O-methyladenosine-3'-phosphate
  modified_base 18: mod_base = OTHER; note = 2'-O-methylcytidine-3'-phosphate
  modified_base 19: mod_base = OTHER; note = 2'-O-methyladenosine-3'-phosphate
  modified_base 20: mod_base = OTHER; note = 2'-O-methylguanosine-3'-phosphate
  modified_base 21: mod_base = OTHER; note = 2'-O-methyluridine-3'-phosphate ((2S,4R)-1-[29-[[2-(acetylamino)-2-deoxy-beta-D-galactopyra nosyl]oxy]-14,14-bis[[3-[[3-[[5-[[2-(acetylamino)-2-deoxy-b eta-D-galactopyranosyl]oxy]-1-oxopentyl]amino]propyl]amino] -3-oxopropoxy]methyl]-1,12,19,25-tetraoxo-16-oxa-13,20,24-t riazanonacos-1-yl]-4-hydroxy-2-pyrrolidinyl)methyl ester
ctatactgtgatgatcacagt

SEQ ID NO: 4078 - RNA, 21 nt, synthetic construct
  source 1..21: mol_type = other RNA
  modified_base 1: mod_base = OTHER; note = 2'-O-methylcytidine-3'-phosphorothioate
  modified_base 2: mod_base = OTHER; note = 2'-O-methyluridine-3'-phosphorothioate
  modified_base 3: mod_base = OTHER; note = 2'-O-methyladenosine-3'-phosphate
  modified_base 4: mod_base = OTHER; note = 2'-O-methylcytidine-3'-phosphate
  modified_base 5: mod_base = OTHER; note = 2'-O-methylcytidine-3'-phosphate
  modified_base 6: mod_base = OTHER; note = 2'-O-methyluridine-3'-phosphate
  modified_base 7: mod_base = OTHER; note = 2'-deoxy-2'-fluoroadenosine-3'-phosphate
  modified_base 8: mod_base = OTHER; note = 2'-O-methyladenosine-3'-phosphate
  modified_base 9: mod_base = OTHER; note = 2'-deoxy-2'-fluoroadenosine-3'-phosphate
  modified_base 10: mod_base = OTHER; note = 2'-deoxy-2'-fluoroadenosine-3'-phosphate
  modified_base 11: mod_base = OTHER; note = 2'-deoxy-2'-fluoroguanosine-3'-phosphate
  modified_base 12: mod_base = OTHER; note = 2'-O-methyladenosine-3'-phosphate
  modified_base 13: mod_base = OTHER; note = 2'-O-methyladenosine-3'-phosphate
  modified_base 14: mod_base = OTHER; note = 2'-O-methylguanosine-3'-phosphate
  modified_base 15: mod_base = OTHER; note = 2'-O-methyladenosine-3'-phosphate
  modified_base 16: mod_base = OTHER; note = 2'-O-methylcytidine-3'-phosphate
  modified_base 17: mod_base = OTHER; note = 2'-O-methyladenosine-3'-phosphate
  modified_base 18: mod_base = OTHER; note = 2'-O-methylguanosine-3'-phosphate
  modified_base 19: mod_base = OTHER; note = 2'-O-methyluridine-3'-phosphate
  modified_base 20: mod_base = OTHER; note = 2'-O-methyluridine-3'-phosphate
  modified_base 21: mod_base = OTHER; note = 2'-O-methyluridine-3'-phosphate ((2S,4R)-1-[29-[[2-(acetylamino)-2-deoxy-beta-D-galactopyra nosyl]oxy]-14,14-bis[[3-[[3-[[5-[[2-(acetylamino)-2-deoxy-b eta-D-galactopyranosyl]oxy]-1-oxopentyl]amino]propyl]amino] -3-oxopropoxy]methyl]-1,12,19,25-tetraoxo-16-oxa-13,20,24-t riazanonacos-1-yl]-4-hydroxy-2-pyrrolidinyl)methyl ester
ctacctaaaagaagacagttt

SEQ ID NO: 4079 - RNA, 21 nt, synthetic construct
  source 1..21: mol_type = other RNA
  modified_base 1: mod_base = OTHER; note = 2'-O-methyladenosine-3'-phosphorothioate
  modified_base 2: mod_base = OTHER; note = 2'-O-methylcytidine-3'-phosphorothioate
  modified_base 3: mod_base = OTHER; note = 2'-O-methyladenosine-3'-phosphate
  modified_base 4: mod_base = OTHER; note = 2'-O-methylguanosine-3'-phosphate
  modified_base 5: mod_base = OTHER; note = 2'-O-methyluridine-3'-phosphate
  modified_base 6: mod_base = OTHER; note = 2'-O-methyluridine-3'-phosphate
  modified_base 7: mod_base = OTHER; note = 2'-deoxy-2'-fluoroadenosine-3'-phosphate
  modified_base 8: mod_base = OTHER; note = 2'-O-methyluridine-3'-phosphate
  modified_base 9: mod_base = OTHER; note = 2'-deoxy-2'-fluorocytidine-3'-phosphate
  modified_base 10: mod_base = OTHER; note = 2'-deoxy-2'-fluorouridine-3'-phosphate
  modified_base 11: mod_base = OTHER; note = 2'-deoxy-2'-fluorocytidine-3'-phosphate
  modified_base 12: mod_base = OTHER; note = 2'-O-methyladenosine-3'-phosphate
  modified_base 13: mod_base = OTHER; note = 2'-O-methyluridine-3'-phosphate
  modified_base 14: mod_base = OTHER; note = 2'-O-methyladenosine-3'-phosphate
  modified_base 15: mod_base = OTHER; note = 2'-O-methyluridine-3'-phosphate
  modified_base 16: mod_base = OTHER; note = 2'-O-methyluridine-3'-phosphate
  modified_base 17: mod_base = OTHER; note = 2'-O-methyluridine-3'-phosphate
  modified_base 18: mod_base = OTHER; note = 2'-O-methylguanosine-3'-phosphate
  modified_base 19: mod_base = OTHER; note = 2'-O-methylguanosine-3'-phosphate
  modified_base 20: mod_base = OTHER; note = 2'-O-methylcytidine-3'-phosphate
  modified_base 21: mod_base = OTHER; note = 2'-O-methyluridine-3'-phosphate ((2S,4R)-1-[29-[[2-(acetylamino)-2-deoxy-beta-D-galactopyra nosyl]oxy]-14,14-bis[[3-[[3-[[5-[[2-(acetylamino)-2-deoxy-b eta-D-galactopyranosyl]oxy]-1-oxopentyl]amino]propyl]amino] -3-oxopropoxy]methyl]-1,12,19,25-tetraoxo-16-oxa-13,20,24-t riazanonacos-1-yl]-4-hydroxy-2-pyrrolidinyl)methyl ester
acagttatctcatatttggct

SEQ ID NO: 4080 - RNA, 21 nt, synthetic construct
  source 1..21: mol_type = other RNA
  modified_base 1: mod_base = OTHER; note = 2'-O-methyluridine-3'-phosphorothioate
  modified_base 2: mod_base = OTHER; note = 2'-O-methylguanosine-3'-phosphorothioate
  modified_base 3: mod_base = OTHER; note = 2'-O-methylcytidine-3'-phosphate
  modified_base 4: mod_base = OTHER; note = 2'-O-methylcytidine-3'-phosphate
  modified_base 5: mod_base = OTHER; note = 2'-O-methyladenosine-3'-phosphate
  modified_base 6: mod_base = OTHER; note = 2'-O-methylguanosine-3'-phosphate
  modified_base 7: mod_base = OTHER; note = 2'-deoxy-2'-fluorocytidine-3'-phosphate
  modified_base 8: mod_base = OTHER; note = 2'-O-methyluridine-3'-phosphate
  modified_base 9: mod_base = OTHER; note = 2'-deoxy-2'-fluorouridine-3'-phosphate
  modified_base 10: mod_base = OTHER; note = 2'-deoxy-2'-fluorouridine-3'-phosphate
  modified_base 11: mod_base = OTHER; note = 2'-deoxy-2'-fluorouridine-3'-phosphate
  modified_base 12: mod_base = OTHER; note = 2'-O-methyluridine-3'-phosphate
  modified_base 13: mod_base = OTHER; note = 2'-O-methyladenosine-3'-phosphate
  modified_base 14: mod_base = OTHER; note = 2'-O-methyluridine-3'-phosphate
  modified_base 15: mod_base = OTHER; note = 2'-O-methylcytidine-3'-phosphate
  modified_base 16: mod_base = OTHER; note = 2'-O-methyluridine-3'-phosphate
  modified_base 17: mod_base = OTHER; note = 2'-O-methyluridine-3'-phosphate
  modified_base 18: mod_base = OTHER; note = 2'-O-methyluridine-3'-phosphate
  modified_base 19: mod_base = OTHER; note = 2'-O-methylcytidine-3'-phosphate
  modified_base 20: mod_base = OTHER; note = 2'-O-methyluridine-3'-phosphate
  modified_base 21: mod_base = OTHER; note = 2'-O-methyluridine-3'-phosphate ((2S,4R)-1-[29-[[2-(acetylamino)-2-deoxy-beta-D-galactopyra nosyl]oxy]-14,14-bis[[3-[[3-[[5-[[2-(acetylamino)-2-deoxy-b eta-D-galactopyranosyl]oxy]-1-oxopentyl]amino]propyl]amino] -3-oxopropoxy]methyl]-1,12,19,25-tetraoxo-16-oxa-13,20,24-t riazanonacos-1-yl]-4-hydroxy-2-pyrrolidinyl)methyl ester
tgccagctttttatctttctt

SEQ ID NO: 4081 - RNA, 21 nt, synthetic construct
  source 1..21: mol_type = other RNA
  modified_base 1: mod_base = OTHER; note = 2'-O-methyluridine-3'-phosphorothioate
  modified_base 2: mod_base = OTHER; note = 2'-O-methylcytidine-3'-phosphorothioate
  modified_base 3: mod_base = OTHER; note = 2'-O-methyluridine-3'-phosphate
  modified_base 4: mod_base = OTHER; note = 2'-O-methyluridine-3'-phosphate
  modified_base 5: mod_base = OTHER; note = 2'-O-methyluridine-3'-phosphate
  modified_base 6: mod_base = OTHER; note = 2'-O-methylcytidine-3'-phosphate
  modified_base 7: mod_base = OTHER; note = 2'-deoxy-2'-fluorouridine-3'-phosphate
  modified_base 8: mod_base = OTHER; note = 2'-O-methylcytidine-3'-phosphate
  modified_base 9: mod_base = OTHER; note = 2'-deoxy-2'-fluorouridine-3'-phosphate
  modified_base 10: mod_base = OTHER; note = 2'-deoxy-2'-fluorocytidine-3'-phosphate
  modified_base 11: mod_base = OTHER; note = 2'-deoxy-2'-fluoroguanosine-3'-phosphate
  modified_base 12: mod_base = OTHER; note = 2'-O-methyladenosine-3'-phosphate
  modified_base 13: mod_base = OTHER; note = 2'-O-methylcytidine-3'-phosphate
  modified_base 14: mod_base = OTHER; note = 2'-O-methylcytidine-3'-phosphate
  modified_base 15: mod_base = OTHER; note = 2'-O-methyladenosine-3'-phosphate
  modified_base 16: mod_base = OTHER; note = 2'-O-methylcytidine-3'-phosphate
  modified_base 17: mod_base = OTHER; note = 2'-O-methyluridine-3'-phosphate
  modified_base 18: mod_base = OTHER; note = 2'-O-methyluridine-3'-phosphate
  modified_base 19: mod_base = OTHER; note = 2'-O-methyladenosine-3'-phosphate
  modified_base 20: mod_base = OTHER; note = 2'-O-methyladenosine-3'-phosphate
  modified_base 21: mod_base = OTHER; note = 2'-O-methyluridine-3'-phosphate ((2S,4R)-1-[29-[[2-(acetylamino)-2-deoxy-beta-D-galactopyra nosyl]oxy]-14,14-bis[[3-[[3-[[5-[[2-(acetylamino)-2-deoxy-b eta-D-galactopyranosyl]oxy]-1-oxopentyl]amino]propyl]amino] -3-oxopropoxy]methyl]-1,12,19,25-tetraoxo-16-oxa-13,20,24-t riazanonacos-1-yl]-4-hydroxy-2-pyrrolidinyl)methyl ester
tctttctctcgaccacttaat

SEQ ID NO: 4082 - RNA, 21 nt, synthetic construct
  source 1..21: mol_type = other RNA
  modified_base 1: mod_base = OTHER; note = 2'-O-methylcytidine-3'-phosphorothioate
  modified_base 2: mod_base = OTHER; note = 2'-O-methyladenosine-3'-phosphorothioate
  modified_base 3: mod_base = OTHER; note = 2'-O-methylcytidine-3'-phosphate
  modified_base 4: mod_base = OTHER; note = 2'-O-methyluridine-3'-phosphate
  modified_base 5: mod_base = OTHER; note = 2'-O-methyluridine-3'-phosphate
  modified_base 6: mod_base = OTHER; note = 2'-O-methyladenosine-3'-phosphate
  modified_base 7: mod_base = OTHER; note = 2'-deoxy-2'-fluoroadenosine-3'-phosphate
  modified_base 8: mod_base = OTHER; note = 2'-O-methyladenosine-3'-phosphate
  modified_base 9: mod_base = OTHER; note = 2'-deoxy-2'-fluoroadenosine-3'-phosphate
  modified_base 10: mod_base = OTHER; note = 2'-deoxy-2'-fluorocytidine-3'-phosphate
  modified_base 11: mod_base = OTHER; note = 2'-deoxy-2'-fluorouridine-3'-phosphate
  modified_base 12: mod_base = OTHER; note = 2'-O-methyluridine-3'-phosphate
  modified_base 13: mod_base = OTHER; note = 2'-O-methylcytidine-3'-phosphate
  modified_base 14: mod_base = OTHER; note = 2'-O-methyladenosine-3'-phosphate
  modified_base 15: mod_base = OTHER; note = 2'-O-methylguanosine-3'-phosphate
  modified_base 16: mod_base = OTHER; note = 2'-O-methyladenosine-3'-phosphate
  modified_base 17: mod_base = OTHER; note = 2'-O-methylcytidine-3'-phosphate
  modified_base 18: mod_base = OTHER; note = 2'-O-methyluridine-3'-phosphate
  modified_base 19: mod_base = OTHER; note = 2'-O-methyluridine-3'-phosphate
  modified_base 20: mod_base = OTHER; note = 2'-O-methylcytidine-3'-phosphate
  modified_base 21: mod_base = OTHER; note = 2'-O-methyluridine-3'-phosphate ((2S,4R)-1-[29-[[2-(acetylamino)-2-deoxy-beta-D-galactopyra nosyl]oxy]-14,14-bis[[3-[[3-[[5-[[2-(acetylamino)-2-deoxy-b eta-D-galactopyranosyl]oxy]-1-oxopentyl]amino]propyl]amino] -3-oxopropoxy]methyl]-1,12,19,25-tetraoxo-16-oxa-13,20,24-t riazanonacos-1-yl]-4-hydroxy-2-pyrrolidinyl)methyl ester
cacttaaaacttcagacttct

SEQ ID NO: 4083 - RNA, 21 nt, synthetic construct
  source 1..21: mol_type = other RNA
  modified_base 1: mod_base = OTHER; note = 2'-O-methyladenosine-3'-phosphorothioate
  modified_base 2: mod_base = OTHER; note = 2'-O-methyluridine-3'-phosphorothioate
  modified_base 3: mod_base = OTHER; note = 2'-O-methylguanosine-3'-phosphate
  modified_base 4: mod_base = OTHER; note = 2'-O-methylguanosine-3'-phosphate
  modified_base 5: mod_base = OTHER; note = 2'-O-methyladenosine-3'-phosphate
  modified_base 6: mod_base = OTHER; note = 2'-O-methylguanosine-3'-phosphate
  modified_base 7: mod_base = OTHER; note = 2'-deoxy-2'-fluoroadenosine-3'-phosphate
  modified_base 8: mod_base = OTHER; note = 2'-O-methyladenosine-3'-phosphate
  modified_base 9: mod_base = OTHER; note = 2'-deoxy-2'-fluoroadenosine-3'-phosphate
  modified_base 10: mod_base = OTHER; note = 2'-deoxy-2'-fluoroguanosine-3'-phosphate
  modified_base 11: mod_base = OTHER; note = 2'-deoxy-2'-fluorouridine-3'-phosphate
  modified_base 12: mod_base = OTHER; note = 2'-O-methylcytidine-3'-phosphate
  modified_base 13: mod_base = OTHER; note = 2'-O-methylcytidine-3'-phosphate
  modified_base 14: mod_base = OTHER; note = 2'-O-methyladenosine-3'-phosphate
  modified_base 15: mod_base = OTHER; note = 2'-O-methyladenosine-3'-phosphate
  modified_base 16: mod_base = OTHER; note = 2'-O-methyluridine-3'-phosphate
  modified_base 17: mod_base = OTHER; note = 2'-O-methyladenosine-3'-phosphate
  modified_base 18: mod_base = OTHER; note = 2'-O-methylcytidine-3'-phosphate
  modified_base 19: mod_base = OTHER; note = 2'-O-methylcytidine-3'-phosphate
  modified_base 20: mod_base = OTHER; note = 2'-O-methyluridine-3'-phosphate
  modified_base 21: mod_base = OTHER; note = 2'-O-methyluridine-3'-phosphate ((2S,4R)-1-[29-[[2-(acetylamino)-2-deoxy-beta-D-galactopyra nosyl]oxy]-14,14-bis[[3-[[3-[[5-[[2-(acetylamino)-2-deoxy-b eta-D-galactopyranosyl]oxy]-1-oxopentyl]amino]propyl]amino] -3-oxopropoxy]methyl]-1,12,19,25-tetraoxo-16-oxa-13,20,24-t riazanonacos-1-yl]-4-hydroxy-2-pyrrolidinyl)methyl ester
atggagaaagtccaatacctt

SEQ ID NO: 4084 - RNA, 21 nt, synthetic construct
  source 1..21: mol_type = other RNA
  modified_base 1: mod_base = OTHER; note = 2'-O-methylcytidine-3'-phosphorothioate
  modified_base 2: mod_base = OTHER; note = 2'-O-methyluridine-3'-phosphorothioate
  modified_base 3: mod_base = OTHER; note = 2'-O-methylcytidine-3'-phosphate
  modified_base 4: mod_base = OTHER; note = 2'-O-methylguanosine-3'-phosphate
  modified_base 5: mod_base = OTHER; note = 2'-O-methylcytidine-3'-phosphate
  modified_base 6: mod_base = OTHER; note = 2'-O-methyluridine-3'-phosphate
  modified_base 7: mod_base = OTHER; note = 2'-deoxy-2'-fluorocytidine-3'-phosphate
  modified_base 8: mod_base = OTHER; note = 2'-O-methyladenosine-3'-phosphate
  modified_base 9: mod_base = OTHER; note = 2'-deoxy-2'-fluoroguanosine-3'-phosphate
  modified_base 10: mod_base = OTHER; note = 2'-deoxy-2'-fluorocytidine-3'-phosphate
  modified_base 11: mod_base = OTHER; note = 2'-deoxy-2'-fluorouridine-3'-phosphate
  modified_base 12: mod_base = OTHER; note = 2'-O-methyladenosine-3'-phosphate
  modified_base 13: mod_base = OTHER; note = 2'-O-methyluridine-3'-phosphate
  modified_base 14: mod_base = OTHER; note = 2'-O-methyladenosine-3'-phosphate
  modified_base 15: mod_base = OTHER; note = 2'-O-methyladenosine-3'-phosphate
  modified_base 16: mod_base = OTHER; note = 2'-O-methylguanosine-3'-phosphate
  modified_base 17: mod_base = OTHER; note = 2'-O-methyladenosine-3'-phosphate
  modified_base 18: mod_base = OTHER; note = 2'-O-methyladenosine-3'-phosphate
  modified_base 19: mod_base = OTHER; note = 2'-O-methylguanosine-3'-phosphate
  modified_base 20: mod_base = OTHER; note = 2'-O-methyladenosine-3'-phosphate
  modified_base 21: mod_base = OTHER; note = 2'-O-methyluridine-3'-phosphate ((2S,4R)-1-[29-[[2-(acetylamino)-2-deoxy-beta-D-galactopyra nosyl]oxy]-14,14-bis[[3-[[3-[[5-[[2-(acetylamino)-2-deoxy-b eta-D-galactopyranosyl]oxy]-1-oxopentyl]amino]propyl]amino] -3-oxopropoxy]methyl]-1,12,19,25-tetraoxo-16-oxa-13,20,24-t riazanonacos-1-yl]-4-hydroxy-2-pyrrolidinyl)methyl ester
ctcgctcagctataagaagat

SEQ ID NO: 4085 - RNA, 21 nt, synthetic construct
  source 1..21: mol_type = other RNA
  modified_base 1: mod_base = OTHER; note = 2'-O-methylcytidine-3'-phosphorothioate
  modified_base 2: mod_base = OTHER; note = 2'-O-methyladenosine-3'-phosphorothioate
  modified_base 3: mod_base = OTHER; note = 2'-O-methyladenosine-3'-phosphate
  modified_base 4: mod_base = OTHER; note = 2'-O-methylcytidine-3'-phosphate
  modified_base 5: mod_base = OTHER; note = 2'-O-methylcytidine-3'-phosphate
  modified_base 6: mod_base = OTHER; note = 2'-O-methyladenosine-3'-phosphate
  modified_base 7: mod_base = OTHER; note = 2'-deoxy-2'-fluorouridine-3'-phosphate
  modified_base 8: mod_base = OTHER; note = 2'-O-methyluridine-3'-phosphate
  modified_base 9: mod_base = OTHER; note = 2'-deoxy-2'-fluoroguanosine-3'-phosphate
  modified_base 10: mod_base = OTHER; note = 2'-deoxy-2'-fluoroadenosine-3'-phosphate
  modified_base 11: mod_base = OTHER; note = 2'-deoxy-2'-fluoroadenosine-3'-phosphate
  modified_base 12: mod_base = OTHER; note = 2'-O-methyladenosine-3'-phosphate
  modified_base 13: mod_base = OTHER; note = 2'-O-methyluridine-3'-phosphate
  modified_base 14: mod_base = OTHER; note = 2'-O-methylguanosine-3'-phosphate
  modified_base 15: mod_base = OTHER; note = 2'-O-methylcytidine-3'-phosphate
  modified_base 16: mod_base = OTHER; note = 2'-O-methylcytidine-3'-phosphate
  modified_base 17: mod_base = OTHER; note = 2'-O-methyluridine-3'-phosphate
  modified_base 18: mod_base = OTHER; note = 2'-O-methylcytidine-3'-phosphate
  modified_base 19: mod_base = OTHER; note = 2'-O-methyladenosine-3'-phosphate
  modified_base 20: mod_base = OTHER; note = 2'-O-methyladenosine-3'-phosphate
  modified_base 21: mod_base = OTHER; note = 2'-O-methyluridine-3'-phosphate ((2S,4R)-1-[29-[[2-(acetylamino)-2-deoxy-beta-D-galactopyra nosyl]oxy]-14,14-bis[[3-[[3-[[5-[[2-(acetylamino)-2-deoxy-b eta-D-galactopyranosyl]oxy]-1-oxopentyl]amino]propyl]amino] -3-oxopropoxy]methyl]-1,12,19,25-tetraoxo-16-oxa-13,20,24-t riazanonacos-1-yl]-4-hydroxy-2-pyrrolidinyl)methyl ester
caaccattgaaatgcctcaat

SEQ ID NO: 4086 - RNA, 21 nt, synthetic construct
  source 1..21: mol_type = other RNA
  modified_base 1: mod_base = OTHER; note = 2'-O-methylcytidine-3'-phosphorothioate
  modified_base 2: mod_base = OTHER; note = 2'-O-methyladenosine-3'-phosphorothioate
  modified_base 3: mod_base = OTHER; note = 2'-O-methyladenosine-3'-phosphate
  modified_base 4: mod_base = OTHER; note = 2'-O-methylcytidine-3'-phosphate
  modified_base 5: mod_base = OTHER; note = 2'-O-methyladenosine-3'-phosphate
  modified_base 6: mod_base = OTHER; note = 2'-O-methyladenosine-3'-phosphate
  modified_base 7: mod_base = OTHER; note = 2'-deoxy-2'-fluoroguanosine-3'-phosphate
  modified_base 8: mod_base = OTHER; note = 2'-O-methylcytidine-3'-phosphate
  modified_base 9: mod_base = OTHER; note = 2'-deoxy-2'-fluoroadenosine-3'-phosphate
  modified_base 10: mod_base = OTHER; note = 2'-deoxy-2'-fluorocytidine-3'-phosphate
  modified_base 11: mod_base = OTHER; note = 2'-deoxy-2'-fluoroguanosine-3'-phosphate
  modified_base 12: mod_base = OTHER; note = 2'-O-methyluridine-3'-phosphate
  modified_base 13: mod_base = OTHER; note = 2'-O-methylcytidine-3'-phosphate
  modified_base 14: mod_base = OTHER; note = 2'-O-methyladenosine-3'-phosphate
  modified_base 15: mod_base = OTHER; note = 2'-O-methyladenosine-3'-phosphate
  modified_base 16: mod_base = OTHER; note = 2'-O-methyladenosine-3'-phosphate
  modified_base 17: mod_base = OTHER; note = 2'-O-methyladenosine-3'-phosphate
  modified_base 18: mod_base = OTHER; note = 2'-O-methylguanosine-3'-phosphate
  modified_base 19: mod_base = OTHER; note = 2'-O-methylcytidine-3'-phosphate
  modified_base 20: mod_base = OTHER; note = 2'-O-methyluridine-3'-phosphate
  modified_base 21: mod_base = OTHER; note = 2'-O-methyluridine-3'-phosphate ((2S,4R)-1-[29-[[2-(acetylamino)-2-deoxy-beta-D-galactopyra nosyl]oxy]-14,14-bis[[3-[[3-[[5-[[2-(acetylamino)-2-deoxy-b eta-D-galactopyranosyl]oxy]-1-oxopentyl]amino]propyl]amino] -3-oxopropoxy]methyl]-1,12,19,25-tetraoxo-16-oxa-13,20,24-t riazanonacos-1-yl]-4-hydroxy-2-pyrrolidinyl)methyl ester
caacaagcacgtcaaaagctt

SEQ ID NO: 4087 - RNA, 21 nt, synthetic construct
  source 1..21: mol_type = other RNA
  modified_base 1: mod_base = OTHER; note = 2'-O-methylcytidine-3'-phosphorothioate
  modified_base 2: mod_base = OTHER; note = 2'-O-methyluridine-3'-phosphorothioate
  modified_base 3: mod_base = OTHER; note = 2'-O-methyladenosine-3'-phosphate
  modified_base 4: mod_base = OTHER; note = 2'-O-methylcytidine-3'-phosphate
  modified_base 5: mod_base = OTHER; note = 2'-O-methyladenosine-3'-phosphate
  modified_base 6: mod_base = OTHER; note = 2'-O-methylguanosine-3'-phosphate
  modified_base 7: mod_base = OTHER; note = 2'-deoxy-2'-fluoroadenosine-3'-phosphate
  modified_base 8: mod_base = OTHER; note = 2'-O-methyladenosine-3'-phosphate
  modified_base 9: mod_base = OTHER; note = 2'-deoxy-2'-fluorouridine-3'-phosphate
  modified_base 10: mod_base = OTHER; note = 2'-deoxy-2'-fluorocytidine-3'-phosphate
  modified_base 11: mod_base = OTHER; note = 2'-deoxy-2'-fluorouridine-3'-phosphate
  modified_base 12: mod_base = OTHER; note = 2'-O-methyladenosine-3'-phosphate
  modified_base 13: mod_base = OTHER; note = 2'-O-methyluridine-3'-phosphate
  modified_base 14: mod_base = OTHER; note = 2'-O-methyluridine-3'-phosphate
  modified_base 15: mod_base = OTHER; note = 2'-O-methyluridine-3'-phosphate
  modified_base 16: mod_base = OTHER; note = 2'-O-methyladenosine-3'-phosphate
  modified_base 17: mod_base = OTHER; note = 2'-O-methyluridine-3'-phosphate
  modified_base 18: mod_base = OTHER; note = 2'-O-methylcytidine-3'-phosphate
  modified_base 19: mod_base = OTHER; note = 2'-O-methyladenosine-3'-phosphate
  modified_base 20: mod_base = OTHER; note = 2'-O-methyladenosine-3'-phosphate
  modified_base 21: mod_base = OTHER; note = 2'-O-methyluridine-3'-phosphate ((2S,4R)-1-[29-[[2-(acetylamino)-2-deoxy-beta-D-galactopyra nosyl]oxy]-14,14-bis[[3-[[3-[[5-[[2-(acetylamino)-2-deoxy-b eta-D-galactopyranosyl]oxy]-1-oxopentyl]amino]propyl]amino] -3-oxopropoxy]methyl]-1,12,19,25-tetraoxo-16-oxa-13,20,24-t riazanonacos-1-yl]-4-hydroxy-2-pyrrolidinyl)methyl ester
ctacagaatctatttatcaat

SEQ ID NO: 4088 - RNA, 21 nt, synthetic construct
  source 1..21: mol_type = other RNA
  modified_base 1: mod_base = OTHER; note = 2'-O-methyluridine-3'-phosphorothioate
  modified_base 2: mod_base = OTHER; note = 2'-O-methyladenosine-3'-phosphorothioate
  modified_base 3: mod_base = OTHER; note = 2'-O-methyluridine-3'-phosphate
  modified_base 4: mod_base = OTHER; note = 2'-O-methylcytidine-3'-phosphate
  modified_base 5: mod_base = OTHER; note = 2'-O-methyladenosine-3'-phosphate
  modified_base 6: mod_base = OTHER; note = 2'-O-methyladenosine-3'-phosphate
  modified_base 7: mod_base = OTHER; note = 2'-deoxy-2'-fluorouridine-3'-phosphate
  modified_base 8: mod_base = OTHER; note = 2'-O-methyluridine-3'-phosphate
  modified_base 9: mod_base = OTHER; note = 2'-deoxy-2'-fluorouridine-3'-phosphate
  modified_base 10: mod_base = OTHER; note = 2'-deoxy-2'-fluorocytidine-3'-phosphate
  modified_base 11: mod_base = OTHER; note = 2'-deoxy-2'-fluorouridine-3'-phosphate
  modified_base 12: mod_base = OTHER; note = 2'-O-methylguanosine-3'-phosphate
  modified_base 13: mod_base = OTHER; note = 2'-O-methyluridine-3'-phosphate
  modified_base 14: mod_base = OTHER; note = 2'-O-methylcytidine-3'-phosphate
  modified_base 15: mod_base = OTHER; note = 2'-O-methyluridine-3'-phosphate
  modified_base 16: mod_base = OTHER; note = 2'-O-methylcytidine-3'-phosphate
  modified_base 17: mod_base = OTHER; note = 2'-O-methyladenosine-3'-phosphate
  modified_base 18: mod_base = OTHER; note = 2'-O-methyluridine-3'-phosphate
  modified_base 19: mod_base = OTHER; note = 2'-O-methylcytidine-3'-phosphate
  modified_base 20: mod_base = OTHER; note = 2'-O-methyluridine-3'-phosphate
  modified_base 21: mod_base = OTHER; note = 2'-O-methyluridine-3'-phosphate ((2S,4R)-1-[29-[[2-(acetylamino)-2-deoxy-beta-D-galactopyra nosyl]oxy]-14,14-bis[[3-[[3-[[5-[[2-(acetylamino)-2-deoxy-b eta-D-galactopyranosyl]oxy]-1-oxopentyl]amino]propyl]amino] -3-oxopropoxy]methyl]-1,12,19,25-tetraoxo-16-oxa-13,20,24-t riazanonacos-1-yl]-4-hydroxy-2-pyrrolidinyl)methyl ester
tatcaatttctgtctcatctt

SEQ ID NO: 4089 - RNA, 21 nt, synthetic construct
  source 1..21: mol_type = other RNA
  modified_base 1: mod_base = OTHER; note = 2'-O-methyladenosine-3'-phosphorothioate
  modified_base 2: mod_base = OTHER; note = 2'-O-methyluridine-3'-phosphorothioate
  modified_base 3: mod_base = OTHER; note = 2'-O-methylcytidine-3'-phosphate
  modified_base 4: mod_base = OTHER; note = 2'-O-methyluridine-3'-phosphate
  modified_base 5: mod_base = OTHER; note = 2'-O-methyluridine-3'-phosphate
  modified_base 6: mod_base = OTHER; note = 2'-O-methyladenosine-3'-phosphate
  modified_base 7: mod_base = OTHER; note = 2'-deoxy-2'-fluoroadenosine-3'-phosphate
  modified_base 8: mod_base = OTHER; note = 2'-O-methyluridine-3'-phosphate
  modified_base 9: mod_base = OTHER; note = 2'-deoxy-2'-fluoroadenosine-3'-phosphate
  modified_base 10: mod_base = OTHER; note = 2'-deoxy-2'-fluorouridine-3'-phosphate
  modified_base 11: mod_base = OTHER; note = 2'-deoxy-2'-fluoroguanosine-3'-phosphate
  modified_base 12: mod_base = OTHER; note = 2'-O-methyluridine-3'-phosphate
  modified_base 13: mod_base = OTHER; note = 2'-O-methylcytidine-3'-phosphate
  modified_base 14: mod_base = OTHER; note = 2'-O-methyluridine-3'-phosphate
  modified_base 15: mod_base = OTHER; note = 2'-O-methylcytidine-3'-phosphate
  modified_base 16: mod_base = OTHER; note = 2'-O-methyluridine-3'-phosphate
  modified_base 17: mod_base = OTHER; note = 2'-O-methyluridine-3'-phosphate
  modified_base 18: mod_base = OTHER; note = 2'-O-methylguanosine-3'-phosphate
  modified_base 19: mod_base = OTHER; note = 2'-O-methylcytidine-3'-phosphate
  modified_base 20: mod_base = OTHER; note = 2'-O-methyluridine-3'-phosphate
  modified_base 21: mod_base = OTHER; note = 2'-O-methyluridine-3'-phosphate ((2S,4R)-1-[29-[[2-(acetylamino)-2-deoxy-beta-D-galactopyra nosyl]oxy]-14,14-bis[[3-[[3-[[5-[[2-(acetylamino)-2-deoxy-b eta-D-galactopyranosyl]oxy]-1-oxopentyl]amino]propyl]amino] -3-oxopropoxy]methyl]-1,12,19,25-tetraoxo-16-oxa-13,20,24-t riazanonacos-1-yl]-4-hydroxy-2-pyrrolidinyl)methyl ester
atcttaatatgtctcttgctt

SEQ ID NO: 4090 - RNA, 21 nt, synthetic construct
  source 1..21: mol_type = other RNA
  modified_base 1: mod_base = OTHER; note = 2'-O-methyluridine-3'-phosphorothioate
  modified_base 2: mod_base = OTHER; note = 2'-O-methyluridine-3'-phosphorothioate
  modified_base 3: mod_base = OTHER; note = 2'-O-methylguanosine-3'-phosphate
  modified_base 4: mod_base = OTHER; note = 2'-O-methylcytidine-3'-phosphate
  modified_base 5: mod_base = OTHER; note = 2'-O-methyluridine-3'-phosphate
  modified_base 6: mod_base = OTHER; note = 2'-O-methylguanosine-3'-phosphate
  modified_base 7: mod_base = OTHER; note = 2'-deoxy-2'-fluoroadenosine-3'-phosphate
  modified_base 8: mod_base = OTHER; note = 2'-O-methyluridine-3'-phosphate
  modified_base 9: mod_base = OTHER; note = 2'-deoxy-2'-fluorocytidine-3'-phosphate
  modified_base 10: mod_base = OTHER; note = 2'-deoxy-2'-fluorouridine-3'-phosphate
  modified_base 11: mod_base = OTHER; note = 2'-deoxy-2'-fluoroguanosine-3'-phosphate
  modified_base 12: mod_base = OTHER; note = 2'-O-methyluridine-3'-phosphate
  modified_base 13: mod_base = OTHER; note = 2'-O-methyladenosine-3'-phosphate
  modified_base 14: mod_base = OTHER; note = 2'-O-methyluridine-3'-phosphate
  modified_base 15: mod_base = OTHER; note = 2'-O-methylcytidine-3'-phosphate
  modified_base 16: mod_base = OTHER; note = 2'-O-methyladenosine-3'-phosphate
  modified_base 17: mod_base = OTHER; note = 2'-O-methyluridine-3'-phosphate
  modified_base 18: mod_base = OTHER; note = 2'-O-methylcytidine-3'-phosphate
  modified_base 19: mod_base = OTHER; note = 2'-O-methylguanosine-3'-phosphate
  modified_base 20: mod_base = OTHER; note = 2'-O-methyluridine-3'-phosphate
  modified_base 21: mod_base = OTHER; note = 2'-O-methyluridine-3'-phosphate ((2S,4R)-1-[29-[[2-(acetylamino)-2-deoxy-beta-D-galactopyra nosyl]oxy]-14,14-bis[[3-[[3-[[5-[[2-(acetylamino)-2-deoxy-b eta-D-galactopyranosyl]oxy]-1-oxopentyl]amino]propyl]amino] -3-oxopropoxy]methyl]-1,12,19,25-tetraoxo-16-oxa-13,20,24-t riazanonacos-1-yl]-4-hydroxy-2-pyrrolidinyl)methyl ester
ttgctgatctgtatcatcgtt

SEQ ID NO: 4091 - RNA, 21 nt, synthetic construct
  source 1..21: mol_type = other RNA
  modified_base 1: mod_base = OTHER; note = 2'-O-methyluridine-3'-phosphorothioate
  modified_base 2: mod_base = OTHER; note = 2'-O-methylcytidine-3'-phosphorothioate
  modified_base 3: mod_base = OTHER; note = 2'-O-methyladenosine-3'-phosphate
  modified_base 4: mod_base = OTHER; note = 2'-O-methyluridine-3'-phosphate
  modified_base 5: mod_base = OTHER; note = 2'-O-methylcytidine-3'-phosphate
  modified_base 6: mod_base = OTHER; note = 2'-O-methylguanosine-3'-phosphate
  modified_base 7: mod_base = OTHER; note = 2'-deoxy-2'-fluorouridine-3'-phosphate
  modified_base 8: mod_base = OTHER; note = 2'-O-methylguanosine-3'-phosphate
  modified_base 9: mod_base = OTHER; note = 2'-deoxy-2'-fluoroadenosine-3'-phosphate
  modified_base 10: mod_base = OTHER; note = 2'-deoxy-2'-fluorouridine-3'-phosphate
  modified_base 11: mod_base = OTHER; note = 2'-deoxy-2'-fluoroguanosine-3'-phosphate
  modified_base 12: mod_base = OTHER; note = 2'-O-methylcytidine-3'-phosphate
  modified_base 13: mod_base = OTHER; note = 2'-O-methyluridine-3'-phosphate
  modified_base 14: mod_base = OTHER; note = 2'-O-methyluridine-3'-phosphate
  modified_base 15: mod_base = OTHER; note = 2'-O-methylcytidine-3'-phosphate
  modified_base 16: mod_base = OTHER; note = 2'-O-methyluridine-3'-phosphate
  modified_base 17: mod_base = OTHER; note = 2'-O-methylcytidine-3'-phosphate
  modified_base 18: mod_base = OTHER; note = 2'-O-methyluridine-3'-phosphate
  modified_base 19: mod_base = OTHER; note = 2'-O-methylguanosine-3'-phosphate
  modified_base 20: mod_base = OTHER; note = 2'-O-methyladenosine-3'-phosphate
  modified_base 21: mod_base = OTHER; note = 2'-O-methyluridine-3'-phosphate ((2S,4R)-1-[29-[[2-(acetylamino)-2-deoxy-beta-D-galactopyra nosyl]oxy]-14,14-bis[[3-[[3-[[5-[[2-(acetylamino)-2-deoxy-b eta-D-galactopyranosyl]oxy]-1-oxopentyl]amino]propyl]amino] -3-oxopropoxy]methyl]-1,12,19,25-tetraoxo-16-oxa-13,20,24-t riazanonacos-1-yl]-4-hydroxy-2-pyrrolidinyl)methyl ester
tcatcgtgatgcttctctgat

SEQ ID NO: 4092 - RNA, 21 nt, synthetic construct
  source 1..21: mol_type = other RNA
  modified_base 1: mod_base = OTHER; note = 2'-O-methyluridine-3'-phosphorothioate
  modified_base 2: mod_base = OTHER; note = 2'-O-methylcytidine-3'-phosphorothioate
  modified_base 3: mod_base = OTHER; note = 2'-O-methyluridine-3'-phosphate
  modified_base 4: mod_base = OTHER; note = 2'-O-methylcytidine-3'-phosphate
  modified_base 5: mod_base = OTHER; note = 2'-O-methyluridine-3'-phosphate
  modified_base 6: mod_base = OTHER; note = 2'-O-methylguanosine-3'-phosphate
  modified_base 7: mod_base = OTHER; note = 2'-deoxy-2'-fluoroadenosine-3'-phosphate
  modified_base 8: mod_base = OTHER; note = 2'-O-methyladenosine-3'-phosphate
  modified_base 9: mod_base = OTHER; note = 2'-deoxy-2'-fluoroguanosine-3'-phosphate
  modified_base 10: mod_base = OTHER; note = 2'-deoxy-2'-fluorouridine-3'-phosphate
  modified_base 11: mod_base = OTHER; note = 2'-deoxy-2'-fluorouridine-3'-phosphate
  modified_base 12: mod_base = OTHER; note = 2'-O-methylcytidine-3'-phosphate
  modified_base 13: mod_base = OTHER; note = 2'-O-methyluridine-3'-phosphate
  modified_base 14: mod_base = OTHER; note = 2'-O-methylguanosine-3'-phosphate
  modified_base 15: mod_base = OTHER; note = 2'-O-methylcytidine-3'-phosphate
  modified_base 16: mod_base = OTHER; note = 2'-O-methyluridine-3'-phosphate
  modified_base 17: mod_base = OTHER; note = 2'-O-methyladenosine-3'-phosphate
  modified_base 18: mod_base = OTHER; note = 2'-O-methylcytidine-3'-phosphate
  modified_base 19: mod_base = OTHER; note = 2'-O-methyladenosine-3'-phosphate
  modified_base 20: mod_base = OTHER; note = 2'-O-methyladenosine-3'-phosphate
  modified_base 21: mod_base = OTHER; note = 2'-O-methyluridine-3'-phosphate ((2S,4R)-1-[29-[[2-(acetylamino)-2-deoxy-beta-D-galactopyra nosyl]oxy]-14,14-bis[[3-[[3-[[5-[[2-(acetylamino)-2-deoxy-b eta-D-galactopyranosyl]oxy]-1-oxopentyl]amino]propyl]amino] -3-oxopropoxy]methyl]-1,12,19,25-tetraoxo-16-oxa-13,20,24-t riazanonacos-1-yl]-4-hydroxy-2-pyrrolidinyl)methyl ester
tctctgaagttctgctacaat

SEQ ID NO: 4093 - RNA, 21 nt, synthetic construct
  source 1..21: mol_type = other RNA
  modified_base 1: mod_base = OTHER; note = 2'-O-methylcytidine-3'-phosphorothioate
  modified_base 2: mod_base = OTHER; note = 2'-O-methyluridine-3'-phosphorothioate
  modified_base 3: mod_base = OTHER; note = 2'-O-methyladenosine-3'-phosphate
  modified_base 4: mod_base = OTHER; note = 2'-O-methylcytidine-3'-phosphate
  modified_base 5: mod_base = OTHER; note = 2'-O-methyladenosine-3'-phosphate
  modified_base 6: mod_base = OTHER; note = 2'-O-methyladenosine-3'-phosphate
  modified_base 7: mod_base = OTHER; note = 2'-deoxy-2'-fluorocytidine-3'-phosphate
  modified_base 8: mod_base = OTHER; note = 2'-O-methylcytidine-3'-phosphate
  modified_base 9: mod_base = OTHER; note = 2'-deoxy-2'-fluorouridine-3'-phosphate
  modified_base 10: mod_base = OTHER; note = 2'-deoxy-2'-fluorocytidine-3'-phosphate
  modified_base 11: mod_base = OTHER; note = 2'-deoxy-2'-fluorouridine-3'-phosphate
  modified_base 12: mod_base = OTHER; note = 2'-O-methyladenosine-3'-phosphate
  modified_base 13: mod_base = OTHER; note = 2'-O-methylguanosine-3'-phosphate
  modified_base 14: mod_base = OTHER; note = 2'-O-methyladenosine-3'-phosphate
  modified_base 15: mod_base = OTHER; note = 2'-O-methyluridine-3'-phosphate
  modified_base 16: mod_base = OTHER; note = 2'-O-methylcytidine-3'-phosphate
  modified_base 17: mod_base = OTHER; note = 2'-O-methyluridine-3'-phosphate
  modified_base 18: mod_base = OTHER; note = 2'-O-methylguanosine-3'-phosphate
  modified_base 19: mod_base = OTHER; note = 2'-O-methylcytidine-3'-phosphate
  modified_base 20: mod_base = OTHER; note = 2'-O-methyladenosine-3'-phosphate
  modified_base 21: mod_base = OTHER; note = 2'-O-methyluridine-3'-phosphate ((2S,4R)-1-[29-[[2-(acetylamino)-2-deoxy-beta-D-galactopyra nosyl]oxy]-14,14-bis[[3-[[3-[[5-[[2-(acetylamino)-2-deoxy-b eta-D-galactopyranosyl]oxy]-1-oxopentyl]amino]propyl]amino] -3-oxopropoxy]methyl]-1,12,19,25-tetraoxo-16-oxa-13,20,24-t riazanonacos-1-yl]-4-hydroxy-2-pyrrolidinyl)methyl ester
ctacaacctctagatctgcat

SEQ ID NO: 4094 - RNA, 21 nt, synthetic construct
  source 1..21: mol_type = other RNA
  modified_base 1: mod_base = OTHER; note = 2'-O-methylcytidine-3'-phosphorothioate
  modified_base 2: mod_base = OTHER; note = 2'-O-methyladenosine-3'-phosphorothioate
  modified_base 3: mod_base = OTHER; note = 2'-O-methyluridine-3'-phosphate
  modified_base 4: mod_base = OTHER; note = 2'-O-methylcytidine-3'-phosphate
  modified_base 5: mod_base = OTHER; note = 2'-O-methyladenosine-3'-phosphate
  modified_base 6: mod_base = OTHER; note = 2'-O-methylguanosine-3'-phosphate
  modified_base 7: mod_base = OTHER; note = 2'-deoxy-2'-fluorocytidine-3'-phosphate
  modified_base 8: mod_base = OTHER; note = 2'-O-methyluridine-3'-phosphate
  modified_base 9: mod_base = OTHER; note = 2'-deoxy-2'-fluorouridine-3'-phosphate
  modified_base 10: mod_base = OTHER; note = 2'-deoxy-2'-fluoroadenosine-3'-phosphate
  modified_base 11: mod_base = OTHER; note = 2'-deoxy-2'-fluoroadenosine-3'-phosphate
  modified_base 12: mod_base = OTHER; note = 2'-O-methyladenosine-3'-phosphate
  modified_base 13: mod_base = OTHER; note = 2'-O-methyladenosine-3'-phosphate
  modified_base 14: mod_base = OTHER; note = 2'-O-methyluridine-3'-phosphate
  modified_base 15: mod_base = OTHER; note = 2'-O-methylcytidine-3'-phosphate
  modified_base 16: mod_base = OTHER; note = 2'-O-methyluridine-3'-phosphate
  modified_base 17: mod_base = OTHER; note = 2'-O-methylguanosine-3'-phosphate
  modified_base 18: mod_base = OTHER; note = 2'-O-methyluridine-3'-phosphate
  modified_base 19: mod_base = OTHER; note = 2'-O-methylcytidine-3'-phosphate
  modified_base 20: mod_base = OTHER; note = 2'-O-methyladenosine-3'-phosphate
  modified_base 21: mod_base = OTHER; note = 2'-O-methyluridine-3'-phosphate ((2S,4R)-1-[29-[[2-(acetylamino)-2-deoxy-beta-D-galactopyra nosyl]oxy]-14,14-bis[[3-[[3-[[5-[[2-(acetylamino)-2-deoxy-b eta-D-galactopyranosyl]oxy]-1-oxopentyl]amino]propyl]amino] -3-oxopropoxy]methyl]-1,12,19,25-tetraoxo-16-oxa-13,20,24-t riazanonacos-1-yl]-4-hydroxy-2-pyrrolidinyl)methyl ester
catcagcttaaaatctgtcat

SEQ ID NO: 4095 - RNA, 21 nt, synthetic construct
  source 1..21: mol_type = other RNA
  modified_base 1: mod_base = OTHER; note = 2'-O-methyladenosine-3'-phosphorothioate
  modified_base 2: mod_base = OTHER; note = 2'-O-methylcytidine-3'-phosphorothioate
  modified_base 3: mod_base = OTHER; note = 2'-O-methyladenosine-3'-phosphate
  modified_base 4: mod_base = OTHER; note = 2'-O-methylguanosine-3'-phosphate
  modified_base 5: mod_base = OTHER; note = 2'-O-methylguanosine-3'-phosphate
  modified_base 6: mod_base = OTHER; note = 2'-O-methyladenosine-3'-phosphate
  modified_base 7: mod_base = OTHER; note = 2'-deoxy-2'-fluoroadenosine-3'-phosphate
  modified_base 8: mod_base = OTHER; note = 2'-O-methyladenosine-3'-phosphate
  modified_base 9: mod_base = OTHER; note = 2'-deoxy-2'-fluoroadenosine-3'-phosphate
  modified_base 10: mod_base = OTHER; note = 2'-deoxy-2'-fluorocytidine-3'-phosphate
  modified_base 11: mod_base = OTHER; note = 2'-deoxy-2'-fluoroadenosine-3'-phosphate
  modified_base 12: mod_base = OTHER; note = 2'-O-methyladenosine-3'-phosphate
  modified_base 13: mod_base = OTHER; note = 2'-O-methyluridine-3'-phosphate
  modified_base 14: mod_base = OTHER; note = 2'-O-methyladenosine-3'-phosphate
  modified_base 15: mod_base = OTHER; note = 2'-O-methyluridine-3'-phosphate
  modified_base 16: mod_base = OTHER; note = 2'-O-methyluridine-3'-phosphate
  modified_base 17: mod_base = OTHER; note = 2'-O-methylguanosine-3'-phosphate
  modified_base 18: mod_base = OTHER; note = 2'-O-methyluridine-3'-phosphate
  modified_base 19: mod_base = OTHER; note = 2'-O-methyladenosine-3'-phosphate
  modified_base 20: mod_base = OTHER; note = 2'-O-methyluridine-3'-phosphate
  modified_base 21: mod_base = OTHER; note = 2'-O-methyluridine-3'-phosphate ((2S,4R)-1-[29-[[2-(acetylamino)-2-deoxy-beta-D-galactopyra nosyl]oxy]-14,14-bis[[3-[[3-[[5-[[2-(acetylamino)-2-deoxy-b eta-D-galactopyranosyl]oxy]-1-oxopentyl]amino]propyl]amino] -3-oxopropoxy]methyl]-1,12,19,25-tetraoxo-16-oxa-13,20,24-t riazanonacos-1-yl]-4-hydroxy-2-pyrrolidinyl)methyl ester
acaggaaaacaatattgtatt

SEQ ID NO: 4096 - RNA, 21 nt, synthetic construct
  source 1..21: mol_type = other RNA
  modified_base 1: mod_base = OTHER; note = 2'-O-methyladenosine-3'-phosphorothioate
  modified_base 2: mod_base = OTHER; note = 2'-O-methyluridine-3'-phosphorothioate
  modified_base 3: mod_base = OTHER; note = 2'-O-methyluridine-3'-phosphate
  modified_base 4: mod_base = OTHER; note = 2'-O-methylguanosine-3'-phosphate
  modified_base 5: mod_base = OTHER; note = 2'-O-methyluridine-3'-phosphate
  modified_base 6: mod_base = OTHER; note = 2'-O-methyladenosine-3'-phosphate
  modified_base 7: mod_base = OTHER; note = 2'-deoxy-2'-fluorouridine-3'-phosphate
  modified_base 8: mod_base = OTHER; note = 2'-O-methyladenosine-3'-phosphate
  modified_base 9: mod_base = OTHER; note = 2'-deoxy-2'-fluoroadenosine-3'-phosphate
  modified_base 10: mod_base = OTHER; note = 2'-deoxy-2'-fluorocytidine-3'-phosphate
  modified_base 11: mod_base = OTHER; note = 2'-deoxy-2'-fluoroadenosine-3'-phosphate
  modified_base 12: mod_base = OTHER; note = 2'-O-methylguanosine-3'-phosphate
  modified_base 13: mod_base = OTHER; note = 2'-O-methyladenosine-3'-phosphate
  modified_base 14: mod_base = OTHER; note = 2'-O-methylcytidine-3'-phosphate
  modified_base 15: mod_base = OTHER; note = 2'-O-methylcytidine-3'-phosphate
  modified_base 16: mod_base = OTHER; note = 2'-O-methyladenosine-3'-phosphate
  modified_base 17: mod_base = OTHER; note = 2'-O-methylcytidine-3'-phosphate
  modified_base 18: mod_base = OTHER; note = 2'-O-methyluridine-3'-phosphate
  modified_base 19: mod_base = OTHER; note = 2'-O-methyluridine-3'-phosphate
  modified_base 20: mod_base = OTHER; note = 2'-O-methylcytidine-3'-phosphate
  modified_base 21: mod_base = OTHER; note = 2'-O-methyluridine-3'-phosphate ((2S,4R)-1-[29-[[2-(acetylamino)-2-deoxy-beta-D-galactopyra nosyl]oxy]-14,14-bis[[3-[[3-[[5-[[2-(acetylamino)-2-deoxy-b eta-D-galactopyranosyl]oxy]-1-oxopentyl]amino]propyl]amino] -3-oxopropoxy]methyl]-1,12,19,25-tetraoxo-16-oxa-13,20,24-t riazanonacos-1-yl]-4-hydroxy-2-pyrrolidinyl)methyl ester
attgtataacagaccacttct

SEQ ID NO: 4097 - RNA, 21 nt, synthetic construct
  source 1..21: mol_type = other RNA
  modified_base 1: mod_base = OTHER; note = 2'-O-methylcytidine-3'-phosphorothioate
  modified_base 2: mod_base = OTHER; note = 2'-O-methylcytidine-3'-phosphorothioate
  modified_base 3: mod_base = OTHER; note = 2'-O-methyladenosine-3'-phosphate
  modified_base 4: mod_base = OTHER; note = 2'-O-methylcytidine-3'-phosphate
  modified_base 5: mod_base = OTHER; note = 2'-O-methyluridine-3'-phosphate
  modified_base 6: mod_base = OTHER; note = 2'-O-methyluridine-3'-phosphate
  modified_base 7: mod_base = OTHER; note = 2'-deoxy-2'-fluorocytidine-3'-phosphate
  modified_base 8: mod_base = OTHER; note = 2'-O-methylcytidine-3'-phosphate
  modified_base 9: mod_base = OTHER; note = 2'-deoxy-2'-fluorouridine-3'-phosphate
  modified_base 10: mod_base = OTHER; note = 2'-deoxy-2'-fluoroguanosine-3'-phosphate
  modified_base 11: mod_base = OTHER; note = 2'-deoxy-2'-fluoroadenosine-3'-phosphate
  modified_base 12: mod_base = OTHER; note = 2'-O-methylguanosine-3'-phosphate
  modified_base 13: mod_base = OTHER; note = 2'-O-methyluridine-3'-phosphate
  modified_base 14: mod_base = OTHER; note = 2'-O-methyladenosine-3'-phosphate
  modified_base 15: mod_base = OTHER; note = 2'-O-methylguanosine-3'-phosphate
  modified_base 16: mod_base = OTHER; note = 2'-O-methyladenosine-3'-phosphate
  modified_base 17: mod_base = OTHER; note = 2'-O-methyladenosine-3'-phosphate
  modified_base 18: mod_base = OTHER; note = 2'-O-methylguanosine-3'-phosphate
  modified_base 19: mod_base = OTHER; note = 2'-O-methyladenosine-3'-phosphate
  modified_base 20: mod_base = OTHER; note = 2'-O-methylguanosine-3'-phosphate
  modified_base 21: mod_base = OTHER; note = 2'-O-methyluridine-3'-phosphate ((2S,4R)-1-[29-[[2-(acetylamino)-2-deoxy-beta-D-galactopyra nosyl]oxy]-14,14-bis[[3-[[3-[[5-[[2-(acetylamino)-2-deoxy-b eta-D-galactopyranosyl]oxy]-1-oxopentyl]amino]propyl]amino] -3-oxopropoxy]methyl]-1,12,19,25-tetraoxo-16-oxa-13,20,24-t riazanonacos-1-yl]-4-hydroxy-2-pyrrolidinyl)methyl ester
ccacttcctgagtagaagagt

SEQ ID NO: 4098 - RNA, 21 nt, synthetic construct
  source 1..21: mol_type = other RNA
  modified_base 1: mod_base = OTHER; note = 2'-O-methylguanosine-3'-phosphorothioate
  modified_base 2: mod_base = OTHER; note = 2'-O-methyladenosine-3'-phosphorothioate
  modified_base 3: mod_base = OTHER; note = 2'-O-methyladenosine-3'-phosphate
  modified_base 4: mod_base = OTHER; note = 2'-O-methylguanosine-3'-phosphate
  modified_base 5: mod_base = OTHER; note = 2'-O-methyladenosine-3'-phosphate
  modified_base 6: mod_base = OTHER; note = 2'-O-methylguanosine-3'-phosphate
  modified_base 7: mod_base = OTHER; note = 2'-deoxy-2'-fluorouridine-3'-phosphate
  modified_base 8: mod_base = OTHER; note = 2'-O-methyluridine-3'-phosphate
  modified_base 9: mod_base = OTHER; note = 2'-deoxy-2'-fluorouridine-3'-phosphate
  modified_base 10: mod_base = OTHER; note = 2'-deoxy-2'-fluorocytidine-3'-phosphate
  modified_base 11: mod_base = OTHER; note = 2'-deoxy-2'-fluorouridine-3'-phosphate
  modified_base 12: mod_base = OTHER; note = 2'-O-methyluridine-3'-phosphate
  modified_base 13: mod_base = OTHER; note = 2'-O-methyluridine-3'-phosphate
  modified_base 14: mod_base = OTHER; note = 2'-O-methylguanosine-3'-phosphate
  modified_base 15: mod_base = OTHER; note = 2'-O-methyluridine-3'-phosphate
  modified_base 16: mod_base = OTHER; note = 2'-O-methylguanosine-3'-phosphate
  modified_base 17: mod_base = OTHER; note = 2'-O-methyladenosine-3'-phosphate
  modified_base 18: mod_base = OTHER; note = 2'-O-methyladenosine-3'-phosphate
  modified_base 19: mod_base = OTHER; note = 2'-O-methyladenosine-3'-phosphate
  modified_base 20: mod_base = OTHER; note = 2'-O-methyladenosine-3'-phosphate
  modified_base 21: mod_base = OTHER; note = 2'-O-methyluridine-3'-phosphate ((2S,4R)-1-[29-[[2-(acetylamino)-2-deoxy-beta-D-galactopyra nosyl]oxy]-14,14-bis[[3-[[3-[[5-[[2-(acetylamino)-2-deoxy-b eta-D-galactopyranosyl]oxy]-1-oxopentyl]amino]propyl]amino] -3-oxopropoxy]methyl]-1,12,19,25-tetraoxo-16-oxa-13,20,24-t riazanonacos-1-yl]-4-hydroxy-2-pyrrolidinyl)methyl ester
gaagagtttctttgtgaaaat

SEQ ID NO: 4099 - RNA, 21 nt, synthetic construct
  source 1..21: mol_type = other RNA
  modified_base 1: mod_base = OTHER; note = 2'-O-methylcytidine-3'-phosphorothioate
  modified_base 2: mod_base = OTHER; note = 2'-O-methyladenosine-3'-phosphorothioate
  modified_base 3: mod_base = OTHER; note = 2'-O-methyladenosine-3'-phosphate
  modified_base 4: mod_base = OTHER; note = 2'-O-methylguanosine-3'-phosphate
  modified_base 5: mod_base = OTHER; note = 2'-O-methyladenosine-3'-phosphate
  modified_base 6: mod_base = OTHER; note = 2'-O-methyluridine-3'-phosphate
  modified_base 7: mod_base = OTHER; note = 2'-deoxy-2'-fluorouridine-3'-phosphate
  modified_base 8: mod_base = OTHER; note = 2'-O-methyladenosine-3'-phosphate
  modified_base 9: mod_base = OTHER; note = 2'-deoxy-2'-fluoroadenosine-3'-phosphate
  modified_base 10: mod_base = OTHER; note = 2'-deoxy-2'-fluoroguanosine-3'-phosphate
  modified_base 11: mod_base = OTHER; note = 2'-deoxy-2'-fluoroadenosine-3'-phosphate
  modified_base 12: mod_base = OTHER; note = 2'-O-methylcytidine-3'-phosphate
  modified_base 13: mod_base = OTHER; note = 2'-O-methyluridine-3'-phosphate
  modified_base 14: mod_base = OTHER; note = 2'-O-methyladenosine-3'-phosphate
  modified_base 15: mod_base = OTHER; note = 2'-O-methyladenosine-3'-phosphate
  modified_base 16: mod_base = OTHER; note = 2'-O-methyladenosine-3'-phosphate
  modified_base 17: mod_base = OTHER; note = 2'-O-methyladenosine-3'-phosphate
  modified_base 18: mod_base = OTHER; note = 2'-O-methylcytidine-3'-phosphate
  modified_base 19: mod_base = OTHER; note = 2'-O-methyluridine-3'-phosphate
  modified_base 20: mod_base = OTHER; note = 2'-O-methyluridine-3'-phosphate
  modified_base 21: mod_base = OTHER; note = 2'-O-methyluridine-3'-phosphate ((2S,4R)-1-[29-[[2-(acetylamino)-2-deoxy-beta-D-galactopyra nosyl]oxy]-14,14-bis[[3-[[3-[[5-[[2-(acetylamino)-2-deoxy-b eta-D-galactopyranosyl]oxy]-1-oxopentyl]amino]propyl]amino] -3-oxopropoxy]methyl]-1,12,19,25-tetraoxo-16-oxa-13,20,24-t riazanonacos-1-yl]-4-hydroxy-2-pyrrolidinyl)methyl ester
caagattaagactaaaacttt

SEQ ID NO: 4100 - RNA, 21 nt, synthetic construct
  source 1..21: mol_type = other RNA
  modified_base 1: mod_base = OTHER; note = 2'-O-methylguanosine-3'-phosphorothioate
  modified_base 2: mod_base = OTHER; note = 2'-O-methyluridine-3'-phosphorothioate
  modified_base 3: mod_base = OTHER; note = 2'-O-methyluridine-3'-phosphate
  modified_base 4: mod_base = OTHER; note = 2'-O-methyladenosine-3'-phosphate
  modified_base 5: mod_base = OTHER; note = 2'-O-methylcytidine-3'-phosphate
  modified_base 6: mod_base = OTHER; note = 2'-O-methylcytidine-3'-phosphate
  modified_base 7: mod_base = OTHER; note = 2'-deoxy-2'-fluoroadenosine-3'-phosphate
  modified_base 8: mod_base = OTHER; note = 2'-O-methyluridine-3'-phosphate
  modified_base 9: mod_base = OTHER; note = 2'-deoxy-2'-fluoroadenosine-3'-phosphate
  modified_base 10: mod_base = OTHER; note = 2'-deoxy-2'-fluorouridine-3'-phosphate
  modified_base 11: mod_base = OTHER; note = 2'-deoxy-2'-fluoroguanosine-3'-phosphate
  modified_base 12: mod_base = OTHER; note = 2'-O-methyluridine-3'-phosphate
  modified_base 13: mod_base = OTHER; note = 2'-O-methyladenosine-3'-phosphate
  modified_base 14: mod_base = OTHER; note = 2'-O-methyluridine-3'-phosphate
  modified_base 15: mod_base = OTHER; note = 2'-O-methyluridine-3'-phosphate
  modified_base 16: mod_base = OTHER; note = 2'-O-methylcytidine-3'-phosphate
  modified_base 17: mod_base = OTHER; note = 2'-O-methyladenosine-3'-phosphate
  modified_base 18: mod_base = OTHER; note = 2'-O-methyluridine-3'-phosphate
  modified_base 19: mod_base = OTHER; note = 2'-O-methylcytidine-3'-phosphate
  modified_base 20: mod_base = OTHER; note = 2'-O-methyluridine-3'-phosphate
  modified_base 21: mod_base = OTHER; note = 2'-O-methyluridine-3'-phosphate ((2S,4R)-1-[29-[[2-(acetylamino)-2-deoxy-beta-D-galactopyra nosyl]oxy]-14,14-bis[[3-[[3-[[5-[[2-(acetylamino)-2-deoxy-b eta-D-galactopyranosyl]oxy]-1-oxopentyl]amino]propyl]amino] -3-oxopropoxy]methyl]-1,12,19,25-tetraoxo-16-oxa-13,20,24-t riazanonacos-1-yl]-4-hydroxy-2-pyrrolidinyl)methyl ester
gttaccatatgtattcatctt

SEQ ID NO: 4101 - RNA, 21 nt, synthetic construct
  source 1..21: mol_type = other RNA
  modified_base 1: mod_base = OTHER; note = 2'-O-methyladenosine-3'-phosphorothioate
  modified_base 2: mod_base = OTHER; note = 2'-O-methyluridine-3'-phosphorothioate
  modified_base 3: mod_base = OTHER; note = 2'-O-methylcytidine-3'-phosphate
  modified_base 4: mod_base = OTHER; note = 2'-O-methyluridine-3'-phosphate
  modified_base 5: mod_base = OTHER; note = 2'-O-methylguanosine-3'-phosphate
  modified_base 6: mod_base = OTHER; note = 2'-O-methyluridine-3'-phosphate
  modified_base 7: mod_base = OTHER; note = 2'-deoxy-2'-fluorouridine-3'-phosphate
  modified_base 8: mod_base = OTHER; note = 2'-O-methylguanosine-3'-phosphate
  modified_base 9: mod_base = OTHER; note = 2'-deoxy-2'-fluoroguanosine-3'-phosphate
  modified_base 10: mod_base = OTHER; note = 2'-deoxy-2'-fluoroadenosine-3'-phosphate
  modified_base 11: mod_base = OTHER; note = 2'-deoxy-2'-fluorouridine-3'-phosphate
  modified_base 12: mod_base = OTHER; note = 2'-O-methylcytidine-3'-phosphate
  modified_base 13: mod_base = OTHER; note = 2'-O-methyluridine-3'-phosphate
  modified_base 14: mod_base = OTHER; note = 2'-O-methyluridine-3'-phosphate
  modified_base 15: mod_base = OTHER; note = 2'-O-methylguanosine-3'-phosphate
  modified_base 16: mod_base = OTHER; note = 2'-O-methyluridine-3'-phosphate
  modified_base 17: mod_base = OTHER; note = 2'-O-methyladenosine-3'-phosphate
  modified_base 18: mod_base = OTHER; note = 2'-O-methyladenosine-3'-phosphate
  modified_base 19: mod_base = OTHER; note = 2'-O-methyladenosine-3'-phosphate
  modified_base 20: mod_base = OTHER; note = 2'-O-methylcytidine-3'-phosphate
  modified_base 21: mod_base = OTHER; note = 2'-O-methyluridine-3'-phosphate ((2S,4R)-1-[29-[[2-(acetylamino)-2-deoxy-beta-D-galactopyra nosyl]oxy]-14,14-bis[[3-[[3-[[5-[[2-(acetylamino)-2-deoxy-b eta-D-galactopyranosyl]oxy]-1-oxopentyl]amino]propyl]amino] -3-oxopropoxy]methyl]-1,12,19,25-tetraoxo-16-oxa-13,20,24-t riazanonacos-1-yl]-4-hydroxy-2-pyrrolidinyl)methyl ester
atctgttggatcttgtaaact

SEQ ID NO: 4102 - RNA, 21 nt, synthetic construct
  source 1..21: mol_type = other RNA
  modified_base 1: mod_base = OTHER; note = 2'-O-methyladenosine-3'-phosphorothioate
  modified_base 2: mod_base = OTHER; note = 2'-O-methyluridine-3'-phosphorothioate
  modified_base 3: mod_base = OTHER; note = 2'-O-methylguanosine-3'-phosphate
  modified_base 4: mod_base = OTHER; note = 2'-O-methyladenosine-3'-phosphate
  modified_base 5: mod_base = OTHER; note = 2'-O-methyladenosine-3'-phosphate
  modified_base 6: mod_base = OTHER; note = 2'-O-methyladenosine-3'-phosphate
  modified_base 7: mod_base = OTHER; note = 2'-deoxy-2'-fluoroadenosine-3'-phosphate
  modified_base 8: mod_base = OTHER; note = 2'-O-methylguanosine-3'-phosphate
  modified_base 9: mod_base = OTHER; note = 2'-deoxy-2'-fluoroguanosine-3'-phosphate
  modified_base 10: mod_base = OTHER; note = 2'-deoxy-2'-fluoroguanosine-3'-phosphate
  modified_base 11: mod_base = OTHER; note = 2'-deoxy-2'-fluorocytidine-3'-phosphate
  modified_base 12: mod_base = OTHER; note = 2'-O-methyluridine-3'-phosphate
  modified_base 13: mod_base = OTHER; note = 2'-O-methyluridine-3'-phosphate
  modified_base 14: mod_base = OTHER; note = 2'-O-methyluridine-3'-phosphate
  modified_base 15: mod_base = OTHER; note = 2'-O-methyladenosine-3'-phosphate
  modified_base 16: mod_base = OTHER; note = 2'-O-methyluridine-3'-phosphate
  modified_base 17: mod_base = OTHER; note = 2'-O-methyluridine-3'-phosphate
  modified_base 18: mod_base = OTHER; note = 2'-O-methyluridine-3'-phosphate
  modified_base 19: mod_base = OTHER; note = 2'-O-methyluridine-3'-phosphate
  modified_base 20: mod_base = OTHER; note = 2'-O-methylcytidine-3'-phosphate
  modified_base 21: mod_base = OTHER; note = 2'-O-methyluridine-3'-phosphate ((2S,4R)-1-[29-[[2-(acetylamino)-2-deoxy-beta-D-galactopyra nosyl]oxy]-14,14-bis[[3-[[3-[[5-[[2-(acetylamino)-2-deoxy-b eta-D-galactopyranosyl]oxy]-1-oxopentyl]amino]propyl]amino] -3-oxopropoxy]methyl]-1,12,19,25-tetraoxo-16-oxa-13,20,24-t riazanonacos-1-yl]-4-hydroxy-2-pyrrolidinyl)methyl ester
atgaaaagggctttattttct

SEQ ID NO: 4103 - RNA, 21 nt, synthetic construct
  source 1..21: mol_type = other RNA
  modified_base 1: mod_base = OTHER; note = 2'-O-methylguanosine-3'-phosphorothioate
  modified_base 2: mod_base = OTHER; note = 2'-O-methyluridine-3'-phosphorothioate
  modified_base 3: mod_base = OTHER; note = 2'-O-methylguanosine-3'-phosphate
  modified_base 4: mod_base = OTHER; note = 2'-O-methyluridine-3'-phosphate
  modified_base 5: mod_base = OTHER; note = 2'-O-methyladenosine-3'-phosphate
  modified_base 6: mod_base = OTHER; note = 2'-O-methyluridine-3'-phosphate
  modified_base 7: mod_base = OTHER; note = 2'-deoxy-2'-fluoroadenosine-3'-phosphate
  modified_base 8: mod_base = OTHER; note = 2'-O-methyladenosine-3'-phosphate
  modified_base 9: mod_base = OTHER; note = 2'-deoxy-2'-fluoroadenosine-3'-phosphate
  modified_base 10: mod_base = OTHER; note = 2'-deoxy-2'-fluoroadenosine-3'-phosphate
  modified_base 11: mod_base = OTHER; note = 2'-deoxy-2'-fluorouridine-3'-phosphate
  modified_base 12: mod_base = OTHER; note = 2'-O-methylguanosine-3'-phosphate
  modified_base 13: mod_base = OTHER; note = 2'-O-methylcytidine-3'-phosphate
  modified_base 14: mod_base = OTHER; note = 2'-O-methyladenosine-3'-phosphate
  modified_base 15: mod_base = OTHER; note = 2'-O-methyladenosine-3'-phosphate
  modified_base 16: mod_base = OTHER; note = 2'-O-methylcytidine-3'-phosphate
  modified_base 17: mod_base = OTHER; note = 2'-O-methyluridine-3'-phosphate
  modified_base 18: mod_base = OTHER; note = 2'-O-methylguanosine-3'-phosphate
  modified_base 19: mod_base = OTHER; note = 2'-O-methyluridine-3'-phosphate
  modified_base 20: mod_base = OTHER; note = 2'-O-methyluridine-3'-phosphate
  modified_base 21: mod_base = OTHER; note = 2'-O-methyluridine-3'-phosphate ((2S,4R)-1-[29-[[2-(acetylamino)-2-deoxy-beta-D-galactopyra nosyl]oxy]-14,14-bis[[3-[[3-[[5-[[2-(acetylamino)-2-deoxy-b eta-D-galactopyranosyl]oxy]-1-oxopentyl]amino]propyl]amino] -3-oxopropoxy]methyl]-1,12,19,25-tetraoxo-16-oxa-13,20,24-t riazanonacos-1-yl]-4-hydroxy-2-pyrrolidinyl)methyl ester
gtgtataaaatgcaactgttt

SEQ ID NO: 4104 - RNA, 21 nt, synthetic construct
  source 1..21: mol_type = other RNA
  modified_base 1: mod_base = OTHER; note = 2'-O-methyladenosine-3'-phosphorothioate
  modified_base 2: mod_base = OTHER; note = 2'-O-methylcytidine-3'-phosphorothioate
  modified_base 3: mod_base = OTHER; note = 2'-O-methyluridine-3'-phosphate
  modified_base 4: mod_base = OTHER; note = 2'-O-methylguanosine-3'-phosphate
  modified_base 5: mod_base = OTHER; note = 2'-O-methyluridine-3'-phosphate
  modified_base 6: mod_base = OTHER; note = 2'-O-methyluridine-3'-phosphate
  modified_base 7: mod_base = OTHER; note = 2'-deoxy-2'-fluoroguanosine-3'-phosphate
  modified_base 8: mod_base = OTHER; note = 2'-O-methyladenosine-3'-phosphate
  modified_base 9: mod_base = OTHER; note = 2'-deoxy-2'-fluorouridine-3'-phosphate
  modified_base 10: mod_base = OTHER; note = 2'-deoxy-2'-fluorouridine-3'-phosphate
  modified_base 11: mod_base = OTHER; note = 2'-deoxy-2'-fluorouridine-3'-phosphate
  modified_base 12: mod_base = OTHER; note = 2'-O-methylcytidine-3'-phosphate
  modified_base 13: mod_base = OTHER; note = 2'-O-methylcytidine-3'-phosphate
  modified_base 14: mod_base = OTHER; note = 2'-O-methyluridine-3'-phosphate
  modified_base 15: mod_base = OTHER; note = 2'-O-methylcytidine-3'-phosphate
  modified_base 16: mod_base = OTHER; note = 2'-O-methyladenosine-3'-phosphate
  modified_base 17: mod_base = OTHER; note = 2'-O-methyladenosine-3'-phosphate
  modified_base 18: mod_base = OTHER; note = 2'-O-methylcytidine-3'-phosphate
  modified_base 19: mod_base = OTHER; note = 2'-O-methyladenosine-3'-phosphate
  modified_base 20: mod_base = OTHER; note = 2'-O-methyluridine-3'-phosphate
  modified_base 21: mod_base = OTHER; note = 2'-O-methyluridine-3'-phosphate ((2S,4R)-1-[29-[[2-(acetylamino)-2-deoxy-beta-D-galactopyra nosyl]oxy]-14,14-bis[[3-[[3-[[5-[[2-(acetylamino)-2-deoxy-b eta-D-galactopyranosyl]oxy]-1-oxopentyl]amino]propyl]amino] -3-oxopropoxy]methyl]-1,12,19,25-tetraoxo-16-oxa-13,20,24-t riazanonacos-1-yl]-4-hydroxy-2-pyrrolidinyl)methyl ester
actgttgatttcctcaacatt

SEQ ID NO: 4105 - RNA, 21 nt, synthetic construct
  source 1..21: mol_type = other RNA
  modified_base 1: mod_base = OTHER; note = 2'-O-methylcytidine-3'-phosphorothioate
  modified_base 2: mod_base = OTHER; note = 2'-O-methyladenosine-3'-phosphorothioate
  modified_base 3: mod_base = OTHER; note = 2'-O-methylcytidine-3'-phosphate
  modified_base 4: mod_base = OTHER; note = 2'-O-methyladenosine-3'-phosphate
  modified_base 5: mod_base = OTHER; note = 2'-O-methyladenosine-3'-phosphate
  modified_base 6: mod_base = OTHER; note = 2'-O-methyladenosine-3'-phosphate
  modified_base 7: mod_base = OTHER; note = 2'-deoxy-2'-fluorouridine-3'-phosphate
  modified_base 8: mod_base = OTHER; note = 2'-O-methyluridine-3'-phosphate
  modified_base 9: mod_base = OTHER; note = 2'-deoxy-2'-fluorouridine-3'-phosphate
  modified_base 10: mod_base = OTHER; note = 2'-deoxy-2'-fluorocytidine-3'-phosphate
  modified_base 11: mod_base = OTHER; note = 2'-deoxy-2'-fluorouridine-3'-phosphate
  modified_base 12: mod_base = OTHER; note = 2'-O-methyladenosine-3'-phosphate
  modified_base 13: mod_base = OTHER; note = 2'-O-methyluridine-3'-phosphate
  modified_base 14: mod_base = OTHER; note = 2'-O-methylcytidine-3'-phosphate
  modified_base 15: mod_base = OTHER; note = 2'-O-methylcytidine-3'-phosphate
  modified_base 16: mod_base = OTHER; note = 2'-O-methylcytidine-3'-phosphate
  modified_base 17: mod_base = OTHER; note = 2'-O-methyladenosine-3'-phosphate
  modified_base 18: mod_base = OTHER; note = 2'-O-methyladenosine-3'-phosphate
  modified_base 19: mod_base = OTHER; note = 2'-O-methyladenosine-3'-phosphate
  modified_base 20: mod_base = OTHER; note = 2'-O-methyluridine-3'-phosphate
  modified_base 21: mod_base = OTHER; note = 2'-O-methyluridine-3'-phosphate ((2S,4R)-1-[29-[[2-(acetylamino)-2-deoxy-beta-D-galactopyra nosyl]oxy]-14,14-bis[[3-[[3-[[5-[[2-(acetylamino)-2-deoxy-b eta-D-galactopyranosyl]oxy]-1-oxopentyl]amino]propyl]amino] -3-oxopropoxy]methyl]-1,12,19,25-tetraoxo-16-oxa-13,20,24-t riazanonacos-1-yl]-4-hydroxy-2-pyrrolidinyl)methyl ester
cacaaatttctatcccaaatt

SEQ ID NO: 4106 - RNA, 21 nt, synthetic construct
  source 1..21: mol_type = other RNA
  modified_base 1: mod_base = OTHER; note = 2'-O-methylcytidine-3'-phosphorothioate
  modified_base 2: mod_base = OTHER; note = 2'-O-methylcytidine-3'-phosphorothioate
  modified_base 3: mod_base = OTHER; note = 2'-O-methyladenosine-3'-phosphate
  modified_base 4: mod_base = OTHER; note = 2'-O-methyladenosine-3'-phosphate
  modified_base 5: mod_base = OTHER; note = 2'-O-methyladenosine-3'-phosphate
  modified_base 6: mod_base = OTHER; note = 2'-O-methyluridine-3'-phosphate
  modified_base 7: mod_base = OTHER; note = 2'-deoxy-2'-fluorocytidine-3'-phosphate
  modified_base 8: mod_base = OTHER; note = 2'-O-methyluridine-3'-phosphate
  modified_base 9: mod_base = OTHER; note = 2'-deoxy-2'-fluorouridine-3'-phosphate
  modified_base 10: mod_base = OTHER; note = 2'-deoxy-2'-fluorouridine-3'-phosphate
  modified_base 11: mod_base = OTHER; note = 2'-deoxy-2'-fluorouridine-3'-phosphate
  modified_base 12: mod_base = OTHER; note = 2'-O-methylcytidine-3'-phosphate
  modified_base 13: mod_base = OTHER; note = 2'-O-methyluridine-3'-phosphate
  modified_base 14: mod_base = OTHER; note = 2'-O-methylguanosine-3'-phosphate
  modified_base 15: mod_base = OTHER; note = 2'-O-methyladenosine-3'-phosphate
  modified_base 16: mod_base = OTHER; note = 2'-O-methyladenosine-3'-phosphate
  modified_base 17: mod_base = OTHER; note = 2'-O-methylguanosine-3'-phosphate
  modified_base 18: mod_base = OTHER; note = 2'-O-methyladenosine-3'-phosphate
  modified_base 19: mod_base = OTHER; note = 2'-O-methyluridine-3'-phosphate
  modified_base 20: mod_base = OTHER; note = 2'-O-methylguanosine-3'-phosphate
  modified_base 21: mod_base = OTHER; note = 2'-O-methyluridine-3'-phosphate ((2S,4R)-1-[29-[[2-(acetylamino)-2-deoxy-beta-D-galactopyra nosyl]oxy]-14,14-bis[[3-[[3-[[5-[[2-(acetylamino)-2-deoxy-b eta-D-galactopyranosyl]oxy]-1-oxopentyl]amino]propyl]amino] -3-oxopropoxy]methyl]-1,12,19,25-tetraoxo-16-oxa-13,20,24-t riazanonacos-1-yl]-4-hydroxy-2-pyrrolidinyl)methyl ester
ccaaatcttttctgaagatgt

SEQ ID NO: 4107 - RNA, 21 nt, synthetic construct
  source 1..21: mol_type = other RNA
  modified_base 1: mod_base = OTHER; note = 2'-O-methyladenosine-3'-phosphorothioate
  modified_base 2: mod_base = OTHER; note = 2'-O-methyladenosine-3'-phosphorothioate
  modified_base 3: mod_base = OTHER; note = 2'-O-methylguanosine-3'-phosphate
  modified_base 4: mod_base = OTHER; note = 2'-O-methyladenosine-3'-phosphate
  modified_base 5: mod_base = OTHER; note = 2'-O-methyluridine-3'-phosphate
  modified_base 6: mod_base = OTHER; note = 2'-O-methylguanosine-3'-phosphate
  modified_base 7: mod_base = OTHER; note = 2'-deoxy-2'-fluoroadenosine-3'-phosphate
  modified_base 8: mod_base = OTHER; note = 2'-O-methyladenosine-3'-phosphate
  modified_base 9: mod_base = OTHER; note = 2'-deoxy-2'-fluoroguanosine-3'-phosphate
  modified_base 10: mod_base = OTHER; note = 2'-deoxy-2'-fluoroadenosine-3'-phosphate
  modified_base 11: mod_base = OTHER; note = 2'-deoxy-2'-fluoroguanosine-3'-phosphate
  modified_base 12: mod_base = OTHER; note = 2'-O-methyluridine-3'-phosphate
  modified_base 13: mod_base = OTHER; note = 2'-O-methyluridine-3'-phosphate
  modified_base 14: mod_base = OTHER; note = 2'-O-methyluridine-3'-phosphate
  modified_base 15: mod_base = OTHER; note = 2'-O-methyladenosine-3'-phosphate
  modified_base 16: mod_base = OTHER; note = 2'-O-methylguanosine-3'-phosphate
  modified_base 17: mod_base = OTHER; note = 2'-O-methyluridine-3'-phosphate
  modified_base 18: mod_base = OTHER; note = 2'-O-methyluridine-3'-phosphate
  modified_base 19: mod_base = OTHER; note = 2'-O-methyluridine-3'-phosphate
  modified_base 20: mod_base = OTHER; note = 2'-O-methyluridine-3'-phosphate
  modified_base 21: mod_base = OTHER; note = 2'-O-methyluridine-3'-phosphate ((2S,4R)-1-[29-[[2-(acetylamino)-2-deoxy-beta-D-galactopyra nosyl]oxy]-14,14-bis[[3-[[3-[[5-[[2-(acetylamino)-2-deoxy-b eta-D-galactopyranosyl]oxy]-1-oxopentyl]amino]propyl]amino] -3-oxopropoxy]methyl]-1,12,19,25-tetraoxo-16-oxa-13,20,24-t riazanonacos-1-yl]-4-hydroxy-2-pyrrolidinyl)methyl ester
aagatgaagagtttagttttt

SEQ ID NO: 4108 - RNA, 21 nt, synthetic construct
  source 1..21: mol_type = other RNA
  modified_base 1: mod_base = OTHER; note = 2'-O-methyladenosine-3'-phosphorothioate
  modified_base 2: mod_base = OTHER; note = 2'-O-methylguanosine-3'-phosphorothioate
  modified_base 3: mod_base = OTHER; note = 2'-O-methyluridine-3'-phosphate
  modified_base 4: mod_base = OTHER; note = 2'-O-methyluridine-3'-phosphate
  modified_base 5: mod_base = OTHER; note = 2'-O-methyluridine-3'-phosphate
  modified_base 6: mod_base = OTHER; note = 2'-O-methyluridine-3'-phosphate
  modified_base 7: mod_base = OTHER; note = 2'-deoxy-2'-fluoroadenosine-3'-phosphate
  modified_base 8: mod_base = OTHER; note = 2'-O-methyladenosine-3'-phosphate
  modified_base 9: mod_base = OTHER; note = 2'-deoxy-2'-fluoroadenosine-3'-phosphate
  modified_base 10: mod_base = OTHER; note = 2'-deoxy-2'-fluoroadenosine-3'-phosphate
  modified_base 11: mod_base = OTHER; note = 2'-deoxy-2'-fluorocytidine-3'-phosphate
  modified_base 12: mod_base = OTHER; note = 2'-O-methyluridine-3'-phosphate
  modified_base 13: mod_base = OTHER; note = 2'-O-methylguanosine-3'-phosphate
  modified_base 14: mod_base = OTHER; note = 2'-O-methylcytidine-3'-phosphate
  modified_base 15: mod_base = OTHER; note = 2'-O-methyladenosine-3'-phosphate
  modified_base 16: mod_base = OTHER; note = 2'-O-methylcytidine-3'-phosphate
  modified_base 17: mod_base = OTHER; note = 2'-O-methyluridine-3'-phosphate
  modified_base 18: mod_base = OTHER; note = 2'-O-methylguanosine-3'-phosphate
  modified_base 19: mod_base = OTHER; note = 2'-O-methylcytidine-3'-phosphate
  modified_base 20: mod_base = OTHER; note = 2'-O-methylcytidine-3'-phosphate
  modified_base 21: mod_base = OTHER; note = 2'-O-methyluridine-3'-phosphate ((2S,4R)-1-[29-[[2-(acetylamino)-2-deoxy-beta-D-galactopyra nosyl]oxy]-14,14-bis[[3-[[3-[[5-[[2-(acetylamino)-2-deoxy-b eta-D-galactopyranosyl]oxy]-1-oxopentyl]amino]propyl]amino] -3-oxopropoxy]methyl]-1,12,19,25-tetraoxo-16-oxa-13,20,24-t riazanonacos-1-yl]-4-hydroxy-2-pyrrolidinyl)methyl ester
agttttaaaactgcactgcct

SEQ ID NO: 4109 - RNA, 21 nt, synthetic construct
  source 1..21: mol_type = other RNA
  modified_base 1: mod_base = OTHER; note = 2'-O-methyluridine-3'-phosphorothioate
  modified_base 2: mod_base = OTHER; note = 2'-O-methylguanosine-3'-phosphorothioate
  modified_base 3: mod_base = OTHER; note = 2'-O-methylcytidine-3'-phosphate
  modified_base 4: mod_base = OTHER; note = 2'-O-methylcytidine-3'-phosphate
  modified_base 5: mod_base = OTHER; note = 2'-O-methyladenosine-3'-phosphate
  modified_base 6: mod_base = OTHER; note = 2'-O-methyladenosine-3'-phosphate
  modified_base 7: mod_base = OTHER; note = 2'-deoxy-2'-fluorocytidine-3'-phosphate
  modified_base 8: mod_base = OTHER; note = 2'-O-methyladenosine-3'-phosphate
  modified_base 9: mod_base = OTHER; note = 2'-deoxy-2'-fluoroadenosine-3'-phosphate
  modified_base 10: mod_base = OTHER; note = 2'-deoxy-2'-fluoroguanosine-3'-phosphate
  modified_base 11: mod_base = OTHER; note = 2'-deoxy-2'-fluorouridine-3'-phosphate
  modified_base 12: mod_base = OTHER; note = 2'-O-methyluridine-3'-phosphate
  modified_base 13: mod_base = OTHER; note = 2'-O-methylcytidine-3'-phosphate
  modified_base 14: mod_base = OTHER; note = 2'-O-methyladenosine-3'-phosphate
  modified_base 15: mod_base = OTHER; note = 2'-O-methylcytidine-3'-phosphate
  modified_base 16: mod_base = OTHER; note = 2'-O-methyluridine-3'-phosphate
  modified_base 17: mod_base = OTHER; note = 2'-O-methyluridine-3'-phosphate
  modified_base 18: mod_base = OTHER; note = 2'-O-methylcytidine-3'-phosphate
  modified_base 19: mod_base = OTHER; note = 2'-O-methyladenosine-3'-phosphate
  modified_base 20: mod_base = OTHER; note = 2'-O-methyluridine-3'-phosphate
  modified_base 21: mod_base = OTHER; note = 2'-O-methyluridine-3'-phosphate ((2S,4R)-1-[29-[[2-(acetylamino)-2-deoxy-beta-D-galactopyra nosyl]oxy]-14,14-bis[[3-[[3-[[5-[[2-(acetylamino)-2-deoxy-b eta-D-galactopyranosyl]oxy]-1-oxopentyl]amino]propyl]amino] -3-oxopropoxy]methyl]-1,12,19,25-tetraoxo-16-oxa-13,20,24-t riazanonacos-1-yl]-4-hydroxy-2-pyrrolidinyl)methyl ester
tgccaacaagttcacttcatt

SEQ ID NO: 4110 - RNA, 21 nt, synthetic construct
  source 1..21: mol_type = other RNA
  modified_base 1: mod_base = OTHER; note = 2'-O-methylcytidine-3'-phosphorothioate
  modified_base 2: mod_base = OTHER; note = 2'-O-methyluridine-3'-phosphorothioate
  modified_base 3: mod_base = OTHER; note = 2'-O-methyluridine-3'-phosphate
  modified_base 4: mod_base = OTHER; note = 2'-O-methyluridine-3'-phosphate
  modified_base 5: mod_base = OTHER; note = 2'-O-methyluridine-3'-phosphate
  modified_base 6: mod_base = OTHER; note = 2'-O-methylguanosine-3'-phosphate
  modified_base 7: mod_base = OTHER; note = 2'-deoxy-2'-fluoroadenosine-3'-phosphate
  modified_base 8: mod_base = OTHER; note = 2'-O-methylguanosine-3'-phosphate
  modified_base 9: mod_base = OTHER; note = 2'-deoxy-2'-fluoroguanosine-3'-phosphate
  modified_base 10: mod_base = OTHER; note = 2'-deoxy-2'-fluorouridine-3'-phosphate
  modified_base 11: mod_base = OTHER; note = 2'-deoxy-2'-fluoroguanosine-3'-phosphate
  modified_base 12: mod_base = OTHER; note = 2'-O-methyladenosine-3'-phosphate
  modified_base 13: mod_base = OTHER; note = 2'-O-methyladenosine-3'-phosphate
  modified_base 14: mod_base = OTHER; note = 2'-O-methyluridine-3'-phosphate
  modified_base 15: mod_base = OTHER; note = 2'-O-methyladenosine-3'-phosphate
  modified_base 16: mod_base = OTHER; note = 2'-O-methyluridine-3'-phosphate
  modified_base 17: mod_base = OTHER; note = 2'-O-methyladenosine-3'-phosphate
  modified_base 18: mod_base = OTHER; note = 2'-O-methyladenosine-3'-phosphate
  modified_base 19: mod_base = OTHER; note = 2'-O-methyluridine-3'-phosphate
  modified_base 20: mod_base = OTHER; note = 2'-O-methyluridine-3'-phosphate
  modified_base 21: mod_base = OTHER; note = 2'-O-methyluridine-3'-phosphate ((2S,4R)-1-[29-[[2-(acetylamino)-2-deoxy-beta-D-galactopyra nosyl]oxy]-14,14-bis[[3-[[3-[[5-[[2-(acetylamino)-2-deoxy-b eta-D-galactopyranosyl]oxy]-1-oxopentyl]amino]propyl]amino] -3-oxopropoxy]methyl]-1,12,19,25-tetraoxo-16-oxa-13,20,24-t riazanonacos-1-yl]-4-hydroxy-2-pyrrolidinyl)methyl ester
cttttgaggtgaatataattt

SEQ ID NO: 4111 - RNA, 21 nt, synthetic construct
  source 1..21: mol_type = other RNA
  modified_base 1: mod_base = OTHER; note = 2'-O-methyladenosine-3'-phosphorothioate
  modified_base 2: mod_base = OTHER; note = 2'-O-methyladenosine-3'-phosphorothioate
  modified_base 3: mod_base = OTHER; note = 2'-O-methylguanosine-3'-phosphate
  modified_base 4: mod_base = OTHER; note = 2'-O-methyluridine-3'-phosphate
  modified_base 5: mod_base = OTHER; note = 2'-O-methyladenosine-3'-phosphate
  modified_base 6: mod_base = OTHER; note = 2'-O-methyluridine-3'-phosphate
  modified_base 7: mod_base = OTHER; note = 2'-deoxy-2'-fluorouridine-3'-phosphate
  modified_base 8: mod_base = OTHER; note = 2'-O-methyluridine-3'-phosphate
  modified_base 9: mod_base = OTHER; note = 2'-deoxy-2'-fluorouridine-3'-phosphate
  modified_base 10: mod_base = OTHER; note = 2'-deoxy-2'-fluorouridine-3'-phosphate
  modified_base 11: mod_base = OTHER; note = 2'-deoxy-2'-fluorocytidine-3'-phosphate
  modified_base 12: mod_base = OTHER; note = 2'-O-methyladenosine-3'-phosphate
  modified_base 13: mod_base = OTHER; note = 2'-O-methylguanosine-3'-phosphate
  modified_base 14: mod_base = OTHER; note = 2'-O-methylguanosine-3'-phosphate
  modified_base 15: mod_base = OTHER; note = 2'-O-methyluridine-3'-phosphate
  modified_base 16: mod_base = OTHER; note = 2'-O-methylcytidine-3'-phosphate
  modified_base 17: mod_base = OTHER; note = 2'-O-methyluridine-3'-phosphate
  modified_base 18: mod_base = OTHER; note = 2'-O-methyluridine-3'-phosphate
  modified_base 19: mod_base = OTHER; note = 2'-O-methylcytidine-3'-phosphate
  modified_base 20: mod_base = OTHER; note = 2'-O-methyladenosine-3'-phosphate
  modified_base 21: mod_base = OTHER; note = 2'-O-methyluridine-3'-phosphate ((2S,4R)-1-[29-[[2-(acetylamino)-2-deoxy-beta-D-galactopyra nosyl]oxy]-14,14-bis[[3-[[3-[[5-[[2-(acetylamino)-2-deoxy-b eta-D-galactopyranosyl]oxy]-1-oxopentyl]amino]propyl]amino] -3-oxopropoxy]methyl]-1,12,19,25-tetraoxo-16-oxa-13,20,24-t riazanonacos-1-yl]-4-hydroxy-2-pyrrolidinyl)methyl ester
aagtatttttcaggtcttcat

SEQ ID NO: 4112 - RNA, 21 nt, synthetic construct
  source 1..21: mol_type = other RNA
  modified_base 1: mod_base = OTHER; note = 2'-O-methyluridine-3'-phosphorothioate
  modified_base 2: mod_base = OTHER; note = 2'-O-methyluridine-3'-phosphorothioate
  modified_base 3: mod_base = OTHER; note = 2'-O-methylcytidine-3'-phosphate
  modified_base 4: mod_base = OTHER; note = 2'-O-methyladenosine-3'-phosphate
  modified_base 5: mod_base = OTHER; note = 2'-O-methylcytidine-3'-phosphate
  modified_base 6: mod_base = OTHER; note = 2'-O-methylcytidine-3'-phosphate
  modified_base 7: mod_base = OTHER; note = 2'-deoxy-2'-fluoroadenosine-3'-phosphate
  modified_base 8: mod_base = OTHER; note = 2'-O-methyladenosine-3'-phosphate
  modified_base 9: mod_base = OTHER; note = 2'-deoxy-2'-fluoroguanosine-3'-phosphate
  modified_base 10: mod_base = OTHER; note = 2'-deoxy-2'-fluorouridine-3'-phosphate
  modified_base 11: mod_base = OTHER; note = 2'-deoxy-2'-fluoroadenosine-3'-phosphate
  modified_base 12: mod_base = OTHER; note = 2'-O-methyluridine-3'-phosphate
  modified_base 13: mod_base = OTHER; note = 2'-O-methylcytidine-3'-phosphate
  modified_base 14: mod_base = OTHER; note = 2'-O-methyladenosine-3'-phosphate
  modified_base 15: mod_base = OTHER; note = 2'-O-methyladenosine-3'-phosphate
  modified_base 16: mod_base = OTHER; note = 2'-O-methyladenosine-3'-phosphate
  modified_base 17: mod_base = OTHER; note = 2'-O-methylguanosine-3'-phosphate
  modified_base 18: mod_base = OTHER; note = 2'-O-methyluridine-3'-phosphate
  modified_base 19: mod_base = OTHER; note = 2'-O-methyladenosine-3'-phosphate
  modified_base 20: mod_base = OTHER; note = 2'-O-methyladenosine-3'-phosphate
  modified_base 21: mod_base = OTHER; note = 2'-O-methyluridine-3'-phosphate ((2S,4R)-1-[29-[[2-(acetylamino)-2-deoxy-beta-D-galactopyra nosyl]oxy]-14,14-bis[[3-[[3-[[5-[[2-(acetylamino)-2-deoxy-b eta-D-galactopyranosyl]oxy]-1-oxopentyl]amino]propyl]amino] -3-oxopropoxy]methyl]-1,12,19,25-tetraoxo-16-oxa-13,20,24-t riazanonacos-1-yl]-4-hydroxy-2-pyrrolidinyl)methyl ester
ttcaccaagtatcaaagtaat

SEQ ID NO: 4113 - RNA, 21 nt, synthetic construct
  source 1..21: mol_type = other RNA
  modified_base 1: mod_base = OTHER; note = 2'-O-methyladenosine-3'-phosphorothioate
  modified_base 2: mod_base = OTHER; note = 2'-O-methyladenosine-3'-phosphorothioate
  modified_base 3: mod_base = OTHER; note = 2'-O-methylguanosine-3'-phosphate
  modified_base 4: mod_base = OTHER; note = 2'-O-methyluridine-3'-phosphate
  modified_base 5: mod_base = OTHER; note = 2'-O-methyladenosine-3'-phosphate
  modified_base 6: mod_base = OTHER; note = 2'-O-methyladenosine-3'-phosphate
  modified_base 7: mod_base = OTHER; note = 2'-deoxy-2'-fluorouridine-3'-phosphate
  modified_base 8: mod_base = OTHER; note = 2'-O-methyladenosine-3'-phosphate
  modified_base 9: mod_base = OTHER; note = 2'-deoxy-2'-fluoroadenosine-3'-phosphate
  modified_base 10: mod_base = OTHER; note = 2'-deoxy-2'-fluorocytidine-3'-phosphate
  modified_base 11: mod_base = OTHER; note = 2'-deoxy-2'-fluoroadenosine-3'-phosphate
  modified_base 12: mod_base = OTHER; note = 2'-O-methylcytidine-3'-phosphate
  modified_base 13: mod_base = OTHER; note = 2'-O-methyladenosine-3'-phosphate
  modified_base 14: mod_base = OTHER; note = 2'-O-methyladenosine-3'-phosphate
  modified_base 15: mod_base = OTHER; note = 2'-O-methyladenosine-3'-phosphate
  modified_base 16: mod_base = OTHER; note = 2'-O-methyluridine-3'-phosphate
  modified_base 17: mod_base = OTHER; note = 2'-O-methylguanosine-3'-phosphate
  modified_base 18: mod_base = OTHER; note = 2'-O-methyladenosine-3'-phosphate
  modified_base 19: mod_base = OTHER; note = 2'-O-methyladenosine-3'-phosphate
  modified_base 20: mod_base = OTHER; note = 2'-O-methylguanosine-3'-phosphate
  modified_base 21: mod_base = OTHER; note = 2'-O-methyluridine-3'-phosphate ((2S,4R)-1-[29-[[2-(acetylamino)-2-deoxy-beta-D-galactopyra nosyl]oxy]-14,14-bis[[3-[[3-[[5-[[2-(acetylamino)-2-deoxy-b eta-D-galactopyranosyl]oxy]-1-oxopentyl]amino]propyl]amino] -3-oxopropoxy]methyl]-1,12,19,25-tetraoxo-16-oxa-13,20,24-t riazanonacos-1-yl]-4-hydroxy-2-pyrrolidinyl)methyl ester
aagtaataacacaaatgaagt

SEQ ID NO: 4114 - RNA, 21 nt, synthetic construct
  source 1..21: mol_type = other RNA
  modified_base 1: mod_base = OTHER; note = 2'-O-methyladenosine-3'-phosphorothioate
  modified_base 2: mod_base = OTHER; note = 2'-O-methyladenosine-3'-phosphorothioate
  modified_base 3: mod_base = OTHER; note = 2'-O-methyluridine-3'-phosphate
  modified_base 4: mod_base = OTHER; note = 2'-O-methylguanosine-3'-phosphate
  modified_base 5: mod_base = OTHER; note = 2'-O-methyladenosine-3'-phosphate
  modified_base 6: mod_base = OTHER; note = 2'-O-methyladenosine-3'-phosphate
  modified_base 7: mod_base = OTHER; note = 2'-deoxy-2'-fluoroguanosine-3'-phosphate
  modified_base 8: mod_base = OTHER; note = 2'-O-methyluridine-3'-phosphate
  modified_base 9: mod_base = OTHER; note = 2'-deoxy-2'-fluoroguanosine-3'-phosphate
  modified_base 10: mod_base = OTHER; note = 2'-deoxy-2'-fluorouridine-3'-phosphate
  modified_base 11: mod_base = OTHER; note = 2'-deoxy-2'-fluorocytidine-3'-phosphate
  modified_base 12: mod_base = OTHER; note = 2'-O-methyladenosine-3'-phosphate
  modified_base 13: mod_base = OTHER; note = 2'-O-methyluridine-3'-phosphate
  modified_base 14: mod_base = OTHER; note = 2'-O-methyluridine-3'-phosphate
  modified_base 15: mod_base = OTHER; note = 2'-O-methyladenosine-3'-phosphate
  modified_base 16: mod_base = OTHER; note = 2'-O-methyluridine-3'-phosphate
  modified_base 17: mod_base = OTHER; note = 2'-O-methyluridine-3'-phosphate
  modified_base 18: mod_base = OTHER; note = 2'-O-methylcytidine-3'-phosphate
  modified_base 19: mod_base = OTHER; note = 2'-O-methyladenosine-3'-phosphate
  modified_base 20: mod_base = OTHER; note = 2'-O-methyladenosine-3'-phosphate
  modified_base 21: mod_base = OTHER; note = 2'-O-methyluridine-3'-phosphate ((2S,4R)-1-[29-[[2-(acetylamino)-2-deoxy-beta-D-galactopyra nosyl]oxy]-14,14-bis[[3-[[3-[[5-[[2-(acetylamino)-2-deoxy-b eta-D-galactopyranosyl]oxy]-1-oxopentyl]amino]propyl]amino] -3-oxopropoxy]methyl]-1,12,19,25-tetraoxo-16-oxa-13,20,24-t riazanonacos-1-yl]-4-hydroxy-2-pyrrolidinyl)methyl ester
aatgaagtgtcattattcaat

SEQ ID NO: 4115 - RNA, 21 nt, synthetic construct
  source 1..21: mol_type = other RNA
  modified_base 1: mod_base = OTHER; note = 2'-O-methyluridine-3'-phosphorothioate
  modified_base 2: mod_base = OTHER; note = 2'-O-methylcytidine-3'-phosphorothioate
  modified_base 3: mod_base = OTHER; note = 2'-O-methyladenosine-3'-phosphate
  modified_base 4: mod_base = OTHER; note = 2'-O-methyladenosine-3'-phosphate
  modified_base 5: mod_base = OTHER; note = 2'-O-methyladenosine-3'-phosphate
  modified_base 6: mod_base = OTHER; note = 2'-O-methyladenosine-3'-phosphate
  modified_base 7: mod_base = OTHER; note = 2'-deoxy-2'-fluorouridine-3'-phosphate
  modified_base 8: mod_base = OTHER; note = 2'-O-methyladenosine-3'-phosphate
  modified_base 9: mod_base = OTHER; note = 2'-deoxy-2'-fluoroguanosine-3'-phosphate
  modified_base 10: mod_base = OTHER; note = 2'-deoxy-2'-fluorouridine-3'-phosphate
  modified_base 11: mod_base = OTHER; note = 2'-deoxy-2'-fluorocytidine-3'-phosphate
  modified_base 12: mod_base = OTHER; note = 2'-O-methylcytidine-3'-phosphate
  modified_base 13: mod_base = OTHER; note = 2'-O-methyladenosine-3'-phosphate
  modified_base 14: mod_base = OTHER; note = 2'-O-methylcytidine-3'-phosphate
  modified_base 15: mod_base = OTHER; note = 2'-O-methyluridine-3'-phosphate
  modified_base 16: mod_base = OTHER; note = 2'-O-methylguanosine-3'-phosphate
  modified_base 17: mod_base = OTHER; note = 2'-O-methyladenosine-3'-phosphate
  modified_base 18: mod_base = OTHER; note = 2'-O-methylcytidine-3'-phosphate
  modified_base 19: mod_base = OTHER; note = 2'-O-methyluridine-3'-phosphate
  modified_base 20: mod_base = OTHER; note = 2'-O-methylcytidine-3'-phosphate
  modified_base 21: mod_base = OTHER; note = 2'-O-methyluridine-3'-phosphate ((2S,4R)-1-[29-[[2-(acetylamino)-2-deoxy-beta-D-galactopyra nosyl]oxy]-14,14-bis[[3-[[3-[[5-[[2-(acetylamino)-2-deoxy-b eta-D-galactopyranosyl]oxy]-1-oxopentyl]amino]propyl]amino] -3-oxopropoxy]methyl]-1,12,19,25-tetraoxo-16-oxa-13,20,24-t riazanonacos-1-yl]-4-hydroxy-2-pyrrolidinyl)methyl ester
tcaaaatagtccactgactct

SEQ ID NO: 4116 - RNA, 21 nt, synthetic construct
  source 1..21: mol_type = other RNA
  modified_base 1: mod_base = OTHER; note = 2'-O-methylcytidine-3'-phosphorothioate
  modified_base 2: mod_base = OTHER; note = 2'-O-methylcytidine-3'-phosphorothioate
  modified_base 3: mod_base = OTHER; note = 2'-O-methyluridine-3'-phosphate
  modified_base 4: mod_base = OTHER; note = 2'-O-methylcytidine-3'-phosphate
  modified_base 5: mod_base = OTHER; note = 2'-O-methyladenosine-3'-phosphate
  modified_base 6: mod_base = OTHER; note = 2'-O-methylcytidine-3'-phosphate
  modified_base 7: mod_base = OTHER; note = 2'-deoxy-2'-fluoroadenosine-3'-phosphate
  modified_base 8: mod_base = OTHER; note = 2'-O-methyluridine-3'-phosphate
  modified_base 9: mod_base = OTHER; note = 2'-deoxy-2'-fluorocytidine-3'-phosphate
  modified_base 10: mod_base = OTHER; note = 2'-deoxy-2'-fluorouridine-3'-phosphate
  modified_base 11: mod_base = OTHER; note = 2'-deoxy-2'-fluoroguanosine-3'-phosphate
  modified_base 12: mod_base = OTHER; note = 2'-O-methyluridine-3'-phosphate
  modified_base 13: mod_base = OTHER; note = 2'-O-methyluridine-3'-phosphate
  modified_base 14: mod_base = OTHER; note = 2'-O-methyladenosine-3'-phosphate
  modified_base 15: mod_base = OTHER; note = 2'-O-methyluridine-3'-phosphate
  modified_base 16: mod_base = OTHER; note = 2'-O-methylcytidine-3'-phosphate
  modified_base 17: mod_base = OTHER; note = 2'-O-methyluridine-3'-phosphate
  modified_base 18: mod_base = OTHER; note = 2'-O-methyluridine-3'-phosphate
  modified_base 19: mod_base = OTHER; note = 2'-O-methyladenosine-3'-phosphate
  modified_base 20: mod_base = OTHER; note = 2'-O-methyluridine-3'-phosphate
  modified_base 21: mod_base = OTHER; note = 2'-O-methyluridine-3'-phosphate ((2S,4R)-1-[29-[[2-(acetylamino)-2-deoxy-beta-D-galactopyra nosyl]oxy]-14,14-bis[[3-[[3-[[5-[[2-(acetylamino)-2-deoxy-b eta-D-galactopyranosyl]oxy]-1-oxopentyl]amino]propyl]amino] -3-oxopropoxy]methyl]-1,12,19,25-tetraoxo-16-oxa-13,20,24-t riazanonacos-1-yl]-4-hydroxy-2-pyrrolidinyl)methyl ester
cctcacatctgttatcttatt

SEQ ID NO: 4117 - RNA, 21 nt, synthetic construct
  source 1..21: mol_type = other RNA
  modified_base 1: mod_base = OTHER; note = 2'-O-methyladenosine-3'-phosphorothioate
  modified_base 2: mod_base = OTHER; note = 2'-O-methyladenosine-3'-phosphorothioate
  modified_base 3: mod_base = OTHER; note = 2'-O-methylcytidine-3'-phosphate
  modified_base 4: mod_base = OTHER; note = 2'-O-methyluridine-3'-phosphate
  modified_base 5: mod_base = OTHER; note = 2'-O-methyladenosine-3'-phosphate
  modified_base 6: mod_base = OTHER; note = 2'-O-methyluridine-3'-phosphate
  modified_base 7: mod_base = OTHER; note = 2'-deoxy-2'-fluorouridine-3'-phosphate
  modified_base 8: mod_base = OTHER; note = 2'-O-methyluridine-3'-phosphate
  modified_base 9: mod_base = OTHER; note = 2'-deoxy-2'-fluoroguanosine-3'-phosphate
  modified_base 10: mod_base = OTHER; note = 2'-deoxy-2'-fluorouridine-3'-phosphate
  modified_base 11: mod_base = OTHER; note = 2'-deoxy-2'-fluoroadenosine-3'-phosphate
  modified_base 12: mod_base = OTHER; note = 2'-O-methylguanosine-3'-phosphate
  modified_base 13: mod_base = OTHER; note = 2'-O-methyluridine-3'-phosphate
  modified_base 14: mod_base = OTHER; note = 2'-O-methyladenosine-3'-phosphate
  modified_base 15: mod_base = OTHER; note = 2'-O-methyladenosine-3'-phosphate
  modified_base 16: mod_base = OTHER; note = 2'-O-methylcytidine-3'-phosphate
  modified_base 17: mod_base = OTHER; note = 2'-O-methyluridine-3'-phosphate
  modified_base 18: mod_base = OTHER; note = 2'-O-methyladenosine-3'-phosphate
  modified_base 19: mod_base = OTHER; note = 2'-O-methyluridine-3'-phosphate
  modified_base 20: mod_base = OTHER; note = 2'-O-methylcytidine-3'-phosphate
  modified_base 21: mod_base = OTHER; note = 2'-O-methyluridine-3'-phosphate ((2S,4R)-1-[29-[[2-(acetylamino)-2-deoxy-beta-D-galactopyra nosyl]oxy]-14,14-bis[[3-[[3-[[5-[[2-(acetylamino)-2-deoxy-b eta-D-galactopyranosyl]oxy]-1-oxopentyl]amino]propyl]amino] -3-oxopropoxy]methyl]-1,12,19,25-tetraoxo-16-oxa-13,20,24-t riazanonacos-1-yl]-4-hydroxy-2-pyrrolidinyl)methyl ester
aactatttgtagtaactatct

SEQ ID NO: 4118 - RNA, 21 nt, synthetic construct
  source 1..21: mol_type = other RNA
  modified_base 1: mod_base = OTHER; note = 2'-O-methyluridine-3'-phosphorothioate
  modified_base 2: mod_base = OTHER; note = 2'-O-methyladenosine-3'-phosphorothioate
  modified_base 3: mod_base = OTHER; note = 2'-O-methyluridine-3'-phosphate
  modified_base 4: mod_base = OTHER; note = 2'-O-methylcytidine-3'-phosphate
  modified_base 5: mod_base = OTHER; note = 2'-O-methyladenosine-3'-phosphate
  modified_base 6: mod_base = OTHER; note = 2'-O-methylguanosine-3'-phosphate
  modified_base 7: mod_base = OTHER; note = 2'-deoxy-2'-fluoroadenosine-3'-phosphate
  modified_base 8: mod_base = OTHER; note = 2'-O-methyladenosine-3'-phosphate
  modified_base 9: mod_base = OTHER; note = 2'-deoxy-2'-fluorouridine-3'-phosphate
  modified_base 10: mod_base = OTHER; note = 2'-deoxy-2'-fluorocytidine-3'-phosphate
  modified_base 11: mod_base = OTHER; note = 2'-deoxy-2'-fluorouridine-3'-phosphate
  modified_base 12: mod_base = OTHER; note = 2'-O-methyladenosine-3'-phosphate
  modified_base 13: mod_base = OTHER; note = 2'-O-methylcytidine-3'-phosphate
  modified_base 14: mod_base = OTHER; note = 2'-O-methyladenosine-3'-phosphate
  modified_base 15: mod_base = OTHER; note = 2'-O-methyluridine-3'-phosphate
  modified_base 16: mod_base = OTHER; note = 2'-O-methyluridine-3'-phosphate
  modified_base 17: mod_base = OTHER; note = 2'-O-methylcytidine-3'-phosphate
  modified_base 18: mod_base = OTHER; note = 2'-O-methyluridine-3'-phosphate
  modified_base 19: mod_base = OTHER; note = 2'-O-methyladenosine-3'-phosphate
  modified_base 20: mod_base = OTHER; note = 2'-O-methyladenosine-3'-phosphate
  modified_base 21: mod_base = OTHER; note = 2'-O-methyluridine-3'-phosphate ((2S,4R)-1-[29-[[2-(acetylamino)-2-deoxy-beta-D-galactopyra nosyl]oxy]-14,14-bis[[3-[[3-[[5-[[2-(acetylamino)-2-deoxy-b eta-D-galactopyranosyl]oxy]-1-oxopentyl]amino]propyl]amino] -3-oxopropoxy]methyl]-1,12,19,25-tetraoxo-16-oxa-13,20,24-t riazanonacos-1-yl]-4-hydroxy-2-pyrrolidinyl)methyl ester
tatcagaatctacattctaat

SEQ ID NO: 4119 - RNA, 21 nt, synthetic construct
  source 1..21: mol_type = other RNA
  modified_base 1: mod_base = OTHER; note = 2'-O-methyluridine-3'-phosphorothioate
  modified_base 2: mod_base = OTHER; note = 2'-O-methyluridine-3'-phosphorothioate
  modified_base 3: mod_base = OTHER; note = 2'-O-methylguanosine-3'-phosphate
  modified_base 4: mod_base = OTHER; note = 2'-O-methyluridine-3'-phosphate
  modified_base 5: mod_base = OTHER; note = 2'-O-methyladenosine-3'-phosphate
  modified_base 6: mod_base = OTHER; note = 2'-O-methyluridine-3'-phosphate
  modified_base 7: mod_base = OTHER; note = 2'-deoxy-2'-fluorouridine-3'-phosphate
  modified_base 8: mod_base = OTHER; note = 2'-O-methyluridine-3'-phosphate
  modified_base 9: mod_base = OTHER; note = 2'-deoxy-2'-fluorouridine-3'-phosphate
  modified_base 10: mod_base = OTHER; note = 2'-deoxy-2'-fluorouridine-3'-phosphate
  modified_base 11: mod_base = OTHER; note = 2'-deoxy-2'-fluorouridine-3'-phosphate
  modified_base 12: mod_base = OTHER; note = 2'-O-methylcytidine-3'-phosphate
  modified_base 13: mod_base = OTHER; note = 2'-O-methyluridine-3'-phosphate
  modified_base 14: mod_base = OTHER; note = 2'-O-methyladenosine-3'-phosphate
  modified_base 15: mod_base = OTHER; note = 2'-O-methyluridine-3'-phosphate
  modified_base 16: mod_base = OTHER; note = 2'-O-methylguanosine-3'-phosphate
  modified_base 17: mod_base = OTHER; note = 2'-O-methylcytidine-3'-phosphate
  modified_base 18: mod_base = OTHER; note = 2'-O-methylcytidine-3'-phosphate
  modified_base 19: mod_base = OTHER; note = 2'-O-methyladenosine-3'-phosphate
  modified_base 20: mod_base = OTHER; note = 2'-O-methylcytidine-3'-phosphate
  modified_base 21: mod_base = OTHER; note = 2'-O-methyluridine-3'-phosphate ((2S,4R)-1-[29-[[2-(acetylamino)-2-deoxy-beta-D-galactopyra nosyl]oxy]-14,14-bis[[3-[[3-[[5-[[2-(acetylamino)-2-deoxy-b eta-D-galactopyranosyl]oxy]-1-oxopentyl]amino]propyl]amino] -3-oxopropoxy]methyl]-1,12,19,25-tetraoxo-16-oxa-13,20,24-t riazanonacos-1-yl]-4-hydroxy-2-pyrrolidinyl)methyl ester
ttgtattttttctatgccact

SEQ ID NO: 4120 - RNA, 21 nt, synthetic construct
  source 1..21: mol_type = other RNA
  modified_base 1: mod_base = OTHER; note = 2'-O-methyladenosine-3'-phosphorothioate
  modified_base 2: mod_base = OTHER; note = 2'-O-methyluridine-3'-phosphorothioate
  modified_base 3: mod_base = OTHER; note = 2'-O-methylguanosine-3'-phosphate
  modified_base 4: mod_base = OTHER; note = 2'-O-methylcytidine-3'-phosphate
  modified_base 5: mod_base = OTHER; note = 2'-O-methylcytidine-3'-phosphate
  modified_base 6: mod_base = OTHER; note = 2'-O-methyladenosine-3'-phosphate
  modified_base 7: mod_base = OTHER; note = 2'-deoxy-2'-fluorocytidine-3'-phosphate
  modified_base 8: mod_base = OTHER; note = 2'-O-methyladenosine-3'-phosphate
  modified_base 9: mod_base = OTHER; note = 2'-deoxy-2'-fluorouridine-3'-phosphate
  modified_base 10: mod_base = OTHER; note = 2'-deoxy-2'-fluorouridine-3'-phosphate
  modified_base 11: mod_base = OTHER; note = 2'-deoxy-2'-fluoroadenosine-3'-phosphate
  modified_base 12: mod_base = OTHER; note = 2'-O-methyladenosine-3'-phosphate
  modified_base 13: mod_base = OTHER; note = 2'-O-methylcytidine-3'-phosphate
  modified_base 14: mod_base = OTHER; note = 2'-O-methyladenosine-3'-phosphate
  modified_base 15: mod_base = OTHER; note = 2'-O-methyluridine-3'-phosphate
  modified_base 16: mod_base = OTHER; note = 2'-O-methylcytidine-3'-phosphate
  modified_base 17: mod_base = OTHER; note = 2'-O-methyluridine-3'-phosphate
  modified_base 18: mod_base = OTHER; note = 2'-O-methyluridine-3'-phosphate
  modified_base 19: mod_base = OTHER; note = 2'-O-methyluridine-3'-phosphate
  modified_base 20: mod_base = OTHER; note = 2'-O-methyluridine-3'-phosphate
  modified_base 21: mod_base = OTHER; note = 2'-O-methyluridine-3'-phosphate ((2S,4R)-1-[29-[[2-(acetylamino)-2-deoxy-beta-D-galactopyra nosyl]oxy]-14,14-bis[[3-[[3-[[5-[[2-(acetylamino)-2-deoxy-b eta-D-galactopyranosyl]oxy]-1-oxopentyl]amino]propyl]amino] -3-oxopropoxy]methyl]-1,12,19,25-tetraoxo-16-oxa-13,20,24-t riazanonacos-1-yl]-4-hydroxy-2-pyrrolidinyl)methyl ester
atgccacattaacatcttttt

SEQ ID NO: 4121 - RNA, 21 nt, synthetic construct
  source 1..21: mol_type = other RNA
  modified_base 1: mod_base = OTHER; note = 2'-O-methyluridine-3'-phosphorothioate
  modified_base 2: mod_base = OTHER; note = 2'-O-methylcytidine-3'-phosphorothioate
  modified_base 3: mod_base = OTHER; note = 2'-O-methyluridine-3'-phosphate
  modified_base 4: mod_base = OTHER; note = 2'-O-methyluridine-3'-phosphate
  modified_base 5: mod_base = OTHER; note = 2'-O-methyluridine-3'-phosphate
  modified_base 6: mod_base = OTHER; note = 2'-O-methyluridine-3'-phosphate
  modified_base 7: mod_base = OTHER; note = 2'-deoxy-2'-fluoroadenosine-3'-phosphate
  modified_base 8: mod_base = OTHER; note = 2'-O-methyladenosine-3'-phosphate
  modified_base 9: mod_base = OTHER; note = 2'-deoxy-2'-fluoroadenosine-3'-phosphate
  modified_base 10: mod_base = OTHER; note = 2'-deoxy-2'-fluoroguanosine-3'-phosphate
  modified_base 11: mod_base = OTHER; note = 2'-deoxy-2'-fluorouridine-3'-phosphate
  modified_base 12: mod_base = OTHER; note = 2'-O-methyluridine-3'-phosphate
  modified_base 13: mod_base = OTHER; note = 2'-O-methylguanosine-3'-phosphate
  modified_base 14: mod_base = OTHER; note = 2'-O-methyladenosine-3'-phosphate
  modified_base 15: mod_base = OTHER; note = 2'-O-methyluridine-3'-phosphate
  modified_base 16: mod_base = OTHER; note = 2'-O-methylguanosine-3'-phosphate
  modified_base 17: mod_base = OTHER; note = 2'-O-methyladenosine-3'-phosphate
  modified_base 18: mod_base = OTHER; note = 2'-O-methylguanosine-3'-phosphate
  modified_base 19: mod_base = OTHER; note = 2'-O-methyladenosine-3'-phosphate
  modified_base 20: mod_base = OTHER; note = 2'-O-methyladenosine-3'-phosphate
  modified_base 21: mod_base = OTHER; note = 2'-O-methyluridine-3'-phosphate ((2S,4R)-1-[29-[[2-(acetylamino)-2-deoxy-beta-D-galactopyra nosyl]oxy]-14,14-bis[[3-[[3-[[5-[[2-(acetylamino)-2-deoxy-b eta-D-galactopyranosyl]oxy]-1-oxopentyl]amino]propyl]amino] -3-oxopropoxy]methyl]-1,12,19,25-tetraoxo-16-oxa-13,20,24-t riazanonacos-1-yl]-4-hydroxy-2-pyrrolidinyl)methyl ester
tcttttaaagttgatgagaat

SEQ ID NO: 4122 - RNA, 21 nt, synthetic construct
  source 1..21: mol_type = other RNA
  modified_base 1: mod_base = OTHER; note = 2'-O-methyladenosine-3'-phosphorothioate
  modified_base 2: mod_base = OTHER; note = 2'-O-methyluridine-3'-phosphorothioate
  modified_base 3: mod_base = OTHER; note = 2'-O-methylguanosine-3'-phosphate
  modified_base 4: mod_base = OTHER; note = 2'-O-methyladenosine-3'-phosphate
  modified_base 5: mod_base = OTHER; note = 2'-O-methylguanosine-3'-phosphate
  modified_base 6: mod_base = OTHER; note = 2'-O-methyladenosine-3'-phosphate
  modified_base 7: mod_base = OTHER; note = 2'-deoxy-2'-fluoroadenosine-3'-phosphate
  modified_base 8: mod_base = OTHER; note = 2'-O-methyluridine-3'-phosphate
  modified_base 9: mod_base = OTHER; note = 2'-deoxy-2'-fluorocytidine-3'-phosphate
  modified_base 10: mod_base = OTHER; note = 2'-deoxy-2'-fluoroadenosine-3'-phosphate
  modified_base 11: mod_base = OTHER; note = 2'-deoxy-2'-fluoroadenosine-3'-phosphate
  modified_base 12: mod_base = OTHER; note = 2'-O-methylguanosine-3'-phosphate
  modified_base 13: mod_base = OTHER; note = 2'-O-methyluridine-3'-phosphate
  modified_base 14: mod_base = OTHER; note = 2'-O-methyladenosine-3'-phosphate
  modified_base 15: mod_base = OTHER; note = 2'-O-methyluridine-3'-phosphate
  modified_base 16: mod_base = OTHER; note = 2'-O-methylguanosine-3'-phosphate
  modified_base 17: mod_base = OTHER; note = 2'-O-methylguanosine-3'-phosphate
  modified_base 18: mod_base = OTHER; note = 2'-O-methyladenosine-3'-phosphate
  modified_base 19: mod_base = OTHER; note = 2'-O-methyladenosine-3'-phosphate
  modified_base 20: mod_base = OTHER; note = 2'-O-methyladenosine-3'-phosphate
  modified_base 21: mod_base = OTHER; note = 2'-O-methyluridine-3'-phosphate ((2S,4R)-1-[29-[[2-(acetylamino)-2-deoxy-beta-D-galactopyra nosyl]oxy]-14,14-bis[[3-[[3-[[5-[[2-(acetylamino)-2-deoxy-b eta-D-galactopyranosyl]oxy]-1-oxopentyl]amino]propyl]amino] -3-oxopropoxy]methyl]-1,12,19,25-tetraoxo-16-oxa-13,20,24-t riazanonacos-1-yl]-4-hydroxy-2-pyrrolidinyl)methyl ester
atgagaatcaagtatggaaat

SEQ ID NO: 4123 - RNA, 21 nt, synthetic construct
  source 1..21: mol_type = other RNA
  modified_base 1: mod_base = OTHER; note = 2'-O-methyladenosine-3'-phosphorothioate
  modified_base 2: mod_base = OTHER; note = 2'-O-methyluridine-3'-phosphorothioate
  modified_base 3: mod_base = OTHER; note = 2'-O-methylguanosine-3'-phosphate
  modified_base 4: mod_base = OTHER; note = 2'-O-methylguanosine-3'-phosphate
  modified_base 5: mod_base = OTHER; note = 2'-O-methyladenosine-3'-phosphate
  modified_base 6: mod_base = OTHER; note = 2'-O-methyladenosine-3'-phosphate
  modified_base 7: mod_base = OTHER; note = 2'-deoxy-2'-fluoroadenosine-3'-phosphate
  modified_base 8: mod_base = OTHER; note = 2'-O-methyladenosine-3'-phosphate
  modified_base 9: mod_base = OTHER; note = 2'-deoxy-2'-fluoroguanosine-3'-phosphate
  modified_base 10: mod_base = OTHER; note = 2'-deoxy-2'-fluorouridine-3'-phosphate
  modified_base 11: mod_base = OTHER; note = 2'-deoxy-2'-fluoroadenosine-3'-phosphate
  modified_base 12: mod_base = OTHER; note = 2'-O-methyladenosine-3'-phosphate
  modified_base 13: mod_base = OTHER; note = 2'-O-methylguanosine-3'-phosphate
  modified_base 14: mod_base = OTHER; note = 2'-O-methylguanosine-3'-phosphate
  modified_base 15: mod_base = OTHER; note = 2'-O-methylcytidine-3'-phosphate
  modified_base 16: mod_base = OTHER; note = 2'-O-methylcytidine-3'-phosphate
  modified_base 17: mod_base = OTHER; note = 2'-O-methyladenosine-3'-phosphate
  modified_base 18: mod_base = OTHER; note = 2'-O-methyluridine-3'-phosphate
  modified_base 19: mod_base = OTHER; note = 2'-O-methyladenosine-3'-phosphate
  modified_base 20: mod_base = OTHER; note = 2'-O-methylcytidine-3'-phosphate
  modified_base 21: mod_base = OTHER; note = 2'-O-methyluridine-3'-phosphate ((2S,4R)-1-[29-[[2-(acetylamino)-2-deoxy-beta-D-galactopyra nosyl]oxy]-14,14-bis[[3-[[3-[[5-[[2-(acetylamino)-2-deoxy-b eta-D-galactopyranosyl]oxy]-1-oxopentyl]amino]propyl]amino] -3-oxopropoxy]methyl]-1,12,19,25-tetraoxo-16-oxa-13,20,24-t riazanonacos-1-yl]-4-hydroxy-2-pyrrolidinyl)methyl ester
atggaaaagtaaggccatact

SEQ ID NO: 4124 - RNA, 21 nt, synthetic construct
  source 1..21: mol_type = other RNA
  modified_base 1: mod_base = OTHER; note = 2'-O-methylguanosine-3'-phosphorothioate
  modified_base 2: mod_base = OTHER; note = 2'-O-methylcytidine-3'-phosphorothioate
  modified_base 3: mod_base = OTHER; note = 2'-O-methylcytidine-3'-phosphate
  modified_base 4: mod_base = OTHER; note = 2'-O-methyladenosine-3'-phosphate
  modified_base 5: mod_base = OTHER; note = 2'-O-methyluridine-3'-phosphate
  modified_base 6: mod_base = OTHER; note = 2'-O-methyladenosine-3'-phosphate
  modified_base 7: mod_base = OTHER; note = 2'-deoxy-2'-fluorocytidine-3'-phosphate
  modified_base 8: mod_base = OTHER; note = 2'-O-methyluridine-3'-phosphate
  modified_base 9: mod_base = OTHER; note = 2'-deoxy-2'-fluorocytidine-3'-phosphate
  modified_base 10: mod_base = OTHER; note = 2'-deoxy-2'-fluorouridine-3'-phosphate
  modified_base 11: mod_base = OTHER; note = 2'-deoxy-2'-fluorouridine-3'-phosphate
  modified_base 12: mod_base = OTHER; note = 2'-O-methyladenosine-3'-phosphate
  modified_base 13: mod_base = OTHER; note = 2'-O-methylcytidine-3'-phosphate
  modified_base 14: mod_base = OTHER; note = 2'-O-methyladenosine-3'-phosphate
  modified_base 15: mod_base = OTHER; note = 2'-O-methyluridine-3'-phosphate
  modified_base 16: mod_base = OTHER; note = 2'-O-methyladenosine-3'-phosphate
  modified_base 17: mod_base = OTHER; note = 2'-O-methyladenosine-3'-phosphate
  modified_base 18: mod_base = OTHER; note = 2'-O-methyluridine-3'-phosphate
  modified_base 19: mod_base = OTHER; note = 2'-O-methyladenosine-3'-phosphate
  modified_base 20: mod_base = OTHER; note = 2'-O-methyladenosine-3'-phosphate
  modified_base 21: mod_base = OTHER; note = 2'-O-methyluridine-3'-phosphate ((2S,4R)-1-[29-[[2-(acetylamino)-2-deoxy-beta-D-galactopyra nosyl]oxy]-14,14-bis[[3-[[3-[[5-[[2-(acetylamino)-2-deoxy-b eta-D-galactopyranosyl]oxy]-1-oxopentyl]amino]propyl]amino] -3-oxopropoxy]methyl]-1,12,19,25-tetraoxo-16-oxa-13,20,24-t riazanonacos-1-yl]-4-hydroxy-2-pyrrolidinyl)methyl ester
gccatactcttacataataat

SEQ ID NO: 4125 - RNA, 21 nt, synthetic construct
  source 1..21: mol_type = other RNA
  modified_base 1: mod_base = OTHER; note = 2'-O-methylguanosine-3'-phosphorothioate
  modified_base 2: mod_base = OTHER; note = 2'-O-methyladenosine-3'-phosphorothioate
  modified_base 3: mod_base = OTHER; note = 2'-O-methyladenosine-3'-phosphate
  modified_base 4: mod_base = OTHER; note = 2'-O-methyluridine-3'-phosphate
  modified_base 5: mod_base = OTHER; note = 2'-O-methylcytidine-3'-phosphate
  modified_base 6: mod_base = OTHER; note = 2'-O-methyladenosine-3'-phosphate
  modified_base 7: mod_base = OTHER; note = 2'-deoxy-2'-fluorocytidine-3'-phosphate
  modified_base 8: mod_base = OTHER; note = 2'-O-methyladenosine-3'-phosphate
  modified_base 9: mod_base = OTHER; note = 2'-deoxy-2'-fluoroguanosine-3'-phosphate
  modified_base 10: mod_base = OTHER; note = 2'-deoxy-2'-fluoroadenosine-3'-phosphate
  modified_base 11: mod_base = OTHER; note = 2'-deoxy-2'-fluoroadenosine-3'-phosphate
  modified_base 12: mod_base = OTHER; note = 2'-O-methyluridine-3'-phosphate
  modified_base 13: mod_base = OTHER; note = 2'-O-methyluridine-3'-phosphate
  modified_base 14: mod_base = OTHER; note = 2'-O-methylcytidine-3'-phosphate
  modified_base 15: mod_base = OTHER; note = 2'-O-methyluridine-3'-phosphate
  modified_base 16: mod_base = OTHER; note = 2'-O-methyladenosine-3'-phosphate
  modified_base 17: mod_base = OTHER; note = 2'-O-methylguanosine-3'-phosphate
  modified_base 18: mod_base = OTHER; note = 2'-O-methyluridine-3'-phosphate
  modified_base 19: mod_base = OTHER; note = 2'-O-methyladenosine-3'-phosphate
  modified_base 20: mod_base = OTHER; note = 2'-O-methylcytidine-3'-phosphate
  modified_base 21: mod_base = OTHER; note = 2'-O-methyluridine-3'-phosphate ((2S,4R)-1-[29-[[2-(acetylamino)-2-deoxy-beta-D-galactopyra nosyl]oxy]-14,14-bis[[3-[[3-[[5-[[2-(acetylamino)-2-deoxy-b eta-D-galactopyranosyl]oxy]-1-oxopentyl]amino]propyl]amino] -3-oxopropoxy]methyl]-1,12,19,25-tetraoxo-16-oxa-13,20,24-t riazanonacos-1-yl]-4-hydroxy-2-pyrrolidinyl)methyl ester
gaatcacagaattctagtact

SEQ ID NO: 4126 - RNA, 21 nt, synthetic construct
  source 1..21: mol_type = other RNA
  modified_base 1: mod_base = OTHER; note = 2'-O-methyladenosine-3'-phosphorothioate
  modified_base 2: mod_base = OTHER; note = 2'-O-methyluridine-3'-phosphorothioate
  modified_base 3: mod_base = OTHER; note = 2'-O-methylguanosine-3'-phosphate
  modified_base 4: mod_base = OTHER; note = 2'-O-methyluridine-3'-phosphate
  modified_base 5: mod_base = OTHER; note = 2'-O-methyladenosine-3'-phosphate
  modified_base 6: mod_base = OTHER; note = 2'-O-methylguanosine-3'-phosphate
  modified_base 7: mod_base = OTHER; note = 2'-deoxy-2'-fluoroguanosine-3'-phosphate
  modified_base 8: mod_base = OTHER; note = 2'-O-methyluridine-3'-phosphate
  modified_base 9: mod_base = OTHER; note = 2'-deoxy-2'-fluoroadenosine-3'-phosphate
  modified_base 10: mod_base = OTHER; note = 2'-deoxy-2'-fluoroadenosine-3'-phosphate
  modified_base 11: mod_base = OTHER; note = 2'-deoxy-2'-fluoroadenosine-3'-phosphate
  modified_base 12: mod_base = OTHER; note = 2'-O-methyluridine-3'-phosphate
  modified_base 13: mod_base = OTHER; note = 2'-O-methylcytidine-3'-phosphate
  modified_base 14: mod_base = OTHER; note = 2'-O-methyladenosine-3'-phosphate
  modified_base 15: mod_base = OTHER; note = 2'-O-methyluridine-3'-phosphate
  modified_base 16: mod_base = OTHER; note = 2'-O-methyladenosine-3'-phosphate
  modified_base 17: mod_base = OTHER; note = 2'-O-methyladenosine-3'-phosphate
  modified_base 18: mod_base = OTHER; note = 2'-O-methyladenosine-3'-phosphate
  modified_base 19: mod_base = OTHER; note = 2'-O-methyluridine-3'-phosphate
  modified_base 20: mod_base = OTHER; note = 2'-O-methylcytidine-3'-phosphate
  modified_base 21: mod_base = OTHER; note = 2'-O-methyluridine-3'-phosphate ((2S,4R)-1-[29-[[2-(acetylamino)-2-deoxy-beta-D-galactopyra nosyl]oxy]-14,14-bis[[3-[[3-[[5-[[2-(acetylamino)-2-deoxy-b eta-D-galactopyranosyl]oxy]-1-oxopentyl]amino]propyl]amino] -3-oxopropoxy]methyl]-1,12,19,25-tetraoxo-16-oxa-13,20,24-t riazanonacos-1-yl]-4-hydroxy-2-pyrrolidinyl)methyl ester
atgtaggtaaatcataaatct

SEQ ID NO: 4127 - RNA, 21 nt, synthetic construct
  source 1..21: mol_type = other RNA
  modified_base 1: mod_base = OTHER; note = 2'-O-methylcytidine-3'-phosphorothioate
  modified_base 2: mod_base = OTHER; note = 2'-O-methyluridine-3'-phosphorothioate
  modified_base 3: mod_base = OTHER; note = 2'-O-methylguanosine-3'-phosphate
  modified_base 4: mod_base = OTHER; note = 2'-O-methyluridine-3'-phosphate
  modified_base 5: mod_base = OTHER; note = 2'-O-methyluridine-3'-phosphate
  modified_base 6: mod_base = OTHER; note = 2'-O-methylcytidine-3'-phosphate
  modified_base 7: mod_base = OTHER; note = 2'-deoxy-2'-fluorouridine-3'-phosphate
  modified_base 8: mod_base = OTHER; note = 2'-O-methyladenosine-3'-phosphate
  modified_base 9: mod_base = OTHER; note = 2'-deoxy-2'-fluoroadenosine-3'-phosphate
  modified_base 10: mod_base = OTHER; note = 2'-deoxy-2'-fluoroguanosine-3'-phosphate
  modified_base 11: mod_base = OTHER; note = 2'-deoxy-2'-fluoroadenosine-3'-phosphate
  modified_base 12: mod_base = OTHER; note = 2'-O-methylcytidine-3'-phosphate
  modified_base 13: mod_base = OTHER; note = 2'-O-methyladenosine-3'-phosphate
  modified_base 14: mod_base = OTHER; note = 2'-O-methyluridine-3'-phosphate
  modified_base 15: mod_base = OTHER; note = 2'-O-methyladenosine-3'-phosphate
  modified_base 16: mod_base = OTHER; note = 2'-O-methyluridine-3'-phosphate
  modified_base 17: mod_base = OTHER; note = 2'-O-methylguanosine-3'-phosphate
  modified_base 18: mod_base = OTHER; note = 2'-O-methyladenosine-3'-phosphate
  modified_base 19: mod_base = OTHER; note = 2'-O-methyluridine-3'-phosphate
  modified_base 20: mod_base = OTHER; note = 2'-O-methylcytidine-3'-phosphate
  modified_base 21: mod_base = OTHER; note = 2'-O-methyluridine-3'-phosphate ((2S,4R)-1-[29-[[2-(acetylamino)-2-deoxy-beta-D-galactopyra nosyl]oxy]-14,14-bis[[3-[[3-[[5-[[2-(acetylamino)-2-deoxy-b eta-D-galactopyranosyl]oxy]-1-oxopentyl]amino]propyl]amino] -3-oxopropoxy]methyl]-1,12,19,25-tetraoxo-16-oxa-13,20,24-t riazanonacos-1-yl]-4-hydroxy-2-pyrrolidinyl)methyl ester
ctgttctaagacatatgatct

SEQ ID NO: 4128 - RNA, 21 nt, synthetic construct
  source 1..21: mol_type = other RNA
  modified_base 1: mod_base = OTHER; note = 2'-O-methyluridine-3'-phosphorothioate
  modified_base 2: mod_base = OTHER; note = 2'-O-methyladenosine-3'-phosphorothioate
  modified_base 3: mod_base = OTHER; note = 2'-O-methyluridine-3'-phosphate
  modified_base 4: mod_base = OTHER; note = 2'-O-methylguanosine-3'-phosphate
  modified_base 5: mod_base = OTHER; note = 2'-O-methyladenosine-3'-phosphate
  modified_base 6: mod_base = OTHER; note = 2'-O-methyluridine-3'-phosphate
  modified_base 7: mod_base = OTHER; note = 2'-deoxy-2'-fluorocytidine-3'-phosphate
  modified_base 8: mod_base = OTHER; note = 2'-O-methyladenosine-3'-phosphate
  modified_base 9: mod_base = OTHER; note = 2'-deoxy-2'-fluoroadenosine-3'-phosphate
  modified_base 10: mod_base = OTHER; note = 2'-deoxy-2'-fluorocytidine-3'-phosphate
  modified_base 11: mod_base = OTHER; note = 2'-deoxy-2'-fluoroadenosine-3'-phosphate
  modified_base 12: mod_base = OTHER; note = 2'-O-methylguanosine-3'-phosphate
  modified_base 13: mod_base = OTHER; note = 2'-O-methyladenosine-3'-phosphate
  modified_base 14: mod_base = OTHER; note = 2'-O-methyluridine-3'-phosphate
  modified_base 15: mod_base = OTHER; note = 2'-O-methylguanosine-3'-phosphate
  modified_base 16: mod_base = OTHER; note = 2'-O-methyladenosine-3'-phosphate
  modified_base 17: mod_base = OTHER; note = 2'-O-methylguanosine-3'-phosphate
  modified_base 18: mod_base = OTHER; note = 2'-O-methyladenosine-3'-phosphate
  modified_base 19: mod_base = OTHER; note = 2'-O-methyladenosine-3'-phosphate
  modified_base 20: mod_base = OTHER; note = 2'-O-methylcytidine-3'-phosphate
  modified_base 21: mod_base = OTHER; note = 2'-O-methyluridine-3'-phosphate ((2S,4R)-1-[29-[[2-(acetylamino)-2-deoxy-beta-D-galactopyra nosyl]oxy]-14,14-bis[[3-[[3-[[5-[[2-(acetylamino)-2-deoxy-b eta-D-galactopyranosyl]oxy]-1-oxopentyl]amino]propyl]amino] -3-oxopropoxy]methyl]-1,12,19,25-tetraoxo-16-oxa-13,20,24-t riazanonacos-1-yl]-4-hydroxy-2-pyrrolidinyl)methyl ester
tatgatcaacagatgagaact

SEQ ID NO: 4129 - RNA, 21 nt, synthetic construct
  source 1..21: mol_type = other RNA
  modified_base 1: mod_base = OTHER; note = 2'-O-methyladenosine-3'-phosphorothioate
  modified_base 2: mod_base = OTHER; note = 2'-O-methylcytidine-3'-phosphorothioate
  modified_base 3: mod_base = OTHER; note = 2'-O-methyluridine-3'-phosphate
  modified_base 4: mod_base = OTHER; note = 2'-O-methylguanosine-3'-phosphate
  modified_base 5: mod_base = OTHER; note = 2'-O-methylguanosine-3'-phosphate
  modified_base 6: mod_base = OTHER; note = 2'-O-methyluridine-3'-phosphate
  modified_base 7: mod_base = OTHER; note = 2'-deoxy-2'-fluoroguanosine-3'-phosphate
  modified_base 8: mod_base = OTHER; note = 2'-O-methylguanosine-3'-phosphate
  modified_base 9: mod_base = OTHER; note = 2'-deoxy-2'-fluorouridine-3'-phosphate
  modified_base 10: mod_base = OTHER; note = 2'-deoxy-2'-fluorouridine-3'-phosphate
  modified_base 11: mod_base = OTHER; note = 2'-deoxy-2'-fluoroadenosine-3'-phosphate
  modified_base 12: mod_base = OTHER; note = 2'-O-methyladenosine-3'-phosphate
  modified_base 13: mod_base = OTHER; note = 2'-O-methyluridine-3'-phosphate
  modified_base 14: mod_base = OTHER; note = 2'-O-methyladenosine-3'-phosphate
  modified_base 15: mod_base = OTHER; note = 2'-O-methyluridine-3'-phosphate
  modified_base 16: mod_base = OTHER; note = 2'-O-methylguanosine-3'-phosphate
  modified_base 17: mod_base = OTHER; note = 2'-O-methyluridine-3'-phosphate
  modified_base 18: mod_base = OTHER; note = 2'-O-methylguanosine-3'-phosphate
  modified_base 19: mod_base = OTHER; note = 2'-O-methyladenosine-3'-phosphate
  modified_base 20: mod_base = OTHER; note = 2'-O-methylcytidine-3'-phosphate
  modified_base 21: mod_base = OTHER; note = 2'-O-methyluridine-3'-phosphate ((2S,4R)-1-[29-[[2-(acetylamino)-2-deoxy-beta-D-galactopyra nosyl]oxy]-14,14-bis[[3-[[3-[[5-[[2-(acetylamino)-2-deoxy-b eta-D-galactopyranosyl]oxy]-1-oxopentyl]amino]propyl]amino] -3-oxopropoxy]methyl]-1,12,19,25-tetraoxo-16-oxa-13,20,24-t riazanonacos-1-yl]-4-hydroxy-2-pyrrolidinyl)methyl ester
actggtggttaatatgtgact

SEQ ID NO: 4130 - RNA, 21 nt, synthetic construct
  source 1..21: mol_type = other RNA
  modified_base 1: mod_base = OTHER; note = 2'-O-methyladenosine-3'-phosphorothioate
  modified_base 2: mod_base = OTHER; note = 2'-O-methyluridine-3'-phosphorothioate
  modified_base 3: mod_base = OTHER; note = 2'-O-methylguanosine-3'-phosphate
  modified_base 4: mod_base = OTHER; note = 2'-O-methyluridine-3'-phosphate
  modified_base 5: mod_base = OTHER; note = 2'-O-methylguanosine-3'-phosphate
  modified_base 6: mod_base = OTHER; note = 2'-O-methyladenosine-3'-phosphate
  modified_base 7: mod_base = OTHER; note = 2'-deoxy-2'-fluorocytidine-3'-phosphate
  modified_base 8: mod_base = OTHER; note = 2'-O-methyladenosine-3'-phosphate
  modified_base 9: mod_base = OTHER; note = 2'-deoxy-2'-fluoroguanosine-3'-phosphate
  modified_base 10: mod_base = OTHER; note = 2'-deoxy-2'-fluorouridine-3'-phosphate
  modified_base 11: mod_base = OTHER; note = 2'-deoxy-2'-fluoroguanosine-3'-phosphate
  modified_base 12: mod_base = OTHER; note = 2'-O-methyladenosine-3'-phosphate
  modified_base 13: mod_base = OTHER; note = 2'-O-methylguanosine-3'-phosphate
  modified_base 14: mod_base = OTHER; note = 2'-O-methyladenosine-3'-phosphate
  modified_base 15: mod_base = OTHER; note = 2'-O-methyluridine-3'-phosphate
  modified_base 16: mod_base = OTHER; note = 2'-O-methyluridine-3'-phosphate
  modified_base 17: mod_base = OTHER; note = 2'-O-methyladenosine-3'-phosphate
  modified_base 18: mod_base = OTHER; note = 2'-O-methylguanosine-3'-phosphate
  modified_base 19: mod_base = OTHER; note = 2'-O-methyluridine-3'-phosphate
  modified_base 20: mod_base = OTHER; note = 2'-O-methylcytidine-3'-phosphate
  modified_base 21: mod_base = OTHER; note = 2'-O-methyluridine-3'-phosphate ((2S,4R)-1-[29-[[2-(acetylamino)-2-deoxy-beta-D-galactopyra nosyl]oxy]-14,14-bis[[3-[[3-[[5-[[2-(acetylamino)-2-deoxy-b eta-D-galactopyranosyl]oxy]-1-oxopentyl]amino]propyl]amino] -3-oxopropoxy]methyl]-1,12,19,25-tetraoxo-16-oxa-13,20,24-t riazanonacos-1-yl]-4-hydroxy-2-pyrrolidinyl)methyl ester
atgtgacagtgagattagtct

SEQ ID NO: 4131 - RNA, 21 nt, synthetic construct
  source 1..21: mol_type = other RNA
  modified_base 1: mod_base = OTHER; note = 2'-O-methylcytidine-3'-phosphorothioate
  modified_base 2: mod_base = OTHER; note = 2'-O-methyladenosine-3'-phosphorothioate
  modified_base 3: mod_base = OTHER; note = 2'-O-methyluridine-3'-phosphate
  modified_base 4: mod_base = OTHER; note = 2'-O-methyladenosine-3'-phosphate
  modified_base 5: mod_base = OTHER; note = 2'-O-methyluridine-3'-phosphate
  modified_base 6: mod_base = OTHER; note = 2'-O-methylcytidine-3'-phosphate
  modified_base 7: mod_base = OTHER; note = 2'-deoxy-2'-fluoroadenosine-3'-phosphate
  modified_base 8: mod_base = OTHER; note = 2'-O-methylcytidine-3'-phosphate
  modified_base 9: mod_base = OTHER; note = 2'-deoxy-2'-fluorouridine-3'-phosphate
  modified_base 10: mod_base = OTHER; note = 2'-deoxy-2'-fluoroadenosine-3'-phosphate
  modified_base 11: mod_base = OTHER; note = 2'-deoxy-2'-fluoroadenosine-3'-phosphate
  modified_base 12: mod_base = OTHER; note = 2'-O-methyluridine-3'-phosphate
  modified_base 13: mod_base = OTHER; note = 2'-O-methyladenosine-3'-phosphate
  modified_base 14: mod_base = OTHER; note = 2'-O-methyluridine-3'-phosphate
  modified_base 15: mod_base = OTHER; note = 2'-O-methyladenosine-3'-phosphate
  modified_base 16: mod_base = OTHER; note = 2'-O-methylcytidine-3'-phosphate
  modified_base 17: mod_base = OTHER; note = 2'-O-methyluridine-3'-phosphate
  modified_base 18: mod_base = OTHER; note = 2'-O-methyladenosine-3'-phosphate
  modified_base 19: mod_base = OTHER; note = 2'-O-methyladenosine-3'-phosphate
  modified_base 20: mod_base = OTHER; note = 2'-O-methylcytidine-3'-phosphate
  modified_base 21: mod_base = OTHER; note = 2'-O-methyluridine-3'-phosphate ((2S,4R)-1-[29-[[2-(acetylamino)-2-deoxy-beta-D-galactopyra nosyl]oxy]-14,14-bis[[3-[[3-[[5-[[2-(acetylamino)-2-deoxy-b eta-D-galactopyranosyl]oxy]-1-oxopentyl]amino]propyl]amino] -3-oxopropoxy]methyl]-1,12,19,25-tetraoxo-16-oxa-13,20,24-t riazanonacos-1-yl]-4-hydroxy-2-pyrrolidinyl)methyl ester
catatcactaatatactaact

SEQ ID NO: 4132 - RNA, 21 nt, synthetic construct
  source 1..21: mol_type = other RNA
  modified_base 1: mod_base = OTHER; note = 2'-O-methyluridine-3'-phosphorothioate
  modified_base 2: mod_base = OTHER; note = 2'-O-methyladenosine-3'-phosphorothioate
  modified_base 3: mod_base = OTHER; note = 2'-O-methyladenosine-3'-phosphate
  modified_base 4: mod_base = OTHER; note = 2'-O-methylcytidine-3'-phosphate
  modified_base 5: mod_base = OTHER; note = 2'-O-methyladenosine-3'-phosphate
  modified_base 6: mod_base = OTHER; note = 2'-O-methyladenosine-3'-phosphate
  modified_base 7: mod_base = OTHER; note = 2'-deoxy-2'-fluorocytidine-3'-phosphate
  modified_base 8: mod_base = OTHER; note = 2'-O-methyladenosine-3'-phosphate
  modified_base 9: mod_base = OTHER; note = 2'-deoxy-2'-fluoroguanosine-3'-phosphate
  modified_base 10: mod_base = OTHER; note = 2'-deoxy-2'-fluoroadenosine-3'-phosphate
  modified_base 11: mod_base = OTHER; note = 2'-deoxy-2'-fluoroadenosine-3'-phosphate
  modified_base 12: mod_base = OTHER; note = 2'-O-methyluridine-3'-phosphate
  modified_base 13: mod_base = OTHER; note = 2'-O-methylcytidine-3'-phosphate
  modified_base 14: mod_base = OTHER; note = 2'-O-methyluridine-3'-phosphate
  modified_base 15: mod_base = OTHER; note = 2'-O-methyladenosine-3'-phosphate
  modified_base 16: mod_base = OTHER; note = 2'-O-methyladenosine-3'-phosphate
  modified_base 17: mod_base = OTHER; note = 2'-O-methyluridine-3'-phosphate
  modified_base 18: mod_base = OTHER; note = 2'-O-methylcytidine-3'-phosphate
  modified_base 19: mod_base = OTHER; note = 2'-O-methyluridine-3'-phosphate
  modified_base 20: mod_base = OTHER; note = 2'-O-methyluridine-3'-phosphate
  modified_base 21: mod_base = OTHER; note = 2'-O-methyluridine-3'-phosphate ((2S,4R)-1-[29-[[2-(acetylamino)-2-deoxy-beta-D-galactopyra nosyl]oxy]-14,14-bis[[3-[[3-[[5-[[2-(acetylamino)-2-deoxy-b eta-D-galactopyranosyl]oxy]-1-oxopentyl]amino]propyl]amino] -3-oxopropoxy]methyl]-1,12,19,25-tetraoxo-16-oxa-13,20,24-t riazanonacos-1-yl]-4-hydroxy-2-pyrrolidinyl)methyl ester
taacaacagaatctaatcttt

SEQ ID NO: 4133 - RNA, 21 nt, synthetic construct
  source 1..21: mol_type = other RNA
  modified_base 1: mod_base = OTHER; note = 2'-O-methyluridine-3'-phosphorothioate
  modified_base 2: mod_base = OTHER; note = 2'-O-methylcytidine-3'-phosphorothioate
  modified_base 3: mod_base = OTHER; note = 2'-O-methyluridine-3'-phosphate
  modified_base 4: mod_base = OTHER; note = 2'-O-methyluridine-3'-phosphate
  modified_base 5: mod_base = OTHER; note = 2'-O-methylcytidine-3'-phosphate
  modified_base 6: mod_base = OTHER; note = 2'-O-methyladenosine-3'-phosphate
  modified_base 7: mod_base = OTHER; note = 2'-deoxy-2'-fluorouridine-3'-phosphate
  modified_base 8: mod_base = OTHER; note = 2'-O-methyluridine-3'-phosphate
  modified_base 9: mod_base = OTHER; note = 2'-deoxy-2'-fluorouridine-3'-phosphate
  modified_base 10: mod_base = OTHER; note = 2'-deoxy-2'-fluoroadenosine-3'-phosphate
  modified_base 11: mod_base = OTHER; note = 2'-deoxy-2'-fluoroadenosine-3'-phosphate
  modified_base 12: mod_base = OTHER; note = 2'-O-methylguanosine-3'-phosphate
  modified_base 13: mod_base = OTHER; note = 2'-O-methylguanosine-3'-phosphate
  modified_base 14: mod_base = OTHER; note = 2'-O-methylcytidine-3'-phosphate
  modified_base 15: mod_base = OTHER; note = 2'-O-methyladenosine-3'-phosphate
  modified_base 16: mod_base = OTHER; note = 2'-O-methylcytidine-3'-phosphate
  modified_base 17: mod_base = OTHER; note = 2'-O-methyluridine-3'-phosphate
  modified_base 18: mod_base = OTHER; note = 2'-O-methylguanosine-3'-phosphate
  modified_base 19: mod_base = OTHER; note = 2'-O-methyluridine-3'-phosphate
  modified_base 20: mod_base = OTHER; note = 2'-O-methyladenosine-3'-phosphate
  modified_base 21: mod_base = OTHER; note = 2'-O-methyluridine-3'-phosphate ((2S,4R)-1-[29-[[2-(acetylamino)-2-deoxy-beta-D-galactopyra nosyl]oxy]-14,14-bis[[3-[[3-[[5-[[2-(acetylamino)-2-deoxy-b eta-D-galactopyranosyl]oxy]-1-oxopentyl]amino]propyl]amino] -3-oxopropoxy]methyl]-1,12,19,25-tetraoxo-16-oxa-13,20,24-t riazanonacos-1-yl]-4-hydroxy-2-pyrrolidinyl)methyl ester
tcttcatttaaggcactgtat

SEQ ID NO: 4134 - RNA, 21 nt, synthetic construct
  source 1..21: mol_type = other RNA
  modified_base 1: mod_base = OTHER; note = 2'-O-methylcytidine-3'-phosphorothioate
  modified_base 2: mod_base = OTHER; note = 2'-O-methyladenosine-3'-phosphorothioate
  modified_base 3: mod_base = OTHER; note = 2'-O-methylcytidine-3'-phosphate
  modified_base 4: mod_base = OTHER; note = 2'-O-methyluridine-3'-phosphate
  modified_base 5: mod_base = OTHER; note = 2'-O-methylguanosine-3'-phosphate
  modified_base 6: mod_base = OTHER; note = 2'-O-methyluridine-3'-phosphate
  modified_base 7: mod_base = OTHER; note = 2'-deoxy-2'-fluoroadenosine-3'-phosphate
  modified_base 8: mod_base = OTHER; note = 2'-O-methylguanosine-3'-phosphate
  modified_base 9: mod_base = OTHER; note = 2'-deoxy-2'-fluorouridine-3'-phosphate
  modified_base 10: mod_base = OTHER; note = 2'-deoxy-2'-fluoroguanosine-3'-phosphate
  modified_base 11: mod_base = OTHER; note = 2'-deoxy-2'-fluoroadenosine-3'-phosphate
  modified_base 12: mod_base = OTHER; note = 2'-O-methyladenosine-3'-phosphate
  modified_base 13: mod_base = OTHER; note = 2'-O-methyluridine-3'-phosphate
  modified_base 14: mod_base = OTHER; note = 2'-O-methyluridine-3'-phosphate
  modified_base 15: mod_base = OTHER; note = 2'-O-methyladenosine-3'-phosphate
  modified_base 16: mod_base = OTHER; note = 2'-O-methyluridine-3'-phosphate
  modified_base 17: mod_base = OTHER; note = 2'-O-methylcytidine-3'-phosphate
  modified_base 18: mod_base = OTHER; note = 2'-O-methyluridine-3'-phosphate
  modified_base 19: mod_base = OTHER; note = 2'-O-methylguanosine-3'-phosphate
  modified_base 20: mod_base = OTHER; note = 2'-O-methyladenosine-3'-phosphate
  modified_base 21: mod_base = OTHER; note = 2'-O-methyluridine-3'-phosphate ((2S,4R)-1-[29-[[2-(acetylamino)-2-deoxy-beta-D-galactopyra nosyl]oxy]-14,14-bis[[3-[[3-[[5-[[2-(acetylamino)-2-deoxy-b eta-D-galactopyranosyl]oxy]-1-oxopentyl]amino]propyl]amino] -3-oxopropoxy]methyl]-1,12,19,25-tetraoxo-16-oxa-13,20,24-t riazanonacos-1-yl]-4-hydroxy-2-pyrrolidinyl)methyl ester
cactgtagtgaattatctgat

SEQ ID NO: 4135 - RNA, 21 nt, synthetic construct
  source 1..21: mol_type = other RNA
  modified_base 1: mod_base = OTHER; note = 2'-O-methyluridine-3'-phosphorothioate
  modified_base 2: mod_base = OTHER; note = 2'-O-methyladenosine-3'-phosphorothioate
  modified_base 3: mod_base = OTHER; note = 2'-O-methyluridine-3'-phosphate
  modified_base 4: mod_base = OTHER; note = 2'-O-methylcytidine-3'-phosphate
  modified_base 5: mod_base = OTHER; note = 2'-O-methyluridine-3'-phosphate
  modified_base 6: mod_base = OTHER; note = 2'-O-methylguanosine-3'-phosphate
  modified_base 7: mod_base = OTHER; note = 2'-deoxy-2'-fluoroadenosine-3'-phosphate
  modified_base 8: mod_base = OTHER; note = 2'-O-methylguanosine-3'-phosphate
  modified_base 9: mod_base = OTHER; note = 2'-deoxy-2'-fluorocytidine-3'-phosphate
  modified_base 10: mod_base = OTHER; note = 2'-deoxy-2'-fluorouridine-3'-phosphate
  modified_base 11: mod_base = OTHER; note = 2'-deoxy-2'-fluoroadenosine-3'-phosphate
  modified_base 12: mod_base = OTHER; note = 2'-O-methylguanosine-3'-phosphate
  modified_base 13: mod_base = OTHER; note = 2'-O-methyladenosine-3'-phosphate
  modified_base 14: mod_base = OTHER; note = 2'-O-methylguanosine-3'-phosphate
  modified_base 15: mod_base = OTHER; note = 2'-O-methyluridine-3'-phosphate
  modified_base 16: mod_base = OTHER; note = 2'-O-methyluridine-3'-phosphate
  modified_base 17: mod_base = OTHER; note = 2'-O-methyladenosine-3'-phosphate
  modified_base 18: mod_base = OTHER; note = 2'-O-methylcytidine-3'-phosphate
  modified_base 19: mod_base = OTHER; note = 2'-O-methylcytidine-3'-phosphate
  modified_base 20: mod_base = OTHER; note = 2'-O-methyluridine-3'-phosphate
  modified_base 21: mod_base = OTHER; note = 2'-O-methyluridine-3'-phosphate ((2S,4R)-1-[29-[[2-(acetylamino)-2-deoxy-beta-D-galactopyra nosyl]oxy]-14,14-bis[[3-[[3-[[5-[[2-(acetylamino)-2-deoxy-b eta-D-galactopyranosyl]oxy]-1-oxopentyl]amino]propyl]amino] -3-oxopropoxy]methyl]-1,12,19,25-tetraoxo-16-oxa-13,20,24-t riazanonacos-1-yl]-4-hydroxy-2-pyrrolidinyl)methyl ester
tatctgagctagagttacctt

SEQ ID NO: 4136 - RNA, 21 nt, synthetic construct
  source 1..21: mol_type = other RNA
  modified_base 1: mod_base = OTHER; note = 2'-O-methylguanosine-3'-phosphorothioate
  modified_base 2: mod_base = OTHER; note = 2'-O-methylcytidine-3'-phosphorothioate
  modified_base 3: mod_base = OTHER; note = 2'-O-methyluridine-3'-phosphate
  modified_base 4: mod_base = OTHER; note = 2'-O-methyluridine-3'-phosphate
  modified_base 5: mod_base = OTHER; note = 2'-O-methyladenosine-3'-phosphate
  modified_base 6: mod_base = OTHER; note = 2'-O-methylcytidine-3'-phosphate
  modified_base 7: mod_base = OTHER; note = 2'-deoxy-2'-fluorocytidine-3'-phosphate
  modified_base 8: mod_base = OTHER; note = 2'-O-methyladenosine-3'-phosphate
  modified_base 9: mod_base = OTHER; note = 2'-deoxy-2'-fluorouridine-3'-phosphate
  modified_base 10: mod_base = OTHER; note = 2'-deoxy-2'-fluoroadenosine-3'-phosphate
  modified_base 11: mod_base = OTHER; note = 2'-deoxy-2'-fluorocytidine-3'-phosphate
  modified_base 12: mod_base = OTHER; note = 2'-O-methyluridine-3'-phosphate
  modified_base 13: mod_base = OTHER; note = 2'-O-methyladenosine-3'-phosphate
  modified_base 14: mod_base = OTHER; note = 2'-O-methyluridine-3'-phosphate
  modified_base 15: mod_base = OTHER; note = 2'-O-methyladenosine-3'-phosphate
  modified_base 16: mod_base = OTHER; note = 2'-O-methyluridine-3'-phosphate
  modified_base 17: mod_base = OTHER; note = 2'-O-methylcytidine-3'-phosphate
  modified_base 18: mod_base = OTHER; note = 2'-O-methyluridine-3'-phosphate
  modified_base 19: mod_base = OTHER; note = 2'-O-methyluridine-3'-phosphate
  modified_base 20: mod_base = OTHER; note = 2'-O-methyluridine-3'-phosphate
  modified_base 21: mod_base = OTHER; note = 2'-O-methyluridine-3'-phosphate ((2S,4R)-1-[29-[[2-(acetylamino)-2-deoxy-beta-D-galactopyra nosyl]oxy]-14,14-bis[[3-[[3-[[5-[[2-(acetylamino)-2-deoxy-b eta-D-galactopyranosyl]oxy]-1-oxopentyl]amino]propyl]amino] -3-oxopropoxy]methyl]-1,12,19,25-tetraoxo-16-oxa-13,20,24-t riazanonacos-1-yl]-4-hydroxy-2-pyrrolidinyl)methyl ester
gcttaccatactatatctttt

SEQ ID NO: 4137 - RNA, 21 nt, synthetic construct
  source 1..21: mol_type = other RNA
  modified_base 1: mod_base = OTHER; note = 2'-O-methyluridine-3'-phosphorothioate
  modified_base 2: mod_base = OTHER; note = 2'-O-methyluridine-3'-phosphorothioate
  modified_base 3: mod_base = OTHER; note = 2'-O-methyluridine-3'-phosphate
  modified_base 4: mod_base = OTHER; note = 2'-O-methylguanosine-3'-phosphate
  modified_base 5: mod_base = OTHER; note = 2'-O-methylguanosine-3'-phosphate
  modified_base 6: mod_base = OTHER; note = 2'-O-methyladenosine-3'-phosphate
  modified_base 7: mod_base = OTHER; note = 2'-deoxy-2'-fluoroadenosine-3'-phosphate
  modified_base 8: mod_base = OTHER; note = 2'-O-methyluridine-3'-phosphate
  modified_base 9: mod_base = OTHER; note = 2'-deoxy-2'-fluorocytidine-3'-phosphate
  modified_base 10: mod_base = OTHER; note = 2'-deoxy-2'-fluoroadenosine-3'-phosphate
  modified_base 11: mod_base = OTHER; note = 2'-deoxy-2'-fluorouridine-3'-phosphate
  modified_base 12: mod_base = OTHER; note = 2'-O-methylguanosine-3'-phosphate
  modified_base 13: mod_base = OTHER; note = 2'-O-methyladenosine-3'-phosphate
  modified_base 14: mod_base = OTHER; note = 2'-O-methyladenosine-3'-phosphate
  modified_base 15: mod_base = OTHER; note = 2'-O-methyladenosine-3'-phosphate
  modified_base 16: mod_base = OTHER; note = 2'-O-methylcytidine-3'-phosphate
  modified_base 17: mod_base = OTHER; note = 2'-O-methylcytidine-3'-phosphate
  modified_base 18: mod_base = OTHER; note = 2'-O-methyluridine-3'-phosphate
  modified_base 19: mod_base = OTHER; note = 2'-O-methyluridine-3'-phosphate
  modified_base 20: mod_base = OTHER; note = 2'-O-methyladenosine-3'-phosphate
  modified_base 21: mod_base = OTHER; note = 2'-O-methyluridine-3'-phosphate ((2S,4R)-1-[29-[[2-(acetylamino)-2-deoxy-beta-D-galactopyra nosyl]oxy]-14,14-bis[[3-[[3-[[5-[[2-(acetylamino)-2-deoxy-b eta-D-galactopyranosyl]oxy]-1-oxopentyl]amino]propyl]amino] -3-oxopropoxy]methyl]-1,12,19,25-tetraoxo-16-oxa-13,20,24-t riazanonacos-1-yl]-4-hydroxy-2-pyrrolidinyl)methyl ester
tttggaatcatgaaaccttat

SEQ ID NO: 4138 - RNA, 21 nt, synthetic construct
  source 1..21: mol_type = other RNA
  modified_base 1: mod_base = OTHER; note = 2'-O-methyluridine-3'-phosphorothioate
  modified_base 2: mod_base = OTHER; note = 2'-O-methyladenosine-3'-phosphorothioate
  modified_base 3: mod_base = OTHER; note = 2'-O-methyladenosine-3'-phosphate
  modified_base 4: mod_base = OTHER; note = 2'-O-methylguanosine-3'-phosphate
  modified_base 5: mod_base = OTHER; note = 2'-O-methyladenosine-3'-phosphate
  modified_base 6: mod_base = OTHER; note = 2'-O-methylcytidine-3'-phosphate
  modified_base 7: mod_base = OTHER; note = 2'-deoxy-2'-fluorouridine-3'-phosphate
  modified_base 8: mod_base = OTHER; note = 2'-O-methyluridine-3'-phosphate
  modified_base 9: mod_base = OTHER; note = 2'-deoxy-2'-fluorocytidine-3'-phosphate
  modified_base 10: mod_base = OTHER; note = 2'-deoxy-2'-fluoroadenosine-3'-phosphate
  modified_base 11: mod_base = OTHER; note = 2'-deoxy-2'-fluoroguanosine-3'-phosphate
  modified_base 12: mod_base = OTHER; note = 2'-O-methyladenosine-3'-phosphate
  modified_base 13: mod_base = OTHER; note = 2'-O-methyladenosine-3'-phosphate
  modified_base 14: mod_base = OTHER; note = 2'-O-methyluridine-3'-phosphate
  modified_base 15: mod_base = OTHER; note = 2'-O-methylguanosine-3'-phosphate
  modified_base 16: mod_base = OTHER; note = 2'-O-methyladenosine-3'-phosphate
  modified_base 17: mod_base = OTHER; note = 2'-O-methyluridine-3'-phosphate
  modified_base 18: mod_base = OTHER; note = 2'-O-methyluridine-3'-phosphate
  modified_base 19: mod_base = OTHER; note = 2'-O-methyluridine-3'-phosphate
  modified_base 20: mod_base = OTHER; note = 2'-O-methyluridine-3'-phosphate
  modified_base 21: mod_base = OTHER; note = 2'-O-methyluridine-3'-phosphate ((2S,4R)-1-[29-[[2-(acetylamino)-2-deoxy-beta-D-galactopyra nosyl]oxy]-14,14-bis[[3-[[3-[[5-[[2-(acetylamino)-2-deoxy-b eta-D-galactopyranosyl]oxy]-1-oxopentyl]amino]propyl]amino] -3-oxopropoxy]methyl]-1,12,19,25-tetraoxo-16-oxa-13,20,24-t riazanonacos-1-yl]-4-hydroxy-2-pyrrolidinyl)methyl ester
taagacttcagaatgattttt

SEQ ID NO: 4139 - RNA, 21 nt, synthetic construct
  source 1..21: mol_type = other RNA
  modified_base 1: mod_base = OTHER; note = 2'-O-methyladenosine-3'-phosphorothioate
  modified_base 2: mod_base = OTHER; note = 2'-O-methyluridine-3'-phosphorothioate
  modified_base 3: mod_base = OTHER; note = 2'-O-methyluridine-3'-phosphate
  modified_base 4: mod_base = OTHER; note = 2'-O-methyluridine-3'-phosphate
  modified_base 5: mod_base = OTHER; note = 2'-O-methyluridine-3'-phosphate
  modified_base 6: mod_base = OTHER; note = 2'-O-methylguanosine-3'-phosphate
  modified_base 7: mod_base = OTHER; note = 2'-deoxy-2'-fluorocytidine-3'-phosphate
  modified_base 8: mod_base = OTHER; note = 2'-O-methyladenosine-3'-phosphate
  modified_base 9: mod_base = OTHER; note = 2'-deoxy-2'-fluoroguanosine-3'-phosphate
  modified_base 10: mod_base = OTHER; note = 2'-deoxy-2'-fluoroguanosine-3'-phosphate
  modified_base 11: mod_base = OTHER; note = 2'-deoxy-2'-fluorouridine-3'-phosphate
  modified_base 12: mod_base = OTHER; note = 2'-O-methyluridine-3'-phosphate
  modified_base 13: mod_base = OTHER; note = 2'-O-methylguanosine-3'-phosphate
  modified_base 14: mod_base = OTHER; note = 2'-O-methyluridine-3'-phosphate
  modified_base 15: mod_base = OTHER; note = 2'-O-methylcytidine-3'-phosphate
  modified_base 16: mod_base = OTHER; note = 2'-O-methyluridine-3'-phosphate
  modified_base 17: mod_base = OTHER; note = 2'-O-methyluridine-3'-phosphate
  modified_base 18: mod_base = OTHER; note = 2'-O-methylcytidine-3'-phosphate
  modified_base 19: mod_base = OTHER; note = 2'-O-methylcytidine-3'-phosphate
  modified_base 20: mod_base = OTHER; note = 2'-O-methyladenosine-3'-phosphate
  modified_base 21: mod_base = OTHER; note = 2'-O-methyluridine-3'-phosphate ((2S,4R)-1-[29-[[2-(acetylamino)-2-deoxy-beta-D-galactopyra nosyl]oxy]-14,14-bis[[3-[[3-[[5-[[2-(acetylamino)-2-deoxy-b eta-D-galactopyranosyl]oxy]-1-oxopentyl]amino]propyl]amino] -3-oxopropoxy]methyl]-1,12,19,25-tetraoxo-16-oxa-13,20,24-t riazanonacos-1-yl]-4-hydroxy-2-pyrrolidinyl)methyl ester
attttgcaggttgtcttccat

SEQ ID NO: 4140 - RNA, 21 nt, synthetic construct
  source 1..21: mol_type = other RNA
  modified_base 1: mod_base = OTHER; note = 2'-O-methylcytidine-3'-phosphorothioate
  modified_base 2: mod_base = OTHER; note = 2'-O-methyluridine-3'-phosphorothioate
  modified_base 3: mod_base = OTHER; note = 2'-O-methyluridine-3'-phosphate
  modified_base 4: mod_base = OTHER; note = 2'-O-methylcytidine-3'-phosphate
  modified_base 5: mod_base = OTHER; note = 2'-O-methylcytidine-3'-phosphate
  modified_base 6: mod_base = OTHER; note = 2'-O-methyladenosine-3'-phosphate
  modified_base 7: mod_base = OTHER; note = 2'-deoxy-2'-fluorouridine-3'-phosphate
  modified_base 8: mod_base = OTHER; note = 2'-O-methyluridine-3'-phosphate
  modified_base 9: mod_base = OTHER; note = 2'-deoxy-2'-fluorocytidine-3'-phosphate
  modified_base 10: mod_base = OTHER; note = 2'-deoxy-2'-fluorocytidine-3'-phosphate
  modified_base 11: mod_base = OTHER; note = 2'-deoxy-2'-fluoroadenosine-3'-phosphate
  modified_base 12: mod_base = OTHER; note = 2'-O-methylguanosine-3'-phosphate
  modified_base 13: mod_base = OTHER; note = 2'-O-methylcytidine-3'-phosphate
  modified_base 14: mod_base = OTHER; note = 2'-O-methylcytidine-3'-phosphate
  modified_base 15: mod_base = OTHER; note = 2'-O-methyluridine-3'-phosphate
  modified_base 16: mod_base = OTHER; note = 2'-O-methyladenosine-3'-phosphate
  modified_base 17: mod_base = OTHER; note = 2'-O-methyladenosine-3'-phosphate
  modified_base 18: mod_base = OTHER; note = 2'-O-methylcytidine-3'-phosphate
  modified_base 19: mod_base = OTHER; note = 2'-O-methyladenosine-3'-phosphate
  modified_base 20: mod_base = OTHER; note = 2'-O-methyluridine-3'-phosphate
  modified_base 21: mod_base = OTHER; note = 2'-O-methyluridine-3'-phosphate ((2S,4R)-1-[29-[[2-(acetylamino)-2-deoxy-beta-D-galactopyra nosyl]oxy]-14,14-bis[[3-[[3-[[5-[[2-(acetylamino)-2-deoxy-b eta-D-galactopyranosyl]oxy]-1-oxopentyl]amino]propyl]amino] -3-oxopropoxy]methyl]-1,12,19,25-tetraoxo-16-oxa-13,20,24-t riazanonacos-1-yl]-4-hydroxy-2-pyrrolidinyl)methyl ester
cttccattccagcctaacatt

SEQ ID NO: 4141 - RNA, 21 nt, synthetic construct
  source 1..21: mol_type = other RNA
  modified_base 1: mod_base = OTHER; note = 2'-O-methylguanosine-3'-phosphorothioate
  modified_base 2: mod_base = OTHER; note = 2'-O-methylguanosine-3'-phosphorothioate
  modified_base 3: mod_base = OTHER; note = 2'-O-methylcytidine-3'-phosphate
  modified_base 4: mod_base = OTHER; note = 2'-O-methyladenosine-3'-phosphate
  modified_base 5: mod_base = OTHER; note = 2'-O-methyladenosine-3'-phosphate
  modified_base 6: mod_base = OTHER; note = 2'-O-methylguanosine-3'-phosphate
  modified_base 7: mod_base = OTHER; note = 2'-deoxy-2'-fluoroguanosine-3'-phosphate
  modified_base 8: mod_base = OTHER; note = 2'-O-methyladenosine-3'-phosphate
  modified_base 9: mod_base = OTHER; note = 2'-deoxy-2'-fluoroadenosine-3'-phosphate
  modified_base 10: mod_base = OTHER; note = 2'-deoxy-2'-fluoroadenosine-3'-phosphate
  modified_base 11: mod_base = OTHER; note = 2'-deoxy-2'-fluoroadenosine-3'-phosphate
  modified_base 12: mod_base = OTHER; note = 2'-O-methyluridine-3'-phosphate
  modified_base 13: mod_base = OTHER; note = 2'-O-methyladenosine-3'-phosphate
  modified_base 14: mod_base = OTHER; note = 2'-O-methyladenosine-3'-phosphate
  modified_base 15: mod_base = OTHER; note = 2'-O-methyladenosine-3'-phosphate
  modified_base 16: mod_base = OTHER; note = 2'-O-methyladenosine-3'-phosphate
  modified_base 17: mod_base = OTHER; note = 2'-O-methylguanosine-3'-phosphate
  modified_base 18: mod_base = OTHER; note = 2'-O-methyladenosine-3'-phosphate
  modified_base 19: mod_base = OTHER; note = 2'-O-methyluridine-3'-phosphate
  modified_base 20: mod_base = OTHER; note = 2'-O-methyluridine-3'-phosphate
  modified_base 21: mod_base = OTHER; note = 2'-O-methyluridine-3'-phosphate ((2S,4R)-1-[29-[[2-(acetylamino)-2-deoxy-beta-D-galactopyra nosyl]oxy]-14,14-bis[[3-[[3-[[5-[[2-(acetylamino)-2-deoxy-b eta-D-galactopyranosyl]oxy]-1-oxopentyl]amino]propyl]amino] -3-oxopropoxy]methyl]-1,12,19,25-tetraoxo-16-oxa-13,20,24-t riazanonacos-1-yl]-4-hydroxy-2-pyrrolidinyl)methyl ester
ggcaaggaaaataaaagattt

SEQ ID NO: 4142 - RNA, 21 nt, synthetic construct
  source 1..21: mol_type = other RNA
  modified_base 1: mod_base = OTHER; note = 2'-O-methyladenosine-3'-phosphorothioate
  modified_base 2: mod_base = OTHER; note = 2'-O-methyladenosine-3'-phosphorothioate
  modified_base 3: mod_base = OTHER; note = 2'-O-methylguanosine-3'-phosphate
  modified_base 4: mod_base = OTHER; note = 2'-O-methyladenosine-3'-phosphate
  modified_base 5: mod_base = OTHER; note = 2'-O-methyluridine-3'-phosphate
  modified_base 6: mod_base = OTHER; note = 2'-O-methyluridine-3'-phosphate
  modified_base 7: mod_base = OTHER; note = 2'-deoxy-2'-fluorouridine-3'-phosphate
  modified_base 8: mod_base = OTHER; note = 2'-O-methylcytidine-3'-phosphate
  modified_base 9: mod_base = OTHER; note = 2'-deoxy-2'-fluorocytidine-3'-phosphate
  modified_base 10: mod_base = OTHER; note = 2'-deoxy-2'-fluoroadenosine-3'-phosphate
  modified_base 11: mod_base = OTHER; note = 2'-deoxy-2'-fluoroguanosine-3'-phosphate
  modified_base 12: mod_base = OTHER; note = 2'-O-methyluridine-3'-phosphate
  modified_base 13: mod_base = OTHER; note = 2'-O-methylguanosine-3'-phosphate
  modified_base 14: mod_base = OTHER; note = 2'-O-methyladenosine-3'-phosphate
  modified_base 15: mod_base = OTHER; note = 2'-O-methylcytidine-3'-phosphate
  modified_base 16: mod_base = OTHER; note = 2'-O-methyladenosine-3'-phosphate
  modified_base 17: mod_base = OTHER; note = 2'-O-methylguanosine-3'-phosphate
  modified_base 18: mod_base = OTHER; note = 2'-O-methyladenosine-3'-phosphate
  modified_base 19: mod_base = OTHER; note = 2'-O-methyladenosine-3'-phosphate
  modified_base 20: mod_base = OTHER; note = 2'-O-methyladenosine-3'-phosphate
  modified_base 21: mod_base = OTHER; note = 2'-O-methyluridine-3'-phosphate ((2S,4R)-1-[29-[[2-(acetylamino)-2-deoxy-beta-D-galactopyra nosyl]oxy]-14,14-bis[[3-[[3-[[5-[[2-(acetylamino)-2-deoxy-b eta-D-galactopyranosyl]oxy]-1-oxopentyl]amino]propyl]amino] -3-oxopropoxy]methyl]-1,12,19,25-tetraoxo-16-oxa-13,20,24-t riazanonacos-1-yl]-4-hydroxy-2-pyrrolidinyl)methyl ester
aagatttccagtgacagaaat

SEQ ID NO: 4143 - RNA, 21 nt, synthetic construct
  source 1..21: mol_type = other RNA
  modified_base 1: mod_base = OTHER; note = 2'-O-methyluridine-3'-phosphorothioate
  modified_base 2: mod_base = OTHER; note = 2'-O-methyladenosine-3'-phosphorothioate
  modified_base 3: mod_base = OTHER; note = 2'-O-methyluridine-3'-phosphate
  modified_base 4: mod_base = OTHER; note = 2'-O-methylguanosine-3'-phosphate
  modified_base 5: mod_base = OTHER; note = 2'-O-methyladenosine-3'-phosphate
  modified_base 6: mod_base = OTHER; note = 2'-O-methyladenosine-3'-phosphate
  modified_base 7: mod_base = OTHER; note = 2'-deoxy-2'-fluorouridine-3'-phosphate
  modified_base 8: mod_base = OTHER; note = 2'-O-methyluridine-3'-phosphate
  modified_base 9: mod_base = OTHER; note = 2'-deoxy-2'-fluorocytidine-3'-phosphate
  modified_base 10: mod_base = OTHER; note = 2'-deoxy-2'-fluorouridine-3'-phosphate
  modified_base 11: mod_base = OTHER; note = 2'-deoxy-2'-fluorocytidine-3'-phosphate
  modified_base 12: mod_base = OTHER; note = 2'-O-methyluridine-3'-phosphate
  modified_base 13: mod_base = OTHER; note = 2'-O-methylcytidine-3'-phosphate
  modified_base 14: mod_base = OTHER; note = 2'-O-methyluridine-3'-phosphate
  modified_base 15: mod_base = OTHER; note = 2'-O-methylcytidine-3'-phosphate
  modified_base 16: mod_base = OTHER; note = 2'-O-methylcytidine-3'-phosphate
  modified_base 17: mod_base = OTHER; note = 2'-O-methyladenosine-3'-phosphate
  modified_base 18: mod_base = OTHER; note = 2'-O-methyladenosine-3'-phosphate
  modified_base 19: mod_base = OTHER; note = 2'-O-methyladenosine-3'-phosphate
  modified_base 20: mod_base = OTHER; note = 2'-O-methyluridine-3'-phosphate
  modified_base 21: mod_base = OTHER; note = 2'-O-methyluridine-3'-phosphate ((2S,4R)-1-[29-[[2-(acetylamino)-2-deoxy-beta-D-galactopyra nosyl]oxy]-14,14-bis[[3-[[3-[[5-[[2-(acetylamino)-2-deoxy-b eta-D-galactopyranosyl]oxy]-1-oxopentyl]amino]propyl]amino] -3-oxopropoxy]methyl]-1,12,19,25-tetraoxo-16-oxa-13,20,24-t riazanonacos-1-yl]-4-hydroxy-2-pyrrolidinyl)methyl ester
tatgaattctctctccaaatt

SEQ ID NO: 4144 - RNA, 21 nt, synthetic construct
  source 1..21: mol_type = other RNA
  modified_base 1: mod_base = OTHER; note = 2'-O-methylguanosine-3'-phosphorothioate
  modified_base 2: mod_base = OTHER; note = 2'-O-methyladenosine-3'-phosphorothioate
  modified_base 3: mod_base = OTHER; note = 2'-O-methyladenosine-3'-phosphate
  modified_base 4: mod_base = OTHER; note = 2'-O-methylcytidine-3'-phosphate
  modified_base 5: mod_base = OTHER; note = 2'-O-methyluridine-3'-phosphate
  modified_base 6: mod_base = OTHER; note = 2'-O-methyluridine-3'-phosphate
  modified_base 7: mod_base = OTHER; note = 2'-deoxy-2'-fluoroguanosine-3'-phosphate
  modified_base 8: mod_base = OTHER; note = 2'-O-methyluridine-3'-phosphate
  modified_base 9: mod_base = OTHER; note = 2'-deoxy-2'-fluorouridine-3'-phosphate
  modified_base 10: mod_base = OTHER; note = 2'-deoxy-2'-fluoroguanosine-3'-phosphate
  modified_base 11: mod_base = OTHER; note = 2'-deoxy-2'-fluoroguanosine-3'-phosphate
  modified_base 12: mod_base = OTHER; note = 2'-O-methylcytidine-3'-phosphate
  modified_base 13: mod_base = OTHER; note = 2'-O-methylcytidine-3'-phosphate
  modified_base 14: mod_base = OTHER; note = 2'-O-methylcytidine-3'-phosphate
  modified_base 15: mod_base = OTHER; note = 2'-O-methyladenosine-3'-phosphate
  modified_base 16: mod_base = OTHER; note = 2'-O-methyluridine-3'-phosphate
  modified_base 17: mod_base = OTHER; note = 2'-O-methylcytidine-3'-phosphate
  modified_base 18: mod_base = OTHER; note = 2'-O-methyluridine-3'-phosphate
  modified_base 19: mod_base = OTHER; note = 2'-O-methyladenosine-3'-phosphate
  modified_base 20: mod_base = OTHER; note = 2'-O-methyluridine-3'-phosphate
  modified_base 21: mod_base = OTHER; note = 2'-O-methyluridine-3'-phosphate ((2S,4R)-1-[29-[[2-(acetylamino)-2-deoxy-beta-D-galactopyra nosyl]oxy]-14,14-bis[[3-[[3-[[5-[[2-(acetylamino)-2-deoxy-b eta-D-galactopyranosyl]oxy]-1-oxopentyl]amino]propyl]amino] -3-oxopropoxy]methyl]-1,12,19,25-tetraoxo-16-oxa-13,20,24-t riazanonacos-1-yl]-4-hydroxy-2-pyrrolidinyl)methyl ester
gaacttgttggcccatctatt

SEQ ID NO: 4145 - RNA, 21 nt, synthetic construct
  source 1..21: mol_type = other RNA
  modified_base 1: mod_base = OTHER; note = 2'-O-methylcytidine-3'-phosphorothioate
  modified_base 2: mod_base = OTHER; note = 2'-O-methyladenosine-3'-phosphorothioate
  modified_base 3: mod_base = OTHER; note = 2'-O-methyluridine-3'-phosphate
  modified_base 4: mod_base = OTHER; note = 2'-O-methylcytidine-3'-phosphate
  modified_base 5: mod_base = OTHER; note = 2'-O-methyluridine-3'-phosphate
  modified_base 6: mod_base = OTHER; note = 2'-O-methyladenosine-3'-phosphate
  modified_base 7: mod_base = OTHER; note = 2'-deoxy-2'-fluorouridine-3'-phosphate
  modified_base 8: mod_base = OTHER; note = 2'-O-methyluridine-3'-phosphate
  modified_base 9: mod_base = OTHER; note = 2'-deoxy-2'-fluoroadenosine-3'-phosphate
  modified_base 10: mod_base = OTHER; note = 2'-deoxy-2'-fluorocytidine-3'-phosphate
  modified_base 11: mod_base = OTHER; note = 2'-deoxy-2'-fluoroadenosine-3'-phosphate
  modified_base 12: mod_base = OTHER; note = 2'-O-methyluridine-3'-phosphate
  modified_base 13: mod_base = OTHER; note = 2'-O-methylcytidine-3'-phosphate
  modified_base 14: mod_base = OTHER; note = 2'-O-methyluridine-3'-phosphate
  modified_base 15: mod_base = OTHER; note = 2'-O-methyladenosine-3'-phosphate
  modified_base 16: mod_base = OTHER; note = 2'-O-methylcytidine-3'-phosphate
  modified_base 17: mod_base = OTHER; note = 2'-O-methyladenosine-3'-phosphate
  modified_base 18: mod_base = OTHER; note = 2'-O-methylguanosine-3'-phosphate
  modified_base 19: mod_base = OTHER; note = 2'-O-methylcytidine-3'-phosphate
  modified_base 20: mod_base = OTHER; note = 2'-O-methyluridine-3'-phosphate
  modified_base 21: mod_base = OTHER; note = 2'-O-methyluridine-3'-phosphate ((2S,4R)-1-[29-[[2-(acetylamino)-2-deoxy-beta-D-galactopyra nosyl]oxy]-14,14-bis[[3-[[3-[[5-[[2-(acetylamino)-2-deoxy-b eta-D-galactopyranosyl]oxy]-1-oxopentyl]amino]propyl]amino] -3-oxopropoxy]methyl]-1,12,19,25-tetraoxo-16-oxa-13,20,24-t riazanonacos-1-yl]-4-hydroxy-2-pyrrolidinyl)methyl ester
catctattacatctacagctt

SEQ ID NO: 4146 - RNA, 21 nt, synthetic construct
  source 1..21: mol_type = other RNA
  modified_base 1: mod_base = OTHER; note = 2'-O-methyluridine-3'-phosphorothioate
  modified_base 2: mod_base = OTHER; note = 2'-O-methyladenosine-3'-phosphorothioate
  modified_base 3: mod_base = OTHER; note = 2'-O-methylcytidine-3'-phosphate
  modified_base 4: mod_base = OTHER; note = 2'-O-methyladenosine-3'-phosphate
  modified_base 5: mod_base = OTHER; note = 2'-O-methylguanosine-3'-phosphate
  modified_base 6: mod_base = OTHER; note = 2'-O-methylcytidine-3'-phosphate
  modified_base 7: mod_base = OTHER; note = 2'-deoxy-2'-fluorouridine-3'-phosphate
  modified_base 8: mod_base = OTHER; note = 2'-O-methylguanosine-3'-phosphate
  modified_base 9: mod_base = OTHER; note = 2'-deoxy-2'-fluoroadenosine-3'-phosphate
  modified_base 10: mod_base = OTHER; note = 2'-deoxy-2'-fluorocytidine-3'-phosphate
  modified_base 11: mod_base = OTHER; note = 2'-deoxy-2'-fluorocytidine-3'-phosphate
  modified_base 12: mod_base = OTHER; note = 2'-O-methylcytidine-3'-phosphate
  modified_base 13: mod_base = OTHER; note = 2'-O-methyluridine-3'-phosphate
  modified_base 14: mod_base = OTHER; note = 2'-O-methyluridine-3'-phosphate
  modified_base 15: mod_base = OTHER; note = 2'-O-methylguanosine-3'-phosphate
  modified_base 16: mod_base = OTHER; note = 2'-O-methyladenosine-3'-phosphate
  modified_base 17: mod_base = OTHER; note = 2'-O-methyladenosine-3'-phosphate
  modified_base 18: mod_base = OTHER; note = 2'-O-methylcytidine-3'-phosphate
  modified_base 19: mod_base = OTHER; note = 2'-O-methyladenosine-3'-phosphate
  modified_base 20: mod_base = OTHER; note = 2'-O-methyluridine-3'-phosphate
  modified_base 21: mod_base = OTHER; note = 2'-O-methyluridine-3'-phosphate ((2S,4R)-1-[29-[[2-(acetylamino)-2-deoxy-beta-D-galactopyra nosyl]oxy]-14,14-bis[[3-[[3-[[5-[[2-(acetylamino)-2-deoxy-b eta-D-galactopyranosyl]oxy]-1-oxopentyl]amino]propyl]amino] -3-oxopropoxy]methyl]-1,12,19,25-tetraoxo-16-oxa-13,20,24-t riazanonacos-1-yl]-4-hydroxy-2-pyrrolidinyl)methyl ester
tacagctgacccttgaacatt

SEQ ID NO: 4147 - RNA, 21 nt, synthetic construct
  source 1..21: mol_type = other RNA
  modified_base 1: mod_base = OTHER; note = 2'-O-methylcytidine-3'-phosphorothioate
  modified_base 2: mod_base = OTHER; note = 2'-O-methyladenosine-3'-phosphorothioate
  modified_base 3: mod_base = OTHER; note = 2'-O-methyladenosine-3'-phosphate
  modified_base 4: mod_base = OTHER; note = 2'-O-methyladenosine-3'-phosphate
  modified_base 5: mod_base = OTHER; note = 2'-O-methyladenosine-3'-phosphate
  modified_base 6: mod_base = OTHER; note = 2'-O-methyluridine-3'-phosphate
  modified_base 7: mod_base = OTHER; note = 2'-deoxy-2'-fluorocytidine-3'-phosphate
  modified_base 8: mod_base = OTHER; note = 2'-O-methyluridine-3'-phosphate
  modified_base 9: mod_base = OTHER; note = 2'-deoxy-2'-fluorouridine-3'-phosphate
  modified_base 10: mod_base = OTHER; note = 2'-deoxy-2'-fluoroadenosine-3'-phosphate
  modified_base 11: mod_base = OTHER; note = 2'-deoxy-2'-fluoroadenosine-3'-phosphate
  modified_base 12: mod_base = OTHER; note = 2'-O-methylcytidine-3'-phosphate
  modified_base 13: mod_base = OTHER; note = 2'-O-methyluridine-3'-phosphate
  modified_base 14: mod_base = OTHER; note = 2'-O-methyladenosine-3'-phosphate
  modified_base 15: mod_base = OTHER; note = 2'-O-methylcytidine-3'-phosphate
  modified_base 16: mod_base = OTHER; note = 2'-O-methylcytidine-3'-phosphate
  modified_base 17: mod_base = OTHER; note = 2'-O-methyluridine-3'-phosphate
  modified_base 18: mod_base = OTHER; note = 2'-O-methyladenosine-3'-phosphate
  modified_base 19: mod_base = OTHER; note = 2'-O-methyladenosine-3'-phosphate
  modified_base 20: mod_base = OTHER; note = 2'-O-methyluridine-3'-phosphate
  modified_base 21: mod_base = OTHER; note = 2'-O-methyluridine-3'-phosphate ((2S,4R)-1-[29-[[2-(acetylamino)-2-deoxy-beta-D-galactopyra nosyl]oxy]-14,14-bis[[3-[[3-[[5-[[2-(acetylamino)-2-deoxy-b eta-D-galactopyranosyl]oxy]-1-oxopentyl]amino]propyl]amino] -3-oxopropoxy]methyl]-1,12,19,25-tetraoxo-16-oxa-13,20,24-t riazanonacos-1-yl]-4-hydroxy-2-pyrrolidinyl)methyl ester
caaaatcttaactacctaatt

SEQ ID NO: 4148 - RNA, 21 nt, synthetic construct
  source 1..21: mol_type = other RNA
  modified_base 1: mod_base = OTHER; note = 2'-O-methyladenosine-3'-phosphorothioate
  modified_base 2: mod_base = OTHER; note = 2'-O-methylcytidine-3'-phosphorothioate
  modified_base 3: mod_base = OTHER; note = 2'-O-methyluridine-3'-phosphate
  modified_base 4: mod_base = OTHER; note = 2'-O-methyladenosine-3'-phosphate
  modified_base 5: mod_base = OTHER; note = 2'-O-methyluridine-3'-phosphate
  modified_base 6: mod_base = OTHER; note = 2'-O-methyluridine-3'-phosphate
  modified_base 7: mod_base = OTHER; note = 2'-deoxy-2'-fluoroguanosine-3'-phosphate
  modified_base 8: mod_base = OTHER; note = 2'-O-methyladenosine-3'-phosphate
  modified_base 9: mod_base = OTHER; note = 2'-deoxy-2'-fluorocytidine-3'-phosphate
  modified_base 10: mod_base = OTHER; note = 2'-deoxy-2'-fluorocytidine-3'-phosphate
  modified_base 11: mod_base = OTHER; note = 2'-deoxy-2'-fluoroadenosine-3'-phosphate
  modified_base 12: mod_base = OTHER; note = 2'-O-methyluridine-3'-phosphate
  modified_base 13: mod_base = OTHER; note = 2'-O-methyladenosine-3'-phosphate
  modified_base 14: mod_base = OTHER; note = 2'-O-methyladenosine-3'-phosphate
  modified_base 15: mod_base = OTHER; note = 2'-O-methyladenosine-3'-phosphate
  modified_base 16: mod_base = OTHER; note = 2'-O-methylcytidine-3'-phosphate
  modified_base 17: mod_base = OTHER; note = 2'-O-methylcytidine-3'-phosphate
  modified_base 18: mod_base = OTHER; note = 2'-O-methyluridine-3'-phosphate
  modified_base 19: mod_base = OTHER; note = 2'-O-methyluridine-3'-phosphate
  modified_base 20: mod_base = OTHER; note = 2'-O-methyladenosine-3'-phosphate
  modified_base 21: mod_base = OTHER; note = 2'-O-methyluridine-3'-phosphate ((2S,4R)-1-[29-[[2-(acetylamino)-2-deoxy-beta-D-galactopyra nosyl]oxy]-14,14-bis[[3-[[3-[[5-[[2-(acetylamino)-2-deoxy-b eta-D-galactopyranosyl]oxy]-1-oxopentyl]amino]propyl]amino] -3-oxopropoxy]methyl]-1,12,19,25-tetraoxo-16-oxa-13,20,24-t riazanonacos-1-yl]-4-hydroxy-2-pyrrolidinyl)methyl ester
actattgaccataaaccttat

SEQ ID NO: 4149 - RNA, 21 nt, synthetic construct
  source 1..21: mol_type = other RNA
  modified_base 1: mod_base = OTHER; note = 2'-O-methylcytidine-3'-phosphorothioate
  modified_base 2: mod_base = OTHER; note = 2'-O-methylcytidine-3'-phosphorothioate
  modified_base 3: mod_base = OTHER; note = 2'-O-methyluridine-3'-phosphate
  modified_base 4: mod_base = OTHER; note = 2'-O-methyluridine-3'-phosphate
  modified_base 5: mod_base = OTHER; note = 2'-O-methyladenosine-3'-phosphate
  modified_base 6: mod_base = OTHER; note = 2'-O-methylcytidine-3'-phosphate
  modified_base 7: mod_base = OTHER; note = 2'-deoxy-2'-fluorouridine-3'-phosphate
  modified_base 8: mod_base = OTHER; note = 2'-O-methylguanosine-3'-phosphate
  modified_base 9: mod_base = OTHER; note = 2'-deoxy-2'-fluoroadenosine-3'-phosphate
  modified_base 10: mod_base = OTHER; note = 2'-deoxy-2'-fluorouridine-3'-phosphate
  modified_base 11: mod_base = OTHER; note = 2'-deoxy-2'-fluoroadenosine-3'-phosphate
  modified_base 12: mod_base = OTHER; note = 2'-O-methyladenosine-3'-phosphate
  modified_base 13: mod_base = OTHER; note = 2'-O-methylcytidine-3'-phosphate
  modified_base 14: mod_base = OTHER; note = 2'-O-methyladenosine-3'-phosphate
  modified_base 15: mod_base = OTHER; note = 2'-O-methyluridine-3'-phosphate
  modified_base 16: mod_base = OTHER; note = 2'-O-methyladenosine-3'-phosphate
  modified_base 17: mod_base = OTHER; note = 2'-O-methyladenosine-3'-phosphate
  modified_base 18: mod_base = OTHER; note = 2'-O-methyladenosine-3'-phosphate
  modified_base 19: mod_base = OTHER; note = 2'-O-methylcytidine-3'-phosphate
  modified_base 20: mod_base = OTHER; note = 2'-O-methyladenosine-3'-phosphate
  modified_base 21: mod_base = OTHER; note = 2'-O-methyluridine-3'-phosphate ((2S,4R)-1-[29-[[2-(acetylamino)-2-deoxy-beta-D-galactopyra nosyl]oxy]-14,14-bis[[3-[[3-[[5-[[2-(acetylamino)-2-deoxy-b eta-D-galactopyranosyl]oxy]-1-oxopentyl]amino]propyl]amino] -3-oxopropoxy]methyl]-1,12,19,25-tetraoxo-16-oxa-13,20,24-t riazanonacos-1-yl]-4-hydroxy-2-pyrrolidinyl)methyl ester
ccttactgataacataaacat

SEQ ID NO: 4150 - RNA, 21 nt, synthetic construct
  source 1..21: mol_type = other RNA
  modified_base 1: mod_base = OTHER; note = 2'-O-methyladenosine-3'-phosphorothioate
  modified_base 2: mod_base = OTHER; note = 2'-O-methylcytidine-3'-phosphorothioate
  modified_base 3: mod_base = OTHER; note = 2'-O-methyladenosine-3'-phosphate
  modified_base 4: mod_base = OTHER; note = 2'-O-methylcytidine-3'-phosphate
  modified_base 5: mod_base = OTHER; note = 2'-O-methyladenosine-3'-phosphate
  modified_base 6: mod_base = OTHER; note = 2'-O-methyluridine-3'-phosphate
  modified_base 7: mod_base = OTHER; note = 2'-deoxy-2'-fluoroadenosine-3'-phosphate
  modified_base 8: mod_base = OTHER; note = 2'-O-methyluridine-3'-phosphate
  modified_base 9: mod_base = OTHER; note = 2'-deoxy-2'-fluorouridine-3'-phosphate
  modified_base 10: mod_base = OTHER; note = 2'-deoxy-2'-fluorouridine-3'-phosphate
  modified_base 11: mod_base = OTHER; note = 2'-deoxy-2'-fluorouridine-3'-phosphate
  modified_base 12: mod_base = OTHER; note = 2'-O-methylguanosine-3'-phosphate
  modified_base 13: mod_base = OTHER; note = 2'-O-methylcytidine-3'-phosphate
  modified_base 14: mod_base = OTHER; note = 2'-O-methylguanosine-3'-phosphate
  modified_base 15: mod_base = OTHER; note = 2'-O-methyluridine-3'-phosphate
  modified_base 16: mod_base = OTHER; note = 2'-O-methylguanosine-3'-phosphate
  modified_base 17: mod_base = OTHER; note = 2'-O-methyluridine-3'-phosphate
  modified_base 18: mod_base = OTHER; note = 2'-O-methyluridine-3'-phosphate
  modified_base 19: mod_base = OTHER; note = 2'-O-methyladenosine-3'-phosphate
  modified_base 20: mod_base = OTHER; note = 2'-O-methyluridine-3'-phosphate
  modified_base 21: mod_base = OTHER; note = 2'-O-methyluridine-3'-phosphate ((2S,4R)-1-[29-[[2-(acetylamino)-2-deoxy-beta-D-galactopyra nosyl]oxy]-14,14-bis[[3-[[3-[[5-[[2-(acetylamino)-2-deoxy-b eta-D-galactopyranosyl]oxy]-1-oxopentyl]amino]propyl]amino] -3-oxopropoxy]methyl]-1,12,19,25-tetraoxo-16-oxa-13,20,24-t riazanonacos-1-yl]-4-hydroxy-2-pyrrolidinyl)methyl ester
acacatattttgcgtgttatt

SEQ ID NO: 4151 - RNA, 21 nt, synthetic construct
  source 1..21: mol_type = other RNA
  modified_base 1: mod_base = OTHER; note = 2'-O-methylguanosine-3'-phosphorothioate
  modified_base 2: mod_base = OTHER; note = 2'-O-methyluridine-3'-phosphorothioate
  modified_base 3: mod_base = OTHER; note = 2'-O-methylguanosine-3'-phosphate
  modified_base 4: mod_base = OTHER; note = 2'-O-methyluridine-3'-phosphate
  modified_base 5: mod_base = OTHER; note = 2'-O-methyluridine-3'-phosphate
  modified_base 6: mod_base = OTHER; note = 2'-O-methyladenosine-3'-phosphate
  modified_base 7: mod_base = OTHER; note = 2'-deoxy-2'-fluorouridine-3'-phosphate
  modified_base 8: mod_base = OTHER; note = 2'-O-methyladenosine-3'-phosphate
  modified_base 9: mod_base = OTHER; note = 2'-deoxy-2'-fluorouridine-3'-phosphate
  modified_base 10: mod_base = OTHER; note = 2'-deoxy-2'-fluoroguanosine-3'-phosphate
  modified_base 11: mod_base = OTHER; note = 2'-deoxy-2'-fluorouridine-3'-phosphate
  modified_base 12: mod_base = OTHER; note = 2'-O-methyladenosine-3'-phosphate
  modified_base 13: mod_base = OTHER; note = 2'-O-methyluridine-3'-phosphate
  modified_base 14: mod_base = OTHER; note = 2'-O-methyluridine-3'-phosphate
  modified_base 15: mod_base = OTHER; note = 2'-O-methyladenosine-3'-phosphate
  modified_base 16: mod_base = OTHER; note = 2'-O-methyluridine-3'-phosphate
  modified_base 17: mod_base = OTHER; note = 2'-O-methyladenosine-3'-phosphate
  modified_base 18: mod_base = OTHER; note = 2'-O-methylcytidine-3'-phosphate
  modified_base 19: mod_base = OTHER; note = 2'-O-methyladenosine-3'-phosphate
  modified_base 20: mod_base = OTHER; note = 2'-O-methylcytidine-3'-phosphate
  modified_base 21: mod_base = OTHER; note = 2'-O-methyluridine-3'-phosphate ((2S,4R)-1-[29-[[2-(acetylamino)-2-deoxy-beta-D-galactopyra nosyl]oxy]-14,14-bis[[3-[[3-[[5-[[2-(acetylamino)-2-deoxy-b eta-D-galactopyranosyl]oxy]-1-oxopentyl]amino]propyl]amino] -3-oxopropoxy]methyl]-1,12,19,25-tetraoxo-16-oxa-13,20,24-t riazanonacos-1-yl]-4-hydroxy-2-pyrrolidinyl)methyl ester
gtgttatatgtattatacact

SEQ ID NO: 4152 - RNA, 21 nt, synthetic construct
  source 1..21: mol_type = other RNA
  modified_base 1: mod_base = OTHER; note = 2'-O-methylcytidine-3'-phosphorothioate
  modified_base 2: mod_base = OTHER; note = 2'-O-methyluridine-3'-phosphorothioate
  modified_base 3: mod_base = OTHER; note = 2'-O-methyladenosine-3'-phosphate
  modified_base 4: mod_base = OTHER; note = 2'-O-methyluridine-3'-phosphate
  modified_base 5: mod_base = OTHER; note = 2'-O-methyladenosine-3'-phosphate
  modified_base 6: mod_base = OTHER; note = 2'-O-methyluridine-3'-phosphate
  modified_base 7: mod_base = OTHER; note = 2'-deoxy-2'-fluorouridine-3'-phosphate
  modified_base 8: mod_base = OTHER; note = 2'-O-methylcytidine-3'-phosphate
  modified_base 9: mod_base = OTHER; note = 2'-deoxy-2'-fluorocytidine-3'-phosphate
  modified_base 10: mod_base = OTHER; note = 2'-deoxy-2'-fluorouridine-3'-phosphate
  modified_base 11: mod_base = OTHER; note = 2'-deoxy-2'-fluoroadenosine-3'-phosphate
  modified_base 12: mod_base = OTHER; note = 2'-O-methylcytidine-3'-phosphate
  modified_base 13: mod_base = OTHER; note = 2'-O-methyladenosine-3'-phosphate
  modified_base 14: mod_base = OTHER; note = 2'-O-methyladenosine-3'-phosphate
  modified_base 15: mod_base = OTHER; note = 2'-O-methyluridine-3'-phosphate
  modified_base 16: mod_base = OTHER; note = 2'-O-methyladenosine-3'-phosphate
  modified_base 17: mod_base = OTHER; note = 2'-O-methyladenosine-3'-phosphate
  modified_base 18: mod_base = OTHER; note = 2'-O-methyladenosine-3'-phosphate
  modified_base 19: mod_base = OTHER; note = 2'-O-methylguanosine-3'-phosphate
  modified_base 20: mod_base = OTHER; note = 2'-O-methyluridine-3'-phosphate
  modified_base 21: mod_base = OTHER; note = 2'-O-methyluridine-3'-phosphate ((2S,4R)-1-[29-[[2-(acetylamino)-2-deoxy-beta-D-galactopyra nosyl]oxy]-14,14-bis[[3-[[3-[[5-[[2-(acetylamino)-2-deoxy-b eta-D-galactopyranosyl]oxy]-1-oxopentyl]amino]propyl]amino] -3-oxopropoxy]methyl]-1,12,19,25-tetraoxo-16-oxa-13,20,24-t riazanonacos-1-yl]-4-hydroxy-2-pyrrolidinyl)methyl ester
ctatattcctacaataaagtt

SEQ ID NO: 4153 - RNA, 21 nt, synthetic construct
  source 1..21: mol_type = other RNA
  modified_base 1: mod_base = OTHER; note = 2'-O-methyladenosine-3'-phosphorothioate
  modified_base 2: mod_base = OTHER; note = 2'-O-methyladenosine-3'-phosphorothioate
  modified_base 3: mod_base = OTHER; note = 2'-O-methylguanosine-3'-phosphate
  modified_base 4: mod_base = OTHER; note = 2'-O-methylcytidine-3'-phosphate
  modified_base 5: mod_base = OTHER; note = 2'-O-methyluridine-3'-phosphate
  modified_base 6: mod_base = OTHER; note = 2'-O-methyladenosine-3'-phosphate
  modified_base 7: mod_base = OTHER; note = 2'-deoxy-2'-fluoroguanosine-3'-phosphate
  modified_base 8: mod_base = OTHER; note = 2'-O-methyladenosine-3'-phosphate
  modified_base 9: mod_base = OTHER; note = 2'-deoxy-2'-fluoroguanosine-3'-phosphate
  modified_base 10: mod_base = OTHER; note = 2'-deoxy-2'-fluoroadenosine-3'-phosphate
  modified_base 11: mod_base = OTHER; note = 2'-deoxy-2'-fluoroadenosine-3'-phosphate
  modified_base 12: mod_base = OTHER; note = 2'-O-methyladenosine-3'-phosphate
  modified_base 13: mod_base = OTHER; note = 2'-O-methyladenosine-3'-phosphate
  modified_base 14: mod_base = OTHER; note = 2'-O-methyluridine-3'-phosphate
  modified_base 15: mod_base = OTHER; note = 2'-O-methylguanosine-3'-phosphate
  modified_base 16: mod_base = OTHER; note = 2'-O-methyluridine-3'-phosphate
  modified_base 17: mod_base = OTHER; note = 2'-O-methyluridine-3'-phosphate
  modified_base 18: mod_base = OTHER; note = 2'-O-methyladenosine-3'-phosphate
  modified_base 19: mod_base = OTHER; note = 2'-O-methyluridine-3'-phosphate
  modified_base 20: mod_base = OTHER; note = 2'-O-methyluridine-3'-phosphate
  modified_base 21: mod_base = OTHER; note = 2'-O-methyluridine-3'-phosphate ((2S,4R)-1-[29-[[2-(acetylamino)-2-deoxy-beta-D-galactopyra nosyl]oxy]-14,14-bis[[3-[[3-[[5-[[2-(acetylamino)-2-deoxy-b eta-D-galactopyranosyl]oxy]-1-oxopentyl]amino]propyl]amino] -3-oxopropoxy]methyl]-1,12,19,25-tetraoxo-16-oxa-13,20,24-t riazanonacos-1-yl]-4-hydroxy-2-pyrrolidinyl)methyl ester
aagctagagaaaatgttattt

SEQ ID NO: 4154 - RNA, 21 nt, synthetic construct
  source 1..21: mol_type = other RNA
  modified_base 1: mod_base = OTHER; note = 2'-O-methylcytidine-3'-phosphorothioate
  modified_base 2: mod_base = OTHER; note = 2'-O-methyluridine-3'-phosphorothioate
  modified_base 3: mod_base = OTHER; note = 2'-O-methyladenosine-3'-phosphate
  modified_base 4: mod_base = OTHER; note = 2'-O-methyluridine-3'-phosphate
  modified_base 5: mod_base = OTHER; note = 2'-O-methyluridine-3'-phosphate
  modified_base 6: mod_base = OTHER; note = 2'-O-methylcytidine-3'-phosphate
  modified_base 7: mod_base = OTHER; note = 2'-deoxy-2'-fluoroadenosine-3'-phosphate
  modified_base 8: mod_base = OTHER; note = 2'-O-methyluridine-3'-phosphate
  modified_base 9: mod_base = OTHER; note = 2'-deoxy-2'-fluorouridine-3'-phosphate
  modified_base 10: mod_base = OTHER; note = 2'-deoxy-2'-fluoroadenosine-3'-phosphate
  modified_base 11: mod_base = OTHER; note = 2'-deoxy-2'-fluoroadenosine-3'-phosphate
  modified_base 12: mod_base = OTHER; note = 2'-O-methyladenosine-3'-phosphate
  modified_base 13: mod_base = OTHER; note = 2'-O-methyluridine-3'-phosphate
  modified_base 14: mod_base = OTHER; note = 2'-O-methylguanosine-3'-phosphate
  modified_base 15: mod_base = OTHER; note = 2'-O-methylguanosine-3'-phosphate
  modified_base 16: mod_base = OTHER; note = 2'-O-methyladenosine-3'-phosphate
  modified_base 17: mod_base = OTHER; note = 2'-O-methyladenosine-3'-phosphate
  modified_base 18: mod_base = OTHER; note = 2'-O-methylguanosine-3'-phosphate
  modified_base 19: mod_base = OTHER; note = 2'-O-methyluridine-3'-phosphate
  modified_base 20: mod_base = OTHER; note = 2'-O-methylguanosine-3'-phosphate
  modified_base 21: mod_base = OTHER; note = 2'-O-methyluridine-3'-phosphate ((2S,4R)-1-[29-[[2-(acetylamino)-2-deoxy-beta-D-galactopyra nosyl]oxy]-14,14-bis[[3-[[3-[[5-[[2-(acetylamino)-2-deoxy-b eta-D-galactopyranosyl]oxy]-1-oxopentyl]amino]propyl]amino] -3-oxopropoxy]methyl]-1,12,19,25-tetraoxo-16-oxa-13,20,24-t riazanonacos-1-yl]-4-hydroxy-2-pyrrolidinyl)methyl ester
ctattcattaaatggaagtgt

SEQ ID NO: 4155 - RNA, 21 nt, synthetic construct
  source 1..21: mol_type = other RNA
  modified_base 1: mod_base = OTHER; note = 2'-O-methyladenosine-3'-phosphorothioate
  modified_base 2: mod_base = OTHER; note = 2'-O-methyladenosine-3'-phosphorothioate
  modified_base 3: mod_base = OTHER; note = 2'-O-methylcytidine-3'-phosphate
  modified_base 4: mod_base = OTHER; note = 2'-O-methyladenosine-3'-phosphate
  modified_base 5: mod_base = OTHER; note = 2'-O-methyluridine-3'-phosphate
  modified_base 6: mod_base = OTHER; note = 2'-O-methyladenosine-3'-phosphate
  modified_base 7: mod_base = OTHER; note = 2'-deoxy-2'-fluoroadenosine-3'-phosphate
  modified_base 8: mod_base = OTHER; note = 2'-O-methyladenosine-3'-phosphate
  modified_base 9: mod_base = OTHER; note = 2'-deoxy-2'-fluoroadenosine-3'-phosphate
  modified_base 10: mod_base = OTHER; note = 2'-deoxy-2'-fluoroguanosine-3'-phosphate
  modified_base 11: mod_base = OTHER; note = 2'-deoxy-2'-fluorouridine-3'-phosphate
  modified_base 12: mod_base = OTHER; note = 2'-O-methylcytidine-3'-phosphate
  modified_base 13: mod_base = OTHER; note = 2'-O-methyluridine-3'-phosphate
  modified_base 14: mod_base = OTHER; note = 2'-O-methyluridine-3'-phosphate
  modified_base 15: mod_base = OTHER; note = 2'-O-methylcytidine-3'-phosphate
  modified_base 16: mod_base = OTHER; note = 2'-O-methyladenosine-3'-phosphate
  modified_base 17: mod_base = OTHER; note = 2'-O-methyluridine-3'-phosphate
  modified_base 18: mod_base = OTHER; note = 2'-O-methyluridine-3'-phosphate
  modified_base 19: mod_base = OTHER; note = 2'-O-methylcytidine-3'-phosphate
  modified_base 20: mod_base = OTHER; note = 2'-O-methyluridine-3'-phosphate
  modified_base 21: mod_base = OTHER; note = 2'-O-methyluridine-3'-phosphate ((2S,4R)-1-[29-[[2-(acetylamino)-2-deoxy-beta-D-galactopyra nosyl]oxy]-14,14-bis[[3-[[3-[[5-[[2-(acetylamino)-2-deoxy-b eta-D-galactopyranosyl]oxy]-1-oxopentyl]amino]propyl]amino] -3-oxopropoxy]methyl]-1,12,19,25-tetraoxo-16-oxa-13,20,24-t riazanonacos-1-yl]-4-hydroxy-2-pyrrolidinyl)methyl ester
aacataaaagtcttcattctt

SEQ ID NO: 4156 - RNA, 21 nt, synthetic construct
  source 1..21: mol_type = other RNA
  modified_base 1: mod_base = OTHER; note = 2'-O-methylcytidine-3'-phosphorothioate
  modified_base 2: mod_base = OTHER; note = 2'-O-methyladenosine-3'-phosphorothioate
  modified_base 3: mod_base = OTHER; note = 2'-O-methyluridine-3'-phosphate
  modified_base 4: mod_base = OTHER; note = 2'-O-methyluridine-3'-phosphate
  modified_base 5: mod_base = OTHER; note = 2'-O-methylcytidine-3'-phosphate
  modified_base 6: mod_base = OTHER; note = 2'-O-methyluridine-3'-phosphate
  modified_base 7: mod_base = OTHER; note = 2'-deoxy-2'-fluorocytidine-3'-phosphate
  modified_base 8: mod_base = OTHER; note = 2'-O-methyladenosine-3'-phosphate
  modified_base 9: mod_base = OTHER; note = 2'-deoxy-2'-fluorouridine-3'-phosphate
  modified_base 10: mod_base = OTHER; note = 2'-deoxy-2'-fluorouridine-3'-phosphate
  modified_base 11: mod_base = OTHER; note = 2'-deoxy-2'-fluoroguanosine-3'-phosphate
  modified_base 12: mod_base = OTHER; note = 2'-O-methyluridine-3'-phosphate
  modified_base 13: mod_base = OTHER; note = 2'-O-methylcytidine-3'-phosphate
  modified_base 14: mod_base = OTHER; note = 2'-O-methyluridine-3'-phosphate
  modified_base 15: mod_base = OTHER; note = 2'-O-methyluridine-3'-phosphate
  modified_base 16: mod_base = OTHER; note = 2'-O-methylcytidine-3'-phosphate
  modified_base 17: mod_base = OTHER; note = 2'-O-methyladenosine-3'-phosphate
  modified_base 18: mod_base = OTHER; note = 2'-O-methylcytidine-3'-phosphate
  modified_base 19: mod_base = OTHER; note = 2'-O-methyladenosine-3'-phosphate
  modified_base 20: mod_base = OTHER; note = 2'-O-methyluridine-3'-phosphate
  modified_base 21: mod_base = OTHER; note = 2'-O-methyluridine-3'-phosphate ((2S,4R)-1-[29-[[2-(acetylamino)-2-deoxy-beta-D-galactopyra nosyl]oxy]-14,14-bis[[3-[[3-[[5-[[2-(acetylamino)-2-deoxy-b eta-D-galactopyranosyl]oxy]-1-oxopentyl]amino]propyl]amino] -3-oxopropoxy]methyl]-1,12,19,25-tetraoxo-16-oxa-13,20,24-t riazanonacos-1-yl]-4-hydroxy-2-pyrrolidinyl)methyl ester
cattctcattgtcttcacatt

SEQ ID NO: 4157 - RNA, 21 nt, synthetic construct
  source 1..21: mol_type = other RNA
  modified_base 1: mod_base = OTHER; note = 2'-O-methylguanosine-3'-phosphorothioate
  modified_base 2: mod_base = OTHER; note = 2'-O-methylguanosine-3'-phosphorothioate
  modified_base 3: mod_base = OTHER; note = 2'-O-methyluridine-3'-phosphate
  modified_base 4: mod_base = OTHER; note = 2'-O-methylcytidine-3'-phosphate
  modified_base 5: mod_base = OTHER; note = 2'-O-methyluridine-3'-phosphate
  modified_base 6: mod_base = OTHER; note = 2'-O-methyluridine-3'-phosphate
  modified_base 7: mod_base = OTHER; note = 2'-deoxy-2'-fluoroguanosine-3'-phosphate
  modified_base 8: mod_base = OTHER; note = 2'-O-methylcytidine-3'-phosphate
  modified_base 9: mod_base = OTHER; note = 2'-deoxy-2'-fluoroadenosine-3'-phosphate
  modified_base 10: mod_base = OTHER; note = 2'-deoxy-2'-fluoroguanosine-3'-phosphate
  modified_base 11: mod_base = OTHER; note = 2'-deoxy-2'-fluorouridine-3'-phosphate
  modified_base 12: mod_base = OTHER; note = 2'-O-methylcytidine-3'-phosphate
  modified_base 13: mod_base = OTHER; note = 2'-O-methyluridine-3'-phosphate
  modified_base 14: mod_base = OTHER; note = 2'-O-methyluridine-3'-phosphate
  modified_base 15: mod_base = OTHER; note = 2'-O-methylguanosine-3'-phosphate
  modified_base 16: mod_base = OTHER; note = 2'-O-methyluridine-3'-phosphate
  modified_base 17: mod_base = OTHER; note = 2'-O-methylcytidine-3'-phosphate
  modified_base 18: mod_base = OTHER; note = 2'-O-methyluridine-3'-phosphate
  modified_base 19: mod_base = OTHER; note = 2'-O-methyluridine-3'-phosphate
  modified_base 20: mod_base = OTHER; note = 2'-O-methyladenosine-3'-phosphate
  modified_base 21: mod_base = OTHER; note = 2'-O-methyluridine-3'-phosphate ((2S,4R)-1-[29-[[2-(acetylamino)-2-deoxy-beta-D-galactopyra nosyl]oxy]-14,14-bis[[3-[[3-[[5-[[2-(acetylamino)-2-deoxy-b eta-D-galactopyranosyl]oxy]-1-oxopentyl]amino]propyl]amino] -3-oxopropoxy]methyl]-1,12,19,25-tetraoxo-16-oxa-13,20,24-t riazanonacos-1-yl]-4-hydroxy-2-pyrrolidinyl)methyl ester
ggtcttgcagtcttgtcttat

SEQ ID NO: 4158 - RNA, 21 nt, synthetic construct
  source 1..21: mol_type = other RNA
  modified_base 1: mod_base = OTHER; note = 2'-O-methyladenosine-3'-phosphorothioate
  modified_base 2: mod_base = OTHER; note = 2'-O-methyladenosine-3'-phosphorothioate
  modified_base 3: mod_base = OTHER; note = 2'-O-methyladenosine-3'-phosphate
  modified_base 4: mod_base = OTHER; note = 2'-O-methylguanosine-3'-phosphate
  modified_base 5: mod_base = OTHER; note = 2'-O-methyladenosine-3'-phosphate
  modified_base 6: mod_base = OTHER; note = 2'-O-methyladenosine-3'-phosphate
  modified_base 7: mod_base = OTHER; note = 2'-deoxy-2'-fluorouridine-3'-phosphate
  modified_base 8: mod_base = OTHER; note = 2'-O-methyladenosine-3'-phosphate
  modified_base 9: mod_base = OTHER; note = 2'-deoxy-2'-fluorouridine-3'-phosphate
  modified_base 10: mod_base = OTHER; note = 2'-deoxy-2'-fluorouridine-3'-phosphate
  modified_base 11: mod_base = OTHER; note = 2'-deoxy-2'-fluorocytidine-3'-phosphate
  modified_base 12: mod_base = OTHER; note = 2'-O-methyladenosine-3'-phosphate
  modified_base 13: mod_base = OTHER; note = 2'-O-methyluridine-3'-phosphate
  modified_base 14: mod_base = OTHER; note = 2'-O-methylguanosine-3'-phosphate
  modified_base 15: mod_base = OTHER; note = 2'-O-methyluridine-3'-phosphate
  modified_base 16: mod_base = OTHER; note = 2'-O-methyladenosine-3'-phosphate
  modified_base 17: mod_base = OTHER; note = 2'-O-methyluridine-3'-phosphate
  modified_base 18: mod_base = OTHER; note = 2'-O-methyladenosine-3'-phosphate
  modified_base 19: mod_base = OTHER; note = 2'-O-methyladenosine-3'-phosphate
  modified_base 20: mod_base = OTHER; note = 2'-O-methylguanosine-3'-phosphate
  modified_base 21: mod_base = OTHER; note = 2'-O-methyluridine-3'-phosphate ((2S,4R)-1-[29-[[2-(acetylamino)-2-deoxy-beta-D-galactopyra nosyl]oxy]-14,14-bis[[3-[[3-[[5-[[2-(acetylamino)-2-deoxy-b eta-D-galactopyranosyl]oxy]-1-oxopentyl]amino]propyl]amino] -3-oxopropoxy]methyl]-1,12,19,25-tetraoxo-16-oxa-13,20,24-t riazanonacos-1-yl]-4-hydroxy-2-pyrrolidinyl)methyl ester
aaagaatattcatgtataagt

SEQ ID NO: 4159 - RNA, 21 nt, synthetic construct
  source 1..21: mol_type = other RNA
  modified_base 1: mod_base = OTHER; note = 2'-O-methyluridine-3'-phosphorothioate
  modified_base 2: mod_base = OTHER; note = 2'-O-methyluridine-3'-phosphorothioate
  modified_base 3: mod_base = OTHER; note = 2'-O-methylguanosine-3'-phosphate
  modified_base 4: mod_base = OTHER; note = 2'-O-methylcytidine-3'-phosphate
  modified_base 5: mod_base = OTHER; note = 2'-O-methyladenosine-3'-phosphate
  modified_base 6: mod_base = OTHER; note = 2'-O-methyladenosine-3'-phosphate
  modified_base 7: mod_base = OTHER; note = 2'-deoxy-2'-fluorouridine-3'-phosphate
  modified_base 8: mod_base = OTHER; note = 2'-O-methyluridine-3'-phosphate
  modified_base 9: mod_base = OTHER; note = 2'-deoxy-2'-fluorocytidine-3'-phosphate
  modified_base 10: mod_base = OTHER; note = 2'-deoxy-2'-fluoroadenosine-3'-phosphate
  modified_base 11: mod_base = OTHER; note = 2'-deoxy-2'-fluoroadenosine-3'-phosphate
  modified_base 12: mod_base = OTHER; note = 2'-O-methylguanosine-3'-phosphate
  modified_base 13: mod_base = OTHER; note = 2'-O-methylcytidine-3'-phosphate
  modified_base 14: mod_base = OTHER; note = 2'-O-methylcytidine-3'-phosphate
  modified_base 15: mod_base = OTHER; note = 2'-O-methylcytidine-3'-phosphate
  modified_base 16: mod_base = OTHER; note = 2'-O-methyluridine-3'-phosphate
  modified_base 17: mod_base = OTHER; note = 2'-O-methyluridine-3'-phosphate
  modified_base 18: mod_base = OTHER; note = 2'-O-methylguanosine-3'-phosphate
  modified_base 19: mod_base = OTHER; note = 2'-O-methyluridine-3'-phosphate
  modified_base 20: mod_base = OTHER; note = 2'-O-methyluridine-3'-phosphate
  modified_base 21: mod_base = OTHER; note = 2'-O-methyluridine-3'-phosphate ((2S,4R)-1-[29-[[2-(acetylamino)-2-deoxy-beta-D-galactopyra nosyl]oxy]-14,14-bis[[3-[[3-[[5-[[2-(acetylamino)-2-deoxy-b eta-D-galactopyranosyl]oxy]-1-oxopentyl]amino]propyl]amino] -3-oxopropoxy]methyl]-1,12,19,25-tetraoxo-16-oxa-13,20,24-t riazanonacos-1-yl]-4-hydroxy-2-pyrrolidinyl)methyl ester
ttgcaattcaagcccttgttt

SEQ ID NO: 4160 - RNA, 21 nt, synthetic construct
  source 1..21: mol_type = other RNA
  modified_base 1: mod_base = OTHER; note = 2'-O-methyluridine-3'-phosphorothioate
  modified_base 2: mod_base = OTHER; note = 2'-O-methyluridine-3'-phosphorothioate
  modified_base 3: mod_base = OTHER; note = 2'-O-methylguanosine-3'-phosphate
  modified_base 4: mod_base = OTHER; note = 2'-O-methyluridine-3'-phosphate
  modified_base 5: mod_base = OTHER; note = 2'-O-methyluridine-3'-phosphate
  modified_base 6: mod_base = OTHER; note = 2'-O-methylcytidine-3'-phosphate
  modified_base 7: mod_base = OTHER; note = 2'-deoxy-2'-fluoroadenosine-3'-phosphate
  modified_base 8: mod_base = OTHER; note = 2'-O-methyladenosine-3'-phosphate
  modified_base 9: mod_base = OTHER; note = 2'-deoxy-2'-fluoroguanosine-3'-phosphate
  modified_base 10: mod_base = OTHER; note = 2'-deoxy-2'-fluoroguanosine-3'-phosphate
  modified_base 11: mod_base = OTHER; note = 2'-deoxy-2'-fluoroguanosine-3'-phosphate
  modified_base 12: mod_base = OTHER; note = 2'-O-methyluridine-3'-phosphate
  modified_base 13: mod_base = OTHER; note = 2'-O-methylcytidine-3'-phosphate
  modified_base 14: mod_base = OTHER; note = 2'-O-methyladenosine-3'-phosphate
  modified_base 15: mod_base = OTHER; note = 2'-O-methyladenosine-3'-phosphate
  modified_base 16: mod_base = OTHER; note = 2'-O-methylcytidine-3'-phosphate
  modified_base 17: mod_base = OTHER; note = 2'-O-methyluridine-3'-phosphate
  modified_base 18: mod_base = OTHER; note = 2'-O-methylguanosine-3'-phosphate
  modified_base 19: mod_base = OTHER; note = 2'-O-methyluridine-3'-phosphate
  modified_base 20: mod_base = OTHER; note = 2'-O-methyladenosine-3'-phosphate
  modified_base 21: mod_base = OTHER; note = 2'-O-methyluridine-3'-phosphate ((2S,4R)-1-[29-[[2-(acetylamino)-2-deoxy-beta-D-galactopyra nosyl]oxy]-14,14-bis[[3-[[3-[[5-[[2-(acetylamino)-2-deoxy-b eta-D-galactopyranosyl]oxy]-1-oxopentyl]amino]propyl]amino] -3-oxopropoxy]methyl]-1,12,19,25-tetraoxo-16-oxa-13,20,24-t riazanonacos-1-yl]-4-hydroxy-2-pyrrolidinyl)methyl ester
ttgttcaagggtcaactgtat

SEQ ID NO: 4161 - RNA, 21 nt, synthetic construct
  source 1..21: mol_type = other RNA
  modified_base 1: mod_base = OTHER; note = 2'-O-methyladenosine-3'-phosphorothioate
  modified_base 2: mod_base = OTHER; note = 2'-O-methyladenosine-3'-phosphorothioate
  modified_base 3: mod_base = OTHER; note = 2'-O-methylcytidine-3'-phosphate
  modified_base 4: mod_base = OTHER; note = 2'-O-methyluridine-3'-phosphate
  modified_base 5: mod_base = OTHER; note = 2'-O-methylguanosine-3'-phosphate
  modified_base 6: mod_base = OTHER; note = 2'-O-methyluridine-3'-phosphate
  modified_base 7: mod_base = OTHER; note = 2'-deoxy-2'-fluoroadenosine-3'-phosphate
  modified_base 8: mod_base = OTHER; note = 2'-O-methyladenosine-3'-phosphate
  modified_base 9: mod_base = OTHER; note = 2'-deoxy-2'-fluorouridine-3'-phosphate
  modified_base 10: mod_base = OTHER; note = 2'-deoxy-2'-fluoroadenosine-3'-phosphate
  modified_base 11: mod_base = OTHER; note = 2'-deoxy-2'-fluoroguanosine-3'-phosphate
  modified_base 12: mod_base = OTHER; note = 2'-O-methylguanosine-3'-phosphate
  modified_base 13: mod_base = OTHER; note = 2'-O-methyladenosine-3'-phosphate
  modified_base 14: mod_base = OTHER; note = 2'-O-methyluridine-3'-phosphate
  modified_base 15: mod_base = OTHER; note = 2'-O-methyladenosine-3'-phosphate
  modified_base 16: mod_base = OTHER; note = 2'-O-methyluridine-3'-phosphate
  modified_base 17: mod_base = OTHER; note = 2'-O-methyladenosine-3'-phosphate
  modified_base 18: mod_base = OTHER; note = 2'-O-methylguanosine-3'-phosphate
  modified_base 19: mod_base = OTHER; note = 2'-O-methylcytidine-3'-phosphate
  modified_base 20: mod_base = OTHER; note = 2'-O-methyluridine-3'-phosphate
  modified_base 21: mod_base = OTHER; note = 2'-O-methyluridine-3'-phosphate ((2S,4R)-1-[29-[[2-(acetylamino)-2-deoxy-beta-D-galactopyra nosyl]oxy]-14,14-bis[[3-[[3-[[5-[[2-(acetylamino)-2-deoxy-b eta-D-galactopyranosyl]oxy]-1-oxopentyl]amino]propyl]amino] -3-oxopropoxy]methyl]-1,12,19,25-tetraoxo-16-oxa-13,20,24-t riazanonacos-1-yl]-4-hydroxy-2-pyrrolidinyl)methyl ester
aactgtaataggatatagctt

SEQ ID NO: 4162 - RNA, 21 nt, synthetic construct
  source 1..21: mol_type = other RNA
  modified_base 1: mod_base = OTHER; note = 2'-O-methylcytidine-3'-phosphorothioate
  modified_base 2: mod_base = OTHER; note = 2'-O-methyluridine-3'-phosphorothioate
  modified_base 3: mod_base = OTHER; note = 2'-O-methyladenosine-3'-phosphate
  modified_base 4: mod_base = OTHER; note = 2'-O-methyluridine-3'-phosphate
  modified_base 5: mod_base = OTHER; note = 2'-O-methyluridine-3'-phosphate
  modified_base 6: mod_base = OTHER; note = 2'-O-methyluridine-3'-phosphate
  modified_base 7: mod_base = OTHER; note = 2'-deoxy-2'-fluorouridine-3'-phosphate
  modified_base 8: mod_base = OTHER; note = 2'-O-methyluridine-3'-phosphate
  modified_base 9: mod_base = OTHER; note = 2'-deoxy-2'-fluorocytidine-3'-phosphate
  modified_base 10: mod_base = OTHER; note = 2'-deoxy-2'-fluorouridine-3'-phosphate
  modified_base 11: mod_base = OTHER; note = 2'-deoxy-2'-fluorouridine-3'-phosphate
  modified_base 12: mod_base = OTHER; note = 2'-O-methylcytidine-3'-phosphate
  modified_base 13: mod_base = OTHER; note = 2'-O-methylcytidine-3'-phosphate
  modified_base 14: mod_base = OTHER; note = 2'-O-methyluridine-3'-phosphate
  modified_base 15: mod_base = OTHER; note = 2'-O-methylcytidine-3'-phosphate
  modified_base 16: mod_base = OTHER; note = 2'-O-methyluridine-3'-phosphate
  modified_base 17: mod_base = OTHER; note = 2'-O-methyladenosine-3'-phosphate
  modified_base 18: mod_base = OTHER; note = 2'-O-methyluridine-3'-phosphate
  modified_base 19: mod_base = OTHER; note = 2'-O-methylcytidine-3'-phosphate
  modified_base 20: mod_base = OTHER; note = 2'-O-methyladenosine-3'-phosphate
  modified_base 21: mod_base = OTHER; note = 2'-O-methyluridine-3'-phosphate ((2S,4R)-1-[29-[[2-(acetylamino)-2-deoxy-beta-D-galactopyra nosyl]oxy]-14,14-bis[[3-[[3-[[5-[[2-(acetylamino)-2-deoxy-b eta-D-galactopyranosyl]oxy]-1-oxopentyl]amino]propyl]amino] -3-oxopropoxy]methyl]-1,12,19,25-tetraoxo-16-oxa-13,20,24-t riazanonacos-1-yl]-4-hydroxy-2-pyrrolidinyl)methyl ester
ctatttttcttcctctatcat

SEQ ID NO: 4163 - RNA, 21 nt, synthetic construct
  source 1..21: mol_type = other RNA
  modified_base 1: mod_base = OTHER; note = 2'-O-methyluridine-3'-phosphorothioate
  modified_base 2: mod_base = OTHER; note = 2'-O-methylcytidine-3'-phosphorothioate
  modified_base 3: mod_base = OTHER; note = 2'-O-methyluridine-3'-phosphate
  modified_base 4: mod_base = OTHER; note = 2'-O-methyladenosine-3'-phosphate
  modified_base 5: mod_base = OTHER; note = 2'-O-methyluridine-3'-phosphate
  modified_base 6: mod_base = OTHER; note = 2'-O-methylcytidine-3'-phosphate
  modified_base 7: mod_base = OTHER; note = 2'-deoxy-2'-fluoroadenosine-3'-phosphate
  modified_base 8: mod_base = OTHER; note = 2'-O-methyladenosine-3'-phosphate
  modified_base 9: mod_base = OTHER; note = 2'-deoxy-2'-fluorocytidine-3'-phosphate
  modified_base 10: mod_base = OTHER; note = 2'-deoxy-2'-fluorocytidine-3'-phosphate
  modified_base 11: mod_base = OTHER; note = 2'-deoxy-2'-fluoroadenosine-3'-phosphate
  modified_base 12: mod_base = OTHER; note = 2'-O-methyladenosine-3'-phosphate
  modified_base 13: mod_base = OTHER; note = 2'-O-methyladenosine-3'-phosphate
  modified_base 14: mod_base = OTHER; note = 2'-O-methyluridine-3'-phosphate
  modified_base 15: mod_base = OTHER; note = 2'-O-methylguanosine-3'-phosphate
  modified_base 16: mod_base = OTHER; note = 2'-O-methylguanosine-3'-phosphate
  modified_base 17: mod_base = OTHER; note = 2'-O-methyluridine-3'-phosphate
  modified_base 18: mod_base = OTHER; note = 2'-O-methyladenosine-3'-phosphate
  modified_base 19: mod_base = OTHER; note = 2'-O-methyladenosine-3'-phosphate
  modified_base 20: mod_base = OTHER; note = 2'-O-methylguanosine-3'-phosphate
  modified_base 21: mod_base = OTHER; note = 2'-O-methyluridine-3'-phosphate ((2S,4R)-1-[29-[[2-(acetylamino)-2-deoxy-beta-D-galactopyra nosyl]oxy]-14,14-bis[[3-[[3-[[5-[[2-(acetylamino)-2-deoxy-b eta-D-galactopyranosyl]oxy]-1-oxopentyl]amino]propyl]amino] -3-oxopropoxy]methyl]-1,12,19,25-tetraoxo-16-oxa-13,20,24-t riazanonacos-1-yl]-4-hydroxy-2-pyrrolidinyl)methyl ester
tctatcaaccaaatggtaagt

SEQ ID NO: 4164 - RNA, 21 nt, synthetic construct
  source 1..21: mol_type = other RNA
  modified_base 1: mod_base = OTHER; note = 2'-O-methyladenosine-3'-phosphorothioate
  modified_base 2: mod_base = OTHER; note = 2'-O-methyluridine-3'-phosphorothioate
  modified_base 3: mod_base = OTHER; note = 2'-O-methylcytidine-3'-phosphate
  modified_base 4: mod_base = OTHER; note = 2'-O-methyluridine-3'-phosphate
  modified_base 5: mod_base = OTHER; note = 2'-O-methyladenosine-3'-phosphate
  modified_base 6: mod_base = OTHER; note = 2'-O-methyluridine-3'-phosphate
  modified_base 7: mod_base = OTHER; note = 2'-deoxy-2'-fluorouridine-3'-phosphate
  modified_base 8: mod_base = OTHER; note = 2'-O-methyluridine-3'-phosphate
  modified_base 9: mod_base = OTHER; note = 2'-deoxy-2'-fluorouridine-3'-phosphate
  modified_base 10: mod_base = OTHER; note = 2'-deoxy-2'-fluoroguanosine-3'-phosphate
  modified_base 11: mod_base = OTHER; note = 2'-deoxy-2'-fluorocytidine-3'-phosphate
  modified_base 12: mod_base = OTHER; note = 2'-O-methyladenosine-3'-phosphate
  modified_base 13: mod_base = OTHER; note = 2'-O-methylguanosine-3'-phosphate
  modified_base 14: mod_base = OTHER; note = 2'-O-methyluridine-3'-phosphate
  modified_base 15: mod_base = OTHER; note = 2'-O-methylcytidine-3'-phosphate
  modified_base 16: mod_base = OTHER; note = 2'-O-methylcytidine-3'-phosphate
  modified_base 17: mod_base = OTHER; note = 2'-O-methyladenosine-3'-phosphate
  modified_base 18: mod_base = OTHER; note = 2'-O-methylcytidine-3'-phosphate
  modified_base 19: mod_base = OTHER; note = 2'-O-methyluridine-3'-phosphate
  modified_base 20: mod_base = OTHER; note = 2'-O-methylcytidine-3'-phosphate
  modified_base 21: mod_base = OTHER; note = 2'-O-methyluridine-3'-phosphate ((2S,4R)-1-[29-[[2-(acetylamino)-2-deoxy-beta-D-galactopyra nosyl]oxy]-14,14-bis[[3-[[3-[[5-[[2-(acetylamino)-2-deoxy-b eta-D-galactopyranosyl]oxy]-1-oxopentyl]amino]propyl]amino] -3-oxopropoxy]methyl]-1,12,19,25-tetraoxo-16-oxa-13,20,24-t riazanonacos-1-yl]-4-hydroxy-2-pyrrolidinyl)methyl ester
atctattttgcagtccactct

SEQ ID NO: 4165 - RNA, 21 nt, synthetic construct
  source 1..21: mol_type = other RNA
  modified_base 1: mod_base = OTHER; note = 2'-O-methyluridine-3'-phosphorothioate
  modified_base 2: mod_base = OTHER; note = 2'-O-methyladenosine-3'-phosphorothioate
  modified_base 3: mod_base = OTHER; note = 2'-O-methylcytidine-3'-phosphate
  modified_base 4: mod_base = OTHER; note = 2'-O-methyluridine-3'-phosphate
  modified_base 5: mod_base = OTHER; note = 2'-O-methylguanosine-3'-phosphate
  modified_base 6: mod_base = OTHER; note = 2'-O-methyladenosine-3'-phosphate
  modified_base 7: mod_base = OTHER; note = 2'-deoxy-2'-fluoroguanosine-3'-phosphate
  modified_base 8: mod_base = OTHER; note = 2'-O-methylcytidine-3'-phosphate
  modified_base 9: mod_base = OTHER; note = 2'-deoxy-2'-fluorouridine-3'-phosphate
  modified_base 10: mod_base = OTHER; note = 2'-deoxy-2'-fluoroadenosine-3'-phosphate
  modified_base 11: mod_base = OTHER; note = 2'-deoxy-2'-fluoroadenosine-3'-phosphate
  modified_base 12: mod_base = OTHER; note = 2'-O-methyladenosine-3'-phosphate
  modified_base 13: mod_base = OTHER; note = 2'-O-methyluridine-3'-phosphate
  modified_base 14: mod_base = OTHER; note = 2'-O-methyluridine-3'-phosphate
  modified_base 15: mod_base = OTHER; note = 2'-O-methyladenosine-3'-phosphate
  modified_base 16: mod_base = OTHER; note = 2'-O-methyluridine-3'-phosphate
  modified_base 17: mod_base = OTHER; note = 2'-O-methyladenosine-3'-phosphate
  modified_base 18: mod_base = OTHER; note = 2'-O-methylguanosine-3'-phosphate
  modified_base 19: mod_base = OTHER; note = 2'-O-methyladenosine-3'-phosphate
  modified_base 20: mod_base = OTHER; note = 2'-O-methyluridine-3'-phosphate
  modified_base 21: mod_base = OTHER; note = 2'-O-methyluridine-3'-phosphate ((2S,4R)-1-[29-[[2-(acetylamino)-2-deoxy-beta-D-galactopyra nosyl]oxy]-14,14-bis[[3-[[3-[[5-[[2-(acetylamino)-2-deoxy-b eta-D-galactopyranosyl]oxy]-1-oxopentyl]amino]propyl]amino] -3-oxopropoxy]methyl]-1,12,19,25-tetraoxo-16-oxa-13,20,24-t riazanonacos-1-yl]-4-hydroxy-2-pyrrolidinyl)methyl ester
tactgagctaaattatagatt

SEQ ID NO: 4166 - RNA, 21 nt, synthetic construct
  source 1..21: mol_type = other RNA
  modified_base 1: mod_base = OTHER; note = 2'-O-methylcytidine-3'-phosphorothioate
  modified_base 2: mod_base = OTHER; note = 2'-O-methylcytidine-3'-phosphorothioate
  modified_base 3: mod_base = OTHER; note = 2'-O-methyladenosine-3'-phosphate
  modified_base 4: mod_base = OTHER; note = 2'-O-methylguanosine-3'-phosphate
  modified_base 5: mod_base = OTHER; note = 2'-O-methylcytidine-3'-phosphate
  modified_base 6: mod_base = OTHER; note = 2'-O-methyluridine-3'-phosphate
  modified_base 7: mod_base = OTHER; note = 2'-deoxy-2'-fluoroadenosine-3'-phosphate
  modified_base 8: mod_base = OTHER; note = 2'-O-methyluridine-3'-phosphate
  modified_base 9: mod_base = OTHER; note = 2'-deoxy-2'-fluoroguanosine-3'-phosphate
  modified_base 10: mod_base = OTHER; note = 2'-deoxy-2'-fluorocytidine-3'-phosphate
  modified_base 11: mod_base = OTHER; note = 2'-deoxy-2'-fluorouridine-3'-phosphate
  modified_base 12: mod_base = OTHER; note = 2'-O-methyladenosine-3'-phosphate
  modified_base 13: mod_base = OTHER; note = 2'-O-methyluridine-3'-phosphate
  modified_base 14: mod_base = OTHER; note = 2'-O-methyluridine-3'-phosphate
  modified_base 15: mod_base = OTHER; note = 2'-O-methyluridine-3'-phosphate
  modified_base 16: mod_base = OTHER; note = 2'-O-methyladenosine-3'-phosphate
  modified_base 17: mod_base = OTHER; note = 2'-O-methyluridine-3'-phosphate
  modified_base 18: mod_base = OTHER; note = 2'-O-methyladenosine-3'-phosphate
  modified_base 19: mod_base = OTHER; note = 2'-O-methyladenosine-3'-phosphate
  modified_base 20: mod_base = OTHER; note = 2'-O-methyluridine-3'-phosphate
  modified_base 21: mod_base = OTHER; note = 2'-O-methyluridine-3'-phosphate ((2S,4R)-1-[29-[[2-(acetylamino)-2-deoxy-beta-D-galactopyra nosyl]oxy]-14,14-bis[[3-[[3-[[5-[[2-(acetylamino)-2-deoxy-b eta-D-galactopyranosyl]oxy]-1-oxopentyl]amino]propyl]amino] -3-oxopropoxy]methyl]-1,12,19,25-tetraoxo-16-oxa-13,20,24-t riazanonacos-1-yl]-4-hydroxy-2-pyrrolidinyl)methyl ester
ccagctatgctatttataatt

SEQ ID NO: 4167 - RNA, 21 nt, synthetic construct
  source 1..21: mol_type = other RNA
  modified_base 1: mod_base = OTHER; note = 2'-O-methyluridine-3'-phosphorothioate
  modified_base 2: mod_base = OTHER; note = 2'-O-methyluridine-3'-phosphorothioate
  modified_base 3: mod_base = OTHER; note = 2'-O-methyluridine-3'-phosphate
  modified_base 4: mod_base = OTHER; note = 2'-O-methyluridine-3'-phosphate
  modified_base 5: mod_base = OTHER; note = 2'-O-methylcytidine-3'-phosphate
  modified_base 6: mod_base = OTHER; note = 2'-O-methyladenosine-3'-phosphate
  modified_base 7: mod_base = OTHER; note = 2'-deoxy-2'-fluoroadenosine-3'-phosphate
  modified_base 8: mod_base = OTHER; note = 2'-O-methyluridine-3'-phosphate
  modified_base 9: mod_base = OTHER; note = 2'-deoxy-2'-fluorouridine-3'-phosphate
  modified_base 10: mod_base = OTHER; note = 2'-deoxy-2'-fluorouridine-3'-phosphate
  modified_base 11: mod_base = OTHER; note = 2'-deoxy-2'-fluorocytidine-3'-phosphate
  modified_base 12: mod_base = OTHER; note = 2'-O-methyluridine-3'-phosphate
  modified_base 13: mod_base = OTHER; note = 2'-O-methylcytidine-3'-phosphate
  modified_base 14: mod_base = OTHER; note = 2'-O-methylcytidine-3'-phosphate
  modified_base 15: mod_base = OTHER; note = 2'-O-methyluridine-3'-phosphate
  modified_base 16: mod_base = OTHER; note = 2'-O-methylcytidine-3'-phosphate
  modified_base 17: mod_base = OTHER; note = 2'-O-methyluridine-3'-phosphate
  modified_base 18: mod_base = OTHER; note = 2'-O-methylguanosine-3'-phosphate
  modified_base 19: mod_base = OTHER; note = 2'-O-methyladenosine-3'-phosphate
  modified_base 20: mod_base = OTHER; note = 2'-O-methylcytidine-3'-phosphate
  modified_base 21: mod_base = OTHER; note = 2'-O-methyluridine-3'-phosphate ((2S,4R)-1-[29-[[2-(acetylamino)-2-deoxy-beta-D-galactopyra nosyl]oxy]-14,14-bis[[3-[[3-[[5-[[2-(acetylamino)-2-deoxy-b eta-D-galactopyranosyl]oxy]-1-oxopentyl]amino]propyl]amino] -3-oxopropoxy]methyl]-1,12,19,25-tetraoxo-16-oxa-13,20,24-t riazanonacos-1-yl]-4-hydroxy-2-pyrrolidinyl)methyl ester
ttttcaatttctcctctgact

SEQ ID NO: 4168 - RNA, 21 nt, synthetic construct
  source 1..21: mol_type = other RNA
  modified_base 1: mod_base = OTHER; note = 2'-O-methylguanosine-3'-phosphorothioate
  modified_base 2: mod_base = OTHER; note = 2'-O-methyladenosine-3'-phosphorothioate
  modified_base 3: mod_base = OTHER; note = 2'-O-methylcytidine-3'-phosphate
  modified_base 4: mod_base = OTHER; note = 2'-O-methylcytidine-3'-phosphate
  modified_base 5: mod_base = OTHER; note = 2'-O-methyladenosine-3'-phosphate
  modified_base 6: mod_base = OTHER; note = 2'-O-methyluridine-3'-phosphate
  modified_base 7: mod_base = OTHER; note = 2'-deoxy-2'-fluorouridine-3'-phosphate
  modified_base 8: mod_base = OTHER; note = 2'-O-methyluridine-3'-phosphate
  modified_base 9: mod_base = OTHER; note = 2'-deoxy-2'-fluorocytidine-3'-phosphate
  modified_base 10: mod_base = OTHER; note = 2'-deoxy-2'-fluoroadenosine-3'-phosphate
  modified_base 11: mod_base = OTHER; note = 2'-deoxy-2'-fluoroguanosine-3'-phosphate
  modified_base 12: mod_base = OTHER; note = 2'-O-methyladenosine-3'-phosphate
  modified_base 13: mod_base = OTHER; note = 2'-O-methyladenosine-3'-phosphate
  modified_base 14: mod_base = OTHER; note = 2'-O-methylcytidine-3'-phosphate
  modified_base 15: mod_base = OTHER; note = 2'-O-methyladenosine-3'-phosphate
  modified_base 16: mod_base = OTHER; note = 2'-O-methyluridine-3'-phosphate
  modified_base 17: mod_base = OTHER; note = 2'-O-methylcytidine-3'-phosphate
  modified_base 18: mod_base = OTHER; note = 2'-O-methyluridine-3'-phosphate
  modified_base 19: mod_base = OTHER; note = 2'-O-methyluridine-3'-phosphate
  modified_base 20: mod_base = OTHER; note = 2'-O-methylcytidine-3'-phosphate
  modified_base 21: mod_base = OTHER; note = 2'-O-methyluridine-3'-phosphate ((2S,4R)-1-[29-[[2-(acetylamino)-2-deoxy-beta-D-galactopyra nosyl]oxy]-14,14-bis[[3-[[3-[[5-[[2-(acetylamino)-2-deoxy-b eta-D-galactopyranosyl]oxy]-1-oxopentyl]amino]propyl]amino] -3-oxopropoxy]methyl]-1,12,19,25-tetraoxo-16-oxa-13,20,24-t riazanonacos-1-yl]-4-hydroxy-2-pyrrolidinyl)methyl ester
gaccatttcagaacatcttct

SEQ ID NO: 4169 - RNA, 21 nt, synthetic construct
  source 1..21: mol_type = other RNA
  modified_base 1: mod_base = OTHER; note = 2'-O-methylcytidine-3'-phosphorothioate
  modified_base 2: mod_base = OTHER; note = 2'-O-methyluridine-3'-phosphorothioate
  modified_base 3: mod_base = OTHER; note = 2'-O-methyluridine-3'-phosphate
  modified_base 4: mod_base = OTHER; note = 2'-O-methylcytidine-3'-phosphate
  modified_base 5: mod_base = OTHER; note = 2'-O-methylcytidine-3'-phosphate
  modified_base 6: mod_base = OTHER; note = 2'-O-methyladenosine-3'-phosphate
  modified_base 7: mod_base = OTHER; note = 2'-deoxy-2'-fluoroadenosine-3'-phosphate
  modified_base 8: mod_base = OTHER; note = 2'-O-methyluridine-3'-phosphate
  modified_base 9: mod_base = OTHER; note = 2'-deoxy-2'-fluoroadenosine-3'-phosphate
  modified_base 10: mod_base = OTHER; note = 2'-deoxy-2'-fluoroadenosine-3'-phosphate
  modified_base 11: mod_base = OTHER; note = 2'-deoxy-2'-fluorocytidine-3'-phosphate
  modified_base 12: mod_base = OTHER; note = 2'-O-methyluridine-3'-phosphate
  modified_base 13: mod_base = OTHER; note = 2'-O-methylcytidine-3'-phosphate
  modified_base 14: mod_base = OTHER; note = 2'-O-methyladenosine-3'-phosphate
  modified_base 15: mod_base = OTHER; note = 2'-O-methyluridine-3'-phosphate
  modified_base 16: mod_base = OTHER; note = 2'-O-methyladenosine-3'-phosphate
  modified_base 17: mod_base = OTHER; note = 2'-O-methyladenosine-3'-phosphate
  modified_base 18: mod_base = OTHER; note = 2'-O-methyladenosine-3'-phosphate
  modified_base 19: mod_base = OTHER; note = 2'-O-methyladenosine-3'-phosphate
  modified_base 20: mod_base = OTHER; note = 2'-O-methylcytidine-3'-phosphate
  modified_base 21: mod_base = OTHER; note = 2'-O-methyluridine-3'-phosphate ((2S,4R)-1-[29-[[2-(acetylamino)-2-deoxy-beta-D-galactopyra nosyl]oxy]-14,14-bis[[3-[[3-[[5-[[2-(acetylamino)-2-deoxy-b eta-D-galactopyranosyl]oxy]-1-oxopentyl]amino]propyl]amino] -3-oxopropoxy]methyl]-1,12,19,25-tetraoxo-16-oxa-13,20,24-t riazanonacos-1-yl]-4-hydroxy-2-pyrrolidinyl)methyl ester
cttccaataactcataaaact

SEQ ID NO: 4170 - RNA, 21 nt, synthetic construct
  source 1..21: mol_type = other RNA
  modified_base 1: mod_base = OTHER; note = 2'-O-methylcytidine-3'-phosphorothioate
  modified_base 2: mod_base = OTHER; note = 2'-O-methyladenosine-3'-phosphorothioate
  modified_base 3: mod_base = OTHER; note = 2'-O-methyladenosine-3'-phosphate
  modified_base 4: mod_base = OTHER; note = 2'-O-methylcytidine-3'-phosphate
  modified_base 5: mod_base = OTHER; note = 2'-O-methyluridine-3'-phosphate
  modified_base 6: mod_base = OTHER; note = 2'-O-methylguanosine-3'-phosphate
  modified_base 7: mod_base = OTHER; note = 2'-deoxy-2'-fluoroadenosine-3'-phosphate
  modified_base 8: mod_base = OTHER; note = 2'-O-methyladenosine-3'-phosphate
  modified_base 9: mod_base = OTHER; note = 2'-deoxy-2'-fluoroguanosine-3'-phosphate
  modified_base 10: mod_base = OTHER; note = 2'-deoxy-2'-fluorouridine-3'-phosphate
  modified_base 11: mod_base = OTHER; note = 2'-deoxy-2'-fluoroadenosine-3'-phosphate
  modified_base 12: mod_base = OTHER; note = 2'-O-methyladenosine-3'-phosphate
  modified_base 13: mod_base = OTHER; note = 2'-O-methyladenosine-3'-phosphate
  modified_base 14: mod_base = OTHER; note = 2'-O-methyladenosine-3'-phosphate
  modified_base 15: mod_base = OTHER; note = 2'-O-methyluridine-3'-phosphate
  modified_base 16: mod_base = OTHER; note = 2'-O-methyluridine-3'-phosphate
  modified_base 17: mod_base = OTHER; note = 2'-O-methylguanosine-3'-phosphate
  modified_base 18: mod_base = OTHER; note = 2'-O-methyladenosine-3'-phosphate
  modified_base 19: mod_base = OTHER; note = 2'-O-methylguanosine-3'-phosphate
  modified_base 20: mod_base = OTHER; note = 2'-O-methyluridine-3'-phosphate
  modified_base 21: mod_base = OTHER; note = 2'-O-methyluridine-3'-phosphate ((2S,4R)-1-[29-[[2-(acetylamino)-2-deoxy-beta-D-galactopyra nosyl]oxy]-14,14-bis[[3-[[3-[[5-[[2-(acetylamino)-2-deoxy-b eta-D-galactopyranosyl]oxy]-1-oxopentyl]amino]propyl]amino] -3-oxopropoxy]methyl]-1,12,19,25-tetraoxo-16-oxa-13,20,24-t riazanonacos-1-yl]-4-hydroxy-2-pyrrolidinyl)methyl ester
caactgaagtaaaattgagtt

SEQ ID NO: 4171 - RNA, 21 nt, synthetic construct
  source 1..21: mol_type = other RNA
  modified_base 1: mod_base = OTHER; note = 2'-O-methylguanosine-3'-phosphorothioate
  modified_base 2: mod_base = OTHER; note = 2'-O-methylguanosine-3'-phosphorothioate
  modified_base 3: mod_base = OTHER; note = 2'-O-methyladenosine-3'-phosphate
  modified_base 4: mod_base = OTHER; note = 2'-O-methyladenosine-3'-phosphate
  modified_base 5: mod_base = OTHER; note = 2'-O-methyladenosine-3'-phosphate
  modified_base 6: mod_base = OTHER; note = 2'-O-methyladenosine-3'-phosphate
  modified_base 7: mod_base = OTHER; note = 2'-deoxy-2'-fluorouridine-3'-phosphate
  modified_base 8: mod_base = OTHER; note = 2'-O-methyladenosine-3'-phosphate
  modified_base 9: mod_base = OTHER; note = 2'-deoxy-2'-fluorouridine-3'-phosphate
  modified_base 10: mod_base = OTHER; note = 2'-deoxy-2'-fluoroadenosine-3'-phosphate
  modified_base 11: mod_base = OTHER; note = 2'-deoxy-2'-fluorouridine-3'-phosphate
  modified_base 12: mod_base = OTHER; note = 2'-O-methyluridine-3'-phosphate
  modified_base 13: mod_base = OTHER; note = 2'-O-methylcytidine-3'-phosphate
  modified_base 14: mod_base = OTHER; note = 2'-O-methyladenosine-3'-phosphate
  modified_base 15: mod_base = OTHER; note = 2'-O-methylcytidine-3'-phosphate
  modified_base 16: mod_base = OTHER; note = 2'-O-methylcytidine-3'-phosphate
  modified_base 17: mod_base = OTHER; note = 2'-O-methyladenosine-3'-phosphate
  modified_base 18: mod_base = OTHER; note = 2'-O-methyladenosine-3'-phosphate
  modified_base 19: mod_base = OTHER; note = 2'-O-methyladenosine-3'-phosphate
  modified_base 20: mod_base = OTHER; note = 2'-O-methylcytidine-3'-phosphate
  modified_base 21: mod_base = OTHER; note = 2'-O-methyluridine-3'-phosphate ((2S,4R)-1-[29-[[2-(acetylamino)-2-deoxy-beta-D-galactopyra nosyl]oxy]-14,14-bis[[3-[[3-[[5-[[2-(acetylamino)-2-deoxy-b eta-D-galactopyranosyl]oxy]-1-oxopentyl]amino]propyl]amino] -3-oxopropoxy]methyl]-1,12,19,25-tetraoxo-16-oxa-13,20,24-t riazanonacos-1-yl]-4-hydroxy-2-pyrrolidinyl)methyl ester
ggaaaatatattcaccaaact

SEQ ID NO: 4172 - RNA, 21 nt, synthetic construct
  source 1..21: mol_type = other RNA
  modified_base 1: mod_base = OTHER; note = 2'-O-methyladenosine-3'-phosphorothioate
  modified_base 2: mod_base = OTHER; note = 2'-O-methyladenosine-3'-phosphorothioate
  modified_base 3: mod_base = OTHER; note = 2'-O-methyladenosine-3'-phosphate
  modified_base 4: mod_base = OTHER; note = 2'-O-methylcytidine-3'-phosphate
  modified_base 5: mod_base = OTHER; note = 2'-O-methyluridine-3'-phosphate
  modified_base 6: mod_base = OTHER; note = 2'-O-methyluridine-3'-phosphate
  modified_base 7: mod_base = OTHER; note = 2'-deoxy-2'-fluorouridine-3'-phosphate
  modified_base 8: mod_base = OTHER; note = 2'-O-methylguanosine-3'-phosphate
  modified_base 9: mod_base = OTHER; note = 2'-deoxy-2'-fluoroguanosine-3'-phosphate
  modified_base 10: mod_base = OTHER; note = 2'-deoxy-2'-fluorouridine-3'-phosphate
  modified_base 11: mod_base = OTHER; note = 2'-deoxy-2'-fluoroadenosine-3'-phosphate
  modified_base 12: mod_base = OTHER; note = 2'-O-methyladenosine-3'-phosphate
  modified_base 13: mod_base = OTHER; note = 2'-O-methyluridine-3'-phosphate
  modified_base 14: mod_base = OTHER; note = 2'-O-methyluridine-3'-phosphate
  modified_base 15: mod_base = OTHER; note = 2'-O-methyluridine-3'-phosphate
  modified_base 16: mod_base = OTHER; note = 2'-O-methyladenosine-3'-phosphate
  modified_base 17: mod_base = OTHER; note = 2'-O-methyladenosine-3'-phosphate
  modified_base 18: mod_base = OTHER; note = 2'-O-methylguanosine-3'-phosphate
  modified_base 19: mod_base = OTHER; note = 2'-O-methyluridine-3'-phosphate
  modified_base 20: mod_base = OTHER; note = 2'-O-methyluridine-3'-phosphate
  modified_base 21: mod_base = OTHER; note = 2'-O-methyluridine-3'-phosphate ((2S,4R)-1-[29-[[2-(acetylamino)-2-deoxy-beta-D-galactopyra nosyl]oxy]-14,14-bis[[3-[[3-[[5-[[2-(acetylamino)-2-deoxy-b eta-D-galactopyranosyl]oxy]-1-oxopentyl]amino]propyl]amino] -3-oxopropoxy]methyl]-1,12,19,25-tetraoxo-16-oxa-13,20,24-t riazanonacos-1-yl]-4-hydroxy-2-pyrrolidinyl)methyl ester
aaactttggtaatttaagttt

SEQ ID NO: 4173 - RNA, 21 nt, synthetic construct
  source 1..21: mol_type = other RNA
  modified_base 1: mod_base = OTHER; note = 2'-O-methyladenosine-3'-phosphorothioate
  modified_base 2: mod_base = OTHER; note = 2'-O-methyladenosine-3'-phosphorothioate
  modified_base 3: mod_base = OTHER; note = 2'-O-methyladenosine-3'-phosphate
  modified_base 4: mod_base = OTHER; note = 2'-O-methyladenosine-3'-phosphate
  modified_base 5: mod_base = OTHER; note = 2'-O-methyluridine-3'-phosphate
  modified_base 6: mod_base = OTHER; note = 2'-O-methyladenosine-3'-phosphate
  modified_base 7: mod_base = OTHER; note = 2'-deoxy-2'-fluoroguanosine-3'-phosphate
  modified_base 8: mod_base = OTHER; note = 2'-O-methyluridine-3'-phosphate
  modified_base 9: mod_base = OTHER; note = 2'-deoxy-2'-fluorouridine-3'-phosphate
  modified_base 10: mod_base = OTHER; note = 2'-deoxy-2'-fluorouridine-3'-phosphate
  modified_base 11: mod_base = OTHER; note = 2'-deoxy-2'-fluoroadenosine-3'-phosphate
  modified_base 12: mod_base = OTHER; note = 2'-O-methylcytidine-3'-phosphate
  modified_base 13: mod_base = OTHER; note = 2'-O-methyladenosine-3'-phosphate
  modified_base 14: mod_base = OTHER; note = 2'-O-methylcytidine-3'-phosphate
  modified_base 15: mod_base = OTHER; note = 2'-O-methylcytidine-3'-phosphate
  modified_base 16: mod_base = OTHER; note = 2'-O-methyluridine-3'-phosphate
  modified_base 17: mod_base = OTHER; note = 2'-O-methyladenosine-3'-phosphate
  modified_base 18: mod_base = OTHER; note = 2'-O-methyluridine-3'-phosphate
  modified_base 19: mod_base = OTHER; note = 2'-O-methyladenosine-3'-phosphate
  modified_base 20: mod_base = OTHER; note = 2'-O-methylcytidine-3'-phosphate
  modified_base 21: mod_base = OTHER; note = 2'-O-methyluridine-3'-phosphate ((2S,4R)-1-[29-[[2-(acetylamino)-2-deoxy-beta-D-galactopyra nosyl]oxy]-14,14-bis[[3-[[3-[[5-[[2-(acetylamino)-2-deoxy-b eta-D-galactopyranosyl]oxy]-1-oxopentyl]amino]propyl]amino] -3-oxopropoxy]methyl]-1,12,19,25-tetraoxo-16-oxa-13,20,24-t riazanonacos-1-yl]-4-hydroxy-2-pyrrolidinyl)methyl ester
aaaatagtttacacctatact

SEQ ID NO: 4174 - RNA, 21 nt, synthetic construct
  source 1..21: mol_type = other RNA
  modified_base 1: mod_base = OTHER; note = 2'-O-methylcytidine-3'-phosphorothioate
  modified_base 2: mod_base = OTHER; note = 2'-O-methylcytidine-3'-phosphorothioate
  modified_base 3: mod_base = OTHER; note = 2'-O-methyluridine-3'-phosphate
  modified_base 4: mod_base = OTHER; note = 2'-O-methyladenosine-3'-phosphate
  modified_base 5: mod_base = OTHER; note = 2'-O-methyluridine-3'-phosphate
  modified_base 6: mod_base = OTHER; note = 2'-O-methyladenosine-3'-phosphate
  modified_base 7: mod_base = OTHER; note = 2'-deoxy-2'-fluorocytidine-3'-phosphate
  modified_base 8: mod_base = OTHER; note = 2'-O-methyluridine-3'-phosphate
  modified_base 9: mod_base = OTHER; note = 2'-deoxy-2'-fluoroguanosine-3'-phosphate
  modified_base 10: mod_base = OTHER; note = 2'-deoxy-2'-fluorocytidine-3'-phosphate
  modified_base 11: mod_base = OTHER; note = 2'-deoxy-2'-fluoroadenosine-3'-phosphate
  modified_base 12: mod_base = OTHER; note = 2'-O-methyluridine-3'-phosphate
  modified_base 13: mod_base = OTHER; note = 2'-O-methyladenosine-3'-phosphate
  modified_base 14: mod_base = OTHER; note = 2'-O-methyladenosine-3'-phosphate
  modified_base 15: mod_base = OTHER; note = 2'-O-methyluridine-3'-phosphate
  modified_base 16: mod_base = OTHER; note = 2'-O-methylcytidine-3'-phosphate
  modified_base 17: mod_base = OTHER; note = 2'-O-methylcytidine-3'-phosphate
  modified_base 18: mod_base = OTHER; note = 2'-O-methyladenosine-3'-phosphate
  modified_base 19: mod_base = OTHER; note = 2'-O-methyladenosine-3'-phosphate
  modified_base 20: mod_base = OTHER; note = 2'-O-methylcytidine-3'-phosphate
  modified_base 21: mod_base = OTHER; note = 2'-O-methyluridine-3'-phosphate ((2S,4R)-1-[29-[[2-(acetylamino)-2-deoxy-beta-D-galactopyra nosyl]oxy]-14,14-bis[[3-[[3-[[5-[[2-(acetylamino)-2-deoxy-b eta-D-galactopyranosyl]oxy]-1-oxopentyl]amino]propyl]amino] -3-oxopropoxy]methyl]-1,12,19,25-tetraoxo-16-oxa-13,20,24-t riazanonacos-1-yl]-4-hydroxy-2-pyrrolidinyl)methyl ester
cctatactgcataatccaact

SEQ ID NO: 4175 - RNA, 21 nt, synthetic construct
  source 1..21: mol_type = other RNA
  modified_base 1: mod_base = OTHER; note = 2'-O-methyladenosine-3'-phosphorothioate
  modified_base 2: mod_base = OTHER; note = 2'-O-methyladenosine-3'-phosphorothioate
  modified_base 3: mod_base = OTHER; note = 2'-O-methylcytidine-3'-phosphate
  modified_base 4: mod_base = OTHER; note = 2'-O-methyladenosine-3'-phosphate
  modified_base 5: mod_base = OTHER; note = 2'-O-methyladenosine-3'-phosphate
  modified_base 6: mod_base = OTHER; note = 2'-O-methyluridine-3'-phosphate
  modified_base 7: mod_base = OTHER; note = 2'-deoxy-2'-fluorouridine-3'-phosphate
  modified_base 8: mod_base = OTHER; note = 2'-O-methyluridine-3'-phosphate
  modified_base 9: mod_base = OTHER; note = 2'-deoxy-2'-fluorouridine-3'-phosphate
  modified_base 10: mod_base = OTHER; note = 2'-deoxy-2'-fluoroadenosine-3'-phosphate
  modified_base 11: mod_base = OTHER; note = 2'-deoxy-2'-fluoroadenosine-3'-phosphate
  modified_base 12: mod_base = OTHER; note = 2'-O-methyluridine-3'-phosphate
  modified_base 13: mod_base = OTHER; note = 2'-O-methyluridine-3'-phosphate
  modified_base 14: mod_base = OTHER; note = 2'-O-methyluridine-3'-phosphate
  modified_base 15: mod_base = OTHER; note = 2'-O-methylcytidine-3'-phosphate
  modified_base 16: mod_base = OTHER; note = 2'-O-methyladenosine-3'-phosphate
  modified_base 17: mod_base = OTHER; note = 2'-O-methylguanosine-3'-phosphate
  modified_base 18: mod_base = OTHER; note = 2'-O-methyluridine-3'-phosphate
  modified_base 19: mod_base = OTHER; note = 2'-O-methyluridine-3'-phosphate
  modified_base 20: mod_base = OTHER; note = 2'-O-methylguanosine-3'-phosphate
  modified_base 21: mod_base = OTHER; note = 2'-O-methyluridine-3'-phosphate ((2S,4R)-1-[29-[[2-(acetylamino)-2-deoxy-beta-D-galactopyra nosyl]oxy]-14,14-bis[[3-[[3-[[5-[[2-(acetylamino)-2-deoxy-b eta-D-galactopyranosyl]oxy]-1-oxopentyl]amino]propyl]amino] -3-oxopropoxy]methyl]-1,12,19,25-tetraoxo-16-oxa-13,20,24-t riazanonacos-1-yl]-4-hydroxy-2-pyrrolidinyl)methyl ester
aacaattttaatttcagttgt

SEQ ID NO: 4176 - RNA, 21 nt, synthetic construct
  source 1..21: mol_type = other RNA
  modified_base 1: mod_base = OTHER; note = 2'-O-methyladenosine-3'-phosphorothioate
  modified_base 2: mod_base = OTHER; note = 2'-O-methylguanosine-3'-phosphorothioate
  modified_base 3: mod_base = OTHER; note = 2'-O-methyladenosine-3'-phosphate
  modified_base 4: mod_base = OTHER; note = 2'-O-methylcytidine-3'-phosphate
  modified_base 5: mod_base = OTHER; note = 2'-O-methyladenosine-3'-phosphate
  modified_base 6: mod_base = OTHER; note = 2'-O-methyluridine-3'-phosphate
  modified_base 7: mod_base = OTHER; note = 2'-deoxy-2'-fluoroguanosine-3'-phosphate
  modified_base 8: mod_base = OTHER; note = 2'-O-methyluridine-3'-phosphate
  modified_base 9: mod_base = OTHER; note = 2'-deoxy-2'-fluorouridine-3'-phosphate
  modified_base 10: mod_base = OTHER; note = 2'-deoxy-2'-fluoroadenosine-3'-phosphate
  modified_base 11: mod_base = OTHER; note = 2'-deoxy-2'-fluorocytidine-3'-phosphate
  modified_base 12: mod_base = OTHER; note = 2'-O-methyluridine-3'-phosphate
  modified_base 13: mod_base = OTHER; note = 2'-O-methyladenosine-3'-phosphate
  modified_base 14: mod_base = OTHER; note = 2'-O-methyladenosine-3'-phosphate
  modified_base 15: mod_base = OTHER; note = 2'-O-methyluridine-3'-phosphate
  modified_base 16: mod_base = OTHER; note = 2'-O-methyladenosine-3'-phosphate
  modified_base 17: mod_base = OTHER; note = 2'-O-methyluridine-3'-phosphate
  modified_base 18: mod_base = OTHER; note = 2'-O-methyladenosine-3'-phosphate
  modified_base 19: mod_base = OTHER; note = 2'-O-methyladenosine-3'-phosphate
  modified_base 20: mod_base = OTHER; note = 2'-O-methylcytidine-3'-phosphate
  modified_base 21: mod_base = OTHER; note = 2'-O-methyluridine-3'-phosphate ((2S,4R)-1-[29-[[2-(acetylamino)-2-deoxy-beta-D-galactopyra nosyl]oxy]-14,14-bis[[3-[[3-[[5-[[2-(acetylamino)-2-deoxy-b eta-D-galactopyranosyl]oxy]-1-oxopentyl]amino]propyl]amino] -3-oxopropoxy]methyl]-1,12,19,25-tetraoxo-16-oxa-13,20,24-t riazanonacos-1-yl]-4-hydroxy-2-pyrrolidinyl)methyl ester
agacatgttactaatataact

SEQ ID NO: 4177 - RNA, 21 nt, synthetic construct
  source 1..21: mol_type = other RNA
  modified_base 1: mod_base = OTHER; note = 2'-O-methyladenosine-3'-phosphorothioate
  modified_base 2: mod_base = OTHER; note = 2'-O-methyladenosine-3'-phosphorothioate
  modified_base 3: mod_base = OTHER; note = 2'-O-methyladenosine-3'-phosphate
  modified_base 4: mod_base = OTHER; note = 2'-O-methylguanosine-3'-phosphate
  modified_base 5: mod_base = OTHER; note = 2'-O-methyladenosine-3'-phosphate
  modified_base 6: mod_base = OTHER; note = 2'-O-methylguanosine-3'-phosphate
  modified_base 7: mod_base = OTHER; note = 2'-deoxy-2'-fluorouridine-3'-phosphate
  modified_base 8: mod_base = OTHER; note = 2'-O-methyladenosine-3'-phosphate
  modified_base 9: mod_base = OTHER; note = 2'-deoxy-2'-fluoroguanosine-3'-phosphate
  modified_base 10: mod_base = OTHER; note = 2'-deoxy-2'-fluoroadenosine-3'-phosphate
  modified_base 11: mod_base = OTHER; note = 2'-deoxy-2'-fluoroguanosine-3'-phosphate
  modified_base 12: mod_base = OTHER; note = 2'-O-methylguanosine-3'-phosphate
  modified_base 13: mod_base = OTHER; note = 2'-O-methyladenosine-3'-phosphate
  modified_base 14: mod_base = OTHER; note = 2'-O-methyluridine-3'-phosphate
  modified_base 15: mod_base = OTHER; note = 2'-O-methylguanosine-3'-phosphate
  modified_base 16: mod_base = OTHER; note = 2'-O-methyluridine-3'-phosphate
  modified_base 17: mod_base = OTHER; note = 2'-O-methylguanosine-3'-phosphate
  modified_base 18: mod_base = OTHER; note = 2'-O-methyluridine-3'-phosphate
  modified_base 19: mod_base = OTHER; note = 2'-O-methyladenosine-3'-phosphate
  modified_base 20: mod_base = OTHER; note = 2'-O-methyladenosine-3'-phosphate
  modified_base 21: mod_base = OTHER; note = 2'-O-methyluridine-3'-phosphate ((2S,4R)-1-[29-[[2-(acetylamino)-2-deoxy-beta-D-galactopyra nosyl]oxy]-14,14-bis[[3-[[3-[[5-[[2-(acetylamino)-2-deoxy-b eta-D-galactopyranosyl]oxy]-1-oxopentyl]amino]propyl]amino] -3-oxopropoxy]methyl]-1,12,19,25-tetraoxo-16-oxa-13,20,24-t riazanonacos-1-yl]-4-hydroxy-2-pyrrolidinyl)methyl ester
aaagagtagaggatgtgtaat

SEQ ID NO: 4178 - RNA, 21 nt, synthetic construct
  source 1..21: mol_type = other RNA
  modified_base 1: mod_base = OTHER; note = 2'-O-methylguanosine-3'-phosphorothioate
  modified_base 2: mod_base = OTHER; note = 2'-O-methyluridine-3'-phosphorothioate
  modified_base 3: mod_base = OTHER; note = 2'-O-methylguanosine-3'-phosphate
  modified_base 4: mod_base = OTHER; note = 2'-O-methyluridine-3'-phosphate
  modified_base 5: mod_base = OTHER; note = 2'-O-methyladenosine-3'-phosphate
  modified_base 6: mod_base = OTHER; note = 2'-O-methyladenosine-3'-phosphate
  modified_base 7: mod_base = OTHER; note = 2'-deoxy-2'-fluorouridine-3'-phosphate
  modified_base 8: mod_base = OTHER; note = 2'-O-methyluridine-3'-phosphate
  modified_base 9: mod_base = OTHER; note = 2'-deoxy-2'-fluoroadenosine-3'-phosphate
  modified_base 10: mod_base = OTHER; note = 2'-deoxy-2'-fluoroadenosine-3'-phosphate
  modified_base 11: mod_base = OTHER; note = 2'-deoxy-2'-fluorocytidine-3'-phosphate
  modified_base 12: mod_base = OTHER; note = 2'-O-methylcytidine-3'-phosphate
  modified_base 13: mod_base = OTHER; note = 2'-O-methyladenosine-3'-phosphate
  modified_base 14: mod_base = OTHER; note = 2'-O-methyluridine-3'-phosphate
  modified_base 15: mod_base = OTHER; note = 2'-O-methyladenosine-3'-phosphate
  modified_base 16: mod_base = OTHER; note = 2'-O-methyluridine-3'-phosphate
  modified_base 17: mod_base = OTHER; note = 2'-O-methylcytidine-3'-phosphate
  modified_base 18: mod_base = OTHER; note = 2'-O-methyluridine-3'-phosphate
  modified_base 19: mod_base = OTHER; note = 2'-O-methyluridine-3'-phosphate
  modified_base 20: mod_base = OTHER; note = 2'-O-methylcytidine-3'-phosphate
  modified_base 21: mod_base = OTHER; note = 2'-O-methyluridine-3'-phosphate ((2S,4R)-1-[29-[[2-(acetylamino)-2-deoxy-beta-D-galactopyra nosyl]oxy]-14,14-bis[[3-[[3-[[5-[[2-(acetylamino)-2-deoxy-b eta-D-galactopyranosyl]oxy]-1-oxopentyl]amino]propyl]amino] -3-oxopropoxy]methyl]-1,12,19,25-tetraoxo-16-oxa-13,20,24-t riazanonacos-1-yl]-4-hydroxy-2-pyrrolidinyl)methyl ester
gtgtaattaaccatatcttct

SEQ ID NO: 4179 - RNA, 21 nt, synthetic construct
  source 1..21: mol_type = other RNA
  modified_base 1: mod_base = OTHER; note = 2'-O-methyluridine-3'-phosphorothioate
  modified_base 2: mod_base = OTHER; note = 2'-O-methyluridine-3'-phosphorothioate
  modified_base 3: mod_base = OTHER; note = 2'-O-methylcytidine-3'-phosphate
  modified_base 4: mod_base = OTHER; note = 2'-O-methyluridine-3'-phosphate
  modified_base 5: mod_base = OTHER; note = 2'-O-methyladenosine-3'-phosphate
  modified_base 6: mod_base = OTHER; note = 2'-O-methyladenosine-3'-phosphate
  modified_base 7: mod_base = OTHER; note = 2'-deoxy-2'-fluoroadenosine-3'-phosphate
  modified_base 8: mod_base = OTHER; note = 2'-O-methyladenosine-3'-phosphate
  modified_base 9: mod_base = OTHER; note = 2'-deoxy-2'-fluorocytidine-3'-phosphate
  modified_base 10: mod_base = OTHER; note = 2'-deoxy-2'-fluoroadenosine-3'-phosphate
  modified_base 11: mod_base = OTHER; note = 2'-deoxy-2'-fluorouridine-3'-phosphate
  modified_base 12: mod_base = OTHER; note = 2'-O-methylguanosine-3'-phosphate
  modified_base 13: mod_base = OTHER; note = 2'-O-methylguanosine-3'-phosphate
  modified_base 14: mod_base = OTHER; note = 2'-O-methyluridine-3'-phosphate
  modified_base 15: mod_base = OTHER; note = 2'-O-methyluridine-3'-phosphate
  modified_base 16: mod_base = OTHER; note = 2'-O-methyladenosine-3'-phosphate
  modified_base 17: mod_base = OTHER; note = 2'-O-methylcytidine-3'-phosphate
  modified_base 18: mod_base = OTHER; note = 2'-O-methyluridine-3'-phosphate
  modified_base 19: mod_base = OTHER; note = 2'-O-methyladenosine-3'-phosphate
  modified_base 20: mod_base = OTHER; note = 2'-O-methyladenosine-3'-phosphate
  modified_base 21: mod_base = OTHER; note = 2'-O-methyluridine-3'-phosphate ((2S,4R)-1-[29-[[2-(acetylamino)-2-deoxy-beta-D-galactopyra nosyl]oxy]-14,14-bis[[3-[[3-[[5-[[2-(acetylamino)-2-deoxy-b eta-D-galactopyranosyl]oxy]-1-oxopentyl]amino]propyl]amino] -3-oxopropoxy]methyl]-1,12,19,25-tetraoxo-16-oxa-13,20,24-t riazanonacos-1-yl]-4-hydroxy-2-pyrrolidinyl)methyl ester
ttctaaaacatggttactaat

SEQ ID NO: 4180 - RNA, 21 nt, synthetic construct
  source 1..21: mol_type = other RNA
  modified_base 1: mod_base = OTHER; note = 2'-O-methyluridine-3'-phosphorothioate
  modified_base 2: mod_base = OTHER; note = 2'-O-methyluridine-3'-phosphorothioate
  modified_base 3: mod_base = OTHER; note = 2'-O-methyladenosine-3'-phosphate
  modified_base 4: mod_base = OTHER; note = 2'-O-methylcytidine-3'-phosphate
  modified_base 5: mod_base = OTHER; note = 2'-O-methyluridine-3'-phosphate
  modified_base 6: mod_base = OTHER; note = 2'-O-methyladenosine-3'-phosphate
  modified_base 7: mod_base = OTHER; note = 2'-deoxy-2'-fluoroadenosine-3'-phosphate
  modified_base 8: mod_base = OTHER; note = 2'-O-methyladenosine-3'-phosphate
  modified_base 9: mod_base = OTHER; note = 2'-deoxy-2'-fluoroadenosine-3'-phosphate
  modified_base 10: mod_base = OTHER; note = 2'-deoxy-2'-fluoroguanosine-3'-phosphate
  modified_base 11: mod_base = OTHER; note = 2'-deoxy-2'-fluoroadenosine-3'-phosphate
  modified_base 12: mod_base = OTHER; note = 2'-O-methyladenosine-3'-phosphate
  modified_base 13: mod_base = OTHER; note = 2'-O-methyluridine-3'-phosphate
  modified_base 14: mod_base = OTHER; note = 2'-O-methyladenosine-3'-phosphate
  modified_base 15: mod_base = OTHER; note = 2'-O-methyluridine-3'-phosphate
  modified_base 16: mod_base = OTHER; note = 2'-O-methylguanosine-3'-phosphate
  modified_base 17: mod_base = OTHER; note = 2'-O-methyluridine-3'-phosphate
  modified_base 18: mod_base = OTHER; note = 2'-O-methyladenosine-3'-phosphate
  modified_base 19: mod_base = OTHER; note = 2'-O-methyladenosine-3'-phosphate
  modified_base 20: mod_base = OTHER; note = 2'-O-methylcytidine-3'-phosphate
  modified_base 21: mod_base = OTHER; note = 2'-O-methyluridine-3'-phosphate ((2S,4R)-1-[29-[[2-(acetylamino)-2-deoxy-beta-D-galactopyra nosyl]oxy]-14,14-bis[[3-[[3-[[5-[[2-(acetylamino)-2-deoxy-b eta-D-galactopyranosyl]oxy]-1-oxopentyl]amino]propyl]amino] -3-oxopropoxy]methyl]-1,12,19,25-tetraoxo-16-oxa-13,20,24-t riazanonacos-1-yl]-4-hydroxy-2-pyrrolidinyl)methyl ester
ttactaaaagaatatgtaact

SEQ ID NO: 4181 - RNA, 21 nt, synthetic construct
  source 1..21: mol_type = other RNA
  modified_base 1: mod_base = OTHER; note = 2'-O-methyladenosine-3'-phosphorothioate
  modified_base 2: mod_base = OTHER; note = 2'-O-methyluridine-3'-phosphorothioate
  modified_base 3: mod_base = OTHER; note = 2'-O-methylguanosine-3'-phosphate
  modified_base 4: mod_base = OTHER; note = 2'-O-methyluridine-3'-phosphate
  modified_base 5: mod_base = OTHER; note = 2'-O-methyladenosine-3'-phosphate
  modified_base 6: mod_base = OTHER; note = 2'-O-methyladenosine-3'-phosphate
  modified_base 7: mod_base = OTHER; note = 2'-deoxy-2'-fluorocytidine-3'-phosphate
  modified_base 8: mod_base = OTHER; note = 2'-O-methyladenosine-3'-phosphate
  modified_base 9: mod_base = OTHER; note = 2'-deoxy-2'-fluorouridine-3'-phosphate
  modified_base 10: mod_base = OTHER; note = 2'-deoxy-2'-fluorocytidine-3'-phosphate
  modified_base 11: mod_base = OTHER; note = 2'-deoxy-2'-fluoroadenosine-3'-phosphate
  modified_base 12: mod_base = OTHER; note = 2'-O-methyladenosine-3'-phosphate
  modified_base 13: mod_base = OTHER; note = 2'-O-methyluridine-3'-phosphate
  modified_base 14: mod_base = OTHER; note = 2'-O-methyladenosine-3'-phosphate
  modified_base 15: mod_base = OTHER; note = 2'-O-methyluridine-3'-phosphate
  modified_base 16: mod_base = OTHER; note = 2'-O-methyluridine-3'-phosphate
  modified_base 17: mod_base = OTHER; note = 2'-O-methylguanosine-3'-phosphate
  modified_base 18: mod_base = OTHER; note = 2'-O-methyladenosine-3'-phosphate
  modified_base 19: mod_base = OTHER; note = 2'-O-methylcytidine-3'-phosphate
  modified_base 20: mod_base = OTHER; note = 2'-O-methylcytidine-3'-phosphate
  modified_base 21: mod_base = OTHER; note = 2'-O-methyluridine-3'-phosphate ((2S,4R)-1-[29-[[2-(acetylamino)-2-deoxy-beta-D-galactopyra nosyl]oxy]-14,14-bis[[3-[[3-[[5-[[2-(acetylamino)-2-deoxy-b eta-D-galactopyranosyl]oxy]-1-oxopentyl]amino]propyl]amino] -3-oxopropoxy]methyl]-1,12,19,25-tetraoxo-16-oxa-13,20,24-t riazanonacos-1-yl]-4-hydroxy-2-pyrrolidinyl)methyl ester
atgtaacatcaatattgacct

SEQ ID NO: 4182 - RNA, 21 nt, synthetic construct
  source 1..21: mol_type = other RNA
  modified_base 1: mod_base = OTHER; note = 2'-O-methyladenosine-3'-phosphorothioate
  modified_base 2: mod_base = OTHER; note = 2'-O-methyluridine-3'-phosphorothioate
  modified_base 3: mod_base = OTHER; note = 2'-O-methyluridine-3'-phosphate
  modified_base 4: mod_base = OTHER; note = 2'-O-methylguanosine-3'-phosphate
  modified_base 5: mod_base = OTHER; note = 2'-O-methyladenosine-3'-phosphate
  modified_base 6: mod_base = OTHER; note = 2'-O-methylcytidine-3'-phosphate
  modified_base 7: mod_base = OTHER; note = 2'-deoxy-2'-fluorocytidine-3'-phosphate
  modified_base 8: mod_base = OTHER; note = 2'-O-methyluridine-3'-phosphate
  modified_base 9: mod_base = OTHER; note = 2'-deoxy-2'-fluorouridine-3'-phosphate
  modified_base 10: mod_base = OTHER; note = 2'-deoxy-2'-fluoroguanosine-3'-phosphate
  modified_base 11: mod_base = OTHER; note = 2'-deoxy-2'-fluoroguanosine-3'-phosphate
  modified_base 12: mod_base = OTHER; note = 2'-O-methyluridine-3'-phosphate
  modified_base 13: mod_base = OTHER; note = 2'-O-methyluridine-3'-phosphate
  modified_base 14: mod_base = OTHER; note = 2'-O-methyluridine-3'-phosphate
  modified_base 15: mod_base = OTHER; note = 2'-O-methylcytidine-3'-phosphate
  modified_base 16: mod_base = OTHER; note = 2'-O-methyluridine-3'-phosphate
  modified_base 17: mod_base = OTHER; note = 2'-O-methyluridine-3'-phosphate
  modified_base 18: mod_base = OTHER; note = 2'-O-methyladenosine-3'-phosphate
  modified_base 19: mod_base = OTHER; note = 2'-O-methylcytidine-3'-phosphate
  modified_base 20: mod_base = OTHER; note = 2'-O-methyladenosine-3'-phosphate
  modified_base 21: mod_base = OTHER; note = 2'-O-methyluridine-3'-phosphate ((2S,4R)-1-[29-[[2-(acetylamino)-2-deoxy-beta-D-galactopyra nosyl]oxy]-14,14-bis[[3-[[3-[[5-[[2-(acetylamino)-2-deoxy-b eta-D-galactopyranosyl]oxy]-1-oxopentyl]amino]propyl]amino] -3-oxopropoxy]methyl]-1,12,19,25-tetraoxo-16-oxa-13,20,24-t riazanonacos-1-yl]-4-hydroxy-2-pyrrolidinyl)methyl ester
attgaccttggtttcttacat

SEQ ID NO: 4183 - RNA, 21 nt, synthetic construct
  source 1..21: mol_type = other RNA
  modified_base 1: mod_base = OTHER; note = 2'-O-methyluridine-3'-phosphorothioate
  modified_base 2: mod_base = OTHER; note = 2'-O-methylcytidine-3'-phosphorothioate
  modified_base 3: mod_base = OTHER; note = 2'-O-methyluridine-3'-phosphate
  modified_base 4: mod_base = OTHER; note = 2'-O-methyluridine-3'-phosphate
  modified_base 5: mod_base = OTHER; note = 2'-O-methyladenosine-3'-phosphate
  modified_base 6: mod_base = OTHER; note = 2'-O-methylcytidine-3'-phosphate
  modified_base 7: mod_base = OTHER; note = 2'-deoxy-2'-fluoroadenosine-3'-phosphate
  modified_base 8: mod_base = OTHER; note = 2'-O-methylcytidine-3'-phosphate
  modified_base 9: mod_base = OTHER; note = 2'-deoxy-2'-fluoroadenosine-3'-phosphate
  modified_base 10: mod_base = OTHER; note = 2'-deoxy-2'-fluoroadenosine-3'-phosphate
  modified_base 11: mod_base = OTHER; note = 2'-deoxy-2'-fluoroguanosine-3'-phosphate
  modified_base 12: mod_base = OTHER; note = 2'-O-methyluridine-3'-phosphate
  modified_base 13: mod_base = OTHER; note = 2'-O-methylguanosine-3'-phosphate
  modified_base 14: mod_base = OTHER; note = 2'-O-methyluridine-3'-phosphate
  modified_base 15: mod_base = OTHER; note = 2'-O-methyluridine-3'-phosphate
  modified_base 16: mod_base = OTHER; note = 2'-O-methylguanosine-3'-phosphate
  modified_base 17: mod_base = OTHER; note = 2'-O-methylcytidine-3'-phosphate
  modified_base 18: mod_base = OTHER; note = 2'-O-methyluridine-3'-phosphate
  modified_base 19: mod_base = OTHER; note = 2'-O-methyladenosine-3'-phosphate
  modified_base 20: mod_base = OTHER; note = 2'-O-methyladenosine-3'-phosphate
  modified_base 21: mod_base = OTHER; note = 2'-O-methyluridine-3'-phosphate ((2S,4R)-1-[29-[[2-(acetylamino)-2-deoxy-beta-D-galactopyra nosyl]oxy]-14,14-bis[[3-[[3-[[5-[[2-(acetylamino)-2-deoxy-b eta-D-galactopyranosyl]oxy]-1-oxopentyl]amino]propyl]amino] -3-oxopropoxy]methyl]-1,12,19,25-tetraoxo-16-oxa-13,20,24-t riazanonacos-1-yl]-4-hydroxy-2-pyrrolidinyl)methyl ester
tcttacacaagtgttgctaat

SEQ ID NO: 4184 - RNA, 21 nt, synthetic construct
  source 1..21: mol_type = other RNA
  modified_base 1: mod_base = OTHER; note = 2'-O-methyladenosine-3'-phosphorothioate
  modified_base 2: mod_base = OTHER; note = 2'-O-methyladenosine-3'-phosphorothioate
  modified_base 3: mod_base = OTHER; note = 2'-O-methylcytidine-3'-phosphate
  modified_base 4: mod_base = OTHER; note = 2'-O-methyluridine-3'-phosphate
  modified_base 5: mod_base = OTHER; note = 2'-O-methylcytidine-3'-phosphate
  modified_base 6: mod_base = OTHER; note = 2'-O-methyladenosine-3'-phosphate
  modified_base 7: mod_base = OTHER; note = 2'-deoxy-2'-fluoroadenosine-3'-phosphate
  modified_base 8: mod_base = OTHER; note = 2'-O-methyluridine-3'-phosphate
  modified_base 9: mod_base = OTHER; note = 2'-deoxy-2'-fluoroadenosine-3'-phosphate
  modified_base 10: mod_base = OTHER; note = 2'-deoxy-2'-fluoroguanosine-3'-phosphate
  modified_base 11: mod_base = OTHER; note = 2'-deoxy-2'-fluorouridine-3'-phosphate
  modified_base 12: mod_base = OTHER; note = 2'-O-methylguanosine-3'-phosphate
  modified_base 13: mod_base = OTHER; note = 2'-O-methyladenosine-3'-phosphate
  modified_base 14: mod_base = OTHER; note = 2'-O-methyladenosine-3'-phosphate
  modified_base 15: mod_base = OTHER; note = 2'-O-methylguanosine-3'-phosphate
  modified_base 16: mod_base = OTHER; note = 2'-O-methylguanosine-3'-phosphate
  modified_base 17: mod_base = OTHER; note = 2'-O-methyladenosine-3'-phosphate
  modified_base 18: mod_base = OTHER; note = 2'-O-methylguanosine-3'-phosphate
  modified_base 19: mod_base = OTHER; note = 2'-O-methyladenosine-3'-phosphate
  modified_base 20: mod_base = OTHER; note = 2'-O-methylcytidine-3'-phosphate
  modified_base 21: mod_base = OTHER; note = 2'-O-methyluridine-3'-phosphate ((2S,4R)-1-[29-[[2-(acetylamino)-2-deoxy-beta-D-galactopyra nosyl]oxy]-14,14-bis[[3-[[3-[[5-[[2-(acetylamino)-2-deoxy-b eta-D-galactopyranosyl]oxy]-1-oxopentyl]amino]propyl]amino] -3-oxopropoxy]methyl]-1,12,19,25-tetraoxo-16-oxa-13,20,24-t riazanonacos-1-yl]-4-hydroxy-2-pyrrolidinyl)methyl ester
aactcaatagtgaaggagact

SEQ ID NO: 4185 - RNA, 21 nt, synthetic construct
  source 1..21: mol_type = other RNA
  modified_base 1: mod_base = OTHER; note = 2'-O-methylguanosine-3'-phosphorothioate
  modified_base 2: mod_base = OTHER; note = 2'-O-methylguanosine-3'-phosphorothioate
  modified_base 3: mod_base = OTHER; note = 2'-O-methyladenosine-3'-phosphate
  modified_base 4: mod_base = OTHER; note = 2'-O-methylguanosine-3'-phosphate
  modified_base 5: mod_base = OTHER; note = 2'-O-methyladenosine-3'-phosphate
  modified_base 6: mod_base = OTHER; note = 2'-O-methylcytidine-3'-phosphate
  modified_base 7: mod_base = OTHER; note = 2'-deoxy-2'-fluoroadenosine-3'-phosphate
  modified_base 8: mod_base = OTHER; note = 2'-O-methylcytidine-3'-phosphate
  modified_base 9: mod_base = OTHER; note = 2'-deoxy-2'-fluorouridine-3'-phosphate
  modified_base 10: mod_base = OTHER; note = 2'-deoxy-2'-fluoroadenosine-3'-phosphate
  modified_base 11: mod_base = OTHER; note = 2'-deoxy-2'-fluorouridine-3'-phosphate
  modified_base 12: mod_base = OTHER; note = 2'-O-methyluridine-3'-phosphate
  modified_base 13: mod_base = OTHER; note = 2'-O-methyladenosine-3'-phosphate
  modified_base 14: mod_base = OTHER; note = 2'-O-methyladenosine-3'-phosphate
  modified_base 15: mod_base = OTHER; note = 2'-O-methyladenosine-3'-phosphate
  modified_base 16: mod_base = OTHER; note = 2'-O-methyluridine-3'-phosphate
  modified_base 17: mod_base = OTHER; note = 2'-O-methyluridine-3'-phosphate
  modified_base 18: mod_base = OTHER; note = 2'-O-methyluridine-3'-phosphate
  modified_base 19: mod_base = OTHER; note = 2'-O-methyluridine-3'-phosphate
  modified_base 20: mod_base = OTHER; note = 2'-O-methylcytidine-3'-phosphate
  modified_base 21: mod_base = OTHER; note = 2'-O-methyluridine-3'-phosphate ((2S,4R)-1-[29-[[2-(acetylamino)-2-deoxy-beta-D-galactopyra nosyl]oxy]-14,14-bis[[3-[[3-[[5-[[2-(acetylamino)-2-deoxy-b eta-D-galactopyranosyl]oxy]-1-oxopentyl]amino]propyl]amino] -3-oxopropoxy]methyl]-1,12,19,25-tetraoxo-16-oxa-13,20,24-t riazanonacos-1-yl]-4-hydroxy-2-pyrrolidinyl)methyl ester
ggagacactattaaattttct

SEQ ID NO: 4186 - RNA, 21 nt, synthetic construct
  source 1..21: mol_type = other RNA
  modified_base 1: mod_base = OTHER; note = 2'-O-methylguanosine-3'-phosphorothioate
  modified_base 2: mod_base = OTHER; note = 2'-O-methyladenosine-3'-phosphorothioate
  modified_base 3: mod_base = OTHER; note = 2'-O-methyladenosine-3'-phosphate
  modified_base 4: mod_base = OTHER; note = 2'-O-methylcytidine-3'-phosphate
  modified_base 5: mod_base = OTHER; note = 2'-O-methylcytidine-3'-phosphate
  modified_base 6: mod_base = OTHER; note = 2'-O-methylcytidine-3'-phosphate
  modified_base 7: mod_base = OTHER; note = 2'-deoxy-2'-fluoroadenosine-3'-phosphate
  modified_base 8: mod_base = OTHER; note = 2'-O-methyluridine-3'-phosphate
  modified_base 9: mod_base = OTHER; note = 2'-deoxy-2'-fluoroguanosine-3'-phosphate
  modified_base 10: mod_base = OTHER; note = 2'-deoxy-2'-fluoroadenosine-3'-phosphate
  modified_base 11: mod_base = OTHER; note = 2'-deoxy-2'-fluoroguanosine-3'-phosphate
  modified_base 12: mod_base = OTHER; note = 2'-O-methyladenosine-3'-phosphate
  modified_base 13: mod_base = OTHER; note = 2'-O-methylguanosine-3'-phosphate
  modified_base 14: mod_base = OTHER; note = 2'-O-methyladenosine-3'-phosphate
  modified_base 15: mod_base = OTHER; note = 2'-O-methyluridine-3'-phosphate
  modified_base 16: mod_base = OTHER; note = 2'-O-methyladenosine-3'-phosphate
  modified_base 17: mod_base = OTHER; note = 2'-O-methylcytidine-3'-phosphate
  modified_base 18: mod_base = OTHER; note = 2'-O-methyluridine-3'-phosphate
  modified_base 19: mod_base = OTHER; note = 2'-O-methyladenosine-3'-phosphate
  modified_base 20: mod_base = OTHER; note = 2'-O-methylguanosine-3'-phosphate
  modified_base 21: mod_base = OTHER; note = 2'-O-methyluridine-3'-phosphate ((2S,4R)-1-[29-[[2-(acetylamino)-2-deoxy-beta-D-galactopyra nosyl]oxy]-14,14-bis[[3-[[3-[[5-[[2-(acetylamino)-2-deoxy-b eta-D-galactopyranosyl]oxy]-1-oxopentyl]amino]propyl]amino] -3-oxopropoxy]methyl]-1,12,19,25-tetraoxo-16-oxa-13,20,24-t riazanonacos-1-yl]-4-hydroxy-2-pyrrolidinyl)methyl ester
gaacccatgagagatactagt

SEQ ID NO: 4187 - RNA, 21 nt, synthetic construct
  source 1..21: mol_type = other RNA
  modified_base 1: mod_base = OTHER; note = 2'-O-methyladenosine-3'-phosphorothioate
  modified_base 2: mod_base = OTHER; note = 2'-O-methylguanosine-3'-phosphorothioate
  modified_base 3: mod_base = OTHER; note = 2'-O-methyluridine-3'-phosphate
  modified_base 4: mod_base = OTHER; note = 2'-O-methylguanosine-3'-phosphate
  modified_base 5: mod_base = OTHER; note = 2'-O-methylguanosine-3'-phosphate
  modified_base 6: mod_base = OTHER; note = 2'-O-methyladenosine-3'-phosphate
  modified_base 7: mod_base = OTHER; note = 2'-deoxy-2'-fluoroadenosine-3'-phosphate
  modified_base 8: mod_base = OTHER; note = 2'-O-methyladenosine-3'-phosphate
  modified_base 9: mod_base = OTHER; note = 2'-deoxy-2'-fluoroguanosine-3'-phosphate
  modified_base 10: mod_base = OTHER; note = 2'-deoxy-2'-fluorouridine-3'-phosphate
  modified_base 11: mod_base = OTHER; note = 2'-deoxy-2'-fluoroguanosine-3'-phosphate
  modified_base 12: mod_base = OTHER; note = 2'-O-methyluridine-3'-phosphate
  modified_base 13: mod_base = OTHER; note = 2'-O-methyluridine-3'-phosphate
  modified_base 14: mod_base = OTHER; note = 2'-O-methyluridine-3'-phosphate
  modified_base 15: mod_base = OTHER; note = 2'-O-methylguanosine-3'-phosphate
  modified_base 16: mod_base = OTHER; note = 2'-O-methylguanosine-3'-phosphate
  modified_base 17: mod_base = OTHER; note = 2'-O-methyluridine-3'-phosphate
  modified_base 18: mod_base = OTHER; note = 2'-O-methyluridine-3'-phosphate
  modified_base 19: mod_base = OTHER; note = 2'-O-methylcytidine-3'-phosphate
  modified_base 20: mod_base = OTHER; note = 2'-O-methyladenosine-3'-phosphate
  modified_base 21: mod_base = OTHER; note = 2'-O-methyluridine-3'-phosphate ((2S,4R)-1-[29-[[2-(acetylamino)-2-deoxy-beta-D-galactopyra nosyl]oxy]-14,14-bis[[3-[[3-[[5-[[2-(acetylamino)-2-deoxy-b eta-D-galactopyranosyl]oxy]-1-oxopentyl]amino]propyl]amino] -3-oxopropoxy]methyl]-1,12,19,25-tetraoxo-16-oxa-13,20,24-t riazanonacos-1-yl]-4-hydroxy-2-pyrrolidinyl)methyl ester
agtggaaagtgtttggttcat

SEQ ID NO: 4188 - RNA, 21 nt, synthetic construct
  source 1..21: mol_type = other RNA
  modified_base 1: mod_base = OTHER; note = 2'-O-methyluridine-3'-phosphorothioate
  modified_base 2: mod_base = OTHER; note = 2'-O-methylcytidine-3'-phosphorothioate
  modified_base 3: mod_base = OTHER; note = 2'-O-methyladenosine-3'-phosphate
  modified_base 4: mod_base = OTHER; note = 2'-O-methylguanosine-3'-phosphate
  modified_base 5: mod_base = OTHER; note = 2'-O-methylguanosine-3'-phosphate
  modified_base 6: mod_base = OTHER; note = 2'-O-methylguanosine-3'-phosphate
  modified_base 7: mod_base = OTHER; note = 2'-deoxy-2'-fluoroadenosine-3'-phosphate
  modified_base 8: mod_base = OTHER; note = 2'-O-methyluridine-3'-phosphate
  modified_base 9: mod_base = OTHER; note = 2'-deoxy-2'-fluoroadenosine-3'-phosphate
  modified_base 10: mod_base = OTHER; note = 2'-deoxy-2'-fluorouridine-3'-phosphate
  modified_base 11: mod_base = OTHER; note = 2'-deoxy-2'-fluorocytidine-3'-phosphate
  modified_base 12: mod_base = OTHER; note = 2'-O-methyluridine-3'-phosphate
  modified_base 13: mod_base = OTHER; note = 2'-O-methylguanosine-3'-phosphate
  modified_base 14: mod_base = OTHER; note = 2'-O-methyladenosine-3'-phosphate
  modified_base 15: mod_base = OTHER; note = 2'-O-methyladenosine-3'-phosphate
  modified_base 16: mod_base = OTHER; note = 2'-O-methylguanosine-3'-phosphate
  modified_base 17: mod_base = OTHER; note = 2'-O-methyladenosine-3'-phosphate
  modified_base 18: mod_base = OTHER; note = 2'-O-methyladenosine-3'-phosphate
  modified_base 19: mod_base = OTHER; note = 2'-O-methylcytidine-3'-phosphate
  modified_base 20: mod_base = OTHER; note = 2'-O-methyladenosine-3'-phosphate
  modified_base 21: mod_base = OTHER; note = 2'-O-methyluridine-3'-phosphate ((2S,4R)-1-[29-[[2-(acetylamino)-2-deoxy-beta-D-galactopyra nosyl]oxy]-14,14-bis[[3-[[3-[[5-[[2-(acetylamino)-2-deoxy-b eta-D-galactopyranosyl]oxy]-1-oxopentyl]amino]propyl]amino] -3-oxopropoxy]methyl]-1,12,19,25-tetraoxo-16-oxa-13,20,24-t riazanonacos-1-yl]-4-hydroxy-2-pyrrolidinyl)methyl ester
tcagggatatctgaagaacat

SEQ ID NO: 4189 - RNA, 21 nt, synthetic construct
  source 1..21: mol_type = other RNA
  modified_base 1: mod_base = OTHER; note = 2'-O-methylguanosine-3'-phosphorothioate
  modified_base 2: mod_base = OTHER; note = 2'-O-methylcytidine-3'-phosphorothioate
  modified_base 3: mod_base = OTHER; note = 2'-O-methyladenosine-3'-phosphate
  modified_base 4: mod_base = OTHER; note = 2'-O-methylguanosine-3'-phosphate
  modified_base 5: mod_base = OTHER; note = 2'-O-methyladenosine-3'-phosphate
  modified_base 6: mod_base = OTHER; note = 2'-O-methylguanosine-3'-phosphate
  modified_base 7: mod_base = OTHER; note = 2'-deoxy-2'-fluoroadenosine-3'-phosphate
  modified_base 8: mod_base = OTHER; note = 2'-O-methyluridine-3'-phosphate
  modified_base 9: mod_base = OTHER; note = 2'-deoxy-2'-fluorouridine-3'-phosphate
  modified_base 10: mod_base = OTHER; note = 2'-deoxy-2'-fluorouridine-3'-phosphate
  modified_base 11: mod_base = OTHER; note = 2'-deoxy-2'-fluorocytidine-3'-phosphate
  modified_base 12: mod_base = OTHER; note = 2'-O-methyluridine-3'-phosphate
  modified_base 13: mod_base = OTHER; note = 2'-O-methyluridine-3'-phosphate
  modified_base 14: mod_base = OTHER; note = 2'-O-methyladenosine-3'-phosphate
  modified_base 15: mod_base = OTHER; note = 2'-O-methyladenosine-3'-phosphate
  modified_base 16: mod_base = OTHER; note = 2'-O-methylguanosine-3'-phosphate
  modified_base 17: mod_base = OTHER; note = 2'-O-methyluridine-3'-phosphate
  modified_base 18: mod_base = OTHER; note = 2'-O-methylguanosine-3'-phosphate
  modified_base 19: mod_base = OTHER; note = 2'-O-methyladenosine-3'-phosphate
  modified_base 20: mod_base = OTHER; note = 2'-O-methylcytidine-3'-phosphate
  modified_base 21: mod_base = OTHER; note = 2'-O-methyluridine-3'-phosphate ((2S,4R)-1-[29-[[2-(acetylamino)-2-deoxy-beta-D-galactopyra nosyl]oxy]-14,14-bis[[3-[[3-[[5-[[2-(acetylamino)-2-deoxy-b eta-D-galactopyranosyl]oxy]-1-oxopentyl]amino]propyl]amino] -3-oxopropoxy]methyl]-1,12,19,25-tetraoxo-16-oxa-13,20,24-t riazanonacos-1-yl]-4-hydroxy-2-pyrrolidinyl)methyl ester
gcagagatttcttaagtgact

SEQ ID NO: 4190 - RNA, 21 nt, synthetic construct
  source 1..21: mol_type = other RNA
  modified_base 1: mod_base = OTHER; note = 2'-O-methyladenosine-3'-phosphorothioate
  modified_base 2: mod_base = OTHER; note = 2'-O-methyladenosine-3'-phosphorothioate
  modified_base 3: mod_base = OTHER; note = 2'-O-methylguanosine-3'-phosphate
  modified_base 4: mod_base = OTHER; note = 2'-O-methyluridine-3'-phosphate
  modified_base 5: mod_base = OTHER; note = 2'-O-methylguanosine-3'-phosphate
  modified_base 6: mod_base = OTHER; note = 2'-O-methyladenosine-3'-phosphate
  modified_base 7: mod_base = OTHER; note = 2'-deoxy-2'-fluorocytidine-3'-phosphate
  modified_base 8: mod_base = OTHER; note = 2'-O-methylguanosine-3'-phosphate
  modified_base 9: mod_base = OTHER; note = 2'-deoxy-2'-fluorocytidine-3'-phosphate
  modified_base 10: mod_base = OTHER; note = 2'-deoxy-2'-fluorocytidine-3'-phosphate
  modified_base 11: mod_base = OTHER; note = 2'-deoxy-2'-fluorouridine-3'-phosphate
  modified_base 12: mod_base = OTHER; note = 2'-O-methylcytidine-3'-phosphate
  modified_base 13: mod_base = OTHER; note = 2'-O-methyladenosine-3'-phosphate
  modified_base 14: mod_base = OTHER; note = 2'-O-methyluridine-3'-phosphate
  modified_base 15: mod_base = OTHER; note = 2'-O-methylcytidine-3'-phosphate
  modified_base 16: mod_base = OTHER; note = 2'-O-methyluridine-3'-phosphate
  modified_base 17: mod_base = OTHER; note = 2'-O-methyladenosine-3'-phosphate
  modified_base 18: mod_base = OTHER; note = 2'-O-methylcytidine-3'-phosphate
  modified_base 19: mod_base = OTHER; note = 2'-O-methyladenosine-3'-phosphate
  modified_base 20: mod_base = OTHER; note = 2'-O-methyladenosine-3'-phosphate
  modified_base 21: mod_base = OTHER; note = 2'-O-methyluridine-3'-phosphate ((2S,4R)-1-[29-[[2-(acetylamino)-2-deoxy-beta-D-galactopyra nosyl]oxy]-14,14-bis[[3-[[3-[[5-[[2-(acetylamino)-2-deoxy-b eta-D-galactopyranosyl]oxy]-1-oxopentyl]amino]propyl]amino] -3-oxopropoxy]methyl]-1,12,19,25-tetraoxo-16-oxa-13,20,24-t riazanonacos-1-yl]-4-hydroxy-2-pyrrolidinyl)methyl ester
aagtgacgcctcatctacaat

SEQ ID NO: 4191 - RNA, 21 nt, synthetic construct
  source 1..21: mol_type = other RNA
  modified_base 1: mod_base = OTHER; note = 2'-O-methyluridine-3'-phosphorothioate
  modified_base 2: mod_base = OTHER; note = 2'-O-methyladenosine-3'-phosphorothioate
  modified_base 3: mod_base = OTHER; note = 2'-O-methylcytidine-3'-phosphate
  modified_base 4: mod_base = OTHER; note = 2'-O-methyladenosine-3'-phosphate
  modified_base 5: mod_base = OTHER; note = 2'-O-methyladenosine-3'-phosphate
  modified_base 6: mod_base = OTHER; note = 2'-O-methylguanosine-3'-phosphate
  modified_base 7: mod_base = OTHER; note = 2'-deoxy-2'-fluorocytidine-3'-phosphate
  modified_base 8: mod_base = OTHER; note = 2'-O-methyluridine-3'-phosphate
  modified_base 9: mod_base = OTHER; note = 2'-deoxy-2'-fluoroguanosine-3'-phosphate
  modified_base 10: mod_base = OTHER; note = 2'-deoxy-2'-fluoroguanosine-3'-phosphate
  modified_base 11: mod_base = OTHER; note = 2'-deoxy-2'-fluoroadenosine-3'-phosphate
  modified_base 12: mod_base = OTHER; note = 2'-O-methyladenosine-3'-phosphate
  modified_base 13: mod_base = OTHER; note = 2'-O-methyladenosine-3'-phosphate
  modified_base 14: mod_base = OTHER; note = 2'-O-methyluridine-3'-phosphate
  modified_base 15: mod_base = OTHER; note = 2'-O-methyluridine-3'-phosphate
  modified_base 16: mod_base = OTHER; note = 2'-O-methylcytidine-3'-phosphate
  modified_base 17: mod_base = OTHER; note = 2'-O-methylcytidine-3'-phosphate
  modified_base 18: mod_base = OTHER; note = 2'-O-methyluridine-3'-phosphate
  modified_base 19: mod_base = OTHER; note = 2'-O-methyladenosine-3'-phosphate
  modified_base 20: mod_base = OTHER; note = 2'-O-methyladenosine-3'-phosphate
  modified_base 21: mod_base = OTHER; note = 2'-O-methyluridine-3'-phosphate ((2S,4R)-1-[29-[[2-(acetylamino)-2-deoxy-beta-D-galactopyra nosyl]oxy]-14,14-bis[[3-[[3-[[5-[[2-(acetylamino)-2-deoxy-b eta-D-galactopyranosyl]oxy]-1-oxopentyl]amino]propyl]amino] -3-oxopropoxy]methyl]-1,12,19,25-tetraoxo-16-oxa-13,20,24-t riazanonacos-1-yl]-4-hydroxy-2-pyrrolidinyl)methyl ester
tacaagctggaaattcctaat

SEQ ID NO: 4192 - RNA, 21 nt, synthetic construct
  source 1..21: mol_type = other RNA
  modified_base 1: mod_base = OTHER; note = 2'-O-methyladenosine-3'-phosphorothioate
  modified_base 2: mod_base = OTHER; note = 2'-O-methylguanosine-3'-phosphorothioate
  modified_base 3: mod_base = OTHER; note = 2'-O-methyluridine-3'-phosphate
  modified_base 4: mod_base = OTHER; note = 2'-O-methyladenosine-3'-phosphate
  modified_base 5: mod_base = OTHER; note = 2'-O-methylguanosine-3'-phosphate
  modified_base 6: mod_base = OTHER; note = 2'-O-methyladenosine-3'-phosphate
  modified_base 7: mod_base = OTHER; note = 2'-deoxy-2'-fluoroadenosine-3'-phosphate
  modified_base 8: mod_base = OTHER; note = 2'-O-methyladenosine-3'-phosphate
  modified_base 9: mod_base = OTHER; note = 2'-deoxy-2'-fluoroguanosine-3'-phosphate
  modified_base 10: mod_base = OTHER; note = 2'-deoxy-2'-fluorocytidine-3'-phosphate
  modified_base 11: mod_base = OTHER; note = 2'-deoxy-2'-fluorouridine-3'-phosphate
  modified_base 12: mod_base = OTHER; note = 2'-O-methyluridine-3'-phosphate
  modified_base 13: mod_base = OTHER; note = 2'-O-methyladenosine-3'-phosphate
  modified_base 14: mod_base = OTHER; note = 2'-O-methyluridine-3'-phosphate
  modified_base 15: mod_base = OTHER; note = 2'-O-methyladenosine-3'-phosphate
  modified_base 16: mod_base = OTHER; note = 2'-O-methyladenosine-3'-phosphate
  modified_base 17: mod_base = OTHER; note = 2'-O-methyladenosine-3'-phosphate
  modified_base 18: mod_base = OTHER; note = 2'-O-methylcytidine-3'-phosphate
  modified_base 19: mod_base = OTHER; note = 2'-O-methyladenosine-3'-phosphate
  modified_base 20: mod_base = OTHER; note = 2'-O-methyladenosine-3'-phosphate
  modified_base 21: mod_base = OTHER; note = 2'-O-methyluridine-3'-phosphate ((2S,4R)-1-[29-[[2-(acetylamino)-2-deoxy-beta-D-galactopyra nosyl]oxy]-14,14-bis[[3-[[3-[[5-[[2-(acetylamino)-2-deoxy-b eta-D-galactopyranosyl]oxy]-1-oxopentyl]amino]propyl]amino] -3-oxopropoxy]methyl]-1,12,19,25-tetraoxo-16-oxa-13,20,24-t riazanonacos-1-yl]-4-hydroxy-2-pyrrolidinyl)methyl ester
agtagaaagcttataaacaat

SEQ ID NO: 4193 - RNA, 21 nt, synthetic construct
  source 1..21: mol_type = other RNA
  modified_base 1: mod_base = OTHER; note = 2'-O-methyladenosine-3'-phosphorothioate
  modified_base 2: mod_base = OTHER; note = 2'-O-methyladenosine-3'-phosphorothioate
  modified_base 3: mod_base = OTHER; note = 2'-O-methyladenosine-3'-phosphate
  modified_base 4: mod_base = OTHER; note = 2'-O-methylcytidine-3'-phosphate
  modified_base 5: mod_base = OTHER; note = 2'-O-methyladenosine-3'-phosphate
  modified_base 6: mod_base = OTHER; note = 2'-O-methyladenosine-3'-phosphate
  modified_base 7: mod_base = OTHER; note = 2'-deoxy-2'-fluorocytidine-3'-phosphate
  modified_base 8: mod_base = OTHER; note = 2'-O-methyladenosine-3'-phosphate
  modified_base 9: mod_base = OTHER; note = 2'-deoxy-2'-fluoroguanosine-3'-phosphate
  modified_base 10: mod_base = OTHER; note = 2'-deoxy-2'-fluoroguanosine-3'-phosphate
  modified_base 11: mod_base = OTHER; note = 2'-deoxy-2'-fluorouridine-3'-phosphate
  modified_base 12: mod_base = OTHER; note = 2'-O-methylguanosine-3'-phosphate
  modified_base 13: mod_base = OTHER; note = 2'-O-methyladenosine-3'-phosphate
  modified_base 14: mod_base = OTHER; note = 2'-O-methyluridine-3'-phosphate
  modified_base 15: mod_base = OTHER; note = 2'-O-methyladenosine-3'-phosphate
  modified_base 16: mod_base = OTHER; note = 2'-O-methylcytidine-3'-phosphate
  modified_base 17: mod_base = OTHER; note = 2'-O-methyladenosine-3'-phosphate
  modified_base 18: mod_base = OTHER; note = 2'-O-methylcytidine-3'-phosphate
  modified_base 19: mod_base = OTHER; note = 2'-O-methyluridine-3'-phosphate
  modified_base 20: mod_base = OTHER; note = 2'-O-methylcytidine-3'-phosphate
  modified_base 21: mod_base = OTHER; note = 2'-O-methyluridine-3'-phosphate ((2S,4R)-1-[29-[[2-(acetylamino)-2-deoxy-beta-D-galactopyra nosyl]oxy]-14,14-bis[[3-[[3-[[5-[[2-(acetylamino)-2-deoxy-b eta-D-galactopyranosyl]oxy]-1-oxopentyl]amino]propyl]amino] -3-oxopropoxy]methyl]-1,12,19,25-tetraoxo-16-oxa-13,20,24-t riazanonacos-1-yl]-4-hydroxy-2-pyrrolidinyl)methyl ester
aaacaacaggtgatacactct

SEQ ID NO: 4194 - RNA, 21 nt, synthetic construct
  source 1..21: mol_type = other RNA
  modified_base 1: mod_base = OTHER; note = 2'-O-methylcytidine-3'-phosphorothioate
  modified_base 2: mod_base = OTHER; note = 2'-O-methyladenosine-3'-phosphorothioate
  modified_base 3: mod_base = OTHER; note = 2'-O-methylcytidine-3'-phosphate
  modified_base 4: mod_base = OTHER; note = 2'-O-methyluridine-3'-phosphate
  modified_base 5: mod_base = OTHER; note = 2'-O-methylguanosine-3'-phosphate
  modified_base 6: mod_base = OTHER; note = 2'-O-methylguanosine-3'-phosphate
  modified_base 7: mod_base = OTHER; note = 2'-deoxy-2'-fluorouridine-3'-phosphate
  modified_base 8: mod_base = OTHER; note = 2'-O-methyluridine-3'-phosphate
  modified_base 9: mod_base = OTHER; note = 2'-deoxy-2'-fluorouridine-3'-phosphate
  modified_base 10: mod_base = OTHER; note = 2'-deoxy-2'-fluorouridine-3'-phosphate
  modified_base 11: mod_base = OTHER; note = 2'-deoxy-2'-fluoroadenosine-3'-phosphate
  modified_base 12: mod_base = OTHER; note = 2'-O-methylguanosine-3'-phosphate
  modified_base 13: mod_base = OTHER; note = 2'-O-methyluridine-3'-phosphate
  modified_base 14: mod_base = OTHER; note = 2'-O-methyladenosine-3'-phosphate
  modified_base 15: mod_base = OTHER; note = 2'-O-methyladenosine-3'-phosphate
  modified_base 16: mod_base = OTHER; note = 2'-O-methyladenosine-3'-phosphate
  modified_base 17: mod_base = OTHER; note = 2'-O-methyluridine-3'-phosphate
  modified_base 18: mod_base = OTHER; note = 2'-O-methyluridine-3'-phosphate
  modified_base 19: mod_base = OTHER; note = 2'-O-methyladenosine-3'-phosphate
  modified_base 20: mod_base = OTHER; note = 2'-O-methylcytidine-3'-phosphate
  modified_base 21: mod_base = OTHER; note = 2'-O-methyluridine-3'-phosphate ((2S,4R)-1-[29-[[2-(acetylamino)-2-deoxy-beta-D-galactopyra nosyl]oxy]-14,14-bis[[3-[[3-[[5-[[2-(acetylamino)-2-deoxy-b eta-D-galactopyranosyl]oxy]-1-oxopentyl]amino]propyl]amino] -3-oxopropoxy]methyl]-1,12,19,25-tetraoxo-16-oxa-13,20,24-t riazanonacos-1-yl]-4-hydroxy-2-pyrrolidinyl)methyl ester
cactggttttagtaaattact

SEQ ID NO: 4195 - RNA, 21 nt, synthetic construct
  source 1..21: mol_type = other RNA
  modified_base 1: mod_base = OTHER; note = 2'-O-methylcytidine-3'-phosphorothioate
  modified_base 2: mod_base = OTHER; note = 2'-O-methyladenosine-3'-phosphorothioate
  modified_base 3: mod_base = OTHER; note = 2'-O-methylguanosine-3'-phosphate
  modified_base 4: mod_base = OTHER; note = 2'-O-methyladenosine-3'-phosphate
  modified_base 5: mod_base = OTHER; note = 2'-O-methyladenosine-3'-phosphate
  modified_base 6: mod_base = OTHER; note = 2'-O-methyladenosine-3'-phosphate
  modified_base 7: mod_base = OTHER; note = 2'-deoxy-2'-fluoroguanosine-3'-phosphate
  modified_base 8: mod_base = OTHER; note = 2'-O-methyluridine-3'-phosphate
  modified_base 9: mod_base = OTHER; note = 2'-deoxy-2'-fluoroadenosine-3'-phosphate
  modified_base 10: mod_base = OTHER; note = 2'-deoxy-2'-fluorouridine-3'-phosphate
  modified_base 11: mod_base = OTHER; note = 2'-deoxy-2'-fluorocytidine-3'-phosphate
  modified_base 12: mod_base = OTHER; note = 2'-O-methylcytidine-3'-phosphate
  modified_base 13: mod_base = OTHER; note = 2'-O-methylcytidine-3'-phosphate
  modified_base 14: mod_base = OTHER; note = 2'-O-methyluridine-3'-phosphate
  modified_base 15: mod_base = OTHER; note = 2'-O-methyladenosine-3'-phosphate
  modified_base 16: mod_base = OTHER; note = 2'-O-methylguanosine-3'-phosphate
  modified_base 17: mod_base = OTHER; note = 2'-O-methyluridine-3'-phosphate
  modified_base 18: mod_base = OTHER; note = 2'-O-methylcytidine-3'-phosphate
  modified_base 19: mod_base = OTHER; note = 2'-O-methyluridine-3'-phosphate
  modified_base 20: mod_base = OTHER; note = 2'-O-methyluridine-3'-phosphate
  modified_base 21: mod_base = OTHER; note = 2'-O-methyluridine-3'-phosphate ((2S,4R)-1-[29-[[2-(acetylamino)-2-deoxy-beta-D-galactopyra nosyl]oxy]-14,14-bis[[3-[[3-[[5-[[2-(acetylamino)-2-deoxy-b eta-D-galactopyranosyl]oxy]-1-oxopentyl]amino]propyl]amino] -3-oxopropoxy]methyl]-1,12,19,25-tetraoxo-16-oxa-13,20,24-t riazanonacos-1-yl]-4-hydroxy-2-pyrrolidinyl)methyl ester
cagaaagtatccctagtcttt

SEQ ID NO: 4196 - RNA, 21 nt, synthetic construct
  source 1..21: mol_type = other RNA
  modified_base 1: mod_base = OTHER; note = 2'-O-methylguanosine-3'-phosphorothioate
  modified_base 2: mod_base = OTHER; note = 2'-O-methyluridine-3'-phosphorothioate
  modified_base 3: mod_base = OTHER; note = 2'-O-methylguanosine-3'-phosphate
  modified_base 4: mod_base = OTHER; note = 2'-O-methylguanosine-3'-phosphate
  modified_base 5: mod_base = OTHER; note = 2'-O-methyladenosine-3'-phosphate
  modified_base 6: mod_base = OTHER; note = 2'-O-methyladenosine-3'-phosphate
  modified_base 7: mod_base = OTHER; note = 2'-deoxy-2'-fluoroadenosine-3'-phosphate
  modified_base 8: mod_base = OTHER; note = 2'-O-methyladenosine-3'-phosphate
  modified_base 9: mod_base = OTHER; note = 2'-deoxy-2'-fluorouridine-3'-phosphate
  modified_base 10: mod_base = OTHER; note = 2'-deoxy-2'-fluorouridine-3'-phosphate
  modified_base 11: mod_base = OTHER; note = 2'-deoxy-2'-fluorouridine-3'-phosphate
  modified_base 12: mod_base = OTHER; note = 2'-O-methylguanosine-3'-phosphate
  modified_base 13: mod_base = OTHER; note = 2'-O-methyladenosine-3'-phosphate
  modified_base 14: mod_base = OTHER; note = 2'-O-methyladenosine-3'-phosphate
  modified_base 15: mod_base = OTHER; note = 2'-O-methylcytidine-3'-phosphate
  modified_base 16: mod_base = OTHER; note = 2'-O-methyluridine-3'-phosphate
  modified_base 17: mod_base = OTHER; note = 2'-O-methylguanosine-3'-phosphate
  modified_base 18: mod_base = OTHER; note = 2'-O-methyladenosine-3'-phosphate
  modified_base 19: mod_base = OTHER; note = 2'-O-methyluridine-3'-phosphate
  modified_base 20: mod_base = OTHER; note = 2'-O-methyluridine-3'-phosphate
  modified_base 21: mod_base = OTHER; note = 2'-O-methyluridine-3'-phosphate ((2S,4R)-1-[29-[[2-(acetylamino)-2-deoxy-beta-D-galactopyra nosyl]oxy]-14,14-bis[[3-[[3-[[5-[[2-(acetylamino)-2-deoxy-b eta-D-galactopyranosyl]oxy]-1-oxopentyl]amino]propyl]amino] -3-oxopropoxy]methyl]-1,12,19,25-tetraoxo-16-oxa-13,20,24-t riazanonacos-1-yl]-4-hydroxy-2-pyrrolidinyl)methyl ester
gtggaaaatttgaactgattt

SEQ ID NO: 4197 - RNA, 21 nt, synthetic construct
  source 1..21: mol_type = other RNA
  modified_base 1: mod_base = OTHER; note = 2'-O-methylcytidine-3'-phosphorothioate
  modified_base 2: mod_base = OTHER; note = 2'-O-methyluridine-3'-phosphorothioate
  modified_base 3: mod_base = OTHER; note = 2'-O-methylguanosine-3'-phosphate
  modified_base 4: mod_base = OTHER; note = 2'-O-methyladenosine-3'-phosphate
  modified_base 5: mod_base = OTHER; note = 2'-O-methyluridine-3'-phosphate
  modified_base 6: mod_base = OTHER; note = 2'-O-methyluridine-3'-phosphate
  modified_base 7: mod_base = OTHER; note = 2'-deoxy-2'-fluoroadenosine-3'-phosphate
  modified_base 8: mod_base = OTHER; note = 2'-O-methylguanosine-3'-phosphate
  modified_base 9: mod_base = OTHER; note = 2'-deoxy-2'-fluorouridine-3'-phosphate
  modified_base 10: mod_base = OTHER; note = 2'-deoxy-2'-fluorocytidine-3'-phosphate
  modified_base 11: mod_base = OTHER; note = 2'-deoxy-2'-fluoroadenosine-3'-phosphate
  modified_base 12: mod_base = OTHER; note = 2'-O-methyluridine-3'-phosphate
  modified_base 13: mod_base = OTHER; note = 2'-O-methyladenosine-3'-phosphate
  modified_base 14: mod_base = OTHER; note = 2'-O-methyluridine-3'-phosphate
  modified_base 15: mod_base = OTHER; note = 2'-O-methyluridine-3'-phosphate
  modified_base 16: mod_base = OTHER; note = 2'-O-methylcytidine-3'-phosphate
  modified_base 17: mod_base = OTHER; note = 2'-O-methylcytidine-3'-phosphate
  modified_base 18: mod_base = OTHER; note = 2'-O-methyluridine-3'-phosphate
  modified_base 19: mod_base = OTHER; note = 2'-O-methyluridine-3'-phosphate
  modified_base 20: mod_base = OTHER; note = 2'-O-methyluridine-3'-phosphate
  modified_base 21: mod_base = OTHER; note = 2'-O-methyluridine-3'-phosphate ((2S,4R)-1-[29-[[2-(acetylamino)-2-deoxy-beta-D-galactopyra nosyl]oxy]-14,14-bis[[3-[[3-[[5-[[2-(acetylamino)-2-deoxy-b eta-D-galactopyranosyl]oxy]-1-oxopentyl]amino]propyl]amino] -3-oxopropoxy]methyl]-1,12,19,25-tetraoxo-16-oxa-13,20,24-t riazanonacos-1-yl]-4-hydroxy-2-pyrrolidinyl)methyl ester
ctgattagtcatattcctttt

SEQ ID NO: 4198 - RNA, 21 nt, synthetic construct
  source 1..21: mol_type = other RNA
  modified_base 1: mod_base = OTHER; note = 2'-O-methyluridine-3'-phosphorothioate
  modified_base 2: mod_base = OTHER; note = 2'-O-methyluridine-3'-phosphorothioate
  modified_base 3: mod_base = OTHER; note = 2'-O-methylguanosine-3'-phosphate
  modified_base 4: mod_base = OTHER; note = 2'-O-methyladenosine-3'-phosphate
  modified_base 5: mod_base = OTHER; note = 2'-O-methyluridine-3'-phosphate
  modified_base 6: mod_base = OTHER; note = 2'-O-methyluridine-3'-phosphate
  modified_base 7: mod_base = OTHER; note = 2'-deoxy-2'-fluoroadenosine-3'-phosphate
  modified_base 8: mod_base = OTHER; note = 2'-O-methylcytidine-3'-phosphate
  modified_base 9: mod_base = OTHER; note = 2'-deoxy-2'-fluoroadenosine-3'-phosphate
  modified_base 10: mod_base = OTHER; note = 2'-deoxy-2'-fluorocytidine-3'-phosphate
  modified_base 11: mod_base = OTHER; note = 2'-deoxy-2'-fluorouridine-3'-phosphate
  modified_base 12: mod_base = OTHER; note = 2'-O-methylguanosine-3'-phosphate
  modified_base 13: mod_base = OTHER; note = 2'-O-methyluridine-3'-phosphate
  modified_base 14: mod_base = OTHER; note = 2'-O-methyluridine-3'-phosphate
  modified_base 15: mod_base = OTHER; note = 2'-O-methyluridine-3'-phosphate
  modified_base 16: mod_base = OTHER; note = 2'-O-methylguanosine-3'-phosphate
  modified_base 17: mod_base = OTHER; note = 2'-O-methyluridine-3'-phosphate
  modified_base 18: mod_base = OTHER; note = 2'-O-methyluridine-3'-phosphate
  modified_base 19: mod_base = OTHER; note = 2'-O-methyladenosine-3'-phosphate
  modified_base 20: mod_base = OTHER; note = 2'-O-methylcytidine-3'-phosphate
  modified_base 21: mod_base = OTHER; note = 2'-O-methyluridine-3'-phosphate ((2S,4R)-1-[29-[[2-(acetylamino)-2-deoxy-beta-D-galactopyra nosyl]oxy]-14,14-bis[[3-[[3-[[5-[[2-(acetylamino)-2-deoxy-b eta-D-galactopyranosyl]oxy]-1-oxopentyl]amino]propyl]amino] -3-oxopropoxy]methyl]-1,12,19,25-tetraoxo-16-oxa-13,20,24-t riazanonacos-1-yl]-4-hydroxy-2-pyrrolidinyl)methyl ester
ttgattacactgtttgttact

SEQ ID NO: 4199 - RNA, 21 nt, synthetic construct
  source 1..21: mol_type = other RNA
  modified_base 1: mod_base = OTHER; note = 2'-O-methyluridine-3'-phosphorothioate
  modified_base 2: mod_base = OTHER; note = 2'-O-methylcytidine-3'-phosphorothioate
  modified_base 3: mod_base = OTHER; note = 2'-O-methyluridine-3'-phosphate
  modified_base 4: mod_base = OTHER; note = 2'-O-methylcytidine-3'-phosphate
  modified_base 5: mod_base = OTHER; note = 2'-O-methyladenosine-3'-phosphate
  modified_base 6: mod_base = OTHER; note = 2'-O-methylguanosine-3'-phosphate
  modified_base 7: mod_base = OTHER; note = 2'-deoxy-2'-fluorouridine-3'-phosphate
  modified_base 8: mod_base = OTHER; note = 2'-O-methyladenosine-3'-phosphate
  modified_base 9: mod_base = OTHER; note = 2'-deoxy-2'-fluoroadenosine-3'-phosphate
  modified_base 10: mod_base = OTHER; note = 2'-deoxy-2'-fluoroadenosine-3'-phosphate
  modified_base 11: mod_base = OTHER; note = 2'-deoxy-2'-fluorocytidine-3'-phosphate
  modified_base 12: mod_base = OTHER; note = 2'-O-methyladenosine-3'-phosphate
  modified_base 13: mod_base = OTHER; note = 2'-O-methylguanosine-3'-phosphate
  modified_base 14: mod_base = OTHER; note = 2'-O-methyladenosine-3'-phosphate
  modified_base 15: mod_base = OTHER; note = 2'-O-methyladenosine-3'-phosphate
  modified_base 16: mod_base = OTHER; note = 2'-O-methyladenosine-3'-phosphate
  modified_base 17: mod_base = OTHER; note = 2'-O-methyluridine-3'-phosphate
  modified_base 18: mod_base = OTHER; note = 2'-O-methyladenosine-3'-phosphate
  modified_base 19: mod_base = OTHER; note = 2'-O-methyladenosine-3'-phosphate
  modified_base 20: mod_base = OTHER; note = 2'-O-methylcytidine-3'-phosphate
  modified_base 21: mod_base = OTHER; note = 2'-O-methyluridine-3'-phosphate ((2S,4R)-1-[29-[[2-(acetylamino)-2-deoxy-beta-D-galactopyra nosyl]oxy]-14,14-bis[[3-[[3-[[5-[[2-(acetylamino)-2-deoxy-b eta-D-galactopyranosyl]oxy]-1-oxopentyl]amino]propyl]amino] -3-oxopropoxy]methyl]-1,12,19,25-tetraoxo-16-oxa-13,20,24-t riazanonacos-1-yl]-4-hydroxy-2-pyrrolidinyl)methyl ester
tctcagtaaacagaaataact

SEQ ID NO: 4200 - RNA, 21 nt, synthetic construct
  source 1..21: mol_type = other RNA
  modified_base 1: mod_base = OTHER; note = 2'-O-methyluridine-3'-phosphorothioate
  modified_base 2: mod_base = OTHER; note = 2'-O-methylcytidine-3'-phosphorothioate
  modified_base 3: mod_base = OTHER; note = 2'-O-methyluridine-3'-phosphate
  modified_base 4: mod_base = OTHER; note = 2'-O-methyluridine-3'-phosphate
  modified_base 5: mod_base = OTHER; note = 2'-O-methylcytidine-3'-phosphate
  modified_base 6: mod_base = OTHER; note = 2'-O-methyladenosine-3'-phosphate
  modified_base 7: mod_base = OTHER; note = 2'-deoxy-2'-fluorouridine-3'-phosphate
  modified_base 8: mod_base = OTHER; note = 2'-O-methyluridine-3'-phosphate
  modified_base 9: mod_base = OTHER; note = 2'-deoxy-2'-fluorocytidine-3'-phosphate
  modified_base 10: mod_base = OTHER; note = 2'-deoxy-2'-fluorouridine-3'-phosphate
  modified_base 11: mod_base = OTHER; note = 2'-deoxy-2'-fluorouridine-3'-phosphate
  modified_base 12: mod_base = OTHER; note = 2'-O-methyluridine-3'-phosphate
  modified_base 13: mod_base = OTHER; note = 2'-O-methylguanosine-3'-phosphate
  modified_base 14: mod_base = OTHER; note = 2'-O-methyladenosine-3'-phosphate
  modified_base 15: mod_base = OTHER; note = 2'-O-methyluridine-3'-phosphate
  modified_base 16: mod_base = OTHER; note = 2'-O-methyladenosine-3'-phosphate
  modified_base 17: mod_base = OTHER; note = 2'-O-methylguanosine-3'-phosphate
  modified_base 18: mod_base = OTHER; note = 2'-O-methyladenosine-3'-phosphate
  modified_base 19: mod_base = OTHER; note = 2'-O-methyladenosine-3'-phosphate
  modified_base 20: mod_base = OTHER; note = 2'-O-methyladenosine-3'-phosphate
  modified_base 21: mod_base = OTHER; note = 2'-O-methyluridine-3'-phosphate ((2S,4R)-1-[29-[[2-(acetylamino)-2-deoxy-beta-D-galactopyra nosyl]oxy]-14,14-bis[[3-[[3-[[5-[[2-(acetylamino)-2-deoxy-b eta-D-galactopyranosyl]oxy]-1-oxopentyl]amino]propyl]amino] -3-oxopropoxy]methyl]-1,12,19,25-tetraoxo-16-oxa-13,20,24-t riazanonacos-1-yl]-4-hydroxy-2-pyrrolidinyl)methyl ester
tcttcattctttgatagaaat

SEQ ID NO: 4201 - RNA, 21 nt, synthetic construct
  source 1..21: mol_type = other RNA
  modified_base 1: mod_base = OTHER; note = 2'-O-methyladenosine-3'-phosphorothioate
  modified_base 2: mod_base = OTHER; note = 2'-O-methyladenosine-3'-phosphorothioate
  modified_base 3: mod_base = OTHER; note = 2'-O-methyladenosine-3'-phosphate
  modified_base 4: mod_base = OTHER; note = 2'-O-methyluridine-3'-phosphate
  modified_base 5: mod_base = OTHER; note = 2'-O-methylcytidine-3'-phosphate
  modified_base 6: mod_base = OTHER; note = 2'-O-methyluridine-3'-phosphate
  modified_base 7: mod_base = OTHER; note = 2'-deoxy-2'-fluorouridine-3'-phosphate
  modified_base 8: mod_base = OTHER; note = 2'-O-methyladenosine-3'-phosphate
  modified_base 9: mod_base = OTHER; note = 2'-deoxy-2'-fluorouridine-3'-phosphate
  modified_base 10: mod_base = OTHER; note = 2'-deoxy-2'-fluorouridine-3'-phosphate
  modified_base 11: mod_base = OTHER; note = 2'-deoxy-2'-fluorocytidine-3'-phosphate
  modified_base 12: mod_base = OTHER; note = 2'-O-methyluridine-3'-phosphate
  modified_base 13: mod_base = OTHER; note = 2'-O-methylguanosine-3'-phosphate
  modified_base 14: mod_base = OTHER; note = 2'-O-methyluridine-3'-phosphate
  modified_base 15: mod_base = OTHER; note = 2'-O-methylguanosine-3'-phosphate
  modified_base 16: mod_base = OTHER; note = 2'-O-methyladenosine-3'-phosphate
  modified_base 17: mod_base = OTHER; note = 2'-O-methylguanosine-3'-phosphate
  modified_base 18: mod_base = OTHER; note = 2'-O-methylguanosine-3'-phosphate
  modified_base 19: mod_base = OTHER; note = 2'-O-methyladenosine-3'-phosphate
  modified_base 20: mod_base = OTHER; note = 2'-O-methyluridine-3'-phosphate
  modified_base 21: mod_base = OTHER; note = 2'-O-methyluridine-3'-phosphate ((2S,4R)-1-[29-[[2-(acetylamino)-2-deoxy-beta-D-galactopyra nosyl]oxy]-14,14-bis[[3-[[3-[[5-[[2-(acetylamino)-2-deoxy-b eta-D-galactopyranosyl]oxy]-1-oxopentyl]amino]propyl]amino] -3-oxopropoxy]methyl]-1,12,19,25-tetraoxo-16-oxa-13,20,24-t riazanonacos-1-yl]-4-hydroxy-2-pyrrolidinyl)methyl ester
aaatcttattctgtgaggatt

SEQ ID NO: 4202 - RNA, 21 nt, synthetic construct
  source 1..21: mol_type = other RNA
  modified_base 1: mod_base = OTHER; note = 2'-O-methyluridine-3'-phosphorothioate
  modified_base 2: mod_base = OTHER; note = 2'-O-methylguanosine-3'-phosphorothioate
  modified_base 3: mod_base = OTHER; note = 2'-O-methyladenosine-3'-phosphate
  modified_base 4: mod_base = OTHER; note = 2'-O-methylguanosine-3'-phosphate
  modified_base 5: mod_base = OTHER; note = 2'-O-methylguanosine-3'-phosphate
  modified_base 6: mod_base = OTHER; note = 2'-O-methyladenosine-3'-phosphate
  modified_base 7: mod_base = OTHER; note = 2'-deoxy-2'-fluorouridine-3'-phosphate
  modified_base 8: mod_base = OTHER; note = 2'-O-methyluridine-3'-phosphate
  modified_base 9: mod_base = OTHER; note = 2'-deoxy-2'-fluoroadenosine-3'-phosphate
  modified_base 10: mod_base = OTHER; note = 2'-deoxy-2'-fluorocytidine-3'-phosphate
  modified_base 11: mod_base = OTHER; note = 2'-deoxy-2'-fluoroadenosine-3'-phosphate
  modified_base 12: mod_base = OTHER; note = 2'-O-methylguanosine-3'-phosphate
  modified_base 13: mod_base = OTHER; note = 2'-O-methyladenosine-3'-phosphate
  modified_base 14: mod_base = OTHER; note = 2'-O-methyladenosine-3'-phosphate
  modified_base 15: mod_base = OTHER; note = 2'-O-methyluridine-3'-phosphate
  modified_base 16: mod_base = OTHER; note = 2'-O-methyladenosine-3'-phosphate
  modified_base 17: mod_base = OTHER; note = 2'-O-methylcytidine-3'-phosphate
  modified_base 18: mod_base = OTHER; note = 2'-O-methyluridine-3'-phosphate
  modified_base 19: mod_base = OTHER; note = 2'-O-methyladenosine-3'-phosphate
  modified_base 20: mod_base = OTHER; note = 2'-O-methyluridine-3'-phosphate
  modified_base 21: mod_base = OTHER; note = 2'-O-methyluridine-3'-phosphate ((2S,4R)-1-[29-[[2-(acetylamino)-2-deoxy-beta-D-galactopyra nosyl]oxy]-14,14-bis[[3-[[3-[[5-[[2-(acetylamino)-2-deoxy-b eta-D-galactopyranosyl]oxy]-1-oxopentyl]amino]propyl]amino] -3-oxopropoxy]methyl]-1,12,19,25-tetraoxo-16-oxa-13,20,24-t riazanonacos-1-yl]-4-hydroxy-2-pyrrolidinyl)methyl ester
tgaggattacagaatactatt

SEQ ID NO: 4203 - RNA, 21 nt, synthetic construct
  source 1..21: mol_type = other RNA
  modified_base 1: mod_base = OTHER; note = 2'-O-methylcytidine-3'-phosphorothioate
  modified_base 2: mod_base = OTHER; note = 2'-O-methyluridine-3'-phosphorothioate
  modified_base 3: mod_base = OTHER; note = 2'-O-methyluridine-3'-phosphate
  modified_base 4: mod_base = OTHER; note = 2'-O-methylcytidine-3'-phosphate
  modified_base 5: mod_base = OTHER; note = 2'-O-methyladenosine-3'-phosphate
  modified_base 6: mod_base = OTHER; note = 2'-O-methyluridine-3'-phosphate
  modified_base 7: mod_base = OTHER; note = 2'-deoxy-2'-fluorocytidine-3'-phosphate
  modified_base 8: mod_base = OTHER; note = 2'-O-methyladenosine-3'-phosphate
  modified_base 9: mod_base = OTHER; note = 2'-deoxy-2'-fluorouridine-3'-phosphate
  modified_base 10: mod_base = OTHER; note = 2'-deoxy-2'-fluoroadenosine-3'-phosphate
  modified_base 11: mod_base = OTHER; note = 2'-deoxy-2'-fluoroadenosine-3'-phosphate
  modified_base 12: mod_base = OTHER; note = 2'-O-methyladenosine-3'-phosphate
  modified_base 13: mod_base = OTHER; note = 2'-O-methylguanosine-3'-phosphate
  modified_base 14: mod_base = OTHER; note = 2'-O-methyluridine-3'-phosphate
  modified_base 15: mod_base = OTHER; note = 2'-O-methylguanosine-3'-phosphate
  modified_base 16: mod_base = OTHER; note = 2'-O-methyluridine-3'-phosphate
  modified_base 17: mod_base = OTHER; note = 2'-O-methyladenosine-3'-phosphate
  modified_base 18: mod_base = OTHER; note = 2'-O-methyladenosine-3'-phosphate
  modified_base 19: mod_base = OTHER; note = 2'-O-methyladenosine-3'-phosphate
  modified_base 20: mod_base = OTHER; note = 2'-O-methylguanosine-3'-phosphate
  modified_base 21: mod_base = OTHER; note = 2'-O-methyluridine-3'-phosphate ((2S,4R)-1-[29-[[2-(acetylamino)-2-deoxy-beta-D-galactopyra nosyl]oxy]-14,14-bis[[3-[[3-[[5-[[2-(acetylamino)-2-deoxy-b eta-D-galactopyranosyl]oxy]-1-oxopentyl]amino]propyl]amino] -3-oxopropoxy]methyl]-1,12,19,25-tetraoxo-16-oxa-13,20,24-t riazanonacos-1-yl]-4-hydroxy-2-pyrrolidinyl)methyl ester
cttcatcataaagtgtaaagt

SEQ ID NO: 4204 - RNA, 21 nt, synthetic construct
  source 1..21: mol_type = other RNA
  modified_base 1: mod_base = OTHER; note = 2'-O-methyladenosine-3'-phosphorothioate
  modified_base 2: mod_base = OTHER; note = 2'-O-methyluridine-3'-phosphorothioate
  modified_base 3: mod_base = OTHER; note = 2'-O-methylguanosine-3'-phosphate
  modified_base 4: mod_base = OTHER; note = 2'-O-methylcytidine-3'-phosphate
  modified_base 5: mod_base = OTHER; note = 2'-O-methyluridine-3'-phosphate
  modified_base 6: mod_base = OTHER; note = 2'-O-methylcytidine-3'-phosphate
  modified_base 7: mod_base = OTHER; note = 2'-deoxy-2'-fluoroadenosine-3'-phosphate
  modified_base 8: mod_base = OTHER; note = 2'-O-methyladenosine-3'-phosphate
  modified_base 9: mod_base = OTHER; note = 2'-deoxy-2'-fluoroadenosine-3'-phosphate
  modified_base 10: mod_base = OTHER; note = 2'-deoxy-2'-fluorouridine-3'-phosphate
  modified_base 11: mod_base = OTHER; note = 2'-deoxy-2'-fluoroadenosine-3'-phosphate
  modified_base 12: mod_base = OTHER; note = 2'-O-methyluridine-3'-phosphate
  modified_base 13: mod_base = OTHER; note = 2'-O-methylguanosine-3'-phosphate
  modified_base 14: mod_base = OTHER; note = 2'-O-methyluridine-3'-phosphate
  modified_base 15: mod_base = OTHER; note = 2'-O-methyluridine-3'-phosphate
  modified_base 16: mod_base = OTHER; note = 2'-O-methylcytidine-3'-phosphate
  modified_base 17: mod_base = OTHER; note = 2'-O-methyluridine-3'-phosphate
  modified_base 18: mod_base = OTHER; note = 2'-O-methyladenosine-3'-phosphate
  modified_base 19: mod_base = OTHER; note = 2'-O-methylcytidine-3'-phosphate
  modified_base 20: mod_base = OTHER; note = 2'-O-methyluridine-3'-phosphate
  modified_base 21: mod_base = OTHER; note = 2'-O-methyluridine-3'-phosphate ((2S,4R)-1-[29-[[2-(acetylamino)-2-deoxy-beta-D-galactopyra nosyl]oxy]-14,14-bis[[3-[[3-[[5-[[2-(acetylamino)-2-deoxy-b eta-D-galactopyranosyl]oxy]-1-oxopentyl]amino]propyl]amino] -3-oxopropoxy]methyl]-1,12,19,25-tetraoxo-16-oxa-13,20,24-t riazanonacos-1-yl]-4-hydroxy-2-pyrrolidinyl)methyl ester
atgctcaaatatgttctactt

SEQ ID NO: 4205 - RNA, 21 nt, synthetic construct
  source 1..21: mol_type = other RNA
  modified_base 1: mod_base = OTHER; note = 2'-O-methyluridine-3'-phosphorothioate
  modified_base 2: mod_base = OTHER; note = 2'-O-methylcytidine-3'-phosphorothioate
  modified_base 3: mod_base = OTHER; note = 2'-O-methyluridine-3'-phosphate
  modified_base 4: mod_base = OTHER; note = 2'-O-methyladenosine-3'-phosphate
  modified_base 5: mod_base = OTHER; note = 2'-O-methylcytidine-3'-phosphate
  modified_base 6: mod_base = OTHER; note = 2'-O-methyluridine-3'-phosphate
  modified_base 7: mod_base = OTHER; note = 2'-deoxy-2'-fluoroadenosine-3'-phosphate
  modified_base 8: mod_base = OTHER; note = 2'-O-methyluridine-3'-phosphate
  modified_base 9: mod_base = OTHER; note = 2'-deoxy-2'-fluoroadenosine-3'-phosphate
  modified_base 10: mod_base = OTHER; note = 2'-deoxy-2'-fluoroguanosine-3'-phosphate
  modified_base 11: mod_base = OTHER; note = 2'-deoxy-2'-fluoroadenosine-3'-phosphate
  modified_base 12: mod_base = OTHER; note = 2'-O-methyladenosine-3'-phosphate
  modified_base 13: mod_base = OTHER; note = 2'-O-methyluridine-3'-phosphate
  modified_base 14: mod_base = OTHER; note = 2'-O-methyladenosine-3'-phosphate
  modified_base 15: mod_base = OTHER; note = 2'-O-methyladenosine-3'-phosphate
  modified_base 16: mod_base = OTHER; note = 2'-O-methylguanosine-3'-phosphate
  modified_base 17: mod_base = OTHER; note = 2'-O-methyluridine-3'-phosphate
  modified_base 18: mod_base = OTHER; note = 2'-O-methyluridine-3'-phosphate
  modified_base 19: mod_base = OTHER; note = 2'-O-methylcytidine-3'-phosphate
  modified_base 20: mod_base = OTHER; note = 2'-O-methyluridine-3'-phosphate
  modified_base 21: mod_base = OTHER; note = 2'-O-methyluridine-3'-phosphate ((2S,4R)-1-[29-[[2-(acetylamino)-2-deoxy-beta-D-galactopyra nosyl]oxy]-14,14-bis[[3-[[3-[[5-[[2-(acetylamino)-2-deoxy-b eta-D-galactopyranosyl]oxy]-1-oxopentyl]amino]propyl]amino] -3-oxopropoxy]methyl]-1,12,19,25-tetraoxo-16-oxa-13,20,24-t riazanonacos-1-yl]-4-hydroxy-2-pyrrolidinyl)methyl ester
tctactatagaataagttctt

SEQ ID NO: 4206 - RNA, 21 nt, synthetic construct
  source 1..21: mol_type = other RNA
  modified_base 1: mod_base = OTHER; note = 2'-O-methyluridine-3'-phosphorothioate
  modified_base 2: mod_base = OTHER; note = 2'-O-methyluridine-3'-phosphorothioate
  modified_base 3: mod_base = OTHER; note = 2'-O-methylcytidine-3'-phosphate
  modified_base 4: mod_base = OTHER; note = 2'-O-methyluridine-3'-phosphate
  modified_base 5: mod_base = OTHER; note = 2'-O-methyluridine-3'-phosphate
  modified_base 6: mod_base = OTHER; note = 2'-O-methyladenosine-3'-phosphate
  modified_base 7: mod_base = OTHER; note = 2'-deoxy-2'-fluorouridine-3'-phosphate
  modified_base 8: mod_base = OTHER; note = 2'-O-methylcytidine-3'-phosphate
  modified_base 9: mod_base = OTHER; note = 2'-deoxy-2'-fluorouridine-3'-phosphate
  modified_base 10: mod_base = OTHER; note = 2'-deoxy-2'-fluorouridine-3'-phosphate
  modified_base 11: mod_base = OTHER; note = 2'-deoxy-2'-fluoroadenosine-3'-phosphate
  modified_base 12: mod_base = OTHER; note = 2'-O-methyladenosine-3'-phosphate
  modified_base 13: mod_base = OTHER; note = 2'-O-methyluridine-3'-phosphate
  modified_base 14: mod_base = OTHER; note = 2'-O-methyluridine-3'-phosphate
  modified_base 15: mod_base = OTHER; note = 2'-O-methyluridine-3'-phosphate
  modified_base 16: mod_base = OTHER; note = 2'-O-methyladenosine-3'-phosphate
  modified_base 17: mod_base = OTHER; note = 2'-O-methylcytidine-3'-phosphate
  modified_base 18: mod_base = OTHER; note = 2'-O-methyladenosine-3'-phosphate
  modified_base 19: mod_base = OTHER; note = 2'-O-methylguanosine-3'-phosphate
  modified_base 20: mod_base = OTHER; note = 2'-O-methylguanosine-3'-phosphate
  modified_base 21: mod_base = OTHER; note = 2'-O-methyluridine-3'-phosphate ((2S,4R)-1-[29-[[2-(acetylamino)-2-deoxy-beta-D-galactopyra nosyl]oxy]-14,14-bis[[3-[[3-[[5-[[2-(acetylamino)-2-deoxy-b eta-D-galactopyranosyl]oxy]-1-oxopentyl]amino]propyl]amino] -3-oxopropoxy]methyl]-1,12,19,25-tetraoxo-16-oxa-13,20,24-t riazanonacos-1-yl]-4-hydroxy-2-pyrrolidinyl)methyl ester
ttcttatcttaatttacaggt

SEQ ID NO: 4207 - RNA, 21 nt, synthetic construct
  source 1..21: mol_type = other RNA
  modified_base 1: mod_base = OTHER; note = 2'-O-methyluridine-3'-phosphorothioate
  modified_base 2: mod_base = OTHER; note = 2'-O-methyluridine-3'-phosphorothioate
  modified_base 3: mod_base = OTHER; note = 2'-O-methyladenosine-3'-phosphate
  modified_base 4: mod_base = OTHER; note = 2'-O-methyladenosine-3'-phosphate
  modified_base 5: mod_base = OTHER; note = 2'-O-methyluridine-3'-phosphate
  modified_base 6: mod_base = OTHER; note = 2'-O-methylguanosine-3'-phosphate
  modified_base 7: mod_base = OTHER; note = 2'-deoxy-2'-fluorouridine-3'-phosphate
  modified_base 8: mod_base = OTHER; note = 2'-O-methyluridine-3'-phosphate
  modified_base 9: mod_base = OTHER; note = 2'-deoxy-2'-fluoroguanosine-3'-phosphate
  modified_base 10: mod_base = OTHER; note = 2'-deoxy-2'-fluorocytidine-3'-phosphate
  modified_base 11: mod_base = OTHER; note = 2'-deoxy-2'-fluorocytidine-3'-phosphate
  modified_base 12: mod_base = OTHER; note = 2'-O-methyluridine-3'-phosphate
  modified_base 13: mod_base = OTHER; note = 2'-O-methyluridine-3'-phosphate
  modified_base 14: mod_base = OTHER; note = 2'-O-methyluridine-3'-phosphate
  modified_base 15: mod_base = OTHER; note = 2'-O-methyluridine-3'-phosphate
  modified_base 16: mod_base = OTHER; note = 2'-O-methyladenosine-3'-phosphate
  modified_base 17: mod_base = OTHER; note = 2'-O-methyluridine-3'-phosphate
  modified_base 18: mod_base = OTHER; note = 2'-O-methyladenosine-3'-phosphate
  modified_base 19: mod_base = OTHER; note = 2'-O-methyluridine-3'-phosphate
  modified_base 20: mod_base = OTHER; note = 2'-O-methyluridine-3'-phosphate
  modified_base 21: mod_base = OTHER; note = 2'-O-methyluridine-3'-phosphate ((2S,4R)-1-[29-[[2-(acetylamino)-2-deoxy-beta-D-galactopyra nosyl]oxy]-14,14-bis[[3-[[3-[[5-[[2-(acetylamino)-2-deoxy-b eta-D-galactopyranosyl]oxy]-1-oxopentyl]amino]propyl]amino] -3-oxopropoxy]methyl]-1,12,19,25-tetraoxo-16-oxa-13,20,24-t riazanonacos-1-yl]-4-hydroxy-2-pyrrolidinyl)methyl ester
ttaatgttgccttttatattt

SEQ ID NO: 4208 - RNA, 21 nt, synthetic construct
  source 1..21: mol_type = other RNA
  modified_base 1: mod_base = OTHER; note = 2'-O-methyladenosine-3'-phosphorothioate
  modified_base 2: mod_base = OTHER; note = 2'-O-methyladenosine-3'-phosphorothioate
  modified_base 3: mod_base = OTHER; note = 2'-O-methyladenosine-3'-phosphate
  modified_base 4: mod_base = OTHER; note = 2'-O-methyluridine-3'-phosphate
  modified_base 5: mod_base = OTHER; note = 2'-O-methylcytidine-3'-phosphate
  modified_base 6: mod_base = OTHER; note = 2'-O-methyladenosine-3'-phosphate
  modified_base 7: mod_base = OTHER; note = 2'-deoxy-2'-fluoroguanosine-3'-phosphate
  modified_base 8: mod_base = OTHER; note = 2'-O-methyladenosine-3'-phosphate
  modified_base 9: mod_base = OTHER; note = 2'-deoxy-2'-fluoroadenosine-3'-phosphate
  modified_base 10: mod_base = OTHER; note = 2'-deoxy-2'-fluorouridine-3'-phosphate
  modified_base 11: mod_base = OTHER; note = 2'-deoxy-2'-fluorocytidine-3'-phosphate
  modified_base 12: mod_base = OTHER; note = 2'-O-methyladenosine-3'-phosphate
  modified_base 13: mod_base = OTHER; note = 2'-O-methylcytidine-3'-phosphate
  modified_base 14: mod_base = OTHER; note = 2'-O-methyluridine-3'-phosphate
  modified_base 15: mod_base = OTHER; note = 2'-O-methyladenosine-3'-phosphate
  modified_base 16: mod_base = OTHER; note = 2'-O-methyluridine-3'-phosphate
  modified_base 17: mod_base = OTHER; note = 2'-O-methyladenosine-3'-phosphate
  modified_base 18: mod_base = OTHER; note = 2'-O-methyluridine-3'-phosphate
  modified_base 19: mod_base = OTHER; note = 2'-O-methyluridine-3'-phosphate
  modified_base 20: mod_base = OTHER; note = 2'-O-methyladenosine-3'-phosphate
  modified_base 21: mod_base = OTHER; note = 2'-O-methyluridine-3'-phosphate ((2S,4R)-1-[29-[[2-(acetylamino)-2-deoxy-beta-D-galactopyra nosyl]oxy]-14,14-bis[[3-[[3-[[5-[[2-(acetylamino)-2-deoxy-b eta-D-galactopyranosyl]oxy]-1-oxopentyl]amino]propyl]amino] -3-oxopropoxy]methyl]-1,12,19,25-tetraoxo-16-oxa-13,20,24-t riazanonacos-1-yl]-4-hydroxy-2-pyrrolidinyl)methyl ester
aaatcagaatcactatattat

SEQ ID NO: 4209 - RNA, 23 nt, synthetic construct
  source 1..23: mol_type = other RNA
  modified_base 1: mod_base = OTHER; note = 2'-O-methyladenosine-3'-phosphorothioate
  modified_base 2: mod_base = OTHER; note = 2'-deoxy-2'-fluoroadenosine-3'-phosphorothioate
  modified_base 3: mod_base = OTHER; note = 2'-O-methylguanosine-3'-phosphate
  modified_base 4: mod_base = OTHER; note = 2'-O-methyluridine-3'-phosphate
  modified_base 5: mod_base = OTHER; note = 2'-O-methyluridine-3'-phosphate
  modified_base 6: mod_base = OTHER; note = 2'-deoxy-2'-fluorouridine-3'-phosphate
  modified_base 7: mod_base = OTHER; note = 2'-O-methyluridine-3'-phosphate
  modified_base 8: mod_base = OTHER; note = 2'-deoxy-2'-fluorocytidine-3'-phosphate
  modified_base 9: mod_base = OTHER; note = 2'-deoxy-2'-fluorouridine-3'-phosphate
  modified_base 10: mod_base = OTHER; note = 2'-O-methylguanosine-3'-phosphate
  modified_base 11: mod_base = OTHER; note = 2'-O-methyladenosine-3'-phosphate
  modified_base 12: mod_base = OTHER; note = 2'-O-methylcytidine-3'-phosphate
  modified_base 13: mod_base = OTHER; note = 2'-O-methyluridine-3'-phosphate
  modified_base 14: mod_base = OTHER; note = 2'-deoxy-2'-fluorocytidine-3'-phosphate
  modified_base 15: mod_base = OTHER; note = 2'-O-methyluridine-3'-phosphate
  modified_base 16: mod_base = OTHER; note = 2'-deoxy-2'-fluoroguanosine-3'-phosphate
  modified_base 17: mod_base = OTHER; note = 2'-O-methyluridine-3'-phosphate
  modified_base 18: mod_base = OTHER; note = 2'-O-methylcytidine-3'-phosphate
  modified_base 19: mod_base = OTHER; note = 2'-O-methyladenosine-3'-phosphate
  modified_base 20: mod_base = OTHER; note = 2'-O-methylcytidine-3'-phosphate
  modified_base 21: mod_base = OTHER; note = 2'-O-methylcytidine-3'-phosphorothioate
  modified_base 22: mod_base = OTHER; note = 2'-O-methylcytidine-3'-phosphorothioate
  modified_base 23: mod_base = OTHER; note = 2'-O-methyladenosine
aagttttctgactctgtcaccca

SEQ ID NO: 4210 - RNA, 23 nt, synthetic construct
  source 1..23: mol_type = other RNA
  modified_base 1: mod_base = OTHER; note = 2'-O-methyladenosine-3'-phosphorothioate
  modified_base 2: mod_base = OTHER; note = 2'-deoxy-2'-fluoroadenosine-3'-phosphorothioate
  modified_base 3: mod_base = OTHER; note = 2'-O-methyluridine-3'-phosphate
  modified_base 4: mod_base = OTHER; note = 2'-O-methylguanosine-3'-phosphate
  modified_base 5: mod_base = OTHER; note = 2'-O-methyladenosine-3'-phosphate
  modified_base 6: mod_base = OTHER; note = 2'-deoxy-2'-fluoroadenosine-3'-phosphate
  modified_base 7: mod_base = OTHER; note = 2'-O-methylguanosine-3'-phosphate
  modified_base 8: mod_base = OTHER; note = 2'-deoxy-2'-fluorouridine-3'-phosphate
  modified_base 9: mod_base = OTHER; note = 2'-deoxy-2'-fluorocytidine-3'-phosphate
  modified_base 10: mod_base = OTHER; note = 2'-O-methyluridine-3'-phosphate
  modified_base 11: mod_base = OTHER; note = 2'-O-methyluridine-3'-phosphate
  modified_base 12: mod_base = OTHER; note = 2'-O-methyladenosine-3'-phosphate
  modified_base 13: mod_base = OTHER; note = 2'-O-methylcytidine-3'-phosphate
  modified_base 14: mod_base = OTHER; note = 2'-deoxy-2'-fluoroguanosine-3'-phosphate
  modified_base 15: mod_base = OTHER; note = 2'-O-methylguanosine-3'-phosphate
  modified_base 16: mod_base = OTHER; note = 2'-deoxy-2'-fluoroguanosine-3'-phosphate
  modified_base 17: mod_base = OTHER; note = 2'-O-methyluridine-3'-phosphate
  modified_base 18: mod_base = OTHER; note = 2'-O-methylguanosine-3'-phosphate
  modified_base 19: mod_base = OTHER; note = 2'-O-methyluridine-3'-phosphate
  modified_base 20: mod_base = OTHER; note = 2'-O-methyluridine-3'-phosphate
  modified_base 21: mod_base = OTHER; note = 2'-O-methyluridine-3'-phosphorothioate
  modified_base 22: mod_base = OTHER; note = 2'-O-methyladenosine-3'-phosphorothioate
  modified_base 23: mod_base = OTHER; note = 2'-O-methylguanosine
aatgaagtcttacgggtgtttag

SEQ ID NO: 4211 - RNA, 23 nt, synthetic construct
  source 1..23: mol_type = other RNA
  modified_base 1: mod_base = OTHER; note = 2'-O-methyladenosine-3'-phosphorothioate
  modified_base 2: mod_base = OTHER; note = 2'-deoxy-2'-fluoroadenosine-3'-phosphorothioate
  modified_base 3: mod_base = OTHER; note = 2'-O-methylguanosine-3'-phosphate
  modified_base 4: mod_base = OTHER; note = 2'-O-methyladenosine-3'-phosphate
  modified_base 5: mod_base = OTHER; note = 2'-O-methylguanosine-3'-phosphate
  modified_base 6: mod_base = OTHER; note = 2'-deoxy-2'-fluorouridine-3'-phosphate
  modified_base 7: mod_base = OTHER; note = 2'-O-methyladenosine-3'-phosphate
  modified_base 8: mod_base = OTHER; note = 2'-deoxy-2'-fluorouridine-3'-phosphate
  modified_base 9: mod_base = OTHER; note = 2'-deoxy-2'-fluorouridine-3'-phosphate
  modified_base 10: mod_base = OTHER; note = 2'-O-methylguanosine-3'-phosphate
  modified_base 11: mod_base = OTHER; note = 2'-O-methyluridine-3'-phosphate
  modified_base 12: mod_base = OTHER; note = 2'-O-methylguanosine-3'-phosphate
  modified_base 13: mod_base = OTHER; note = 2'-O-methyluridine-3'-phosphate
  modified_base 14: mod_base = OTHER; note = 2'-deoxy-2'-fluorouridine-3'-phosphate
  modified_base 15: mod_base = OTHER; note = 2'-O-methylguanosine-3'-phosphate
  modified_base 16: mod_base = OTHER; note = 2'-deoxy-2'-fluorouridine-3'-phosphate
  modified_base 17: mod_base = OTHER; note = 2'-O-methyladenosine-3'-phosphate
  modified_base 18: mod_base = OTHER; note = 2'-O-methyluridine-3'-phosphate
  modified_base 19: mod_base = OTHER; note = 2'-O-methylguanosine-3'-phosphate
  modified_base 20: mod_base = OTHER; note = 2'-O-methyladenosine-3'-phosphate
  modified_base 21: mod_base = OTHER; note = 2'-O-methyladenosine-3'-phosphorothioate
  modified_base 22: mod_base = OTHER; note = 2'-O-methylguanosine-3'-phosphorothioate
  modified_base 23: mod_base = OTHER; note = 2'-O-methyluridine
aagagtattgtgttgtatgaagt

SEQ ID NO: 4212 - RNA, 23 nt, synthetic construct
  source 1..23: mol_type = other RNA
  modified_base 1: mod_base = OTHER; note = 2'-O-methyladenosine-3'-phosphorothioate
  modified_base 2: mod_base = OTHER; note = 2'-deoxy-2'-fluorocytidine-3'-phosphorothioate
  modified_base 3: mod_base = OTHER; note = 2'-O-methyluridine-3'-phosphate
  modified_base 4: mod_base = OTHER; note = 2'-O-methylguanosine-3'-phosphate
  modified_base 5: mod_base = OTHER; note = 2'-O-methyluridine-3'-phosphate
  modified_base 6: mod_base = OTHER; note = 2'-deoxy-2'-fluoroguanosine-3'-phosphate
  modified_base 7: mod_base = OTHER; note = 2'-O-methyladenosine-3'-phosphate
  modified_base 8: mod_base = OTHER; note = 2'-deoxy-2'-fluorouridine-3'-phosphate
  modified_base 9: mod_base = OTHER; note = 2'-deoxy-2'-fluorocytidine-3'-phosphate
  modified_base 10: mod_base = OTHER; note = 2'-O-methyladenosine-3'-phosphate
  modified_base 11: mod_base = OTHER; note = 2'-O-methyluridine-3'-phosphate
  modified_base 12: mod_base = OTHER; note = 2'-O-methylcytidine-3'-phosphate
  modified_base 13: mod_base = OTHER; note = 2'-O-methyladenosine-3'-phosphate
  modified_base 14: mod_base = OTHER; note = 2'-deoxy-2'-fluorocytidine-3'-phosphate
  modified_base 15: mod_base = OTHER; note = 2'-O-methyladenosine-3'-phosphate
  modified_base 16: mod_base = OTHER; note = 2'-deoxy-2'-fluoroguanosine-3'-phosphate
  modified_base 17: mod_base = OTHER; note = 2'-O-methyluridine-3'-phosphate
  modified_base 18: mod_base = OTHER; note = 2'-O-methyladenosine-3'-phosphate
  modified_base 19: mod_base = OTHER; note = 2'-O-methyluridine-3'-phosphate
  modified_base 20: mod_base = OTHER; note = 2'-O-methyladenosine-3'-phosphate
  modified_base 21: mod_base = OTHER; note = 2'-O-methylguanosine-3'-phosphorothioate
  modified_base 22: mod_base = OTHER; note = 2'-O-methyladenosine-3'-phosphorothioate
  modified_base 23: mod_base = OTHER; note = 2'-O-methylguanosine
actgtgatcatcacagtatagag

SEQ ID NO: 4213 - RNA, 23 nt, synthetic construct
  source 1..23: mol_type = other RNA
  modified_base 1: mod_base = OTHER; note = 2'-O-methyladenosine-3'-phosphorothioate
  modified_base 2: mod_base = OTHER; note = 2'-deoxy-2'-fluoroadenosine-3'-phosphorothioate
  modified_base 3: mod_base = OTHER; note = 2'-O-methyladenosine-3'-phosphate
  modified_base 4: mod_base = OTHER; note = 2'-O-methylcytidine-3'-phosphate
  modified_base 5: mod_base = OTHER; note = 2'-O-methyluridine-3'-phosphate
  modified_base 6: mod_base = OTHER; note = 2'-deoxy-2'-fluoroguanosine-3'-phosphate
  modified_base 7: mod_base = OTHER; note = 2'-O-methyluridine-3'-phosphate
  modified_base 8: mod_base = OTHER; note = 2'-deoxy-2'-fluorocytidine-3'-phosphate
  modified_base 9: mod_base = OTHER; note = 2'-deoxy-2'-fluorouridine-3'-phosphate
  modified_base 10: mod_base = OTHER; note = 2'-O-methyluridine-3'-phosphate
  modified_base 11: mod_base = OTHER; note = 2'-O-methylcytidine-3'-phosphate
  modified_base 12: mod_base = OTHER; note = 2'-O-methyluridine-3'-phosphate
  modified_base 13: mod_base = OTHER; note = 2'-O-methyluridine-3'-phosphate
  modified_base 14: mod_base = OTHER; note = 2'-deoxy-2'-fluorouridine-3'-phosphate
  modified_base 15: mod_base = OTHER; note = 2'-O-methyluridine-3'-phosphate
  modified_base 16: mod_base = OTHER; note = 2'-deoxy-2'-fluoroadenosine-3'-phosphate
  modified_base 17: mod_base = OTHER; note = 2'-O-methylguanosine-3'-phosphate
  modified_base 18: mod_base = OTHER; note = 2'-O-methylguanosine-3'-phosphate
  modified_base 19: mod_base = OTHER; note = 2'-O-methyluridine-3'-phosphate
  modified_base 20: mod_base = OTHER; note = 2'-O-methyladenosine-3'-phosphate
  modified_base 21: mod_base = OTHER; note = 2'-O-methylguanosine-3'-phosphorothioate
  modified_base 22: mod_base = OTHER; note = 2'-O-methylcytidine-3'-phosphorothioate
  modified_base 23: mod_base = OTHER; note = 2'-O-methylcytidine
aaactgtcttcttttaggtagcc

SEQ ID NO: 4214 - RNA, 23 nt, synthetic construct
  source 1..23: mol_type = other RNA
  modified_base 1: mod_base = OTHER; note = 2'-O-methyladenosine-3'-phosphorothioate
  modified_base 2: mod_base = OTHER; note = 2'-deoxy-2'-fluoroguanosine-3'-phosphorothioate
  modified_base 3: mod_base = OTHER; note = 2'-O-methylcytidine-3'-phosphate
  modified_base 4: mod_base = OTHER; note = 2'-O-methylcytidine-3'-phosphate
  modified_base 5: mod_base = OTHER; note = 2'-O-methyladenosine-3'-phosphate
  modified_base 6: mod_base = OTHER; note = 2'-deoxy-2'-fluoroadenosine-3'-phosphate
  modified_base 7: mod_base = OTHER; note = 2'-O-methyladenosine-3'-phosphate
  modified_base 8: mod_base = OTHER; note = 2'-deoxy-2'-fluorouridine-3'-phosphate
  modified_base 9: mod_base = OTHER; note = 2'-deoxy-2'-fluoroadenosine-3'-phosphate
  modified_base 10: mod_base = OTHER; note = 2'-O-methyluridine-3'-phosphate
  modified_base 11: mod_base = OTHER; note = 2'-O-methylguanosine-3'-phosphate
  modified_base 12: mod_base = OTHER; note = 2'-O-methyladenosine-3'-phosphate
  modified_base 13: mod_base = OTHER; note = 2'-O-methylguanosine-3'-phosphate
  modified_base 14: mod_base = OTHER; note = 2'-deoxy-2'-fluoroadenosine-3'-phosphate
  modified_base 15: mod_base = OTHER; note = 2'-O-methyluridine-3'-phosphate
  modified_base 16: mod_base = OTHER; note = 2'-deoxy-2'-fluoroadenosine-3'-phosphate
  modified_base 17: mod_base = OTHER; note = 2'-O-methyladenosine-3'-phosphate
  modified_base 18: mod_base = OTHER; note = 2'-O-methylcytidine-3'-phosphate
  modified_base 19: mod_base = OTHER; note = 2'-O-methyluridine-3'-phosphate
  modified_base 20: mod_base = OTHER; note = 2'-O-methylguanosine-3'-phosphate
  modified_base 21: mod_base = OTHER; note = 2'-O-methyluridine-3'-phosphorothioate
  modified_base 22: mod_base = OTHER; note = 2'-O-methylcytidine-3'-phosphorothioate
  modified_base 23: mod_base = OTHER; note = 2'-O-methyluridine
agccaaatatgagataactgtct

SEQ ID NO: 4215 - RNA, 23 nt, synthetic construct
  source 1..23: mol_type = other RNA
  modified_base 1: mod_base = OTHER; note = 2'-O-methyladenosine-3'-phosphorothioate
  modified_base 2: mod_base = OTHER; note = 2'-deoxy-2'-fluoroadenosine-3'-phosphorothioate
  modified_base 3: mod_base = OTHER; note = 2'-O-methylguanosine-3'-phosphate
  modified_base 4: mod_base = OTHER; note = 2'-O-methyladenosine-3'-phosphate
  modified_base 5: mod_base = OTHER; note = 2'-O-methyladenosine-3'-phosphate
  modified_base 6: mod_base = OTHER; note = 2'-deoxy-2'-fluoroadenosine-3'-phosphate
  modified_base 7: mod_base = OTHER; note = 2'-O-methylguanosine-3'-phosphate
  modified_base 8: mod_base = OTHER; note = 2'-deoxy-2'-fluoroadenosine-3'-phosphate
  modified_base 9: mod_base = OTHER; note = 2'-deoxy-2'-fluorouridine-3'-phosphate
  modified_base 10: mod_base = OTHER; note = 2'-O-methyladenosine-3'-phosphate
  modified_base 11: mod_base = OTHER; note = 2'-O-methyladenosine-3'-phosphate
  modified_base 12: mod_base = OTHER; note = 2'-O-methyladenosine-3'-phosphate
  modified_base 13: mod_base = OTHER; note = 2'-O-methyladenosine-3'-phosphate
  modified_base 14: mod_base = OTHER; note = 2'-deoxy-2'-fluoroadenosine-3'-phosphate
  modified_base 15: mod_base = OTHER; note = 2'-O-methylguanosine-3'-phosphate
  modified_base 16: mod_base = OTHER; note = 2'-deoxy-2'-fluorocytidine-3'-phosphate
  modified_base 17: mod_base = OTHER; note = 2'-O-methyluridine-3'-phosphate
  modified_base 18: mod_base = OTHER; note = 2'-O-methylguanosine-3'-phosphate
  modified_base 19: mod_base = OTHER; note = 2'-O-methylguanosine-3'-phosphate
  modified_base 20: mod_base = OTHER; note = 2'-O-methylcytidine-3'-phosphate
  modified_base 21: mod_base = OTHER; note = 2'-O-methyladenosine-3'-phosphorothioate
  modified_base 22: mod_base = OTHER; note = 2'-O-methylguanosine-3'-phosphorothioate
  modified_base 23: mod_base = OTHER; note = 2'-O-methylcytidine
aagaaagataaaaagctggcagc

SEQ ID NO: 4216 - RNA, 23 nt, synthetic construct
  source 1..23: mol_type = other RNA
  modified_base 1: mod_base = OTHER; note = 2'-O-methyladenosine-3'-phosphorothioate
  modified_base 2: mod_base = OTHER; note = 2'-deoxy-2'-fluorouridine-3'-phosphorothioate
  modified_base 3: mod_base = OTHER; note = 2'-O-methyluridine-3'-phosphate
  modified_base 4: mod_base = OTHER; note = 2'-O-methyladenosine-3'-phosphate
  modified_base 5: mod_base = OTHER; note = 2'-O-methyladenosine-3'-phosphate
  modified_base 6: mod_base = OTHER; note = 2'-deoxy-2'-fluoroguanosine-3'-phosphate
  modified_base 7: mod_base = OTHER; note = 2'-O-methyluridine-3'-phosphate
  modified_base 8: mod_base = OTHER; note = 2'-deoxy-2'-fluoroguanosine-3'-phosphate
  modified_base 9: mod_base = OTHER; note = 2'-deoxy-2'-fluoroguanosine-3'-phosphate
  modified_base 10: mod_base = OTHER; note = 2'-O-methyluridine-3'-phosphate
  modified_base 11: mod_base = OTHER; note = 2'-O-methylcytidine-3'-phosphate
  modified_base 12: mod_base = OTHER; note = 2'-O-methylguanosine-3'-phosphate
  modified_base 13: mod_base = OTHER; note = 2'-O-methyladenosine-3'-phosphate
  modified_base 14: mod_base = OTHER; note = 2'-deoxy-2'-fluoroguanosine-3'-phosphate
  modified_base 15: mod_base = OTHER; note = 2'-O-methyladenosine-3'-phosphate
  modified_base 16: mod_base = OTHER; note = 2'-deoxy-2'-fluoroguanosine-3'-phosphate
  modified_base 17: mod_base = OTHER; note = 2'-O-methyladenosine-3'-phosphate
  modified_base 18: mod_base = OTHER; note = 2'-O-methyladenosine-3'-phosphate
  modified_base 19: mod_base = OTHER; note = 2'-O-methyladenosine-3'-phosphate
  modified_base 20: mod_base = OTHER; note = 2'-O-methylguanosine-3'-phosphate
  modified_base 21: mod_base = OTHER; note = 2'-O-methyladenosine-3'-phosphorothioate
  modified_base 22: mod_base = OTHER; note = 2'-O-methyluridine-3'-phosphorothioate
  modified_base 23: mod_base = OTHER; note = 2'-O-methyladenosine
attaagtggtcgagagaaagata

SEQ ID NO: 4217 - RNA, 23 nt, synthetic construct
  source 1..23: mol_type = other RNA
  modified_base 1: mod_base = OTHER; note = 2'-O-methyladenosine-3'-phosphorothioate
  modified_base 2: mod_base = OTHER; note = 2'-deoxy-2'-fluoroguanosine-3'-phosphorothioate
  modified_base 3: mod_base = OTHER; note = 2'-O-methyladenosine-3'-phosphate
  modified_base 4: mod_base = OTHER; note = 2'-O-methyladenosine-3'-phosphate
  modified_base 5: mod_base = OTHER; note = 2'-O-methylguanosine-3'-phosphate
  modified_base 6: mod_base = OTHER; note = 2'-deoxy-2'-fluorouridine-3'-phosphate
  modified_base 7: mod_base = OTHER; note = 2'-O-methylcytidine-3'-phosphate
  modified_base 8: mod_base = OTHER; note = 2'-deoxy-2'-fluorouridine-3'-phosphate
  modified_base 9: mod_base = OTHER; note = 2'-deoxy-2'-fluoroguanosine-3'-phosphate
  modified_base 10: mod_base = OTHER; note = 2'-O-methyladenosine-3'-phosphate
  modified_base 11: mod_base = OTHER; note = 2'-O-methyladenosine-3'-phosphate
  modified_base 12: mod_base = OTHER; note = 2'-O-methylguanosine-3'-phosphate
  modified_base 13: mod_base = OTHER; note = 2'-O-methyluridine-3'-phosphate
  modified_base 14: mod_base = OTHER; note = 2'-deoxy-2'-fluorouridine-3'-phosphate
  modified_base 15: mod_base = OTHER; note = 2'-O-methyluridine-3'-phosphate
  modified_base 16: mod_base = OTHER; note = 2'-deoxy-2'-fluorouridine-3'-phosphate
  modified_base 17: mod_base = OTHER; note = 2'-O-methyladenosine-3'-phosphate
  modified_base 18: mod_base = OTHER; note = 2'-O-methyladenosine-3'-phosphate
  modified_base 19: mod_base = OTHER; note = 2'-O-methylguanosine-3'-phosphate
  modified_base 20: mod_base = OTHER; note = 2'-O-methyluridine-3'-phosphate
  modified_base 21: mod_base = OTHER; note = 2'-O-methylguanosine-3'-phosphorothioate
  modified_base 22: mod_base = OTHER; note = 2'-O-methylguanosine-3'-phosphorothioate
  modified_base 23: mod_base = OTHER; note = 2'-O-methyluridine
agaagtctgaagttttaagtggt

SEQ ID NO: 4218 - RNA, 23 nt, synthetic construct
  source 1..23: mol_type = other RNA
  modified_base 1: mod_base = OTHER; note = 2'-O-methyladenosine-3'-phosphorothioate
  modified_base 2: mod_base = OTHER; note = 2'-deoxy-2'-fluoroadenosine-3'-phosphorothioate
  modified_base 3: mod_base = OTHER; note = 2'-O-methylguanosine-3'-phosphate
  modified_base 4: mod_base = OTHER; note = 2'-O-methylguanosine-3'-phosphate
  modified_base 5: mod_base = OTHER; note = 2'-O-methyluridine-3'-phosphate
  modified_base 6: mod_base = OTHER; note = 2'-deoxy-2'-fluoroadenosine-3'-phosphate
  modified_base 7: mod_base = OTHER; note = 2'-O-methyluridine-3'-phosphate
  modified_base 8: mod_base = OTHER; note = 2'-deoxy-2'-fluorouridine-3'-phosphate
  modified_base 9: mod_base = OTHER; note = 2'-deoxy-2'-fluoroguanosine-3'-phosphate
  modified_base 10: mod_base = OTHER; note = 2'-O-methylguanosine-3'-phosphate
  modified_base 11: mod_base = OTHER; note = 2'-O-methyladenosine-3'-phosphate
  modified_base 12: mod_base = OTHER; note = 2'-O-methylcytidine-3'-phosphate
  modified_base 13: mod_base = OTHER; note = 2'-O-methyluridine-3'-phosphate
  modified_base 14: mod_base = OTHER; note = 2'-deoxy-2'-fluorouridine-3'-phosphate
  modified_base 15: mod_base = OTHER; note = 2'-O-methyluridine-3'-phosphate
  modified_base 16: mod_base = OTHER; note = 2'-deoxy-2'-fluorocytidine-3'-phosphate
  modified_base 17: mod_base = OTHER; note = 2'-O-methyluridine-3'-phosphate
  modified_base 18: mod_base = OTHER; note = 2'-O-methylcytidine-3'-phosphate
  modified_base 19: mod_base = OTHER; note = 2'-O-methylcytidine-3'-phosphate
  modified_base 20: mod_base = OTHER; note = 2'-O-methyladenosine-3'-phosphate
  modified_base 21: mod_base = OTHER; note = 2'-O-methyluridine-3'-phosphorothioate
  modified_base 22: mod_base = OTHER; note = 2'-O-methylguanosine-3'-phosphorothioate
  modified_base 23: mod_base = OTHER; note = 2'-O-methyladenosine
aaggtattggactttctccatga

SEQ ID NO: 4219 - RNA, 23 nt, synthetic construct
  source 1..23: mol_type = other RNA
  modified_base 1: mod_base = OTHER; note = 2'-O-methyladenosine-3'-phosphorothioate
  modified_base 2: mod_base = OTHER; note = 2'-deoxy-2'-fluorouridine-3'-phosphorothioate
  modified_base 3: mod_base = OTHER; note = 2'-O-methylcytidine-3'-phosphate
  modified_base 4: mod_base = OTHER; note = 2'-O-methyluridine-3'-phosphate
  modified_base 5: mod_base = OTHER; note = 2'-O-methyluridine-3'-phosphate
  modified_base 6: mod_base = OTHER; note = 2'-deoxy-2'-fluorocytidine-3'-phosphate
  modified_base 7: mod_base = OTHER; note = 2'-O-methyluridine-3'-phosphate
  modified_base 8: mod_base = OTHER; note = 2'-deoxy-2'-fluorouridine-3'-phosphate
  modified_base 9: mod_base = OTHER; note = 2'-deoxy-2'-fluoroadenosine-3'-phosphate
  modified_base 10: mod_base = OTHER; note = 2'-O-methyluridine-3'-phosphate
  modified_base 11: mod_base = OTHER; note = 2'-O-methyladenosine-3'-phosphate
  modified_base 12: mod_base = OTHER; note = 2'-O-methylguanosine-3'-phosphate
  modified_base 13: mod_base = OTHER; note = 2'-O-methylcytidine-3'-phosphate
  modified_base 14: mod_base = OTHER; note = 2'-deoxy-2'-fluorouridine-3'-phosphate
  modified_base 15: mod_base = OTHER; note = 2'-O-methylguanosine-3'-phosphate
  modified_base 16: mod_base = OTHER; note = 2'-deoxy-2'-fluoroadenosine-3'-phosphate
  modified_base 17: mod_base = OTHER; note = 2'-O-methylguanosine-3'-phosphate
  modified_base 18: mod_base = OTHER; note = 2'-O-methylcytidine-3'-phosphate
  modified_base 19: mod_base = OTHER; note = 2'-O-methylguanosine-3'-phosphate
  modified_base 20: mod_base = OTHER; note = 2'-O-methyladenosine-3'-phosphate
  modified_base 21: mod_base = OTHER; note = 2'-O-methylguanosine-3'-phosphorothioate
  modified_base 22: mod_base = OTHER; note = 2'-O-methyluridine-3'-phosphorothioate
  modified_base 23: mod_base = OTHER; note = 2'-O-methylguanosine
atcttcttatagctgagcgagtg

SEQ ID NO: 4220 - RNA, 23 nt, synthetic construct
  source 1..23: mol_type = other RNA
  modified_base 1: mod_base = OTHER; note = 2'-O-methyladenosine-3'-phosphorothioate
  modified_base 2: mod_base = OTHER; note = 2'-deoxy-2'-fluorouridine-3'-phosphorothioate
  modified_base 3: mod_base = OTHER; note = 2'-O-methyluridine-3'-phosphate
  modified_base 4: mod_base = OTHER; note = 2'-O-methylguanosine-3'-phosphate
  modified_base 5: mod_base = OTHER; note = 2'-O-methyladenosine-3'-phosphate
  modified_base 6: mod_base = OTHER; note = 2'-deoxy-2'-fluoroguanosine-3'-phosphate
  modified_base 7: mod_base = OTHER; note = 2'-O-methylguanosine-3'-phosphate
  modified_base 8: mod_base = OTHER; note = 2'-deoxy-2'-fluorocytidine-3'-phosphate
  modified_base 9: mod_base = OTHER; note = 2'-deoxy-2'-fluoroadenosine-3'-phosphate
  modified_base 10: mod_base = OTHER; note = 2'-O-methyluridine-3'-phosphate
  modified_base 11: mod_base = OTHER; note = 2'-O-methyluridine-3'-phosphate
  modified_base 12: mod_base = OTHER; note = 2'-O-methyluridine-3'-phosphate
  modified_base 13: mod_base = OTHER; note = 2'-O-methylcytidine-3'-phosphate
  modified_base 14: mod_base = OTHER; note = 2'-deoxy-2'-fluoroadenosine-3'-phosphate
  modified_base 15: mod_base = OTHER; note = 2'-O-methyladenosine-3'-phosphate
  modified_base 16: mod_base = OTHER; note = 2'-deoxy-2'-fluorouridine-3'-phosphate
  modified_base 17: mod_base = OTHER; note = 2'-O-methylguanosine-3'-phosphate
  modified_base 18: mod_base = OTHER; note = 2'-O-methylguanosine-3'-phosphate
  modified_base 19: mod_base = OTHER; note = 2'-O-methyluridine-3'-phosphate
  modified_base 20: mod_base = OTHER; note = 2'-O-methyluridine-3'-phosphate
  modified_base 21: mod_base = OTHER; note = 2'-O-methylguanosine-3'-phosphorothioate
  modified_base 22: mod_base = OTHER; note = 2'-O-methyladenosine-3'-phosphorothioate
  modified_base 23: mod_base = OTHER; note = 2'-O-methylguanosine
attgaggcatttcaatggttgag

SEQ ID NO: 4221 - RNA, 23 nt, synthetic construct
  source 1..23: mol_type = other RNA
  modified_base 1: mod_base = OTHER; note = 2'-O-methyladenosine-3'-phosphorothioate
  modified_base 2: mod_base = OTHER; note = 2'-deoxy-2'-fluoroadenosine-3'-phosphorothioate
  modified_base 3: mod_base = OTHER; note = 2'-O-methylguanosine-3'-phosphate
  modified_base 4: mod_base = OTHER; note = 2'-O-methylcytidine-3'-phosphate
  modified_base 5: mod_base = OTHER; note = 2'-O-methyluridine-3'-phosphate
  modified_base 6: mod_base = OTHER; note = 2'-deoxy-2'-fluorouridine-3'-phosphate
  modified_base 7: mod_base = OTHER; note = 2'-O-methyluridine-3'-phosphate
  modified_base 8: mod_base = OTHER; note = 2'-deoxy-2'-fluorouridine-3'-phosphate
  modified_base 9: mod_base = OTHER; note = 2'-deoxy-2'-fluoroguanosine-3'-phosphate
  modified_base 10: mod_base = OTHER; note = 2'-O-methyladenosine-3'-phosphate
  modified_base 11: mod_base = OTHER; note = 2'-O-methylcytidine-3'-phosphate
  modified_base 12: mod_base = OTHER; note = 2'-O-methylguanosine-3'-phosphate
  modified_base 13: mod_base = OTHER; note = 2'-O-methyluridine-3'-phosphate
  modified_base 14: mod_base = OTHER; note = 2'-deoxy-2'-fluoroguanosine-3'-phosphate
  modified_base 15: mod_base = OTHER; note = 2'-O-methylcytidine-3'-phosphate
  modified_base 16: mod_base = OTHER; note = 2'-deoxy-2'-fluorouridine-3'-phosphate
  modified_base 17: mod_base = OTHER; note = 2'-O-methyluridine-3'-phosphate
  modified_base 18: mod_base = OTHER; note = 2'-O-methylguanosine-3'-phosphate
  modified_base 19: mod_base = OTHER; note = 2'-O-methyluridine-3'-phosphate
  modified_base 20: mod_base = OTHER; note = 2'-O-methyluridine-3'-phosphate
  modified_base 21: mod_base = OTHER; note = 2'-O-methylguanosine-3'-phosphorothioate
  modified_base 22: mod_base = OTHER; note = 2'-O-methyladenosine-3'-phosphorothioate
  modified_base 23: mod_base = OTHER; note = 2'-O-methylguanosine
aagcttttgacgtgcttgttgag

SEQ ID NO: 4222 - RNA, 23 nt, synthetic construct
  source 1..23: mol_type = other RNA
  modified_base 1: mod_base = OTHER; note = 2'-O-methyladenosine-3'-phosphorothioate
  modified_base 2: mod_base = OTHER; note = 2'-deoxy-2'-fluorouridine-3'-phosphorothioate
  modified_base 3: mod_base = OTHER; note = 2'-O-methyluridine-3'-phosphate
  modified_base 4: mod_base = OTHER; note = 2'-O-methylguanosine-3'-phosphate
  modified_base 5: mod_base = OTHER; note = 2'-O-methyladenosine-3'-phosphate
  modified_base 6: mod_base = OTHER; note = 2'-deoxy-2'-fluorouridine-3'-phosphate
  modified_base 7: mod_base = OTHER; note = 2'-O-methyladenosine-3'-phosphate
  modified_base 8: mod_base = OTHER; note = 2'-deoxy-2'-fluoroadenosine-3'-phosphate
  modified_base 9: mod_base = OTHER; note = 2'-deoxy-2'-fluoroadenosine-3'-phosphate
  modified_base 10: mod_base = OTHER; note = 2'-O-methyluridine-3'-phosphate
  modified_base 11: mod_base = OTHER; note = 2'-O-methyladenosine-3'-phosphate
  modified_base 12: mod_base = OTHER; note = 2'-O-methylguanosine-3'-phosphate
  modified_base 13: mod_base = OTHER; note = 2'-O-methyladenosine-3'-phosphate
  modified_base 14: mod_base = OTHER; note = 2'-deoxy-2'-fluorouridine-3'-phosphate
  modified_base 15: mod_base = OTHER; note = 2'-O-methyluridine-3'-phosphate
  modified_base 16: mod_base = OTHER; note = 2'-deoxy-2'-fluorocytidine-3'-phosphate
  modified_base 17: mod_base = OTHER; note = 2'-O-methyluridine-3'-phosphate
  modified_base 18: mod_base = OTHER; note = 2'-O-methylguanosine-3'-phosphate
  modified_base 19: mod_base = OTHER; note = 2'-O-methyluridine-3'-phosphate
  modified_base 20: mod_base = OTHER; note = 2'-O-methyladenosine-3'-phosphate
  modified_base 21: mod_base = OTHER; note = 2'-O-methylguanosine-3'-phosphorothioate
  modified_base 22: mod_base = OTHER; note = 2'-O-methylcytidine-3'-phosphorothioate
  modified_base 23: mod_base = OTHER; note = 2'-O-methyluridine
attgataaatagattctgtagct

SEQ ID NO: 4223 - RNA, 23 nt, synthetic construct
  source 1..23: mol_type = other RNA
  modified_base 1: mod_base = OTHER; note = 2'-O-methyladenosine-3'-phosphorothioate
  modified_base 2: mod_base = OTHER; note = 2'-deoxy-2'-fluoroadenosine-3'-phosphorothioate
  modified_base 3: mod_base = OTHER; note = 2'-O-methylguanosine-3'-phosphate
  modified_base 4: mod_base = OTHER; note = 2'-O-methyladenosine-3'-phosphate
  modified_base 5: mod_base = OTHER; note = 2'-O-methyluridine-3'-phosphate
  modified_base 6: mod_base = OTHER; note = 2'-deoxy-2'-fluoroguanosine-3'-phosphate
  modified_base 7: mod_base = OTHER; note = 2'-O-methyladenosine-3'-phosphate
  modified_base 8: mod_base = OTHER; note = 2'-deoxy-2'-fluoroguanosine-3'-phosphate
  modified_base 9: mod_base = OTHER; note = 2'-deoxy-2'-fluoroadenosine-3'-phosphate
  modified_base 10: mod_base = OTHER; note = 2'-O-methylcytidine-3'-phosphate
  modified_base 11: mod_base = OTHER; note = 2'-O-methyladenosine-3'-phosphate
  modified_base 12: mod_base = OTHER; note = 2'-O-methylguanosine-3'-phosphate
  modified_base 13: mod_base = OTHER; note = 2'-O-methyladenosine-3'-phosphate
  modified_base 14: mod_base = OTHER; note = 2'-deoxy-2'-fluoroadenosine-3'-phosphate
  modified_base 15: mod_base = OTHER; note = 2'-O-methyladenosine-3'-phosphate
  modified_base 16: mod_base = OTHER; note = 2'-deoxy-2'-fluorouridine-3'-phosphate
  modified_base 17: mod_base = OTHER; note = 2'-O-methyluridine-3'-phosphate
  modified_base 18: mod_base = OTHER; note = 2'-O-methylguanosine-3'-phosphate
  modified_base 19: mod_base = OTHER; note = 2'-O-methyladenosine-3'-phosphate
  modified_base 20: mod_base = OTHER; note = 2'-O-methyluridine-3'-phosphate
  modified_base 21: mod_base = OTHER; note = 2'-O-methyladenosine-3'-phosphorothioate
  modified_base 22: mod_base = OTHER; note = 2'-O-methyladenosine-3'-phosphorothioate
  modified_base 23: mod_base = OTHER; note = 2'-O-methyladenosine
aagatgagacagaaattgataaa

SEQ ID NO: 4224 - RNA, 23 nt, synthetic construct
  source 1..23: mol_type = other RNA
  modified_base 1: mod_base = OTHER; note = 2'-O-methyladenosine-3'-phosphorothioate
  modified_base 2: mod_base = OTHER; note = 2'-deoxy-2'-fluoroadenosine-3'-phosphorothioate
  modified_base 3: mod_base = OTHER; note = 2'-O-methylguanosine-3'-phosphate
  modified_base 4: mod_base = OTHER; note = 2'-O-methylcytidine-3'-phosphate
  modified_base 5: mod_base = OTHER; note = 2'-O-methyladenosine-3'-phosphate
  modified_base 6: mod_base = OTHER; note = 2'-deoxy-2'-fluoroadenosine-3'-phosphate
  modified_base 7: mod_base = OTHER; note = 2'-O-methylguanosine-3'-phosphate
  modified_base 8: mod_base = OTHER; note = 2'-deoxy-2'-fluoroadenosine-3'-phosphate
  modified_base 9: mod_base = OTHER; note = 2'-deoxy-2'-fluoroguanosine-3'-phosphate
  modified_base 10: mod_base = OTHER; note = 2'-O-methyladenosine-3'-phosphate
  modified_base 11: mod_base = OTHER; note = 2'-O-methylcytidine-3'-phosphate
  modified_base 12: mod_base = OTHER; note = 2'-O-methyladenosine-3'-phosphate
  modified_base 13: mod_base = OTHER; note = 2'-O-methyluridine-3'-phosphate
  modified_base 14: mod_base = OTHER; note = 2'-deoxy-2'-fluoroadenosine-3'-phosphate
  modified_base 15: mod_base = OTHER; note = 2'-O-methyluridine-3'-phosphate
  modified_base 16: mod_base = OTHER; note = 2'-deoxy-2'-fluorouridine-3'-phosphate
  modified_base 17: mod_base = OTHER; note = 2'-O-methyladenosine-3'-phosphate
  modified_base 18: mod_base = OTHER; note = 2'-O-methyladenosine-3'-phosphate
  modified_base 19: mod_base = OTHER; note = 2'-O-methylguanosine-3'-phosphate
  modified_base 20: mod_base = OTHER; note = 2'-O-methyladenosine-3'-phosphate
  modified_base 21: mod_base = OTHER; note = 2'-O-methyluridine-3'-phosphorothioate
  modified_base 22: mod_base = OTHER; note = 2'-O-methylguanosine-3'-phosphorothioate
  modified_base 23: mod_base = OTHER; note = 2'-O-methyladenosine
aagcaagagacatattaagatga

SEQ ID NO: 4225 - RNA, 23 nt, synthetic construct
  source 1..23: mol_type = other RNA
  modified_base 1: mod_base = OTHER; note = 2'-O-methyladenosine-3'-phosphorothioate
  modified_base 2: mod_base = OTHER; note = 2'-deoxy-2'-fluoroadenosine-3'-phosphorothioate
  modified_base 3: mod_base = OTHER; note = 2'-O-methylcytidine-3'-phosphate
  modified_base 4: mod_base = OTHER; note = 2'-O-methylguanosine-3'-phosphate
  modified_base 5: mod_base = OTHER; note = 2'-O-methyladenosine-3'-phosphate
  modified_base 6: mod_base = OTHER; note = 2'-deoxy-2'-fluorouridine-3'-phosphate
  modified_base 7: mod_base = OTHER; note = 2'-O-methylguanosine-3'-phosphate
  modified_base 8: mod_base = OTHER; note = 2'-deoxy-2'-fluoroadenosine-3'-phosphate
  modified_base 9: mod_base = OTHER; note = 2'-deoxy-2'-fluorouridine-3'-phosphate
  modified_base 10: mod_base = OTHER; note = 2'-O-methyladenosine-3'-phosphate
  modified_base 11: mod_base = OTHER; note = 2'-O-methylcytidine-3'-phosphate
  modified_base 12: mod_base = OTHER; note = 2'-O-methyladenosine-3'-phosphate
  modified_base 13: mod_base = OTHER; note = 2'-O-methylguanosine-3'-phosphate
  modified_base 14: mod_base = OTHER; note = 2'-deoxy-2'-fluoroadenosine-3'-phosphate
  modified_base 15: mod_base = OTHER; note = 2'-O-methyluridine-3'-phosphate
  modified_base 16: mod_base = OTHER; note = 2'-deoxy-2'-fluorocytidine-3'-phosphate
  modified_base 17: mod_base = OTHER; note = 2'-O-methyladenosine-3'-phosphate
  modified_base 18: mod_base = OTHER; note = 2'-O-methylguanosine-3'-phosphate
  modified_base 19: mod_base = OTHER; note = 2'-O-methylcytidine-3'-phosphate
  modified_base 20: mod_base = OTHER; note = 2'-O-methyladenosine-3'-phosphate
  modified_base 21: mod_base = OTHER; note = 2'-O-methyladenosine-3'-phosphorothioate
  modified_base 22: mod_base = OTHER; note = 2'-O-methylguanosine-3'-phosphorothioate
  modified_base 23: mod_base = OTHER; note = 2'-O-methyladenosine
aacgatgatacagatcagcaaga

SEQ ID NO: 4226 - RNA, 23 nt, synthetic construct
  source 1..23: mol_type = other RNA
  modified_base 1: mod_base = OTHER; note = 2'-O-methyladenosine-3'-phosphorothioate
  modified_base 2: mod_base = OTHER; note = 2'-deoxy-2'-fluorouridine-3'-phosphorothioate
  modified_base 3: mod_base = OTHER; note = 2'-O-methylcytidine-3'-phosphate
  modified_base 4: mod_base = OTHER; note = 2'-O-methyladenosine-3'-phosphate
  modified_base 5: mod_base = OTHER; note = 2'-O-methylguanosine-3'-phosphate
  modified_base 6: mod_base = OTHER; note = 2'-deoxy-2'-fluoroadenosine-3'-phosphate
  modified_base 7: mod_base = OTHER; note = 2'-O-methylguanosine-3'-phosphate
  modified_base 8: mod_base = OTHER; note = 2'-deoxy-2'-fluoroadenosine-3'-phosphate
  modified_base 9: mod_base = OTHER; note = 2'-deoxy-2'-fluoroadenosine-3'-phosphate
  modified_base 10: mod_base = OTHER; note = 2'-O-methylguanosine-3'-phosphate
  modified_base 11: mod_base = OTHER; note = 2'-O-methylcytidine-3'-phosphate
  modified_base 12: mod_base = OTHER; note = 2'-O-methyladenosine-3'-phosphate
  modified_base 13: mod_base = OTHER; note = 2'-O-methyluridine-3'-phosphate
  modified_base 14: mod_base = OTHER; note = 2'-deoxy-2'-fluorocytidine-3'-phosphate
  modified_base 15: mod_base = OTHER; note = 2'-O-methyladenosine-3'-phosphate
  modified_base 16: mod_base = OTHER; note = 2'-deoxy-2'-fluorocytidine-3'-phosphate
  modified_base 17: mod_base = OTHER; note = 2'-O-methylguanosine-3'-phosphate
  modified_base 18: mod_base = OTHER; note = 2'-O-methyladenosine-3'-phosphate
  modified_base 19: mod_base = OTHER; note = 2'-O-methyluridine-3'-phosphate
  modified_base 20: mod_base = OTHER; note = 2'-O-methylguanosine-3'-phosphate
  modified_base 21: mod_base = OTHER; note = 2'-O-methyladenosine-3'-phosphorothioate
  modified_base 22: mod_base = OTHER; note = 2'-O-methyluridine-3'-phosphorothioate
  modified_base 23: mod_base = OTHER; note = 2'-O-methyladenosine
atcagagaagcatcacgatgata

SEQ ID NO: 4227 - RNA, 23 nt, synthetic construct
  source 1..23: mol_type = other RNA
  modified_base 1: mod_base = OTHER; note = 2'-O-methyladenosine-3'-phosphorothioate
  modified_base 2: mod_base = OTHER; note = 2'-deoxy-2'-fluorouridine-3'-phosphorothioate
  modified_base 3: mod_base = OTHER; note = 2'-O-methyluridine-3'-phosphate
  modified_base 4: mod_base = OTHER; note = 2'-O-methylguanosine-3'-phosphate
  modified_base 5: mod_base = OTHER; note = 2'-O-methyluridine-3'-phosphate
  modified_base 6: mod_base = OTHER; note = 2'-deoxy-2'-fluoroadenosine-3'-phosphate
  modified_base 7: mod_base = OTHER; note = 2'-O-methylguanosine-3'-phosphate
  modified_base 8: mod_base = OTHER; note = 2'-deoxy-2'-fluorocytidine-3'-phosphate
  modified_base 9: mod_base = OTHER; note = 2'-deoxy-2'-fluoroadenosine-3'-phosphate
  modified_base 10: mod_base = OTHER; note = 2'-O-methylguanosine-3'-phosphate
  modified_base 11: mod_base = OTHER; note = 2'-O-methyladenosine-3'-phosphate
  modified_base 12: mod_base = OTHER; note = 2'-O-methyladenosine-3'-phosphate
  modified_base 13: mod_base = OTHER; note = 2'-O-methylcytidine-3'-phosphate
  modified_base 14: mod_base = OTHER; note = 2'-deoxy-2'-fluorouridine-3'-phosphate
  modified_base 15: mod_base = OTHER; note = 2'-O-methyluridine-3'-phosphate
  modified_base 16: mod_base = OTHER; note = 2'-deoxy-2'-fluorocytidine-3'-phosphate
  modified_base 17: mod_base = OTHER; note = 2'-O-methyladenosine-3'-phosphate
  modified_base 18: mod_base = OTHER; note = 2'-O-methylguanosine-3'-phosphate
  modified_base 19: mod_base = OTHER; note = 2'-O-methyladenosine-3'-phosphate
  modified_base 20: mod_base = OTHER; note = 2'-O-methylguanosine-3'-phosphate
  modified_base 21: mod_base = OTHER; note = 2'-O-methyladenosine-3'-phosphorothioate
  modified_base 22: mod_base = OTHER; note = 2'-O-methyladenosine-3'-phosphorothioate
  modified_base 23: mod_base = OTHER; note = 2'-O-methylguanosine
attgtagcagaacttcagagaag

SEQ ID NO: 4228 - RNA, 23 nt, synthetic construct
  source 1..23: mol_type = other RNA
  modified_base 1: mod_base = OTHER; note = 2'-O-methyladenosine-3'-phosphorothioate
  modified_base 2: mod_base = OTHER; note = 2'-deoxy-2'-fluorouridine-3'-phosphorothioate
  modified_base 3: mod_base = OTHER; note = 2'-O-methylguanosine-3'-phosphate
  modified_base 4: mod_base = OTHER; note = 2'-O-methylcytidine-3'-phosphate
  modified_base 5: mod_base = OTHER; note = 2'-O-methyladenosine-3'-phosphate
  modified_base 6: mod_base = OTHER; note = 2'-deoxy-2'-fluoroguanosine-3'-phosphate
  modified_base 7: mod_base = OTHER; note = 2'-O-methyladenosine-3'-phosphate
  modified_base 8: mod_base = OTHER; note = 2'-deoxy-2'-fluorouridine-3'-phosphate
  modified_base 9: mod_base = OTHER; note = 2'-deoxy-2'-fluorocytidine-3'-phosphate
  modified_base 10: mod_base = OTHER; note = 2'-O-methyluridine-3'-phosphate
  modified_base 11: mod_base = OTHER; note = 2'-O-methyladenosine-3'-phosphate
  modified_base 12: mod_base = OTHER; note = 2'-O-methylguanosine-3'-phosphate
  modified_base 13: mod_base = OTHER; note = 2'-O-methyladenosine-3'-phosphate
  modified_base 14: mod_base = OTHER; note = 2'-deoxy-2'-fluoroguanosine-3'-phosphate
  modified_base 15: mod_base = OTHER; note = 2'-O-methylguanosine-3'-phosphate
  modified_base 16: mod_base = OTHER; note = 2'-deoxy-2'-fluorouridine-3'-phosphate
  modified_base 17: mod_base = OTHER; note = 2'-O-methyluridine-3'-phosphate
  modified_base 18: mod_base = OTHER; note = 2'-O-methylguanosine-3'-phosphate
  modified_base 19: mod_base = OTHER; note = 2'-O-methyluridine-3'-phosphate
  modified_base 20: mod_base = OTHER; note = 2'-O-methyladenosine-3'-phosphate
  modified_base 21: mod_base = OTHER; note = 2'-O-methylguanosine-3'-phosphorothioate
  modified_base 22: mod_base = OTHER; note = 2'-O-methylcytidine-3'-phosphorothioate
  modified_base 23: mod_base = OTHER; note = 2'-O-methyladenosine
atgcagatctagaggttgtagca

SEQ ID NO: 4229 - RNA, 23 nt, synthetic construct
  source 1..23: mol_type = other RNA
  modified_base 1: mod_base = OTHER; note = 2'-O-methyladenosine-3'-phosphorothioate
  modified_base 2: mod_base = OTHER; note = 2'-deoxy-2'-fluorouridine-3'-phosphorothioate
  modified_base 3: mod_base = OTHER; note = 2'-O-methylguanosine-3'-phosphate
  modified_base 4: mod_base = OTHER; note = 2'-O-methyladenosine-3'-phosphate
  modified_base 5: mod_base = OTHER; note = 2'-O-methylcytidine-3'-phosphate
  modified_base 6: mod_base = OTHER; note = 2'-deoxy-2'-fluoroadenosine-3'-phosphate
  modified_base 7: mod_base = OTHER; note = 2'-O-methylguanosine-3'-phosphate
  modified_base 8: mod_base = OTHER; note = 2'-deoxy-2'-fluoroadenosine-3'-phosphate
  modified_base 9: mod_base = OTHER; note = 2'-deoxy-2'-fluorouridine-3'-phosphate
  modified_base 10: mod_base = OTHER; note = 2'-O-methyluridine-3'-phosphate
  modified_base 11: mod_base = OTHER; note = 2'-O-methyluridine-3'-phosphate
  modified_base 12: mod_base = OTHER; note = 2'-O-methyluridine-3'-phosphate
  modified_base 13: mod_base = OTHER; note = 2'-O-methyladenosine-3'-phosphate
  modified_base 14: mod_base = OTHER; note = 2'-deoxy-2'-fluoroadenosine-3'-phosphate
  modified_base 15: mod_base = OTHER; note = 2'-O-methylguanosine-3'-phosphate
  modified_base 16: mod_base = OTHER; note = 2'-deoxy-2'-fluorocytidine-3'-phosphate
  modified_base 17: mod_base = OTHER; note = 2'-O-methyluridine-3'-phosphate
  modified_base 18: mod_base = OTHER; note = 2'-O-methylguanosine-3'-phosphate
  modified_base 19: mod_base = OTHER; note = 2'-O-methyladenosine-3'-phosphate
  modified_base 20: mod_base = OTHER; note = 2'-O-methyluridine-3'-phosphate
  modified_base 21: mod_base = OTHER; note = 2'-O-methylguanosine-3'-phosphorothioate
  modified_base 22: mod_base = OTHER; note = 2'-O-methyluridine-3'-phosphorothioate
  modified_base 23: mod_base = OTHER; note = 2'-O-methylguanosine
atgacagattttaagctgatgtg

SEQ ID NO: 4230 - RNA, 23 nt, synthetic construct
  source 1..23: mol_type = other RNA
  modified_base 1: mod_base = OTHER; note = 2'-O-methyladenosine-3'-phosphorothioate
  modified_base 2: mod_base = OTHER; note = 2'-deoxy-2'-fluoroadenosine-3'-phosphorothioate
  modified_base 3: mod_base = OTHER; note = 2'-O-methyluridine-3'-phosphate
  modified_base 4: mod_base = OTHER; note = 2'-O-methyladenosine-3'-phosphate
  modified_base 5: mod_base = OTHER; note = 2'-O-methylcytidine-3'-phosphate
  modified_base 6: mod_base = OTHER; note = 2'-deoxy-2'-fluoroadenosine-3'-phosphate
  modified_base 7: mod_base = OTHER; note = 2'-O-methyladenosine-3'-phosphate
  modified_base 8: mod_base = OTHER; note = 2'-deoxy-2'-fluorouridine-3'-phosphate
  modified_base 9: mod_base = OTHER; note = 2'-deoxy-2'-fluoroadenosine-3'-phosphate
  modified_base 10: mod_base = OTHER; note = 2'-O-methyluridine-3'-phosphate
  modified_base 11: mod_base = OTHER; note = 2'-O-methyluridine-3'-phosphate
  modified_base 12: mod_base = OTHER; note = 2'-O-methylguanosine-3'-phosphate
  modified_base 13: mod_base = OTHER; note = 2'-O-methyluridine-3'-phosphate
  modified_base 14: mod_base = OTHER; note = 2'-deoxy-2'-fluorouridine-3'-phosphate
  modified_base 15: mod_base = OTHER; note = 2'-O-methyluridine-3'-phosphate
  modified_base 16: mod_base = OTHER; note = 2'-deoxy-2'-fluorouridine-3'-phosphate
  modified_base 17: mod_base = OTHER; note = 2'-O-methylcytidine-3'-phosphate
  modified_base 18: mod_base = OTHER; note = 2'-O-methylcytidine-3'-phosphate
  modified_base 19: mod_base = OTHER; note = 2'-O-methyluridine-3'-phosphate
  modified_base 20: mod_base = OTHER; note = 2'-O-methylguanosine-3'-phosphate
  modified_base 21: mod_base = OTHER; note = 2'-O-methyluridine-3'-phosphorothioate
  modified_base 22: mod_base = OTHER; note = 2'-O-methylcytidine-3'-phosphorothioate
  modified_base 23: mod_base = OTHER; note = 2'-O-methyluridine
aatacaatattgttttcctgtct

SEQ ID NO: 4231 - RNA, 23 nt, synthetic construct
  source 1..23: mol_type = other RNA
  modified_base 1: mod_base = OTHER; note = 2'-O-methyladenosine-3'-phosphorothioate
  modified_base 2: mod_base = OTHER; note = 2'-deoxy-2'-fluoroguanosine-3'-phosphorothioate
  modified_base 3: mod_base = OTHER; note = 2'-O-methyladenosine-3'-phosphate
  modified_base 4: mod_base = OTHER; note = 2'-O-methyladenosine-3'-phosphate
  modified_base 5: mod_base = OTHER; note = 2'-O-methylguanosine-3'-phosphate
  modified_base 6: mod_base = OTHER; note = 2'-deoxy-2'-fluorouridine-3'-phosphate
  modified_base 7: mod_base = OTHER; note = 2'-O-methylguanosine-3'-phosphate
  modified_base 8: mod_base = OTHER; note = 2'-deoxy-2'-fluoroguanosine-3'-phosphate
  modified_base 9: mod_base = OTHER; note = 2'-deoxy-2'-fluorouridine-3'-phosphate
  modified_base 10: mod_base = OTHER; note = 2'-O-methylcytidine-3'-phosphate
  modified_base 11: mod_base = OTHER; note = 2'-O-methyluridine-3'-phosphate
  modified_base 12: mod_base = OTHER; note = 2'-O-methylguanosine-3'-phosphate
  modified_base 13: mod_base = OTHER; note = 2'-O-methyluridine-3'-phosphate
  modified_base 14: mod_base = OTHER; note = 2'-deoxy-2'-fluorouridine-3'-phosphate
  modified_base 15: mod_base = OTHER; note = 2'-O-methyladenosine-3'-phosphate
  modified_base 16: mod_base = OTHER; note = 2'-deoxy-2'-fluorouridine-3'-phosphate
  modified_base 17: mod_base = OTHER; note = 2'-O-methyladenosine-3'-phosphate
  modified_base 18: mod_base = OTHER; note = 2'-O-methylcytidine-3'-phosphate
  modified_base 19: mod_base = OTHER; note = 2'-O-methyladenosine-3'-phosphate
  modified_base 20: mod_base = OTHER; note = 2'-O-methyladenosine-3'-phosphate
  modified_base 21: mod_base = OTHER; note = 2'-O-methyluridine-3'-phosphorothioate
  modified_base 22: mod_base = OTHER; note = 2'-O-methyladenosine-3'-phosphorothioate
  modified_base 23: mod_base = OTHER; note = 2'-O-methyluridine
agaagtggtctgttatacaatat

SEQ ID NO: 4232 - RNA, 23 nt, synthetic construct
  source 1..23: mol_type = other RNA
  modified_base 1: mod_base = OTHER; note = 2'-O-methyladenosine-3'-phosphorothioate
  modified_base 2: mod_base = OTHER; note = 2'-deoxy-2'-fluorocytidine-3'-phosphorothioate
  modified_base 3: mod_base = OTHER; note = 2'-O-methyluridine-3'-phosphate
  modified_base 4: mod_base = OTHER; note = 2'-O-methylcytidine-3'-phosphate
  modified_base 5: mod_base = OTHER; note = 2'-O-methyluridine-3'-phosphate
  modified_base 6: mod_base = OTHER; note = 2'-deoxy-2'-fluorouridine-3'-phosphate
  modified_base 7: mod_base = OTHER; note = 2'-O-methylcytidine-3'-phosphate
  modified_base 8: mod_base = OTHER; note = 2'-deoxy-2'-fluorouridine-3'-phosphate
  modified_base 9: mod_base = OTHER; note = 2'-deoxy-2'-fluoroadenosine-3'-phosphate
  modified_base 10: mod_base = OTHER; note = 2'-O-methylcytidine-3'-phosphate
  modified_base 11: mod_base = OTHER; note = 2'-O-methyluridine-3'-phosphate
  modified_base 12: mod_base = OTHER; note = 2'-O-methylcytidine-3'-phosphate
  modified_base 13: mod_base = OTHER; note = 2'-O-methyladenosine-3'-phosphate
  modified_base 14: mod_base = OTHER; note = 2'-deoxy-2'-fluoroguanosine-3'-phosphate
  modified_base 15: mod_base = OTHER; note = 2'-O-methylguanosine-3'-phosphate
  modified_base 16: mod_base = OTHER; note = 2'-deoxy-2'-fluoroadenosine-3'-phosphate
  modified_base 17: mod_base = OTHER; note = 2'-O-methyladenosine-3'-phosphate
  modified_base 18: mod_base = OTHER; note = 2'-O-methylguanosine-3'-phosphate
  modified_base 19: mod_base = OTHER; note = 2'-O-methyluridine-3'-phosphate
  modified_base 20: mod_base = OTHER; note = 2'-O-methylguanosine-3'-phosphate
  modified_base 21: mod_base = OTHER; note = 2'-O-methylguanosine-3'-phosphorothioate
  modified_base 22: mod_base = OTHER; note = 2'-O-methyluridine-3'-phosphorothioate
  modified_base 23: mod_base = OTHER; note = 2'-O-methylcytidine
actcttctactcaggaagtggtc

SEQ ID NO: 4233 - RNA, 23 nt, synthetic construct
  source 1..23: mol_type = other RNA
  modified_base 1: mod_base = OTHER; note = 2'-O-methyladenosine-3'-phosphorothioate
  modified_base 2: mod_base = OTHER; note = 2'-deoxy-2'-fluorouridine-3'-phosphorothioate
  modified_base 3: mod_base = OTHER; note = 2'-O-methyluridine-3'-phosphate
  modified_base 4: mod_base = OTHER; note = 2'-O-methyluridine-3'-phosphate
  modified_base 5: mod_base = OTHER; note = 2'-O-methyluridine-3'-phosphate
  modified_base 6: mod_base = OTHER; note = 2'-deoxy-2'-fluorocytidine-3'-phosphate
  modified_base 7: mod_base = OTHER; note = 2'-O-methyladenosine-3'-phosphate
  modified_base 8: mod_base = OTHER; note = 2'-deoxy-2'-fluorocytidine-3'-phosphate
  modified_base 9: mod_base = OTHER; note = 2'-deoxy-2'-fluoroadenosine-3'-phosphate
  modified_base 10: mod_base = OTHER; note = 2'-O-methyladenosine-3'-phosphate
  modified_base 11: mod_base = OTHER; note = 2'-O-methyladenosine-3'-phosphate
  modified_base 12: mod_base = OTHER; note = 2'-O-methylguanosine-3'-phosphate
  modified_base 13: mod_base = OTHER; note = 2'-O-methyladenosine-3'-phosphate
  modified_base 14: mod_base = OTHER; note = 2'-deoxy-2'-fluoroadenosine-3'-phosphate
  modified_base 15: mod_base = OTHER; note = 2'-O-methyladenosine-3'-phosphate
  modified_base 16: mod_base = OTHER; note = 2'-deoxy-2'-fluorocytidine-3'-phosphate
  modified_base 17: mod_base = OTHER; note = 2'-O-methyluridine-3'-phosphate
  modified_base 18: mod_base = OTHER; note = 2'-O-methylcytidine-3'-phosphate
  modified_base 19: mod_base = OTHER; note = 2'-O-methyluridine-3'-phosphate
  modified_base 20: mod_base = OTHER; note = 2'-O-methyluridine-3'-phosphate
  modified_base 21: mod_base = OTHER; note = 2'-O-methylcytidine-3'-phosphorothioate
  modified_base 22: mod_base = OTHER; note = 2'-O-methyluridine-3'-phosphorothioate
  modified_base 23: mod_base = OTHER; note = 2'-O-methyladenosine
attttcacaaagaaactcttcta

SEQ ID NO: 4234 - RNA, 23 nt, synthetic construct
  source 1..23: mol_type = other RNA
  modified_base 1: mod_base = OTHER; note = 2'-O-methyladenosine-3'-phosphorothioate
  modified_base 2: mod_base = OTHER; note = 2'-deoxy-2'-fluoroadenosine-3'-phosphorothioate
  modified_base 3: mod_base = OTHER; note = 2'-O-methyladenosine-3'-phosphate
  modified_base 4: mod_base = OTHER; note = 2'-O-methylguanosine-3'-phosphate
  modified_base 5: mod_base = OTHER; note = 2'-O-methyluridine-3'-phosphate
  modified_base 6: mod_base = OTHER; note = 2'-deoxy-2'-fluorouridine-3'-phosphate
  modified_base 7: mod_base = OTHER; note = 2'-O-methyluridine-3'-phosphate
  modified_base 8: mod_base = OTHER; note = 2'-deoxy-2'-fluorouridine-3'-phosphate
  modified_base 9: mod_base = OTHER; note = 2'-deoxy-2'-fluoroadenosine-3'-phosphate
  modified_base 10: mod_base = OTHER; note = 2'-O-methylguanosine-3'-phosphate
  modified_base 11: mod_base = OTHER; note = 2'-O-methyluridine-3'-phosphate
  modified_base 12: mod_base = OTHER; note = 2'-O-methylcytidine-3'-phosphate
  modified_base 13: mod_base = OTHER; note = 2'-O-methyluridine-3'-phosphate
  modified_base 14: mod_base = OTHER; note = 2'-deoxy-2'-fluorouridine-3'-phosphate
  modified_base 15: mod_base = OTHER; note = 2'-O-methyladenosine-3'-phosphate
  modified_base 16: mod_base = OTHER; note = 2'-deoxy-2'-fluoroadenosine-3'-phosphate
  modified_base 17: mod_base = OTHER; note = 2'-O-methyluridine-3'-phosphate
  modified_base 18: mod_base = OTHER; note = 2'-O-methylcytidine-3'-phosphate
  modified_base 19: mod_base = OTHER; note = 2'-O-methyluridine-3'-phosphate
  modified_base 20: mod_base = OTHER; note = 2'-O-methyluridine-3'-phosphate
  modified_base 21: mod_base = OTHER; note = 2'-O-methylguanosine-3'-phosphorothioate
  modified_base 22: mod_base = OTHER; note = 2'-O-methyladenosine-3'-phosphorothioate
  modified_base 23: mod_base = OTHER; note = 2'-O-methylcytidine
aaagttttagtcttaatcttgac

SEQ ID NO: 4235 - RNA, 23 nt, synthetic construct
  source 1..23: mol_type = other RNA
  modified_base 1: mod_base = OTHER; note = 2'-O-methyladenosine-3'-phosphorothioate
  modified_base 2: mod_base = OTHER; note = 2'-deoxy-2'-fluoroadenosine-3'-phosphorothioate
  modified_base 3: mod_base = OTHER; note = 2'-O-methylguanosine-3'-phosphate
  modified_base 4: mod_base = OTHER; note = 2'-O-methyladenosine-3'-phosphate
  modified_base 5: mod_base = OTHER; note = 2'-O-methyluridine-3'-phosphate
  modified_base 6: mod_base = OTHER; note = 2'-deoxy-2'-fluoroguanosine-3'-phosphate
  modified_base 7: mod_base = OTHER; note = 2'-O-methyladenosine-3'-phosphate
  modified_base 8: mod_base = OTHER; note = 2'-deoxy-2'-fluoroadenosine-3'-phosphate
  modified_base 9: mod_base = OTHER; note = 2'-deoxy-2'-fluorouridine-3'-phosphate
  modified_base 10: mod_base = OTHER; note = 2'-O-methyladenosine-3'-phosphate
  modified_base 11: mod_base = OTHER; note = 2'-O-methylcytidine-3'-phosphate
  modified_base 12: mod_base = OTHER; note = 2'-O-methyladenosine-3'-phosphate
  modified_base 13: mod_base = OTHER; note = 2'-O-methyluridine-3'-phosphate
  modified_base 14: mod_base = OTHER; note = 2'-deoxy-2'-fluoroadenosine-3'-phosphate
  modified_base 15: mod_base = OTHER; note = 2'-O-methyluridine-3'-phosphate
  modified_base 16: mod_base = OTHER; note = 2'-deoxy-2'-fluoroguanosine-3'-phosphate
  modified_base 17: mod_base = OTHER; note = 2'-O-methylguanosine-3'-phosphate
  modified_base 18: mod_base = OTHER; note = 2'-O-methyluridine-3'-phosphate
  modified_base 19: mod_base = OTHER; note = 2'-O-methyladenosine-3'-phosphate
  modified_base 20: mod_base = OTHER; note = 2'-O-methyladenosine-3'-phosphate
  modified_base 21: mod_base = OTHER; note = 2'-O-methylcytidine-3'-phosphorothioate
  modified_base 22: mod_base = OTHER; note = 2'-O-methyladenosine-3'-phosphorothioate
  modified_base 23: mod_base = OTHER; note = 2'-O-methyladenosine
aagatgaatacatatggtaacaa

SEQ ID NO: 4236 - RNA, 23 nt, synthetic construct
  source 1..23: mol_type = other RNA
  modified_base 1: mod_base = OTHER; note = 2'-O-methyladenosine-3'-phosphorothioate
  modified_base 2: mod_base = OTHER; note = 2'-deoxy-2'-fluoroguanosine-3'-phosphorothioate
  modified_base 3: mod_base = OTHER; note = 2'-O-methyluridine-3'-phosphate
  modified_base 4: mod_base = OTHER; note = 2'-O-methyluridine-3'-phosphate
  modified_base 5: mod_base = OTHER; note = 2'-O-methyluridine-3'-phosphate
  modified_base 6: mod_base = OTHER; note = 2'-deoxy-2'-fluoroadenosine-3'-phosphate
  modified_base 7: mod_base = OTHER; note = 2'-O-methylcytidine-3'-phosphate
  modified_base 8: mod_base = OTHER; note = 2'-deoxy-2'-fluoroadenosine-3'-phosphate
  modified_base 9: mod_base = OTHER; note = 2'-deoxy-2'-fluoroadenosine-3'-phosphate
  modified_base 10: mod_base = OTHER; note = 2'-O-methylguanosine-3'-phosphate
  modified_base 11: mod_base = OTHER; note = 2'-O-methyladenosine-3'-phosphate
  modified_base 12: mod_base = OTHER; note = 2'-O-methyluridine-3'-phosphate
  modified_base 13: mod_base = OTHER; note = 2'-O-methylcytidine-3'-phosphate
  modified_base 14: mod_base = OTHER; note = 2'-deoxy-2'-fluorocytidine-3'-phosphate
  modified_base 15: mod_base = OTHER; note = 2'-O-methyladenosine-3'-phosphate
  modified_base 16: mod_base = OTHER; note = 2'-deoxy-2'-fluoroadenosine-3'-phosphate
  modified_base 17: mod_base = OTHER; note = 2'-O-methylcytidine-3'-phosphate
  modified_base 18: mod_base = OTHER; note = 2'-O-methyladenosine-3'-phosphate
  modified_base 19: mod_base = OTHER; note = 2'-O-methylguanosine-3'-phosphate
  modified_base 20: mod_base = OTHER; note = 2'-O-methyladenosine-3'-phosphate
  modified_base 21: mod_base = OTHER; note = 2'-O-methyluridine-3'-phosphorothioate
  modified_base 22: mod_base = OTHER; note = 2'-O-methylguanosine-3'-phosphorothioate
  modified_base 23: mod_base = OTHER; note = 2'-O-methyladenosine
agtttacaagatccaacagatga

SEQ ID NO: 4237 - RNA, 23 nt, synthetic construct
  source 1..23: mol_type = other RNA
  modified_base 1: mod_base = OTHER; note = 2'-O-methyladenosine-3'-phosphorothioate
  modified_base 2: mod_base = OTHER; note = 2'-deoxy-2'-fluoroguanosine-3'-phosphorothioate
  modified_base 3: mod_base = OTHER; note = 2'-O-methyladenosine-3'-phosphate
  modified_base 4: mod_base = OTHER; note = 2'-O-methyladenosine-3'-phosphate
  modified_base 5: mod_base = OTHER; note = 2'-O-methyladenosine-3'-phosphate
  modified_base 6: mod_base = OTHER; note = 2'-deoxy-2'-fluoroadenosine-3'-phosphate
  modified_base 7: mod_base = OTHER; note = 2'-O-methyluridine-3'-phosphate
  modified_base 8: mod_base = OTHER; note = 2'-deoxy-2'-fluoroadenosine-3'-phosphate
  modified_base 9: mod_base = OTHER; note = 2'-deoxy-2'-fluoroadenosine-3'-phosphate
  modified_base 10: mod_base = OTHER; note = 2'-O-methyladenosine-3'-phosphate
  modified_base 11: mod_base = OTHER; note = 2'-O-methylguanosine-3'-phosphate
  modified_base 12: mod_base = OTHER; note = 2'-O-methylcytidine-3'-phosphate
  modified_base 13: mod_base = OTHER; note = 2'-O-methylcytidine-3'-phosphate
  modified_base 14: mod_base = OTHER; note = 2'-deoxy-2'-fluorocytidine-3'-phosphate
  modified_base 15: mod_base = OTHER; note = 2'-O-methyluridine-3'-phosphate
  modified_base 16: mod_base = OTHER; note = 2'-deoxy-2'-fluorouridine-3'-phosphate
  modified_base 17: mod_base = OTHER; note = 2'-O-methyluridine-3'-phosphate
  modified_base 18: mod_base = OTHER; note = 2'-O-methyluridine-3'-phosphate
  modified_base 19: mod_base = OTHER; note = 2'-O-methylcytidine-3'-phosphate
  modified_base 20: mod_base = OTHER; note = 2'-O-methyladenosine-3'-phosphate
  modified_base 21: mod_base = OTHER; note = 2'-O-methyluridine-3'-phosphorothioate
  modified_base 22: mod_base = OTHER; note = 2'-O-methylguanosine-3'-phosphorothioate
  modified_base 23: mod_base = OTHER; note = 2'-O-methyluridine
agaaaataaagcccttttcatgt

SEQ ID NO: 4238 - RNA, 23 nt, synthetic construct
  source 1..23: mol_type = other RNA
  modified_base 1: mod_base = OTHER; note = 2'-O-methyladenosine-3'-phosphorothioate
  modified_base 2: mod_base = OTHER; note = 2'-deoxy-2'-fluoroadenosine-3'-phosphorothioate
  modified_base 3: mod_base = OTHER; note = 2'-O-methyladenosine-3'-phosphate
  modified_base 4: mod_base = OTHER; note = 2'-O-methylcytidine-3'-phosphate
  modified_base 5: mod_base = OTHER; note = 2'-O-methyladenosine-3'-phosphate
  modified_base 6: mod_base = OTHER; note = 2'-deoxy-2'-fluoroguanosine-3'-phosphate
  modified_base 7: mod_base = OTHER; note = 2'-O-methyluridine-3'-phosphate
  modified_base 8: mod_base = OTHER; note = 2'-deoxy-2'-fluorouridine-3'-phosphate
  modified_base 9: mod_base = OTHER; note = 2'-deoxy-2'-fluoroguanosine-3'-phosphate
  modified_base 10: mod_base = OTHER; note = 2'-O-methylcytidine-3'-phosphate
  modified_base 11: mod_base = OTHER; note = 2'-O-methyladenosine-3'-phosphate
  modified_base 12: mod_base = OTHER; note = 2'-O-methyluridine-3'-phosphate
  modified_base 13: mod_base = OTHER; note = 2'-O-methyluridine-3'-phosphate
  modified_base 14: mod_base = OTHER; note = 2'-deoxy-2'-fluorouridine-3'-phosphate
  modified_base 15: mod_base = OTHER; note = 2'-O-methyluridine-3'-phosphate
  modified_base 16: mod_base = OTHER; note = 2'-deoxy-2'-fluoroadenosine-3'-phosphate
  modified_base 17: mod_base = OTHER; note = 2'-O-methyluridine-3'-phosphate
  modified_base 18: mod_base = OTHER; note = 2'-O-methyladenosine-3'-phosphate
  modified_base 19: mod_base = OTHER; note = 2'-O-methylcytidine-3'-phosphate
  modified_base 20: mod_base = OTHER; note = 2'-O-methyladenosine-3'-phosphate
  modified_base 21: mod_base = OTHER; note = 2'-O-methylcytidine-3'-phosphorothioate
  modified_base 22: mod_base = OTHER; note = 2'-O-methyluridine-3'-phosphorothioate
  modified_base 23: mod_base = OTHER; note = 2'-O-methyluridine
aaacagttgcattttatacactt

SEQ ID NO: 4239 - RNA, 23 nt, synthetic construct
  source 1..23: mol_type = other RNA
  modified_base 1: mod_base = OTHER; note = 2'-O-methyladenosine-3'-phosphorothioate
  modified_base 2: mod_base = OTHER; note = 2'-deoxy-2'-fluoroadenosine-3'-phosphorothioate
  modified_base 3: mod_base = OTHER; note = 2'-O-methyluridine-3'-phosphate
  modified_base 4: mod_base = OTHER; note = 2'-O-methylguanosine-3'-phosphate
  modified_base 5: mod_base = OTHER; note = 2'-O-methyluridine-3'-phosphate
  modified_base 6: mod_base = OTHER; note = 2'-deoxy-2'-fluorouridine-3'-phosphate
  modified_base 7: mod_base = OTHER; note = 2'-O-methylguanosine-3'-phosphate
  modified_base 8: mod_base = OTHER; note = 2'-deoxy-2'-fluoroadenosine-3'-phosphate
  modified_base 9: mod_base = OTHER; note = 2'-deoxy-2'-fluoroguanosine-3'-phosphate
  modified_base 10: mod_base = OTHER; note = 2'-O-methylguanosine-3'-phosphate
  modified_base 11: mod_base = OTHER; note = 2'-O-methyladenosine-3'-phosphate
  modified_base 12: mod_base = OTHER; note = 2'-O-methyladenosine-3'-phosphate
  modified_base 13: mod_base = OTHER; note = 2'-O-methyladenosine-3'-phosphate
  modified_base 14: mod_base = OTHER; note = 2'-deoxy-2'-fluorouridine-3'-phosphate
  modified_base 15: mod_base = OTHER; note = 2'-O-methylcytidine-3'-phosphate
  modified_base 16: mod_base = OTHER; note = 2'-deoxy-2'-fluoroadenosine-3'-phosphate
  modified_base 17: mod_base = OTHER; note = 2'-O-methyladenosine-3'-phosphate
  modified_base 18: mod_base = OTHER; note = 2'-O-methylcytidine-3'-phosphate
  modified_base 19: mod_base = OTHER; note = 2'-O-methyladenosine-3'-phosphate
  modified_base 20: mod_base = OTHER; note = 2'-O-methylguanosine-3'-phosphate
  modified_base 21: mod_base = OTHER; note = 2'-O-methyluridine-3'-phosphorothioate
  modified_base 22: mod_base = OTHER; note = 2'-O-methyluridine-3'-phosphorothioate
  modified_base 23: mod_base = OTHER; note = 2'-O-methylguanosine
aatgttgaggaaatcaacagttg

SEQ ID NO: 4240 - RNA, 23 nt, synthetic construct
  source 1..23: mol_type = other RNA
  modified_base 1: mod_base = OTHER; note = 2'-O-methyladenosine-3'-phosphorothioate
  modified_base 2: mod_base = OTHER; note = 2'-deoxy-2'-fluoroadenosine-3'-phosphorothioate
  modified_base 3: mod_base = OTHER; note = 2'-O-methyluridine-3'-phosphate
  modified_base 4: mod_base = OTHER; note = 2'-O-methyluridine-3'-phosphate
  modified_base 5: mod_base = OTHER; note = 2'-O-methyluridine-3'-phosphate
  modified_base 6: mod_base = OTHER; note = 2'-deoxy-2'-fluoroguanosine-3'-phosphate
  modified_base 7: mod_base = OTHER; note = 2'-O-methylguanosine-3'-phosphate
  modified_base 8: mod_base = OTHER; note = 2'-deoxy-2'-fluoroguanosine-3'-phosphate
  modified_base 9: mod_base = OTHER; note = 2'-deoxy-2'-fluoroadenosine-3'-phosphate
  modified_base 10: mod_base = OTHER; note = 2'-O-methyluridine-3'-phosphate
  modified_base 11: mod_base = OTHER; note = 2'-O-methyladenosine-3'-phosphate
  modified_base 12: mod_base = OTHER; note = 2'-O-methylguanosine-3'-phosphate
  modified_base 13: mod_base = OTHER; note = 2'-O-methyladenosine-3'-phosphate
  modified_base 14: mod_base = OTHER; note = 2'-deoxy-2'-fluoroadenosine-3'-phosphate
  modified_base 15: mod_base = OTHER; note = 2'-O-methyladenosine-3'-phosphate
  modified_base 16: mod_base = OTHER; note = 2'-deoxy-2'-fluorouridine-3'-phosphate
  modified_base 17: mod_base = OTHER; note = 2'-O-methyluridine-3'-phosphate
  modified_base 18: mod_base = OTHER; note = 2'-O-methyluridine-3'-phosphate
  modified_base 19: mod_base = OTHER; note = 2'-O-methylguanosine-3'-phosphate
  modified_base 20: mod_base = OTHER; note = 2'-O-methyluridine-3'-phosphate
  modified_base 21: mod_base = OTHER; note = 2'-O-methylguanosine-3'-phosphorothioate
  modified_base 22: mod_base = OTHER; note = 2'-O-methyladenosine-3'-phosphorothioate
  modified_base 23: mod_base = OTHER; note = 2'-O-methylguanosine
aatttgggatagaaatttgtgag

SEQ ID NO: 4241 - RNA, 23 nt, synthetic construct
  source 1..23: mol_type = other RNA
  modified_base 1: mod_base = OTHER; note = 2'-O-methyladenosine-3'-phosphorothioate
  modified_base 2: mod_base = OTHER; note = 2'-deoxy-2'-fluorocytidine-3'-phosphorothioate
  modified_base 3: mod_base = OTHER; note = 2'-O-methyladenosine-3'-phosphate
  modified_base 4: mod_base = OTHER; note = 2'-O-methyluridine-3'-phosphate
  modified_base 5: mod_base = OTHER; note = 2'-O-methylcytidine-3'-phosphate
  modified_base 6: mod_base = OTHER; note = 2'-deoxy-2'-fluorouridine-3'-phosphate
  modified_base 7: mod_base = OTHER; note = 2'-O-methyluridine-3'-phosphate
  modified_base 8: mod_base = OTHER; note = 2'-deoxy-2'-fluorocytidine-3'-phosphate
  modified_base 9: mod_base = OTHER; note = 2'-deoxy-2'-fluoroadenosine-3'-phosphate
  modified_base 10: mod_base = OTHER; note = 2'-O-methylguanosine-3'-phosphate
  modified_base 11: mod_base = OTHER; note = 2'-O-methyladenosine-3'-phosphate
  modified_base 12: mod_base = OTHER; note = 2'-O-methyladenosine-3'-phosphate
  modified_base 13: mod_base = OTHER; note = 2'-O-methyladenosine-3'-phosphate
  modified_base 14: mod_base = OTHER; note = 2'-deoxy-2'-fluoroadenosine-3'-phosphate
  modified_base 15: mod_base = OTHER; note = 2'-O-methylguanosine-3'-phosphate
  modified_base 16: mod_base = OTHER; note = 2'-deoxy-2'-fluoroadenosine-3'-phosphate
  modified_base 17: mod_base = OTHER; note = 2'-O-methyluridine-3'-phosphate
  modified_base 18: mod_base = OTHER; note = 2'-O-methyluridine-3'-phosphate
  modified_base 19: mod_base = OTHER; note = 2'-O-methyluridine-3'-phosphate
  modified_base 20: mod_base = OTHER; note = 2'-O-methylguanosine-3'-phosphate
  modified_base 21: mod_base = OTHER; note = 2'-O-methylguanosine-3'-phosphorothioate
  modified_base 22: mod_base = OTHER; note = 2'-O-methylguanosine-3'-phosphorothioate
  modified_base 23: mod_base = OTHER; note = 2'-O-methyladenosine
acatcttcagaaaagatttggga

SEQ ID NO: 4242 - RNA, 23 nt, synthetic construct
  source 1..23: mol_type = other RNA
  modified_base 1: mod_base = OTHER; note = 2'-O-methyladenosine-3'-phosphorothioate
  modified_base 2: mod_base = OTHER; note = 2'-deoxy-2'-fluoroadenosine-3'-phosphorothioate
  modified_base 3: mod_base = OTHER; note = 2'-O-methyladenosine-3'-phosphate
  modified_base 4: mod_base = OTHER; note = 2'-O-methyladenosine-3'-phosphate
  modified_base 5: mod_base = OTHER; note = 2'-O-methyladenosine-3'-phosphate
  modified_base 6: mod_base = OTHER; note = 2'-deoxy-2'-fluorocytidine-3'-phosphate
  modified_base 7: mod_base = OTHER; note = 2'-O-methyluridine-3'-phosphate
  modified_base 8: mod_base = OTHER; note = 2'-deoxy-2'-fluoroadenosine-3'-phosphate
  modified_base 9: mod_base = OTHER; note = 2'-deoxy-2'-fluoroadenosine-3'-phosphate
  modified_base 10: mod_base = OTHER; note = 2'-O-methyladenosine-3'-phosphate
  modified_base 11: mod_base = OTHER; note = 2'-O-methylcytidine-3'-phosphate
  modified_base 12: mod_base = OTHER; note = 2'-O-methyluridine-3'-phosphate
  modified_base 13: mod_base = OTHER; note = 2'-O-methylcytidine-3'-phosphate
  modified_base 14: mod_base = OTHER; note = 2'-deoxy-2'-fluorouridine-3'-phosphate
  modified_base 15: mod_base = OTHER; note = 2'-O-methyluridine-3'-phosphate
  modified_base 16: mod_base = OTHER; note = 2'-deoxy-2'-fluorocytidine-3'-phosphate
  modified_base 17: mod_base = OTHER; note = 2'-O-methyladenosine-3'-phosphate
  modified_base 18: mod_base = OTHER; note = 2'-O-methyluridine-3'-phosphate
  modified_base 19: mod_base = OTHER; note = 2'-O-methylcytidine-3'-phosphate
  modified_base 20: mod_base = OTHER; note = 2'-O-methyluridine-3'-phosphate
  modified_base 21: mod_base = OTHER; note = 2'-O-methyluridine-3'-phosphorothioate
  modified_base 22: mod_base = OTHER; note = 2'-O-methylcytidine-3'-phosphorothioate
  modified_base 23: mod_base = OTHER; note = 2'-O-methyladenosine
aaaaactaaactcttcatcttca

SEQ ID NO: 4243 - RNA, 23 nt, synthetic construct
  source 1..23: mol_type = other RNA
  modified_base 1: mod_base = OTHER; note = 2'-O-methyladenosine-3'-phosphorothioate
  modified_base 2: mod_base = OTHER; note = 2'-deoxy-2'-fluoroguanosine-3'-phosphorothioate
  modified_base 3: mod_base = OTHER; note = 2'-O-methylguanosine-3'-phosphate
  modified_base 4: mod_base = OTHER; note = 2'-O-methylcytidine-3'-phosphate
  modified_base 5: mod_base = OTHER; note = 2'-O-methyladenosine-3'-phosphate
  modified_base 6: mod_base = OTHER; note = 2'-deoxy-2'-fluoroguanosine-3'-phosphate
  modified_base 7: mod_base = OTHER; note = 2'-O-methyluridine-3'-phosphate
  modified_base 8: mod_base = OTHER; note = 2'-deoxy-2'-fluoroguanosine-3'-phosphate
  modified_base 9: mod_base = OTHER; note = 2'-deoxy-2'-fluorocytidine-3'-phosphate
  modified_base 10: mod_base = OTHER; note = 2'-O-methyladenosine-3'-phosphate
  modified_base 11: mod_base = OTHER; note = 2'-O-methylguanosine-3'-phosphate
  modified_base 12: mod_base = OTHER; note = 2'-O-methyluridine-3'-phosphate
  modified_base 13: mod_base = OTHER; note = 2'-O-methyluridine-3'-phosphate
  modified_base 14: mod_base = OTHER; note = 2'-deoxy-2'-fluorouridine-3'-phosphate
  modified_base 15: mod_base = OTHER; note = 2'-O-methyluridine-3'-phosphate
  modified_base 16: mod_base = OTHER; note = 2'-deoxy-2'-fluoroadenosine-3'-phosphate
  modified_base 17: mod_base = OTHER; note = 2'-O-methyladenosine-3'-phosphate
  modified_base 18: mod_base = OTHER; note = 2'-O-methyladenosine-3'-phosphate
  modified_base 19: mod_base = OTHER; note = 2'-O-methyladenosine-3'-phosphate
  modified_base 20: mod_base = OTHER; note = 2'-O-methylcytidine-3'-phosphate
  modified_base 21: mod_base = OTHER; note = 2'-O-methyluridine-3'-phosphorothioate
  modified_base 22: mod_base = OTHER; note = 2'-O-methyladenosine-3'-phosphorothioate
  modified_base 23: mod_base = OTHER; note = 2'-O-methyladenosine
aggcagtgcagttttaaaactaa

SEQ ID NO: 4244 - RNA, 23 nt, synthetic construct
  source 1..23: mol_type = other RNA
  modified_base 1: mod_base = OTHER; note = 2'-O-methyladenosine-3'-phosphorothioate
  modified_base 2: mod_base = OTHER; note = 2'-deoxy-2'-fluoroadenosine-3'-phosphorothioate
  modified_base 3: mod_base = OTHER; note = 2'-O-methyluridine-3'-phosphate
  modified_base 4: mod_base = OTHER; note = 2'-O-methylguanosine-3'-phosphate
  modified_base 5: mod_base = OTHER; note = 2'-O-methyladenosine-3'-phosphate
  modified_base 6: mod_base = OTHER; note = 2'-deoxy-2'-fluoroadenosine-3'-phosphate
  modified_base 7: mod_base = OTHER; note = 2'-O-methylguanosine-3'-phosphate
  modified_base 8: mod_base = OTHER; note = 2'-deoxy-2'-fluorouridine-3'-phosphate
  modified_base 9: mod_base = OTHER; note = 2'-deoxy-2'-fluoroguanosine-3'-phosphate
  modified_base 10: mod_base = OTHER; note = 2'-O-methyladenosine-3'-phosphate
  modified_base 11: mod_base = OTHER; note = 2'-O-methyladenosine-3'-phosphate
  modified_base 12: mod_base = OTHER; note = 2'-O-methylcytidine-3'-phosphate
  modified_base 13: mod_base = OTHER; note = 2'-O-methyluridine-3'-phosphate
  modified_base 14: mod_base = OTHER; note = 2'-deoxy-2'-fluorouridine-3'-phosphate
  modified_base 15: mod_base = OTHER; note = 2'-O-methylguanosine-3'-phosphate
  modified_base 16: mod_base = OTHER; note = 2'-deoxy-2'-fluorouridine-3'-phosphate
  modified_base 17: mod_base = OTHER; note = 2'-O-methyluridine-3'-phosphate
  modified_base 18: mod_base = OTHER; note = 2'-O-methylguanosine-3'-phosphate
  modified_base 19: mod_base = OTHER; note = 2'-O-methylguanosine-3'-phosphate
  modified_base 20: mod_base = OTHER; note = 2'-O-methylcytidine-3'-phosphate
  modified_base 21: mod_base = OTHER; note = 2'-O-methyladenosine-3'-phosphorothioate
  modified_base 22: mod_base = OTHER; note = 2'-O-methylguanosine-3'-phosphorothioate
  modified_base 23: mod_base = OTHER; note = 2'-O-methyluridine
aatgaagtgaacttgttggcagt

SEQ ID NO: 4245 - RNA, 23 nt, synthetic construct
  source 1..23: mol_type = other RNA
  modified_base 1: mod_base = OTHER; note = 2'-O-methyladenosine-3'-phosphorothioate
  modified_base 2: mod_base = OTHER; note = 2'-deoxy-2'-fluoroadenosine-3'-phosphorothioate
  modified_base 3: mod_base = OTHER; note = 2'-O-methyladenosine-3'-phosphate
  modified_base 4: mod_base = OTHER; note = 2'-O-methyluridine-3'-phosphate
  modified_base 5: mod_base = OTHER; note = 2'-O-methyluridine-3'-phosphate
  modified_base 6: mod_base = OTHER; note = 2'-deoxy-2'-fluoroadenosine-3'-phosphate
  modified_base 7: mod_base = OTHER; note = 2'-O-methyluridine-3'-phosphate
  modified_base 8: mod_base = OTHER; note = 2'-deoxy-2'-fluoroadenosine-3'-phosphate
  modified_base 9: mod_base = OTHER; note = 2'-deoxy-2'-fluorouridine-3'-phosphate
  modified_base 10: mod_base = OTHER; note = 2'-O-methyluridine-3'-phosphate
  modified_base 11: mod_base = OTHER; note = 2'-O-methylcytidine-3'-phosphate
  modified_base 12: mod_base = OTHER; note = 2'-O-methyladenosine-3'-phosphate
  modified_base 13: mod_base = OTHER; note = 2'-O-methylcytidine-3'-phosphate
  modified_base 14: mod_base = OTHER; note = 2'-deoxy-2'-fluorocytidine-3'-phosphate
  modified_base 15: mod_base = OTHER; note = 2'-O-methyluridine-3'-phosphate
  modified_base 16: mod_base = OTHER; note = 2'-deoxy-2'-fluorocytidine-3'-phosphate
  modified_base 17: mod_base = OTHER; note = 2'-O-methyladenosine-3'-phosphate
  modified_base 18: mod_base = OTHER; note = 2'-O-methyladenosine-3'-phosphate
  modified_base 19: mod_base = OTHER; note = 2'-O-methyladenosine-3'-phosphate
  modified_base 20: mod_base = OTHER; note = 2'-O-methyladenosine-3'-phosphate
  modified_base 21: mod_base = OTHER; note = 2'-O-methylguanosine-3'-phosphorothioate
  modified_base 22: mod_base = OTHER; note = 2'-O-methyladenosine-3'-phosphorothioate
  modified_base 23: mod_base = OTHER; note = 2'-O-methylguanosine
aaattatattcacctcaaaagag

SEQ ID NO: 4246 - RNA, 23 nt, synthetic construct
  source 1..23: mol_type = other RNA
  modified_base 1: mod_base = OTHER; note = 2'-O-methyladenosine-3'-phosphorothioate
  modified_base 2: mod_base = OTHER; note = 2'-deoxy-2'-fluorouridine-3'-phosphorothioate
  modified_base 3: mod_base = OTHER; note = 2'-O-methylguanosine-3'-phosphate
  modified_base 4: mod_base = OTHER; note = 2'-O-methyladenosine-3'-phosphate
  modified_base 5: mod_base = OTHER; note = 2'-O-methyladenosine-3'-phosphate
  modified_base 6: mod_base = OTHER; note = 2'-deoxy-2'-fluoroguanosine-3'-phosphate
  modified_base 7: mod_base = OTHER; note = 2'-O-methyladenosine-3'-phosphate
  modified_base 8: mod_base = OTHER; note = 2'-deoxy-2'-fluorocytidine-3'-phosphate
  modified_base 9: mod_base = OTHER; note = 2'-deoxy-2'-fluorocytidine-3'-phosphate
  modified_base 10: mod_base = OTHER; note = 2'-O-methyluridine-3'-phosphate
  modified_base 11: mod_base = OTHER; note = 2'-O-methylguanosine-3'-phosphate
  modified_base 12: mod_base = OTHER; note = 2'-O-methyladenosine-3'-phosphate
  modified_base 13: mod_base = OTHER; note = 2'-O-methyladenosine-3'-phosphate
  modified_base 14: mod_base = OTHER; note = 2'-deoxy-2'-fluoroadenosine-3'-phosphate
  modified_base 15: mod_base = OTHER; note = 2'-O-methyladenosine-3'-phosphate
  modified_base 16: mod_base = OTHER; note = 2'-deoxy-2'-fluoroadenosine-3'-phosphate
  modified_base 17: mod_base = OTHER; note = 2'-O-methyluridine-3'-phosphate
  modified_base 18: mod_base = OTHER; note = 2'-O-methyladenosine-3'-phosphate
  modified_base 19: mod_base = OTHER; note = 2'-O-methylcytidine-3'-phosphate
  modified_base 20: mod_base = OTHER; note = 2'-O-methyluridine-3'-phosphate
  modified_base 21: mod_base = OTHER; note = 2'-O-methyluridine-3'-phosphorothioate
  modified_base 22: mod_base = OTHER; note = 2'-O-methyladenosine-3'-phosphorothioate
  modified_base 23: mod_base = OTHER; note = 2'-O-methylguanosine
atgaagacctgaaaaatacttag

SEQ ID NO: 4247 - RNA, 23 nt, synthetic construct
  source 1..23: mol_type = other RNA
  modified_base 1: mod_base = OTHER; note = 2'-O-methyladenosine-3'-phosphorothioate
  modified_base 2: mod_base = OTHER; note = 2'-deoxy-2'-fluorouridine-3'-phosphorothioate
  modified_base 3: mod_base = OTHER; note = 2'-O-methyluridine-3'-phosphate
  modified_base 4: mod_base = OTHER; note = 2'-O-methyladenosine-3'-phosphate
  modified_base 5: mod_base = OTHER; note = 2'-O-methylcytidine-3'-phosphate
  modified_base 6: mod_base = OTHER; note = 2'-deoxy-2'-fluorouridine-3'-phosphate
  modified_base 7: mod_base = OTHER; note = 2'-O-methyluridine-3'-phosphate
  modified_base 8: mod_base = OTHER; note = 2'-deoxy-2'-fluorouridine-3'-phosphate
  modified_base 9: mod_base = OTHER; note = 2'-deoxy-2'-fluoroguanosine-3'-phosphate
  modified_base 10: mod_base = OTHER; note = 2'-O-methyladenosine-3'-phosphate
  modified_base 11: mod_base = OTHER; note = 2'-O-methyluridine-3'-phosphate
  modified_base 12: mod_base = OTHER; note = 2'-O-methyladenosine-3'-phosphate
  modified_base 13: mod_base = OTHER; note = 2'-O-methylcytidine-3'-phosphate
  modified_base 14: mod_base = OTHER; note = 2'-deoxy-2'-fluorouridine-3'-phosphate
  modified_base 15: mod_base = OTHER; note = 2'-O-methyluridine-3'-phosphate
  modified_base 16: mod_base = OTHER; note = 2'-deoxy-2'-fluoroguanosine-3'-phosphate
  modified_base 17: mod_base = OTHER; note = 2'-O-methylguanosine-3'-phosphate
  modified_base 18: mod_base = OTHER; note = 2'-O-methyluridine-3'-phosphate
  modified_base 19: mod_base = OTHER; note = 2'-O-methylguanosine-3'-phosphate
  modified_base 20: mod_base = OTHER; note = 2'-O-methyladenosine-3'-phosphate
  modified_base 21: mod_base = OTHER; note = 2'-O-methyladenosine-3'-phosphorothioate
  modified_base 22: mod_base = OTHER; note = 2'-O-methylguanosine-3'-phosphorothioate
  modified_base 23: mod_base = OTHER; note = 2'-O-methyladenosine
attactttgatacttggtgaaga

SEQ ID NO: 4248 - RNA, 23 nt, synthetic construct
  source 1..23: mol_type = other RNA
  modified_base 1: mod_base = OTHER; note = 2'-O-methyladenosine-3'-phosphorothioate
  modified_base 2: mod_base = OTHER; note = 2'-deoxy-2'-fluorocytidine-3'-phosphorothioate
  modified_base 3: mod_base = OTHER; note = 2'-O-methyluridine-3'-phosphate
  modified_base 4: mod_base = OTHER; note = 2'-O-methyluridine-3'-phosphate
  modified_base 5: mod_base = OTHER; note = 2'-O-methylcytidine-3'-phosphate
  modified_base 6: mod_base = OTHER; note = 2'-deoxy-2'-fluoroadenosine-3'-phosphate
  modified_base 7: mod_base = OTHER; note = 2'-O-methyluridine-3'-phosphate
  modified_base 8: mod_base = OTHER; note = 2'-deoxy-2'-fluorouridine-3'-phosphate
  modified_base 9: mod_base = OTHER; note = 2'-deoxy-2'-fluorouridine-3'-phosphate
  modified_base 10: mod_base = OTHER; note = 2'-O-methylguanosine-3'-phosphate
  modified_base 11: mod_base = OTHER; note = 2'-O-methyluridine-3'-phosphate
  modified_base 12: mod_base = OTHER; note = 2'-O-methylguanosine-3'-phosphate
  modified_base 13: mod_base = OTHER; note = 2'-O-methyluridine-3'-phosphate
  modified_base 14: mod_base = OTHER; note = 2'-deoxy-2'-fluorouridine-3'-phosphate
  modified_base 15: mod_base = OTHER; note = 2'-O-methyladenosine-3'-phosphate
  modified_base 16: mod_base = OTHER; note = 2'-deoxy-2'-fluorouridine-3'-phosphate
  modified_base 17: mod_base = OTHER; note = 2'-O-methyluridine-3'-phosphate
  modified_base 18: mod_base = OTHER; note = 2'-O-methyladenosine-3'-phosphate
  modified_base 19: mod_base = OTHER; note = 2'-O-methylcytidine-3'-phosphate
  modified_base 20: mod_base = OTHER; note = 2'-O-methyluridine-3'-phosphate
  modified_base 21: mod_base = OTHER; note = 2'-O-methyluridine-3'-phosphorothioate
  modified_base 22: mod_base = OTHER; note = 2'-O-methyluridine-3'-phosphorothioate
  modified_base 23: mod_base = OTHER; note = 2'-O-methylguanosine
acttcatttgtgttattactttg

SEQ ID NO: 4249 - RNA, 23 nt, synthetic construct
  source 1..23: mol_type = other RNA
  modified_base 1: mod_base = OTHER; note = 2'-O-methyladenosine-3'-phosphorothioate
  modified_base 2: mod_base = OTHER; note = 2'-deoxy-2'-fluorouridine-3'-phosphorothioate
  modified_base 3: mod_base = OTHER; note = 2'-O-methyluridine-3'-phosphate
  modified_base 4: mod_base = OTHER; note = 2'-O-methylguanosine-3'-phosphate
  modified_base 5: mod_base = OTHER; note = 2'-O-methyladenosine-3'-phosphate
  modified_base 6: mod_base = OTHER; note = 2'-deoxy-2'-fluoroadenosine-3'-phosphate
  modified_base 7: mod_base = OTHER; note = 2'-O-methyluridine-3'-phosphate
  modified_base 8: mod_base = OTHER; note = 2'-deoxy-2'-fluoroadenosine-3'-phosphate
  modified_base 9: mod_base = OTHER; note = 2'-deoxy-2'-fluoroadenosine-3'-phosphate
  modified_base 10: mod_base = OTHER; note = 2'-O-methyluridine-3'-phosphate
  modified_base 11: mod_base = OTHER; note = 2'-O-methylguanosine-3'-phosphate
  modified_base 12: mod_base = OTHER; note = 2'-O-methyladenosine-3'-phosphate
  modified_base 13: mod_base = OTHER; note = 2'-O-methylcytidine-3'-phosphate
  modified_base 14: mod_base = OTHER; note = 2'-deoxy-2'-fluoroadenosine-3'-phosphate
  modified_base 15: mod_base = OTHER; note = 2'-O-methylcytidine-3'-phosphate
  modified_base 16: mod_base = OTHER; note = 2'-deoxy-2'-fluorouridine-3'-phosphate
  modified_base 17: mod_base = OTHER; note = 2'-O-methyluridine-3'-phosphate
  modified_base 18: mod_base = OTHER; note = 2'-O-methylcytidine-3'-phosphate
  modified_base 19: mod_base = OTHER; note = 2'-O-methyladenosine-3'-phosphate
  modified_base 20: mod_base = OTHER; note = 2'-O-methyluridine-3'-phosphate
  modified_base 21: mod_base = OTHER; note = 2'-O-methyluridine-3'-phosphorothioate
  modified_base 22: mod_base = OTHER; note = 2'-O-methyluridine-3'-phosphorothioate
  modified_base 23: mod_base = OTHER; note = 2'-O-methylguanosine
attgaataatgacacttcatttg

SEQ ID NO: 4250 - RNA, 23 nt, synthetic construct
  source 1..23: mol_type = other RNA
  modified_base 1: mod_base = OTHER; note = 2'-O-methyladenosine-3'-phosphorothioate
  modified_base 2: mod_base = OTHER; note = 2'-deoxy-2'-fluoroguanosine-3'-phosphorothioate
  modified_base 3: mod_base = OTHER; note = 2'-O-methyladenosine-3'-phosphate
  modified_base 4: mod_base = OTHER; note = 2'-O-methylguanosine-3'-phosphate
  modified_base 5: mod_base = OTHER; note = 2'-O-methyluridine-3'-phosphate
  modified_base 6: mod_base = OTHER; note = 2'-deoxy-2'-fluorocytidine-3'-phosphate
  modified_base 7: mod_base = OTHER; note = 2'-O-methyladenosine-3'-phosphate
  modified_base 8: mod_base = OTHER; note = 2'-deoxy-2'-fluoroguanosine-3'-phosphate
  modified_base 9: mod_base = OTHER; note = 2'-deoxy-2'-fluorouridine-3'-phosphate
  modified_base 10: mod_base = OTHER; note = 2'-O-methylguanosine-3'-phosphate
  modified_base 11: mod_base = OTHER; note = 2'-O-methylguanosine-3'-phosphate
  modified_base 12: mod_base = OTHER; note = 2'-O-methyladenosine-3'-phosphate
  modified_base 13: mod_base = OTHER; note = 2'-O-methylcytidine-3'-phosphate
  modified_base 14: mod_base = OTHER; note = 2'-deoxy-2'-fluorouridine-3'-phosphate
  modified_base 15: mod_base = OTHER; note = 2'-O-methyladenosine-3'-phosphate
  modified_base 16: mod_base = OTHER; note = 2'-deoxy-2'-fluorouridine-3'-phosphate
  modified_base 17: mod_base = OTHER; note = 2'-O-methyluridine-3'-phosphate
  modified_base 18: mod_base = OTHER; note = 2'-O-methyluridine-3'-phosphate
  modified_base 19: mod_base = OTHER; note = 2'-O-methyluridine-3'-phosphate
  modified_base 20: mod_base = OTHER; note = 2'-O-methylguanosine-3'-phosphate
  modified_base 21: mod_base = OTHER; note = 2'-O-methyladenosine-3'-phosphorothioate
  modified_base 22: mod_base = OTHER; note = 2'-O-methyladenosine-3'-phosphorothioate
  modified_base 23: mod_base = OTHER; note = 2'-O-methyluridine
agagtcagtggactattttgaat

SEQ ID NO: 4251 - RNA, 23 nt, synthetic construct
  source 1..23: mol_type = other RNA
  modified_base 1: mod_base = OTHER; note = 2'-O-methyladenosine-3'-phosphorothioate
  modified_base 2: mod_base = OTHER; note = 2'-deoxy-2'-fluoroadenosine-3'-phosphorothioate
  modified_base 3: mod_base = OTHER; note = 2'-O-methyluridine-3'-phosphate
  modified_base 4: mod_base = OTHER; note = 2'-O-methyladenosine-3'-phosphate
  modified_base 5: mod_base = OTHER; note = 2'-O-methyladenosine-3'-phosphate
  modified_base 6: mod_base = OTHER; note = 2'-deoxy-2'-fluoroguanosine-3'-phosphate
  modified_base 7: mod_base = OTHER; note = 2'-O-methyladenosine-3'-phosphate
  modified_base 8: mod_base = OTHER; note = 2'-deoxy-2'-fluorouridine-3'-phosphate
  modified_base 9: mod_base = OTHER; note = 2'-deoxy-2'-fluoroadenosine-3'-phosphate
  modified_base 10: mod_base = OTHER; note = 2'-O-methyladenosine-3'-phosphate
  modified_base 11: mod_base = OTHER; note = 2'-O-methylcytidine-3'-phosphate
  modified_base 12: mod_base = OTHER; note = 2'-O-methyladenosine-3'-phosphate
  modified_base 13: mod_base = OTHER; note = 2'-O-methylguanosine-3'-phosphate
  modified_base 14: mod_base = OTHER; note = 2'-deoxy-2'-fluoroadenosine-3'-phosphate
  modified_base 15: mod_base = OTHER; note = 2'-O-methyluridine-3'-phosphate
  modified_base 16: mod_base = OTHER; note = 2'-deoxy-2'-fluoroguanosine-3'-phosphate
  modified_base 17: mod_base = OTHER; note = 2'-O-methyluridine-3'-phosphate
  modified_base 18: mod_base = OTHER; note = 2'-O-methylguanosine-3'-phosphate
  modified_base 19: mod_base = OTHER; note = 2'-O-methyladenosine-3'-phosphate
  modified_base 20: mod_base = OTHER; note = 2'-O-methylguanosine-3'-phosphate
  modified_base 21: mod_base = OTHER; note = 2'-O-methylguanosine-3'-phosphorothioate
  modified_base 22: mod_base = OTHER; note = 2'-O-methyladenosine-3'-phosphorothioate
  modified_base 23: mod_base = OTHER; note = 2'-O-methylguanosine
aataagataacagatgtgaggag

SEQ ID NO: 4252 - RNA, 23 nt, synthetic construct
  source 1..23: mol_type = other RNA
  modified_base 1: mod_base = OTHER; note = 2'-O-methyladenosine-3'-phosphorothioate
  modified_base 2: mod_base = OTHER; note = 2'-deoxy-2'-fluoroguanosine-3'-phosphorothioate
  modified_base 3: mod_base = OTHER; note = 2'-O-methyladenosine-3'-phosphate
  modified_base 4: mod_base = OTHER; note = 2'-O-methyluridine-3'-phosphate
  modified_base 5: mod_base = OTHER; note = 2'-O-methyladenosine-3'-phosphate
  modified_base 6: mod_base = OTHER; note = 2'-deoxy-2'-fluoroguanosine-3'-phosphate
  modified_base 7: mod_base = OTHER; note = 2'-O-methyluridine-3'-phosphate
  modified_base 8: mod_base = OTHER; note = 2'-deoxy-2'-fluorouridine-3'-phosphate
  modified_base 9: mod_base = OTHER; note = 2'-deoxy-2'-fluoroadenosine-3'-phosphate
  modified_base 10: mod_base = OTHER; note = 2'-O-methylcytidine-3'-phosphate
  modified_base 11: mod_base = OTHER; note = 2'-O-methyluridine-3'-phosphate
  modified_base 12: mod_base = OTHER; note = 2'-O-methyladenosine-3'-phosphate
  modified_base 13: mod_base = OTHER; note = 2'-O-methylcytidine-3'-phosphate
  modified_base 14: mod_base = OTHER; note = 2'-deoxy-2'-fluoroadenosine-3'-phosphate
  modified_base 15: mod_base = OTHER; note = 2'-O-methyladenosine-3'-phosphate
  modified_base 16: mod_base = OTHER; note = 2'-deoxy-2'-fluoroadenosine-3'-phosphate
  modified_base 17: mod_base = OTHER; note = 2'-O-methyluridine-3'-phosphate
  modified_base 18: mod_base = OTHER; note = 2'-O-methyladenosine-3'-phosphate
  modified_base 19: mod_base = OTHER; note = 2'-O-methylguanosine-3'-phosphate
  modified_base 20: mod_base = OTHER; note = 2'-O-methyluridine-3'-phosphate
  modified_base 21: mod_base = OTHER; note = 2'-O-methyluridine-3'-phosphorothioate
  modified_base 22: mod_base = OTHER; note = 2'-O-methylcytidine-3'-phosphorothioate
  modified_base 23: mod_base = OTHER; note = 2'-O-methyluridine
agatagttactacaaatagttct

SEQ ID NO: 4253 - RNA, 23 nt, synthetic construct
  source 1..23: mol_type = other RNA
  modified_base 1: mod_base = OTHER; note = 2'-O-methyladenosine-3'-phosphorothioate
  modified_base 2: mod_base = OTHER; note = 2'-deoxy-2'-fluorouridine-3'-phosphorothioate
  modified_base 3: mod_base = OTHER; note = 2'-O-methyluridine-3'-phosphate
  modified_base 4: mod_base = OTHER; note = 2'-O-methyladenosine-3'-phosphate
  modified_base 5: mod_base = OTHER; note = 2'-O-methylguanosine-3'-phosphate
  modified_base 6: mod_base = OTHER; note = 2'-deoxy-2'-fluoroadenosine-3'-phosphate
  modified_base 7: mod_base = OTHER; note = 2'-O-methyladenosine-3'-phosphate
  modified_base 8: mod_base = OTHER; note = 2'-deoxy-2'-fluorouridine-3'-phosphate
  modified_base 9: mod_base = OTHER; note = 2'-deoxy-2'-fluoroguanosine-3'-phosphate
  modified_base 10: mod_base = OTHER; note = 2'-O-methyluridine-3'-phosphate
  modified_base 11: mod_base = OTHER; note = 2'-O-methyladenosine-3'-phosphate
  modified_base 12: mod_base = OTHER; note = 2'-O-methylguanosine-3'-phosphate
  modified_base 13: mod_base = OTHER; note = 2'-O-methyladenosine-3'-phosphate
  modified_base 14: mod_base = OTHER; note = 2'-deoxy-2'-fluorouridine-3'-phosphate
  modified_base 15: mod_base = OTHER; note = 2'-O-methyluridine-3'-phosphate
  modified_base 16: mod_base = OTHER; note = 2'-deoxy-2'-fluorocytidine-3'-phosphate
  modified_base 17: mod_base = OTHER; note = 2'-O-methyluridine-3'-phosphate
  modified_base 18: mod_base = OTHER; note = 2'-O-methylguanosine-3'-phosphate
  modified_base 19: mod_base = OTHER; note = 2'-O-methyladenosine-3'-phosphate
  modified_base 20: mod_base = OTHER; note = 2'-O-methyluridine-3'-phosphate
  modified_base 21: mod_base = OTHER; note = 2'-O-methyladenosine-3'-phosphorothioate
  modified_base 22: mod_base = OTHER; note = 2'-O-methylguanosine-3'-phosphorothioate
  modified_base 23: mod_base = OTHER; note = 2'-O-methyluridine
attagaatgtagattctgatagt

SEQ ID NO: 4254 - RNA, 23 nt, synthetic construct
  source 1..23: mol_type = other RNA
  modified_base 1: mod_base = OTHER; note = 2'-O-methyladenosine-3'-phosphorothioate
  modified_base 2: mod_base = OTHER; note = 2'-deoxy-2'-fluoroguanosine-3'-phosphorothioate
  modified_base 3: mod_base = OTHER; note = 2'-O-methyluridine-3'-phosphate
  modified_base 4: mod_base = OTHER; note = 2'-O-methylguanosine-3'-phosphate
  modified_base 5: mod_base = OTHER; note = 2'-O-methylguanosine-3'-phosphate
  modified_base 6: mod_base = OTHER; note = 2'-deoxy-2'-fluorocytidine-3'-phosphate
  modified_base 7: mod_base = OTHER; note = 2'-O-methyladenosine-3'-phosphate
  modified_base 8: mod_base = OTHER; note = 2'-deoxy-2'-fluorouridine-3'-phosphate
  modified_base 9: mod_base = OTHER; note = 2'-deoxy-2'-fluoroadenosine-3'-phosphate
  modified_base 10: mod_base = OTHER; note = 2'-O-methylguanosine-3'-phosphate
  modified_base 11: mod_base = OTHER; note = 2'-O-methyladenosine-3'-phosphate
  modified_base 12: mod_base = OTHER; note = 2'-O-methyladenosine-3'-phosphate
  modified_base 13: mod_base = OTHER; note = 2'-O-methyladenosine-3'-phosphate
  modified_base 14: mod_base = OTHER; note = 2'-deoxy-2'-fluoroadenosine-3'-phosphate
  modified_base 15: mod_base = OTHER; note = 2'-O-methyladenosine-3'-phosphate
  modified_base 16: mod_base = OTHER; note = 2'-deoxy-2'-fluoroadenosine-3'-phosphate
  modified_base 17: mod_base = OTHER; note = 2'-O-methyluridine-3'-phosphate
  modified_base 18: mod_base = OTHER; note = 2'-O-methyladenosine-3'-phosphate
  modified_base 19: mod_base = OTHER; note = 2'-O-methylcytidine-3'-phosphate
  modified_base 20: mod_base = OTHER; note = 2'-O-methyladenosine-3'-phosphate
  modified_base 21: mod_base = OTHER; note = 2'-O-methyladenosine-3'-phosphorothioate
  modified_base 22: mod_base = OTHER; note = 2'-O-methyluridine-3'-phosphorothioate
  modified_base 23: mod_base = OTHER; note = 2'-O-methyluridine
agtggcatagaaaaaatacaatt

SEQ ID NO: 4255 - RNA, 23 nt, synthetic construct
  source 1..23: mol_type = other RNA
  modified_base 1: mod_base = OTHER; note = 2'-O-methyladenosine-3'-phosphorothioate
  modified_base 2: mod_base = OTHER; note = 2'-deoxy-2'-fluoroadenosine-3'-phosphorothioate
  modified_base 3: mod_base = OTHER; note = 2'-O-methyladenosine-3'-phosphate
  modified_base 4: mod_base = OTHER; note = 2'-O-methyladenosine-3'-phosphate
  modified_base 5: mod_base = OTHER; note = 2'-O-methyladenosine-3'-phosphate
  modified_base 6: mod_base = OTHER; note = 2'-deoxy-2'-fluoroguanosine-3'-phosphate
  modified_base 7: mod_base = OTHER; note = 2'-O-methyladenosine-3'-phosphate
  modified_base 8: mod_base = OTHER; note = 2'-deoxy-2'-fluorouridine-3'-phosphate
  modified_base 9: mod_base = OTHER; note = 2'-deoxy-2'-fluoroguanosine-3'-phosphate
  modified_base 10: mod_base = OTHER; note = 2'-O-methyluridine-3'-phosphate
  modified_base 11: mod_base = OTHER; note = 2'-O-methyluridine-3'-phosphate
  modified_base 12: mod_base = OTHER; note = 2'-O-methyladenosine-3'-phosphate
  modified_base 13: mod_base = OTHER; note = 2'-O-methyladenosine-3'-phosphate
  modified_base 14: mod_base = OTHER; note = 2'-deoxy-2'-fluorouridine-3'-phosphate
  modified_base 15: mod_base = OTHER; note = 2'-O-methylguanosine-3'-phosphate
  modified_base 16: mod_base = OTHER; note = 2'-deoxy-2'-fluorouridine-3'-phosphate
  modified_base 17: mod_base = OTHER; note = 2'-O-methylguanosine-3'-phosphate
  modified_base 18: mod_base = OTHER; note = 2'-O-methylguanosine-3'-phosphate
  modified_base 19: mod_base = OTHER; note = 2'-O-methylcytidine-3'-phosphate
  modified_base 20: mod_base = OTHER; note = 2'-O-methyladenosine-3'-phosphate
  modified_base 21: mod_base = OTHER; note = 2'-O-methyluridine-3'-phosphorothioate
  modified_base 22: mod_base = OTHER; note = 2'-O-methyladenosine-3'-phosphorothioate
  modified_base 23: mod_base = OTHER; note = 2'-O-methylguanosine
aaaaagatgttaatgtggcatag

SEQ ID NO: 4256 - RNA, 23 nt, synthetic construct
  source 1..23: mol_type = other RNA
  modified_base 1: mod_base = OTHER; note = 2'-O-methyladenosine-3'-phosphorothioate
  modified_base 2: mod_base = OTHER; note = 2'-deoxy-2'-fluorouridine-3'-phosphorothioate
  modified_base 3: mod_base = OTHER; note = 2'-O-methyluridine-3'-phosphate
  modified_base 4: mod_base = OTHER; note = 2'-O-methylcytidine-3'-phosphate
  modified_base 5: mod_base = OTHER; note = 2'-O-methyluridine-3'-phosphate
  modified_base 6: mod_base = OTHER; note = 2'-deoxy-2'-fluorocytidine-3'-phosphate
  modified_base 7: mod_base = OTHER; note = 2'-O-methyladenosine-3'-phosphate
  modified_base 8: mod_base = OTHER; note = 2'-deoxy-2'-fluorouridine-3'-phosphate
  modified_base 9: mod_base = OTHER; note = 2'-deoxy-2'-fluorocytidine-3'-phosphate
  modified_base 10: mod_base = OTHER; note = 2'-O-methyladenosine-3'-phosphate
  modified_base 11: mod_base = OTHER; note = 2'-O-methyladenosine-3'-phosphate
  modified_base 12: mod_base = OTHER; note = 2'-O-methylcytidine-3'-phosphate
  modified_base 13: mod_base = OTHER; note = 2'-O-methyluridine-3'-phosphate
  modified_base 14: mod_base = OTHER; note = 2'-deoxy-2'-fluorouridine-3'-phosphate
  modified_base 15: mod_base = OTHER; note = 2'-O-methyluridine-3'-phosphate
  modified_base 16: mod_base = OTHER; note = 2'-deoxy-2'-fluoroadenosine-3'-phosphate
  modified_base 17: mod_base = OTHER; note = 2'-O-methyladenosine-3'-phosphate
  modified_base 18: mod_base = OTHER; note = 2'-O-methyladenosine-3'-phosphate
  modified_base 19: mod_base = OTHER; note = 2'-O-methyladenosine-3'-phosphate
  modified_base 20: mod_base = OTHER; note = 2'-O-methylguanosine-3'-phosphate
  modified_base 21: mod_base = OTHER; note = 2'-O-methyladenosine-3'-phosphorothioate
  modified_base 22: mod_base = OTHER; note = 2'-O-methyluridine-3'-phosphorothioate
  modified_base 23: mod_base = OTHER; note = 2'-O-methylguanosine
attctcatcaactttaaaagatg

SEQ ID NO: 4257 - RNA, 23 nt, synthetic construct
  source 1..23: mol_type = other RNA
  modified_base 1: mod_base = OTHER; note = 2'-O-methyladenosine-3'-phosphorothioate
  modified_base 2: mod_base = OTHER; note = 2'-deoxy-2'-fluorouridine-3'-phosphorothioate
  modified_base 3: mod_base = OTHER; note = 2'-O-methyluridine-3'-phosphate
  modified_base 4: mod_base = OTHER; note = 2'-O-methyluridine-3'-phosphate
  modified_base 5: mod_base = OTHER; note = 2'-O-methylcytidine-3'-phosphate
  modified_base 6: mod_base = OTHER; note = 2'-deoxy-2'-fluorocytidine-3'-phosphate
  modified_base 7: mod_base = OTHER; note = 2'-O-methyladenosine-3'-phosphate
  modified_base 8: mod_base = OTHER; note = 2'-deoxy-2'-fluorouridine-3'-phosphate
  modified_base 9: mod_base = OTHER; note = 2'-deoxy-2'-fluoroadenosine-3'-phosphate
  modified_base 10: mod_base = OTHER; note = 2'-O-methylcytidine-3'-phosphate
  modified_base 11: mod_base = OTHER; note = 2'-O-methyluridine-3'-phosphate
  modified_base 12: mod_base = OTHER; note = 2'-O-methyluridine-3'-phosphate
  modified_base 13: mod_base = OTHER; note = 2'-O-methylguanosine-3'-phosphate
  modified_base 14: mod_base = OTHER; note = 2'-deoxy-2'-fluoroadenosine-3'-phosphate
  modified_base 15: mod_base = OTHER; note = 2'-O-methyluridine-3'-phosphate
  modified_base 16: mod_base = OTHER; note = 2'-deoxy-2'-fluorouridine-3'-phosphate
  modified_base 17: mod_base = OTHER; note = 2'-O-methylcytidine-3'-phosphate
  modified_base 18: mod_base = OTHER; note = 2'-O-methyluridine-3'-phosphate
  modified_base 19: mod_base = OTHER; note = 2'-O-methylcytidine-3'-phosphate
  modified_base 20: mod_base = OTHER; note = 2'-O-methyladenosine-3'-phosphate
  modified_base 21: mod_base = OTHER; note = 2'-O-methyluridine-3'-phosphorothioate
  modified_base 22: mod_base = OTHER; note = 2'-O-methylcytidine-3'-phosphorothioate
  modified_base 23: mod_base = OTHER; note = 2'-O-methyladenosine
atttccatacttgattctcatca

SEQ ID NO: 4258 - RNA, 23 nt, synthetic construct
  source 1..23: mol_type = other RNA
  modified_base 1: mod_base = OTHER; note = 2'-O-methyladenosine-3'-phosphorothioate
  modified_base 2: mod_base = OTHER; note = 2'-deoxy-2'-fluoroguanosine-3'-phosphorothioate
  modified_base 3: mod_base = OTHER; note = 2'-O-methyluridine-3'-phosphate
  modified_base 4: mod_base = OTHER; note = 2'-O-methyladenosine-3'-phosphate
  modified_base 5: mod_base = OTHER; note = 2'-O-methyluridine-3'-phosphate
  modified_base 6: mod_base = OTHER; note = 2'-deoxy-2'-fluoroguanosine-3'-phosphate
  modified_base 7: mod_base = OTHER; note = 2'-O-methylguanosine-3'-phosphate
  modified_base 8: mod_base = OTHER; note = 2'-deoxy-2'-fluorocytidine-3'-phosphate
  modified_base 9: mod_base = OTHER; note = 2'-deoxy-2'-fluorocytidine-3'-phosphate
  modified_base 10: mod_base = OTHER; note = 2'-O-methyluridine-3'-phosphate
  modified_base 11: mod_base = OTHER; note = 2'-O-methyluridine-3'-phosphate
  modified_base 12: mod_base = OTHER; note = 2'-O-methyladenosine-3'-phosphate
  modified_base 13: mod_base = OTHER; note = 2'-O-methylcytidine-3'-phosphate
  modified_base 14: mod_base = OTHER; note = 2'-deoxy-2'-fluorouridine-3'-phosphate
  modified_base 15: mod_base = OTHER; note = 2'-O-methyluridine-3'-phosphate
  modified_base 16: mod_base = OTHER; note = 2'-deoxy-2'-fluorouridine-3'-phosphate
  modified_base 17: mod_base = OTHER; note = 2'-O-methyluridine-3'-phosphate
  modified_base 18: mod_base = OTHER; note = 2'-O-methylcytidine-3'-phosphate
  modified_base 19: mod_base = OTHER; note = 2'-O-methylcytidine-3'-phosphate
  modified_base 20: mod_base = OTHER; note = 2'-O-methyladenosine-3'-phosphate
  modified_base 21: mod_base = OTHER; note = 2'-O-methyluridine-3'-phosphorothioate
  modified_base 22: mod_base = OTHER; note = 2'-O-methyladenosine-3'-phosphorothioate
  modified_base 23: mod_base = OTHER; note = 2'-O-methylcytidine
agtatggccttacttttccatac

SEQ ID NO: 4259 - RNA, 23 nt, synthetic construct
  source 1..23: mol_type = other RNA
  modified_base 1: mod_base = OTHER; note = 2'-O-methyladenosine-3'-phosphorothioate
  modified_base 2: mod_base = OTHER; note = 2'-deoxy-2'-fluorouridine-3'-phosphorothioate
  modified_base 3: mod_base = OTHER; note = 2'-O-methyluridine-3'-phosphate
  modified_base 4: mod_base = OTHER; note = 2'-O-methyladenosine-3'-phosphate
  modified_base 5: mod_base = OTHER; note = 2'-O-methyluridine-3'-phosphate
  modified_base 6: mod_base = OTHER; note = 2'-deoxy-2'-fluorouridine-3'-phosphate
  modified_base 7: mod_base = OTHER; note = 2'-O-methyladenosine-3'-phosphate
  modified_base 8: mod_base = OTHER; note = 2'-deoxy-2'-fluorouridine-3'-phosphate
  modified_base 9: mod_base = OTHER; note = 2'-deoxy-2'-fluoroguanosine-3'-phosphate
  modified_base 10: mod_base = OTHER; note = 2'-O-methyluridine-3'-phosphate
  modified_base 11: mod_base = OTHER; note = 2'-O-methyladenosine-3'-phosphate
  modified_base 12: mod_base = OTHER; note = 2'-O-methyladenosine-3'-phosphate
  modified_base 13: mod_base = OTHER; note = 2'-O-methylguanosine-3'-phosphate
  modified_base 14: mod_base = OTHER; note = 2'-deoxy-2'-fluoroadenosine-3'-phosphate
  modified_base 15: mod_base = OTHER; note = 2'-O-methylguanosine-3'-phosphate
  modified_base 16: mod_base = OTHER; note = 2'-deoxy-2'-fluorouridine-3'-phosphate
  modified_base 17: mod_base = OTHER; note = 2'-O-methyladenosine-3'-phosphate
  modified_base 18: mod_base = OTHER; note = 2'-O-methyluridine-3'-phosphate
  modified_base 19: mod_base = OTHER; note = 2'-O-methylguanosine-3'-phosphate
  modified_base 20: mod_base = OTHER; note = 2'-O-methylguanosine-3'-phosphate
  modified_base 21: mod_base = OTHER; note = 2'-O-methylcytidine-3'-phosphorothioate
  modified_base 22: mod_base = OTHER; note = 2'-O-methylcytidine-3'-phosphorothioate
  modified_base 23: mod_base = OTHER; note = 2'-O-methyluridine
attattatgtaagagtatggcct

SEQ ID NO: 4260 - RNA, 23 nt, synthetic construct
  source 1..23: mol_type = other RNA
  modified_base 1: mod_base = OTHER; note = 2'-O-methyladenosine-3'-phosphorothioate
  modified_base 2: mod_base = OTHER; note = 2'-deoxy-2'-fluoroguanosine-3'-phosphorothioate
  modified_base 3: mod_base = OTHER; note = 2'-O-methyluridine-3'-phosphate
  modified_base 4: mod_base = OTHER; note = 2'-O-methyladenosine-3'-phosphate
  modified_base 5: mod_base = OTHER; note = 2'-O-methylcytidine-3'-phosphate
  modified_base 6: mod_base = OTHER; note = 2'-deoxy-2'-fluorouridine-3'-phosphate
  modified_base 7: mod_base = OTHER; note = 2'-O-methyladenosine-3'-phosphate
  modified_base 8: mod_base = OTHER; note = 2'-deoxy-2'-fluoroguanosine-3'-phosphate
  modified_base 9: mod_base = OTHER; note = 2'-deoxy-2'-fluoroadenosine-3'-phosphate
  modified_base 10: mod_base = OTHER; note = 2'-O-methyladenosine-3'-phosphate
  modified_base 11: mod_base = OTHER; note = 2'-O-methyluridine-3'-phosphate
  modified_base 12: mod_base = OTHER; note = 2'-O-methyluridine-3'-phosphate
  modified_base 13: mod_base = OTHER; note = 2'-O-methylcytidine-3'-phosphate
  modified_base 14: mod_base = OTHER; note = 2'-deoxy-2'-fluorouridine-3'-phosphate
  modified_base 15: mod_base = OTHER; note = 2'-O-methylguanosine-3'-phosphate
  modified_base 16: mod_base = OTHER; note = 2'-deoxy-2'-fluorouridine-3'-phosphate
  modified_base 17: mod_base = OTHER; note = 2'-O-methylguanosine-3'-phosphate
  modified_base 18: mod_base = OTHER; note = 2'-O-methyladenosine-3'-phosphate
  modified_base 19: mod_base = OTHER; note = 2'-O-methyluridine-3'-phosphate
  modified_base 20: mod_base = OTHER; note = 2'-O-methyluridine-3'-phosphate
  modified_base 21: mod_base = OTHER; note = 2'-O-methylcytidine-3'-phosphorothioate
  modified_base 22: mod_base = OTHER; note = 2'-O-methyluridine-3'-phosphorothioate
  modified_base 23: mod_base = OTHER; note = 2'-O-methyluridine
agtactagaattctgtgattctt

SEQ ID NO: 4261 - RNA, 23 nt, synthetic construct
  source 1..23: mol_type = other RNA
  modified_base 1: mod_base = OTHER; note = 2'-O-methyladenosine-3'-phosphorothioate
  modified_base 2: mod_base = OTHER; note = 2'-deoxy-2'-fluoroguanosine-3'-phosphorothioate
  modified_base 3: mod_base = OTHER; note = 2'-O-methyladenosine-3'-phosphate
  modified_base 4: mod_base = OTHER; note = 2'-O-methyluridine-3'-phosphate
  modified_base 5: mod_base = OTHER; note = 2'-O-methyluridine-3'-phosphate
  modified_base 6: mod_base = OTHER; note = 2'-deoxy-2'-fluorouridine-3'-phosphate
  modified_base 7: mod_base = OTHER; note = 2'-O-methyladenosine-3'-phosphate
  modified_base 8: mod_base = OTHER; note = 2'-deoxy-2'-fluorouridine-3'-phosphate
  modified_base 9: mod_base = OTHER; note = 2'-deoxy-2'-fluoroguanosine-3'-phosphate
  modified_base 10: mod_base = OTHER; note = 2'-O-methyladenosine-3'-phosphate
  modified_base 11: mod_base = OTHER; note = 2'-O-methyluridine-3'-phosphate
  modified_base 12: mod_base = OTHER; note = 2'-O-methyluridine-3'-phosphate
  modified_base 13: mod_base = OTHER; note = 2'-O-methyluridine-3'-phosphate
  modified_base 14: mod_base = OTHER; note = 2'-deoxy-2'-fluoroadenosine-3'-phosphate
  modified_base 15: mod_base = OTHER; note = 2'-O-methylcytidine-3'-phosphate
  modified_base 16: mod_base = OTHER; note = 2'-deoxy-2'-fluorocytidine-3'-phosphate
  modified_base 17: mod_base = OTHER; note = 2'-O-methyluridine-3'-phosphate
  modified_base 18: mod_base = OTHER; note = 2'-O-methyladenosine-3'-phosphate
  modified_base 19: mod_base = OTHER; note = 2'-O-methylcytidine-3'-phosphate
  modified_base 20: mod_base = OTHER; note = 2'-O-methyladenosine-3'-phosphate
  modified_base 21: mod_base = OTHER; note = 2'-O-methyluridine-3'-phosphorothioate
  modified_base 22: mod_base = OTHER; note = 2'-O-methylguanosine-3'-phosphorothioate
  modified_base 23: mod_base = OTHER; note = 2'-O-methyluridine
agatttatgatttacctacatgt

SEQ ID NO: 4262 - RNA, 23 nt, synthetic construct
  source 1..23: mol_type = other RNA
  modified_base 1: mod_base = OTHER; note = 2'-O-methyladenosine-3'-phosphorothioate
  modified_base 2: mod_base = OTHER; note = 2'-deoxy-2'-fluoroguanosine-3'-phosphorothioate
  modified_base 3: mod_base = OTHER; note = 2'-O-methyladenosine-3'-phosphate
  modified_base 4: mod_base = OTHER; note = 2'-O-methyluridine-3'-phosphate
  modified_base 5: mod_base = OTHER; note = 2'-O-methylcytidine-3'-phosphate
  modified_base 6: mod_base = OTHER; note = 2'-deoxy-2'-fluoroadenosine-3'-phosphate
  modified_base 7: mod_base = OTHER; note = 2'-O-methyluridine-3'-phosphate
  modified_base 8: mod_base = OTHER; note = 2'-deoxy-2'-fluoroadenosine-3'-phosphate
  modified_base 9: mod_base = OTHER; note = 2'-deoxy-2'-fluorouridine-3'-phosphate
  modified_base 10: mod_base = OTHER; note = 2'-O-methylguanosine-3'-phosphate
  modified_base 11: mod_base = OTHER; note = 2'-O-methyluridine-3'-phosphate
  modified_base 12: mod_base = OTHER; note = 2'-O-methylcytidine-3'-phosphate
  modified_base 13: mod_base = OTHER; note = 2'-O-methyluridine-3'-phosphate
  modified_base 14: mod_base = OTHER; note = 2'-deoxy-2'-fluorouridine-3'-phosphate
  modified_base 15: mod_base = OTHER; note = 2'-O-methyladenosine-3'-phosphate
  modified_base 16: mod_base = OTHER; note = 2'-deoxy-2'-fluoroguanosine-3'-phosphate
  modified_base 17: mod_base = OTHER; note = 2'-O-methyladenosine-3'-phosphate
  modified_base 18: mod_base = OTHER; note = 2'-O-methyladenosine-3'-phosphate
  modified_base 19: mod_base = OTHER; note = 2'-O-methylcytidine-3'-phosphate
  modified_base 20: mod_base = OTHER; note = 2'-O-methyladenosine-3'-phosphate
  modified_base 21: mod_base = OTHER; note = 2'-O-methylguanosine-3'-phosphorothioate
  modified_base 22: mod_base = OTHER; note = 2'-O-methyladenosine-3'-phosphorothioate
  modified_base 23: mod_base = OTHER; note = 2'-O-methyluridine
agatcatatgtcttagaacagat

SEQ ID NO: 4263 - RNA, 23 nt, synthetic construct
  source 1..23: mol_type = other RNA
  modified_base 1: mod_base = OTHER; note = 2'-O-methyladenosine-3'-phosphorothioate
  modified_base 2: mod_base = OTHER; note = 2'-deoxy-2'-fluoroguanosine-3'-phosphorothioate
  modified_base 3: mod_base = OTHER; note = 2'-O-methyluridine-3'-phosphate
  modified_base 4: mod_base = OTHER; note = 2'-O-methyluridine-3'-phosphate
  modified_base 5: mod_base = OTHER; note = 2'-O-methylcytidine-3'-phosphate
  modified_base 6: mod_base = OTHER; note = 2'-deoxy-2'-fluorouridine-3'-phosphate
  modified_base 7: mod_base = OTHER; note = 2'-O-methylcytidine-3'-phosphate
  modified_base 8: mod_base = OTHER; note = 2'-deoxy-2'-fluoroadenosine-3'-phosphate
  modified_base 9: mod_base = OTHER; note = 2'-deoxy-2'-fluorouridine-3'-phosphate
  modified_base 10: mod_base = OTHER; note = 2'-O-methylcytidine-3'-phosphate
  modified_base 11: mod_base = OTHER; note = 2'-O-methyluridine-3'-phosphate
  modified_base 12: mod_base = OTHER; note = 2'-O-methylguanosine-3'-phosphate
  modified_base 13: mod_base = OTHER; note = 2'-O-methyluridine-3'-phosphate
  modified_base 14: mod_base = OTHER; note = 2'-deoxy-2'-fluorouridine-3'-phosphate
  modified_base 15: mod_base = OTHER; note = 2'-O-methylguanosine-3'-phosphate
  modified_base 16: mod_base = OTHER; note = 2'-deoxy-2'-fluoroadenosine-3'-phosphate
  modified_base 17: mod_base = OTHER; note = 2'-O-methyluridine-3'-phosphate
  modified_base 18: mod_base = OTHER; note = 2'-O-methylcytidine-3'-phosphate
  modified_base 19: mod_base = OTHER; note = 2'-O-methyladenosine-3'-phosphate
  modified_base 20: mod_base = OTHER; note = 2'-O-methyluridine-3'-phosphate
  modified_base 21: mod_base = OTHER; note = 2'-O-methyladenosine-3'-phosphorothioate
  modified_base 22: mod_base = OTHER; note = 2'-O-methyluridine-3'-phosphorothioate
  modified_base 23: mod_base = OTHER; note = 2'-O-methylguanosine
agttctcatctgttgatcatatg

SEQ ID NO: 4264 - RNA, 23 nt, synthetic construct
  source 1..23: mol_type = other RNA
  modified_base 1: mod_base = OTHER; note = 2'-O-methyladenosine-3'-phosphorothioate
  modified_base 2: mod_base = OTHER; note = 2'-deoxy-2'-fluoroguanosine-3'-phosphorothioate
  modified_base 3: mod_base = OTHER; note = 2'-O-methyluridine-3'-phosphate
  modified_base 4: mod_base = OTHER; note = 2'-O-methylcytidine-3'-phosphate
  modified_base 5: mod_base = OTHER; note = 2'-O-methyladenosine-3'-phosphate
  modified_base 6: mod_base = OTHER; note = 2'-deoxy-2'-fluorocytidine-3'-phosphate
  modified_base 7: mod_base = OTHER; note = 2'-O-methyladenosine-3'-phosphate
  modified_base 8: mod_base = OTHER; note = 2'-deoxy-2'-fluorouridine-3'-phosphate
  modified_base 9: mod_base = OTHER; note = 2'-deoxy-2'-fluoroadenosine-3'-phosphate
  modified_base 10: mod_base = OTHER; note = 2'-O-methyluridine-3'-phosphate
  modified_base 11: mod_base = OTHER; note = 2'-O-methyluridine-3'-phosphate
  modified_base 12: mod_base = OTHER; note = 2'-O-methyladenosine-3'-phosphate
  modified_base 13: mod_base = OTHER; note = 2'-O-methyladenosine-3'-phosphate
  modified_base 14: mod_base = OTHER; note = 2'-deoxy-2'-fluorocytidine-3'-phosphate
  modified_base 15: mod_base = OTHER; note = 2'-O-methylcytidine-3'-phosphate
  modified_base 16: mod_base = OTHER; note = 2'-deoxy-2'-fluoroadenosine-3'-phosphate
  modified_base 17: mod_base = OTHER; note = 2'-O-methylcytidine-3'-phosphate
  modified_base 18: mod_base = OTHER; note = 2'-O-methylcytidine-3'-phosphate
  modified_base 19: mod_base = OTHER; note = 2'-O-methyladenosine-3'-phosphate
  modified_base 20: mod_base = OTHER; note = 2'-O-methylguanosine-3'-phosphate
  modified_base 21: mod_base = OTHER; note = 2'-O-methyluridine-3'-phosphorothioate
  modified_base 22: mod_base = OTHER; note = 2'-O-methyluridine-3'-phosphorothioate
  modified_base 23: mod_base = OTHER; note = 2'-O-methylcytidine
agtcacatattaaccaccagttc

SEQ ID NO: 4265 - RNA, 23 nt, synthetic construct
  source 1..23: mol_type = other RNA
  modified_base 1: mod_base = OTHER; note = 2'-O-methyladenosine-3'-phosphorothioate
  modified_base 2: mod_base = OTHER; note = 2'-deoxy-2'-fluoroguanosine-3'-phosphorothioate
  modified_base 3: mod_base = OTHER; note = 2'-O-methyladenosine-3'-phosphate
  modified_base 4: mod_base = OTHER; note = 2'-O-methylcytidine-3'-phosphate
  modified_base 5: mod_base = OTHER; note = 2'-O-methyluridine-3'-phosphate
  modified_base 6: mod_base = OTHER; note = 2'-deoxy-2'-fluoroadenosine-3'-phosphate
  modified_base 7: mod_base = OTHER; note = 2'-O-methyladenosine-3'-phosphate
  modified_base 8: mod_base = OTHER; note = 2'-deoxy-2'-fluorouridine-3'-phosphate
  modified_base 9: mod_base = OTHER; note = 2'-deoxy-2'-fluorocytidine-3'-phosphate
  modified_base 10: mod_base = OTHER; note = 2'-O-methyluridine-3'-phosphate
  modified_base 11: mod_base = OTHER; note = 2'-O-methylcytidine-3'-phosphate
  modified_base 12: mod_base = OTHER; note = 2'-O-methyladenosine-3'-phosphate
  modified_base 13: mod_base = OTHER; note = 2'-O-methylcytidine-3'-phosphate
  modified_base 14: mod_base = OTHER; note = 2'-deoxy-2'-fluorouridine-3'-phosphate
  modified_base 15: mod_base = OTHER; note = 2'-O-methylguanosine-3'-phosphate
  modified_base 16: mod_base = OTHER; note = 2'-deoxy-2'-fluorouridine-3'-phosphate
  modified_base 17: mod_base = OTHER; note = 2'-O-methylcytidine-3'-phosphate
  modified_base 18: mod_base = OTHER; note = 2'-O-methyladenosine-3'-phosphate
  modified_base 19: mod_base = OTHER; note = 2'-O-methylcytidine-3'-phosphate
  modified_base 20: mod_base = OTHER; note = 2'-O-methyladenosine-3'-phosphate
  modified_base 21: mod_base = OTHER; note = 2'-O-methyluridine-3'-phosphorothioate
  modified_base 22: mod_base = OTHER; note = 2'-O-methyladenosine-3'-phosphorothioate
  modified_base 23: mod_base = OTHER; note = 2'-O-methyluridine
agactaatctcactgtcacatat

SEQ ID NO: 4266 - RNA, 23 nt, synthetic construct
  source 1..23: mol_type = other RNA
  modified_base 1: mod_base = OTHER; note = 2'-O-methyladenosine-3'-phosphorothioate
  modified_base 2: mod_base = OTHER; note = 2'-deoxy-2'-fluoroguanosine-3'-phosphorothioate
  modified_base 3: mod_base = OTHER; note = 2'-O-methyluridine-3'-phosphate
  modified_base 4: mod_base = OTHER; note = 2'-O-methyluridine-3'-phosphate
  modified_base 5: mod_base = OTHER; note = 2'-O-methyladenosine-3'-phosphate
  modified_base 6: mod_base = OTHER; note = 2'-deoxy-2'-fluoroguanosine-3'-phosphate
  modified_base 7: mod_base = OTHER; note = 2'-O-methyluridine-3'-phosphate
  modified_base 8: mod_base = OTHER; note = 2'-deoxy-2'-fluoroadenosine-3'-phosphate
  modified_base 9: mod_base = OTHER; note = 2'-deoxy-2'-fluorouridine-3'-phosphate
  modified_base 10: mod_base = OTHER; note = 2'-O-methyladenosine-3'-phosphate
  modified_base 11: mod_base = OTHER; note = 2'-O-methyluridine-3'-phosphate
  modified_base 12: mod_base = OTHER; note = 2'-O-methyluridine-3'-phosphate
  modified_base 13: mod_base = OTHER; note = 2'-O-methyladenosine-3'-phosphate
  modified_base 14: mod_base = OTHER; note = 2'-deoxy-2'-fluoroguanosine-3'-phosphate
  modified_base 15: mod_base = OTHER; note = 2'-O-methyluridine-3'-phosphate
  modified_base 16: mod_base = OTHER; note = 2'-deoxy-2'-fluoroguanosine-3'-phosphate
  modified_base 17: mod_base = OTHER; note = 2'-O-methyladenosine-3'-phosphate
  modified_base 18: mod_base = OTHER; note = 2'-O-methyluridine-3'-phosphate
  modified_base 19: mod_base = OTHER; note = 2'-O-methyladenosine-3'-phosphate
  modified_base 20: mod_base = OTHER; note = 2'-O-methyluridine-3'-phosphate
  modified_base 21: mod_base = OTHER; note = 2'-O-methylguanosine-3'-phosphorothioate
  modified_base 22: mod_base = OTHER; note = 2'-O-methyladenosine-3'-phosphorothioate
  modified_base 23: mod_base = OTHER; note = 2'-O-methylcytidine
agttagtatattagtgatatgac

SEQ ID NO: 4267 - RNA, 23 nt, synthetic construct
  source 1..23: mol_type = other RNA
  modified_base 1: mod_base = OTHER; note = 2'-O-methyladenosine-3'-phosphorothioate
  modified_base 2: mod_base = OTHER; note = 2'-deoxy-2'-fluoroadenosine-3'-phosphorothioate
  modified_base 3: mod_base = OTHER; note = 2'-O-methyladenosine-3'-phosphate
  modified_base 4: mod_base = OTHER; note = 2'-O-methylguanosine-3'-phosphate
  modified_base 5: mod_base = OTHER; note = 2'-O-methyladenosine-3'-phosphate
  modified_base 6: mod_base = OTHER; note = 2'-deoxy-2'-fluorouridine-3'-phosphate
  modified_base 7: mod_base = OTHER; note = 2'-O-methyluridine-3'-phosphate
  modified_base 8: mod_base = OTHER; note = 2'-deoxy-2'-fluoroadenosine-3'-phosphate
  modified_base 9: mod_base = OTHER; note = 2'-deoxy-2'-fluoroguanosine-3'-phosphate
  modified_base 10: mod_base = OTHER; note = 2'-O-methyladenosine-3'-phosphate
  modified_base 11: mod_base = OTHER; note = 2'-O-methyluridine-3'-phosphate
  modified_base 12: mod_base = OTHER; note = 2'-O-methyluridine-3'-phosphate
  modified_base 13: mod_base = OTHER; note = 2'-O-methylcytidine-3'-phosphate
  modified_base 14: mod_base = OTHER; note = 2'-deoxy-2'-fluorouridine-3'-phosphate
  modified_base 15: mod_base = OTHER; note = 2'-O-methylguanosine-3'-phosphate
  modified_base 16: mod_base = OTHER; note = 2'-deoxy-2'-fluorouridine-3'-phosphate
  modified_base 17: mod_base = OTHER; note = 2'-O-methyluridine-3'-phosphate
  modified_base 18: mod_base = OTHER; note = 2'-O-methylguanosine-3'-phosphate
  modified_base 19: mod_base = OTHER; note = 2'-O-methyluridine-3'-phosphate
  modified_base 20: mod_base = OTHER; note = 2'-O-methyluridine-3'-phosphate
  modified_base 21: mod_base = OTHER; note = 2'-O-methyladenosine-3'-phosphorothioate
  modified_base 22: mod_base = OTHER; note = 2'-O-methylguanosine-3'-phosphorothioate
  modified_base 23: mod_base = OTHER; note = 2'-O-methyluridine
aaagattagattctgttgttagt

SEQ ID NO: 4268 - RNA, 23 nt, synthetic construct
  source 1..23: mol_type = other RNA
  modified_base 1: mod_base = OTHER; note = 2'-O-methyladenosine-3'-phosphorothioate
  modified_base 2: mod_base = OTHER; note = 2'-deoxy-2'-fluorouridine-3'-phosphorothioate
  modified_base 3: mod_base = OTHER; note = 2'-O-methyladenosine-3'-phosphate
  modified_base 4: mod_base = OTHER; note = 2'-O-methylcytidine-3'-phosphate
  modified_base 5: mod_base = OTHER; note = 2'-O-methyladenosine-3'-phosphate
  modified_base 6: mod_base = OTHER; note = 2'-deoxy-2'-fluoroguanosine-3'-phosphate
  modified_base 7: mod_base = OTHER; note = 2'-O-methyluridine-3'-phosphate
  modified_base 8: mod_base = OTHER; note = 2'-deoxy-2'-fluoroguanosine-3'-phosphate
  modified_base 9: mod_base = OTHER; note = 2'-deoxy-2'-fluorocytidine-3'-phosphate
  modified_base 10: mod_base = OTHER; note = 2'-O-methylcytidine-3'-phosphate
  modified_base 11: mod_base = OTHER; note = 2'-O-methyluridine-3'-phosphate
  modified_base 12: mod_base = OTHER; note = 2'-O-methyluridine-3'-phosphate
  modified_base 13: mod_base = OTHER; note = 2'-O-methyladenosine-3'-phosphate
  modified_base 14: mod_base = OTHER; note = 2'-deoxy-2'-fluoroadenosine-3'-phosphate
  modified_base 15: mod_base = OTHER; note = 2'-O-methyladenosine-3'-phosphate
  modified_base 16: mod_base = OTHER; note = 2'-deoxy-2'-fluorouridine-3'-phosphate
  modified_base 17: mod_base = OTHER; note = 2'-O-methylguanosine-3'-phosphate
  modified_base 18: mod_base = OTHER; note = 2'-O-methyladenosine-3'-phosphate
  modified_base 19: mod_base = OTHER; note = 2'-O-methyladenosine-3'-phosphate
  modified_base 20: mod_base = OTHER; note = 2'-O-methylguanosine-3'-phosphate
  modified_base 21: mod_base = OTHER; note = 2'-O-methyladenosine-3'-phosphorothioate
  modified_base 22: mod_base = OTHER; note = 2'-O-methyluridine-3'-phosphorothioate
  modified_base 23: mod_base = OTHER; note = 2'-O-methyluridine
atacagtgccttaaatgaagatt

SEQ ID NO: 4269 - RNA, 23 nt, synthetic construct
  source 1..23: mol_type = other RNA
  modified_base 1: mod_base = OTHER; note = 2'-O-methyladenosine-3'-phosphorothioate
  modified_base 2: mod_base = OTHER; note = 2'-deoxy-2'-fluorouridine-3'-phosphorothioate
  modified_base 3: mod_base = OTHER; note = 2'-O-methylcytidine-3'-phosphate
  modified_base 4: mod_base = OTHER; note = 2'-O-methyladenosine-3'-phosphate
  modified_base 5: mod_base = OTHER; note = 2'-O-methylguanosine-3'-phosphate
  modified_base 6: mod_base = OTHER; note = 2'-deoxy-2'-fluoroadenosine-3'-phosphate
  modified_base 7: mod_base = OTHER; note = 2'-O-methyluridine-3'-phosphate
  modified_base 8: mod_base = OTHER; note = 2'-deoxy-2'-fluoroadenosine-3'-phosphate
  modified_base 9: mod_base = OTHER; note = 2'-deoxy-2'-fluoroadenosine-3'-phosphate
  modified_base 10: mod_base = OTHER; note = 2'-O-methyluridine-3'-phosphate
  modified_base 11: mod_base = OTHER; note = 2'-O-methyluridine-3'-phosphate
  modified_base 12: mod_base = OTHER; note = 2'-O-methylcytidine-3'-phosphate
  modified_base 13: mod_base = OTHER; note = 2'-O-methyladenosine-3'-phosphate
  modified_base 14: mod_base = OTHER; note = 2'-deoxy-2'-fluorocytidine-3'-phosphate
  modified_base 15: mod_base = OTHER; note = 2'-O-methyluridine-3'-phosphate
  modified_base 16: mod_base = OTHER; note = 2'-deoxy-2'-fluoroadenosine-3'-phosphate
  modified_base 17: mod_base = OTHER; note = 2'-O-methylcytidine-3'-phosphate
  modified_base 18: mod_base = OTHER; note = 2'-O-methyladenosine-3'-phosphate
  modified_base 19: mod_base = OTHER; note = 2'-O-methylguanosine-3'-phosphate
  modified_base 20: mod_base = OTHER; note = 2'-O-methyluridine-3'-phosphate
  modified_base 21: mod_base = OTHER; note = 2'-O-methylguanosine-3'-phosphorothioate
  modified_base 22: mod_base = OTHER; note = 2'-O-methylcytidine-3'-phosphorothioate
  modified_base 23: mod_base = OTHER; note = 2'-O-methylcytidine
atcagataattcactacagtgcc

SEQ ID NO: 4270 - RNA, 23 nt, synthetic construct
  source 1..23: mol_type = other RNA
  modified_base 1: mod_base = OTHER; note = 2'-O-methyladenosine-3'-phosphorothioate
  modified_base 2: mod_base = OTHER; note = 2'-deoxy-2'-fluoroadenosine-3'-phosphorothioate
  modified_base 3: mod_base = OTHER; note = 2'-O-methylguanosine-3'-phosphate
  modified_base 4: mod_base = OTHER; note = 2'-O-methylguanosine-3'-phosphate
  modified_base 5: mod_base = OTHER; note = 2'-O-methyluridine-3'-phosphate
  modified_base 6: mod_base = OTHER; note = 2'-deoxy-2'-fluoroadenosine-3'-phosphate
  modified_base 7: mod_base = OTHER; note = 2'-O-methyladenosine-3'-phosphate
  modified_base 8: mod_base = OTHER; note = 2'-deoxy-2'-fluorocytidine-3'-phosphate
  modified_base 9: mod_base = OTHER; note = 2'-deoxy-2'-fluorouridine-3'-phosphate
  modified_base 10: mod_base = OTHER; note = 2'-O-methylcytidine-3'-phosphate
  modified_base 11: mod_base = OTHER; note = 2'-O-methyluridine-3'-phosphate
  modified_base 12: mod_base = OTHER; note = 2'-O-methyladenosine-3'-phosphate
  modified_base 13: mod_base = OTHER; note = 2'-O-methylguanosine-3'-phosphate
  modified_base 14: mod_base = OTHER; note = 2'-deoxy-2'-fluorocytidine-3'-phosphate
  modified_base 15: mod_base = OTHER; note = 2'-O-methyluridine-3'-phosphate
  modified_base 16: mod_base = OTHER; note = 2'-deoxy-2'-fluorocytidine-3'-phosphate
  modified_base 17: mod_base = OTHER; note = 2'-O-methyladenosine-3'-phosphate
  modified_base 18: mod_base = OTHER; note = 2'-O-methylguanosine-3'-phosphate
  modified_base 19: mod_base = OTHER; note = 2'-O-methyladenosine-3'-phosphate
  modified_base 20: mod_base = OTHER; note = 2'-O-methyluridine-3'-phosphate
  modified_base 21: mod_base = OTHER; note = 2'-O-methyladenosine-3'-phosphorothioate
  modified_base 22: mod_base = OTHER; note = 2'-O-methyladenosine-3'-phosphorothioate
  modified_base 23: mod_base = OTHER; note = 2'-O-methyluridine
aaggtaactctagctcagataat

SEQ ID NO: 4271 - RNA, 23 nt, synthetic construct
  source 1..23: mol_type = other RNA
  modified_base 1: mod_base = OTHER; note = 2'-O-methyladenosine-3'-phosphorothioate
  modified_base 2: mod_base = OTHER; note = 2'-deoxy-2'-fluoroadenosine-3'-phosphorothioate
  modified_base 3: mod_base = OTHER; note = 2'-O-methyladenosine-3'-phosphate
  modified_base 4: mod_base = OTHER; note = 2'-O-methyladenosine-3'-phosphate
  modified_base 5: mod_base = OTHER; note = 2'-O-methylguanosine-3'-phosphate
  modified_base 6: mod_base = OTHER; note = 2'-deoxy-2'-fluoroadenosine-3'-phosphate
  modified_base 7: mod_base = OTHER; note = 2'-O-methyluridine-3'-phosphate
  modified_base 8: mod_base = OTHER; note = 2'-deoxy-2'-fluoroadenosine-3'-phosphate
  modified_base 9: mod_base = OTHER; note = 2'-deoxy-2'-fluorouridine-3'-phosphate
  modified_base 10: mod_base = OTHER; note = 2'-O-methyladenosine-3'-phosphate
  modified_base 11: mod_base = OTHER; note = 2'-O-methylguanosine-3'-phosphate
  modified_base 12: mod_base = OTHER; note = 2'-O-methyluridine-3'-phosphate
  modified_base 13: mod_base = OTHER; note = 2'-O-methyladenosine-3'-phosphate
  modified_base 14: mod_base = OTHER; note = 2'-deoxy-2'-fluorouridine-3'-phosphate
  modified_base 15: mod_base = OTHER; note = 2'-O-methylguanosine-3'-phosphate
  modified_base 16: mod_base = OTHER; note = 2'-deoxy-2'-fluoroguanosine-3'-phosphate
  modified_base 17: mod_base = OTHER; note = 2'-O-methyluridine-3'-phosphate
  modified_base 18: mod_base = OTHER; note = 2'-O-methyladenosine-3'-phosphate
  modified_base 19: mod_base = OTHER; note = 2'-O-methyladenosine-3'-phosphate
  modified_base 20: mod_base = OTHER; note = 2'-O-methylguanosine-3'-phosphate
  modified_base 21: mod_base = OTHER; note = 2'-O-methylcytidine-3'-phosphorothioate
  modified_base 22: mod_base = OTHER; note = 2'-O-methyluridine-3'-phosphorothioate
  modified_base 23: mod_base = OTHER; note = 2'-O-methyladenosine
aaaagatatagtatggtaagcta

SEQ ID NO: 4272 - RNA, 23 nt, synthetic construct
  source 1..23: mol_type = other RNA
  modified_base 1: mod_base = OTHER; note = 2'-O-methyladenosine-3'-phosphorothioate
  modified_base 2: mod_base = OTHER; note = 2'-deoxy-2'-fluorouridine-3'-phosphorothioate
  modified_base 3: mod_base = OTHER; note = 2'-O-methyladenosine-3'-phosphate
  modified_base 4: mod_base = OTHER; note = 2'-O-methyladenosine-3'-phosphate
  modified_base 5: mod_base = OTHER; note = 2'-O-methylguanosine-3'-phosphate
  modified_base 6: mod_base = OTHER; note = 2'-deoxy-2'-fluoroguanosine-3'-phosphate
  modified_base 7: mod_base = OTHER; note = 2'-O-methyluridine-3'-phosphate
  modified_base 8: mod_base = OTHER; note = 2'-deoxy-2'-fluorouridine-3'-phosphate
  modified_base 9: mod_base = OTHER; note = 2'-deoxy-2'-fluorouridine-3'-phosphate
  modified_base 10: mod_base = OTHER; note = 2'-O-methylcytidine-3'-phosphate
  modified_base 11: mod_base = OTHER; note = 2'-O-methyladenosine-3'-phosphate
  modified_base 12: mod_base = OTHER; note = 2'-O-methyluridine-3'-phosphate
  modified_base 13: mod_base = OTHER; note = 2'-O-methylguanosine-3'-phosphate
  modified_base 14: mod_base = OTHER; note = 2'-deoxy-2'-fluoroadenosine-3'-phosphate
  modified_base 15: mod_base = OTHER; note = 2'-O-methyluridine-3'-phosphate
  modified_base 16: mod_base = OTHER; note = 2'-deoxy-2'-fluorouridine-3'-phosphate
  modified_base 17: mod_base = OTHER; note = 2'-O-methylcytidine-3'-phosphate
  modified_base 18: mod_base = OTHER; note = 2'-O-methylcytidine-3'-phosphate
  modified_base 19: mod_base = OTHER; note = 2'-O-methyladenosine-3'-phosphate
  modified_base 20: mod_base = OTHER; note = 2'-O-methyladenosine-3'-phosphate
  modified_base 21: mod_base = OTHER; note = 2'-O-methyladenosine-3'-phosphorothioate
  modified_base 22: mod_base = OTHER; note = 2'-O-methylguanosine-3'-phosphorothioate
  modified_base 23: mod_base = OTHER; note = 2'-O-methyladenosine
ataaggtttcatgattccaaaga

SEQ ID NO: 4273 - RNA, 23 nt, synthetic construct
  source 1..23: mol_type = other RNA
  modified_base 1: mod_base = OTHER; note = 2'-O-methyladenosine-3'-phosphorothioate
  modified_base 2: mod_base = OTHER; note = 2'-deoxy-2'-fluoroadenosine-3'-phosphorothioate
  modified_base 3: mod_base = OTHER; note = 2'-O-methyladenosine-3'-phosphate
  modified_base 4: mod_base = OTHER; note = 2'-O-methyladenosine-3'-phosphate
  modified_base 5: mod_base = OTHER; note = 2'-O-methyladenosine-3'-phosphate
  modified_base 6: mod_base = OTHER; note = 2'-deoxy-2'-fluorouridine-3'-phosphate
  modified_base 7: mod_base = OTHER; note = 2'-O-methylcytidine-3'-phosphate
  modified_base 8: mod_base = OTHER; note = 2'-deoxy-2'-fluoroadenosine-3'-phosphate
  modified_base 9: mod_base = OTHER; note = 2'-deoxy-2'-fluorouridine-3'-phosphate
  modified_base 10: mod_base = OTHER; note = 2'-O-methyluridine-3'-phosphate
  modified_base 11: mod_base = OTHER; note = 2'-O-methylcytidine-3'-phosphate
  modified_base 12: mod_base = OTHER; note = 2'-O-methyluridine-3'-phosphate
  modified_base 13: mod_base = OTHER; note = 2'-O-methylguanosine-3'-phosphate
  modified_base 14: mod_base = OTHER; note = 2'-deoxy-2'-fluoroadenosine-3'-phosphate
  modified_base 15: mod_base = OTHER; note = 2'-O-methyladenosine-3'-phosphate
  modified_base 16: mod_base = OTHER; note = 2'-deoxy-2'-fluoroguanosine-3'-phosphate
  modified_base 17: mod_base = OTHER; note = 2'-O-methyluridine-3'-phosphate
  modified_base 18: mod_base = OTHER; note = 2'-O-methylcytidine-3'-phosphate
  modified_base 19: mod_base = OTHER; note = 2'-O-methyluridine-3'-phosphate
  modified_base 20: mod_base = OTHER; note = 2'-O-methyluridine-3'-phosphate
  modified_base 21: mod_base = OTHER; note = 2'-O-methyladenosine-3'-phosphorothioate
  modified_base 22: mod_base = OTHER; note = 2'-O-methyladenosine-3'-phosphorothioate
  modified_base 23: mod_base = OTHER; note = 2'-O-methylguanosine
aaaaatcattctgaagtcttaag

SEQ ID NO: 4274 - RNA, 23 nt, synthetic construct
  source 1..23: mol_type = other RNA
  modified_base 1: mod_base = OTHER; note = 2'-O-methyladenosine-3'-phosphorothioate
  modified_base 2: mod_base = OTHER; note = 2'-deoxy-2'-fluorouridine-3'-phosphorothioate
  modified_base 3: mod_base = OTHER; note = 2'-O-methylguanosine-3'-phosphate
  modified_base 4: mod_base = OTHER; note = 2'-O-methylguanosine-3'-phosphate
  modified_base 5: mod_base = OTHER; note = 2'-O-methyladenosine-3'-phosphate
  modified_base 6: mod_base = OTHER; note = 2'-deoxy-2'-fluoroadenosine-3'-phosphate
  modified_base 7: mod_base = OTHER; note = 2'-O-methylguanosine-3'-phosphate
  modified_base 8: mod_base = OTHER; note = 2'-deoxy-2'-fluoroadenosine-3'-phosphate
  modified_base 9: mod_base = OTHER; note = 2'-deoxy-2'-fluorocytidine-3'-phosphate
  modified_base 10: mod_base = OTHER; note = 2'-O-methyladenosine-3'-phosphate
  modified_base 11: mod_base = OTHER; note = 2'-O-methyladenosine-3'-phosphate
  modified_base 12: mod_base = OTHER; note = 2'-O-methylcytidine-3'-phosphate
  modified_base 13: mod_base = OTHER; note = 2'-O-methylcytidine-3'-phosphate
  modified_base 14: mod_base = OTHER; note = 2'-deoxy-2'-fluorouridine-3'-phosphate
  modified_base 15: mod_base = OTHER; note = 2'-O-methylguanosine-3'-phosphate
  modified_base 16: mod_base = OTHER; note = 2'-deoxy-2'-fluorocytidine-3'-phosphate
  modified_base 17: mod_base = OTHER; note = 2'-O-methyladenosine-3'-phosphate
  modified_base 18: mod_base = OTHER; note = 2'-O-methyladenosine-3'-phosphate
  modified_base 19: mod_base = OTHER; note = 2'-O-methyladenosine-3'-phosphate
  modified_base 20: mod_base = OTHER; note = 2'-O-methyladenosine-3'-phosphate
  modified_base 21: mod_base = OTHER; note = 2'-O-methyluridine-3'-phosphorothioate
  modified_base 22: mod_base = OTHER; note = 2'-O-methylcytidine-3'-phosphorothioate
  modified_base 23: mod_base = OTHER; note = 2'-O-methyladenosine
atggaagacaacctgcaaaatca

SEQ ID NO: 4275 - RNA, 23 nt, synthetic construct
  source 1..23: mol_type = other RNA
  modified_base 1: mod_base = OTHER; note = 2'-O-methyladenosine-3'-phosphorothioate
  modified_base 2: mod_base = OTHER; note = 2'-deoxy-2'-fluoroadenosine-3'-phosphorothioate
  modified_base 3: mod_base = OTHER; note = 2'-O-methyluridine-3'-phosphate
  modified_base 4: mod_base = OTHER; note = 2'-O-methylguanosine-3'-phosphate
  modified_base 5: mod_base = OTHER; note = 2'-O-methyluridine-3'-phosphate
  modified_base 6: mod_base = OTHER; note = 2'-deoxy-2'-fluorouridine-3'-phosphate
  modified_base 7: mod_base = OTHER; note = 2'-O-methyladenosine-3'-phosphate
  modified_base 8: mod_base = OTHER; note = 2'-deoxy-2'-fluoroguanosine-3'-phosphate
  modified_base 9: mod_base = OTHER; note = 2'-deoxy-2'-fluoroguanosine-3'-phosphate
  modified_base 10: mod_base = OTHER; note = 2'-O-methylcytidine-3'-phosphate
  modified_base 11: mod_base = OTHER; note = 2'-O-methyluridine-3'-phosphate
  modified_base 12: mod_base = OTHER; note = 2'-O-methylguanosine-3'-phosphate
  modified_base 13: mod_base = OTHER; note = 2'-O-methylguanosine-3'-phosphate
  modified_base 14: mod_base = OTHER; note = 2'-deoxy-2'-fluoroadenosine-3'-phosphate
  modified_base 15: mod_base = OTHER; note = 2'-O-methyladenosine-3'-phosphate
  modified_base 16: mod_base = OTHER; note = 2'-deoxy-2'-fluorouridine-3'-phosphate
  modified_base 17: mod_base = OTHER; note = 2'-O-methylguanosine-3'-phosphate
  modified_base 18: mod_base = OTHER; note = 2'-O-methylguanosine-3'-phosphate
  modified_base 19: mod_base = OTHER; note = 2'-O-methyladenosine-3'-phosphate
  modified_base 20: mod_base = OTHER; note = 2'-O-methyladenosine-3'-phosphate
  modified_base 21: mod_base = OTHER; note = 2'-O-methylguanosine-3'-phosphorothioate
  modified_base 22: mod_base = OTHER; note = 2'-O-methyladenosine-3'-phosphorothioate
  modified_base 23: mod_base = OTHER; note = 2'-O-methylcytidine
aatgttaggctggaatggaagac

SEQ ID NO: 4276 - RNA, 23 nt, synthetic construct
  source 1..23: mol_type = other RNA
  modified_base 1: mod_base = OTHER; note = 2'-O-methyladenosine-3'-phosphorothioate
  modified_base 2: mod_base = OTHER; note = 2'-deoxy-2'-fluoroadenosine-3'-phosphorothioate
  modified_base 3: mod_base = OTHER; note = 2'-O-methyladenosine-3'-phosphate
  modified_base 4: mod_base = OTHER; note = 2'-O-methyluridine-3'-phosphate
  modified_base 5: mod_base = OTHER; note = 2'-O-methylcytidine-3'-phosphate
  modified_base 6: mod_base = OTHER; note = 2'-deoxy-2'-fluorouridine-3'-phosphate
  modified_base 7: mod_base = OTHER; note = 2'-O-methyluridine-3'-phosphate
  modified_base 8: mod_base = OTHER; note = 2'-deoxy-2'-fluorouridine-3'-phosphate
  modified_base 9: mod_base = OTHER; note = 2'-deoxy-2'-fluorouridine-3'-phosphate
  modified_base 10: mod_base = OTHER; note = 2'-O-methyladenosine-3'-phosphate
  modified_base 11: mod_base = OTHER; note = 2'-O-methyluridine-3'-phosphate
  modified_base 12: mod_base = OTHER; note = 2'-O-methyluridine-3'-phosphate
  modified_base 13: mod_base = OTHER; note = 2'-O-methyluridine-3'-phosphate
  modified_base 14: mod_base = OTHER; note = 2'-deoxy-2'-fluorouridine-3'-phosphate
  modified_base 15: mod_base = OTHER; note = 2'-O-methylcytidine-3'-phosphate
  modified_base 16: mod_base = OTHER; note = 2'-deoxy-2'-fluorocytidine-3'-phosphate
  modified_base 17: mod_base = OTHER; note = 2'-O-methyluridine-3'-phosphate
  modified_base 18: mod_base = OTHER; note = 2'-O-methyluridine-3'-phosphate
  modified_base 19: mod_base = OTHER; note = 2'-O-methylguanosine-3'-phosphate
  modified_base 20: mod_base = OTHER; note = 2'-O-methylcytidine-3'-phosphate
  modified_base 21: mod_base = OTHER; note = 2'-O-methylcytidine-3'-phosphorothioate
  modified_base 22: mod_base = OTHER; note = 2'-O-methyluridine-3'-phosphorothioate
  modified_base 23: mod_base = OTHER; note = 2'-O-methylguanosine
aaatcttttattttccttgcctg

SEQ ID NO: 4277 - RNA, 23 nt, synthetic construct
  source 1..23: mol_type = other RNA
  modified_base 1: mod_base = OTHER; note = 2'-O-methyladenosine-3'-phosphorothioate
  modified_base 2: mod_base = OTHER; note = 2'-deoxy-2'-fluorouridine-3'-phosphorothioate
  modified_base 3: mod_base = OTHER; note = 2'-O-methyluridine-3'-phosphate
  modified_base 4: mod_base = OTHER; note = 2'-O-methyluridine-3'-phosphate
  modified_base 5: mod_base = OTHER; note = 2'-O-methylcytidine-3'-phosphate
  modified_base 6: mod_base = OTHER; note = 2'-deoxy-2'-fluorouridine-3'-phosphate
  modified_base 7: mod_base = OTHER; note = 2'-O-methylguanosine-3'-phosphate
  modified_base 8: mod_base = OTHER; note = 2'-deoxy-2'-fluorouridine-3'-phosphate
  modified_base 9: mod_base = OTHER; note = 2'-deoxy-2'-fluorocytidine-3'-phosphate
  modified_base 10: mod_base = OTHER; note = 2'-O-methyladenosine-3'-phosphate
  modified_base 11: mod_base = OTHER; note = 2'-O-methylcytidine-3'-phosphate
  modified_base 12: mod_base = OTHER; note = 2'-O-methyluridine-3'-phosphate
  modified_base 13: mod_base = OTHER; note = 2'-O-methylguanosine-3'-phosphate
  modified_base 14: mod_base = OTHER; note = 2'-deoxy-2'-fluoroguanosine-3'-phosphate
  modified_base 15: mod_base = OTHER; note = 2'-O-methyladenosine-3'-phosphate
  modified_base 16: mod_base = OTHER; note = 2'-deoxy-2'-fluoroadenosine-3'-phosphate
  modified_base 17: mod_base = OTHER; note = 2'-O-methyladenosine-3'-phosphate
  modified_base 18: mod_base = OTHER; note = 2'-O-methyluridine-3'-phosphate
  modified_base 19: mod_base = OTHER; note = 2'-O-methylcytidine-3'-phosphate
  modified_base 20: mod_base = OTHER; note = 2'-O-methyluridine-3'-phosphate
  modified_base 21: mod_base = OTHER; note = 2'-O-methyluridine-3'-phosphorothioate
  modified_base 22: mod_base = OTHER; note = 2'-O-methyluridine-3'-phosphorothioate
  modified_base 23: mod_base = OTHER; note = 2'-O-methyluridine
atttctgtcactggaaatctttt

SEQ ID NO: 4278 - RNA, 23 nt, synthetic construct
  source 1..23: mol_type = other RNA
  modified_base 1: mod_base = OTHER; note = 2'-O-methyladenosine-3'-phosphorothioate
  modified_base 2: mod_base = OTHER; note = 2'-deoxy-2'-fluoroadenosine-3'-phosphorothioate
  modified_base 3: mod_base = OTHER; note = 2'-O-methyluridine-3'-phosphate
  modified_base 4: mod_base = OTHER; note = 2'-O-methyluridine-3'-phosphate
  modified_base 5: mod_base = OTHER; note = 2'-O-methyluridine-3'-phosphate
  modified_base 6: mod_base = OTHER; note = 2'-deoxy-2'-fluoroguanosine-3'-phosphate
  modified_base 7: mod_base = OTHER; note = 2'-O-methylguanosine-3'-phosphate
  modified_base 8: mod_base = OTHER; note = 2'-deoxy-2'-fluoroadenosine-3'-phosphate
  modified_base 9: mod_base = OTHER; note = 2'-deoxy-2'-fluoroguanosine-3'-phosphate
  modified_base 10: mod_base = OTHER; note = 2'-O-methyladenosine-3'-phosphate
  modified_base 11: mod_base = OTHER; note = 2'-O-methylguanosine-3'-phosphate
  modified_base 12: mod_base = OTHER; note = 2'-O-methyladenosine-3'-phosphate
  modified_base 13: mod_base = OTHER; note = 2'-O-methylguanosine-3'-phosphate
  modified_base 14: mod_base = OTHER; note = 2'-deoxy-2'-fluoroadenosine-3'-phosphate
  modified_base 15: mod_base = OTHER; note = 2'-O-methyladenosine-3'-phosphate
  modified_base 16: mod_base = OTHER; note = 2'-deoxy-2'-fluorouridine-3'-phosphate
  modified_base 17: mod_base = OTHER; note = 2'-O-methyluridine-3'-phosphate
  modified_base 18: mod_base = OTHER; note = 2'-O-methylcytidine-3'-phosphate
  modified_base 19: mod_base = OTHER; note = 2'-O-methyladenosine-3'-phosphate
  modified_base 20: mod_base = OTHER; note = 2'-O-methyluridine-3'-phosphate
  modified_base 21: mod_base = OTHER; note = 2'-O-methyladenosine-3'-phosphorothioate
  modified_base 22: mod_base = OTHER; note = 2'-O-methyluridine-3'-phosphorothioate
  modified_base 23: mod_base = OTHER; note = 2'-O-methyladenosine
aatttggagagagaattcatata

SEQ ID NO: 4279 - RNA, 23 nt, synthetic construct
  source 1..23: mol_type = other RNA
  modified_base 1: mod_base = OTHER; note = 2'-O-methyladenosine-3'-phosphorothioate
  modified_base 2: mod_base = OTHER; note = 2'-deoxy-2'-fluoroadenosine-3'-phosphorothioate
  modified_base 3: mod_base = OTHER; note = 2'-O-methyluridine-3'-phosphate
  modified_base 4: mod_base = OTHER; note = 2'-O-methyladenosine-3'-phosphate
  modified_base 5: mod_base = OTHER; note = 2'-O-methylguanosine-3'-phosphate
  modified_base 6: mod_base = OTHER; note = 2'-deoxy-2'-fluoroadenosine-3'-phosphate
  modified_base 7: mod_base = OTHER; note = 2'-O-methyluridine-3'-phosphate
  modified_base 8: mod_base = OTHER; note = 2'-deoxy-2'-fluoroguanosine-3'-phosphate
  modified_base 9: mod_base = OTHER; note = 2'-deoxy-2'-fluoroguanosine-3'-phosphate
  modified_base 10: mod_base = OTHER; note = 2'-O-methylguanosine-3'-phosphate
  modified_base 11: mod_base = OTHER; note = 2'-O-methylcytidine-3'-phosphate
  modified_base 12: mod_base = OTHER; note = 2'-O-methylcytidine-3'-phosphate
  modified_base 13: mod_base = OTHER; note = 2'-O-methyladenosine-3'-phosphate
  modified_base 14: mod_base = OTHER; note = 2'-deoxy-2'-fluoroadenosine-3'-phosphate
  modified_base 15: mod_base = OTHER; note = 2'-O-methylcytidine-3'-phosphate
  modified_base 16: mod_base = OTHER; note = 2'-deoxy-2'-fluoroadenosine-3'-phosphate
  modified_base 17: mod_base = OTHER; note = 2'-O-methyladenosine-3'-phosphate
  modified_base 18: mod_base = OTHER; note = 2'-O-methylguanosine-3'-phosphate
  modified_base 19: mod_base = OTHER; note = 2'-O-methyluridine-3'-phosphate
  modified_base 20: mod_base = OTHER; note = 2'-O-methyluridine-3'-phosphate
  modified_base 21: mod_base = OTHER; note = 2'-O-methylcytidine-3'-phosphorothioate
  modified_base 22: mod_base = OTHER; note = 2'-O-methyladenosine-3'-phosphorothioate
  modified_base 23: mod_base = OTHER; note = 2'-O-methyluridine
aatagatgggccaacaagttcat

SEQ ID NO: 4280 - RNA, 23 nt, synthetic construct
  source 1..23: mol_type = other RNA
  modified_base 1: mod_base = OTHER; note = 2'-O-methyladenosine-3'-phosphorothioate
  modified_base 2: mod_base = OTHER; note = 2'-deoxy-2'-fluoroadenosine-3'-phosphorothioate
  modified_base 3: mod_base = OTHER; note = 2'-O-methylguanosine-3'-phosphate
  modified_base 4: mod_base = OTHER; note = 2'-O-methylcytidine-3'-phosphate
  modified_base 5: mod_base = OTHER; note = 2'-O-methyluridine-3'-phosphate
  modified_base 6: mod_base = OTHER; note = 2'-deoxy-2'-fluoroguanosine-3'-phosphate
  modified_base 7: mod_base = OTHER; note = 2'-O-methyluridine-3'-phosphate
  modified_base 8: mod_base = OTHER; note = 2'-deoxy-2'-fluoroadenosine-3'-phosphate
  modified_base 9: mod_base = OTHER; note = 2'-deoxy-2'-fluoroguanosine-3'-phosphate
  modified_base 10: mod_base = OTHER; note = 2'-O-methyladenosine-3'-phosphate
  modified_base 11: mod_base = OTHER; note = 2'-O-methyluridine-3'-phosphate
  modified_base 12: mod_base = OTHER; note = 2'-O-methylguanosine-3'-phosphate
  modified_base 13: mod_base = OTHER; note = 2'-O-methyluridine-3'-phosphate
  modified_base 14: mod_base = OTHER; note = 2'-deoxy-2'-fluoroadenosine-3'-phosphate
  modified_base 15: mod_base = OTHER; note = 2'-O-methyladenosine-3'-phosphate
  modified_base 16: mod_base = OTHER; note = 2'-deoxy-2'-fluorouridine-3'-phosphate
  modified_base 17: mod_base = OTHER; note = 2'-O-methyladenosine-3'-phosphate
  modified_base 18: mod_base = OTHER; note = 2'-O-methylguanosine-3'-phosphate
  modified_base 19: mod_base = OTHER; note = 2'-O-methyladenosine-3'-phosphate
  modified_base 20: mod_base = OTHER; note = 2'-O-methyluridine-3'-phosphate
  modified_base 21: mod_base = OTHER; note = 2'-O-methylguanosine-3'-phosphorothioate
  modified_base 22: mod_base = OTHER; note = 2'-O-methylguanosine-3'-phosphorothioate
  modified_base 23: mod_base = OTHER; note = 2'-O-methylguanosine
aagctgtagatgtaatagatggg

SEQ ID NO: 4281 - RNA, 23 nt, synthetic construct
  source 1..23: mol_type = other RNA
  modified_base 1: mod_base = OTHER; note = 2'-O-methyladenosine-3'-phosphorothioate
  modified_base 2: mod_base = OTHER; note = 2'-deoxy-2'-fluoroadenosine-3'-phosphorothioate
  modified_base 3: mod_base = OTHER; note = 2'-O-methyluridine-3'-phosphate
  modified_base 4: mod_base = OTHER; note = 2'-O-methylguanosine-3'-phosphate
  modified_base 5: mod_base = OTHER; note = 2'-O-methyluridine-3'-phosphate
  modified_base 6: mod_base = OTHER; note = 2'-deoxy-2'-fluorouridine-3'-phosphate
  modified_base 7: mod_base = OTHER; note = 2'-O-methylcytidine-3'-phosphate
  modified_base 8: mod_base = OTHER; note = 2'-deoxy-2'-fluoroadenosine-3'-phosphate
  modified_base 9: mod_base = OTHER; note = 2'-deoxy-2'-fluoroadenosine-3'-phosphate
  modified_base 10: mod_base = OTHER; note = 2'-O-methylguanosine-3'-phosphate
  modified_base 11: mod_base = OTHER; note = 2'-O-methylguanosine-3'-phosphate
  modified_base 12: mod_base = OTHER; note = 2'-O-methylguanosine-3'-phosphate
  modified_base 13: mod_base = OTHER; note = 2'-O-methyluridine-3'-phosphate
  modified_base 14: mod_base = OTHER; note = 2'-deoxy-2'-fluorocytidine-3'-phosphate
  modified_base 15: mod_base = OTHER; note = 2'-O-methyladenosine-3'-phosphate
  modified_base 16: mod_base = OTHER; note = 2'-deoxy-2'-fluoroguanosine-3'-phosphate
  modified_base 17: mod_base = OTHER; note = 2'-O-methylcytidine-3'-phosphate
  modified_base 18: mod_base = OTHER; note = 2'-O-methyluridine-3'-phosphate
  modified_base 19: mod_base = OTHER; note = 2'-O-methylguanosine-3'-phosphate
  modified_base 20: mod_base = OTHER; note = 2'-O-methyluridine-3'-phosphate
  modified_base 21: mod_base = OTHER; note = 2'-O-methyladenosine-3'-phosphorothioate
  modified_base 22: mod_base = OTHER; note = 2'-O-methylguanosine-3'-phosphorothioate
  modified_base 23: mod_base = OTHER; note = 2'-O-methyladenosine
aatgttcaagggtcagctgtaga

SEQ ID NO: 4282 - RNA, 23 nt, synthetic construct
  source 1..23: mol_type = other RNA
  modified_base 1: mod_base = OTHER; note = 2'-O-methyladenosine-3'-phosphorothioate
  modified_base 2: mod_base = OTHER; note = 2'-deoxy-2'-fluoroadenosine-3'-phosphorothioate
  modified_base 3: mod_base = OTHER; note = 2'-O-methyluridine-3'-phosphate
  modified_base 4: mod_base = OTHER; note = 2'-O-methyluridine-3'-phosphate
  modified_base 5: mod_base = OTHER; note = 2'-O-methyladenosine-3'-phosphate
  modified_base 6: mod_base = OTHER; note = 2'-deoxy-2'-fluoroguanosine-3'-phosphate
  modified_base 7: mod_base = OTHER; note = 2'-O-methylguanosine-3'-phosphate
  modified_base 8: mod_base = OTHER; note = 2'-deoxy-2'-fluorouridine-3'-phosphate
  modified_base 9: mod_base = OTHER; note = 2'-deoxy-2'-fluoroadenosine-3'-phosphate
  modified_base 10: mod_base = OTHER; note = 2'-O-methylguanosine-3'-phosphate
  modified_base 11: mod_base = OTHER; note = 2'-O-methyluridine-3'-phosphate
  modified_base 12: mod_base = OTHER; note = 2'-O-methyluridine-3'-phosphate
  modified_base 13: mod_base = OTHER; note = 2'-O-methyladenosine-3'-phosphate
  modified_base 14: mod_base = OTHER; note = 2'-deoxy-2'-fluoroadenosine-3'-phosphate
  modified_base 15: mod_base = OTHER; note = 2'-O-methylguanosine-3'-phosphate
  modified_base 16: mod_base = OTHER; note = 2'-deoxy-2'-fluoroadenosine-3'-phosphate
  modified_base 17: mod_base = OTHER; note = 2'-O-methyluridine-3'-phosphate
  modified_base 18: mod_base = OTHER; note = 2'-O-methyluridine-3'-phosphate
  modified_base 19: mod_base = OTHER; note = 2'-O-methyluridine-3'-phosphate
  modified_base 20: mod_base = OTHER; note = 2'-O-methyluridine-3'-phosphate
  modified_base 21: mod_base = OTHER; note = 2'-O-methylguanosine-3'-phosphorothioate
  modified_base 22: mod_base = OTHER; note = 2'-O-methylcytidine-3'-phosphorothioate
  modified_base 23: mod_base = OTHER; note = 2'-O-methylguanosine
aattaggtagttaagattttgcg

SEQ ID NO: 4283 - RNA, 23 nt, synthetic construct
  source 1..23: mol_type = other RNA
  modified_base 1: mod_base = OTHER; note = 2'-O-methyladenosine-3'-phosphorothioate
  modified_base 2: mod_base = OTHER; note = 2'-deoxy-2'-fluorouridine-3'-phosphorothioate
  modified_base 3: mod_base = OTHER; note = 2'-O-methyladenosine-3'-phosphate
  modified_base 4: mod_base = OTHER; note = 2'-O-methyladenosine-3'-phosphate
  modified_base 5: mod_base = OTHER; note = 2'-O-methylguanosine-3'-phosphate
  modified_base 6: mod_base = OTHER; note = 2'-deoxy-2'-fluoroguanosine-3'-phosphate
  modified_base 7: mod_base = OTHER; note = 2'-O-methyluridine-3'-phosphate
  modified_base 8: mod_base = OTHER; note = 2'-deoxy-2'-fluorouridine-3'-phosphate
  modified_base 9: mod_base = OTHER; note = 2'-deoxy-2'-fluorouridine-3'-phosphate
  modified_base 10: mod_base = OTHER; note = 2'-O-methyladenosine-3'-phosphate
  modified_base 11: mod_base = OTHER; note = 2'-O-methyluridine-3'-phosphate
  modified_base 12: mod_base = OTHER; note = 2'-O-methylguanosine-3'-phosphate
  modified_base 13: mod_base = OTHER; note = 2'-O-methylguanosine-3'-phosphate
  modified_base 14: mod_base = OTHER; note = 2'-deoxy-2'-fluorouridine-3'-phosphate
  modified_base 15: mod_base = OTHER; note = 2'-O-methylcytidine-3'-phosphate
  modified_base 16: mod_base = OTHER; note = 2'-deoxy-2'-fluoroadenosine-3'-phosphate
  modified_base 17: mod_base = OTHER; note = 2'-O-methyladenosine-3'-phosphate
  modified_base 18: mod_base = OTHER; note = 2'-O-methyluridine-3'-phosphate
  modified_base 19: mod_base = OTHER; note = 2'-O-methyladenosine-3'-phosphate
  modified_base 20: mod_base = OTHER; note = 2'-O-methylguanosine-3'-phosphate
  modified_base 21: mod_base = OTHER; note = 2'-O-methyluridine-3'-phosphorothioate
  modified_base 22: mod_base = OTHER; note = 2'-O-methyladenosine-3'-phosphorothioate
  modified_base 23: mod_base = OTHER; note = 2'-O-methylguanosine
ataaggtttatggtcaatagtag

SEQ ID NO: 4284 - RNA, 23 nt, synthetic construct
  source 1..23: mol_type = other RNA
  modified_base 1: mod_base = OTHER; note = 2'-O-methyladenosine-3'-phosphorothioate
  modified_base 2: mod_base = OTHER; note = 2'-deoxy-2'-fluorouridine-3'-phosphorothioate
  modified_base 3: mod_base = OTHER; note = 2'-O-methylguanosine-3'-phosphate
  modified_base 4: mod_base = OTHER; note = 2'-O-methyluridine-3'-phosphate
  modified_base 5: mod_base = OTHER; note = 2'-O-methyluridine-3'-phosphate
  modified_base 6: mod_base = OTHER; note = 2'-deoxy-2'-fluorouridine-3'-phosphate
  modified_base 7: mod_base = OTHER; note = 2'-O-methyladenosine-3'-phosphate
  modified_base 8: mod_base = OTHER; note = 2'-deoxy-2'-fluorouridine-3'-phosphate
  modified_base 9: mod_base = OTHER; note = 2'-deoxy-2'-fluoroguanosine-3'-phosphate
  modified_base 10: mod_base = OTHER; note = 2'-O-methyluridine-3'-phosphate
  modified_base 11: mod_base = OTHER; note = 2'-O-methyluridine-3'-phosphate
  modified_base 12: mod_base = OTHER; note = 2'-O-methyladenosine-3'-phosphate
  modified_base 13: mod_base = OTHER; note = 2'-O-methyluridine-3'-phosphate
  modified_base 14: mod_base = OTHER; note = 2'-deoxy-2'-fluorocytidine-3'-phosphate
  modified_base 15: mod_base = OTHER; note = 2'-O-methyladenosine-3'-phosphate
  modified_base 16: mod_base = OTHER; note = 2'-deoxy-2'-fluoroguanosine-3'-phosphate
  modified_base 17: mod_base = OTHER; note = 2'-O-methyluridine-3'-phosphate
  modified_base 18: mod_base = OTHER; note = 2'-O-methyladenosine-3'-phosphate
  modified_base 19: mod_base = OTHER; note = 2'-O-methyladenosine-3'-phosphate
  modified_base 20: mod_base = OTHER; note = 2'-O-methylguanosine-3'-phosphate
  modified_base 21: mod_base = OTHER; note = 2'-O-methylguanosine-3'-phosphorothioate
  modified_base 22: mod_base = OTHER; note = 2'-O-methyluridine-3'-phosphorothioate
  modified_base 23: mod_base = OTHER; note = 2'-O-methyluridine
atgtttatgttatcagtaaggtt

SEQ ID NO: 4285 - RNA, 23 nt, synthetic construct
  source 1..23: mol_type = other RNA
  modified_base 1: mod_base = OTHER; note = 2'-O-methyladenosine-3'-phosphorothioate
  modified_base 2: mod_base = OTHER; note = 2'-deoxy-2'-fluoroadenosine-3'-phosphorothioate
  modified_base 3: mod_base = OTHER; note = 2'-O-methyluridine-3'-phosphate
  modified_base 4: mod_base = OTHER; note = 2'-O-methyladenosine-3'-phosphate
  modified_base 5: mod_base = OTHER; note = 2'-O-methyladenosine-3'-phosphate
  modified_base 6: mod_base = OTHER; note = 2'-deoxy-2'-fluorocytidine-3'-phosphate
  modified_base 7: mod_base = OTHER; note = 2'-O-methyladenosine-3'-phosphate
  modified_base 8: mod_base = OTHER; note = 2'-deoxy-2'-fluorocytidine-3'-phosphate
  modified_base 9: mod_base = OTHER; note = 2'-deoxy-2'-fluoroguanosine-3'-phosphate
  modified_base 10: mod_base = OTHER; note = 2'-O-methylcytidine-3'-phosphate
  modified_base 11: mod_base = OTHER; note = 2'-O-methyladenosine-3'-phosphate
  modified_base 12: mod_base = OTHER; note = 2'-O-methyladenosine-3'-phosphate
  modified_base 13: mod_base = OTHER; note = 2'-O-methyladenosine-3'-phosphate
  modified_base 14: mod_base = OTHER; note = 2'-deoxy-2'-fluoroadenosine-3'-phosphate
  modified_base 15: mod_base = OTHER; note = 2'-O-methyluridine-3'-phosphate
  modified_base 16: mod_base = OTHER; note = 2'-deoxy-2'-fluoroadenosine-3'-phosphate
  modified_base 17: mod_base = OTHER; note = 2'-O-methyluridine-3'-phosphate
  modified_base 18: mod_base = OTHER; note = 2'-O-methylguanosine-3'-phosphate
  modified_base 19: mod_base = OTHER; note = 2'-O-methyluridine-3'-phosphate
  modified_base 20: mod_base = OTHER; note = 2'-O-methylguanosine-3'-phosphate
  modified_base 21: mod_base = OTHER; note = 2'-O-methyluridine-3'-phosphorothioate
  modified_base 22: mod_base = OTHER; note = 2'-O-methyluridine-3'-phosphorothioate
  modified_base 23: mod_base = OTHER; note = 2'-O-methyladenosine
aataacacgcaaaatatgtgtta

SEQ ID NO: 4286 - RNA, 23 nt, synthetic construct
  source 1..23: mol_type = other RNA
  modified_base 1: mod_base = OTHER; note = 2'-O-methyladenosine-3'-phosphorothioate
  modified_base 2: mod_base = OTHER; note = 2'-deoxy-2'-fluoroguanosine-3'-phosphorothioate
  modified_base 3: mod_base = OTHER; note = 2'-O-methyluridine-3'-phosphate
  modified_base 4: mod_base = OTHER; note = 2'-O-methylguanosine-3'-phosphate
  modified_base 5: mod_base = OTHER; note = 2'-O-methyluridine-3'-phosphate
  modified_base 6: mod_base = OTHER; note = 2'-deoxy-2'-fluoroadenosine-3'-phosphate
  modified_base 7: mod_base = OTHER; note = 2'-O-methyluridine-3'-phosphate
  modified_base 8: mod_base = OTHER; note = 2'-deoxy-2'-fluoroadenosine-3'-phosphate
  modified_base 9: mod_base = OTHER; note = 2'-deoxy-2'-fluoroadenosine-3'-phosphate
  modified_base 10: mod_base = OTHER; note = 2'-O-methyluridine-3'-phosphate
  modified_base 11: mod_base = OTHER; note = 2'-O-methyladenosine-3'-phosphate
  modified_base 12: mod_base = OTHER; note = 2'-O-methylcytidine-3'-phosphate
  modified_base 13: mod_base = OTHER; note = 2'-O-methyladenosine-3'-phosphate
  modified_base 14: mod_base = OTHER; note = 2'-deoxy-2'-fluorouridine-3'-phosphate
  modified_base 15: mod_base = OTHER; note = 2'-O-methyladenosine-3'-phosphate
  modified_base 16: mod_base = OTHER; note = 2'-deoxy-2'-fluorouridine-3'-phosphate
  modified_base 17: mod_base = OTHER; note = 2'-O-methyladenosine-3'-phosphate
  modified_base 18: mod_base = OTHER; note = 2'-O-methyladenosine-3'-phosphate
  modified_base 19: mod_base = OTHER; note = 2'-O-methylcytidine-3'-phosphate
  modified_base 20: mod_base = OTHER; note = 2'-O-methyladenosine-3'-phosphate
  modified_base 21: mod_base = OTHER; note = 2'-O-methylcytidine-3'-phosphorothioate
  modified_base 22: mod_base = OTHER; note = 2'-O-methylguanosine-3'-phosphorothioate
  modified_base 23: mod_base = OTHER; note = 2'-O-methylcytidine
agtgtataatacatataacacgc

SEQ ID NO: 4287 - RNA, 23 nt, synthetic construct
  source 1..23: mol_type = other RNA
  modified_base 1: mod_base = OTHER; note = 2'-O-methyladenosine-3'-phosphorothioate
  modified_base 2: mod_base = OTHER; note = 2'-deoxy-2'-fluoroadenosine-3'-phosphorothioate
  modified_base 3: mod_base = OTHER; note = 2'-O-methylcytidine-3'-phosphate
  modified_base 4: mod_base = OTHER; note = 2'-O-methyluridine-3'-phosphate
  modified_base 5: mod_base = OTHER; note = 2'-O-methyluridine-3'-phosphate
  modified_base 6: mod_base = OTHER; note = 2'-deoxy-2'-fluorouridine-3'-phosphate
  modified_base 7: mod_base = OTHER; note = 2'-O-methyladenosine-3'-phosphate
  modified_base 8: mod_base = OTHER; note = 2'-deoxy-2'-fluorouridine-3'-phosphate
  modified_base 9: mod_base = OTHER; note = 2'-deoxy-2'-fluorouridine-3'-phosphate
  modified_base 10: mod_base = OTHER; note = 2'-O-methylguanosine-3'-phosphate
  modified_base 11: mod_base = OTHER; note = 2'-O-methyluridine-3'-phosphate
  modified_base 12: mod_base = OTHER; note = 2'-O-methyladenosine-3'-phosphate
  modified_base 13: mod_base = OTHER; note = 2'-O-methylguanosine-3'-phosphate
  modified_base 14: mod_base = OTHER; note = 2'-deoxy-2'-fluoroguanosine-3'-phosphate
  modified_base 15: mod_base = OTHER; note = 2'-O-methyladenosine-3'-phosphate
  modified_base 16: mod_base = OTHER; note = 2'-deoxy-2'-fluoroadenosine-3'-phosphate
  modified_base 17: mod_base = OTHER; note = 2'-O-methyluridine-3'-phosphate
  modified_base 18: mod_base = OTHER; note = 2'-O-methyladenosine-3'-phosphate
  modified_base 19: mod_base = OTHER; note = 2'-O-methyluridine-3'-phosphate
  modified_base 20: mod_base = OTHER; note = 2'-O-methyladenosine-3'-phosphate
  modified_base 21: mod_base = OTHER; note = 2'-O-methylguanosine-3'-phosphorothioate
  modified_base 22: mod_base = OTHER; note = 2'-O-methyluridine-3'-phosphorothioate
  modified_base 23: mod_base = OTHER; note = 2'-O-methylguanosine
aactttattgtaggaatatagtg

SEQ ID NO: 4288 - RNA, 23 nt, synthetic construct
  source 1..23: mol_type = other RNA
  modified_base 1: mod_base = OTHER; note = 2'-O-methyladenosine-3'-phosphorothioate
  modified_base 2: mod_base = OTHER; note = 2'-deoxy-2'-fluoroadenosine-3'-phosphorothioate
  modified_base 3: mod_base = OTHER; note = 2'-O-methyladenosine-3'-phosphate
  modified_base 4: mod_base = OTHER; note = 2'-O-methyluridine-3'-phosphate
  modified_base 5: mod_base = OTHER; note = 2'-O-methyladenosine-3'-phosphate
  modified_base 6: mod_base = OTHER; note = 2'-deoxy-2'-fluoroadenosine-3'-phosphate
  modified_base 7: mod_base = OTHER; note = 2'-O-methylcytidine-3'-phosphate
  modified_base 8: mod_base = OTHER; note = 2'-deoxy-2'-fluoroadenosine-3'-phosphate
  modified_base 9: mod_base = OTHER; note = 2'-deoxy-2'-fluorouridine-3'-phosphate
  modified_base 10: mod_base = OTHER; note = 2'-O-methyluridine-3'-phosphate
  modified_base 11: mod_base = OTHER; note = 2'-O-methyluridine-3'-phosphate
  modified_base 12: mod_base = OTHER; note = 2'-O-methyluridine-3'-phosphate
  modified_base 13: mod_base = OTHER; note = 2'-O-methylcytidine-3'-phosphate
  modified_base 14: mod_base = OTHER; note = 2'-deoxy-2'-fluorouridine-3'-phosphate
  modified_base 15: mod_base = OTHER; note = 2'-O-methylcytidine-3'-phosphate
  modified_base 16: mod_base = OTHER; note = 2'-deoxy-2'-fluorouridine-3'-phosphate
  modified_base 17: mod_base = OTHER; note = 2'-O-methyladenosine-3'-phosphate
  modified_base 18: mod_base = OTHER; note = 2'-O-methylguanosine-3'-phosphate
  modified_base 19: mod_base = OTHER; note = 2'-O-methylcytidine-3'-phosphate
  modified_base 20: mod_base = OTHER; note = 2'-O-methyluridine-3'-phosphate
  modified_base 21: mod_base = OTHER; note = 2'-O-methyluridine-3'-phosphorothioate
  modified_base 22: mod_base = OTHER; note = 2'-O-methyladenosine-3'-phosphorothioate
  modified_base 23: mod_base = OTHER; note = 2'-O-methylcytidine
aaataacattttctctagcttac

SEQ ID NO: 4289 - RNA, 23 nt, synthetic construct
  source 1..23: mol_type = other RNA
  modified_base 1: mod_base = OTHER; note = 2'-O-methyladenosine-3'-phosphorothioate
  modified_base 2: mod_base = OTHER; note = 2'-deoxy-2'-fluorocytidine-3'-phosphorothioate
  modified_base 3: mod_base = OTHER; note = 2'-O-methyladenosine-3'-phosphate
  modified_base 4: mod_base = OTHER; note = 2'-O-methylcytidine-3'-phosphate
  modified_base 5: mod_base = OTHER; note = 2'-O-methyluridine-3'-phosphate
  modified_base 6: mod_base = OTHER; note = 2'-deoxy-2'-fluorouridine-3'-phosphate
  modified_base 7: mod_base = OTHER; note = 2'-O-methylcytidine-3'-phosphate
  modified_base 8: mod_base = OTHER; note = 2'-deoxy-2'-fluorocytidine-3'-phosphate
  modified_base 9: mod_base = OTHER; note = 2'-deoxy-2'-fluoroadenosine-3'-phosphate
  modified_base 10: mod_base = OTHER; note = 2'-O-methyluridine-3'-phosphate
  modified_base 11: mod_base = OTHER; note = 2'-O-methyluridine-3'-phosphate
  modified_base 12: mod_base = OTHER; note = 2'-O-methyluridine-3'-phosphate
  modified_base 13: mod_base = OTHER; note = 2'-O-methyladenosine-3'-phosphate
  modified_base 14: mod_base = OTHER; note = 2'-deoxy-2'-fluoroadenosine-3'-phosphate
  modified_base 15: mod_base = OTHER; note = 2'-O-methyluridine-3'-phosphate
  modified_base 16: mod_base = OTHER; note = 2'-deoxy-2'-fluoroguanosine-3'-phosphate
  modified_base 17: mod_base = OTHER; note = 2'-O-methyladenosine-3'-phosphate
  modified_base 18: mod_base = OTHER; note = 2'-O-methyladenosine-3'-phosphate
  modified_base 19: mod_base = OTHER; note = 2'-O-methyluridine-3'-phosphate
  modified_base 20: mod_base = OTHER; note = 2'-O-methyladenosine-3'-phosphate
  modified_base 21: mod_base = OTHER; note = 2'-O-methylguanosine-3'-phosphorothioate
  modified_base 22: mod_base = OTHER; note = 2'-O-methyluridine-3'-phosphorothioate
  modified_base 23: mod_base = OTHER; note = 2'-O-methyladenosine
acacttccatttaatgaatagta

SEQ ID NO: 4290 - RNA, 23 nt, synthetic construct
  source 1..23: mol_type = other RNA
  modified_base 1: mod_base = OTHER; note = 2'-O-methyladenosine-3'-phosphorothioate
  modified_base 2: mod_base = OTHER; note = 2'-deoxy-2'-fluoroadenosine-3'-phosphorothioate
  modified_base 3: mod_base = OTHER; note = 2'-O-methylguanosine-3'-phosphate
  modified_base 4: mod_base = OTHER; note = 2'-O-methyladenosine-3'-phosphate
  modified_base 5: mod_base = OTHER; note = 2'-O-methyladenosine-3'-phosphate
  modified_base 6: mod_base = OTHER; note = 2'-deoxy-2'-fluorouridine-3'-phosphate
  modified_base 7: mod_base = OTHER; note = 2'-O-methylguanosine-3'-phosphate
  modified_base 8: mod_base = OTHER; note = 2'-deoxy-2'-fluoroadenosine-3'-phosphate
  modified_base 9: mod_base = OTHER; note = 2'-deoxy-2'-fluoroadenosine-3'-phosphate
  modified_base 10: mod_base = OTHER; note = 2'-O-methylguanosine-3'-phosphate
  modified_base 11: mod_base = OTHER; note = 2'-O-methyladenosine-3'-phosphate
  modified_base 12: mod_base = OTHER; note = 2'-O-methylcytidine-3'-phosphate
  modified_base 13: mod_base = OTHER; note = 2'-O-methyluridine-3'-phosphate
  modified_base 14: mod_base = OTHER; note = 2'-deoxy-2'-fluorouridine-3'-phosphate
  modified_base 15: mod_base = OTHER; note = 2'-O-methyluridine-3'-phosphate
  modified_base 16: mod_base = OTHER; note = 2'-deoxy-2'-fluorouridine-3'-phosphate
  modified_base 17: mod_base = OTHER; note = 2'-O-methyladenosine-3'-phosphate
  modified_base 18: mod_base = OTHER; note = 2'-O-methyluridine-3'-phosphate
  modified_base 19: mod_base = OTHER; note = 2'-O-methylguanosine-3'-phosphate
  modified_base 20: mod_base = OTHER; note = 2'-O-methyluridine-3'-phosphate
  modified_base 21: mod_base = OTHER; note = 2'-O-methyluridine-3'-phosphorothioate
  modified_base 22: mod_base = OTHER; note = 2'-O-methylguanosine-3'-phosphorothioate
  modified_base 23: mod_base = OTHER; note = 2'-O-methyladenosine
aagaatgaagacttttatgttga

SEQ ID NO: 4291 - RNA, 23 nt, synthetic construct
  source 1..23: mol_type = other RNA
  modified_base 1: mod_base = OTHER; note = 2'-O-methyladenosine-3'-phosphorothioate
  modified_base 2: mod_base = OTHER; note = 2'-deoxy-2'-fluoroadenosine-3'-phosphorothioate
  modified_base 3: mod_base = OTHER; note = 2'-O-methyluridine-3'-phosphate
  modified_base 4: mod_base = OTHER; note = 2'-O-methylguanosine-3'-phosphate
  modified_base 5: mod_base = OTHER; note = 2'-O-methyluridine-3'-phosphate
  modified_base 6: mod_base = OTHER; note = 2'-deoxy-2'-fluoroguanosine-3'-phosphate
  modified_base 7: mod_base = OTHER; note = 2'-O-methyladenosine-3'-phosphate
  modified_base 8: mod_base = OTHER; note = 2'-deoxy-2'-fluoroadenosine-3'-phosphate
  modified_base 9: mod_base = OTHER; note = 2'-deoxy-2'-fluoroguanosine-3'-phosphate
  modified_base 10: mod_base = OTHER; note = 2'-O-methyladenosine-3'-phosphate
  modified_base 11: mod_base = OTHER; note = 2'-O-methylcytidine-3'-phosphate
  modified_base 12: mod_base = OTHER; note = 2'-O-methyladenosine-3'-phosphate
  modified_base 13: mod_base = OTHER; note = 2'-O-methyladenosine-3'-phosphate
  modified_base 14: mod_base = OTHER; note = 2'-deoxy-2'-fluorouridine-3'-phosphate
  modified_base 15: mod_base = OTHER; note = 2'-O-methylguanosine-3'-phosphate
  modified_base 16: mod_base = OTHER; note = 2'-deoxy-2'-fluoroadenosine-3'-phosphate
  modified_base 17: mod_base = OTHER; note = 2'-O-methylguanosine-3'-phosphate
  modified_base 18: mod_base = OTHER; note = 2'-O-methyladenosine-3'-phosphate
  modified_base 19: mod_base = OTHER; note = 2'-O-methyladenosine-3'-phosphate
  modified_base 20: mod_base = OTHER; note = 2'-O-methyluridine-3'-phosphate
  modified_base 21: mod_base = OTHER; note = 2'-O-methylguanosine-3'-phosphorothioate
  modified_base 22: mod_base = OTHER; note = 2'-O-methyladenosine-3'-phosphorothioate
  modified_base 23: mod_base = OTHER; note = 2'-O-methyladenosine
aatgtgaagacaatgagaatgaa

SEQ ID NO: 4292 - RNA, 23 nt, synthetic construct
  source 1..23: mol_type = other RNA
  modified_base 1: mod_base = OTHER; note = 2'-O-methyladenosine-3'-phosphorothioate
  modified_base 2: mod_base = OTHER; note = 2'-deoxy-2'-fluorouridine-3'-phosphorothioate
  modified_base 3: mod_base = OTHER; note = 2'-O-methyladenosine-3'-phosphate
  modified_base 4: mod_base = OTHER; note = 2'-O-methyladenosine-3'-phosphate
  modified_base 5: mod_base = OTHER; note = 2'-O-methylguanosine-3'-phosphate
  modified_base 6: mod_base = OTHER; note = 2'-deoxy-2'-fluoroadenosine-3'-phosphate
  modified_base 7: mod_base = OTHER; note = 2'-O-methylcytidine-3'-phosphate
  modified_base 8: mod_base = OTHER; note = 2'-deoxy-2'-fluoroadenosine-3'-phosphate
  modified_base 9: mod_base = OTHER; note = 2'-deoxy-2'-fluoroadenosine-3'-phosphate
  modified_base 10: mod_base = OTHER; note = 2'-O-methylguanosine-3'-phosphate
  modified_base 11: mod_base = OTHER; note = 2'-O-methyladenosine-3'-phosphate
  modified_base 12: mod_base = OTHER; note = 2'-O-methylcytidine-3'-phosphate
  modified_base 13: mod_base = OTHER; note = 2'-O-methyluridine-3'-phosphate
  modified_base 14: mod_base = OTHER; note = 2'-deoxy-2'-fluoroguanosine-3'-phosphate
  modified_base 15: mod_base = OTHER; note = 2'-O-methylcytidine-3'-phosphate
  modified_base 16: mod_base = OTHER; note = 2'-deoxy-2'-fluoroadenosine-3'-phosphate
  modified_base 17: mod_base = OTHER; note = 2'-O-methyladenosine-3'-phosphate
  modified_base 18: mod_base = OTHER; note = 2'-O-methylguanosine-3'-phosphate
  modified_base 19: mod_base = OTHER; note = 2'-O-methyladenosine-3'-phosphate
  modified_base 20: mod_base = OTHER; note = 2'-O-methylcytidine-3'-phosphate
  modified_base 21: mod_base = OTHER; note = 2'-O-methylcytidine-3'-phosphorothioate
  modified_base 22: mod_base = OTHER; note = 2'-O-methyladenosine-3'-phosphorothioate
  modified_base 23: mod_base = OTHER; note = 2'-O-methyladenosine
ataagacaagactgcaagaccaa

SEQ ID NO: 4293 - RNA, 23 nt, synthetic construct
  source 1..23: mol_type = other RNA
  modified_base 1: mod_base = OTHER; note = 2'-O-methyladenosine-3'-phosphorothioate
  modified_base 2: mod_base = OTHER; note = 2'-deoxy-2'-fluorocytidine-3'-phosphorothioate
  modified_base 3: mod_base = OTHER; note = 2'-O-methyluridine-3'-phosphate
  modified_base 4: mod_base = OTHER; note = 2'-O-methyluridine-3'-phosphate
  modified_base 5: mod_base = OTHER; note = 2'-O-methyladenosine-3'-phosphate
  modified_base 6: mod_base = OTHER; note = 2'-deoxy-2'-fluorouridine-3'-phosphate
  modified_base 7: mod_base = OTHER; note = 2'-O-methyladenosine-3'-phosphate
  modified_base 8: mod_base = OTHER; note = 2'-deoxy-2'-fluorocytidine-3'-phosphate
  modified_base 9: mod_base = OTHER; note = 2'-deoxy-2'-fluoroadenosine-3'-phosphate
  modified_base 10: mod_base = OTHER; note = 2'-O-methyluridine-3'-phosphate
  modified_base 11: mod_base = OTHER; note = 2'-O-methylguanosine-3'-phosphate
  modified_base 12: mod_base = OTHER; note = 2'-O-methyladenosine-3'-phosphate
  modified_base 13: mod_base = OTHER; note = 2'-O-methyladenosine-3'-phosphate
  modified_base 14: mod_base = OTHER; note = 2'-deoxy-2'-fluorouridine-3'-phosphate
  modified_base 15: mod_base = OTHER; note = 2'-O-methyladenosine-3'-phosphate
  modified_base 16: mod_base = OTHER; note = 2'-deoxy-2'-fluorouridine-3'-phosphate
  modified_base 17: mod_base = OTHER; note = 2'-O-methyluridine-3'-phosphate
  modified_base 18: mod_base = OTHER; note = 2'-O-methylcytidine-3'-phosphate
  modified_base 19: mod_base = OTHER; note = 2'-O-methyluridine-3'-phosphate
  modified_base 20: mod_base = OTHER; note = 2'-O-methyluridine-3'-phosphate
  modified_base 21: mod_base = OTHER; note = 2'-O-methyluridine-3'-phosphorothioate
  modified_base 22: mod_base = OTHER; note = 2'-O-methylcytidine-3'-phosphorothioate
  modified_base 23: mod_base = OTHER; note = 2'-O-methylcytidine
acttatacatgaatattctttcc

SEQ ID NO: 4294 - RNA, 23 nt, synthetic construct
  source 1..23: mol_type = other RNA
  modified_base 1: mod_base = OTHER; note = 2'-O-methyladenosine-3'-phosphorothioate
  modified_base 2: mod_base = OTHER; note = 2'-deoxy-2'-fluoroadenosine-3'-phosphorothioate
  modified_base 3: mod_base = OTHER; note = 2'-O-methyladenosine-3'-phosphate
  modified_base 4: mod_base = OTHER; note = 2'-O-methylcytidine-3'-phosphate
  modified_base 5: mod_base = OTHER; note = 2'-O-methyladenosine-3'-phosphate
  modified_base 6: mod_base = OTHER; note = 2'-deoxy-2'-fluoroadenosine-3'-phosphate
  modified_base 7: mod_base = OTHER; note = 2'-O-methylguanosine-3'-phosphate
  modified_base 8: mod_base = OTHER; note = 2'-deoxy-2'-fluoroguanosine-3'-phosphate
  modified_base 9: mod_base = OTHER; note = 2'-deoxy-2'-fluoroguanosine-3'-phosphate
  modified_base 10: mod_base = OTHER; note = 2'-O-methylcytidine-3'-phosphate
  modified_base 11: mod_base = OTHER; note = 2'-O-methyluridine-3'-phosphate
  modified_base 12: mod_base = OTHER; note = 2'-O-methyluridine-3'-phosphate
  modified_base 13: mod_base = OTHER; note = 2'-O-methylguanosine-3'-phosphate
  modified_base 14: mod_base = OTHER; note = 2'-deoxy-2'-fluoroadenosine-3'-phosphate
  modified_base 15: mod_base = OTHER; note = 2'-O-methyladenosine-3'-phosphate
  modified_base 16: mod_base = OTHER; note = 2'-deoxy-2'-fluorouridine-3'-phosphate
  modified_base 17: mod_base = OTHER; note = 2'-O-methyluridine-3'-phosphate
  modified_base 18: mod_base = OTHER; note = 2'-O-methylguanosine-3'-phosphate
  modified_base 19: mod_base = OTHER; note = 2'-O-methylcytidine-3'-phosphate
  modified_base 20: mod_base = OTHER; note = 2'-O-methyladenosine-3'-phosphate
  modified_base 21: mod_base = OTHER; note = 2'-O-methyladenosine-3'-phosphorothioate
  modified_base 22: mod_base = OTHER; note = 2'-O-methylguanosine-3'-phosphorothioate
  modified_base 23: mod_base = OTHER; note = 2'-O-methylguanosine
aaacaagggcttgaattgcaagg

SEQ ID NO: 4295 - RNA, 23 nt, synthetic construct
  source 1..23: mol_type = other RNA
  modified_base 1: mod_base = OTHER; note = 2'-O-methyladenosine-3'-phosphorothioate
  modified_base 2: mod_base = OTHER; note = 2'-deoxy-2'-fluorouridine-3'-phosphorothioate
  modified_base 3: mod_base = OTHER; note = 2'-O-methyladenosine-3'-phosphate
  modified_base 4: mod_base = OTHER; note = 2'-O-methylcytidine-3'-phosphate
  modified_base 5: mod_base = OTHER; note = 2'-O-methyladenosine-3'-phosphate
  modified_base 6: mod_base = OTHER; note = 2'-deoxy-2'-fluoroguanosine-3'-phosphate
  modified_base 7: mod_base = OTHER; note = 2'-O-methyluridine-3'-phosphate
  modified_base 8: mod_base = OTHER; note = 2'-deoxy-2'-fluorouridine-3'-phosphate
  modified_base 9: mod_base = OTHER; note = 2'-deoxy-2'-fluoroguanosine-3'-phosphate
  modified_base 10: mod_base = OTHER; note = 2'-O-methyladenosine-3'-phosphate
  modified_base 11: mod_base = OTHER; note = 2'-O-methylcytidine-3'-phosphate
  modified_base 12: mod_base = OTHER; note = 2'-O-methylcytidine-3'-phosphate
  modified_base 13: mod_base = OTHER; note = 2'-O-methylcytidine-3'-phosphate
  modified_base 14: mod_base = OTHER; note = 2'-deoxy-2'-fluorouridine-3'-phosphate
  modified_base 15: mod_base = OTHER; note = 2'-O-methyluridine-3'-phosphate
  modified_base 16: mod_base = OTHER; note = 2'-deoxy-2'-fluoroguanosine-3'-phosphate
  modified_base 17: mod_base = OTHER; note = 2'-O-methyladenosine-3'-phosphate
  modified_base 18: mod_base = OTHER; note = 2'-O-methyladenosine-3'-phosphate
  modified_base 19: mod_base = OTHER; note = 2'-O-methylcytidine-3'-phosphate
  modified_base 20: mod_base = OTHER; note = 2'-O-methyladenosine-3'-phosphate
  modified_base 21: mod_base = OTHER; note = 2'-O-methyladenosine-3'-phosphorothioate
  modified_base 22: mod_base = OTHER; note = 2'-O-methylcytidine-3'-phosphorothioate
  modified_base 23: mod_base = OTHER; note = 2'-O-methyladenosine
atacagttgacccttgaacaaca

SEQ ID NO: 4296 - RNA, 23 nt, synthetic construct
  source 1..23: mol_type = other RNA
  modified_base 1: mod_base = OTHER; note = 2'-O-methyladenosine-3'-phosphorothioate
  modified_base 2: mod_base = OTHER; note = 2'-deoxy-2'-fluoroadenosine-3'-phosphorothioate
  modified_base 3: mod_base = OTHER; note = 2'-O-methylguanosine-3'-phosphate
  modified_base 4: mod_base = OTHER; note = 2'-O-methylcytidine-3'-phosphate
  modified_base 5: mod_base = OTHER; note = 2'-O-methyluridine-3'-phosphate
  modified_base 6: mod_base = OTHER; note = 2'-deoxy-2'-fluoroadenosine-3'-phosphate
  modified_base 7: mod_base = OTHER; note = 2'-O-methyluridine-3'-phosphate
  modified_base 8: mod_base = OTHER; note = 2'-deoxy-2'-fluoroadenosine-3'-phosphate
  modified_base 9: mod_base = OTHER; note = 2'-deoxy-2'-fluorouridine-3'-phosphate
  modified_base 10: mod_base = OTHER; note = 2'-O-methylcytidine-3'-phosphate
  modified_base 11: mod_base = OTHER; note = 2'-O-methylcytidine-3'-phosphate
  modified_base 12: mod_base = OTHER; note = 2'-O-methyluridine-3'-phosphate
  modified_base 13: mod_base = OTHER; note = 2'-O-methyladenosine-3'-phosphate
  modified_base 14: mod_base = OTHER; note = 2'-deoxy-2'-fluorouridine-3'-phosphate
  modified_base 15: mod_base = OTHER; note = 2'-O-methyluridine-3'-phosphate
  modified_base 16: mod_base = OTHER; note = 2'-deoxy-2'-fluoroadenosine-3'-phosphate
  modified_base 17: mod_base = OTHER; note = 2'-O-methylcytidine-3'-phosphate
  modified_base 18: mod_base = OTHER; note = 2'-O-methyladenosine-3'-phosphate
  modified_base 19: mod_base = OTHER; note = 2'-O-methylguanosine-3'-phosphate
  modified_base 20: mod_base = OTHER; note = 2'-O-methyluridine-3'-phosphate
  modified_base 21: mod_base = OTHER; note = 2'-O-methyluridine-3'-phosphorothioate
  modified_base 22: mod_base = OTHER; note = 2'-O-methylguanosine-3'-phosphorothioate
  modified_base 23: mod_base = OTHER; note = 2'-O-methyladenosine
aagctatatcctattacagttga

SEQ ID NO: 4297 - RNA, 23 nt, synthetic construct
  source 1..23: mol_type = other RNA
  modified_base 1: mod_base = OTHER; note = 2'-O-methyladenosine-3'-phosphorothioate
  modified_base 2: mod_base = OTHER; note = 2'-deoxy-2'-fluorouridine-3'-phosphorothioate
  modified_base 3: mod_base = OTHER; note = 2'-O-methylguanosine-3'-phosphate
  modified_base 4: mod_base = OTHER; note = 2'-O-methyladenosine-3'-phosphate
  modified_base 5: mod_base = OTHER; note = 2'-O-methyluridine-3'-phosphate
  modified_base 6: mod_base = OTHER; note = 2'-deoxy-2'-fluoroadenosine-3'-phosphate
  modified_base 7: mod_base = OTHER; note = 2'-O-methylguanosine-3'-phosphate
  modified_base 8: mod_base = OTHER; note = 2'-deoxy-2'-fluoroadenosine-3'-phosphate
  modified_base 9: mod_base = OTHER; note = 2'-deoxy-2'-fluoroguanosine-3'-phosphate
  modified_base 10: mod_base = OTHER; note = 2'-O-methylguanosine-3'-phosphate
  modified_base 11: mod_base = OTHER; note = 2'-O-methyladenosine-3'-phosphate
  modified_base 12: mod_base = OTHER; note = 2'-O-methyladenosine-3'-phosphate
  modified_base 13: mod_base = OTHER; note = 2'-O-methylguanosine-3'-phosphate
  modified_base 14: mod_base = OTHER; note = 2'-deoxy-2'-fluoroadenosine-3'-phosphate
  modified_base 15: mod_base = OTHER; note = 2'-O-methyladenosine-3'-phosphate
  modified_base 16: mod_base = OTHER; note = 2'-deoxy-2'-fluoroadenosine-3'-phosphate
  modified_base 17: mod_base = OTHER; note = 2'-O-methyladenosine-3'-phosphate
  modified_base 18: mod_base = OTHER; note = 2'-O-methyladenosine-3'-phosphate
  modified_base 19: mod_base = OTHER; note = 2'-O-methyluridine-3'-phosphate
  modified_base 20: mod_base = OTHER; note = 2'-O-methyladenosine-3'-phosphate
  modified_base 21: mod_base = OTHER; note = 2'-O-methylguanosine-3'-phosphorothioate
  modified_base 22: mod_base = OTHER; note = 2'-O-methylcytidine-3'-phosphorothioate
  modified_base 23: mod_base = OTHER; note = 2'-O-methyluridine
atgatagaggaagaaaaatagct

SEQ ID NO: 4298 - RNA, 23 nt, synthetic construct
  source 1..23: mol_type = other RNA
  modified_base 1: mod_base = OTHER; note = 2'-O-methyladenosine-3'-phosphorothioate
  modified_base 2: mod_base = OTHER; note = 2'-deoxy-2'-fluorocytidine-3'-phosphorothioate
  modified_base 3: mod_base = OTHER; note = 2'-O-methyluridine-3'-phosphate
  modified_base 4: mod_base = OTHER; note = 2'-O-methyluridine-3'-phosphate
  modified_base 5: mod_base = OTHER; note = 2'-O-methyladenosine-3'-phosphate
  modified_base 6: mod_base = OTHER; note = 2'-deoxy-2'-fluorocytidine-3'-phosphate
  modified_base 7: mod_base = OTHER; note = 2'-O-methylcytidine-3'-phosphate
  modified_base 8: mod_base = OTHER; note = 2'-deoxy-2'-fluoroadenosine-3'-phosphate
  modified_base 9: mod_base = OTHER; note = 2'-deoxy-2'-fluorouridine-3'-phosphate
  modified_base 10: mod_base = OTHER; note = 2'-O-methyluridine-3'-phosphate
  modified_base 11: mod_base = OTHER; note = 2'-O-methyluridine-3'-phosphate
  modified_base 12: mod_base = OTHER; note = 2'-O-methylguanosine-3'-phosphate
  modified_base 13: mod_base = OTHER; note = 2'-O-methylguanosine-3'-phosphate
  modified_base 14: mod_base = OTHER; note = 2'-deoxy-2'-fluorouridine-3'-phosphate
  modified_base 15: mod_base = OTHER; note = 2'-O-methyluridine-3'-phosphate
  modified_base 16: mod_base = OTHER; note = 2'-deoxy-2'-fluoroguanosine-3'-phosphate
  modified_base 17: mod_base = OTHER; note = 2'-O-methyladenosine-3'-phosphate
  modified_base 18: mod_base = OTHER; note = 2'-O-methyluridine-3'-phosphate
  modified_base 19: mod_base = OTHER; note = 2'-O-methyladenosine-3'-phosphate
  modified_base 20: mod_base = OTHER; note = 2'-O-methylguanosine-3'-phosphate
  modified_base 21: mod_base = OTHER; note = 2'-O-methyladenosine-3'-phosphorothioate
  modified_base 22: mod_base = OTHER; note = 2'-O-methylguanosine-3'-phosphorothioate
  modified_base 23: mod_base = OTHER; note = 2'-O-methylguanosine
acttaccatttggttgatagagg

SEQ ID NO: 4299 - RNA, 23 nt, synthetic construct
  source 1..23: mol_type = other RNA
  modified_base 1: mod_base = OTHER; note = 2'-O-methyladenosine-3'-phosphorothioate
  modified_base 2: mod_base = OTHER; note = 2'-deoxy-2'-fluoroguanosine-3'-phosphorothioate
  modified_base 3: mod_base = OTHER; note = 2'-O-methyladenosine-3'-phosphate
  modified_base 4: mod_base = OTHER; note = 2'-O-methylguanosine-3'-phosphate
  modified_base 5: mod_base = OTHER; note = 2'-O-methyluridine-3'-phosphate
  modified_base 6: mod_base = OTHER; note = 2'-deoxy-2'-fluoroguanosine-3'-phosphate
  modified_base 7: mod_base = OTHER; note = 2'-O-methylguanosine-3'-phosphate
  modified_base 8: mod_base = OTHER; note = 2'-deoxy-2'-fluoroadenosine-3'-phosphate
  modified_base 9: mod_base = OTHER; note = 2'-deoxy-2'-fluorocytidine-3'-phosphate
  modified_base 10: mod_base = OTHER; note = 2'-O-methyluridine-3'-phosphate
  modified_base 11: mod_base = OTHER; note = 2'-O-methylguanosine-3'-phosphate
  modified_base 12: mod_base = OTHER; note = 2'-O-methylcytidine-3'-phosphate
  modified_base 13: mod_base = OTHER; note = 2'-O-methyladenosine-3'-phosphate
  modified_base 14: mod_base = OTHER; note = 2'-deoxy-2'-fluoroadenosine-3'-phosphate
  modified_base 15: mod_base = OTHER; note = 2'-O-methyladenosine-3'-phosphate
  modified_base 16: mod_base = OTHER; note = 2'-deoxy-2'-fluoroadenosine-3'-phosphate
  modified_base 17: mod_base = OTHER; note = 2'-O-methyluridine-3'-phosphate
  modified_base 18: mod_base = OTHER; note = 2'-O-methyladenosine-3'-phosphate
  modified_base 19: mod_base = OTHER; note = 2'-O-methylguanosine-3'-phosphate
  modified_base 20: mod_base = OTHER; note = 2'-O-methyladenosine-3'-phosphate
  modified_base 21: mod_base = OTHER; note = 2'-O-methyluridine-3'-phosphorothioate
  modified_base 22: mod_base = OTHER; note = 2'-O-methylguanosine-3'-phosphorothioate
  modified_base 23: mod_base = OTHER; note = 2'-O-methylcytidine
agagtggactgcaaaatagatgc

SEQ ID NO: 4300 - RNA, 23 nt, synthetic construct
  source 1..23: mol_type = other RNA
  modified_base 1: mod_base = OTHER; note = 2'-O-methyladenosine-3'-phosphorothioate
  modified_base 2: mod_base = OTHER; note = 2'-deoxy-2'-fluoroadenosine-3'-phosphorothioate
  modified_base 3: mod_base = OTHER; note = 2'-O-methyluridine-3'-phosphate
  modified_base 4: mod_base = OTHER; note = 2'-O-methylcytidine-3'-phosphate
  modified_base 5: mod_base = OTHER; note = 2'-O-methyluridine-3'-phosphate
  modified_base 6: mod_base = OTHER; note = 2'-deoxy-2'-fluoroadenosine-3'-phosphate
  modified_base 7: mod_base = OTHER; note = 2'-O-methyluridine-3'-phosphate
  modified_base 8: mod_base = OTHER; note = 2'-deoxy-2'-fluoroadenosine-3'-phosphate
  modified_base 9: mod_base = OTHER; note = 2'-deoxy-2'-fluoroadenosine-3'-phosphate
  modified_base 10: mod_base = OTHER; note = 2'-O-methyluridine-3'-phosphate
  modified_base 11: mod_base = OTHER; note = 2'-O-methyluridine-3'-phosphate
  modified_base 12: mod_base = OTHER; note = 2'-O-methyluridine-3'-phosphate
  modified_base 13: mod_base = OTHER; note = 2'-O-methyladenosine-3'-phosphate
  modified_base 14: mod_base = OTHER; note = 2'-deoxy-2'-fluoroguanosine-3'-phosphate
  modified_base 15: mod_base = OTHER; note = 2'-O-methylcytidine-3'-phosphate
  modified_base 16: mod_base = OTHER; note = 2'-deoxy-2'-fluorouridine-3'-phosphate
  modified_base 17: mod_base = OTHER; note = 2'-O-methylcytidine-3'-phosphate
  modified_base 18: mod_base = OTHER; note = 2'-O-methyladenosine-3'-phosphate
  modified_base 19: mod_base = OTHER; note = 2'-O-methylguanosine-3'-phosphate
  modified_base 20: mod_base = OTHER; note = 2'-O-methyluridine-3'-phosphate
  modified_base 21: mod_base = OTHER; note = 2'-O-methyladenosine-3'-phosphorothioate
  modified_base 22: mod_base = OTHER; note = 2'-O-methylguanosine-3'-phosphorothioate
  modified_base 23: mod_base = OTHER; note = 2'-O-methyladenosine
aatctataatttagctcagtaga

SEQ ID NO: 4301 - RNA, 23 nt, synthetic construct
  source 1..23: mol_type = other RNA
  modified_base 1: mod_base = OTHER; note = 2'-O-methyladenosine-3'-phosphorothioate
  modified_base 2: mod_base = OTHER; note = 2'-deoxy-2'-fluoroadenosine-3'-phosphorothioate
  modified_base 3: mod_base = OTHER; note = 2'-O-methyluridine-3'-phosphate
  modified_base 4: mod_base = OTHER; note = 2'-O-methyluridine-3'-phosphate
  modified_base 5: mod_base = OTHER; note = 2'-O-methyladenosine-3'-phosphate
  modified_base 6: mod_base = OTHER; note = 2'-deoxy-2'-fluorouridine-3'-phosphate
  modified_base 7: mod_base = OTHER; note = 2'-O-methyladenosine-3'-phosphate
  modified_base 8: mod_base = OTHER; note = 2'-deoxy-2'-fluoroadenosine-3'-phosphate
  modified_base 9: mod_base = OTHER; note = 2'-deoxy-2'-fluoroadenosine-3'-phosphate
  modified_base 10: mod_base = OTHER; note = 2'-O-methyluridine-3'-phosphate
  modified_base 11: mod_base = OTHER; note = 2'-O-methyladenosine-3'-phosphate
  modified_base 12: mod_base = OTHER; note = 2'-O-methylguanosine-3'-phosphate
  modified_base 13: mod_base = OTHER; note = 2'-O-methylcytidine-3'-phosphate
  modified_base 14: mod_base = OTHER; note = 2'-deoxy-2'-fluoroadenosine-3'-phosphate
  modified_base 15: mod_base = OTHER; note = 2'-O-methyluridine-3'-phosphate
  modified_base 16: mod_base = OTHER; note = 2'-deoxy-2'-fluoroadenosine-3'-phosphate
  modified_base 17: mod_base = OTHER; note = 2'-O-methylguanosine-3'-phosphate
  modified_base 18: mod_base = OTHER; note = 2'-O-methylcytidine-3'-phosphate
  modified_base 19: mod_base = OTHER; note = 2'-O-methyluridine-3'-phosphate
  modified_base 20: mod_base = OTHER; note = 2'-O-methylguanosine-3'-phosphate
  modified_base 21: mod_base = OTHER; note = 2'-O-methylguanosine-3'-phosphorothioate
  modified_base 22: mod_base = OTHER; note = 2'-O-methyladenosine-3'-phosphorothioate
  modified_base 23: mod_base = OTHER; note = 2'-O-methyluridine
aattataaatagcatagctggat

SEQ ID NO: 4302 - RNA, 23 nt, synthetic construct
  source 1..23: mol_type = other RNA
  modified_base 1: mod_base = OTHER; note = 2'-O-methyladenosine-3'-phosphorothioate
  modified_base 2: mod_base = OTHER; note = 2'-deoxy-2'-fluoroguanosine-3'-phosphorothioate
  modified_base 3: mod_base = OTHER; note = 2'-O-methyluridine-3'-phosphate
  modified_base 4: mod_base = OTHER; note = 2'-O-methylcytidine-3'-phosphate
  modified_base 5: mod_base = OTHER; note = 2'-O-methyladenosine-3'-phosphate
  modified_base 6: mod_base = OTHER; note = 2'-deoxy-2'-fluoroguanosine-3'-phosphate
  modified_base 7: mod_base = OTHER; note = 2'-O-methyladenosine-3'-phosphate
  modified_base 8: mod_base = OTHER; note = 2'-deoxy-2'-fluoroguanosine-3'-phosphate
  modified_base 9: mod_base = OTHER; note = 2'-deoxy-2'-fluoroguanosine-3'-phosphate
  modified_base 10: mod_base = OTHER; note = 2'-O-methyladenosine-3'-phosphate
  modified_base 11: mod_base = OTHER; note = 2'-O-methylguanosine-3'-phosphate
  modified_base 12: mod_base = OTHER; note = 2'-O-methyladenosine-3'-phosphate
  modified_base 13: mod_base = OTHER; note = 2'-O-methyladenosine-3'-phosphate
  modified_base 14: mod_base = OTHER; note = 2'-deoxy-2'-fluoroadenosine-3'-phosphate
  modified_base 15: mod_base = OTHER; note = 2'-O-methyluridine-3'-phosphate
  modified_base 16: mod_base = OTHER; note = 2'-deoxy-2'-fluorouridine-3'-phosphate
  modified_base 17: mod_base = OTHER; note = 2'-O-methylguanosine-3'-phosphate
  modified_base 18: mod_base = OTHER; note = 2'-O-methyladenosine-3'-phosphate
  modified_base 19: mod_base = OTHER; note = 2'-O-methyladenosine-3'-phosphate
  modified_base 20: mod_base = OTHER; note = 2'-O-methyladenosine-3'-phosphate
  modified_base 21: mod_base = OTHER; note = 2'-O-methyladenosine-3'-phosphorothioate
  modified_base 22: mod_base = OTHER; note = 2'-O-methyluridine-3'-phosphorothioate
  modified_base 23: mod_base = OTHER; note = 2'-O-methyluridine
agtcagaggagaaattgaaaatt

SEQ ID NO: 4303 - RNA, 23 nt, synthetic construct
  source 1..23: mol_type = other RNA
  modified_base 1: mod_base = OTHER; note = 2'-O-methyladenosine-3'-phosphorothioate
  modified_base 2: mod_base = OTHER; note = 2'-deoxy-2'-fluoroguanosine-3'-phosphorothioate
  modified_base 3: mod_base = OTHER; note = 2'-O-methyladenosine-3'-phosphate
  modified_base 4: mod_base = OTHER; note = 2'-O-methyladenosine-3'-phosphate
  modified_base 5: mod_base = OTHER; note = 2'-O-methylguanosine-3'-phosphate
  modified_base 6: mod_base = OTHER; note = 2'-deoxy-2'-fluoroadenosine-3'-phosphate
  modified_base 7: mod_base = OTHER; note = 2'-O-methyluridine-3'-phosphate
  modified_base 8: mod_base = OTHER; note = 2'-deoxy-2'-fluoroguanosine-3'-phosphate
  modified_base 9: mod_base = OTHER; note = 2'-deoxy-2'-fluorouridine-3'-phosphate
  modified_base 10: mod_base = OTHER; note = 2'-O-methyluridine-3'-phosphate
  modified_base 11: mod_base = OTHER; note = 2'-O-methylcytidine-3'-phosphate
  modified_base 12: mod_base = OTHER; note = 2'-O-methyluridine-3'-phosphate
  modified_base 13: mod_base = OTHER; note = 2'-O-methylguanosine-3'-phosphate
  modified_base 14: mod_base = OTHER; note = 2'-deoxy-2'-fluoroadenosine-3'-phosphate
  modified_base 15: mod_base = OTHER; note = 2'-O-methyladenosine-3'-phosphate
  modified_base 16: mod_base = OTHER; note = 2'-deoxy-2'-fluoroadenosine-3'-phosphate
  modified_base 17: mod_base = OTHER; note = 2'-O-methyluridine-3'-phosphate
  modified_base 18: mod_base = OTHER; note = 2'-O-methylguanosine-3'-phosphate
  modified_base 19: mod_base = OTHER; note = 2'-O-methylguanosine-3'-phosphate
  modified_base 20: mod_base = OTHER; note = 2'-O-methyluridine-3'-phosphate
  modified_base 21: mod_base = OTHER; note = 2'-O-methylcytidine-3'-phosphorothioate
  modified_base 22: mod_base = OTHER; note = 2'-O-methyladenosine-3'-phosphorothioate
  modified_base 23: mod_base = OTHER; note = 2'-O-methylguanosine
agaagatgttctgaaatggtcag

SEQ ID NO: 4304 - RNA, 23 nt, synthetic construct
  source 1..23: mol_type = other RNA
  modified_base 1: mod_base = OTHER; note = 2'-O-methyladenosine-3'-phosphorothioate
  modified_base 2: mod_base = OTHER; note = 2'-deoxy-2'-fluoroguanosine-3'-phosphorothioate
  modified_base 3: mod_base = OTHER; note = 2'-O-methyluridine-3'-phosphate
  modified_base 4: mod_base = OTHER; note = 2'-O-methyluridine-3'-phosphate
  modified_base 5: mod_base = OTHER; note = 2'-O-methyluridine-3'-phosphate
  modified_base 6: mod_base = OTHER; note = 2'-deoxy-2'-fluorouridine-3'-phosphate
  modified_base 7: mod_base = OTHER; note = 2'-O-methyladenosine-3'-phosphate
  modified_base 8: mod_base = OTHER; note = 2'-deoxy-2'-fluorouridine-3'-phosphate
  modified_base 9: mod_base = OTHER; note = 2'-deoxy-2'-fluoroguanosine-3'-phosphate
  modified_base 10: mod_base = OTHER; note = 2'-O-methyladenosine-3'-phosphate
  modified_base 11: mod_base = OTHER; note = 2'-O-methylguanosine-3'-phosphate
  modified_base 12: mod_base = OTHER; note = 2'-O-methyluridine-3'-phosphate
  modified_base 13: mod_base = OTHER; note = 2'-O-methyluridine-3'-phosphate
  modified_base 14: mod_base = OTHER; note = 2'-deoxy-2'-fluoroadenosine-3'-phosphate
  modified_base 15: mod_base = OTHER; note = 2'-O-methyluridine-3'-phosphate
  modified_base 16: mod_base = OTHER; note = 2'-deoxy-2'-fluorouridine-3'-phosphate
  modified_base 17: mod_base = OTHER; note = 2'-O-methylguanosine-3'-phosphate
  modified_base 18: mod_base = OTHER; note = 2'-O-methylguanosine-3'-phosphate
  modified_base 19: mod_base = OTHER; note = 2'-O-methyladenosine-3'-phosphate
  modified_base 20: mod_base = OTHER; note = 2'-O-methyladenosine-3'-phosphate
  modified_base 21: mod_base = OTHER; note = 2'-O-methylguanosine-3'-phosphorothioate
  modified_base 22: mod_base = OTHER; note = 2'-O-methyladenosine-3'-phosphorothioate
  modified_base 23: mod_base = OTHER; note = 2'-O-methyluridine
agttttatgagttattggaagat

SEQ ID NO: 4305 - RNA, 23 nt, synthetic construct
  source 1..23: mol_type = other RNA
  modified_base 1: mod_base = OTHER; note = 2'-O-methyladenosine-3'-phosphorothioate
  modified_base 2: mod_base = OTHER; note = 2'-deoxy-2'-fluoroadenosine-3'-phosphorothioate
  modified_base 3: mod_base = OTHER; note = 2'-O-methylcytidine-3'-phosphate
  modified_base 4: mod_base = OTHER; note = 2'-O-methyluridine-3'-phosphate
  modified_base 5: mod_base = OTHER; note = 2'-O-methylcytidine-3'-phosphate
  modified_base 6: mod_base = OTHER; note = 2'-deoxy-2'-fluoroadenosine-3'-phosphate
  modified_base 7: mod_base = OTHER; note = 2'-O-methyladenosine-3'-phosphate
  modified_base 8: mod_base = OTHER; note = 2'-deoxy-2'-fluorouridine-3'-phosphate
  modified_base 9: mod_base = OTHER; note = 2'-deoxy-2'-fluorouridine-3'-phosphate
  modified_base 10: mod_base = OTHER; note = 2'-O-methyluridine-3'-phosphate
  modified_base 11: mod_base = OTHER; note = 2'-O-methyluridine-3'-phosphate
  modified_base 12: mod_base = OTHER; note = 2'-O-methyladenosine-3'-phosphate
  modified_base 13: mod_base = OTHER; note = 2'-O-methylcytidine-3'-phosphate
  modified_base 14: mod_base = OTHER; note = 2'-deoxy-2'-fluorouridine-3'-phosphate
  modified_base 15: mod_base = OTHER; note = 2'-O-methyluridine-3'-phosphate
  modified_base 16: mod_base = OTHER; note = 2'-deoxy-2'-fluorocytidine-3'-phosphate
  modified_base 17: mod_base = OTHER; note = 2'-O-methyladenosine-3'-phosphate
  modified_base 18: mod_base = OTHER; note = 2'-O-methylguanosine-3'-phosphate
  modified_base 19: mod_base = OTHER; note = 2'-O-methyluridine-3'-phosphate
  modified_base 20: mod_base = OTHER; note = 2'-O-methyluridine-3'-phosphate
  modified_base 21: mod_base = OTHER; note = 2'-O-methylguanosine-3'-phosphorothioate
  modified_base 22: mod_base = OTHER; note = 2'-O-methyluridine-3'-phosphorothioate
  modified_base 23: mod_base = OTHER; note = 2'-O-methyluridine
aactcaattttacttcagttgtt

SEQ ID NO: 4306 - RNA, 23 nt, synthetic construct
  source 1..23: mol_type = other RNA
  modified_base 1: mod_base = OTHER; note = 2'-O-methyladenosine-3'-phosphorothioate
  modified_base 2: mod_base = OTHER; note = 2'-deoxy-2'-fluoroguanosine-3'-phosphorothioate
  modified_base 3: mod_base = OTHER; note = 2'-O-methyluridine-3'-phosphate
  modified_base 4: mod_base = OTHER; note = 2'-O-methyluridine-3'-phosphate
  modified_base 5: mod_base = OTHER; note = 2'-O-methyluridine-3'-phosphate
  modified_base 6: mod_base = OTHER; note = 2'-deoxy-2'-fluoroguanosine-3'-phosphate
  modified_base 7: mod_base = OTHER; note = 2'-O-methylguanosine-3'-phosphate
  modified_base 8: mod_base = OTHER; note = 2'-deoxy-2'-fluorouridine-3'-phosphate
  modified_base 9: mod_base = OTHER; note = 2'-deoxy-2'-fluoroguanosine-3'-phosphate
  modified_base 10: mod_base = OTHER; note = 2'-O-methyladenosine-3'-phosphate
  modified_base 11: mod_base = OTHER; note = 2'-O-methyladenosine-3'-phosphate
  modified_base 12: mod_base = OTHER; note = 2'-O-methyluridine-3'-phosphate
  modified_base 13: mod_base = OTHER; note = 2'-O-methyladenosine-3'-phosphate
  modified_base 14: mod_base = OTHER; note = 2'-deoxy-2'-fluorouridine-3'-phosphate
  modified_base 15: mod_base = OTHER; note = 2'-O-methyladenosine-3'-phosphate
  modified_base 16: mod_base = OTHER; note = 2'-deoxy-2'-fluorouridine-3'-phosphate
  modified_base 17: mod_base = OTHER; note = 2'-O-methyluridine-3'-phosphate
  modified_base 18: mod_base = OTHER; note = 2'-O-methyluridine-3'-phosphate
  modified_base 19: mod_base = OTHER; note = 2'-O-methyluridine-3'-phosphate
  modified_base 20: mod_base = OTHER; note = 2'-O-methylcytidine-3'-phosphate
  modified_base 21: mod_base = OTHER; note = 2'-O-methylcytidine-3'-phosphorothioate
  modified_base 22: mod_base = OTHER; note = 2'-O-methyladenosine-3'-phosphorothioate
  modified_base 23: mod_base = OTHER; note = 2'-O-methylguanosine
agtttggtgaatatattttccag

SEQ ID NO: 4307 - RNA, 23 nt, synthetic construct
  source 1..23: mol_type = other RNA
  modified_base 1: mod_base = OTHER; note = 2'-O-methyladenosine-3'-phosphorothioate
  modified_base 2: mod_base = OTHER; note = 2'-deoxy-2'-fluoroadenosine-3'-phosphorothioate
  modified_base 3: mod_base = OTHER; note = 2'-O-methyladenosine-3'-phosphate
  modified_base 4: mod_base = OTHER; note = 2'-O-methylcytidine-3'-phosphate
  modified_base 5: mod_base = OTHER; note = 2'-O-methyluridine-3'-phosphate
  modified_base 6: mod_base = OTHER; note = 2'-deoxy-2'-fluorouridine-3'-phosphate
  modified_base 7: mod_base = OTHER; note = 2'-O-methyladenosine-3'-phosphate
  modified_base 8: mod_base = OTHER; note = 2'-deoxy-2'-fluoroadenosine-3'-phosphate
  modified_base 9: mod_base = OTHER; note = 2'-deoxy-2'-fluoroadenosine-3'-phosphate
  modified_base 10: mod_base = OTHER; note = 2'-O-methyluridine-3'-phosphate
  modified_base 11: mod_base = OTHER; note = 2'-O-methyluridine-3'-phosphate
  modified_base 12: mod_base = OTHER; note = 2'-O-methyladenosine-3'-phosphate
  modified_base 13: mod_base = OTHER; note = 2'-O-methylcytidine-3'-phosphate
  modified_base 14: mod_base = OTHER; note = 2'-deoxy-2'-fluorocytidine-3'-phosphate
  modified_base 15: mod_base = OTHER; note = 2'-O-methyladenosine-3'-phosphate
  modified_base 16: mod_base = OTHER; note = 2'-deoxy-2'-fluoroadenosine-3'-phosphate
  modified_base 17: mod_base = OTHER; note = 2'-O-methyladenosine-3'-phosphate
  modified_base 18: mod_base = OTHER; note = 2'-O-methylguanosine-3'-phosphate
  modified_base 19: mod_base = OTHER; note = 2'-O-methyluridine-3'-phosphate
  modified_base 20: mod_base = OTHER; note = 2'-O-methyluridine-3'-phosphate
  modified_base 21: mod_base = OTHER; note = 2'-O-methyluridine-3'-phosphorothioate
  modified_base 22: mod_base = OTHER; note = 2'-O-methylguanosine-3'-phosphorothioate
  modified_base 23: mod_base = OTHER; note = 2'-O-methylguanosine
aaacttaaattaccaaagtttgg

SEQ ID NO: 4308 - RNA, 23 nt, synthetic construct
  source 1..23: mol_type = other RNA
  modified_base 1: mod_base = OTHER; note = 2'-O-methyladenosine-3'-phosphorothioate
  modified_base 2: mod_base = OTHER; note = 2'-deoxy-2'-fluoroguanosine-3'-phosphorothioate
  modified_base 3: mod_base = OTHER; note = 2'-O-methyluridine-3'-phosphate
  modified_base 4: mod_base = OTHER; note = 2'-O-methyladenosine-3'-phosphate
  modified_base 5: mod_base = OTHER; note = 2'-O-methyluridine-3'-phosphate
  modified_base 6: mod_base = OTHER; note = 2'-deoxy-2'-fluoroadenosine-3'-phosphate
  modified_base 7: mod_base = OTHER; note = 2'-O-methylguanosine-3'-phosphate
  modified_base 8: mod_base = OTHER; note = 2'-deoxy-2'-fluoroguanosine-3'-phosphate
  modified_base 9: mod_base = OTHER; note = 2'-deoxy-2'-fluorouridine-3'-phosphate
  modified_base 10: mod_base = OTHER; note = 2'-O-methylguanosine-3'-phosphate
  modified_base 11: mod_base = OTHER; note = 2'-O-methyluridine-3'-phosphate
  modified_base 12: mod_base = OTHER; note = 2'-O-methyladenosine-3'-phosphate
  modified_base 13: mod_base = OTHER; note = 2'-O-methyladenosine-3'-phosphate
  modified_base 14: mod_base = OTHER; note = 2'-deoxy-2'-fluoroadenosine-3'-phosphate
  modified_base 15: mod_base = OTHER; note = 2'-O-methylcytidine-3'-phosphate
  modified_base 16: mod_base = OTHER; note = 2'-deoxy-2'-fluorouridine-3'-phosphate
  modified_base 17: mod_base = OTHER; note = 2'-O-methyladenosine-3'-phosphate
  modified_base 18: mod_base = OTHER; note = 2'-O-methyluridine-3'-phosphate
  modified_base 19: mod_base = OTHER; note = 2'-O-methyluridine-3'-phosphate
  modified_base 20: mod_base = OTHER; note = 2'-O-methyluridine-3'-phosphate
  modified_base 21: mod_base = OTHER; note = 2'-O-methyluridine-3'-phosphorothioate
  modified_base 22: mod_base = OTHER; note = 2'-O-methyladenosine-3'-phosphorothioate
  modified_base 23: mod_base = OTHER; note = 2'-O-methylguanosine
agtataggtgtaaactattttag

SEQ ID NO: 4309 - RNA, 23 nt, synthetic construct
  source 1..23: mol_type = other RNA
  modified_base 1: mod_base = OTHER; note = 2'-O-methyladenosine-3'-phosphorothioate
  modified_base 2: mod_base = OTHER; note = 2'-deoxy-2'-fluoroguanosine-3'-phosphorothioate
  modified_base 3: mod_base = OTHER; note = 2'-O-methyluridine-3'-phosphate
  modified_base 4: mod_base = OTHER; note = 2'-O-methyluridine-3'-phosphate
  modified_base 5: mod_base = OTHER; note = 2'-O-methylguanosine-3'-phosphate
  modified_base 6: mod_base = OTHER; note = 2'-deoxy-2'-fluoroguanosine-3'-phosphate
  modified_base 7: mod_base = OTHER; note = 2'-O-methyladenosine-3'-phosphate
  modified_base 8: mod_base = OTHER; note = 2'-deoxy-2'-fluorouridine-3'-phosphate
  modified_base 9: mod_base = OTHER; note = 2'-deoxy-2'-fluorouridine-3'-phosphate
  modified_base 10: mod_base = OTHER; note = 2'-O-methyladenosine-3'-phosphate
  modified_base 11: mod_base = OTHER; note = 2'-O-methyluridine-3'-phosphate
  modified_base 12: mod_base = OTHER; note = 2'-O-methylguanosine-3'-phosphate
  modified_base 13: mod_base = OTHER; note = 2'-O-methylcytidine-3'-phosphate
  modified_base 14: mod_base = OTHER; note = 2'-deoxy-2'-fluoroadenosine-3'-phosphate
  modified_base 15: mod_base = OTHER; note = 2'-O-methylguanosine-3'-phosphate
  modified_base 16: mod_base = OTHER; note = 2'-deoxy-2'-fluorouridine-3'-phosphate
  modified_base 17: mod_base = OTHER; note = 2'-O-methyladenosine-3'-phosphate
  modified_base 18: mod_base = OTHER; note = 2'-O-methyluridine-3'-phosphate
  modified_base 19: mod_base = OTHER; note = 2'-O-methyladenosine-3'-phosphate
  modified_base 20: mod_base = OTHER; note = 2'-O-methylguanosine-3'-phosphate
  modified_base 21: mod_base = OTHER; note = 2'-O-methylguanosine-3'-phosphorothioate
  modified_base 22: mod_base = OTHER; note = 2'-O-methyluridine-3'-phosphorothioate
  modified_base 23: mod_base = OTHER; note = 2'-O-methylguanosine
agttggattatgcagtataggtg

SEQ ID NO: 4310 - RNA, 23 nt, synthetic construct
  source 1..23: mol_type = other RNA
  modified_base 1: mod_base = OTHER; note = 2'-O-methyladenosine-3'-phosphorothioate
  modified_base 2: mod_base = OTHER; note = 2'-deoxy-2'-fluorocytidine-3'-phosphorothioate
  modified_base 3: mod_base = OTHER; note = 2'-O-methyladenosine-3'-phosphate
  modified_base 4: mod_base = OTHER; note = 2'-O-methyladenosine-3'-phosphate
  modified_base 5: mod_base = OTHER; note = 2'-O-methylcytidine-3'-phosphate
  modified_base 6: mod_base = OTHER; note = 2'-deoxy-2'-fluorouridine-3'-phosphate
  modified_base 7: mod_base = OTHER; note = 2'-O-methylguanosine-3'-phosphate
  modified_base 8: mod_base = OTHER; note = 2'-deoxy-2'-fluoroadenosine-3'-phosphate
  modified_base 9: mod_base = OTHER; note = 2'-deoxy-2'-fluoroadenosine-3'-phosphate
  modified_base 10: mod_base = OTHER; note = 2'-O-methyladenosine-3'-phosphate
  modified_base 11: mod_base = OTHER; note = 2'-O-methyluridine-3'-phosphate
  modified_base 12: mod_base = OTHER; note = 2'-O-methyluridine-3'-phosphate
  modified_base 13: mod_base = OTHER; note = 2'-O-methyladenosine-3'-phosphate
  modified_base 14: mod_base = OTHER; note = 2'-deoxy-2'-fluoroadenosine-3'-phosphate
  modified_base 15: mod_base = OTHER; note = 2'-O-methyladenosine-3'-phosphate
  modified_base 16: mod_base = OTHER; note = 2'-deoxy-2'-fluoroadenosine-3'-phosphate
  modified_base 17: mod_base = OTHER; note = 2'-O-methyluridine-3'-phosphate
  modified_base 18: mod_base = OTHER; note = 2'-O-methyluridine-3'-phosphate
  modified_base 19: mod_base = OTHER; note = 2'-O-methylguanosine-3'-phosphate
  modified_base 20: mod_base = OTHER; note = 2'-O-methyluridine-3'-phosphate
  modified_base 21: mod_base = OTHER; note = 2'-O-methyluridine-3'-phosphorothioate
  modified_base 22: mod_base = OTHER; note = 2'-O-methylguanosine-3'-phosphorothioate
  modified_base 23: mod_base = OTHER; note = 2'-O-methylguanosine
acaactgaaattaaaattgttgg

SEQ ID NO: 4311 - RNA, 23 nt, synthetic construct
  source 1..23: mol_type = other RNA
  modified_base 1: mod_base = OTHER; note = 2'-O-methyladenosine-3'-phosphorothioate
  modified_base 2: mod_base = OTHER; note = 2'-deoxy-2'-fluoroguanosine-3'-phosphorothioate
  modified_base 3: mod_base = OTHER; note = 2'-O-methyluridine-3'-phosphate
  modified_base 4: mod_base = OTHER; note = 2'-O-methyluridine-3'-phosphate
  modified_base 5: mod_base = OTHER; note = 2'-O-methyladenosine-3'-phosphate
  modified_base 6: mod_base = OTHER; note = 2'-deoxy-2'-fluorouridine-3'-phosphate
  modified_base 7: mod_base = OTHER; note = 2'-O-methyladenosine-3'-phosphate
  modified_base 8: mod_base = OTHER; note = 2'-deoxy-2'-fluorouridine-3'-phosphate
  modified_base 9: mod_base = OTHER; note = 2'-deoxy-2'-fluorouridine-3'-phosphate
  modified_base 10: mod_base = OTHER; note = 2'-O-methyladenosine-3'-phosphate
  modified_base 11: mod_base = OTHER; note = 2'-O-methylguanosine-3'-phosphate
  modified_base 12: mod_base = OTHER; note = 2'-O-methyluridine-3'-phosphate
  modified_base 13: mod_base = OTHER; note = 2'-O-methyladenosine-3'-phosphate
  modified_base 14: mod_base = OTHER; note = 2'-deoxy-2'-fluoroadenosine-3'-phosphate
  modified_base 15: mod_base = OTHER; note = 2'-O-methylcytidine-3'-phosphate
  modified_base 16: mod_base = OTHER; note = 2'-deoxy-2'-fluoroadenosine-3'-phosphate
  modified_base 17: mod_base = OTHER; note = 2'-O-methyluridine-3'-phosphate
  modified_base 18: mod_base = OTHER; note = 2'-O-methylguanosine-3'-phosphate
  modified_base 19: mod_base = OTHER; note = 2'-O-methyluridine-3'-phosphate
  modified_base 20: mod_base = OTHER; note = 2'-O-methylcytidine-3'-phosphate
  modified_base 21: mod_base = OTHER; note = 2'-O-methyluridine-3'-phosphorothioate
  modified_base 22: mod_base = OTHER; note = 2'-O-methyluridine-3'-phosphorothioate
  modified_base 23: mod_base = OTHER; note = 2'-O-methylcytidine
agttatattagtaacatgtcttc

SEQ ID NO: 4312 - RNA, 23 nt, synthetic construct
  source 1..23: mol_type = other RNA
  modified_base 1: mod_base = OTHER; note = 2'-O-methyladenosine-3'-phosphorothioate
  modified_base 2: mod_base = OTHER; note = 2'-deoxy-2'-fluorouridine-3'-phosphorothioate
  modified_base 3: mod_base = OTHER; note = 2'-O-methyluridine-3'-phosphate
  modified_base 4: mod_base = OTHER; note = 2'-O-methyladenosine-3'-phosphate
  modified_base 5: mod_base = OTHER; note = 2'-O-methylcytidine-3'-phosphate
  modified_base 6: mod_base = OTHER; note = 2'-deoxy-2'-fluoroadenosine-3'-phosphate
  modified_base 7: mod_base = OTHER; note = 2'-O-methylcytidine-3'-phosphate
  modified_base 8: mod_base = OTHER; note = 2'-deoxy-2'-fluoroadenosine-3'-phosphate
  modified_base 9: mod_base = OTHER; note = 2'-deoxy-2'-fluorouridine-3'-phosphate
  modified_base 10: mod_base = OTHER; note = 2'-O-methylcytidine-3'-phosphate
  modified_base 11: mod_base = OTHER; note = 2'-O-methylcytidine-3'-phosphate
  modified_base 12: mod_base = OTHER; note = 2'-O-methyluridine-3'-phosphate
  modified_base 13: mod_base = OTHER; note = 2'-O-methylcytidine-3'-phosphate
  modified_base 14: mod_base = OTHER; note = 2'-deoxy-2'-fluorouridine-3'-phosphate
  modified_base 15: mod_base = OTHER; note = 2'-O-methyladenosine-3'-phosphate
  modified_base 16: mod_base = OTHER; note = 2'-deoxy-2'-fluorocytidine-3'-phosphate
  modified_base 17: mod_base = OTHER; note = 2'-O-methyluridine-3'-phosphate
  modified_base 18: mod_base = OTHER; note = 2'-O-methylcytidine-3'-phosphate
  modified_base 19: mod_base = OTHER; note = 2'-O-methyluridine-3'-phosphate
  modified_base 20: mod_base = OTHER; note = 2'-O-methyluridine-3'-phosphate
  modified_base 21: mod_base = OTHER; note = 2'-O-methyluridine-3'-phosphorothioate
  modified_base 22: mod_base = OTHER; note = 2'-O-methyluridine-3'-phosphorothioate
  modified_base 23: mod_base = OTHER; note = 2'-O-methyladenosine
attacacatcctctactctttta

SEQ ID NO: 4313 - RNA, 23 nt, synthetic construct
  source 1..23: mol_type = other RNA
  modified_base 1: mod_base = OTHER; note = 2'-O-methyladenosine-3'-phosphorothioate
  modified_base 2: mod_base = OTHER; note = 2'-deoxy-2'-fluoroguanosine-3'-phosphorothioate
  modified_base 3: mod_base = OTHER; note = 2'-O-methyladenosine-3'-phosphate
  modified_base 4: mod_base = OTHER; note = 2'-O-methyladenosine-3'-phosphate
  modified_base 5: mod_base = OTHER; note = 2'-O-methylguanosine-3'-phosphate
  modified_base 6: mod_base = OTHER; note = 2'-deoxy-2'-fluoroadenosine-3'-phosphate
  modified_base 7: mod_base = OTHER; note = 2'-O-methyluridine-3'-phosphate
  modified_base 8: mod_base = OTHER; note = 2'-deoxy-2'-fluoroadenosine-3'-phosphate
  modified_base 9: mod_base = OTHER; note = 2'-deoxy-2'-fluorouridine-3'-phosphate
  modified_base 10: mod_base = OTHER; note = 2'-O-methylguanosine-3'-phosphate
  modified_base 11: mod_base = OTHER; note = 2'-O-methylguanosine-3'-phosphate
  modified_base 12: mod_base = OTHER; note = 2'-O-methyluridine-3'-phosphate
  modified_base 13: mod_base = OTHER; note = 2'-O-methyluridine-3'-phosphate
  modified_base 14: mod_base = OTHER; note = 2'-deoxy-2'-fluoroadenosine-3'-phosphate
  modified_base 15: mod_base = OTHER; note = 2'-O-methyladenosine-3'-phosphate
  modified_base 16: mod_base = OTHER; note = 2'-deoxy-2'-fluorouridine-3'-phosphate
  modified_base 17: mod_base = OTHER; note = 2'-O-methyluridine-3'-phosphate
  modified_base 18: mod_base = OTHER; note = 2'-O-methyladenosine-3'-phosphate
  modified_base 19: mod_base = OTHER; note = 2'-O-methylcytidine-3'-phosphate
  modified_base 20: mod_base = OTHER; note = 2'-O-methyladenosine-3'-phosphate
  modified_base 21: mod_base = OTHER; note = 2'-O-methylcytidine-3'-phosphorothioate
  modified_base 22: mod_base = OTHER; note = 2'-O-methyladenosine-3'-phosphorothioate
  modified_base 23: mod_base = OTHER; note = 2'-O-methyluridine
agaagatatggttaattacacat

SEQ ID NO: 4314 - RNA, 23 nt, synthetic construct
  source 1..23: mol_type = other RNA
  modified_base 1: mod_base = OTHER; note = 2'-O-methyladenosine-3'-phosphorothioate
  modified_base 2: mod_base = OTHER; note = 2'-deoxy-2'-fluorouridine-3'-phosphorothioate
  modified_base 3: mod_base = OTHER; note = 2'-O-methyluridine-3'-phosphate
  modified_base 4: mod_base = OTHER; note = 2'-O-methyladenosine-3'-phosphate
  modified_base 5: mod_base = OTHER; note = 2'-O-methylguanosine-3'-phosphate
  modified_base 6: mod_base = OTHER; note = 2'-deoxy-2'-fluorouridine-3'-phosphate
  modified_base 7: mod_base = OTHER; note = 2'-O-methyladenosine-3'-phosphate
  modified_base 8: mod_base = OTHER; note = 2'-deoxy-2'-fluoroadenosine-3'-phosphate
  modified_base 9: mod_base = OTHER; note = 2'-deoxy-2'-fluorocytidine-3'-phosphate
  modified_base 10: mod_base = OTHER; note = 2'-O-methylcytidine-3'-phosphate
  modified_base 11: mod_base = OTHER; note = 2'-O-methyladenosine-3'-phosphate
  modified_base 12: mod_base = OTHER; note = 2'-O-methyluridine-3'-phosphate
  modified_base 13: mod_base = OTHER; note = 2'-O-methylguanosine-3'-phosphate
  modified_base 14: mod_base = OTHER; note = 2'-deoxy-2'-fluorouridine-3'-phosphate
  modified_base 15: mod_base = OTHER; note = 2'-O-methyluridine-3'-phosphate
  modified_base 16: mod_base = OTHER; note = 2'-deoxy-2'-fluorouridine-3'-phosphate
  modified_base 17: mod_base = OTHER; note = 2'-O-methyluridine-3'-phosphate
  modified_base 18: mod_base = OTHER; note = 2'-O-methyladenosine-3'-phosphate
  modified_base 19: mod_base = OTHER; note = 2'-O-methylguanosine-3'-phosphate
  modified_base 20: mod_base = OTHER; note = 2'-O-methyladenosine-3'-phosphate
  modified_base 21: mod_base = OTHER; note = 2'-O-methyladenosine-3'-phosphorothioate
  modified_base 22: mod_base = OTHER; note = 2'-O-methylguanosine-3'-phosphorothioate
  modified_base 23: mod_base = OTHER; note = 2'-O-methyladenosine
attagtaaccatgttttagaaga

SEQ ID NO: 4315 - RNA, 23 nt, synthetic construct
  source 1..23: mol_type = other RNA
  modified_base 1: mod_base = OTHER; note = 2'-O-methyladenosine-3'-phosphorothioate
  modified_base 2: mod_base = OTHER; note = 2'-deoxy-2'-fluoroguanosine-3'-phosphorothioate
  modified_base 3: mod_base = OTHER; note = 2'-O-methyluridine-3'-phosphate
  modified_base 4: mod_base = OTHER; note = 2'-O-methyluridine-3'-phosphate
  modified_base 5: mod_base = OTHER; note = 2'-O-methyladenosine-3'-phosphate
  modified_base 6: mod_base = OTHER; note = 2'-deoxy-2'-fluorocytidine-3'-phosphate
  modified_base 7: mod_base = OTHER; note = 2'-O-methyladenosine-3'-phosphate
  modified_base 8: mod_base = OTHER; note = 2'-deoxy-2'-fluorouridine-3'-phosphate
  modified_base 9: mod_base = OTHER; note = 2'-deoxy-2'-fluoroadenosine-3'-phosphate
  modified_base 10: mod_base = OTHER; note = 2'-O-methyluridine-3'-phosphate
  modified_base 11: mod_base = OTHER; note = 2'-O-methyluridine-3'-phosphate
  modified_base 12: mod_base = OTHER; note = 2'-O-methylcytidine-3'-phosphate
  modified_base 13: mod_base = OTHER; note = 2'-O-methyluridine-3'-phosphate
  modified_base 14: mod_base = OTHER; note = 2'-deoxy-2'-fluorouridine-3'-phosphate
  modified_base 15: mod_base = OTHER; note = 2'-O-methyluridine-3'-phosphate
  modified_base 16: mod_base = OTHER; note = 2'-deoxy-2'-fluorouridine-3'-phosphate
  modified_base 17: mod_base = OTHER; note = 2'-O-methyladenosine-3'-phosphate
  modified_base 18: mod_base = OTHER; note = 2'-O-methylguanosine-3'-phosphate
  modified_base 19: mod_base = OTHER; note = 2'-O-methyluridine-3'-phosphate
  modified_base 20: mod_base = OTHER; note = 2'-O-methyladenosine-3'-phosphate
  modified_base 21: mod_base = OTHER; note = 2'-O-methyladenosine-3'-phosphorothioate
  modified_base 22: mod_base = OTHER; note = 2'-O-methylcytidine-3'-phosphorothioate
  modified_base 23: mod_base = OTHER; note = 2'-O-methylcytidine
agttacatattcttttagtaacc

SEQ ID NO: 4316 - RNA, 23 nt, synthetic construct
  source 1..23: mol_type = other RNA
  modified_base 1: mod_base = OTHER; note = 2'-O-methyladenosine-3'-phosphorothioate
  modified_base 2: mod_base = OTHER; note = 2'-deoxy-2'-fluoroguanosine-3'-phosphorothioate
  modified_base 3: mod_base = OTHER; note = 2'-O-methylguanosine-3'-phosphate
  modified_base 4: mod_base = OTHER; note = 2'-O-methyluridine-3'-phosphate
  modified_base 5: mod_base = OTHER; note = 2'-O-methylcytidine-3'-phosphate
  modified_base 6: mod_base = OTHER; note = 2'-deoxy-2'-fluoroadenosine-3'-phosphate
  modified_base 7: mod_base = OTHER; note = 2'-O-methyladenosine-3'-phosphate
  modified_base 8: mod_base = OTHER; note = 2'-deoxy-2'-fluorouridine-3'-phosphate
  modified_base 9: mod_base = OTHER; note = 2'-deoxy-2'-fluoroadenosine-3'-phosphate
  modified_base 10: mod_base = OTHER; note = 2'-O-methyluridine-3'-phosphate
  modified_base 11: mod_base = OTHER; note = 2'-O-methyluridine-3'-phosphate
  modified_base 12: mod_base = OTHER; note = 2'-O-methylguanosine-3'-phosphate
  modified_base 13: mod_base = OTHER; note = 2'-O-methyladenosine-3'-phosphate
  modified_base 14: mod_base = OTHER; note = 2'-deoxy-2'-fluorouridine-3'-phosphate
  modified_base 15: mod_base = OTHER; note = 2'-O-methylguanosine-3'-phosphate
  modified_base 16: mod_base = OTHER; note = 2'-deoxy-2'-fluorouridine-3'-phosphate
  modified_base 17: mod_base = OTHER; note = 2'-O-methyluridine-3'-phosphate
  modified_base 18: mod_base = OTHER; note = 2'-O-methyladenosine-3'-phosphate
  modified_base 19: mod_base = OTHER; note = 2'-O-methylcytidine-3'-phosphate
  modified_base 20: mod_base = OTHER; note = 2'-O-methyladenosine-3'-phosphate
  modified_base 21: mod_base = OTHER; note = 2'-O-methyluridine-3'-phosphorothioate
  modified_base 22: mod_base = OTHER; note = 2'-O-methyladenosine-3'-phosphorothioate
  modified_base 23: mod_base = OTHER; note = 2'-O-methyluridine
aggtcaatattgatgttacatat

SEQ ID NO: 4317 - RNA, 23 nt, synthetic construct
  source 1..23: mol_type = other RNA
  modified_base 1: mod_base = OTHER; note = 2'-O-methyladenosine-3'-phosphorothioate
  modified_base 2: mod_base = OTHER; note = 2'-deoxy-2'-fluorouridine-3'-phosphorothioate
  modified_base 3: mod_base = OTHER; note = 2'-O-methylguanosine-3'-phosphate
  modified_base 4: mod_base = OTHER; note = 2'-O-methyluridine-3'-phosphate
  modified_base 5: mod_base = OTHER; note = 2'-O-methyladenosine-3'-phosphate
  modified_base 6: mod_base = OTHER; note = 2'-deoxy-2'-fluoroadenosine-3'-phosphate
  modified_base 7: mod_base = OTHER; note = 2'-O-methylguanosine-3'-phosphate
  modified_base 8: mod_base = OTHER; note = 2'-deoxy-2'-fluoroadenosine-3'-phosphate
  modified_base 9: mod_base = OTHER; note = 2'-deoxy-2'-fluoroadenosine-3'-phosphate
  modified_base 10: mod_base = OTHER; note = 2'-O-methyladenosine-3'-phosphate
  modified_base 11: mod_base = OTHER; note = 2'-O-methylcytidine-3'-phosphate
  modified_base 12: mod_base = OTHER; note = 2'-O-methylcytidine-3'-phosphate
  modified_base 13: mod_base = OTHER; note = 2'-O-methyladenosine-3'-phosphate
  modified_base 14: mod_base = OTHER; note = 2'-deoxy-2'-fluoroadenosine-3'-phosphate
  modified_base 15: mod_base = OTHER; note = 2'-O-methylguanosine-3'-phosphate
  modified_base 16: mod_base = OTHER; note = 2'-deoxy-2'-fluoroguanosine-3'-phosphate
  modified_base 17: mod_base = OTHER; note = 2'-O-methyluridine-3'-phosphate
  modified_base 18: mod_base = OTHER; note = 2'-O-methylcytidine-3'-phosphate
  modified_base 19: mod_base = OTHER; note = 2'-O-methyladenosine-3'-phosphate
  modified_base 20: mod_base = OTHER; note = 2'-O-methyladenosine-3'-phosphate
  modified_base 21: mod_base = OTHER; note = 2'-O-methyluridine-3'-phosphorothioate
  modified_base 22: mod_base = OTHER; note = 2'-O-methyladenosine-3'-phosphorothioate
  modified_base 23: mod_base = OTHER; note = 2'-O-methyluridine
atgtaagaaaccaaggtcaatat

SEQ ID NO: 4318 - RNA, 23 nt, synthetic construct
  source 1..23: mol_type = other RNA
  modified_base 1: mod_base = OTHER; note = 2'-O-methyladenosine-3'-phosphorothioate
  modified_base 2: mod_base = OTHER; note = 2'-deoxy-2'-fluorouridine-3'-phosphorothioate
  modified_base 3: mod_base = OTHER; note = 2'-O-methyluridine-3'-phosphate
  modified_base 4: mod_base = OTHER; note = 2'-O-methyladenosine-3'-phosphate
  modified_base 5: mod_base = OTHER; note = 2'-O-methylguanosine-3'-phosphate
  modified_base 6: mod_base = OTHER; note = 2'-deoxy-2'-fluorocytidine-3'-phosphate
  modified_base 7: mod_base = OTHER; note = 2'-O-methyladenosine-3'-phosphate
  modified_base 8: mod_base = OTHER; note = 2'-deoxy-2'-fluoroadenosine-3'-phosphate
  modified_base 9: mod_base = OTHER; note = 2'-deoxy-2'-fluorocytidine-3'-phosphate
  modified_base 10: mod_base = OTHER; note = 2'-O-methyladenosine-3'-phosphate
  modified_base 11: mod_base = OTHER; note = 2'-O-methylcytidine-3'-phosphate
  modified_base 12: mod_base = OTHER; note = 2'-O-methyluridine-3'-phosphate
  modified_base 13: mod_base = OTHER; note = 2'-O-methyluridine-3'-phosphate
  modified_base 14: mod_base = OTHER; note = 2'-deoxy-2'-fluoroguanosine-3'-phosphate
  modified_base 15: mod_base = OTHER; note = 2'-O-methyluridine-3'-phosphate
  modified_base 16: mod_base = OTHER; note = 2'-deoxy-2'-fluoroguanosine-3'-phosphate
  modified_base 17: mod_base = OTHER; note = 2'-O-methyluridine-3'-phosphate
  modified_base 18: mod_base = OTHER; note = 2'-O-methyladenosine-3'-phosphate
  modified_base 19: mod_base = OTHER; note = 2'-O-methyladenosine-3'-phosphate
  modified_base 20: mod_base = OTHER; note = 2'-O-methylguanosine-3'-phosphate
  modified_base 21: mod_base = OTHER; note = 2'-O-methyladenosine-3'-phosphorothioate
  modified_base 22: mod_base = OTHER; note = 2'-O-methyladenosine-3'-phosphorothioate
  modified_base 23: mod_base = OTHER; note = 2'-O-methyladenosine
attagcaacacttgtgtaagaaa

SEQ ID NO: 4319 - RNA, 23 nt, synthetic construct
  source 1..23: mol_type = other RNA
  modified_base 1: mod_base = OTHER; note = 2'-O-methyladenosine-3'-phosphorothioate
  modified_base 2: mod_base = OTHER; note = 2'-deoxy-2'-fluoroguanosine-3'-phosphorothioate
  modified_base 3: mod_base = OTHER; note = 2'-O-methyluridine-3'-phosphate
  modified_base 4: mod_base = OTHER; note = 2'-O-methylcytidine-3'-phosphate
  modified_base 5: mod_base = OTHER; note = 2'-O-methyluridine-3'-phosphate
  modified_base 6: mod_base = OTHER; note = 2'-deoxy-2'-fluorocytidine-3'-phosphate
  modified_base 7: mod_base = OTHER; note = 2'-O-methylcytidine-3'-phosphate
  modified_base 8: mod_base = OTHER; note = 2'-deoxy-2'-fluorouridine-3'-phosphate
  modified_base 9: mod_base = OTHER; note = 2'-deoxy-2'-fluorouridine-3'-phosphate
  modified_base 10: mod_base = OTHER; note = 2'-O-methylcytidine-3'-phosphate
  modified_base 11: mod_base = OTHER; note = 2'-O-methyladenosine-3'-phosphate
  modified_base 12: mod_base = OTHER; note = 2'-O-methylcytidine-3'-phosphate
  modified_base 13: mod_base = OTHER; note = 2'-O-methyluridine-3'-phosphate
  modified_base 14: mod_base = OTHER; note = 2'-deoxy-2'-fluoroadenosine-3'-phosphate
  modified_base 15: mod_base = OTHER; note = 2'-O-methyluridine-3'-phosphate
  modified_base 16: mod_base = OTHER; note = 2'-deoxy-2'-fluorouridine-3'-phosphate
  modified_base 17: mod_base = OTHER; note = 2'-O-methylguanosine-3'-phosphate
  modified_base 18: mod_base = OTHER; note = 2'-O-methyladenosine-3'-phosphate
  modified_base 19: mod_base = OTHER; note = 2'-O-methylguanosine-3'-phosphate
  modified_base 20: mod_base = OTHER; note = 2'-O-methyluridine-3'-phosphate
  modified_base 21: mod_base = OTHER; note = 2'-O-methyluridine-3'-phosphorothioate
  modified_base 22: mod_base = OTHER; note = 2'-O-methyladenosine-3'-phosphorothioate
  modified_base 23: mod_base = OTHER; note = 2'-O-methylguanosine
agtctccttcactattgagttag

SEQ ID NO: 4320 - RNA, 23 nt, synthetic construct
  source 1..23: mol_type = other RNA
  modified_base 1: mod_base = OTHER; note = 2'-O-methyladenosine-3'-phosphorothioate
  modified_base 2: mod_base = OTHER; note = 2'-deoxy-2'-fluoroguanosine-3'-phosphorothioate
  modified_base 3: mod_base = OTHER; note = 2'-O-methyladenosine-3'-phosphate
  modified_base 4: mod_base = OTHER; note = 2'-O-methyladenosine-3'-phosphate
  modified_base 5: mod_base = OTHER; note = 2'-O-methyladenosine-3'-phosphate
  modified_base 6: mod_base = OTHER; note = 2'-deoxy-2'-fluoroadenosine-3'-phosphate
  modified_base 7: mod_base = OTHER; note = 2'-O-methyluridine-3'-phosphate
  modified_base 8: mod_base = OTHER; note = 2'-deoxy-2'-fluorouridine-3'-phosphate
  modified_base 9: mod_base = OTHER; note = 2'-deoxy-2'-fluorouridine-3'-phosphate
  modified_base 10: mod_base = OTHER; note = 2'-O-methyladenosine-3'-phosphate
  modified_base 11: mod_base = OTHER; note = 2'-O-methyladenosine-3'-phosphate
  modified_base 12: mod_base = OTHER; note = 2'-O-methyluridine-3'-phosphate
  modified_base 13: mod_base = OTHER; note = 2'-O-methyladenosine-3'-phosphate
  modified_base 14: mod_base = OTHER; note = 2'-deoxy-2'-fluoroguanosine-3'-phosphate
  modified_base 15: mod_base = OTHER; note = 2'-O-methyluridine-3'-phosphate
  modified_base 16: mod_base = OTHER; note = 2'-deoxy-2'-fluoroguanosine-3'-phosphate
  modified_base 17: mod_base = OTHER; note = 2'-O-methyluridine-3'-phosphate
  modified_base 18: mod_base = OTHER; note = 2'-O-methylcytidine-3'-phosphate
  modified_base 19: mod_base = OTHER; note = 2'-O-methyluridine-3'-phosphate
  modified_base 20: mod_base = OTHER; note = 2'-O-methylcytidine-3'-phosphate
  modified_base 21: mod_base = OTHER; note = 2'-O-methylcytidine-3'-phosphorothioate
  modified_base 22: mod_base = OTHER; note = 2'-O-methyluridine-3'-phosphorothioate
  modified_base 23: mod_base = OTHER; note = 2'-O-methyluridine
agaaaatttaatagtgtctcctt

SEQ ID NO: 4321 - RNA, 23 nt, synthetic construct
  source 1..23: mol_type = other RNA
  modified_base 1: mod_base = OTHER; note = 2'-O-methyladenosine-3'-phosphorothioate
  modified_base 2: mod_base = OTHER; note = 2'-deoxy-2'-fluorocytidine-3'-phosphorothioate
  modified_base 3: mod_base = OTHER; note = 2'-O-methyluridine-3'-phosphate
  modified_base 4: mod_base = OTHER; note = 2'-O-methyladenosine-3'-phosphate
  modified_base 5: mod_base = OTHER; note = 2'-O-methylguanosine-3'-phosphate
  modified_base 6: mod_base = OTHER; note = 2'-deoxy-2'-fluorouridine-3'-phosphate
  modified_base 7: mod_base = OTHER; note = 2'-O-methyladenosine-3'-phosphate
  modified_base 8: mod_base = OTHER; note = 2'-deoxy-2'-fluorouridine-3'-phosphate
  modified_base 9: mod_base = OTHER; note = 2'-deoxy-2'-fluorocytidine-3'-phosphate
  modified_base 10: mod_base = OTHER; note = 2'-O-methyluridine-3'-phosphate
  modified_base 11: mod_base = OTHER; note = 2'-O-methylcytidine-3'-phosphate
  modified_base 12: mod_base = OTHER; note = 2'-O-methyluridine-3'-phosphate
  modified_base 13: mod_base = OTHER; note = 2'-O-methylcytidine-3'-phosphate
  modified_base 14: mod_base = OTHER; note = 2'-deoxy-2'-fluoroadenosine-3'-phosphate
  modified_base 15: mod_base = OTHER; note = 2'-O-methyluridine-3'-phosphate
  modified_base 16: mod_base = OTHER; note = 2'-deoxy-2'-fluoroguanosine-3'-phosphate
  modified_base 17: mod_base = OTHER; note = 2'-O-methylguanosine-3'-phosphate
  modified_base 18: mod_base = OTHER; note = 2'-O-methylguanosine-3'-phosphate
  modified_base 19: mod_base = OTHER; note = 2'-O-methyluridine-3'-phosphate
  modified_base 20: mod_base = OTHER; note = 2'-O-methyluridine-3'-phosphate
  modified_base 21: mod_base = OTHER; note = 2'-O-methylcytidine-3'-phosphorothioate
  modified_base 22: mod_base = OTHER; note = 2'-O-methyladenosine-3'-phosphorothioate
  modified_base 23: mod_base = OTHER; note = 2'-O-methylguanosine
actagtatctctcatgggttcag

SEQ ID NO: 4322 - RNA, 23 nt, synthetic construct
  source 1..23: mol_type = other RNA
  modified_base 1: mod_base = OTHER; note = 2'-O-methyladenosine-3'-phosphorothioate
  modified_base 2: mod_base = OTHER; note = 2'-deoxy-2'-fluorouridine-3'-phosphorothioate
  modified_base 3: mod_base = OTHER; note = 2'-O-methylguanosine-3'-phosphate
  modified_base 4: mod_base = OTHER; note = 2'-O-methyladenosine-3'-phosphate
  modified_base 5: mod_base = OTHER; note = 2'-O-methyladenosine-3'-phosphate
  modified_base 6: mod_base = OTHER; note = 2'-deoxy-2'-fluorocytidine-3'-phosphate
  modified_base 7: mod_base = OTHER; note = 2'-O-methylcytidine-3'-phosphate
  modified_base 8: mod_base = OTHER; note = 2'-deoxy-2'-fluoroadenosine-3'-phosphate
  modified_base 9: mod_base = OTHER; note = 2'-deoxy-2'-fluoroadenosine-3'-phosphate
  modified_base 10: mod_base = OTHER; note = 2'-O-methyladenosine-3'-phosphate
  modified_base 11: mod_base = OTHER; note = 2'-O-methylcytidine-3'-phosphate
  modified_base 12: mod_base = OTHER; note = 2'-O-methyladenosine-3'-phosphate
  modified_base 13: mod_base = OTHER; note = 2'-O-methylcytidine-3'-phosphate
  modified_base 14: mod_base = OTHER; note = 2'-deoxy-2'-fluorouridine-3'-phosphate
  modified_base 15: mod_base = OTHER; note = 2'-O-methyluridine-3'-phosphate
  modified_base 16: mod_base = OTHER; note = 2'-deoxy-2'-fluorouridine-3'-phosphate
  modified_base 17: mod_base = OTHER; note = 2'-O-methylcytidine-3'-phosphate
  modified_base 18: mod_base = OTHER; note = 2'-O-methylcytidine-3'-phosphate
  modified_base 19: mod_base = OTHER; note = 2'-O-methyladenosine-3'-phosphate
  modified_base 20: mod_base = OTHER; note = 2'-O-methylcytidine-3'-phosphate
  modified_base 21: mod_base = OTHER; note = 2'-O-methyluridine-3'-phosphorothioate
  modified_base 22: mod_base = OTHER; note = 2'-O-methylcytidine-3'-phosphorothioate
  modified_base 23: mod_base = OTHER; note = 2'-O-methylcytidine
atgaaccaaacactttccactcc

SEQ ID NO: 4323 - RNA, 23 nt, synthetic construct
  source 1..23: mol_type = other RNA
  modified_base 1: mod_base = OTHER; note = 2'-O-methyladenosine-3'-phosphorothioate
  modified_base 2: mod_base = OTHER; note = 2'-deoxy-2'-fluorouridine-3'-phosphorothioate
  modified_base 3: mod_base = OTHER; note = 2'-O-methylguanosine-3'-phosphate
  modified_base 4: mod_base = OTHER; note = 2'-O-methyluridine-3'-phosphate
  modified_base 5: mod_base = OTHER; note = 2'-O-methyluridine-3'-phosphate
  modified_base 6: mod_base = OTHER; note = 2'-deoxy-2'-fluorocytidine-3'-phosphate
  modified_base 7: mod_base = OTHER; note = 2'-O-methyluridine-3'-phosphate
  modified_base 8: mod_base = OTHER; note = 2'-deoxy-2'-fluorouridine-3'-phosphate
  modified_base 9: mod_base = OTHER; note = 2'-deoxy-2'-fluorocytidine-3'-phosphate
  modified_base 10: mod_base = OTHER; note = 2'-O-methyladenosine-3'-phosphate
  modified_base 11: mod_base = OTHER; note = 2'-O-methylguanosine-3'-phosphate
  modified_base 12: mod_base = OTHER; note = 2'-O-methyladenosine-3'-phosphate
  modified_base 13: mod_base = OTHER; note = 2'-O-methyluridine-3'-phosphate
  modified_base 14: mod_base = OTHER; note = 2'-deoxy-2'-fluoroadenosine-3'-phosphate
  modified_base 15: mod_base = OTHER; note = 2'-O-methyluridine-3'-phosphate
  modified_base 16: mod_base = OTHER; note = 2'-deoxy-2'-fluorocytidine-3'-phosphate
  modified_base 17: mod_base = OTHER; note = 2'-O-methylcytidine-3'-phosphate
  modified_base 18: mod_base = OTHER; note = 2'-O-methylcytidine-3'-phosphate
  modified_base 19: mod_base = OTHER; note = 2'-O-methyluridine-3'-phosphate
  modified_base 20: mod_base = OTHER; note = 2'-O-methylguanosine-3'-phosphate
  modified_base 21: mod_base = OTHER; note = 2'-O-methyladenosine-3'-phosphorothioate
  modified_base 22: mod_base = OTHER; note = 2'-O-methyladenosine-3'-phosphorothioate
  modified_base 23: mod_base = OTHER; note = 2'-O-methylcytidine
atgttcttcagatatccctgaac

SEQ ID NO: 4324 - RNA, 23 nt, synthetic construct
  source 1..23: mol_type = other RNA
  modified_base 1: mod_base = OTHER; note = 2'-O-methyladenosine-3'-phosphorothioate
  modified_base 2: mod_base = OTHER; note = 2'-deoxy-2'-fluoroguanosine-3'-phosphorothioate
  modified_base 3: mod_base = OTHER; note = 2'-O-methyluridine-3'-phosphate
  modified_base 4: mod_base = OTHER; note = 2'-O-methylcytidine-3'-phosphate
  modified_base 5: mod_base = OTHER; note = 2'-O-methyladenosine-3'-phosphate
  modified_base 6: mod_base = OTHER; note = 2'-deoxy-2'-fluorocytidine-3'-phosphate
  modified_base 7: mod_base = OTHER; note = 2'-O-methyluridine-3'-phosphate
  modified_base 8: mod_base = OTHER; note = 2'-deoxy-2'-fluorouridine-3'-phosphate
  modified_base 9: mod_base = OTHER; note = 2'-deoxy-2'-fluoroadenosine-3'-phosphate
  modified_base 10: mod_base = OTHER; note = 2'-O-methyladenosine-3'-phosphate
  modified_base 11: mod_base = OTHER; note = 2'-O-methylguanosine-3'-phosphate
  modified_base 12: mod_base = OTHER; note = 2'-O-methyladenosine-3'-phosphate
  modified_base 13: mod_base = OTHER; note = 2'-O-methyladenosine-3'-phosphate
  modified_base 14: mod_base = OTHER; note = 2'-deoxy-2'-fluoroadenosine-3'-phosphate
  modified_base 15: mod_base = OTHER; note = 2'-O-methyluridine-3'-phosphate
  modified_base 16: mod_base = OTHER; note = 2'-deoxy-2'-fluorocytidine-3'-phosphate
  modified_base 17: mod_base = OTHER; note = 2'-O-methyluridine-3'-phosphate
  modified_base 18: mod_base = OTHER; note = 2'-O-methylcytidine-3'-phosphate
  modified_base 19: mod_base = OTHER; note = 2'-O-methyluridine-3'-phosphate
  modified_base 20: mod_base = OTHER; note = 2'-O-methylguanosine-3'-phosphate
  modified_base 21: mod_base = OTHER; note = 2'-O-methylcytidine-3'-phosphorothioate
  modified_base 22: mod_base = OTHER; note = 2'-O-methylcytidine-3'-phosphorothioate
  modified_base 23: mod_base = OTHER; note = 2'-O-methylcytidine
agtcacttaagaaatctctgccc

SEQ ID NO: 4325 - RNA, 23 nt, synthetic construct
  source 1..23: mol_type = other RNA
  modified_base 1: mod_base = OTHER; note = 2'-O-methyladenosine-3'-phosphorothioate
  modified_base 2: mod_base = OTHER; note = 2'-deoxy-2'-fluorouridine-3'-phosphorothioate
  modified_base 3: mod_base = OTHER; note = 2'-O-methyluridine-3'-phosphate
  modified_base 4: mod_base = OTHER; note = 2'-O-methylguanosine-3'-phosphate
  modified_base 5: mod_base = OTHER; note = 2'-O-methyluridine-3'-phosphate
  modified_base 6: mod_base = OTHER; note = 2'-deoxy-2'-fluoroadenosine-3'-phosphate
  modified_base 7: mod_base = OTHER; note = 2'-O-methylguanosine-3'-phosphate
  modified_base 8: mod_base = OTHER; note = 2'-deoxy-2'-fluoroadenosine-3'-phosphate
  modified_base 9: mod_base = OTHER; note = 2'-deoxy-2'-fluorouridine-3'-phosphate
  modified_base 10: mod_base = OTHER; note = 2'-O-methylguanosine-3'-phosphate
  modified_base 11: mod_base = OTHER; note = 2'-O-methyladenosine-3'-phosphate
  modified_base 12: mod_base = OTHER; note = 2'-O-methylguanosine-3'-phosphate
  modified_base 13: mod_base = OTHER; note = 2'-O-methylguanosine-3'-phosphate
  modified_base 14: mod_base = OTHER; note = 2'-deoxy-2'-fluorocytidine-3'-phosphate
  modified_base 15: mod_base = OTHER; note = 2'-O-methylguanosine-3'-phosphate
  modified_base 16: mod_base = OTHER; note = 2'-deoxy-2'-fluorouridine-3'-phosphate
  modified_base 17: mod_base = OTHER; note = 2'-O-methylcytidine-3'-phosphate
  modified_base 18: mod_base = OTHER; note = 2'-O-methyladenosine-3'-phosphate
  modified_base 19: mod_base = OTHER; note = 2'-O-methylcytidine-3'-phosphate
  modified_base 20: mod_base = OTHER; note = 2'-O-methyluridine-3'-phosphate
  modified_base 21: mod_base = OTHER; note = 2'-O-methyluridine-3'-phosphorothioate
  modified_base 22: mod_base = OTHER; note = 2'-O-methyladenosine-3'-phosphorothioate
  modified_base 23: mod_base = OTHER; note = 2'-O-methyladenosine
attgtagatgaggcgtcacttaa

SEQ ID NO: 4326 - RNA, 23 nt, synthetic construct
  source 1..23: mol_type = other RNA
  modified_base 1: mod_base = OTHER; note = 2'-O-methyladenosine-3'-phosphorothioate
  modified_base 2: mod_base = OTHER; note = 2'-deoxy-2'-fluorouridine-3'-phosphorothioate
  modified_base 3: mod_base = OTHER; note = 2'-O-methyluridine-3'-phosphate
  modified_base 4: mod_base = OTHER; note = 2'-O-methyladenosine-3'-phosphate
  modified_base 5: mod_base = OTHER; note = 2'-O-methylguanosine-3'-phosphate
  modified_base 6: mod_base = OTHER; note = 2'-deoxy-2'-fluoroguanosine-3'-phosphate
  modified_base 7: mod_base = OTHER; note = 2'-O-methyladenosine-3'-phosphate
  modified_base 8: mod_base = OTHER; note = 2'-deoxy-2'-fluoroadenosine-3'-phosphate
  modified_base 9: mod_base = OTHER; note = 2'-deoxy-2'-fluorouridine-3'-phosphate
  modified_base 10: mod_base = OTHER; note = 2'-O-methyluridine-3'-phosphate
  modified_base 11: mod_base = OTHER; note = 2'-O-methyluridine-3'-phosphate
  modified_base 12: mod_base = OTHER; note = 2'-O-methylcytidine-3'-phosphate
  modified_base 13: mod_base = OTHER; note = 2'-O-methylcytidine-3'-phosphate
  modified_base 14: mod_base = OTHER; note = 2'-deoxy-2'-fluoroadenosine-3'-phosphate
  modified_base 15: mod_base = OTHER; note = 2'-O-methylguanosine-3'-phosphate
  modified_base 16: mod_base = OTHER; note = 2'-deoxy-2'-fluorocytidine-3'-phosphate
  modified_base 17: mod_base = OTHER; note = 2'-O-methyluridine-3'-phosphate
  modified_base 18: mod_base = OTHER; note = 2'-O-methyluridine-3'-phosphate
  modified_base 19: mod_base = OTHER; note = 2'-O-methylguanosine-3'-phosphate
  modified_base 20: mod_base = OTHER; note = 2'-O-methyluridine-3'-phosphate
  modified_base 21: mod_base = OTHER; note = 2'-O-methyladenosine-3'-phosphorothioate
  modified_base 22: mod_base = OTHER; note = 2'-O-methylguanosine-3'-phosphorothioate
  modified_base 23: mod_base = OTHER; note = 2'-O-methyladenosine
attaggaatttccagcttgtaga

SEQ ID NO: 4327 - RNA, 23 nt, synthetic construct
  source 1..23: mol_type = other RNA
  modified_base 1: mod_base = OTHER; note = 2'-O-methyladenosine-3'-phosphorothioate
  modified_base 2: mod_base = OTHER; note = 2'-deoxy-2'-fluorouridine-3'-phosphorothioate
  modified_base 3: mod_base = OTHER; note = 2'-O-methyluridine-3'-phosphate
  modified_base 4: mod_base = OTHER; note = 2'-O-methylguanosine-3'-phosphate
  modified_base 5: mod_base = OTHER; note = 2'-O-methyluridine-3'-phosphate
  modified_base 6: mod_base = OTHER; note = 2'-deoxy-2'-fluorouridine-3'-phosphate
  modified_base 7: mod_base = OTHER; note = 2'-O-methyluridine-3'-phosphate
  modified_base 8: mod_base = OTHER; note = 2'-deoxy-2'-fluoroadenosine-3'-phosphate
  modified_base 9: mod_base = OTHER; note = 2'-deoxy-2'-fluorouridine-3'-phosphate
  modified_base 10: mod_base = OTHER; note = 2'-O-methyladenosine-3'-phosphate
  modified_base 11: mod_base = OTHER; note = 2'-O-methyladenosine-3'-phosphate
  modified_base 12: mod_base = OTHER; note = 2'-O-methylguanosine-3'-phosphate
  modified_base 13: mod_base = OTHER; note = 2'-O-methylcytidine-3'-phosphate
  modified_base 14: mod_base = OTHER; note = 2'-deoxy-2'-fluorouridine-3'-phosphate
  modified_base 15: mod_base = OTHER; note = 2'-O-methyluridine-3'-phosphate
  modified_base 16: mod_base = OTHER; note = 2'-deoxy-2'-fluorouridine-3'-phosphate
  modified_base 17: mod_base = OTHER; note = 2'-O-methylcytidine-3'-phosphate
  modified_base 18: mod_base = OTHER; note = 2'-O-methyluridine-3'-phosphate
  modified_base 19: mod_base = OTHER; note = 2'-O-methyladenosine-3'-phosphate
  modified_base 20: mod_base = OTHER; note = 2'-O-methylcytidine-3'-phosphate
  modified_base 21: mod_base = OTHER; note = 2'-O-methyluridine-3'-phosphorothioate
  modified_base 22: mod_base = OTHER; note = 2'-O-methyluridine-3'-phosphorothioate
  modified_base 23: mod_base = OTHER; note = 2'-O-methylguanosine
attgtttataagctttctacttg

SEQ ID NO: 4328 - RNA, 23 nt, synthetic construct
  source 1..23: mol_type = other RNA
  modified_base 1: mod_base = OTHER; note = 2'-O-methyladenosine-3'-phosphorothioate
  modified_base 2: mod_base = OTHER; note = 2'-deoxy-2'-fluoroguanosine-3'-phosphorothioate
  modified_base 3: mod_base = OTHER; note = 2'-O-methyladenosine-3'-phosphate
  modified_base 4: mod_base = OTHER; note = 2'-O-methylguanosine-3'-phosphate
  modified_base 5: mod_base = OTHER; note = 2'-O-methyluridine-3'-phosphate
  modified_base 6: mod_base = OTHER; note = 2'-deoxy-2'-fluoroguanosine-3'-phosphate
  modified_base 7: mod_base = OTHER; note = 2'-O-methyluridine-3'-phosphate
  modified_base 8: mod_base = OTHER; note = 2'-deoxy-2'-fluoroadenosine-3'-phosphate
  modified_base 9: mod_base = OTHER; note = 2'-deoxy-2'-fluorouridine-3'-phosphate
  modified_base 10: mod_base = OTHER; note = 2'-O-methylcytidine-3'-phosphate
  modified_base 11: mod_base = OTHER; note = 2'-O-methyladenosine-3'-phosphate
  modified_base 12: mod_base = OTHER; note = 2'-O-methylcytidine-3'-phosphate
  modified_base 13: mod_base = OTHER; note = 2'-O-methylcytidine-3'-phosphate
  modified_base 14: mod_base = OTHER; note = 2'-deoxy-2'-fluorouridine-3'-phosphate
  modified_base 15: mod_base = OTHER; note = 2'-O-methylguanosine-3'-phosphate
  modified_base 16: mod_base = OTHER; note = 2'-deoxy-2'-fluorouridine-3'-phosphate
  modified_base 17: mod_base = OTHER; note = 2'-O-methyluridine-3'-phosphate
  modified_base 18: mod_base = OTHER; note = 2'-O-methylguanosine-3'-phosphate
  modified_base 19: mod_base = OTHER; note = 2'-O-methyluridine-3'-phosphate
  modified_base 20: mod_base = OTHER; note = 2'-O-methyluridine-3'-phosphate
  modified_base 21: mod_base = OTHER; note = 2'-O-methyluridine-3'-phosphorothioate
  modified_base 22: mod_base = OTHER; note = 2'-O-methyladenosine-3'-phosphorothioate
  modified_base 23: mod_base = OTHER; note = 2'-O-methyluridine
agagtgtatcacctgttgtttat

SEQ ID NO: 4329 - RNA, 23 nt, synthetic construct
  source 1..23: mol_type = other RNA
  modified_base 1: mod_base = OTHER; note = 2'-O-methyladenosine-3'-phosphorothioate
  modified_base 2: mod_base = OTHER; note = 2'-deoxy-2'-fluoroguanosine-3'-phosphorothioate
  modified_base 3: mod_base = OTHER; note = 2'-O-methyluridine-3'-phosphate
  modified_base 4: mod_base = OTHER; note = 2'-O-methyladenosine-3'-phosphate
  modified_base 5: mod_base = OTHER; note = 2'-O-methyladenosine-3'-phosphate
  modified_base 6: mod_base = OTHER; note = 2'-deoxy-2'-fluorouridine-3'-phosphate
  modified_base 7: mod_base = OTHER; note = 2'-O-methyluridine-3'-phosphate
  modified_base 8: mod_base = OTHER; note = 2'-deoxy-2'-fluorouridine-3'-phosphate
  modified_base 9: mod_base = OTHER; note = 2'-deoxy-2'-fluoroadenosine-3'-phosphate
  modified_base 10: mod_base = OTHER; note = 2'-O-methylcytidine-3'-phosphate
  modified_base 11: mod_base = OTHER; note = 2'-O-methyluridine-3'-phosphate
  modified_base 12: mod_base = OTHER; note = 2'-O-methyladenosine-3'-phosphate
  modified_base 13: mod_base = OTHER; note = 2'-O-methyladenosine-3'-phosphate
  modified_base 14: mod_base = OTHER; note = 2'-deoxy-2'-fluoroadenosine-3'-phosphate
  modified_base 15: mod_base = OTHER; note = 2'-O-methyladenosine-3'-phosphate
  modified_base 16: mod_base = OTHER; note = 2'-deoxy-2'-fluorocytidine-3'-phosphate
  modified_base 17: mod_base = OTHER; note = 2'-O-methylcytidine-3'-phosphate
  modified_base 18: mod_base = OTHER; note = 2'-O-methyladenosine-3'-phosphate
  modified_base 19: mod_base = OTHER; note = 2'-O-methylguanosine-3'-phosphate
  modified_base 20: mod_base = OTHER; note = 2'-O-methyluridine-3'-phosphate
  modified_base 21: mod_base = OTHER; note = 2'-O-methylguanosine-3'-phosphorothioate
  modified_base 22: mod_base = OTHER; note = 2'-O-methyladenosine-3'-phosphorothioate
  modified_base 23: mod_base = OTHER; note = 2'-O-methylguanosine
agtaatttactaaaaccagtgag

SEQ ID NO: 4330 - RNA, 23 nt, synthetic construct
  source 1..23: mol_type = other RNA
  modified_base 1: mod_base = OTHER; note = 2'-O-methyladenosine-3'-phosphorothioate
  modified_base 2: mod_base = OTHER; note = 2'-deoxy-2'-fluoroadenosine-3'-phosphorothioate
  modified_base 3: mod_base = OTHER; note = 2'-O-methyladenosine-3'-phosphate
  modified_base 4: mod_base = OTHER; note = 2'-O-methylguanosine-3'-phosphate
  modified_base 5: mod_base = OTHER; note = 2'-O-methyladenosine-3'-phosphate
  modified_base 6: mod_base = OTHER; note = 2'-deoxy-2'-fluorocytidine-3'-phosphate
  modified_base 7: mod_base = OTHER; note = 2'-O-methyluridine-3'-phosphate
  modified_base 8: mod_base = OTHER; note = 2'-deoxy-2'-fluoroadenosine-3'-phosphate
  modified_base 9: mod_base = OTHER; note = 2'-deoxy-2'-fluoroguanosine-3'-phosphate
  modified_base 10: mod_base = OTHER; note = 2'-O-methylguanosine-3'-phosphate
  modified_base 11: mod_base = OTHER; note = 2'-O-methylguanosine-3'-phosphate
  modified_base 12: mod_base = OTHER; note = 2'-O-methyladenosine-3'-phosphate
  modified_base 13: mod_base = OTHER; note = 2'-O-methyluridine-3'-phosphate
  modified_base 14: mod_base = OTHER; note = 2'-deoxy-2'-fluoroadenosine-3'-phosphate
  modified_base 15: mod_base = OTHER; note = 2'-O-methylcytidine-3'-phosphate
  modified_base 16: mod_base = OTHER; note = 2'-deoxy-2'-fluorouridine-3'-phosphate
  modified_base 17: mod_base = OTHER; note = 2'-O-methyluridine-3'-phosphate
  modified_base 18: mod_base = OTHER; note = 2'-O-methyluridine-3'-phosphate
  modified_base 19: mod_base = OTHER; note = 2'-O-methylcytidine-3'-phosphate
  modified_base 20: mod_base = OTHER; note = 2'-O-methyluridine-3'-phosphate
  modified_base 21: mod_base = OTHER; note = 2'-O-methylguanosine-3'-phosphorothioate
  modified_base 22: mod_base = OTHER; note = 2'-O-methyluridine-3'-phosphorothioate
  modified_base 23: mod_base = OTHER; note = 2'-O-methyladenosine
aaagactagggatactttctgta

SEQ ID NO: 4331 - RNA, 23 nt, synthetic construct
  source 1..23: mol_type = other RNA
  modified_base 1: mod_base = OTHER; note = 2'-O-methyladenosine-3'-phosphorothioate
  modified_base 2: mod_base = OTHER; note = 2'-deoxy-2'-fluoroadenosine-3'-phosphorothioate
  modified_base 3: mod_base = OTHER; note = 2'-O-methyladenosine-3'-phosphate
  modified_base 4: mod_base = OTHER; note = 2'-O-methyluridine-3'-phosphate
  modified_base 5: mod_base = OTHER; note = 2'-O-methylcytidine-3'-phosphate
  modified_base 6: mod_base = OTHER; note = 2'-deoxy-2'-fluoroadenosine-3'-phosphate
  modified_base 7: mod_base = OTHER; note = 2'-O-methylguanosine-3'-phosphate
  modified_base 8: mod_base = OTHER; note = 2'-deoxy-2'-fluorouridine-3'-phosphate
  modified_base 9: mod_base = OTHER; note = 2'-deoxy-2'-fluorouridine-3'-phosphate
  modified_base 10: mod_base = OTHER; note = 2'-O-methylcytidine-3'-phosphate
  modified_base 11: mod_base = OTHER; note = 2'-O-methyladenosine-3'-phosphate
  modified_base 12: mod_base = OTHER; note = 2'-O-methyladenosine-3'-phosphate
  modified_base 13: mod_base = OTHER; note = 2'-O-methyladenosine-3'-phosphate
  modified_base 14: mod_base = OTHER; note = 2'-deoxy-2'-fluorouridine-3'-phosphate
  modified_base 15: mod_base = OTHER; note = 2'-O-methyluridine-3'-phosphate
  modified_base 16: mod_base = OTHER; note = 2'-deoxy-2'-fluorouridine-3'-phosphate
  modified_base 17: mod_base = OTHER; note = 2'-O-methyluridine-3'-phosphate
  modified_base 18: mod_base = OTHER; note = 2'-O-methylcytidine-3'-phosphate
  modified_base 19: mod_base = OTHER; note = 2'-O-methylcytidine-3'-phosphate
  modified_base 20: mod_base = OTHER; note = 2'-O-methyladenosine-3'-phosphate
  modified_base 21: mod_base = OTHER; note = 2'-O-methylcytidine-3'-phosphorothioate
  modified_base 22: mod_base = OTHER; note = 2'-O-methyluridine-3'-phosphorothioate
  modified_base 23: mod_base = OTHER; note = 2'-O-methyluridine
aaatcagttcaaattttccactt

SEQ ID NO: 4332 - RNA, 23 nt, synthetic construct
  source 1..23: mol_type = other RNA
  modified_base 1: mod_base = OTHER; note = 2'-O-methyladenosine-3'-phosphorothioate
  modified_base 2: mod_base = OTHER; note = 2'-deoxy-2'-fluoroadenosine-3'-phosphorothioate
  modified_base 3: mod_base = OTHER; note = 2'-O-methyladenosine-3'-phosphate
  modified_base 4: mod_base = OTHER; note = 2'-O-methyladenosine-3'-phosphate
  modified_base 5: mod_base = OTHER; note = 2'-O-methylguanosine-3'-phosphate
  modified_base 6: mod_base = OTHER; note = 2'-deoxy-2'-fluoroguanosine-3'-phosphate
  modified_base 7: mod_base = OTHER; note = 2'-O-methyladenosine-3'-phosphate
  modified_base 8: mod_base = OTHER; note = 2'-deoxy-2'-fluoroadenosine-3'-phosphate
  modified_base 9: mod_base = OTHER; note = 2'-deoxy-2'-fluorouridine-3'-phosphate
  modified_base 10: mod_base = OTHER; note = 2'-O-methyladenosine-3'-phosphate
  modified_base 11: mod_base = OTHER; note = 2'-O-methyluridine-3'-phosphate
  modified_base 12: mod_base = OTHER; note = 2'-O-methylguanosine-3'-phosphate
  modified_base 13: mod_base = OTHER; note = 2'-O-methyladenosine-3'-phosphate
  modified_base 14: mod_base = OTHER; note = 2'-deoxy-2'-fluorocytidine-3'-phosphate
  modified_base 15: mod_base = OTHER; note = 2'-O-methyluridine-3'-phosphate
  modified_base 16: mod_base = OTHER; note = 2'-deoxy-2'-fluoroadenosine-3'-phosphate
  modified_base 17: mod_base = OTHER; note = 2'-O-methyladenosine-3'-phosphate
  modified_base 18: mod_base = OTHER; note = 2'-O-methyluridine-3'-phosphate
  modified_base 19: mod_base = OTHER; note = 2'-O-methylcytidine-3'-phosphate
  modified_base 20: mod_base = OTHER; note = 2'-O-methyladenosine-3'-phosphate
  modified_base 21: mod_base = OTHER; note = 2'-O-methylguanosine-3'-phosphorothioate
  modified_base 22: mod_base = OTHER; note = 2'-O-methyluridine-3'-phosphorothioate
  modified_base 23: mod_base = OTHER; note = 2'-O-methyluridine
aaaaggaatatgactaatcagtt

SEQ ID NO: 4333 - RNA, 23 nt, synthetic construct
  source 1..23: mol_type = other RNA
  modified_base 1: mod_base = OTHER; note = 2'-O-methyladenosine-3'-phosphorothioate
  modified_base 2: mod_base = OTHER; note = 2'-deoxy-2'-fluoroguanosine-3'-phosphorothioate
  modified_base 3: mod_base = OTHER; note = 2'-O-methyluridine-3'-phosphate
  modified_base 4: mod_base = OTHER; note = 2'-O-methyladenosine-3'-phosphate
  modified_base 5: mod_base = OTHER; note = 2'-O-methyladenosine-3'-phosphate
  modified_base 6: mod_base = OTHER; note = 2'-deoxy-2'-fluorocytidine-3'-phosphate
  modified_base 7: mod_base = OTHER; note = 2'-O-methyladenosine-3'-phosphate
  modified_base 8: mod_base = OTHER; note = 2'-deoxy-2'-fluoroadenosine-3'-phosphate
  modified_base 9: mod_base = OTHER; note = 2'-deoxy-2'-fluoroadenosine-3'-phosphate
  modified_base 10: mod_base = OTHER; note = 2'-O-methylcytidine-3'-phosphate
  modified_base 11: mod_base = OTHER; note = 2'-O-methyladenosine-3'-phosphate
  modified_base 12: mod_base = OTHER; note = 2'-O-methylguanosine-3'-phosphate
  modified_base 13: mod_base = OTHER; note = 2'-O-methyluridine-3'-phosphate
  modified_base 14: mod_base = OTHER; note = 2'-deoxy-2'-fluoroguanosine-3'-phosphate
  modified_base 15: mod_base = OTHER; note = 2'-O-methyluridine-3'-phosphate
  modified_base 16: mod_base = OTHER; note = 2'-deoxy-2'-fluoroadenosine-3'-phosphate
  modified_base 17: mod_base = OTHER; note = 2'-O-methyladenosine-3'-phosphate
  modified_base 18: mod_base = OTHER; note = 2'-O-methyluridine-3'-phosphate
  modified_base 19: mod_base = OTHER; note = 2'-O-methylcytidine-3'-phosphate
  modified_base 20: mod_base = OTHER; note = 2'-O-methyladenosine-3'-phosphate
  modified_base 21: mod_base = OTHER; note = 2'-O-methyladenosine-3'-phosphorothioate
  modified_base 22: mod_base = OTHER; note = 2'-O-methyladenosine-3'-phosphorothioate
  modified_base 23: mod_base = OTHER; note = 2'-O-methylguanosine
agtaacaaacagtgtaatcaaag

SEQ ID NO: 4334 - RNA, 23 nt, synthetic construct
  source 1..23: mol_type = other RNA
  modified_base 1: mod_base = OTHER; note = 2'-O-methyladenosine-3'-phosphorothioate
  modified_base 2: mod_base = OTHER; note = 2'-deoxy-2'-fluoroguanosine-3'-phosphorothioate
  modified_base 3: mod_base = OTHER; note = 2'-O-methyluridine-3'-phosphate
  modified_base 4: mod_base = OTHER; note = 2'-O-methyluridine-3'-phosphate
  modified_base 5: mod_base = OTHER; note = 2'-O-methyladenosine-3'-phosphate
  modified_base 6: mod_base = OTHER; note = 2'-deoxy-2'-fluorouridine-3'-phosphate
  modified_base 7: mod_base = OTHER; note = 2'-O-methyluridine-3'-phosphate
  modified_base 8: mod_base = OTHER; note = 2'-deoxy-2'-fluorouridine-3'-phosphate
  modified_base 9: mod_base = OTHER; note = 2'-deoxy-2'-fluorocytidine-3'-phosphate
  modified_base 10: mod_base = OTHER; note = 2'-O-methyluridine-3'-phosphate
  modified_base 11: mod_base = OTHER; note = 2'-O-methylguanosine-3'-phosphate
  modified_base 12: mod_base = OTHER; note = 2'-O-methyluridine-3'-phosphate
  modified_base 13: mod_base = OTHER; note = 2'-O-methyluridine-3'-phosphate
  modified_base 14: mod_base = OTHER; note = 2'-deoxy-2'-fluorouridine-3'-phosphate
  modified_base 15: mod_base = OTHER; note = 2'-O-methyladenosine-3'-phosphate
  modified_base 16: mod_base = OTHER; note = 2'-deoxy-2'-fluorocytidine-3'-phosphate
  modified_base 17: mod_base = OTHER; note = 2'-O-methyluridine-3'-phosphate
  modified_base 18: mod_base = OTHER; note = 2'-O-methylguanosine-3'-phosphate
  modified_base 19: mod_base = OTHER; note = 2'-O-methyladenosine-3'-phosphate
  modified_base 20: mod_base = OTHER; note = 2'-O-methylguanosine-3'-phosphate
  modified_base 21: mod_base = OTHER; note = 2'-O-methyladenosine-3'-phosphorothioate
  modified_base 22: mod_base = OTHER; note = 2'-O-methyladenosine-3'-phosphorothioate
  modified_base 23: mod_base = OTHER; note = 2'-O-methyladenosine
agttatttctgtttactgagaaa

SEQ ID NO: 4335 - RNA, 23 nt, synthetic construct
  source 1..23: mol_type = other RNA
  modified_base 1: mod_base = OTHER; note = 2'-O-methyladenosine-3'-phosphorothioate
  modified_base 2: mod_base = OTHER; note = 2'-deoxy-2'-fluorouridine-3'-phosphorothioate
  modified_base 3: mod_base = OTHER; note = 2'-O-methyluridine-3'-phosphate
  modified_base 4: mod_base = OTHER; note = 2'-O-methyluridine-3'-phosphate
  modified_base 5: mod_base = OTHER; note = 2'-O-methylcytidine-3'-phosphate
  modified_base 6: mod_base = OTHER; note = 2'-deoxy-2'-fluorouridine-3'-phosphate
  modified_base 7: mod_base = OTHER; note = 2'-O-methyladenosine-3'-phosphate
  modified_base 8: mod_base = OTHER; note = 2'-deoxy-2'-fluorouridine-3'-phosphate
  modified_base 9: mod_base = OTHER; note = 2'-deoxy-2'-fluorocytidine-3'-phosphate
  modified_base 10: mod_base = OTHER; note = 2'-O-methyladenosine-3'-phosphate
  modified_base 11: mod_base = OTHER; note = 2'-O-methyladenosine-3'-phosphate
  modified_base 12: mod_base = OTHER; note = 2'-O-methyladenosine-3'-phosphate
  modified_base 13: mod_base = OTHER; note = 2'-O-methylguanosine-3'-phosphate
  modified_base 14: mod_base = OTHER; note = 2'-deoxy-2'-fluoroadenosine-3'-phosphate
  modified_base 15: mod_base = OTHER; note = 2'-O-methyladenosine-3'-phosphate
  modified_base 16: mod_base = OTHER; note = 2'-deoxy-2'-fluorouridine-3'-phosphate
  modified_base 17: mod_base = OTHER; note = 2'-O-methylguanosine-3'-phosphate
  modified_base 18: mod_base = OTHER; note = 2'-O-methyladenosine-3'-phosphate
  modified_base 19: mod_base = OTHER; note = 2'-O-methyladenosine-3'-phosphate
  modified_base 20: mod_base = OTHER; note = 2'-O-methylguanosine-3'-phosphate
  modified_base 21: mod_base = OTHER; note = 2'-O-methyladenosine-3'-phosphorothioate
  modified_base 22: mod_base = OTHER; note = 2'-O-methyladenosine-3'-phosphorothioate
  modified_base 23: mod_base = OTHER; note = 2'-O-methylcytidine
atttctatcaaagaatgaagaac

SEQ ID NO: 4336 - RNA, 23 nt, synthetic construct
  source 1..23: mol_type = other RNA
  modified_base 1: mod_base = OTHER; note = 2'-O-methyladenosine-3'-phosphorothioate
  modified_base 2: mod_base = OTHER; note = 2'-deoxy-2'-fluoroadenosine-3'-phosphorothioate
  modified_base 3: mod_base = OTHER; note = 2'-O-methyluridine-3'-phosphate
  modified_base 4: mod_base = OTHER; note = 2'-O-methylcytidine-3'-phosphate
  modified_base 5: mod_base = OTHER; note = 2'-O-methylcytidine-3'-phosphate
  modified_base 6: mod_base = OTHER; note = 2'-deoxy-2'-fluorouridine-3'-phosphate
  modified_base 7: mod_base = OTHER; note = 2'-O-methylcytidine-3'-phosphate
  modified_base 8: mod_base = OTHER; note = 2'-deoxy-2'-fluoroadenosine-3'-phosphate
  modified_base 9: mod_base = OTHER; note = 2'-deoxy-2'-fluorocytidine-3'-phosphate
  modified_base 10: mod_base = OTHER; note = 2'-O-methyladenosine-3'-phosphate
  modified_base 11: mod_base = OTHER; note = 2'-O-methylguanosine-3'-phosphate
  modified_base 12: mod_base = OTHER; note = 2'-O-methyladenosine-3'-phosphate
  modified_base 13: mod_base = OTHER; note = 2'-O-methyladenosine-3'-phosphate
  modified_base 14: mod_base = OTHER; note = 2'-deoxy-2'-fluorouridine-3'-phosphate
  modified_base 15: mod_base = OTHER; note = 2'-O-methyladenosine-3'-phosphate
  modified_base 16: mod_base = OTHER; note = 2'-deoxy-2'-fluoroadenosine-3'-phosphate
  modified_base 17: mod_base = OTHER; note = 2'-O-methylguanosine-3'-phosphate
  modified_base 18: mod_base = OTHER; note = 2'-O-methyladenosine-3'-phosphate
  modified_base 19: mod_base = OTHER; note = 2'-O-methyluridine-3'-phosphate
  modified_base 20: mod_base = OTHER; note = 2'-O-methyluridine-3'-phosphate
  modified_base 21: mod_base = OTHER; note = 2'-O-methyluridine-3'-phosphorothioate
  modified_base 22: mod_base = OTHER; note = 2'-O-methyluridine-3'-phosphorothioate
  modified_base 23: mod_base = OTHER; note = 2'-O-methyladenosine
aatcctcacagaataagatttta

SEQ ID NO: 4337 - RNA, 23 nt, synthetic construct
  source 1..23: mol_type = other RNA
  modified_base 1: mod_base = OTHER; note = 2'-O-methyladenosine-3'-phosphorothioate
  modified_base 2: mod_base = OTHER; note = 2'-deoxy-2'-fluoroadenosine-3'-phosphorothioate
  modified_base 3: mod_base = OTHER; note = 2'-O-methyluridine-3'-phosphate
  modified_base 4: mod_base = OTHER; note = 2'-O-methyladenosine-3'-phosphate
  modified_base 5: mod_base = OTHER; note = 2'-O-methylguanosine-3'-phosphate
  modified_base 6: mod_base = OTHER; note = 2'-deoxy-2'-fluorouridine-3'-phosphate
  modified_base 7: mod_base = OTHER; note = 2'-O-methyladenosine-3'-phosphate
  modified_base 8: mod_base = OTHER; note = 2'-deoxy-2'-fluorouridine-3'-phosphate
  modified_base 9: mod_base = OTHER; note = 2'-deoxy-2'-fluorouridine-3'-phosphate
  modified_base 10: mod_base = OTHER; note = 2'-O-methylcytidine-3'-phosphate
  modified_base 11: mod_base = OTHER; note = 2'-O-methyluridine-3'-phosphate
  modified_base 12: mod_base = OTHER; note = 2'-O-methylguanosine-3'-phosphate
  modified_base 13: mod_base = OTHER; note = 2'-O-methyluridine-3'-phosphate
  modified_base 14: mod_base = OTHER; note = 2'-deoxy-2'-fluoroadenosine-3'-phosphate
  modified_base 15: mod_base = OTHER; note = 2'-O-methyladenosine-3'-phosphate
  modified_base 16: mod_base = OTHER; note = 2'-deoxy-2'-fluorouridine-3'-phosphate
  modified_base 17: mod_base = OTHER; note = 2'-O-methylcytidine-3'-phosphate
  modified_base 18: mod_base = OTHER; note = 2'-O-methylcytidine-3'-phosphate
  modified_base 19: mod_base = OTHER; note = 2'-O-methyluridine-3'-phosphate
  modified_base 20: mod_base = OTHER; note = 2'-O-methylcytidine-3'-phosphate
  modified_base 21: mod_base = OTHER; note = 2'-O-methyladenosine-3'-phosphorothioate
  modified_base 22: mod_base = OTHER; note = 2'-O-methylcytidine-3'-phosphorothioate
  modified_base 23: mod_base = OTHER; note = 2'-O-methyladenosine
aatagtattctgtaatcctcaca

SEQ ID NO: 4338 - RNA, 23 nt, synthetic construct
  source 1..23: mol_type = other RNA
  modified_base 1: mod_base = OTHER; note = 2'-O-methyladenosine-3'-phosphorothioate
  modified_base 2: mod_base = OTHER; note = 2'-deoxy-2'-fluorocytidine-3'-phosphorothioate
  modified_base 3: mod_base = OTHER; note = 2'-O-methyluridine-3'-phosphate
  modified_base 4: mod_base = OTHER; note = 2'-O-methyluridine-3'-phosphate
  modified_base 5: mod_base = OTHER; note = 2'-O-methyluridine-3'-phosphate
  modified_base 6: mod_base = OTHER; note = 2'-deoxy-2'-fluoroadenosine-3'-phosphate
  modified_base 7: mod_base = OTHER; note = 2'-O-methylcytidine-3'-phosphate
  modified_base 8: mod_base = OTHER; note = 2'-deoxy-2'-fluoroadenosine-3'-phosphate
  modified_base 9: mod_base = OTHER; note = 2'-deoxy-2'-fluorocytidine-3'-phosphate
  modified_base 10: mod_base = OTHER; note = 2'-O-methyluridine-3'-phosphate
  modified_base 11: mod_base = OTHER; note = 2'-O-methyluridine-3'-phosphate
  modified_base 12: mod_base = OTHER; note = 2'-O-methyluridine-3'-phosphate
  modified_base 13: mod_base = OTHER; note = 2'-O-methyladenosine-3'-phosphate
  modified_base 14: mod_base = OTHER; note = 2'-deoxy-2'-fluorouridine-3'-phosphate
  modified_base 15: mod_base = OTHER; note = 2'-O-methylguanosine-3'-phosphate
  modified_base 16: mod_base = OTHER; note = 2'-deoxy-2'-fluoroadenosine-3'-phosphate
  modified_base 17: mod_base = OTHER; note = 2'-O-methyluridine-3'-phosphate
  modified_base 18: mod_base = OTHER; note = 2'-O-methylguanosine-3'-phosphate
  modified_base 19: mod_base = OTHER; note = 2'-O-methyladenosine-3'-phosphate
  modified_base 20: mod_base = OTHER; note = 2'-O-methyladenosine-3'-phosphate
  modified_base 21: mod_base = OTHER; note = 2'-O-methylguanosine-3'-phosphorothioate
  modified_base 22: mod_base = OTHER; note = 2'-O-methyladenosine-3'-phosphorothioate
  modified_base 23: mod_base = OTHER; note = 2'-O-methyladenosine
actttacactttatgatgaagaa

SEQ ID NO: 4339 - RNA, 23 nt, synthetic construct
  source 1..23: mol_type = other RNA
  modified_base 1: mod_base = OTHER; note = 2'-O-methyladenosine-3'-phosphorothioate
  modified_base 2: mod_base = OTHER; note = 2'-deoxy-2'-fluoroadenosine-3'-phosphorothioate
  modified_base 3: mod_base = OTHER; note = 2'-O-methylguanosine-3'-phosphate
  modified_base 4: mod_base = OTHER; note = 2'-O-methyluridine-3'-phosphate
  modified_base 5: mod_base = OTHER; note = 2'-O-methyladenosine-3'-phosphate
  modified_base 6: mod_base = OTHER; note = 2'-deoxy-2'-fluoroguanosine-3'-phosphate
  modified_base 7: mod_base = OTHER; note = 2'-O-methyladenosine-3'-phosphate
  modified_base 8: mod_base = OTHER; note = 2'-deoxy-2'-fluoroadenosine-3'-phosphate
  modified_base 9: mod_base = OTHER; note = 2'-deoxy-2'-fluorocytidine-3'-phosphate
  modified_base 10: mod_base = OTHER; note = 2'-O-methyladenosine-3'-phosphate
  modified_base 11: mod_base = OTHER; note = 2'-O-methyluridine-3'-phosphate
  modified_base 12: mod_base = OTHER; note = 2'-O-methyladenosine-3'-phosphate
  modified_base 13: mod_base = OTHER; note = 2'-O-methyluridine-3'-phosphate
  modified_base 14: mod_base = OTHER; note = 2'-deoxy-2'-fluorouridine-3'-phosphate
  modified_base 15: mod_base = OTHER; note = 2'-O-methyluridine-3'-phosphate
  modified_base 16: mod_base = OTHER; note = 2'-deoxy-2'-fluoroguanosine-3'-phosphate
  modified_base 17: mod_base = OTHER; note = 2'-O-methyladenosine-3'-phosphate
  modified_base 18: mod_base = OTHER; note = 2'-O-methylguanosine-3'-phosphate
  modified_base 19: mod_base = OTHER; note = 2'-O-methylcytidine-3'-phosphate
  modified_base 20: mod_base = OTHER; note = 2'-O-methyladenosine-3'-phosphate
  modified_base 21: mod_base = OTHER; note = 2'-O-methyluridine-3'-phosphorothioate
  modified_base 22: mod_base = OTHER; note = 2'-O-methyluridine-3'-phosphorothioate
  modified_base 23: mod_base = OTHER; note = 2'-O-methyluridine
aagtagaacatatttgagcattt

SEQ ID NO: 4340 - RNA, 23 nt, synthetic construct
  source 1..23: mol_type = other RNA
  modified_base 1: mod_base = OTHER; note = 2'-O-methyladenosine-3'-phosphorothioate
  modified_base 2: mod_base = OTHER; note = 2'-deoxy-2'-fluoroadenosine-3'-phosphorothioate
  modified_base 3: mod_base = OTHER; note = 2'-O-methylguanosine-3'-phosphate
  modified_base 4: mod_base = OTHER; note = 2'-O-methyladenosine-3'-phosphate
  modified_base 5: mod_base = OTHER; note = 2'-O-methyladenosine-3'-phosphate
  modified_base 6: mod_base = OTHER; note = 2'-deoxy-2'-fluorocytidine-3'-phosphate
  modified_base 7: mod_base = OTHER; note = 2'-O-methyluridine-3'-phosphate
  modified_base 8: mod_base = OTHER; note = 2'-deoxy-2'-fluorouridine-3'-phosphate
  modified_base 9: mod_base = OTHER; note = 2'-deoxy-2'-fluoroadenosine-3'-phosphate
  modified_base 10: mod_base = OTHER; note = 2'-O-methyluridine-3'-phosphate
  modified_base 11: mod_base = OTHER; note = 2'-O-methyluridine-3'-phosphate
  modified_base 12: mod_base = OTHER; note = 2'-O-methylcytidine-3'-phosphate
  modified_base 13: mod_base = OTHER; note = 2'-O-methyluridine-3'-phosphate
  modified_base 14: mod_base = OTHER; note = 2'-deoxy-2'-fluoroadenosine-3'-phosphate
  modified_base 15: mod_base = OTHER; note = 2'-O-methyluridine-3'-phosphate
  modified_base 16: mod_base = OTHER; note = 2'-deoxy-2'-fluoroadenosine-3'-phosphate
  modified_base 17: mod_base = OTHER; note = 2'-O-methylguanosine-3'-phosphate
  modified_base 18: mod_base = OTHER; note = 2'-O-methyluridine-3'-phosphate
  modified_base 19: mod_base = OTHER; note = 2'-O-methyladenosine-3'-phosphate
  modified_base 20: mod_base = OTHER; note = 2'-O-methylguanosine-3'-phosphate
  modified_base 21: mod_base = OTHER; note = 2'-O-methyladenosine-3'-phosphorothioate
  modified_base 22: mod_base = OTHER; note = 2'-O-methyladenosine-3'-phosphorothioate
  modified_base 23: mod_base = OTHER; note = 2'-O-methylcytidine
aagaacttattctatagtagaac

SEQ ID NO: 4341 - RNA, 23 nt, synthetic construct
  source 1..23: mol_type = other RNA
  modified_base 1: mod_base = OTHER; note = 2'-O-methyladenosine-3'-phosphorothioate
  modified_base 2: mod_base = OTHER; note = 2'-deoxy-2'-fluorocytidine-3'-phosphorothioate
  modified_base 3: mod_base = OTHER; note = 2'-O-methylcytidine-3'-phosphate
  modified_base 4: mod_base = OTHER; note = 2'-O-methyluridine-3'-phosphate
  modified_base 5: mod_base = OTHER; note = 2'-O-methylguanosine-3'-phosphate
  modified_base 6: mod_base = OTHER; note = 2'-deoxy-2'-fluorouridine-3'-phosphate
  modified_base 7: mod_base = OTHER; note = 2'-O-methyladenosine-3'-phosphate
  modified_base 8: mod_base = OTHER; note = 2'-deoxy-2'-fluoroadenosine-3'-phosphate
  modified_base 9: mod_base = OTHER; note = 2'-deoxy-2'-fluoroadenosine-3'-phosphate
  modified_base 10: mod_base = OTHER; note = 2'-O-methyluridine-3'-phosphate
  modified_base 11: mod_base = OTHER; note = 2'-O-methyluridine-3'-phosphate
  modified_base 12: mod_base = OTHER; note = 2'-O-methyladenosine-3'-phosphate
  modified_base 13: mod_base = OTHER; note = 2'-O-methyladenosine-3'-phosphate
  modified_base 14: mod_base = OTHER; note = 2'-deoxy-2'-fluoroguanosine-3'-phosphate
  modified_base 15: mod_base = OTHER; note = 2'-O-methyladenosine-3'-phosphate
  modified_base 16: mod_base = OTHER; note = 2'-deoxy-2'-fluorouridine-3'-phosphate
  modified_base 17: mod_base = OTHER; note = 2'-O-methyladenosine-3'-phosphate
  modified_base 18: mod_base = OTHER; note = 2'-O-methyladenosine-3'-phosphate
  modified_base 19: mod_base = OTHER; note = 2'-O-methylguanosine-3'-phosphate
  modified_base 20: mod_base = OTHER; note = 2'-O-methyladenosine-3'-phosphate
  modified_base 21: mod_base = OTHER; note = 2'-O-methyladenosine-3'-phosphorothioate
  modified_base 22: mod_base = OTHER; note = 2'-O-methylcytidine-3'-phosphorothioate
  modified_base 23: mod_base = OTHER; note = 2'-O-methyluridine
acctgtaaattaagataagaact

SEQ ID NO: 4342 - RNA, 23 nt, synthetic construct
  source 1..23: mol_type = other RNA
  modified_base 1: mod_base = OTHER; note = 2'-O-methyladenosine-3'-phosphorothioate
  modified_base 2: mod_base = OTHER; note = 2'-deoxy-2'-fluoroadenosine-3'-phosphorothioate
  modified_base 3: mod_base = OTHER; note = 2'-O-methyladenosine-3'-phosphate
  modified_base 4: mod_base = OTHER; note = 2'-O-methyluridine-3'-phosphate
  modified_base 5: mod_base = OTHER; note = 2'-O-methyladenosine-3'-phosphate
  modified_base 6: mod_base = OTHER; note = 2'-deoxy-2'-fluorouridine-3'-phosphate
  modified_base 7: mod_base = OTHER; note = 2'-O-methyladenosine-3'-phosphate
  modified_base 8: mod_base = OTHER; note = 2'-deoxy-2'-fluoroadenosine-3'-phosphate
  modified_base 9: mod_base = OTHER; note = 2'-deoxy-2'-fluoroadenosine-3'-phosphate
  modified_base 10: mod_base = OTHER; note = 2'-O-methyladenosine-3'-phosphate
  modified_base 11: mod_base = OTHER; note = 2'-O-methylguanosine-3'-phosphate
  modified_base 12: mod_base = OTHER; note = 2'-O-methylguanosine-3'-phosphate
  modified_base 13: mod_base = OTHER; note = 2'-O-methylcytidine-3'-phosphate
  modified_base 14: mod_base = OTHER; note = 2'-deoxy-2'-fluoroadenosine-3'-phosphate
  modified_base 15: mod_base = OTHER; note = 2'-O-methyladenosine-3'-phosphate
  modified_base 16: mod_base = OTHER; note = 2'-deoxy-2'-fluorocytidine-3'-phosphate
  modified_base 17: mod_base = OTHER; note = 2'-O-methyladenosine-3'-phosphate
  modified_base 18: mod_base = OTHER; note = 2'-O-methyluridine-3'-phosphate
  modified_base 19: mod_base = OTHER; note = 2'-O-methyluridine-3'-phosphate
  modified_base 20: mod_base = OTHER; note = 2'-O-methyladenosine-3'-phosphate
  modified_base 21: mod_base = OTHER; note = 2'-O-methyladenosine-3'-phosphorothioate
  modified_base 22: mod_base = OTHER; note = 2'-O-methylguanosine-3'-phosphorothioate
  modified_base 23: mod_base = OTHER; note = 2'-O-methylcytidine
aaatataaaaggcaacattaagc

SEQ ID NO: 4343 - RNA, 23 nt, synthetic construct
  source 1..23: mol_type = other RNA
  modified_base 1: mod_base = OTHER; note = 2'-O-methyladenosine-3'-phosphorothioate
  modified_base 2: mod_base = OTHER; note = 2'-deoxy-2'-fluorouridine-3'-phosphorothioate
  modified_base 3: mod_base = OTHER; note = 2'-O-methyladenosine-3'-phosphate
  modified_base 4: mod_base = OTHER; note = 2'-O-methyladenosine-3'-phosphate
  modified_base 5: mod_base = OTHER; note = 2'-O-methyluridine-3'-phosphate
  modified_base 6: mod_base = OTHER; note = 2'-deoxy-2'-fluoroadenosine-3'-phosphate
  modified_base 7: mod_base = OTHER; note = 2'-O-methyluridine-3'-phosphate
  modified_base 8: mod_base = OTHER; note = 2'-deoxy-2'-fluoroadenosine-3'-phosphate
  modified_base 9: mod_base = OTHER; note = 2'-deoxy-2'-fluoroguanosine-3'-phosphate
  modified_base 10: mod_base = OTHER; note = 2'-O-methyluridine-3'-phosphate
  modified_base 11: mod_base = OTHER; note = 2'-O-methylguanosine-3'-phosphate
  modified_base 12: mod_base = OTHER; note = 2'-O-methyladenosine-3'-phosphate
  modified_base 13: mod_base = OTHER; note = 2'-O-methyluridine-3'-phosphate
  modified_base 14: mod_base = OTHER; note = 2'-deoxy-2'-fluorouridine-3'-phosphate
  modified_base 15: mod_base = OTHER; note = 2'-O-methylcytidine-3'-phosphate
  modified_base 16: mod_base = OTHER; note = 2'-deoxy-2'-fluorouridine-3'-phosphate
  modified_base 17: mod_base = OTHER; note = 2'-O-methylguanosine-3'-phosphate
  modified_base 18: mod_base = OTHER; note = 2'-O-methyladenosine-3'-phosphate
  modified_base 19: mod_base = OTHER; note = 2'-O-methyluridine-3'-phosphate
  modified_base 20: mod_base = OTHER; note = 2'-O-methyluridine-3'-phosphate
  modified_base 21: mod_base = OTHER; note = 2'-O-methyluridine-3'-phosphorothioate
  modified_base 22: mod_base = OTHER; note = 2'-O-methylguanosine-3'-phosphorothioate
  modified_base 23: mod_base = OTHER; note = 2'-O-methylcytidine
ataatatagtgattctgatttgc

SEQ ID NO: 4344 - RNA, 23 nt, synthetic construct
  source 1..23: mol_type = other RNA
tgggtgacagagtcagaaaactc

SEQ ID NO: 4345 - RNA, 23 nt, synthetic construct
  source 1..23: mol_type = other RNA
ctaaacacccgtaagacttcata

SEQ ID NO: 4346 - RNA, 23 nt, synthetic construct
  source 1..23: mol_type = other RNA
acttcatacaacacaatactcta

SEQ ID NO: 4347 - RNA, 23 nt, synthetic construct
  source 1..23: mol_type = other RNA
ctctatactgtgatgatcacagc

SEQ ID NO: 4348 - RNA, 23 nt, synthetic construct
  source 1..23: mol_type = other RNA
ggctacctaaaagaagacagtta

SEQ ID NO: 4349 - RNA, 23 nt, synthetic construct
  source 1..23: mol_type = other RNA
agacagttatctcatatttggct

SEQ ID NO: 4350 - RNA, 23 nt, synthetic construct
  source 1..23: mol_type = other RNA
gctgccagctttttatctttctc

SEQ ID NO: 4351 - RNA, 23 nt, synthetic construct
  source 1..23: mol_type = other RNA
tatctttctctcgaccacttaaa

SEQ ID NO: 4352 - RNA, 23 nt, synthetic construct
  source 1..23: mol_type = other RNA
accacttaaaacttcagacttcc

SEQ ID NO: 4353 - RNA, 23 nt, synthetic construct
  source 1..23: mol_type = other RNA
tcatggagaaagtccaatacctc

SEQ ID NO: 4354 - RNA, 23 nt, synthetic construct
  source 1..23: mol_type = other RNA
cactcgctcagctataagaagag

SEQ ID NO: 4355 - RNA, 23 nt, synthetic construct
  source 1..23: mol_type = other RNA
ctcaaccattgaaatgcctcaac

SEQ ID NO: 4356 - RNA, 23 nt, synthetic construct
  source 1..23: mol_type = other RNA
ctcaacaagcacgtcaaaagcta

SEQ ID NO: 4357 - RNA, 23 nt, synthetic construct
  source 1..23: mol_type = other RNA
agctacagaatctatttatcaat

SEQ ID NO: 4358 - RNA, 23 nt, synthetic construct
  source 1..23: mol_type = other RNA
tttatcaatttctgtctcatctt

SEQ ID NO: 4359 - RNA, 23 nt, synthetic construct
  source 1..23: mol_type = other RNA
tcatcttaatatgtctcttgctg

SEQ ID NO: 4360 - RNA, 23 nt, synthetic construct
  source 1..23: mol_type = other RNA
tcttgctgatctgtatcatcgtg

SEQ ID NO: 4361 - RNA, 23 nt, synthetic construct
  source 1..23: mol_type = other RNA
tatcatcgtgatgcttctctgaa

SEQ ID NO: 4362 - RNA, 23 nt, synthetic construct
  source 1..23: mol_type = other RNA
cttctctgaagttctgctacaac

SEQ ID NO: 4363 - RNA, 23 nt, synthetic construct
  source 1..23: mol_type = other RNA
tgctacaacctctagatctgcag

SEQ ID NO: 4364 - RNA, 23 nt, synthetic construct
  source 1..23: mol_type = other RNA
cacatcagcttaaaatctgtcat

SEQ ID NO: 4365 - RNA, 23 nt, synthetic construct
  source 1..23: mol_type = other RNA
agacaggaaaacaatattgtata

SEQ ID NO: 4366 - RNA, 23 nt, synthetic construct
  source 1..23: mol_type = other RNA
atattgtataacagaccacttcc

SEQ ID NO: 4367 - RNA, 23 nt, synthetic construct
  source 1..23: mol_type = other RNA
gaccacttcctgagtagaagagt

SEQ ID NO: 4368 - RNA, 23 nt, synthetic construct
  source 1..23: mol_type = other RNA
tagaagagtttctttgtgaaaag

SEQ ID NO: 4369 - RNA, 23 nt, synthetic construct
  source 1..23: mol_type = other RNA
gtcaagattaagactaaaactta

SEQ ID NO: 4370 - RNA, 23 nt, synthetic construct
  source 1..23: mol_type = other RNA
ttgttaccatatgtattcatctg

SEQ ID NO: 4371 - RNA, 23 nt, synthetic construct
  source 1..23: mol_type = other RNA
tcatctgttggatcttgtaaaca

SEQ ID NO: 4372 - RNA, 23 nt, synthetic construct
  source 1..23: mol_type = other RNA
acatgaaaagggctttattttca

SEQ ID NO: 4373 - RNA, 23 nt, synthetic construct
  source 1..23: mol_type = other RNA
aagtgtataaaatgcaactgttg

SEQ ID NO: 4374 - RNA, 23 nt, synthetic construct
  source 1..23: mol_type = other RNA
caactgttgatttcctcaacatg

SEQ ID NO: 4375 - RNA, 23 nt, synthetic construct
  source 1..23: mol_type = other RNA
ctcacaaatttctatcccaaatc

SEQ ID NO: 4376 - RNA, 23 nt, synthetic construct
  source 1..23: mol_type = other RNA
tcccaaatcttttctgaagatga

SEQ ID NO: 4377 - RNA, 23 nt, synthetic construct
  source 1..23: mol_type = other RNA
tgaagatgaagagtttagtttta

SEQ ID NO: 4378 - RNA, 23 nt, synthetic construct
  source 1..23: mol_type = other RNA
ttagttttaaaactgcactgcca

SEQ ID NO: 4379 - RNA, 23 nt, synthetic construct
  source 1..23: mol_type = other RNA
actgccaacaagttcacttcata

SEQ ID NO: 4380 - RNA, 23 nt, synthetic construct
  source 1..23: mol_type = other RNA
ctcttttgaggtgaatataattt

SEQ ID NO: 4381 - RNA, 23 nt, synthetic construct
  source 1..23: mol_type = other RNA
ctaagtatttttcaggtcttcac

SEQ ID NO: 4382 - RNA, 23 nt, synthetic construct
  source 1..23: mol_type = other RNA
tcttcaccaagtatcaaagtaat

SEQ ID NO: 4383 - RNA, 23 nt, synthetic construct
  source 1..23: mol_type = other RNA
caaagtaataacacaaatgaagt

SEQ ID NO: 4384 - RNA, 23 nt, synthetic construct
  source 1..23: mol_type = other RNA
caaatgaagtgtcattattcaaa

SEQ ID NO: 4385 - RNA, 23 nt, synthetic construct
  source 1..23: mol_type = other RNA
attcaaaatagtccactgactcc

SEQ ID NO: 4386 - RNA, 23 nt, synthetic construct
  source 1..23: mol_type = other RNA
ctcctcacatctgttatcttatt

SEQ ID NO: 4387 - RNA, 23 nt, synthetic construct
  source 1..23: mol_type = other RNA
agaactatttgtagtaactatca

SEQ ID NO: 4388 - RNA, 23 nt, synthetic construct
  source 1..23: mol_type = other RNA
actatcagaatctacattctaaa

SEQ ID NO: 4389 - RNA, 23 nt, synthetic construct
  source 1..23: mol_type = other RNA
aattgtattttttctatgccaca

SEQ ID NO: 4390 - RNA, 23 nt, synthetic construct
  source 1..23: mol_type = other RNA
ctatgccacattaacatctttta

SEQ ID NO: 4391 - RNA, 23 nt, synthetic construct
  source 1..23: mol_type = other RNA
catcttttaaagttgatgagaat

SEQ ID NO: 4392 - RNA, 23 nt, synthetic construct
  source 1..23: mol_type = other RNA
tgatgagaatcaagtatggaaaa

SEQ ID NO: 4393 - RNA, 23 nt, synthetic construct
  source 1..23: mol_type = other RNA
gtatggaaaagtaaggccatact

SEQ ID NO: 4394 - RNA, 23 nt, synthetic construct
  source 1..23: mol_type = other RNA
aggccatactcttacataataaa

SEQ ID NO: 4395 - RNA, 23 nt, synthetic construct
  source 1..23: mol_type = other RNA
aagaatcacagaattctagtaca

SEQ ID NO: 4396 - RNA, 23 nt, synthetic construct
  source 1..23: mol_type = other RNA
acatgtaggtaaatcataaatct

SEQ ID NO: 4397 - RNA, 23 nt, synthetic construct
  source 1..23: mol_type = other RNA
atctgttctaagacatatgatca

SEQ ID NO: 4398 - RNA, 23 nt, synthetic construct
  source 1..23: mol_type = other RNA
catatgatcaacagatgagaact

SEQ ID NO: 4399 - RNA, 23 nt, synthetic construct
  source 1..23: mol_type = other RNA
gaactggtggttaatatgtgaca

SEQ ID NO: 4400 - RNA, 23 nt, synthetic construct
  source 1..23: mol_type = other RNA
atatgtgacagtgagattagtca

SEQ ID NO: 4401 - RNA, 23 nt, synthetic construct
  source 1..23: mol_type = other RNA
gtcatatcactaatatactaaca

SEQ ID NO: 4402 - RNA, 23 nt, synthetic construct
  source 1..23: mol_type = other RNA
actaacaacagaatctaatcttc

SEQ ID NO: 4403 - RNA, 23 nt, synthetic construct
  source 1..23: mol_type = other RNA
aatcttcatttaaggcactgtag

SEQ ID NO: 4404 - RNA, 23 nt, synthetic construct
  source 1..23: mol_type = other RNA
ggcactgtagtgaattatctgag

SEQ ID NO: 4405 - RNA, 23 nt, synthetic construct
  source 1..23: mol_type = other RNA
attatctgagctagagttaccta

SEQ ID NO: 4406 - RNA, 23 nt, synthetic construct
  source 1..23: mol_type = other RNA
tagcttaccatactatatctttg

SEQ ID NO: 4407 - RNA, 23 nt, synthetic construct
  source 1..23: mol_type = other RNA
tctttggaatcatgaaaccttaa

SEQ ID NO: 4408 - RNA, 23 nt, synthetic construct
  source 1..23: mol_type = other RNA
cttaagacttcagaatgattttg

SEQ ID NO: 4409 - RNA, 23 nt, synthetic construct
  source 1..23: mol_type = other RNA
tgattttgcaggttgtcttccat

SEQ ID NO: 4410 - RNA, 23 nt, synthetic construct
  source 1..23: mol_type = other RNA
gtcttccattccagcctaacatc

SEQ ID NO: 4411 - RNA, 23 nt, synthetic construct
  source 1..23: mol_type = other RNA
caggcaaggaaaataaaagattt

SEQ ID NO: 4412 - RNA, 23 nt, synthetic construct
  source 1..23: mol_type = other RNA
aaaagatttccagtgacagaaaa

SEQ ID NO: 4413 - RNA, 23 nt, synthetic construct
  source 1..23: mol_type = other RNA
tatatgaattctctctccaaata

SEQ ID NO: 4414 - RNA, 23 nt, synthetic construct
  source 1..23: mol_type = other RNA
atgaacttgttggcccatctatt

SEQ ID NO: 4415 - RNA, 23 nt, synthetic construct
  source 1..23: mol_type = other RNA
cccatctattacatctacagctg

SEQ ID NO: 4416 - RNA, 23 nt, synthetic construct
  source 1..23: mol_type = other RNA
tctacagctgacccttgaacatg

SEQ ID NO: 4417 - RNA, 23 nt, synthetic construct
  source 1..23: mol_type = other RNA
cgcaaaatcttaactacctaata

SEQ ID NO: 4418 - RNA, 23 nt, synthetic construct
  source 1..23: mol_type = other RNA
ctactattgaccataaaccttac

SEQ ID NO: 4419 - RNA, 23 nt, synthetic construct
  source 1..23: mol_type = other RNA
aaccttactgataacataaacag

SEQ ID NO: 4420 - RNA, 23 nt, synthetic construct
  source 1..23: mol_type = other RNA
taacacatattttgcgtgttata

SEQ ID NO: 4421 - RNA, 23 nt, synthetic construct
  source 1..23: mol_type = other RNA
gcgtgttatatgtattatacact

SEQ ID NO: 4422 - RNA, 23 nt, synthetic construct
  source 1..23: mol_type = other RNA
cactatattcctacaataaagta

SEQ ID NO: 4423 - RNA, 23 nt, synthetic construct
  source 1..23: mol_type = other RNA
gtaagctagagaaaatgttattt

SEQ ID NO: 4424 - RNA, 23 nt, synthetic construct
  source 1..23: mol_type = other RNA
tactattcattaaatggaagtgg

SEQ ID NO: 4425 - RNA, 23 nt, synthetic construct
  source 1..23: mol_type = other RNA
tcaacataaaagtcttcattctc

SEQ ID NO: 4426 - RNA, 23 nt, synthetic construct
  source 1..23: mol_type = other RNA
ttcattctcattgtcttcacatt

SEQ ID NO: 4427 - RNA, 23 nt, synthetic construct
  source 1..23: mol_type = other RNA
ttggtcttgcagtcttgtcttag

SEQ ID NO: 4428 - RNA, 23 nt, synthetic construct
  source 1..23: mol_type = other RNA
ggaaagaatattcatgtataagt

SEQ ID NO: 4429 - RNA, 23 nt, synthetic construct
  source 1..23: mol_type = other RNA
ccttgcaattcaagcccttgttg

SEQ ID NO: 4430 - RNA, 23 nt, synthetic construct
  source 1..23: mol_type = other RNA
tgttgttcaagggtcaactgtaa

SEQ ID NO: 4431 - RNA, 23 nt, synthetic construct
  source 1..23: mol_type = other RNA
tcaactgtaataggatatagcta

SEQ ID NO: 4432 - RNA, 23 nt, synthetic construct
  source 1..23: mol_type = other RNA
agctatttttcttcctctatcaa

SEQ ID NO: 4433 - RNA, 23 nt, synthetic construct
  source 1..23: mol_type = other RNA
cctctatcaaccaaatggtaagc

SEQ ID NO: 4434 - RNA, 23 nt, synthetic construct
  source 1..23: mol_type = other RNA
gcatctattttgcagtccactct

SEQ ID NO: 4435 - RNA, 23 nt, synthetic construct
  source 1..23: mol_type = other RNA
tctactgagctaaattatagatc

SEQ ID NO: 4436 - RNA, 23 nt, synthetic construct
  source 1..23: mol_type = other RNA
atccagctatgctatttataatt

SEQ ID NO: 4437 - RNA, 23 nt, synthetic construct
  source 1..23: mol_type = other RNA
aattttcaatttctcctctgacc

SEQ ID NO: 4438 - RNA, 23 nt, synthetic construct
  source 1..23: mol_type = other RNA
ctgaccatttcagaacatcttcc

SEQ ID NO: 4439 - RNA, 23 nt, synthetic construct
  source 1..23: mol_type = other RNA
atcttccaataactcataaaaca

SEQ ID NO: 4440 - RNA, 23 nt, synthetic construct
  source 1..23: mol_type = other RNA
aacaactgaagtaaaattgagtg

SEQ ID NO: 4441 - RNA, 23 nt, synthetic construct
  source 1..23: mol_type = other RNA
ctggaaaatatattcaccaaact

SEQ ID NO: 4442 - RNA, 23 nt, synthetic construct
  source 1..23: mol_type = other RNA
ccaaactttggtaatttaagttg

SEQ ID NO: 4443 - RNA, 23 nt, synthetic construct
  source 1..23: mol_type = other RNA
ctaaaatagtttacacctatact

SEQ ID NO: 4444 - RNA, 23 nt, synthetic construct
  source 1..23: mol_type = other RNA
cacctatactgcataatccaaca

SEQ ID NO: 4445 - RNA, 23 nt, synthetic construct
  source 1..23: mol_type = other RNA
ccaacaattttaatttcagttga

SEQ ID NO: 4446 - RNA, 23 nt, synthetic construct
  source 1..23: mol_type = other RNA
gaagacatgttactaatataact

SEQ ID NO: 4447 - RNA, 23 nt, synthetic construct
  source 1..23: mol_type = other RNA
taaaagagtagaggatgtgtaat

SEQ ID NO: 4448 - RNA, 23 nt, synthetic construct
  source 1..23: mol_type = other RNA
atgtgtaattaaccatatcttct

SEQ ID NO: 4449 - RNA, 23 nt, synthetic construct
  source 1..23: mol_type = other RNA
tcttctaaaacatggttactaaa

SEQ ID NO: 4450 - RNA, 23 nt, synthetic construct
  source 1..23: mol_type = other RNA
ggttactaaaagaatatgtaaca

SEQ ID NO: 4451 - RNA, 23 nt, synthetic construct
  source 1..23: mol_type = other RNA
atatgtaacatcaatattgacct

SEQ ID NO: 4452 - RNA, 23 nt, synthetic construct
  source 1..23: mol_type = other RNA
atattgaccttggtttcttacac

SEQ ID NO: 4453 - RNA, 23 nt, synthetic construct
  source 1..23: mol_type = other RNA
tttcttacacaagtgttgctaac

SEQ ID NO: 4454 - RNA, 23 nt, synthetic construct
  source 1..23: mol_type = other RNA
ctaactcaatagtgaaggagaca

SEQ ID NO: 4455 - RNA, 23 nt, synthetic construct
  source 1..23: mol_type = other RNA
aaggagacactattaaattttct

SEQ ID NO: 4456 - RNA, 23 nt, synthetic construct
  source 1..23: mol_type = other RNA
ctgaacccatgagagatactaga

SEQ ID NO: 4457 - RNA, 23 nt, synthetic construct
  source 1..23: mol_type = other RNA
ggagtggaaagtgtttggttcag

SEQ ID NO: 4458 - RNA, 23 nt, synthetic construct
  source 1..23: mol_type = other RNA
gttcagggatatctgaagaacag

SEQ ID NO: 4459 - RNA, 23 nt, synthetic construct
  source 1..23: mol_type = other RNA
gggcagagatttcttaagtgacg

SEQ ID NO: 4460 - RNA, 23 nt, synthetic construct
  source 1..23: mol_type = other RNA
ttaagtgacgcctcatctacaag

SEQ ID NO: 4461 - RNA, 23 nt, synthetic construct
  source 1..23: mol_type = other RNA
tctacaagctggaaattcctaaa

SEQ ID NO: 4462 - RNA, 23 nt, synthetic construct
  source 1..23: mol_type = other RNA
caagtagaaagcttataaacaac

SEQ ID NO: 4463 - RNA, 23 nt, synthetic construct
  source 1..23: mol_type = other RNA
ataaacaacaggtgatacactca

SEQ ID NO: 4464 - RNA, 23 nt, synthetic construct
  source 1..23: mol_type = other RNA
ctcactggttttagtaaattacc

SEQ ID NO: 4465 - RNA, 23 nt, synthetic construct
  source 1..23: mol_type = other RNA
tacagaaagtatccctagtctta

SEQ ID NO: 4466 - RNA, 23 nt, synthetic construct
  source 1..23: mol_type = other RNA
aagtggaaaatttgaactgatta

SEQ ID NO: 4467 - RNA, 23 nt, synthetic construct
  source 1..23: mol_type = other RNA
aactgattagtcatattcctttg

SEQ ID NO: 4468 - RNA, 23 nt, synthetic construct
  source 1..23: mol_type = other RNA
ctttgattacactgtttgttaca

SEQ ID NO: 4469 - RNA, 23 nt, synthetic construct
  source 1..23: mol_type = other RNA
tttctcagtaaacagaaataact

SEQ ID NO: 4470 - RNA, 23 nt, synthetic construct
  source 1..23: mol_type = other RNA
gttcttcattctttgatagaaat

SEQ ID NO: 4471 - RNA, 23 nt, synthetic construct
  source 1..23: mol_type = other RNA
taaaatcttattctgtgaggatt

SEQ ID NO: 4472 - RNA, 23 nt, synthetic construct
  source 1..23: mol_type = other RNA
tgtgaggattacagaatactata

SEQ ID NO: 4473 - RNA, 23 nt, synthetic construct
  source 1..23: mol_type = other RNA
ttcttcatcataaagtgtaaaga

SEQ ID NO: 4474 - RNA, 23 nt, synthetic construct
  source 1..23: mol_type = other RNA
aaatgctcaaatatgttctacta

SEQ ID NO: 4475 - RNA, 23 nt, synthetic construct
  source 1..23: mol_type = other RNA
gttctactatagaataagttctt

SEQ ID NO: 4476 - RNA, 23 nt, synthetic construct
  source 1..23: mol_type = other RNA
agttcttatcttaatttacaggg

SEQ ID NO: 4477 - RNA, 23 nt, synthetic construct
  source 1..23: mol_type = other RNA
gcttaatgttgccttttatattt

SEQ ID NO: 4478 - RNA, 23 nt, synthetic construct
  source 1..23: mol_type = other RNA
gcaaatcagaatcactatattaa

SEQ ID NO: 4479 - RNA, 21 nt, synthetic construct
  source 1..21: mol_type = other RNA
tagcacttttgatcatcttct

SEQ ID NO: 4480 - RNA, 21 nt, synthetic construct
  source 1..21: mol_type = other RNA
cctcatcaataaaatgcttat

SEQ ID NO: 4481 - RNA, 21 nt, synthetic construct
  source 1..21: mol_type = other RNA
tccatcattgttattttaact

SEQ ID NO: 4482 - RNA, 21 nt, synthetic construct
  source 1..21: mol_type = other RNA
tccacactattattctaaact

SEQ ID NO: 4483 - RNA, 21 nt, synthetic construct
  source 1..21: mol_type = other RNA
ctcctaaaagcttctctaaat

SEQ ID NO: 4484 - RNA, 21 nt, synthetic construct
  source 1..21: mol_type = other RNA
ggtctcatttagtacataact

SEQ ID NO: 4485 - RNA, 21 nt, synthetic construct
  source 1..21: mol_type = other RNA
cagacttaagaactattgttt

SEQ ID NO: 4486 - RNA, 21 nt, synthetic construct
  source 1..21: mol_type = other RNA
catcaagtttctctgttaatt

SEQ ID NO: 4487 - RNA, 21 nt, synthetic construct
  source 1..21: mol_type = other RNA
attctctatattctacttgtt

SEQ ID NO: 4488 - RNA, 21 nt, synthetic construct
  source 1..21: mol_type = other RNA
ctgcttgaagaaatttaatgt

SEQ ID NO: 4489 - RNA, 21 nt, synthetic construct
  source 1..21: mol_type = other RNA
cactgacattaatattcctat

SEQ ID NO: 4490 - RNA, 21 nt, synthetic construct
  source 1..21: mol_type = other RNA
aaccacattgttttgaaaatt

SEQ ID NO: 4491 - RNA, 21 nt, synthetic construct
  source 1..21: mol_type = other RNA
tcatcactagctagttttctt

SEQ ID NO: 4492 - RNA, 21 nt, synthetic construct
  source 1..21: mol_type = other RNA
ttactttttcctaagattcat

SEQ ID NO: 4493 - RNA, 21 nt, synthetic construct
  source 1..21: mol_type = other RNA
ttacctagaataaatagtctt

SEQ ID NO: 4494 - RNA, 21 nt, synthetic construct
  source 1..21: mol_type = other RNA
ggtcttctaaatttcaacagt

SEQ ID NO: 4495 - RNA, 21 nt, synthetic construct
  source 1..21: mol_type = other RNA
cctatacattgtttacacttt

SEQ ID NO: 4496 - RNA, 21 nt, synthetic construct
  source 1..21: mol_type = other RNA
tctcttgaatcagagtatcat

SEQ ID NO: 4497 - RNA, 21 nt, synthetic construct
  source 1..21: mol_type = other RNA
gctgagaacaatatagttaat

SEQ ID NO: 4498 - RNA, 21 nt, synthetic construct
  source 1..21: mol_type = other RNA
cgtccatctttatttcttcat

SEQ ID NO: 4499 - RNA, 21 nt, synthetic construct
  source 1..21: mol_type = other RNA
agcttcttttgatttgctaat

SEQ ID NO: 4500 - RNA, 21 nt, synthetic construct
  source 1..21: mol_type = other RNA
atctcttttctttatcctgtt

SEQ ID NO: 4501 - RNA, 21 nt, synthetic construct
  source 1..21: mol_type = other RNA
cacaaatgaattacacatttt

SEQ ID NO: 4502 - RNA, 21 nt, synthetic construct
  source 1..21: mol_type = other RNA
tttgtccaaaagcaataaact

SEQ ID NO: 4503 - RNA, 21 nt, synthetic construct
  source 1..21: mol_type = other RNA
tctgagtttaatcactttagt

SEQ ID NO: 4504 - RNA, 21 nt, synthetic construct
  source 1..21: mol_type = other RNA
ccaagtacaactcttcatcat

SEQ ID NO: 4505 - RNA, 21 nt, synthetic construct
  source 1..21: mol_type = other RNA
ttctactttgaaaatgctttt

SEQ ID NO: 4506 - RNA, 21 nt, synthetic construct
  source 1..21: mol_type = other RNA
tatcatatattccttcctatt

SEQ ID NO: 4507 - RNA, 21 nt, synthetic construct
  source 1..21: mol_type = other RNA
cctctcaaaacctacataatt

SEQ ID NO: 4508 - RNA, 21 nt, synthetic construct
  source 1..21: mol_type = other RNA
agttaattgttctctgtgagt

SEQ ID NO: 4509 - RNA, 21 nt, synthetic construct
  source 1..21: mol_type = other RNA
ttctatcattttgaaacactt

SEQ ID NO: 4510 - RNA, 21 nt, synthetic construct
  source 1..21: mol_type = other RNA
cagcttgaacttgagcatact

SEQ ID NO: 4511 - RNA, 21 nt, synthetic construct
  source 1..21: mol_type = other RNA
tcacccaaattttgaattttt

SEQ ID NO: 4512 - RNA, 21 nt, synthetic construct
  source 1..21: mol_type = other RNA
gcagtataactattctgatct

SEQ ID NO: 4513 - RNA, 21 nt, synthetic construct
  source 1..21: mol_type = other RNA
ggttttctttgtgcttctcat

SEQ ID NO: 4514 - RNA, 21 nt, synthetic construct
  source 1..21: mol_type = other RNA
atgagaataaacataccaact

SEQ ID NO: 4515 - RNA, 21 nt, synthetic construct
  source 1..21: mol_type = other RNA
gagtgatttcattgaataaat

SEQ ID NO: 4516 - RNA, 21 nt, synthetic construct
  source 1..21: mol_type = other RNA
gtttccatatttgtaaaatgt

SEQ ID NO: 4517 - RNA, 21 nt, synthetic construct
  source 1..21: mol_type = other RNA
catgctgtttttggtcaaact

SEQ ID NO: 4518 - RNA, 21 nt, synthetic construct
  source 1..21: mol_type = other RNA
ctctactgcagtataatgtct

SEQ ID NO: 4519 - RNA, 21 nt, synthetic construct
  source 1..21: mol_type = other RNA
ttggtgtttgatttagttact

SEQ ID NO: 4520 - RNA, 21 nt, synthetic construct
  source 1..21: mol_type = other RNA
tctttctccagaagttttact

SEQ ID NO: 4521 - RNA, 21 nt, synthetic construct
  source 1..21: mol_type = other RNA
agagttcaaatacaacaattt

SEQ ID NO: 4522 - RNA, 21 nt, synthetic construct
  source 1..21: mol_type = other RNA
tctgtgttgattactaatcat

SEQ ID NO: 4523 - RNA, 21 nt, synthetic construct
  source 1..21: mol_type = other RNA
tgcttttttagcttctctctt

SEQ ID NO: 4524 - RNA, 21 nt, synthetic construct
  source 1..21: mol_type = other RNA
ctgtgactgcaacgtcttact

SEQ ID NO: 4525 - RNA, 21 nt, synthetic construct
  source 1..21: mol_type = other RNA
cacttctgcattctctgttct

SEQ ID NO: 4526 - RNA, 21 nt, synthetic construct
  source 1..21: mol_type = other RNA
ctcatttttcctttgttgatt

SEQ ID NO: 4527 - RNA, 21 nt, synthetic construct
  source 1..21: mol_type = other RNA
cctcagaagcctatttttaat

SEQ ID NO: 4528 - RNA, 21 nt, synthetic construct
  source 1..21: mol_type = other RNA
atagtaattcacagtcctcat

SEQ ID NO: 4529 - RNA, 21 nt, synthetic construct
  source 1..21: mol_type = other RNA
tttctcaaatctgtgatctct

SEQ ID NO: 4530 - RNA, 21 nt, synthetic construct
  source 1..21: mol_type = other RNA
gctgccaaaattatcaacact

SEQ ID NO: 4531 - RNA, 21 nt, synthetic construct
  source 1..21: mol_type = other RNA
gactgattgatatatttaagt

SEQ ID NO: 4532 - RNA, 21 nt, synthetic construct
  source 1..21: mol_type = other RNA
tacacttttaacttagcatgt

SEQ ID NO: 4533 - RNA, 21 nt, synthetic construct
  source 1..21: mol_type = other RNA
tctgagcaagttacctcttct

SEQ ID NO: 4534 - RNA, 21 nt, synthetic construct
  source 1..21: mol_type = other RNA
gccctctttatgtaggtttat

SEQ ID NO: 4535 - RNA, 21 nt, synthetic construct
  source 1..21: mol_type = other RNA
caaggaatattaatcttcact

SEQ ID NO: 4536 - RNA, 21 nt, synthetic construct
  source 1..21: mol_type = other RNA
atgttgtttatgtttcttact

SEQ ID NO: 4537 - RNA, 21 nt, synthetic construct
  source 1..21: mol_type = other RNA
atactcggactcaaatgtctt

SEQ ID NO: 4538 - RNA, 21 nt, synthetic construct
  source 1..21: mol_type = other RNA
tgaagcttttctgataattat

SEQ ID NO: 4539 - RNA, 21 nt, synthetic construct
  source 1..21: mol_type = other RNA
gaactctttgctgttaatctt

SEQ ID NO: 4540 - RNA, 21 nt, synthetic construct
  source 1..21: mol_type = other RNA
ttgaaagttttgctgattaat

SEQ ID NO: 4541 - RNA, 21 nt, synthetic construct
  source 1..21: mol_type = other RNA
atgctagaagaaaactaaagt

SEQ ID NO: 4542 - RNA, 21 nt, synthetic construct
  source 1..21: mol_type = other RNA
cctcttcatgcatgtttctgt

SEQ ID NO: 4543 - RNA, 21 nt, synthetic construct
  source 1..21: mol_type = other RNA
tactgcttttgaacctgaagt

SEQ ID NO: 4544 - RNA, 21 nt, synthetic construct
  source 1..21: mol_type = other RNA
caacgttctactgttgcttct

SEQ ID NO: 4545 - RNA, 21 nt, synthetic construct
  source 1..21: mol_type = other RNA
cagatagtccttgttttaatt

SEQ ID NO: 4546 - RNA, 21 nt, synthetic construct
  source 1..21: mol_type = other RNA
acactgtatatatttcttgct

SEQ ID NO: 4547 - RNA, 21 nt, synthetic construct
  source 1..21: mol_type = other RNA
aacttaataaagatattgtgt

SEQ ID NO: 4548 - RNA, 21 nt, synthetic construct
  source 1..21: mol_type = other RNA
tttctatttgtgtctcctctt

SEQ ID NO: 4549 - RNA, 21 nt, synthetic construct
  source 1..21: mol_type = other RNA
gcttacaaatgtttgccattt

SEQ ID NO: 4550 - RNA, 21 nt, synthetic construct
  source 1..21: mol_type = other RNA
ctgtgatttttgttctcttct

SEQ ID NO: 4551 - RNA, 21 nt, synthetic construct
  source 1..21: mol_type = other RNA
tgatcgaagctatcaacaatt

SEQ ID NO: 4552 - RNA, 21 nt, synthetic construct
  source 1..21: mol_type = other RNA
atgcctgtttatgctgttcat

SEQ ID NO: 4553 - RNA, 21 nt, synthetic construct
  source 1..21: mol_type = other RNA
agaatttcccagtttaaaact

SEQ ID NO: 4554 - RNA, 21 nt, synthetic construct
  source 1..21: mol_type = other RNA
gtagatcaagtttgtcttcct

SEQ ID NO: 4555 - RNA, 21 nt, synthetic construct
  source 1..21: mol_type = other RNA
acaacccttcctcttttctct

SEQ ID NO: 4556 - RNA, 21 nt, synthetic construct
  source 1..21: mol_type = other RNA
agtgaaatttgcataatgaat

SEQ ID NO: 4557 - RNA, 21 nt, synthetic construct
  source 1..21: mol_type = other RNA
ttaggatatattcacattgtt

SEQ ID NO: 4558 - RNA, 21 nt, synthetic construct
  source 1..21: mol_type = other RNA
tcttagatattattgctagtt

SEQ ID NO: 4559 - RNA, 21 nt, synthetic construct
  source 1..21: mol_type = other RNA
ctggttaaaatggatgatttt

SEQ ID NO: 4560 - RNA, 21 nt, synthetic construct
  source 1..21: mol_type = other RNA
cttccctgaagtgctttacat

SEQ ID NO: 4561 - RNA, 21 nt, synthetic construct
  source 1..21: mol_type = other RNA
caccactgtcttgatgctctt

SEQ ID NO: 4562 - RNA, 21 nt, synthetic construct
  source 1..21: mol_type = other RNA
acaactcttgttttgctgttt

SEQ ID NO: 4563 - RNA, 21 nt, synthetic construct
  source 1..21: mol_type = other RNA
cctttcgtttgctttcttatt

SEQ ID NO: 4564 - RNA, 21 nt, synthetic construct
  source 1..21: mol_type = other RNA
gggcaaaatcacttatgaaat

SEQ ID NO: 4565 - RNA, 21 nt, synthetic construct
  source 1..21: mol_type = other RNA
aacactttgatgttatcattt

SEQ ID NO: 4566 - RNA, 21 nt, synthetic construct
  source 1..21: mol_type = other RNA
ttcctccaaggagttagaatt

SEQ ID NO: 4567 - RNA, 21 nt, synthetic construct
  source 1..21: mol_type = other RNA
aagtgttttgaacttgatctt

SEQ ID NO: 4568 - RNA, 21 nt, synthetic construct
  source 1..21: mol_type = other RNA
tggcctcatttttctcttttt

SEQ ID NO: 4569 - RNA, 21 nt, synthetic construct
  source 1..21: mol_type = other RNA
aggtatttgcattgtttaaat

SEQ ID NO: 4570 - RNA, 21 nt, synthetic construct
  source 1..21: mol_type = other RNA
cctaatattgtgcgacttcat

SEQ ID NO: 4571 - RNA, 21 nt, synthetic construct
  source 1..21: mol_type = other RNA
acaccaaatgaagtggtcatt

SEQ ID NO: 4572 - RNA, 21 nt, synthetic construct
  source 1..21: mol_type = other RNA
gtagcaaatcagtatattctt

SEQ ID NO: 4573 - RNA, 21 nt, synthetic construct
  source 1..21: mol_type = other RNA
cgaaagcaagagattatcaat

SEQ ID NO: 4574 - RNA, 21 nt, synthetic construct
  source 1..21: mol_type = other RNA
ccaacacagactctatcagct

SEQ ID NO: 4575 - RNA, 21 nt, synthetic construct
  source 1..21: mol_type = other RNA
gactagaatgatatttgatat

SEQ ID NO: 4576 - RNA, 21 nt, synthetic construct
  source 1..21: mol_type = other RNA
gcctgagaatttgcttttagt

SEQ ID NO: 4577 - RNA, 21 nt, synthetic construct
  source 1..21: mol_type = other RNA
caaaacaatggtctcttctgt

SEQ ID NO: 4578 - RNA, 21 nt, synthetic construct
  source 1..21: mol_type = other RNA
gataaacaacaaagccaacgt

SEQ ID NO: 4579 - RNA, 21 nt, synthetic construct
  source 1..21: mol_type = other RNA
ttttttaatacgaacctgtct

SEQ ID NO: 4580 - RNA, 21 nt, synthetic construct
  source 1..21: mol_type = other RNA
ggtttataattctgcttaagt

SEQ ID NO: 4581 - RNA, 21 nt, synthetic construct
  source 1..21: mol_type = other RNA
aggataaaagcaagttcctct

SEQ ID NO: 4582 - RNA, 21 nt, synthetic construct
  source 1..21: mol_type = other RNA
tgtagagtgttttttttacat

SEQ ID NO: 4583 - RNA, 21 nt, synthetic construct
  source 1..21: mol_type = other RNA
ttctctgaatgacagttgtat

SEQ ID NO: 4584 - RNA, 21 nt, synthetic construct
  source 1..21: mol_type = other RNA
attgtatttacctctcctgtt

SEQ ID NO: 4585 - RNA, 21 nt, synthetic construct
  source 1..21: mol_type = other RNA
tggcatacatgtatttaaagt

SEQ ID NO: 4586 - RNA, 21 nt, synthetic construct
  source 1..21: mol_type = other RNA
ttgtcaagattttaaaggttt

SEQ ID NO: 4587 - RNA, 21 nt, synthetic construct
  source 1..21: mol_type = other RNA
tatgaaaattcctactggact

SEQ ID NO: 4588 - RNA, 21 nt, synthetic construct
  source 1..21: mol_type = other RNA
cctctttgtggcaaaacatct

SEQ ID NO: 4589 - RNA, 21 nt, synthetic construct
  source 1..21: mol_type = other RNA
cagtcagaagagactcgtgtt

SEQ ID NO: 4590 - RNA, 21 nt, synthetic construct
  source 1..21: mol_type = other RNA
aagtcactgaacaactgatct

SEQ ID NO: 4591 - RNA, 21 nt, synthetic construct
  source 1..21: mol_type = other RNA
ggagcttatgattttccatct

SEQ ID NO: 4592 - RNA, 21 nt, synthetic construct
  source 1..21: mol_type = other RNA
gtgcggatcgtttcgcaactt

SEQ ID NO: 4593 - RNA, 21 nt, synthetic construct
  source 1..21: mol_type = other RNA
aatctgccgtcttttgaagct

SEQ ID NO: 4594 - RNA, 21 nt, synthetic construct
  source 1..21: mol_type = other RNA
tacttcttttcccgacttctt

SEQ ID NO: 4595 - RNA, 21 nt, synthetic construct
  source 1..21: mol_type = other RNA
ctactgtaatccacaaccctt

SEQ ID NO: 4596 - RNA, 21 nt, synthetic construct
  source 1..21: mol_type = other RNA
tttgttccattcttttcttat

SEQ ID NO: 4597 - RNA, 21 nt, synthetic construct
  source 1..21: mol_type = other RNA
gaagatgtgaaagcacgaaat

SEQ ID NO: 4598 - RNA, 21 nt, synthetic construct
  source 1..21: mol_type = other RNA
cagtaaatatattgagccatt

SEQ ID NO: 4599 - RNA, 21 nt, synthetic construct
  source 1..21: mol_type = other RNA
aatgggaaagaaaacttctct

SEQ ID NO: 4600 - RNA, 21 nt, synthetic construct
  source 1..21: mol_type = other RNA
ggcagaatgttcattttcatt

SEQ ID NO: 4601 - RNA, 21 nt, synthetic construct
  source 1..21: mol_type = other RNA
cgcctgcatagcatatattat

SEQ ID NO: 4602 - RNA, 21 nt, synthetic construct
  source 1..21: mol_type = other RNA
ctggctgtttttccatttcct

SEQ ID NO: 4603 - RNA, 21 nt, synthetic construct
  source 1..21: mol_type = other RNA
agggaaataaaagtcttttgt

SEQ ID NO: 4604 - RNA, 21 nt, synthetic construct
  source 1..21: mol_type = other RNA
ccaccctttctggtcatctct

SEQ ID NO: 4605 - RNA, 21 nt, synthetic construct
  source 1..21: mol_type = other RNA
tgccataatggtaaaggactt

SEQ ID NO: 4606 - RNA, 21 nt, synthetic construct
  source 1..21: mol_type = other RNA
caaactgtgtaaactggaaat

SEQ ID NO: 4607 - RNA, 21 nt, synthetic construct
  source 1..21: mol_type = other RNA
taaaccctcatgtacatctgt

SEQ ID NO: 4608 - RNA, 21 nt, synthetic construct
  source 1..21: mol_type = other RNA
ttttgtgaagcagctatacgt

SEQ ID NO: 4609 - RNA, 21 nt, synthetic construct
  source 1..21: mol_type = other RNA
atggagatatcattgataaat

SEQ ID NO: 4610 - RNA, 21 nt, synthetic construct
  source 1..21: mol_type = other RNA
gtgtattcatcattgcattct

SEQ ID NO: 4611 - RNA, 21 nt, synthetic construct
  source 1..21: mol_type = other RNA
gaagctttgggtaatttagtt

SEQ ID NO: 4612 - RNA, 21 nt, synthetic construct
  source 1..21: mol_type = other RNA
gctgtgaaattggcagacttt

SEQ ID NO: 4613 - RNA, 21 nt, synthetic construct
  source 1..21: mol_type = other RNA
taacaattaaagtgggatgat

SEQ ID NO: 4614 - RNA, 21 nt, synthetic construct
  source 1..21: mol_type = other RNA
gctggctacaaggaatttctt

SEQ ID NO: 4615 - RNA, 21 nt, synthetic construct
  source 1..21: mol_type = other RNA
tgttattattctttgctcact

SEQ ID NO: 4616 - RNA, 21 nt, synthetic construct
  source 1..21: mol_type = other RNA
ataacaatttgcacttggtgt

SEQ ID NO: 4617 - RNA, 21 nt, synthetic construct
  source 1..21: mol_type = other RNA
cttccgcactaagatgtgagt

SEQ ID NO: 4618 - RNA, 21 nt, synthetic construct
  source 1..21: mol_type = other RNA
ctctcatctcacctctctgtt

SEQ ID NO: 4619 - RNA, 21 nt, synthetic construct
  source 1..21: mol_type = other RNA
cacccatggatctgtcaacgt

SEQ ID NO: 4620 - RNA, 21 nt, synthetic construct
  source 1..21: mol_type = other RNA
ataaaattctactgacttctt

SEQ ID NO: 4621 - RNA, 21 nt, synthetic construct
  source 1..21: mol_type = other RNA
tgccatcttgacaactatgct

SEQ ID NO: 4622 - RNA, 21 nt, synthetic construct
  source 1..21: mol_type = other RNA
acttaggtatcctaactatgt

SEQ ID NO: 4623 - RNA, 21 nt, synthetic construct
  source 1..21: mol_type = other RNA
ctgcttctactcctcctgctt

SEQ ID NO: 4624 - RNA, 21 nt, synthetic construct
  source 1..21: mol_type = other RNA
tgaggaaattgtgatttgttt

SEQ ID NO: 4625 - RNA, 21 nt, synthetic construct
  source 1..21: mol_type = other RNA
gacgagtatcagcttttcgat

SEQ ID NO: 4626 - RNA, 21 nt, synthetic construct
  source 1..21: mol_type = other RNA
tccctctgaccctcagtttct

SEQ ID NO: 4627 - RNA, 21 nt, synthetic construct
  source 1..21: mol_type = other RNA
gcccttttgataacagaagct

SEQ ID NO: 4628 - RNA, 21 nt, synthetic construct
  source 1..21: mol_type = other RNA
agaaattaaatggtagcagtt

SEQ ID NO: 4629 - RNA, 21 nt, synthetic construct
  source 1..21: mol_type = other RNA
gatggattttcaccgattctt

SEQ ID NO: 4630 - RNA, 21 nt, synthetic construct
  source 1..21: mol_type = other RNA
acatcacacttgctcacatgt

SEQ ID NO: 4631 - RNA, 21 nt, synthetic construct
  source 1..21: mol_type = other RNA
tctaaggcctgaaaaccattt

SEQ ID NO: 4632 - RNA, 21 nt, synthetic construct
  source 1..21: mol_type = other RNA
ttacgtaaagatccttatggt

SEQ ID NO: 4633 - RNA, 21 nt, synthetic construct
  source 1..21: mol_type = other RNA
tacagtgaagctgatgccagt

SEQ ID NO: 4634 - RNA, 21 nt, synthetic construct
  source 1..21: mol_type = other RNA
atttgctgaattgaattgttt

SEQ ID NO: 4635 - RNA, 21 nt, synthetic construct
  source 1..21: mol_type = other RNA
taagctctagtttggacttat

SEQ ID NO: 4636 - RNA, 21 nt, synthetic construct
  source 1..21: mol_type = other RNA
ctggctagtagtgtgtgagat

SEQ ID NO: 4637 - RNA, 21 nt, synthetic construct
  source 1..21: mol_type = other RNA
atgtgatgcatcatcttatct

SEQ ID NO: 4638 - RNA, 21 nt, synthetic construct
  source 1..21: mol_type = other RNA
cctacatgtaatgcatatgtt

SEQ ID NO: 4639 - RNA, 21 nt, synthetic construct
  source 1..21: mol_type = other RNA
cagcagccaagagtttgttgt

SEQ ID NO: 4640 - RNA, 21 nt, synthetic construct
  source 1..21: mol_type = other RNA
tccaatccagccttcacatgt

SEQ ID NO: 4641 - RNA, 21 nt, synthetic construct
  source 1..21: mol_type = other RNA
accaacagtacccatcaagct

SEQ ID NO: 4642 - RNA, 21 nt, synthetic construct
  source 1..21: mol_type = other RNA
ctgctagggatcatcagaaat

SEQ ID NO: 4643 - RNA, 21 nt, synthetic construct
  source 1..21: mol_type = other RNA
ggtttgctaccacataaagct

SEQ ID NO: 4644 - RNA, 21 nt, synthetic construct
  source 1..21: mol_type = other RNA
agtgtacagcatcatgctcct

SEQ ID NO: 4645 - RNA, 21 nt, synthetic construct
  source 1..21: mol_type = other RNA
tggcttcgaccacaacctgct

SEQ ID NO: 4646 - RNA, 21 nt, synthetic construct
  source 1..21: mol_type = other RNA
ccagtcattgcattcagcagt

SEQ ID NO: 4647 - RNA, 21 nt, synthetic construct
  source 1..21: mol_type = other RNA
cttccatgatgcacagacagt

SEQ ID NO: 4648 - RNA, 21 nt, synthetic construct
  source 1..21: mol_type = other RNA
caggaggataccaacttgatt

SEQ ID NO: 4649 - RNA, 21 nt, synthetic construct
  source 1..21: mol_type = other RNA
tgatggaaacaaggagtcaat

SEQ ID NO: 4650 - RNA, 21 nt, synthetic construct
  source 1..21: mol_type = other RNA
aagcaagaatcagttggtttt

SEQ ID NO: 4651 - RNA, 21 nt, synthetic construct
  source 1..21: mol_type = other RNA
caactgcttgccactcgtcct

SEQ ID NO: 4652 - RNA, 21 nt, synthetic construct
  source 1..21: mol_type = other RNA
gtgttgaagtattactgtagt

SEQ ID NO: 4653 - RNA, 21 nt, synthetic construct
  source 1..21: mol_type = other RNA
ttactgttggcaaaacaatat

SEQ ID NO: 4654 - RNA, 21 nt, synthetic construct
  source 1..21: mol_type = other RNA
cagtgtgtcctactctggtct

SEQ ID NO: 4655 - RNA, 21 nt, synthetic construct
  source 1..21: mol_type = other RNA
agaaaccagatggagtaaagt

SEQ ID NO: 4656 - RNA, 21 nt, synthetic construct
  source 1..21: mol_type = other RNA
gctccacagcaaaccttcctt

SEQ ID NO: 4657 - RNA, 21 nt, synthetic construct
  source 1..21: mol_type = other RNA
gactttgaagcctacacaaat

SEQ ID NO: 4658 - RNA, 23 nt, synthetic construct
  source 1..23: mol_type = other RNA
agaagatgatcaaaagtgctagt

SEQ ID NO: 4659 - RNA, 23 nt, synthetic construct
  source 1..23: mol_type = other RNA
ataagcattttattgatgaggtc

SEQ ID NO: 4660 - RNA, 23 nt, synthetic construct
  source 1..23: mol_type = other RNA
agttaaaataacaatgatggaga

SEQ ID NO: 4661 - RNA, 23 nt, synthetic construct
  source 1..23: mol_type = other RNA
agtttagaataatagtgtggatt

SEQ ID NO: 4662 - RNA, 23 nt, synthetic construct
  source 1..23: mol_type = other RNA
atttagagaagcttttaggagtc

SEQ ID NO: 4663 - RNA, 23 nt, synthetic construct
  source 1..23: mol_type = other RNA
agttatgtactaaatgagaccag

SEQ ID NO: 4664 - RNA, 23 nt, synthetic construct
  source 1..23: mol_type = other RNA
aaacaatagttcttaagtctgtt

SEQ ID NO: 4665 - RNA, 23 nt, synthetic construct
  source 1..23: mol_type = other RNA
aattaacagagaaacttgatgaa

SEQ ID NO: 4666 - RNA, 23 nt, synthetic construct
  source 1..23: mol_type = other RNA
aacaagtagaatatagagaatga

SEQ ID NO: 4667 - RNA, 23 nt, synthetic construct
  source 1..23: mol_type = other RNA
acattaaatttcttcaagcagtc

SEQ ID NO: 4668 - RNA, 23 nt, synthetic construct
  source 1..23: mol_type = other RNA
ataggaatattaatgtcagtgat

SEQ ID NO: 4669 - RNA, 23 nt, synthetic construct
  source 1..23: mol_type = other RNA
aattttcaaaacaatgtggttga

SEQ ID NO: 4670 - RNA, 23 nt, synthetic construct
  source 1..23: mol_type = other RNA
aagaaaactagctagtgatgatg

SEQ ID NO: 4671 - RNA, 23 nt, synthetic construct
  source 1..23: mol_type = other RNA
atgaatcttaggaaaaagtaaga

SEQ ID NO: 4672 - RNA, 23 nt, synthetic construct
  source 1..23: mol_type = other RNA
aagactatttattctaggtaaga

SEQ ID NO: 4673 - RNA, 23 nt, synthetic construct
  source 1..23: mol_type = other RNA
actgttgaaatttagaagaccca

SEQ ID NO: 4674 - RNA, 23 nt, synthetic construct
  source 1..23: mol_type = other RNA
aaagtgtaaacaatgtataggaa

SEQ ID NO: 4675 - RNA, 23 nt, synthetic construct
  source 1..23: mol_type = other RNA
atgatactctgattcaagagaga

SEQ ID NO: 4676 - RNA, 23 nt, synthetic construct
  source 1..23: mol_type = other RNA
attaactatattgttctcagcaa

SEQ ID NO: 4677 - RNA, 23 nt, synthetic construct
  source 1..23: mol_type = other RNA
atgaagaaataaagatggacgca

SEQ ID NO: 4678 - RNA, 23 nt, synthetic construct
  source 1..23: mol_type = other RNA
attagcaaatcaaaagaagctga

SEQ ID NO: 4679 - RNA, 23 nt, synthetic construct
  source 1..23: mol_type = other RNA
aacaggataaagaaaagagatca

SEQ ID NO: 4680 - RNA, 23 nt, synthetic construct
  source 1..23: mol_type = other RNA
aaaatgtgtaattcatttgtggt

SEQ ID NO: 4681 - RNA, 23 nt, synthetic construct
  source 1..23: mol_type = other RNA
agtttattgcttttggacaaagc

SEQ ID NO: 4682 - RNA, 23 nt, synthetic construct
  source 1..23: mol_type = other RNA
actaaagtgattaaactcagaaa

SEQ ID NO: 4683 - RNA, 23 nt, synthetic construct
  source 1..23: mol_type = other RNA
atgatgaagagttgtacttggaa

SEQ ID NO: 4684 - RNA, 23 nt, synthetic construct
  source 1..23: mol_type = other RNA
aaaagcattttcaaagtagaatc

SEQ ID NO: 4685 - RNA, 23 nt, synthetic construct
  source 1..23: mol_type = other RNA
aataggaaggaatatatgataag

SEQ ID NO: 4686 - RNA, 23 nt, synthetic construct
  source 1..23: mol_type = other RNA
aattatgtaggttttgagaggga

SEQ ID NO: 4687 - RNA, 23 nt, synthetic construct
  source 1..23: mol_type = other RNA
actcacagagaacaattaacttg

SEQ ID NO: 4688 - RNA, 23 nt, synthetic construct
  source 1..23: mol_type = other RNA
aagtgtttcaaaatgatagaaga

SEQ ID NO: 4689 - RNA, 23 nt, synthetic construct
  source 1..23: mol_type = other RNA
agtatgctcaagttcaagctggg

SEQ ID NO: 4690 - RNA, 23 nt, synthetic construct
  source 1..23: mol_type = other RNA
aaaaattcaaaatttgggtgaag

SEQ ID NO: 4691 - RNA, 23 nt, synthetic construct
  source 1..23: mol_type = other RNA
agatcagaatagttatactgcta

SEQ ID NO: 4692 - RNA, 23 nt, synthetic construct
  source 1..23: mol_type = other RNA
atgagaagcacaaagaaaaccta

SEQ ID NO: 4693 - RNA, 23 nt, synthetic construct
  source 1..23: mol_type = other RNA
agttggtatgtttattctcattt

SEQ ID NO: 4694 - RNA, 23 nt, synthetic construct
  source 1..23: mol_type = other RNA
atttattcaatgaaatcactcga

SEQ ID NO: 4695 - RNA, 23 nt, synthetic construct
  source 1..23: mol_type = other RNA
acattttacaaatatggaaactg

SEQ ID NO: 4696 - RNA, 23 nt, synthetic construct
  source 1..23: mol_type = other RNA
agtttgaccaaaaacagcatggc

SEQ ID NO: 4697 - RNA, 23 nt, synthetic construct
  source 1..23: mol_type = other RNA
agacattatactgcagtagagga

SEQ ID NO: 4698 - RNA, 23 nt, synthetic construct
  source 1..23: mol_type = other RNA
agtaactaaatcaaacaccaagt

SEQ ID NO: 4699 - RNA, 23 nt, synthetic construct
  source 1..23: mol_type = other RNA
agtaaaacttctggagaaagata

SEQ ID NO: 4700 - RNA, 23 nt, synthetic construct
  source 1..23: mol_type = other RNA
aaattgttgtatttgaactctca

SEQ ID NO: 4701 - RNA, 23 nt, synthetic construct
  source 1..23: mol_type = other RNA
atgattagtaatcaacacagaga

SEQ ID NO: 4702 - RNA, 23 nt, synthetic construct
  source 1..23: mol_type = other RNA
aagagagaagctaaaaaagcaca

SEQ ID NO: 4703 - RNA, 23 nt, synthetic construct
  source 1..23: mol_type = other RNA
agtaagacgttgcagtcacagga

SEQ ID NO: 4704 - RNA, 23 nt, synthetic construct
  source 1..23: mol_type = other RNA
agaacagagaatgcagaagtggc

SEQ ID NO: 4705 - RNA, 23 nt, synthetic construct
  source 1..23: mol_type = other RNA
aatcaacaaaggaaaaatgagaa

SEQ ID NO: 4706 - RNA, 23 nt, synthetic construct
  source 1..23: mol_type = other RNA
attaaaaataggcttctgaggac

SEQ ID NO: 4707 - RNA, 23 nt, synthetic construct
  source 1..23: mol_type = other RNA
atgaggactgtgaattactatcg

SEQ ID NO: 4708 - RNA, 23 nt, synthetic construct
  source 1..23: mol_type = other RNA
agagatcacagatttgagaaaga

SEQ ID NO: 4709 - RNA, 23 nt, synthetic construct
  source 1..23: mol_type = other RNA
agtgttgataattttggcagcat

SEQ ID NO: 4710 - RNA, 23 nt, synthetic construct
  source 1..23: mol_type = other RNA
acttaaatatatcaatcagtcct

SEQ ID NO: 4711 - RNA, 23 nt, synthetic construct
  source 1..23: mol_type = other RNA
acatgctaagttaaaagtgtaaa

SEQ ID NO: 4712 - RNA, 23 nt, synthetic construct
  source 1..23: mol_type = other RNA
agaagaggtaacttgctcagagc

SEQ ID NO: 4713 - RNA, 23 nt, synthetic construct
  source 1..23: mol_type = other RNA
ataaacctacataaagagggcag

SEQ ID NO: 4714 - RNA, 23 nt, synthetic construct
  source 1..23: mol_type = other RNA
agtgaagattaatattccttgaa

SEQ ID NO: 4715 - RNA, 23 nt, synthetic construct
  source 1..23: mol_type = other RNA
agtaagaaacataaacaacatga

SEQ ID NO: 4716 - RNA, 23 nt, synthetic construct
  source 1..23: mol_type = other RNA
aagacatttgagtccgagtatat

SEQ ID NO: 4717 - RNA, 23 nt, synthetic construct
  source 1..23: mol_type = other RNA
ataattatcagaaaagcttcaac

SEQ ID NO: 4718 - RNA, 23 nt, synthetic construct
  source 1..23: mol_type = other RNA
aagattaacagcaaagagttcta

SEQ ID NO: 4719 - RNA, 23 nt, synthetic construct
  source 1..23: mol_type = other RNA
attaatcagcaaaactttcaatg

SEQ ID NO: 4720 - RNA, 23 nt, synthetic construct
  source 1..23: mol_type = other RNA
actttagttttcttctagcatta

SEQ ID NO: 4721 - RNA, 23 nt, synthetic construct
  source 1..23: mol_type = other RNA
acagaaacatgcatgaagaggag

SEQ ID NO: 4722 - RNA, 23 nt, synthetic construct
  source 1..23: mol_type = other RNA
acttcaggttcaaaagcagtaag

SEQ ID NO: 4723 - RNA, 23 nt, synthetic construct
  source 1..23: mol_type = other RNA
agaagcaacagtagaacgttgac

SEQ ID NO: 4724 - RNA, 23 nt, synthetic construct
  source 1..23: mol_type = other RNA
aattaaaacaaggactatctggg

SEQ ID NO: 4725 - RNA, 23 nt, synthetic construct
  source 1..23: mol_type = other RNA
agcaagaaatatatacagtgtcc

SEQ ID NO: 4726 - RNA, 23 nt, synthetic construct
  source 1..23: mol_type = other RNA
acacaatatctttattaagttgg

SEQ ID NO: 4727 - RNA, 23 nt, synthetic construct
  source 1..23: mol_type = other RNA
aagaggagacacaaatagaaata

SEQ ID NO: 4728 - RNA, 23 nt, synthetic construct
  source 1..23: mol_type = other RNA
aaatggcaaacatttgtaagcct

SEQ ID NO: 4729 - RNA, 23 nt, synthetic construct
  source 1..23: mol_type = other RNA
agaagagaacaaaaatcacagga

SEQ ID NO: 4730 - RNA, 23 nt, synthetic construct
  source 1..23: mol_type = other RNA
aattgttgatagcttcgatcagt

SEQ ID NO: 4731 - RNA, 23 nt, synthetic construct
  source 1..23: mol_type = other RNA
atgaacagcataaacaggcatgt

SEQ ID NO: 4732 - RNA, 23 nt, synthetic construct
  source 1..23: mol_type = other RNA
agttttaaactgggaaattctaa

SEQ ID NO: 4733 - RNA, 23 nt, synthetic construct
  source 1..23: mol_type = other RNA
aggaagacaaacttgatctacag

SEQ ID NO: 4734 - RNA, 23 nt, synthetic construct
  source 1..23: mol_type = other RNA
agagaaaagaggaagggttgttt

SEQ ID NO: 4735 - RNA, 23 nt, synthetic construct
  source 1..23: mol_type = other RNA
attcattatgcaaatttcacttc

SEQ ID NO: 4736 - RNA, 23 nt, synthetic construct
  source 1..23: mol_type = other RNA
aacaatgtgaatatatcctaaag

SEQ ID NO: 4737 - RNA, 23 nt, synthetic construct
  source 1..23: mol_type = other RNA
aactagcaataatatctaagatg

SEQ ID NO: 4738 - RNA, 23 nt, synthetic construct
  source 1..23: mol_type = other RNA
aaaatcatccattttaaccagga

SEQ ID NO: 4739 - RNA, 23 nt, synthetic construct
  source 1..23: mol_type = other RNA
atgtaaagcacttcagggaagag

SEQ ID NO: 4740 - RNA, 23 nt, synthetic construct
  source 1..23: mol_type = other RNA
aagagcatcaagacagtggtgag

SEQ ID NO: 4741 - RNA, 23 nt, synthetic construct
  source 1..23: mol_type = other RNA
aaacagcaaaacaagagttgtat

SEQ ID NO: 4742 - RNA, 23 nt, synthetic construct
  source 1..23: mol_type = other RNA
aataagaaagcaaacgaaaggaa

SEQ ID NO: 4743 - RNA, 23 nt, synthetic construct
  source 1..23: mol_type = other RNA
atttcataagtgattttgcccac

SEQ ID NO: 4744 - RNA, 23 nt, synthetic construct
  source 1..23: mol_type = other RNA
aaatgataacatcaaagtgttac

SEQ ID NO: 4745 - RNA, 23 nt, synthetic construct
  source 1..23: mol_type = other RNA
aattctaactccttggaggaaga

SEQ ID NO: 4746 - RNA, 23 nt, synthetic construct
  source 1..23: mol_type = other RNA
aagatcaagttcaaaacacttat

SEQ ID NO: 4747 - RNA, 23 nt, synthetic construct
  source 1..23: mol_type = other RNA
aaaaagagaaaaatgaggccatt

SEQ ID NO: 4748 - RNA, 23 nt, synthetic construct
  source 1..23: mol_type = other RNA
atttaaacaatgcaaatacctcc

SEQ ID NO: 4749 - RNA, 23 nt, synthetic construct
  source 1..23: mol_type = other RNA
atgaagtcgcacaatattagggt

SEQ ID NO: 4750 - RNA, 23 nt, synthetic construct
  source 1..23: mol_type = other RNA
aatgaccacttcatttggtgtct

SEQ ID NO: 4751 - RNA, 23 nt, synthetic construct
  source 1..23: mol_type = other RNA
aagaatatactgatttgctacta

SEQ ID NO: 4752 - RNA, 23 nt, synthetic construct
  source 1..23: mol_type = other RNA
attgataatctcttgctttcgtg

SEQ ID NO: 4753 - RNA, 23 nt, synthetic construct
  source 1..23: mol_type = other RNA
agctgatagagtctgtgttggtc

SEQ ID NO: 4754 - RNA, 23 nt, synthetic construct
  source 1..23: mol_type = other RNA
atatcaaatatcattctagtcac

SEQ ID NO: 4755 - RNA, 23 nt, synthetic construct
  source 1..23: mol_type = other RNA
actaaaagcaaattctcaggctt

SEQ ID NO: 4756 - RNA, 23 nt, synthetic construct
  source 1..23: mol_type = other RNA
acagaagagaccattgttttgct

SEQ ID NO: 4757 - RNA, 23 nt, synthetic construct
  source 1..23: mol_type = other RNA
acgttggctttgttgtttatctt

SEQ ID NO: 4758 - RNA, 23 nt, synthetic construct
  source 1..23: mol_type = other RNA
agacaggttcgtattaaaaaaaa

SEQ ID NO: 4759 - RNA, 23 nt, synthetic construct
  source 1..23: mol_type = other RNA
acttaagcagaattataaacctt

SEQ ID NO: 4760 - RNA, 23 nt, synthetic construct
  source 1..23: mol_type = other RNA
agaggaacttgcttttatcctaa

SEQ ID NO: 4761 - RNA, 23 nt, synthetic construct
  source 1..23: mol_type = other RNA
atgtaaaaaaaacactctacatc

SEQ ID NO: 4762 - RNA, 23 nt, synthetic construct
  source 1..23: mol_type = other RNA
atacaactgtcattcagagaaca

SEQ ID NO: 4763 - RNA, 23 nt, synthetic construct
  source 1..23: mol_type = other RNA
aacaggagaggtaaatacaatct

SEQ ID NO: 4764 - RNA, 23 nt, synthetic construct
  source 1..23: mol_type = other RNA
actttaaatacatgtatgccacg

SEQ ID NO: 4765 - RNA, 23 nt, synthetic construct
  source 1..23: mol_type = other RNA
aaacctttaaaatcttgacaaca

SEQ ID NO: 4766 - RNA, 23 nt, synthetic construct
  source 1..23: mol_type = other RNA
agtccagtaggaattttcataca

SEQ ID NO: 4767 - RNA, 23 nt, synthetic construct
  source 1..23: mol_type = other RNA
agatgttttgccacaaagaggtg

SEQ ID NO: 4768 - RNA, 23 nt, synthetic construct
  source 1..23: mol_type = other RNA
aacacgagtctcttctgactgca

SEQ ID NO: 4769 - RNA, 23 nt, synthetic construct
  source 1..23: mol_type = other RNA
agatcagttgttcagtgactttg

SEQ ID NO: 4770 - RNA, 23 nt, synthetic construct
  source 1..23: mol_type = other RNA
agatggaaaatcataagctccag

SEQ ID NO: 4771 - RNA, 23 nt, synthetic construct
  source 1..23: mol_type = other RNA
aagttgcgaaacgatccgcactg

SEQ ID NO: 4772 - RNA, 23 nt, synthetic construct
  source 1..23: mol_type = other RNA
agcttcaaaagacggcagattct

SEQ ID NO: 4773 - RNA, 23 nt, synthetic construct
  source 1..23: mol_type = other RNA
aagaagtcgggaaaagaagtagg

SEQ ID NO: 4774 - RNA, 23 nt, synthetic construct
  source 1..23: mol_type = other RNA
aagggttgtggattacagtagtt

SEQ ID NO: 4775 - RNA, 23 nt, synthetic construct
  source 1..23: mol_type = other RNA
ataagaaaagaatggaacaaaag

SEQ ID NO: 4776 - RNA, 23 nt, synthetic construct
  source 1..23: mol_type = other RNA
atttcgtgctttcacatcttcat

SEQ ID NO: 4777 - RNA, 23 nt, synthetic construct
  source 1..23: mol_type = other RNA
aatggctcaatatatttactgta

SEQ ID NO: 4778 - RNA, 23 nt, synthetic construct
  source 1..23: mol_type = other RNA
agagaagttttctttcccatttg

SEQ ID NO: 4779 - RNA, 23 nt, synthetic construct
  source 1..23: mol_type = other RNA
aatgaaaatgaacattctgccac

SEQ ID NO: 4780 - RNA, 23 nt, synthetic construct
  source 1..23: mol_type = other RNA
ataatatatgctatgcaggcggc

SEQ ID NO: 4781 - RNA, 23 nt, synthetic construct
  source 1..23: mol_type = other RNA
aggaaatggaaaaacagccaggc

SEQ ID NO: 4782 - RNA, 23 nt, synthetic construct
  source 1..23: mol_type = other RNA
acaaaagacttttatttcccttt

SEQ ID NO: 4783 - RNA, 23 nt, synthetic construct
  source 1..23: mol_type = other RNA
agagatgaccagaaagggtggcg

SEQ ID NO: 4784 - RNA, 23 nt, synthetic construct
  source 1..23: mol_type = other RNA
aagtcctttaccattatggcaag

SEQ ID NO: 4785 - RNA, 23 nt, synthetic construct
  source 1..23: mol_type = other RNA
atttccagtttacacagtttgac

SEQ ID NO: 4786 - RNA, 23 nt, synthetic construct
  source 1..23: mol_type = other RNA
acagatgtacatgagggtttaga

SEQ ID NO: 4787 - RNA, 23 nt, synthetic construct
  source 1..23: mol_type = other RNA
acgtatagctgcttcacaaaagg

SEQ ID NO: 4788 - RNA, 23 nt, synthetic construct
  source 1..23: mol_type = other RNA
atttatcaatgatatctccattc

SEQ ID NO: 4789 - RNA, 23 nt, synthetic construct
  source 1..23: mol_type = other RNA
agaatgcaatgatgaatacacag

SEQ ID NO: 4790 - RNA, 23 nt, synthetic construct
  source 1..23: mol_type = other RNA
aactaaattacccaaagcttcag

SEQ ID NO: 4791 - RNA, 23 nt, synthetic construct
  source 1..23: mol_type = other RNA
aaagtctgccaatttcacagctg

SEQ ID NO: 4792 - RNA, 23 nt, synthetic construct
  source 1..23: mol_type = other RNA
atcatcccactttaattgttaat

SEQ ID NO: 4793 - RNA, 23 nt, synthetic construct
  source 1..23: mol_type = other RNA
aagaaattccttgtagccagcat

SEQ ID NO: 4794 - RNA, 23 nt, synthetic construct
  source 1..23: mol_type = other RNA
agtgagcaaagaataataacaat

SEQ ID NO: 4795 - RNA, 23 nt, synthetic construct
  source 1..23: mol_type = other RNA
acaccaagtgcaaattgttatgt

SEQ ID NO: 4796 - RNA, 23 nt, synthetic construct
  source 1..23: mol_type = other RNA
actcacatcttagtgcggaagac

SEQ ID NO: 4797 - RNA, 23 nt, synthetic construct
  source 1..23: mol_type = other RNA
aacagagaggtgagatgagagaa

SEQ ID NO: 4798 - RNA, 23 nt, synthetic construct
  source 1..23: mol_type = other RNA
acgttgacagatccatgggtgct

SEQ ID NO: 4799 - RNA, 23 nt, synthetic construct
  source 1..23: mol_type = other RNA
aagaagtcagtagaattttattc

SEQ ID NO: 4800 - RNA, 23 nt, synthetic construct
  source 1..23: mol_type = other RNA
agcatagttgtcaagatggcacc

SEQ ID NO: 4801 - RNA, 23 nt, synthetic construct
  source 1..23: mol_type = other RNA
acatagttaggatacctaagtcc

SEQ ID NO: 4802 - RNA, 23 nt, synthetic construct
  source 1..23: mol_type = other RNA
aagcaggaggagtagaagcagag

SEQ ID NO: 4803 - RNA, 23 nt, synthetic construct
  source 1..23: mol_type = other RNA
aaacaaatcacaatttcctcaca

SEQ ID NO: 4804 - RNA, 23 nt, synthetic construct
  source 1..23: mol_type = other RNA
atcgaaaagctgatactcgtccg

SEQ ID NO: 4805 - RNA, 23 nt, synthetic construct
  source 1..23: mol_type = other RNA
agaaactgagggtcagagggaag

SEQ ID NO: 4806 - RNA, 23 nt, synthetic construct
  source 1..23: mol_type = other RNA
agcttctgttatcaaaagggctt

SEQ ID NO: 4807 - RNA, 23 nt, synthetic construct
  source 1..23: mol_type = other RNA
aactgctaccatttaatttctat

SEQ ID NO: 4808 - RNA, 23 nt, synthetic construct
  source 1..23: mol_type = other RNA
aagaatcggtgaaaatccatccc

SEQ ID NO: 4809 - RNA, 23 nt, synthetic construct
  source 1..23: mol_type = other RNA
acatgtgagcaagtgtgatgttt

SEQ ID NO: 4810 - RNA, 23 nt, synthetic construct
  source 1..23: mol_type = other RNA
aaatggttttcaggccttagatg

SEQ ID NO: 4811 - RNA, 23 nt, synthetic construct
  source 1..23: mol_type = other RNA
accataaggatctttacgtaaaa

SEQ ID NO: 4812 - RNA, 23 nt, synthetic construct
  source 1..23: mol_type = other RNA
actggcatcagcttcactgtagt

SEQ ID NO: 4813 - RNA, 23 nt, synthetic construct
  source 1..23: mol_type = other RNA
aaacaattcaattcagcaaattc

SEQ ID NO: 4814 - RNA, 23 nt, synthetic construct
  source 1..23: mol_type = other RNA
ataagtccaaactagagcttaag

SEQ ID NO: 4815 - RNA, 23 nt, synthetic construct
  source 1..23: mol_type = other RNA
atctcacacactactagccagcc

SEQ ID NO: 4816 - RNA, 23 nt, synthetic construct
  source 1..23: mol_type = other RNA
agataagatgatgcatcacatat

SEQ ID NO: 4817 - RNA, 23 nt, synthetic construct
  source 1..23: mol_type = other RNA
aacatatgcattacatgtaggac

SEQ ID NO: 4818 - RNA, 23 nt, synthetic construct
  source 1..23: mol_type = other RNA
acaacaaactcttggctgctgag

SEQ ID NO: 4819 - RNA, 23 nt, synthetic construct
  source 1..23: mol_type = other RNA
acatgtgaaggctggattggagg

SEQ ID NO: 4820 - RNA, 23 nt, synthetic construct
  source 1..23: mol_type = other RNA
agcttgatgggtactgttggtga

SEQ ID NO: 4821 - RNA, 23 nt, synthetic construct
  source 1..23: mol_type = other RNA
atttctgatgatccctagcagaa

SEQ ID NO: 4822 - RNA, 23 nt, synthetic construct
  source 1..23: mol_type = other RNA
agctttatgtggtagcaaaccaa

SEQ ID NO: 4823 - RNA, 23 nt, synthetic construct
  source 1..23: mol_type = other RNA
aggagcatgatgctgtacactga

SEQ ID NO: 4824 - RNA, 23 nt, synthetic construct
  source 1..23: mol_type = other RNA
agcaggttgtggtcgaagccatc

SEQ ID NO: 4825 - RNA, 23 nt, synthetic construct
  source 1..23: mol_type = other RNA
actgctgaatgcaatgactggca

SEQ ID NO: 4826 - RNA, 23 nt, synthetic construct
  source 1..23: mol_type = other RNA
actgtctgtgcatcatggaagca

SEQ ID NO: 4827 - RNA, 23 nt, synthetic construct
  source 1..23: mol_type = other RNA
aatcaagttggtatcctcctggc

SEQ ID NO: 4828 - RNA, 23 nt, synthetic construct
  source 1..23: mol_type = other RNA
attgactccttgtttccatcagg

SEQ ID NO: 4829 - RNA, 23 nt, synthetic construct
  source 1..23: mol_type = other RNA
aaaaccaactgattcttgcttct

SEQ ID NO: 4830 - RNA, 23 nt, synthetic construct
  source 1..23: mol_type = other RNA
aggacgagtggcaagcagttgcg

SEQ ID NO: 4831 - RNA, 23 nt, synthetic construct
  source 1..23: mol_type = other RNA
actacagtaatacttcaacacca

SEQ ID NO: 4832 - RNA, 23 nt, synthetic construct
  source 1..23: mol_type = other RNA
atattgttttgccaacagtaatt

SEQ ID NO: 4833 - RNA, 23 nt, synthetic construct
  source 1..23: mol_type = other RNA
agaccagagtaggacacactgcc

SEQ ID NO: 4834 - RNA, 23 nt, synthetic construct
  source 1..23: mol_type = other RNA
actttactccatctggtttcttc

SEQ ID NO: 4835 - RNA, 23 nt, synthetic construct
  source 1..23: mol_type = other RNA
aaggaaggtttgctgtggagcat

SEQ ID NO: 4836 - RNA, 23 nt, synthetic construct
  source 1..23: mol_type = other RNA
atttgtgtaggcttcaaagtccc

SEQ ID NO: 4837 - RNA, 21 nt, synthetic construct
  source 1..21: mol_type = other RNA
  modified_base 1: mod_base = OTHER; note = 2'-O-methylcytidine-3'-phosphorothioate
  modified_base 2: mod_base = OTHER; note = 2'-O-methylcytidine-3'-phosphorothioate
  modified_base 3: mod_base = OTHER; note = 2'-O-methyladenosine-3'-phosphate
  modified_base 4: mod_base = OTHER; note = 2'-O-methylcytidine-3'-phosphate
  modified_base 5: mod_base = OTHER; note = 2'-O-methyladenosine-3'-phosphate
  modified_base 6: mod_base = OTHER; note = 2'-O-docosanyl-cytidine-3'-phosphate
  modified_base 7: mod_base = OTHER; note = 2'-deoxy-2'-fluoroadenosine-3'-phosphate
  modified_base 8: mod_base = OTHER; note = 2'-O-methyladenosine-3'-phosphate
  modified_base 9: mod_base = OTHER; note = 2'-deoxy-2'-fluoroadenosine-3'-phosphate
  modified_base 10: mod_base = OTHER; note = 2'-deoxy-2'-fluorocytidine-3'-phosphate
  modified_base 11: mod_base = OTHER; note = 2'-deoxy-2'-fluorouridine-3'-phosphate
  modified_base 12: mod_base = OTHER; note = 2'-O-methyluridine-3'-phosphate
  modified_base 13: mod_base = OTHER; note = 2'-O-methyladenosine-3'-phosphate
  modified_base 14: mod_base = OTHER; note = 2'-O-methyladenosine-3'-phosphate
  modified_base 15: mod_base = OTHER; note = 2'-O-methyladenosine-3'-phosphate
  modified_base 16: mod_base = OTHER; note = 2'-O-methyluridine-3'-phosphate
  modified_base 17: mod_base = OTHER; note = 2'-O-methyluridine-3'-phosphate
  modified_base 18: mod_base = OTHER; note = 2'-O-methyladenosine-3'-phosphate
  modified_base 19: mod_base = OTHER; note = 2'-O-methylcytidine-3'-phosphate
  modified_base 20: mod_base = OTHER; note = 2'-O-methyluridine-3'-phosphate
  modified_base 21: mod_base = OTHER; note = 2'-O-methyluridine-3'-phosphate ((2S,4R)-1-[29-[[2-(acetylamino)-2-deoxy-beta-D-galactopyra nosyl]oxy]-14,14-bis[[3-[[3-[[5-[[2-(acetylamino)-2-deoxy-b eta-D-galactopyranosyl]oxy]-1-oxopentyl]amino]propyl]amino] -3-oxopropoxy]methyl]-1,12,19,25-tetraoxo-16-oxa-13,20,24-t riazanonacos-1-yl]-4-hydroxy-2-pyrrolidinyl)methyl ester
ccacacaaacttaaattactt

SEQ ID NO: 4838 - RNA, 21 nt, synthetic construct
  source 1..21: mol_type = other RNA
  modified_base 1: mod_base = OTHER; note = 2'-O-methyluridine-3'-phosphorothioate
  modified_base 2: mod_base = OTHER; note = 2'-O-methyladenosine-3'-phosphorothioate
  modified_base 3: mod_base = OTHER; note = 2'-O-methylguanosine-3'-phosphate
  modified_base 4: mod_base = OTHER; note = 2'-O-methylcytidine-3'-phosphate
  modified_base 5: mod_base = OTHER; note = 2'-O-methyladenosine-3'-phosphate
  modified_base 6: mod_base = OTHER; note = 2'-O-docosanyl-cytidine-3'-phosphate
  modified_base 7: mod_base = OTHER; note = 2'-deoxy-2'-fluorouridine-3'-phosphate
  modified_base 8: mod_base = OTHER; note = 2'-O-methyluridine-3'-phosphate
  modified_base 9: mod_base = OTHER; note = 2'-deoxy-2'-fluorouridine-3'-phosphate
  modified_base 10: mod_base = OTHER; note = 2'-deoxy-2'-fluorouridine-3'-phosphate
  modified_base 11: mod_base = OTHER; note = 2'-deoxy-2'-fluoroguanosine-3'-phosphate
  modified_base 12: mod_base = OTHER; note = 2'-O-methyladenosine-3'-phosphate
  modified_base 13: mod_base = OTHER; note = 2'-O-methyluridine-3'-phosphate
  modified_base 14: mod_base = OTHER; note = 2'-O-methylcytidine-3'-phosphate
  modified_base 15: mod_base = OTHER; note = 2'-O-methyladenosine-3'-phosphate
  modified_base 16: mod_base = OTHER; note = 2'-O-methyluridine-3'-phosphate
  modified_base 17: mod_base = OTHER; note = 2'-O-methylcytidine-3'-phosphate
  modified_base 18: mod_base = OTHER; note = 2'-O-methyluridine-3'-phosphate
  modified_base 19: mod_base = OTHER; note = 2'-O-methyluridine-3'-phosphate
  modified_base 20: mod_base = OTHER; note = 2'-O-methylcytidine-3'-phosphate
  modified_base 21: mod_base = OTHER; note = 2'-O-methyluridine-3'-phosphate ((2S,4R)-1-[29-[[2-(acetylamino)-2-deoxy-beta-D-galactopyra nosyl]oxy]-14,14-bis[[3-[[3-[[5-[[2-(acetylamino)-2-deoxy-b eta-D-galactopyranosyl]oxy]-1-oxopentyl]amino]propyl]amino] -3-oxopropoxy]methyl]-1,12,19,25-tetraoxo-16-oxa-13,20,24-t riazanonacos-1-yl]-4-hydroxy-2-pyrrolidinyl)methyl ester
tagcacttttgatcatcttct

SEQ ID NO: 4839 - RNA, 21 nt, synthetic construct
  source 1..21: mol_type = other RNA
  modified_base 1: mod_base = OTHER; note = 2'-O-methylcytidine-3'-phosphorothioate
  modified_base 2: mod_base = OTHER; note = 2'-O-methylcytidine-3'-phosphorothioate
  modified_base 3: mod_base = OTHER; note = 2'-O-methyluridine-3'-phosphate
  modified_base 4: mod_base = OTHER; note = 2'-O-methylcytidine-3'-phosphate
  modified_base 5: mod_base = OTHER; note = 2'-O-methyladenosine-3'-phosphate
  modified_base 6: mod_base = OTHER; note = 2'-O-docosanyl-uridine-3'-phosphate
  modified_base 7: mod_base = OTHER; note = 2'-deoxy-2'-fluorocytidine-3'-phosphate
  modified_base 8: mod_base = OTHER; note = 2'-O-methyladenosine-3'-phosphate
  modified_base 9: mod_base = OTHER; note = 2'-deoxy-2'-fluoroadenosine-3'-phosphate
  modified_base 10: mod_base = OTHER; note = 2'-deoxy-2'-fluorouridine-3'-phosphate
  modified_base 11: mod_base = OTHER; note = 2'-deoxy-2'-fluoroadenosine-3'-phosphate
  modified_base 12: mod_base = OTHER; note = 2'-O-methyladenosine-3'-phosphate
  modified_base 13: mod_base = OTHER; note = 2'-O-methyladenosine-3'-phosphate
  modified_base 14: mod_base = OTHER; note = 2'-O-methyladenosine-3'-phosphate
  modified_base 15: mod_base = OTHER; note = 2'-O-methyluridine-3'-phosphate
  modified_base 16: mod_base = OTHER; note = 2'-O-methylguanosine-3'-phosphate
  modified_base 17: mod_base = OTHER; note = 2'-O-methylcytidine-3'-phosphate
  modified_base 18: mod_base = OTHER; note = 2'-O-methyluridine-3'-phosphate
  modified_base 19: mod_base = OTHER; note = 2'-O-methyluridine-3'-phosphate
  modified_base 20: mod_base = OTHER; note = 2'-O-methyladenosine-3'-phosphate
  modified_base 21: mod_base = OTHER; note = 2'-O-methyluridine-3'-phosphate ((2S,4R)-1-[29-[[2-(acetylamino)-2-deoxy-beta-D-galactopyra nosyl]oxy]-14,14-bis[[3-[[3-[[5-[[2-(acetylamino)-2-deoxy-b eta-D-galactopyranosyl]oxy]-1-oxopentyl]amino]propyl]amino] -3-oxopropoxy]methyl]-1,12,19,25-tetraoxo-16-oxa-13,20,24-t riazanonacos-1-yl]-4-hydroxy-2-pyrrolidinyl)methyl ester
cctcatcaataaaatgcttat

SEQ ID NO: 4840 - RNA, 21 nt, synthetic construct
  source 1..21: mol_type = other RNA
  modified_base 1: mod_base = OTHER; note = 2'-O-methyluridine-3'-phosphorothioate
  modified_base 2: mod_base = OTHER; note = 2'-O-methylcytidine-3'-phosphorothioate
  modified_base 3: mod_base = OTHER; note = 2'-O-methylcytidine-3'-phosphate
  modified_base 4: mod_base = OTHER; note = 2'-O-methyladenosine-3'-phosphate
  modified_base 5: mod_base = OTHER; note = 2'-O-methyluridine-3'-phosphate
  modified_base 6: mod_base = OTHER; note = 2'-O-docosanyl-cytidine-3'-phosphate
  modified_base 7: mod_base = OTHER; note = 2'-deoxy-2'-fluoroadenosine-3'-phosphate
  modified_base 8: mod_base = OTHER; note = 2'-O-methyluridine-3'-phosphate
  modified_base 9: mod_base = OTHER; note = 2'-deoxy-2'-fluorouridine-3'-phosphate
  modified_base 10: mod_base = OTHER; note = 2'-deoxy-2'-fluoroguanosine-3'-phosphate
  modified_base 11: mod_base = OTHER; note = 2'-deoxy-2'-fluorouridine-3'-phosphate
  modified_base 12: mod_base = OTHER; note = 2'-O-methyluridine-3'-phosphate
  modified_base 13: mod_base = OTHER; note = 2'-O-methyladenosine-3'-phosphate
  modified_base 14: mod_base = OTHER; note = 2'-O-methyluridine-3'-phosphate
  modified_base 15: mod_base = OTHER; note = 2'-O-methyluridine-3'-phosphate
  modified_base 16: mod_base = OTHER; note = 2'-O-methyluridine-3'-phosphate
  modified_base 17: mod_base = OTHER; note = 2'-O-methyluridine-3'-phosphate
  modified_base 18: mod_base = OTHER; note = 2'-O-methyladenosine-3'-phosphate
  modified_base 19: mod_base = OTHER; note = 2'-O-methyladenosine-3'-phosphate
  modified_base 20: mod_base = OTHER; note = 2'-O-methylcytidine-3'-phosphate
  modified_base 21: mod_base = OTHER; note = 2'-O-methyluridine-3'-phosphate ((2S,4R)-1-[29-[[2-(acetylamino)-2-deoxy-beta-D-galactopyra nosyl]oxy]-14,14-bis[[3-[[3-[[5-[[2-(acetylamino)-2-deoxy-b eta-D-galactopyranosyl]oxy]-1-oxopentyl]amino]propyl]amino] -3-oxopropoxy]methyl]-1,12,19,25-tetraoxo-16-oxa-13,20,24-t riazanonacos-1-yl]-4-hydroxy-2-pyrrolidinyl)methyl ester
tccatcattgttattttaact

SEQ ID NO: 4841 - RNA, 21 nt, synthetic construct
  source 1..21: mol_type = other RNA
  modified_base 1: mod_base = OTHER; note = 2'-O-methyluridine-3'-phosphorothioate
  modified_base 2: mod_base = OTHER; note = 2'-O-methylcytidine-3'-phosphorothioate
  modified_base 3: mod_base = OTHER; note = 2'-O-methylcytidine-3'-phosphate
  modified_base 4: mod_base = OTHER; note = 2'-O-methyladenosine-3'-phosphate
  modified_base 5: mod_base = OTHER; note = 2'-O-methylcytidine-3'-phosphate
  modified_base 6: mod_base = OTHER; note = 2'-O-docosanyl-adenosine-3'-phosphate
  modified_base 7: mod_base = OTHER; note = 2'-deoxy-2'-fluorocytidine-3'-phosphate
  modified_base 8: mod_base = OTHER; note = 2'-O-methyluridine-3'-phosphate
  modified_base 9: mod_base = OTHER; note = 2'-deoxy-2'-fluoroadenosine-3'-phosphate
  modified_base 10: mod_base = OTHER; note = 2'-deoxy-2'-fluorouridine-3'-phosphate
  modified_base 11: mod_base = OTHER; note = 2'-deoxy-2'-fluorouridine-3'-phosphate
  modified_base 12: mod_base = OTHER; note = 2'-O-methyladenosine-3'-phosphate
  modified_base 13: mod_base = OTHER; note = 2'-O-methyluridine-3'-phosphate
  modified_base 14: mod_base = OTHER; note = 2'-O-methyluridine-3'-phosphate
  modified_base 15: mod_base = OTHER; note = 2'-O-methylcytidine-3'-phosphate
  modified_base 16: mod_base = OTHER; note = 2'-O-methyluridine-3'-phosphate
  modified_base 17: mod_base = OTHER; note = 2'-O-methyladenosine-3'-phosphate
  modified_base 18: mod_base = OTHER; note = 2'-O-methyladenosine-3'-phosphate
  modified_base 19: mod_base = OTHER; note = 2'-O-methyladenosine-3'-phosphate
  modified_base 20: mod_base = OTHER; note = 2'-O-methylcytidine-3'-phosphate
  modified_base 21: mod_base = OTHER; note = 2'-O-methyluridine-3'-phosphate ((2S,4R)-1-[29-[[2-(acetylamino)-2-deoxy-beta-D-galactopyra nosyl]oxy]-14,14-bis[[3-[[3-[[5-[[2-(acetylamino)-2-deoxy-b eta-D-galactopyranosyl]oxy]-1-oxopentyl]amino]propyl]amino] -3-oxopropoxy]methyl]-1,12,19,25-tetraoxo-16-oxa-13,20,24-t riazanonacos-1-yl]-4-hydroxy-2-pyrrolidinyl)methyl ester
tccacactattattctaaact

SEQ ID NO: 4842 - RNA, 21 nt, synthetic construct
  source 1..21: mol_type = other RNA
  modified_base 1: mod_base = OTHER; note = 2'-O-methylcytidine-3'-phosphorothioate
  modified_base 2: mod_base = OTHER; note = 2'-O-methyluridine-3'-phosphorothioate
  modified_base 3: mod_base = OTHER; note = 2'-O-methylcytidine-3'-phosphate
  modified_base 4: mod_base = OTHER; note = 2'-O-methylcytidine-3'-phosphate
  modified_base 5: mod_base = OTHER; note = 2'-O-methyluridine-3'-phosphate
  modified_base 6: mod_base = OTHER; note = 2'-O-docosanyl-adenosine-3'-phosphate
  modified_base 7: mod_base = OTHER; note = 2'-deoxy-2'-fluoroadenosine-3'-phosphate
  modified_base 8: mod_base = OTHER; note = 2'-O-methyladenosine-3'-phosphate
  modified_base 9: mod_base = OTHER; note = 2'-deoxy-2'-fluoroadenosine-3'-phosphate
  modified_base 10: mod_base = OTHER; note = 2'-deoxy-2'-fluoroguanosine-3'-phosphate
  modified_base 11: mod_base = OTHER; note = 2'-deoxy-2'-fluorocytidine-3'-phosphate
  modified_base 12: mod_base = OTHER; note = 2'-O-methyluridine-3'-phosphate
  modified_base 13: mod_base = OTHER; note = 2'-O-methyluridine-3'-phosphate
  modified_base 14: mod_base = OTHER; note = 2'-O-methylcytidine-3'-phosphate
  modified_base 15: mod_base = OTHER; note = 2'-O-methyluridine-3'-phosphate
  modified_base 16: mod_base = OTHER; note = 2'-O-methylcytidine-3'-phosphate
  modified_base 17: mod_base = OTHER; note = 2'-O-methyluridine-3'-phosphate
  modified_base 18: mod_base = OTHER; note = 2'-O-methyladenosine-3'-phosphate
  modified_base 19: mod_base = OTHER; note = 2'-O-methyladenosine-3'-phosphate
  modified_base 20: mod_base = OTHER; note = 2'-O-methyladenosine-3'-phosphate
  modified_base 21: mod_base = OTHER; note = 2'-O-methyluridine-3'-phosphate ((2S,4R)-1-[29-[[2-(acetylamino)-2-deoxy-beta-D-galactopyra nosyl]oxy]-14,14-bis[[3-[[3-[[5-[[2-(acetylamino)-2-deoxy-b eta-D-galactopyranosyl]oxy]-1-oxopentyl]amino]propyl]amino] -3-oxopropoxy]methyl]-1,12,19,25-tetraoxo-16-oxa-13,20,24-t riazanonacos-1-yl]-4-hydroxy-2-pyrrolidinyl)methyl ester
ctcctaaaagcttctctaaat

SEQ ID NO: 4843 - RNA, 21 nt, synthetic construct
  source 1..21: mol_type = other RNA
  modified_base 1: mod_base = OTHER; note = 2'-O-methylguanosine-3'-phosphorothioate
  modified_base 2: mod_base = OTHER; note = 2'-O-methylguanosine-3'-phosphorothioate
  modified_base 3: mod_base = OTHER; note = 2'-O-methyluridine-3'-phosphate
  modified_base 4: mod_base = OTHER; note = 2'-O-methylcytidine-3'-phosphate
  modified_base 5: mod_base = OTHER; note = 2'-O-methyluridine-3'-phosphate
  modified_base 6: mod_base = OTHER; note = 2'-O-docosanyl-cytidine-3'-phosphate
  modified_base 7: mod_base = OTHER; note = 2'-deoxy-2'-fluoroadenosine-3'-phosphate
  modified_base 8: mod_base = OTHER; note = 2'-O-methyluridine-3'-phosphate
  modified_base 9: mod_base = OTHER; note = 2'-deoxy-2'-fluorouridine-3'-phosphate
  modified_base 10: mod_base = OTHER; note = 2'-deoxy-2'-fluorouridine-3'-phosphate
  modified_base 11: mod_base = OTHER; note = 2'-deoxy-2'-fluoroadenosine-3'-phosphate
  modified_base 12: mod_base = OTHER; note = 2'-O-methylguanosine-3'-phosphate
  modified_base 13: mod_base = OTHER; note = 2'-O-methyluridine-3'-phosphate
  modified_base 14: mod_base = OTHER; note = 2'-O-methyladenosine-3'-phosphate
  modified_base 15: mod_base = OTHER; note = 2'-O-methylcytidine-3'-phosphate
  modified_base 16: mod_base = OTHER; note = 2'-O-methyladenosine-3'-phosphate
  modified_base 17: mod_base = OTHER; note = 2'-O-methyluridine-3'-phosphate
  modified_base 18: mod_base = OTHER; note = 2'-O-methyladenosine-3'-phosphate
  modified_base 19: mod_base = OTHER; note = 2'-O-methyladenosine-3'-phosphate
  modified_base 20: mod_base = OTHER; note = 2'-O-methylcytidine-3'-phosphate
  modified_base 21: mod_base = OTHER; note = 2'-O-methyluridine-3'-phosphate ((2S,4R)-1-[29-[[2-(acetylamino)-2-deoxy-beta-D-galactopyra nosyl]oxy]-14,14-bis[[3-[[3-[[5-[[2-(acetylamino)-2-deoxy-b eta-D-galactopyranosyl]oxy]-1-oxopentyl]amino]propyl]amino] -3-oxopropoxy]methyl]-1,12,19,25-tetraoxo-16-oxa-13,20,24-t riazanonacos-1-yl]-4-hydroxy-2-pyrrolidinyl)methyl ester
ggtctcatttagtacataact

SEQ ID NO: 4844 - RNA, 21 nt, synthetic construct
  source 1..21: mol_type = other RNA
  modified_base 1: mod_base = OTHER; note = 2'-O-methylcytidine-3'-phosphorothioate
  modified_base 2: mod_base = OTHER; note = 2'-O-methyladenosine-3'-phosphorothioate
  modified_base 3: mod_base = OTHER; note = 2'-O-methylguanosine-3'-phosphate
  modified_base 4: mod_base = OTHER; note = 2'-O-methyladenosine-3'-phosphate
  modified_base 5: mod_base = OTHER; note = 2'-O-methylcytidine-3'-phosphate
  modified_base 6: mod_base = OTHER; note = 2'-O-docosanyl-uridine-3'-phosphate
  modified_base 7: mod_base = OTHER; note = 2'-deoxy-2'-fluorouridine-3'-phosphate
  modified_base 8: mod_base = OTHER; note = 2'-O-methyladenosine-3'-phosphate
  modified_base 9: mod_base = OTHER; note = 2'-deoxy-2'-fluoroadenosine-3'-phosphate
  modified_base 10: mod_base = OTHER; note = 2'-deoxy-2'-fluoroguanosine-3'-phosphate
  modified_base 11: mod_base = OTHER; note = 2'-deoxy-2'-fluoroadenosine-3'-phosphate
  modified_base 12: mod_base = OTHER; note = 2'-O-methyladenosine-3'-phosphate
  modified_base 13: mod_base = OTHER; note = 2'-O-methylcytidine-3'-phosphate
  modified_base 14: mod_base = OTHER; note = 2'-O-methyluridine-3'-phosphate
  modified_base 15: mod_base = OTHER; note = 2'-O-methyladenosine-3'-phosphate
  modified_base 16: mod_base = OTHER; note = 2'-O-methyluridine-3'-phosphate
  modified_base 17: mod_base = OTHER; note = 2'-O-methyluridine-3'-phosphate
  modified_base 18: mod_base = OTHER; note = 2'-O-methylguanosine-3'-phosphate
  modified_base 19: mod_base = OTHER; note = 2'-O-methyluridine-3'-phosphate
  modified_base 20: mod_base = OTHER; note = 2'-O-methyluridine-3'-phosphate
  modified_base 21: mod_base = OTHER; note = 2'-O-methyluridine-3'-phosphate ((2S,4R)-1-[29-[[2-(acetylamino)-2-deoxy-beta-D-galactopyra nosyl]oxy]-14,14-bis[[3-[[3-[[5-[[2-(acetylamino)-2-deoxy-b eta-D-galactopyranosyl]oxy]-1-oxopentyl]amino]propyl]amino] -3-oxopropoxy]methyl]-1,12,19,25-tetraoxo-16-oxa-13,20,24-t riazanonacos-1-yl]-4-hydroxy-2-pyrrolidinyl)methyl ester
cagacttaagaactattgttt

SEQ ID NO: 4845 - RNA, 21 nt, synthetic construct
  source 1..21: mol_type = other RNA
  modified_base 1: mod_base = OTHER; note = 2'-O-methylcytidine-3'-phosphorothioate
  modified_base 2: mod_base = OTHER; note = 2'-O-methyladenosine-3'-phosphorothioate
  modified_base 3: mod_base = OTHER; note = 2'-O-methyluridine-3'-phosphate
  modified_base 4: mod_base = OTHER; note = 2'-O-methylcytidine-3'-phosphate
  modified_base 5: mod_base = OTHER; note = 2'-O-methyladenosine-3'-phosphate
  modified_base 6: mod_base = OTHER; note = 2'-O-docosanyl-adenosine-3'-phosphate
  modified_base 7: mod_base = OTHER; note = 2'-deoxy-2'-fluoroguanosine-3'-phosphate
  modified_base 8: mod_base = OTHER; note = 2'-O-methyluridine-3'-phosphate
  modified_base 9: mod_base = OTHER; note = 2'-deoxy-2'-fluorouridine-3'-phosphate
  modified_base 10: mod_base = OTHER; note = 2'-deoxy-2'-fluorouridine-3'-phosphate
  modified_base 11: mod_base = OTHER; note = 2'-deoxy-2'-fluorocytidine-3'-phosphate
  modified_base 12: mod_base = OTHER; note = 2'-O-methyluridine-3'-phosphate
  modified_base 13: mod_base = OTHER; note = 2'-O-methylcytidine-3'-phosphate
  modified_base 14: mod_base = OTHER; note = 2'-O-methyluridine-3'-phosphate
  modified_base 15: mod_base = OTHER; note = 2'-O-methylguanosine-3'-phosphate
  modified_base 16: mod_base = OTHER; note = 2'-O-methyluridine-3'-phosphate
  modified_base 17: mod_base = OTHER; note = 2'-O-methyluridine-3'-phosphate
  modified_base 18: mod_base = OTHER; note = 2'-O-methyladenosine-3'-phosphate
  modified_base 19: mod_base = OTHER; note = 2'-O-methyladenosine-3'-phosphate
  modified_base 20: mod_base = OTHER; note = 2'-O-methyluridine-3'-phosphate
  modified_base 21: mod_base = OTHER; note = 2'-O-methyluridine-3'-phosphate ((2S,4R)-1-[29-[[2-(acetylamino)-2-deoxy-beta-D-galactopyra nosyl]oxy]-14,14-bis[[3-[[3-[[5-[[2-(acetylamino)-2-deoxy-b eta-D-galactopyranosyl]oxy]-1-oxopentyl]amino]propyl]amino] -3-oxopropoxy]methyl]-1,12,19,25-tetraoxo-16-oxa-13,20,24-t riazanonacos-1-yl]-4-hydroxy-2-pyrrolidinyl)methyl ester
catcaagtttctctgttaatt

SEQ ID NO: 4846 - RNA, 21 nt, synthetic construct
  source 1..21: mol_type = other RNA
  modified_base 1: mod_base = OTHER; note = 2'-O-methyladenosine-3'-phosphorothioate
  modified_base 2: mod_base = OTHER; note = 2'-O-methyluridine-3'-phosphorothioate
  modified_base 3: mod_base = OTHER; note = 2'-O-methyluridine-3'-phosphate
  modified_base 4: mod_base = OTHER; note = 2'-O-methylcytidine-3'-phosphate
  modified_base 5: mod_base = OTHER; note = 2'-O-methyluridine-3'-phosphate
  modified_base 6: mod_base = OTHER; note = 2'-O-docosanyl-cytidine-3'-phosphate
  modified_base 7: mod_base = OTHER; note = 2'-deoxy-2'-fluorouridine-3'-phosphate
  modified_base 8: mod_base = OTHER; note = 2'-O-methyladenosine-3'-phosphate
  modified_base 9: mod_base = OTHER; note = 2'-deoxy-2'-fluorouridine-3'-phosphate
  modified_base 10: mod_base = OTHER; note = 2'-deoxy-2'-fluoroadenosine-3'-phosphate
  modified_base 11: mod_base = OTHER; note = 2'-deoxy-2'-fluorouridine-3'-phosphate
  modified_base 12: mod_base = OTHER; note = 2'-O-methyluridine-3'-phosphate
  modified_base 13: mod_base = OTHER; note = 2'-O-methylcytidine-3'-phosphate
  modified_base 14: mod_base = OTHER; note = 2'-O-methyluridine-3'-phosphate
  modified_base 15: mod_base = OTHER; note = 2'-O-methyladenosine-3'-phosphate
  modified_base 16: mod_base = OTHER; note = 2'-O-methylcytidine-3'-phosphate
  modified_base 17: mod_base = OTHER; note = 2'-O-methyluridine-3'-phosphate
  modified_base 18: mod_base = OTHER; note = 2'-O-methyluridine-3'-phosphate
  modified_base 19: mod_base = OTHER; note = 2'-O-methylguanosine-3'-phosphate
  modified_base 20: mod_base = OTHER; note = 2'-O-methyluridine-3'-phosphate
  modified_base 21: mod_base = OTHER; note = 2'-O-methyluridine-3'-phosphate ((2S,4R)-1-[29-[[2-(acetylamino)-2-deoxy-beta-D-galactopyra nosyl]oxy]-14,14-bis[[3-[[3-[[5-[[2-(acetylamino)-2-deoxy-b eta-D-galactopyranosyl]oxy]-1-oxopentyl]amino]propyl]amino] -3-oxopropoxy]methyl]-1,12,19,25-tetraoxo-16-oxa-13,20,24-t riazanonacos-1-yl]-4-hydroxy-2-pyrrolidinyl)methyl ester
attctctatattctacttgtt

SEQ ID NO: 4847 - RNA, 21 nt, synthetic construct
  source 1..21: mol_type = other RNA
  modified_base 1: mod_base = OTHER; note = 2'-O-methylcytidine-3'-phosphorothioate
  modified_base 2: mod_base = OTHER; note = 2'-O-methyluridine-3'-phosphorothioate
  modified_base 3: mod_base = OTHER; note = 2'-O-methylguanosine-3'-phosphate
  modified_base 4: mod_base = OTHER; note = 2'-O-methylcytidine-3'-phosphate
  modified_base 5: mod_base = OTHER; note = 2'-O-methyluridine-3'-phosphate
  modified_base 6: mod_base = OTHER; note = 2'-O-docosanyl-uridine-3'-phosphate
  modified_base 7: mod_base = OTHER; note = 2'-deoxy-2'-fluoroguanosine-3'-phosphate
  modified_base 8: mod_base = OTHER; note = 2'-O-methyladenosine-3'-phosphate
  modified_base 9: mod_base = OTHER; note = 2'-deoxy-2'-fluoroadenosine-3'-phosphate
  modified_base 10: mod_base = OTHER; note = 2'-deoxy-2'-fluoroguanosine-3'-phosphate
  modified_base 11: mod_base = OTHER; note = 2'-deoxy-2'-fluoroadenosine-3'-phosphate
  modified_base 12: mod_base = OTHER; note = 2'-O-methyladenosine-3'-phosphate
  modified_base 13: mod_base = OTHER; note = 2'-O-methyladenosine-3'-phosphate
  modified_base 14: mod_base = OTHER; note = 2'-O-methyluridine-3'-phosphate
  modified_base 15: mod_base = OTHER; note = 2'-O-methyluridine-3'-phosphate
  modified_base 16: mod_base = OTHER; note = 2'-O-methyluridine-3'-phosphate
  modified_base 17: mod_base = OTHER; note = 2'-O-methyladenosine-3'-phosphate
  modified_base 18: mod_base = OTHER; note = 2'-O-methyladenosine-3'-phosphate
  modified_base 19: mod_base = OTHER; note = 2'-O-methyluridine-3'-phosphate
  modified_base 20: mod_base = OTHER; note = 2'-O-methylguanosine-3'-phosphate
  modified_base 21: mod_base = OTHER; note = 2'-O-methyluridine-3'-phosphate ((2S,4R)-1-[29-[[2-(acetylamino)-2-deoxy-beta-D-galactopyra nosyl]oxy]-14,14-bis[[3-[[3-[[5-[[2-(acetylamino)-2-deoxy-b eta-D-galactopyranosyl]oxy]-1-oxopentyl]amino]propyl]amino] -3-oxopropoxy]methyl]-1,12,19,25-tetraoxo-16-oxa-13,20,24-t riazanonacos-1-yl]-4-hydroxy-2-pyrrolidinyl)methyl ester
ctgcttgaagaaatttaatgt

SEQ ID NO: 4848 - RNA, 21 nt, synthetic construct
  source 1..21: mol_type = other RNA
  modified_base 1: mod_base = OTHER; note = 2'-O-methylcytidine-3'-phosphorothioate
  modified_base 2: mod_base = OTHER; note = 2'-O-methyladenosine-3'-phosphorothioate
  modified_base 3: mod_base = OTHER; note = 2'-O-methylcytidine-3'-phosphate
  modified_base 4: mod_base = OTHER; note = 2'-O-methyluridine-3'-phosphate
  modified_base 5: mod_base = OTHER; note = 2'-O-methylguanosine-3'-phosphate
  modified_base 6: mod_base = OTHER; note = 2'-O-docosanyl-adenosine-3'-phosphate
  modified_base 7: mod_base = OTHER; note = 2'-deoxy-2'-fluorocytidine-3'-phosphate
  modified_base 8: mod_base = OTHER; note = 2'-O-methyladenosine-3'-phosphate
  modified_base 9: mod_base = OTHER; note = 2'-deoxy-2'-fluorouridine-3'-phosphate
  modified_base 10: mod_base = OTHER; note = 2'-deoxy-2'-fluorouridine-3'-phosphate
  modified_base 11: mod_base = OTHER; note = 2'-deoxy-2'-fluoroadenosine-3'-phosphate
  modified_base 12: mod_base = OTHER; note = 2'-O-methyladenosine-3'-phosphate
  modified_base 13: mod_base = OTHER; note = 2'-O-methyluridine-3'-phosphate
  modified_base 14: mod_base = OTHER; note = 2'-O-methyladenosine-3'-phosphate
  modified_base 15: mod_base = OTHER; note = 2'-O-methyluridine-3'-phosphate
  modified_base 16: mod_base = OTHER; note = 2'-O-methyluridine-3'-phosphate
  modified_base 17: mod_base = OTHER; note = 2'-O-methylcytidine-3'-phosphate
  modified_base 18: mod_base = OTHER; note = 2'-O-methylcytidine-3'-phosphate
  modified_base 19: mod_base = OTHER; note = 2'-O-methyluridine-3'-phosphate
  modified_base 20: mod_base = OTHER; note = 2'-O-methyladenosine-3'-phosphate
  modified_base 21: mod_base = OTHER; note = 2'-O-methyluridine-3'-phosphate ((2S,4R)-1-[29-[[2-(acetylamino)-2-deoxy-beta-D-galactopyra nosyl]oxy]-14,14-bis[[3-[[3-[[5-[[2-(acetylamino)-2-deoxy-b eta-D-galactopyranosyl]oxy]-1-oxopentyl]amino]propyl]amino] -3-oxopropoxy]methyl]-1,12,19,25-tetraoxo-16-oxa-13,20,24-t riazanonacos-1-yl]-4-hydroxy-2-pyrrolidinyl)methyl ester
cactgacattaatattcctat

SEQ ID NO: 4849 - RNA, 21 nt, synthetic construct
  source 1..21: mol_type = other RNA
  modified_base 1: mod_base = OTHER; note = 2'-O-methyladenosine-3'-phosphorothioate
  modified_base 2: mod_base = OTHER; note = 2'-O-methyladenosine-3'-phosphorothioate
  modified_base 3: mod_base = OTHER; note = 2'-O-methylcytidine-3'-phosphate
  modified_base 4: mod_base = OTHER; note = 2'-O-methylcytidine-3'-phosphate
  modified_base 5: mod_base = OTHER; note = 2'-O-methyladenosine-3'-phosphate
  modified_base 6: mod_base = OTHER; note = 2'-O-docosanyl-cytidine-3'-phosphate
  modified_base 7: mod_base = OTHER; note = 2'-deoxy-2'-fluoroadenosine-3'-phosphate
  modified_base 8: mod_base = OTHER; note = 2'-O-methyluridine-3'-phosphate
  modified_base 9: mod_base = OTHER; note = 2'-deoxy-2'-fluorouridine-3'-phosphate
  modified_base 10: mod_base = OTHER; note = 2'-deoxy-2'-fluoroguanosine-3'-phosphate
  modified_base 11: mod_base = OTHER; note = 2'-deoxy-2'-fluorouridine-3'-phosphate
  modified_base 12: mod_base = OTHER; note = 2'-O-methyluridine-3'-phosphate
  modified_base 13: mod_base = OTHER; note = 2'-O-methyluridine-3'-phosphate
  modified_base 14: mod_base = OTHER; note = 2'-O-methyluridine-3'-phosphate
  modified_base 15: mod_base = OTHER; note = 2'-O-methylguanosine-3'-phosphate
  modified_base 16: mod_base = OTHER; note = 2'-O-methyladenosine-3'-phosphate
  modified_base 17: mod_base = OTHER; note = 2'-O-methyladenosine-3'-phosphate
  modified_base 18: mod_base = OTHER; note = 2'-O-methyladenosine-3'-phosphate
  modified_base 19: mod_base = OTHER; note = 2'-O-methyladenosine-3'-phosphate
  modified_base 20: mod_base = OTHER; note = 2'-O-methyluridine-3'-phosphate
  modified_base 21: mod_base = OTHER; note = 2'-O-methyluridine-3'-phosphate ((2S,4R)-1-[29-[[2-(acetylamino)-2-deoxy-beta-D-galactopyra nosyl]oxy]-14,14-bis[[3-[[3-[[5-[[2-(acetylamino)-2-deoxy-b eta-D-galactopyranosyl]oxy]-1-oxopentyl]amino]propyl]amino] -3-oxopropoxy]methyl]-1,12,19,25-tetraoxo-16-oxa-13,20,24-t riazanonacos-1-yl]-4-hydroxy-2-pyrrolidinyl)methyl ester
aaccacattgttttgaaaatt

SEQ ID NO: 4850 - RNA, 21 nt, synthetic construct
  source 1..21: mol_type = other RNA
  modified_base 1: mod_base = OTHER; note = 2'-O-methyluridine-3'-phosphorothioate
  modified_base 2: mod_base = OTHER; note = 2'-O-methylcytidine-3'-phosphorothioate
  modified_base 3: mod_base = OTHER; note = 2'-O-methyladenosine-3'-phosphate
  modified_base 4: mod_base = OTHER; note = 2'-O-methyluridine-3'-phosphate
  modified_base 5: mod_base = OTHER; note = 2'-O-methylcytidine-3'-phosphate
  modified_base 6: mod_base = OTHER; note = 2'-O-docosanyl-adenosine-3'-phosphate
  modified_base 7: mod_base = OTHER; note = 2'-deoxy-2'-fluorocytidine-3'-phosphate
  modified_base 8: mod_base = OTHER; note = 2'-O-methyluridine-3'-phosphate
  modified_base 9: mod_base = OTHER; note = 2'-deoxy-2'-fluoroadenosine-3'-phosphate
  modified_base 10: mod_base = OTHER; note = 2'-deoxy-2'-fluoroguanosine-3'-phosphate
  modified_base 11: mod_base = OTHER; note = 2'-deoxy-2'-fluorocytidine-3'-phosphate
  modified_base 12: mod_base = OTHER; note = 2'-O-methyluridine-3'-phosphate
  modified_base 13: mod_base = OTHER; note = 2'-O-methyladenosine-3'-phosphate
  modified_base 14: mod_base = OTHER; note = 2'-O-methylguanosine-3'-phosphate
  modified_base 15: mod_base = OTHER; note = 2'-O-methyluridine-3'-phosphate
  modified_base 16: mod_base = OTHER; note = 2'-O-methyluridine-3'-phosphate
  modified_base 17: mod_base = OTHER; note = 2'-O-methyluridine-3'-phosphate
  modified_base 18: mod_base = OTHER; note = 2'-O-methyluridine-3'-phosphate
  modified_base 19: mod_base = OTHER; note = 2'-O-methylcytidine-3'-phosphate
  modified_base 20: mod_base = OTHER; note = 2'-O-methyluridine-3'-phosphate
  modified_base 21: mod_base = OTHER; note = 2'-O-methyluridine-3'-phosphate ((2S,4R)-1-[29-[[2-(acetylamino)-2-deoxy-beta-D-galactopyra nosyl]oxy]-14,14-bis[[3-[[3-[[5-[[2-(acetylamino)-2-deoxy-b eta-D-galactopyranosyl]oxy]-1-oxopentyl]amino]propyl]amino] -3-oxopropoxy]methyl]-1,12,19,25-tetraoxo-16-oxa-13,20,24-t riazanonacos-1-yl]-4-hydroxy-2-pyrrolidinyl)methyl ester
tcatcactagctagttttctt

SEQ ID NO: 4851 - RNA, 21 nt, synthetic construct
  source 1..21: mol_type = other RNA
  modified_base 1: mod_base = OTHER; note = 2'-O-methyluridine-3'-phosphorothioate
  modified_base 2: mod_base = OTHER; note = 2'-O-methyluridine-3'-phosphorothioate
  modified_base 3: mod_base = OTHER; note = 2'-O-methyladenosine-3'-phosphate
  modified_base 4: mod_base = OTHER; note = 2'-O-methylcytidine-3'-phosphate
  modified_base 5: mod_base = OTHER; note = 2'-O-methyluridine-3'-phosphate
  modified_base 6: mod_base = OTHER; note = 2'-O-docosanyl-uridine-3'-phosphate
  modified_base 7: mod_base = OTHER; note = 2'-deoxy-2'-fluorouridine-3'-phosphate
  modified_base 8: mod_base = OTHER; note = 2'-O-methyluridine-3'-phosphate
  modified_base 9: mod_base = OTHER; note = 2'-deoxy-2'-fluorouridine-3'-phosphate
  modified_base 10: mod_base = OTHER; note = 2'-deoxy-2'-fluorocytidine-3'-phosphate
  modified_base 11: mod_base = OTHER; note = 2'-deoxy-2'-fluorocytidine-3'-phosphate
  modified_base 12: mod_base = OTHER; note = 2'-O-methyluridine-3'-phosphate
  modified_base 13: mod_base = OTHER; note = 2'-O-methyladenosine-3'-phosphate
  modified_base 14: mod_base = OTHER; note = 2'-O-methyladenosine-3'-phosphate
  modified_base 15: mod_base = OTHER; note = 2'-O-methylguanosine-3'-phosphate
  modified_base 16: mod_base = OTHER; note = 2'-O-methyladenosine-3'-phosphate
  modified_base 17: mod_base = OTHER; note = 2'-O-methyluridine-3'-phosphate
  modified_base 18: mod_base = OTHER; note = 2'-O-methyluridine-3'-phosphate
  modified_base 19: mod_base = OTHER; note = 2'-O-methylcytidine-3'-phosphate
  modified_base 20: mod_base = OTHER; note = 2'-O-methyladenosine-3'-phosphate
  modified_base 21: mod_base = OTHER; note = 2'-O-methyluridine-3'-phosphate ((2S,4R)-1-[29-[[2-(acetylamino)-2-deoxy-beta-D-galactopyra nosyl]oxy]-14,14-bis[[3-[[3-[[5-[[2-(acetylamino)-2-deoxy-b eta-D-galactopyranosyl]oxy]-1-oxopentyl]amino]propyl]amino] -3-oxopropoxy]methyl]-1,12,19,25-tetraoxo-16-oxa-13,20,24-t riazanonacos-1-yl]-4-hydroxy-2-pyrrolidinyl)methyl ester
ttactttttcctaagattcat

SEQ ID NO: 4852 - RNA, 21 nt, synthetic construct
  source 1..21: mol_type = other RNA
  modified_base 1: mod_base = OTHER; note = 2'-O-methyluridine-3'-phosphorothioate
  modified_base 2: mod_base = OTHER; note = 2'-O-methyluridine-3'-phosphorothioate
  modified_base 3: mod_base = OTHER; note = 2'-O-methyladenosine-3'-phosphate
  modified_base 4: mod_base = OTHER; note = 2'-O-methylcytidine-3'-phosphate
  modified_base 5: mod_base = OTHER; note = 2'-O-methylcytidine-3'-phosphate
  modified_base 6: mod_base = OTHER; note = 2'-O-docosanyl-uridine-3'-phosphate
  modified_base 7: mod_base = OTHER; note = 2'-deoxy-2'-fluoroadenosine-3'-phosphate
  modified_base 8: mod_base = OTHER; note = 2'-O-methylguanosine-3'-phosphate
  modified_base 9: mod_base = OTHER; note = 2'-deoxy-2'-fluoroadenosine-3'-phosphate
  modified_base 10: mod_base = OTHER; note = 2'-deoxy-2'-fluoroadenosine-3'-phosphate
  modified_base 11: mod_base = OTHER; note = 2'-deoxy-2'-fluorouridine-3'-phosphate
  modified_base 12: mod_base = OTHER; note = 2'-O-methyladenosine-3'-phosphate
  modified_base 13: mod_base = OTHER; note = 2'-O-methyladenosine-3'-phosphate
  modified_base 14: mod_base = OTHER; note = 2'-O-methyladenosine-3'-phosphate
  modified_base 15: mod_base = OTHER; note = 2'-O-methyluridine-3'-phosphate
  modified_base 16: mod_base = OTHER; note = 2'-O-methyladenosine-3'-phosphate
  modified_base 17: mod_base = OTHER; note = 2'-O-methylguanosine-3'-phosphate
  modified_base 18: mod_base = OTHER; note = 2'-O-methyluridine-3'-phosphate
  modified_base 19: mod_base = OTHER; note = 2'-O-methylcytidine-3'-phosphate
  modified_base 20: mod_base = OTHER; note = 2'-O-methyluridine-3'-phosphate
  modified_base 21: mod_base = OTHER; note = 2'-O-methyluridine-3'-phosphate ((2S,4R)-1-[29-[[2-(acetylamino)-2-deoxy-beta-D-galactopyra nosyl]oxy]-14,14-bis[[3-[[3-[[5-[[2-(acetylamino)-2-deoxy-b eta-D-galactopyranosyl]oxy]-1-oxopentyl]amino]propyl]amino] -3-oxopropoxy]methyl]-1,12,19,25-tetraoxo-16-oxa-13,20,24-t riazanonacos-1-yl]-4-hydroxy-2-pyrrolidinyl)methyl ester
ttacctagaataaatagtctt

SEQ ID NO: 4853 - RNA, 21 nt, synthetic construct
  source 1..21: mol_type = other RNA
  modified_base 1: mod_base = OTHER; note = 2'-O-methylguanosine-3'-phosphorothioate
  modified_base 2: mod_base = OTHER; note = 2'-O-methylguanosine-3'-phosphorothioate
  modified_base 3: mod_base = OTHER; note = 2'-O-methyluridine-3'-phosphate
  modified_base 4: mod_base = OTHER; note = 2'-O-methylcytidine-3'-phosphate
  modified_base 5: mod_base = OTHER; note = 2'-O-methyluridine-3'-phosphate
  modified_base 6: mod_base = OTHER; note = 2'-O-docosanyl-uridine-3'-phosphate
  modified_base 7: mod_base = OTHER; note = 2'-deoxy-2'-fluorocytidine-3'-phosphate
  modified_base 8: mod_base = OTHER; note = 2'-O-methyluridine-3'-phosphate
  modified_base 9: mod_base = OTHER; note = 2'-deoxy-2'-fluoroadenosine-3'-phosphate
  modified_base 10: mod_base = OTHER; note = 2'-deoxy-2'-fluoroadenosine-3'-phosphate
  modified_base 11: mod_base = OTHER; note = 2'-deoxy-2'-fluoroadenosine-3'-phosphate
  modified_base 12: mod_base = OTHER; note = 2'-O-methyluridine-3'-phosphate
  modified_base 13: mod_base = OTHER; note = 2'-O-methyluridine-3'-phosphate
  modified_base 14: mod_base = OTHER; note = 2'-O-methyluridine-3'-phosphate
  modified_base 15: mod_base = OTHER; note = 2'-O-methylcytidine-3'-phosphate
  modified_base 16: mod_base = OTHER; note = 2'-O-methyladenosine-3'-phosphate
  modified_base 17: mod_base = OTHER; note = 2'-O-methyladenosine-3'-phosphate
  modified_base 18: mod_base = OTHER; note = 2'-O-methylcytidine-3'-phosphate
  modified_base 19: mod_base = OTHER; note = 2'-O-methyladenosine-3'-phosphate
  modified_base 20: mod_base = OTHER; note = 2'-O-methylguanosine-3'-phosphate
  modified_base 21: mod_base = OTHER; note = 2'-O-methyluridine-3'-phosphate ((2S,4R)-1-[29-[[2-(acetylamino)-2-deoxy-beta-D-galactopyra nosyl]oxy]-14,14-bis[[3-[[3-[[5-[[2-(acetylamino)-2-deoxy-b eta-D-galactopyranosyl]oxy]-1-oxopentyl]amino]propyl]amino] -3-oxopropoxy]methyl]-1,12,19,25-tetraoxo-16-oxa-13,20,24-t riazanonacos-1-yl]-4-hydroxy-2-pyrrolidinyl)methyl ester
ggtcttctaaatttcaacagt

SEQ ID NO: 4854 - RNA, 21 nt, synthetic construct
  source 1..21: mol_type = other RNA
  modified_base 1: mod_base = OTHER; note = 2'-O-methylcytidine-3'-phosphorothioate
  modified_base 2: mod_base = OTHER; note = 2'-O-methylcytidine-3'-phosphorothioate
  modified_base 3: mod_base = OTHER; note = 2'-O-methyluridine-3'-phosphate
  modified_base 4: mod_base = OTHER; note = 2'-O-methyladenosine-3'-phosphate
  modified_base 5: mod_base = OTHER; note = 2'-O-methyluridine-3'-phosphate
  modified_base 6: mod_base = OTHER; note = 2'-O-docosanyl-adenosine-3'-phosphate
  modified_base 7: mod_base = OTHER; note = 2'-deoxy-2'-fluorocytidine-3'-phosphate
  modified_base 8: mod_base = OTHER; note = 2'-O-methyladenosine-3'-phosphate
  modified_base 9: mod_base = OTHER; note = 2'-deoxy-2'-fluorouridine-3'-phosphate
  modified_base 10: mod_base = OTHER; note = 2'-deoxy-2'-fluorouridine-3'-phosphate
  modified_base 11: mod_base = OTHER; note = 2'-deoxy-2'-fluoroguanosine-3'-phosphate
  modified_base 12: mod_base = OTHER; note = 2'-O-methyluridine-3'-phosphate
  modified_base 13: mod_base = OTHER; note = 2'-O-methyluridine-3'-phosphate
  modified_base 14: mod_base = OTHER; note = 2'-O-methyluridine-3'-phosphate
  modified_base 15: mod_base = OTHER; note = 2'-O-methyladenosine-3'-phosphate
  modified_base 16: mod_base = OTHER; note = 2'-O-methylcytidine-3'-phosphate
  modified_base 17: mod_base = OTHER; note = 2'-O-methyladenosine-3'-phosphate
  modified_base 18: mod_base = OTHER; note = 2'-O-methylcytidine-3'-phosphate
  modified_base 19: mod_base = OTHER; note = 2'-O-methyluridine-3'-phosphate
  modified_base 20: mod_base = OTHER; note = 2'-O-methyluridine-3'-phosphate
  modified_base 21: mod_base = OTHER; note = 2'-O-methyluridine-3'-phosphate ((2S,4R)-1-[29-[[2-(acetylamino)-2-deoxy-beta-D-galactopyra nosyl]oxy]-14,14-bis[[3-[[3-[[5-[[2-(acetylamino)-2-deoxy-b eta-D-galactopyranosyl]oxy]-1-oxopentyl]amino]propyl]amino] -3-oxopropoxy]methyl]-1,12,19,25-tetraoxo-16-oxa-13,20,24-t riazanonacos-1-yl]-4-hydroxy-2-pyrrolidinyl)methyl ester
cctatacattgtttacacttt

SEQ ID NO: 4855 - RNA, 21 nt, synthetic construct
  source 1..21: mol_type = other RNA
  modified_base 1: mod_base = OTHER; note = 2'-O-methyluridine-3'-phosphorothioate
  modified_base 2: mod_base = OTHER; note = 2'-O-methylcytidine-3'-phosphorothioate
  modified_base 3: mod_base = OTHER; note = 2'-O-methyluridine-3'-phosphate
  modified_base 4: mod_base = OTHER; note = 2'-O-methylcytidine-3'-phosphate
  modified_base 5: mod_base = OTHER; note = 2'-O-methyluridine-3'-phosphate
  modified_base 6: mod_base = OTHER; note = 2'-O-docosanyl-uridine-3'-phosphate
  modified_base 7: mod_base = OTHER; note = 2'-deoxy-2'-fluoroguanosine-3'-phosphate
  modified_base 8: mod_base = OTHER; note = 2'-O-methyladenosine-3'-phosphate
  modified_base 9: mod_base = OTHER; note = 2'-deoxy-2'-fluoroadenosine-3'-phosphate
  modified_base 10: mod_base = OTHER; note = 2'-deoxy-2'-fluorouridine-3'-phosphate
  modified_base 11: mod_base = OTHER; note = 2'-deoxy-2'-fluorocytidine-3'-phosphate
  modified_base 12: mod_base = OTHER; note = 2'-O-methyladenosine-3'-phosphate
  modified_base 13: mod_base = OTHER; note = 2'-O-methylguanosine-3'-phosphate
  modified_base 14: mod_base = OTHER; note = 2'-O-methyladenosine-3'-phosphate
  modified_base 15: mod_base = OTHER; note = 2'-O-methylguanosine-3'-phosphate
  modified_base 16: mod_base = OTHER; note = 2'-O-methyluridine-3'-phosphate
  modified_base 17: mod_base = OTHER; note = 2'-O-methyladenosine-3'-phosphate
  modified_base 18: mod_base = OTHER; note = 2'-O-methyluridine-3'-phosphate
  modified_base 19: mod_base = OTHER; note = 2'-O-methylcytidine-3'-phosphate
  modified_base 20: mod_base = OTHER; note = 2'-O-methyladenosine-3'-phosphate
  modified_base 21: mod_base = OTHER; note = 2'-O-methyluridine-3'-phosphate ((2S,4R)-1-[29-[[2-(acetylamino)-2-deoxy-beta-D-galactopyra nosyl]oxy]-14,14-bis[[3-[[3-[[5-[[2-(acetylamino)-2-deoxy-b eta-D-galactopyranosyl]oxy]-1-oxopentyl]amino]propyl]amino] -3-oxopropoxy]methyl]-1,12,19,25-tetraoxo-16-oxa-13,20,24-t riazanonacos-1-yl]-4-hydroxy-2-pyrrolidinyl)methyl ester
tctcttgaatcagagtatcat

SEQ ID NO: 4856 - RNA, 21 nt, synthetic construct
  source 1..21: mol_type = other RNA
  modified_base 1: mod_base = OTHER; note = 2'-O-methylguanosine-3'-phosphorothioate
  modified_base 2: mod_base = OTHER; note = 2'-O-methylcytidine-3'-phosphorothioate
  modified_base 3: mod_base = OTHER; note = 2'-O-methyluridine-3'-phosphate
  modified_base 4: mod_base = OTHER; note = 2'-O-methylguanosine-3'-phosphate
  modified_base 5: mod_base = OTHER; note = 2'-O-methyladenosine-3'-phosphate
  modified_base 6: mod_base = OTHER; note = 2'-O-docosanyl-guanosine-3'-phosphate
  modified_base 7: mod_base = OTHER; note = 2'-deoxy-2'-fluoroadenosine-3'-phosphate
  modified_base 8: mod_base = OTHER; note = 2'-O-methyladenosine-3'-phosphate
  modified_base 9: mod_base = OTHER; note = 2'-deoxy-2'-fluorocytidine-3'-phosphate
  modified_base 10: mod_base = OTHER; note = 2'-deoxy-2'-fluoroadenosine-3'-phosphate
  modified_base 11: mod_base = OTHER; note = 2'-deoxy-2'-fluoroadenosine-3'-phosphate
  modified_base 12: mod_base = OTHER; note = 2'-O-methyluridine-3'-phosphate
  modified_base 13: mod_base = OTHER; note = 2'-O-methyladenosine-3'-phosphate
  modified_base 14: mod_base = OTHER; note = 2'-O-methyluridine-3'-phosphate
  modified_base 15: mod_base = OTHER; note = 2'-O-methyladenosine-3'-phosphate
  modified_base 16: mod_base = OTHER; note = 2'-O-methylguanosine-3'-phosphate
  modified_base 17: mod_base = OTHER; note = 2'-O-methyluridine-3'-phosphate
  modified_base 18: mod_base = OTHER; note = 2'-O-methyluridine-3'-phosphate
  modified_base 19: mod_base = OTHER; note = 2'-O-methyladenosine-3'-phosphate
  modified_base 20: mod_base = OTHER; note = 2'-O-methyladenosine-3'-phosphate
  modified_base 21: mod_base = OTHER; note = 2'-O-methyluridine-3'-phosphate ((2S,4R)-1-[29-[[2-(acetylamino)-2-deoxy-beta-D-galactopyra nosyl]oxy]-14,14-bis[[3-[[3-[[5-[[2-(acetylamino)-2-deoxy-b eta-D-galactopyranosyl]oxy]-1-oxopentyl]amino]propyl]amino] -3-oxopropoxy]methyl]-1,12,19,25-tetraoxo-16-oxa-13,20,24-t riazanonacos-1-yl]-4-hydroxy-2-pyrrolidinyl)methyl ester
gctgagaacaatatagttaat

SEQ ID NO: 4857 - RNA, 21 nt, synthetic construct
  source 1..21: mol_type = other RNA
  modified_base 1: mod_base = OTHER; note = 2'-O-methylcytidine-3'-phosphorothioate
  modified_base 2: mod_base = OTHER; note = 2'-O-methylguanosine-3'-phosphorothioate
  modified_base 3: mod_base = OTHER; note = 2'-O-methyluridine-3'-phosphate
  modified_base 4: mod_base = OTHER; note = 2'-O-methylcytidine-3'-phosphate
  modified_base 5: mod_base = OTHER; note = 2'-O-methylcytidine-3'-phosphate
  modified_base 6: mod_base = OTHER; note = 2'-O-docosanyl-adenosine-3'-phosphate
  modified_base 7: mod_base = OTHER; note = 2'-deoxy-2'-fluorouridine-3'-phosphate
  modified_base 8: mod_base = OTHER; note = 2'-O-methylcytidine-3'-phosphate
  modified_base 9: mod_base = OTHER; note = 2'-deoxy-2'-fluorouridine-3'-phosphate
  modified_base 10: mod_base = OTHER; note = 2'-deoxy-2'-fluorouridine-3'-phosphate
  modified_base 11: mod_base = OTHER; note = 2'-deoxy-2'-fluorouridine-3'-phosphate
  modified_base 12: mod_base = OTHER; note = 2'-O-methyladenosine-3'-phosphate
  modified_base 13: mod_base = OTHER; note = 2'-O-methyluridine-3'-phosphate
  modified_base 14: mod_base = OTHER; note = 2'-O-methyluridine-3'-phosphate
  modified_base 15: mod_base = OTHER; note = 2'-O-methyluridine-3'-phosphate
  modified_base 16: mod_base = OTHER; note = 2'-O-methylcytidine-3'-phosphate
  modified_base 17: mod_base = OTHER; note = 2'-O-methyluridine-3'-phosphate
  modified_base 18: mod_base = OTHER; note = 2'-O-methyluridine-3'-phosphate
  modified_base 19: mod_base = OTHER; note = 2'-O-methylcytidine-3'-phosphate
  modified_base 20: mod_base = OTHER; note = 2'-O-methyladenosine-3'-phosphate
  modified_base 21: mod_base = OTHER; note = 2'-O-methyluridine-3'-phosphate ((2S,4R)-1-[29-[[2-(acetylamino)-2-deoxy-beta-D-galactopyra nosyl]oxy]-14,14-bis[[3-[[3-[[5-[[2-(acetylamino)-2-deoxy-b eta-D-galactopyranosyl]oxy]-1-oxopentyl]amino]propyl]amino] -3-oxopropoxy]methyl]-1,12,19,25-tetraoxo-16-oxa-13,20,24-t riazanonacos-1-yl]-4-hydroxy-2-pyrrolidinyl)methyl ester
cgtccatctttatttcttcat

SEQ ID NO: 4858 - RNA, 21 nt, synthetic construct
  source 1..21: mol_type = other RNA
  modified_base 1: mod_base = OTHER; note = 2'-O-methyladenosine-3'-phosphorothioate
  modified_base 2: mod_base = OTHER; note = 2'-O-methylguanosine-3'-phosphorothioate
  modified_base 3: mod_base = OTHER; note = 2'-O-methylcytidine-3'-phosphate
  modified_base 4: mod_base = OTHER; note = 2'-O-methyluridine-3'-phosphate
  modified_base 5: mod_base = OTHER; note = 2'-O-methyluridine-3'-phosphate
  modified_base 6: mod_base = OTHER; note = 2'-O-docosanyl-cytidine-3'-phosphate
  modified_base 7: mod_base = OTHER; note = 2'-deoxy-2'-fluorouridine-3'-phosphate
  modified_base 8: mod_base = OTHER; note = 2'-O-methyluridine-3'-phosphate
  modified_base 9: mod_base = OTHER; note = 2'-deoxy-2'-fluorouridine-3'-phosphate
  modified_base 10: mod_base = OTHER; note = 2'-deoxy-2'-fluorouridine-3'-phosphate
  modified_base 11: mod_base = OTHER; note = 2'-deoxy-2'-fluoroguanosine-3'-phosphate
  modified_base 12: mod_base = OTHER; note = 2'-O-methyladenosine-3'-phosphate
  modified_base 13: mod_base = OTHER; note = 2'-O-methyluridine-3'-phosphate
  modified_base 14: mod_base = OTHER; note = 2'-O-methyluridine-3'-phosphate
  modified_base 15: mod_base = OTHER; note = 2'-O-methyluridine-3'-phosphate
  modified_base 16: mod_base = OTHER; note = 2'-O-methylguanosine-3'-phosphate
  modified_base 17: mod_base = OTHER; note = 2'-O-methylcytidine-3'-phosphate
  modified_base 18: mod_base = OTHER; note = 2'-O-methyluridine-3'-phosphate
  modified_base 19: mod_base = OTHER; note = 2'-O-methyladenosine-3'-phosphate
  modified_base 20: mod_base = OTHER; note = 2'-O-methyladenosine-3'-phosphate
  modified_base 21: mod_base = OTHER; note = 2'-O-methyluridine-3'-phosphate ((2S,4R)-1-[29-[[2-(acetylamino)-2-deoxy-beta-D-galactopyra nosyl]oxy]-14,14-bis[[3-[[3-[[5-[[2-(acetylamino)-2-deoxy-b eta-D-galactopyranosyl]oxy]-1-oxopentyl]amino]propyl]amino] -3-oxopropoxy]methyl]-1,12,19,25-tetraoxo-16-oxa-13,20,24-t riazanonacos-1-yl]-4-hydroxy-2-pyrrolidinyl)methyl ester
agcttcttttgatttgctaat

SEQ ID NO: 4859 - RNA, 21 nt, synthetic construct
  source 1..21: mol_type = other RNA
  modified_base 1: mod_base = OTHER; note = 2'-O-methyladenosine-3'-phosphorothioate
  modified_base 2: mod_base = OTHER; note = 2'-O-methyluridine-3'-phosphorothioate
  modified_base 3: mod_base = OTHER; note = 2'-O-methylcytidine-3'-phosphate
  modified_base 4: mod_base = OTHER; note = 2'-O-methyluridine-3'-phosphate
  modified_base 5: mod_base = OTHER; note = 2'-O-methylcytidine-3'-phosphate
  modified_base 6: mod_base = OTHER; note = 2'-O-docosanyl-uridine-3'-phosphate
  modified_base 7: mod_base = OTHER; note = 2'-deoxy-2'-fluorouridine-3'-phosphate
  modified_base 8: mod_base = OTHER; note = 2'-O-methyluridine-3'-phosphate
  modified_base 9: mod_base = OTHER; note = 2'-deoxy-2'-fluorouridine-3'-phosphate
  modified_base 10: mod_base = OTHER; note = 2'-deoxy-2'-fluorocytidine-3'-phosphate
  modified_base 11: mod_base = OTHER; note = 2'-deoxy-2'-fluorouridine-3'-phosphate
  modified_base 12: mod_base = OTHER; note = 2'-O-methyluridine-3'-phosphate
  modified_base 13: mod_base = OTHER; note = 2'-O-methyluridine-3'-phosphate
  modified_base 14: mod_base = OTHER; note = 2'-O-methyladenosine-3'-phosphate
  modified_base 15: mod_base = OTHER; note = 2'-O-methyluridine-3'-phosphate
  modified_base 16: mod_base = OTHER; note = 2'-O-methylcytidine-3'-phosphate
  modified_base 17: mod_base = OTHER; note = 2'-O-methylcytidine-3'-phosphate
  modified_base 18: mod_base = OTHER; note = 2'-O-methyluridine-3'-phosphate
  modified_base 19: mod_base = OTHER; note = 2'-O-methylguanosine-3'-phosphate
  modified_base 20: mod_base = OTHER; note = 2'-O-methyluridine-3'-phosphate
  modified_base 21: mod_base = OTHER; note = 2'-O-methyluridine-3'-phosphate ((2S,4R)-1-[29-[[2-(acetylamino)-2-deoxy-beta-D-galactopyra nosyl]oxy]-14,14-bis[[3-[[3-[[5-[[2-(acetylamino)-2-deoxy-b eta-D-galactopyranosyl]oxy]-1-oxopentyl]amino]propyl]amino] -3-oxopropoxy]methyl]-1,12,19,25-tetraoxo-16-oxa-13,20,24-t riazanonacos-1-yl]-4-hydroxy-2-pyrrolidinyl)methyl ester
atctcttttctttatcctgtt

SEQ ID NO: 4860 - RNA, 21 nt, synthetic construct
  source 1..21: mol_type = other RNA
  modified_base 1: mod_base = OTHER; note = 2'-O-methylcytidine-3'-phosphorothioate
  modified_base 2: mod_base = OTHER; note = 2'-O-methyladenosine-3'-phosphorothioate
  modified_base 3: mod_base = OTHER; note = 2'-O-methylcytidine-3'-phosphate
  modified_base 4: mod_base = OTHER; note = 2'-O-methyladenosine-3'-phosphate
  modified_base 5: mod_base = OTHER; note = 2'-O-methyladenosine-3'-phosphate
  modified_base 6: mod_base = OTHER; note = 2'-O-docosanyl-adenosine-3'-phosphate
  modified_base 7: mod_base = OTHER; note = 2'-deoxy-2'-fluorouridine-3'-phosphate
  modified_base 8: mod_base = OTHER; note = 2'-O-methylguanosine-3'-phosphate
  modified_base 9: mod_base = OTHER; note = 2'-deoxy-2'-fluoroadenosine-3'-phosphate
  modified_base 10: mod_base = OTHER; note = 2'-deoxy-2'-fluoroadenosine-3'-phosphate
  modified_base 11: mod_base = OTHER; note = 2'-deoxy-2'-fluorouridine-3'-phosphate
  modified_base 12: mod_base = OTHER; note = 2'-O-methyluridine-3'-phosphate
  modified_base 13: mod_base = OTHER; note = 2'-O-methyladenosine-3'-phosphate
  modified_base 14: mod_base = OTHER; note = 2'-O-methylcytidine-3'-phosphate
  modified_base 15: mod_base = OTHER; note = 2'-O-methyladenosine-3'-phosphate
  modified_base 16: mod_base = OTHER; note = 2'-O-methylcytidine-3'-phosphate
  modified_base 17: mod_base = OTHER; note = 2'-O-methyladenosine-3'-phosphate
  modified_base 18: mod_base = OTHER; note = 2'-O-methyluridine-3'-phosphate
  modified_base 19: mod_base = OTHER; note = 2'-O-methyluridine-3'-phosphate
  modified_base 20: mod_base = OTHER; note = 2'-O-methyluridine-3'-phosphate
  modified_base 21: mod_base = OTHER; note = 2'-O-methyluridine-3'-phosphate ((2S,4R)-1-[29-[[2-(acetylamino)-2-deoxy-beta-D-galactopyra nosyl]oxy]-14,14-bis[[3-[[3-[[5-[[2-(acetylamino)-2-deoxy-b eta-D-galactopyranosyl]oxy]-1-oxopentyl]amino]propyl]amino] -3-oxopropoxy]methyl]-1,12,19,25-tetraoxo-16-oxa-13,20,24-t riazanonacos-1-yl]-4-hydroxy-2-pyrrolidinyl)methyl ester
cacaaatgaattacacatttt

SEQ ID NO: 4861 - RNA, 21 nt, synthetic construct
  source 1..21: mol_type = other RNA
  modified_base 1: mod_base = OTHER; note = 2'-O-methyluridine-3'-phosphorothioate
  modified_base 2: mod_base = OTHER; note = 2'-O-methyluridine-3'-phosphorothioate
  modified_base 3: mod_base = OTHER; note = 2'-O-methyluridine-3'-phosphate
  modified_base 4: mod_base = OTHER; note = 2'-O-methylguanosine-3'-phosphate
  modified_base 5: mod_base = OTHER; note = 2'-O-methyluridine-3'-phosphate
  modified_base 6: mod_base = OTHER; note = 2'-O-docosanyl-cytidine-3'-phosphate
  modified_base 7: mod_base = OTHER; note = 2'-deoxy-2'-fluorocytidine-3'-phosphate
  modified_base 8: mod_base = OTHER; note = 2'-O-methyladenosine-3'-phosphate
  modified_base 9: mod_base = OTHER; note = 2'-deoxy-2'-fluoroadenosine-3'-phosphate
  modified_base 10: mod_base = OTHER; note = 2'-deoxy-2'-fluoroadenosine-3'-phosphate
  modified_base 11: mod_base = OTHER; note = 2'-deoxy-2'-fluoroadenosine-3'-phosphate
  modified_base 12: mod_base = OTHER; note = 2'-O-methylguanosine-3'-phosphate
  modified_base 13: mod_base = OTHER; note = 2'-O-methylcytidine-3'-phosphate
  modified_base 14: mod_base = OTHER; note = 2'-O-methyladenosine-3'-phosphate
  modified_base 15: mod_base = OTHER; note = 2'-O-methyladenosine-3'-phosphate
  modified_base 16: mod_base = OTHER; note = 2'-O-methyluridine-3'-phosphate
  modified_base 17: mod_base = OTHER; note = 2'-O-methyladenosine-3'-phosphate
  modified_base 18: mod_base = OTHER; note = 2'-O-methyladenosine-3'-phosphate
  modified_base 19: mod_base = OTHER; note = 2'-O-methyladenosine-3'-phosphate
  modified_base 20: mod_base = OTHER; note = 2'-O-methylcytidine-3'-phosphate
  modified_base 21: mod_base = OTHER; note = 2'-O-methyluridine-3'-phosphate ((2S,4R)-1-[29-[[2-(acetylamino)-2-deoxy-beta-D-galactopyra nosyl]oxy]-14,14-bis[[3-[[3-[[5-[[2-(acetylamino)-2-deoxy-b eta-D-galactopyranosyl]oxy]-1-oxopentyl]amino]propyl]amino] -3-oxopropoxy]methyl]-1,12,19,25-tetraoxo-16-oxa-13,20,24-t riazanonacos-1-yl]-4-hydroxy-2-pyrrolidinyl)methyl ester
tttgtccaaaagcaataaact

SEQ ID NO: 4862 - RNA, 21 nt, synthetic construct
  source 1..21: mol_type = other RNA
  modified_base 1: mod_base = OTHER; note = 2'-O-methyluridine-3'-phosphorothioate
  modified_base 2: mod_base = OTHER; note = 2'-O-methylcytidine-3'-phosphorothioate
  modified_base 3: mod_base = OTHER; note = 2'-O-methyluridine-3'-phosphate
  modified_base 4: mod_base = OTHER; note = 2'-O-methylguanosine-3'-phosphate
  modified_base 5: mod_base = OTHER; note = 2'-O-methyladenosine-3'-phosphate
  modified_base 6: mod_base = OTHER; note = 2'-O-docosanyl-guanosine-3'-phosphate
  modified_base 7: mod_base = OTHER; note = 2'-deoxy-2'-fluorouridine-3'-phosphate
  modified_base 8: mod_base = OTHER; note = 2'-O-methyluridine-3'-phosphate
  modified_base 9: mod_base = OTHER; note = 2'-deoxy-2'-fluorouridine-3'-phosphate
  modified_base 10: mod_base = OTHER; note = 2'-deoxy-2'-fluoroadenosine-3'-phosphate
  modified_base 11: mod_base = OTHER; note = 2'-deoxy-2'-fluoroadenosine-3'-phosphate
  modified_base 12: mod_base = OTHER; note = 2'-O-methyluridine-3'-phosphate
  modified_base 13: mod_base = OTHER; note = 2'-O-methylcytidine-3'-phosphate
  modified_base 14: mod_base = OTHER; note = 2'-O-methyladenosine-3'-phosphate
  modified_base 15: mod_base = OTHER; note = 2'-O-methylcytidine-3'-phosphate
  modified_base 16: mod_base = OTHER; note = 2'-O-methyluridine-3'-phosphate
  modified_base 17: mod_base = OTHER; note = 2'-O-methyluridine-3'-phosphate
  modified_base 18: mod_base = OTHER; note = 2'-O-methyluridine-3'-phosphate
  modified_base 19: mod_base = OTHER; note = 2'-O-methyladenosine-3'-phosphate
  modified_base 20: mod_base = OTHER; note = 2'-O-methylguanosine-3'-phosphate
  modified_base 21: mod_base = OTHER; note = 2'-O-methyluridine-3'-phosphate ((2S,4R)-1-[29-[[2-(acetylamino)-2-deoxy-beta-D-galactopyra nosyl]oxy]-14,14-bis[[3-[[3-[[5-[[2-(acetylamino)-2-deoxy-b eta-D-galactopyranosyl]oxy]-1-oxopentyl]amino]propyl]amino] -3-oxopropoxy]methyl]-1,12,19,25-tetraoxo-16-oxa-13,20,24-t riazanonacos-1-yl]-4-hydroxy-2-pyrrolidinyl)methyl ester
tctgagtttaatcactttagt

SEQ ID NO: 4863 - RNA, 21 nt, synthetic construct
  source 1..21: mol_type = other RNA
  modified_base 1: mod_base = OTHER; note = 2'-O-methylcytidine-3'-phosphorothioate
  modified_base 2: mod_base = OTHER; note = 2'-O-methylcytidine-3'-phosphorothioate
  modified_base 3: mod_base = OTHER; note = 2'-O-methyladenosine-3'-phosphate
  modified_base 4: mod_base = OTHER; note = 2'-O-methyladenosine-3'-phosphate
  modified_base 5: mod_base = OTHER; note = 2'-O-methylguanosine-3'-phosphate
  modified_base 6: mod_base = OTHER; note = 2'-O-docosanyl-uridine-3'-phosphate
  modified_base 7: mod_base = OTHER; note = 2'-deoxy-2'-fluoroadenosine-3'-phosphate
  modified_base 8: mod_base = OTHER; note = 2'-O-methylcytidine-3'-phosphate
  modified_base 9: mod_base = OTHER; note = 2'-deoxy-2'-fluoroadenosine-3'-phosphate
  modified_base 10: mod_base = OTHER; note = 2'-deoxy-2'-fluoroadenosine-3'-phosphate
  modified_base 11: mod_base = OTHER; note = 2'-deoxy-2'-fluorocytidine-3'-phosphate
  modified_base 12: mod_base = OTHER; note = 2'-O-methyluridine-3'-phosphate
  modified_base 13: mod_base = OTHER; note = 2'-O-methylcytidine-3'-phosphate
  modified_base 14: mod_base = OTHER; note = 2'-O-methyluridine-3'-phosphate
  modified_base 15: mod_base = OTHER; note = 2'-O-methyluridine-3'-phosphate
  modified_base 16: mod_base = OTHER; note = 2'-O-methylcytidine-3'-phosphate
  modified_base 17: mod_base = OTHER; note = 2'-O-methyladenosine-3'-phosphate
  modified_base 18: mod_base = OTHER; note = 2'-O-methyluridine-3'-phosphate
  modified_base 19: mod_base = OTHER; note = 2'-O-methylcytidine-3'-phosphate
  modified_base 20: mod_base = OTHER; note = 2'-O-methyladenosine-3'-phosphate
  modified_base 21: mod_base = OTHER; note = 2'-O-methyluridine-3'-phosphate ((2S,4R)-1-[29-[[2-(acetylamino)-2-deoxy-beta-D-galactopyra nosyl]oxy]-14,14-bis[[3-[[3-[[5-[[2-(acetylamino)-2-deoxy-b eta-D-galactopyranosyl]oxy]-1-oxopentyl]amino]propyl]amino] -3-oxopropoxy]methyl]-1,12,19,25-tetraoxo-16-oxa-13,20,24-t riazanonacos-1-yl]-4-hydroxy-2-pyrrolidinyl)methyl ester
ccaagtacaactcttcatcat

SEQ ID NO: 4864 - RNA, 21 nt, synthetic construct
  source 1..21: mol_type = other RNA
  modified_base 1: mod_base = OTHER; note = 2'-O-methyluridine-3'-phosphorothioate
  modified_base 2: mod_base = OTHER; note = 2'-O-methyluridine-3'-phosphorothioate
  modified_base 3: mod_base = OTHER; note = 2'-O-methylcytidine-3'-phosphate
  modified_base 4: mod_base = OTHER; note = 2'-O-methyluridine-3'-phosphate
  modified_base 5: mod_base = OTHER; note = 2'-O-methyladenosine-3'-phosphate
  modified_base 6: mod_base = OTHER; note = 2'-O-docosanyl-cytidine-3'-phosphate
  modified_base 7: mod_base = OTHER; note = 2'-deoxy-2'-fluorouridine-3'-phosphate
  modified_base 8: mod_base = OTHER; note = 2'-O-methyluridine-3'-phosphate
  modified_base 9: mod_base = OTHER; note = 2'-deoxy-2'-fluorouridine-3'-phosphate
  modified_base 10: mod_base = OTHER; note = 2'-deoxy-2'-fluoroguanosine-3'-phosphate
  modified_base 11: mod_base = OTHER; note = 2'-deoxy-2'-fluoroadenosine-3'-phosphate
  modified_base 12: mod_base = OTHER; note = 2'-O-methyladenosine-3'-phosphate
  modified_base 13: mod_base = OTHER; note = 2'-O-methyladenosine-3'-phosphate
  modified_base 14: mod_base = OTHER; note = 2'-O-methyladenosine-3'-phosphate
  modified_base 15: mod_base = OTHER; note = 2'-O-methyluridine-3'-phosphate
  modified_base 16: mod_base = OTHER; note = 2'-O-methylguanosine-3'-phosphate
  modified_base 17: mod_base = OTHER; note = 2'-O-methylcytidine-3'-phosphate
  modified_base 18: mod_base = OTHER; note = 2'-O-methyluridine-3'-phosphate
  modified_base 19: mod_base = OTHER; note = 2'-O-methyluridine-3'-phosphate
  modified_base 20: mod_base = OTHER; note = 2'-O-methyluridine-3'-phosphate
  modified_base 21: mod_base = OTHER; note = 2'-O-methyluridine-3'-phosphate ((2S,4R)-1-[29-[[2-(acetylamino)-2-deoxy-beta-D-galactopyra nosyl]oxy]-14,14-bis[[3-[[3-[[5-[[2-(acetylamino)-2-deoxy-b eta-D-galactopyranosyl]oxy]-1-oxopentyl]amino]propyl]amino] -3-oxopropoxy]methyl]-1,12,19,25-tetraoxo-16-oxa-13,20,24-t riazanonacos-1-yl]-4-hydroxy-2-pyrrolidinyl)methyl ester
ttctactttgaaaatgctttt

SEQ ID NO: 4865 - RNA, 21 nt, synthetic construct
  source 1..21: mol_type = other RNA
  modified_base 1: mod_base = OTHER; note = 2'-O-methyluridine-3'-phosphorothioate
  modified_base 2: mod_base = OTHER; note = 2'-O-methyladenosine-3'-phosphorothioate
  modified_base 3: mod_base = OTHER; note = 2'-O-methyluridine-3'-phosphate
  modified_base 4: mod_base = OTHER; note = 2'-O-methylcytidine-3'-phosphate
  modified_base 5: mod_base = OTHER; note = 2'-O-methyladenosine-3'-phosphate
  modified_base 6: mod_base = OTHER; note = 2'-O-docosanyl-uridine-3'-phosphate
  modified_base 7: mod_base = OTHER; note = 2'-deoxy-2'-fluoroadenosine-3'-phosphate
  modified_base 8: mod_base = OTHER; note = 2'-O-methyluridine-3'-phosphate
  modified_base 9: mod_base = OTHER; note = 2'-deoxy-2'-fluoroadenosine-3'-phosphate
  modified_base 10: mod_base = OTHER; note = 2'-deoxy-2'-fluorouridine-3'-phosphate
  modified_base 11: mod_base = OTHER; note = 2'-deoxy-2'-fluorouridine-3'-phosphate
  modified_base 12: mod_base = OTHER; note = 2'-O-methylcytidine-3'-phosphate
  modified_base 13: mod_base = OTHER; note = 2'-O-methylcytidine-3'-phosphate
  modified_base 14: mod_base = OTHER; note = 2'-O-methyluridine-3'-phosphate
  modified_base 15: mod_base = OTHER; note = 2'-O-methyluridine-3'-phosphate
  modified_base 16: mod_base = OTHER; note = 2'-O-methylcytidine-3'-phosphate
  modified_base 17: mod_base = OTHER; note = 2'-O-methylcytidine-3'-phosphate
  modified_base 18: mod_base = OTHER; note = 2'-O-methyluridine-3'-phosphate
  modified_base 19: mod_base = OTHER; note = 2'-O-methyladenosine-3'-phosphate
  modified_base 20: mod_base = OTHER; note = 2'-O-methyluridine-3'-phosphate
  modified_base 21: mod_base = OTHER; note = 2'-O-methyluridine-3'-phosphate ((2S,4R)-1-[29-[[2-(acetylamino)-2-deoxy-beta-D-galactopyra nosyl]oxy]-14,14-bis[[3-[[3-[[5-[[2-(acetylamino)-2-deoxy-b eta-D-galactopyranosyl]oxy]-1-oxopentyl]amino]propyl]amino] -3-oxopropoxy]methyl]-1,12,19,25-tetraoxo-16-oxa-13,20,24-t riazanonacos-1-yl]-4-hydroxy-2-pyrrolidinyl)methyl ester
tatcatatattccttcctatt

SEQ ID NO: 4866 - RNA, 21 nt, synthetic construct
  source 1..21: mol_type = other RNA
  modified_base 1: mod_base = OTHER; note = 2'-O-methylcytidine-3'-phosphorothioate
  modified_base 2: mod_base = OTHER; note = 2'-O-methylcytidine-3'-phosphorothioate
  modified_base 3: mod_base = OTHER; note = 2'-O-methyluridine-3'-phosphate
  modified_base 4: mod_base = OTHER; note = 2'-O-methylcytidine-3'-phosphate
  modified_base 5: mod_base = OTHER; note = 2'-O-methyluridine-3'-phosphate
  modified_base 6: mod_base = OTHER; note = 2'-O-docosanyl-cytidine-3'-phosphate
  modified_base 7: mod_base = OTHER; note = 2'-deoxy-2'-fluoroadenosine-3'-phosphate
  modified_base 8: mod_base = OTHER; note = 2'-O-methyladenosine-3'-phosphate
  modified_base 9: mod_base = OTHER; note = 2'-deoxy-2'-fluoroadenosine-3'-phosphate
  modified_base 10: mod_base = OTHER; note = 2'-deoxy-2'-fluoroadenosine-3'-phosphate
  modified_base 11: mod_base = OTHER; note = 2'-deoxy-2'-fluorocytidine-3'-phosphate
  modified_base 12: mod_base = OTHER; note = 2'-O-methylcytidine-3'-phosphate
  modified_base 13: mod_base = OTHER; note = 2'-O-methyluridine-3'-phosphate
  modified_base 14: mod_base = OTHER; note = 2'-O-methyladenosine-3'-phosphate
  modified_base 15: mod_base = OTHER; note = 2'-O-methylcytidine-3'-phosphate
  modified_base 16: mod_base = OTHER; note = 2'-O-methyladenosine-3'-phosphate
  modified_base 17: mod_base = OTHER; note = 2'-O-methyluridine-3'-phosphate
  modified_base 18: mod_base = OTHER; note = 2'-O-methyladenosine-3'-phosphate
  modified_base 19: mod_base = OTHER; note = 2'-O-methyladenosine-3'-phosphate
  modified_base 20: mod_base = OTHER; note = 2'-O-methyluridine-3'-phosphate
  modified_base 21: mod_base = OTHER; note = 2'-O-methyluridine-3'-phosphate ((2S,4R)-1-[29-[[2-(acetylamino)-2-deoxy-beta-D-galactopyra nosyl]oxy]-14,14-bis[[3-[[3-[[5-[[2-(acetylamino)-2-deoxy-b eta-D-galactopyranosyl]oxy]-1-oxopentyl]amino]propyl]amino] -3-oxopropoxy]methyl]-1,12,19,25-tetraoxo-16-oxa-13,20,24-t riazanonacos-1-yl]-4-hydroxy-2-pyrrolidinyl)methyl ester
cctctcaaaacctacataatt

SEQ ID NO: 4867 - RNA, 21 nt, synthetic construct
  source 1..21: mol_type = other RNA
  modified_base 1: mod_base = OTHER; note = 2'-O-methyladenosine-3'-phosphorothioate
  modified_base 2: mod_base = OTHER; note = 2'-O-methylguanosine-3'-phosphorothioate
  modified_base 3: mod_base = OTHER; note = 2'-O-methyluridine-3'-phosphate
  modified_base 4: mod_base = OTHER; note = 2'-O-methyluridine-3'-phosphate
  modified_base 5: mod_base = OTHER; note = 2'-O-methyladenosine-3'-phosphate
  modified_base 6: mod_base = OTHER; note = 2'-O-docosanyl-adenosine-3'-phosphate
  modified_base 7: mod_base = OTHER; note = 2'-deoxy-2'-fluorouridine-3'-phosphate
  modified_base 8: mod_base = OTHER; note = 2'-O-methyluridine-3'-phosphate
  modified_base 9: mod_base = OTHER; note = 2'-deoxy-2'-fluoroguanosine-3'-phosphate
  modified_base 10: mod_base = OTHER; note = 2'-deoxy-2'-fluorouridine-3'-phosphate
  modified_base 11: mod_base = OTHER; note = 2'-deoxy-2'-fluorouridine-3'-phosphate
  modified_base 12: mod_base = OTHER; note = 2'-O-methylcytidine-3'-phosphate
  modified_base 13: mod_base = OTHER; note = 2'-O-methyluridine-3'-phosphate
  modified_base 14: mod_base = OTHER; note = 2'-O-methylcytidine-3'-phosphate
  modified_base 15: mod_base = OTHER; note = 2'-O-methyluridine-3'-phosphate
  modified_base 16: mod_base = OTHER; note = 2'-O-methylguanosine-3'-phosphate
  modified_base 17: mod_base = OTHER; note = 2'-O-methyluridine-3'-phosphate
  modified_base 18: mod_base = OTHER; note = 2'-O-methylguanosine-3'-phosphate
  modified_base 19: mod_base = OTHER; note = 2'-O-methyladenosine-3'-phosphate
  modified_base 20: mod_base = OTHER; note = 2'-O-methylguanosine-3'-phosphate
  modified_base 21: mod_base = OTHER; note = 2'-O-methyluridine-3'-phosphate ((2S,4R)-1-[29-[[2-(acetylamino)-2-deoxy-beta-D-galactopyra nosyl]oxy]-14,14-bis[[3-[[3-[[5-[[2-(acetylamino)-2-deoxy-b eta-D-galactopyranosyl]oxy]-1-oxopentyl]amino]propyl]amino] -3-oxopropoxy]methyl]-1,12,19,25-tetraoxo-16-oxa-13,20,24-t riazanonacos-1-yl]-4-hydroxy-2-pyrrolidinyl)methyl ester
agttaattgttctctgtgagt

SEQ ID NO: 4868 - RNA, 21 nt, synthetic construct
  source 1..21: mol_type = other RNA
  modified_base 1: mod_base = OTHER; note = 2'-O-methyluridine-3'-phosphorothioate
  modified_base 2: mod_base = OTHER; note = 2'-O-methyluridine-3'-phosphorothioate
  modified_base 3: mod_base = OTHER; note = 2'-O-methylcytidine-3'-phosphate
  modified_base 4: mod_base = OTHER; note = 2'-O-methyluridine-3'-phosphate
  modified_base 5: mod_base = OTHER; note = 2'-O-methyladenosine-3'-phosphate
  modified_base 6: mod_base = OTHER; note = 2'-O-docosanyl-uridine-3'-phosphate
  modified_base 7: mod_base = OTHER; note = 2'-deoxy-2'-fluorocytidine-3'-phosphate
  modified_base 8: mod_base = OTHER; note = 2'-O-methyladenosine-3'-phosphate
  modified_base 9: mod_base = OTHER; note = 2'-deoxy-2'-fluorouridine-3'-phosphate
  modified_base 10: mod_base = OTHER; note = 2'-deoxy-2'-fluorouridine-3'-phosphate
  modified_base 11: mod_base = OTHER; note = 2'-deoxy-2'-fluorouridine-3'-phosphate
  modified_base 12: mod_base = OTHER; note = 2'-O-methyluridine-3'-phosphate
  modified_base 13: mod_base = OTHER; note = 2'-O-methylguanosine-3'-phosphate
  modified_base 14: mod_base = OTHER; note = 2'-O-methyladenosine-3'-phosphate
  modified_base 15: mod_base = OTHER; note = 2'-O-methyladenosine-3'-phosphate
  modified_base 16: mod_base = OTHER; note = 2'-O-methyladenosine-3'-phosphate
  modified_base 17: mod_base = OTHER; note = 2'-O-methylcytidine-3'-phosphate
  modified_base 18: mod_base = OTHER; note = 2'-O-methyladenosine-3'-phosphate
  modified_base 19: mod_base = OTHER; note = 2'-O-methylcytidine-3'-phosphate
  modified_base 20: mod_base = OTHER; note = 2'-O-methyluridine-3'-phosphate
  modified_base 21: mod_base = OTHER; note = 2'-O-methyluridine-3'-phosphate ((2S,4R)-1-[29-[[2-(acetylamino)-2-deoxy-beta-D-galactopyra nosyl]oxy]-14,14-bis[[3-[[3-[[5-[[2-(acetylamino)-2-deoxy-b eta-D-galactopyranosyl]oxy]-1-oxopentyl]amino]propyl]amino] -3-oxopropoxy]methyl]-1,12,19,25-tetraoxo-16-oxa-13,20,24-t riazanonacos-1-yl]-4-hydroxy-2-pyrrolidinyl)methyl ester
ttctatcattttgaaacactt

SEQ ID NO: 4869 - RNA, 21 nt, synthetic construct
  source 1..21: mol_type = other RNA
  modified_base 1: mod_base = OTHER; note = 2'-O-methylcytidine-3'-phosphorothioate
  modified_base 2: mod_base = OTHER; note = 2'-O-methyladenosine-3'-phosphorothioate
  modified_base 3: mod_base = OTHER; note = 2'-O-methylguanosine-3'-phosphate
  modified_base 4: mod_base = OTHER; note = 2'-O-methylcytidine-3'-phosphate
  modified_base 5: mod_base = OTHER; note = 2'-O-methyluridine-3'-phosphate
  modified_base 6: mod_base = OTHER; note = 2'-O-docosanyl-uridine-3'-phosphate
  modified_base 7: mod_base = OTHER; note = 2'-deoxy-2'-fluoroguanosine-3'-phosphate
  modified_base 8: mod_base = OTHER; note = 2'-O-methyladenosine-3'-phosphate
  modified_base 9: mod_base = OTHER; note = 2'-deoxy-2'-fluoroadenosine-3'-phosphate
  modified_base 10: mod_base = OTHER; note = 2'-deoxy-2'-fluorocytidine-3'-phosphate
  modified_base 11: mod_base = OTHER; note = 2'-deoxy-2'-fluorouridine-3'-phosphate
  modified_base 12: mod_base = OTHER; note = 2'-O-methyluridine-3'-phosphate
  modified_base 13: mod_base = OTHER; note = 2'-O-methylguanosine-3'-phosphate
  modified_base 14: mod_base = OTHER; note = 2'-O-methyladenosine-3'-phosphate
  modified_base 15: mod_base = OTHER; note = 2'-O-methylguanosine-3'-phosphate
  modified_base 16: mod_base = OTHER; note = 2'-O-methylcytidine-3'-phosphate
  modified_base 17: mod_base = OTHER; note = 2'-O-methyladenosine-3'-phosphate
  modified_base 18: mod_base = OTHER; note = 2'-O-methyluridine-3'-phosphate
  modified_base 19: mod_base = OTHER; note = 2'-O-methyladenosine-3'-phosphate
  modified_base 20: mod_base = OTHER; note = 2'-O-methylcytidine-3'-phosphate
  modified_base 21: mod_base = OTHER; note = 2'-O-methyluridine-3'-phosphate ((2S,4R)-1-[29-[[2-(acetylamino)-2-deoxy-beta-D-galactopyra nosyl]oxy]-14,14-bis[[3-[[3-[[5-[[2-(acetylamino)-2-deoxy-b eta-D-galactopyranosyl]oxy]-1-oxopentyl]amino]propyl]amino] -3-oxopropoxy]methyl]-1,12,19,25-tetraoxo-16-oxa-13,20,24-t riazanonacos-1-yl]-4-hydroxy-2-pyrrolidinyl)methyl ester
cagcttgaacttgagcatact

SEQ ID NO: 4870 - RNA, 21 nt, synthetic construct
  source 1..21: mol_type = other RNA
  modified_base 1: mod_base = OTHER; note = 2'-O-methyluridine-3'-phosphorothioate
  modified_base 2: mod_base = OTHER; note = 2'-O-methylcytidine-3'-phosphorothioate
  modified_base 3: mod_base = OTHER; note = 2'-O-methyladenosine-3'-phosphate
  modified_base 4: mod_base = OTHER; note = 2'-O-methylcytidine-3'-phosphate
  modified_base 5: mod_base = OTHER; note = 2'-O-methylcytidine-3'-phosphate
  modified_base 6: mod_base = OTHER; note = 2'-O-docosanyl-cytidine-3'-phosphate
  modified_base 7: mod_base = OTHER; note = 2'-deoxy-2'-fluoroadenosine-3'-phosphate
  modified_base 8: mod_base = OTHER; note = 2'-O-methyladenosine-3'-phosphate
  modified_base 9: mod_base = OTHER; note = 2'-deoxy-2'-fluoroadenosine-3'-phosphate
  modified_base 10: mod_base = OTHER; note = 2'-deoxy-2'-fluorouridine-3'-phosphate
  modified_base 11: mod_base = OTHER; note = 2'-deoxy-2'-fluorouridine-3'-phosphate
  modified_base 12: mod_base = OTHER; note = 2'-O-methyluridine-3'-phosphate
  modified_base 13: mod_base = OTHER; note = 2'-O-methyluridine-3'-phosphate
  modified_base 14: mod_base = OTHER; note = 2'-O-methylguanosine-3'-phosphate
  modified_base 15: mod_base = OTHER; note = 2'-O-methyladenosine-3'-phosphate
  modified_base 16: mod_base = OTHER; note = 2'-O-methyladenosine-3'-phosphate
  modified_base 17: mod_base = OTHER; note = 2'-O-methyluridine-3'-phosphate
  modified_base 18: mod_base = OTHER; note = 2'-O-methyluridine-3'-phosphate
  modified_base 19: mod_base = OTHER; note = 2'-O-methyluridine-3'-phosphate
  modified_base 20: mod_base = OTHER; note = 2'-O-methyluridine-3'-phosphate
  modified_base 21: mod_base = OTHER; note = 2'-O-methyluridine-3'-phosphate ((2S,4R)-1-[29-[[2-(acetylamino)-2-deoxy-beta-D-galactopyra nosyl]oxy]-14,14-bis[[3-[[3-[[5-[[2-(acetylamino)-2-deoxy-b eta-D-galactopyranosyl]oxy]-1-oxopentyl]amino]propyl]amino] -3-oxopropoxy]methyl]-1,12,19,25-tetraoxo-16-oxa-13,20,24-t riazanonacos-1-yl]-4-hydroxy-2-pyrrolidinyl)methyl ester
tcacccaaattttgaattttt

SEQ ID NO: 4871 - RNA, 21 nt, synthetic construct
  source 1..21: mol_type = other RNA
  modified_base 1: mod_base = OTHER; note = 2'-O-methylguanosine-3'-phosphorothioate
  modified_base 2: mod_base = OTHER; note = 2'-O-methylcytidine-3'-phosphorothioate
  modified_base 3: mod_base = OTHER; note = 2'-O-methyladenosine-3'-phosphate
  modified_base 4: mod_base = OTHER; note = 2'-O-methylguanosine-3'-phosphate
  modified_base 5: mod_base = OTHER; note = 2'-O-methyluridine-3'-phosphate
  modified_base 6: mod_base = OTHER; note = 2'-O-docosanyl-adenosine-3'-phosphate
  modified_base 7: mod_base = OTHER; note = 2'-deoxy-2'-fluorouridine-3'-phosphate
  modified_base 8: mod_base = OTHER; note = 2'-O-methyladenosine-3'-phosphate
  modified_base 9: mod_base = OTHER; note = 2'-deoxy-2'-fluoroadenosine-3'-phosphate
  modified_base 10: mod_base = OTHER; note = 2'-deoxy-2'-fluorocytidine-3'-phosphate
  modified_base 11: mod_base = OTHER; note = 2'-deoxy-2'-fluorouridine-3'-phosphate
  modified_base 12: mod_base = OTHER; note = 2'-O-methyladenosine-3'-phosphate
  modified_base 13: mod_base = OTHER; note = 2'-O-methyluridine-3'-phosphate
  modified_base 14: mod_base = OTHER; note = 2'-O-methyluridine-3'-phosphate
  modified_base 15: mod_base = OTHER; note = 2'-O-methylcytidine-3'-phosphate
  modified_base 16: mod_base = OTHER; note = 2'-O-methyluridine-3'-phosphate
  modified_base 17: mod_base = OTHER; note = 2'-O-methylguanosine-3'-phosphate
  modified_base 18: mod_base = OTHER; note = 2'-O-methyladenosine-3'-phosphate
  modified_base 19: mod_base = OTHER; note = 2'-O-methyluridine-3'-phosphate
  modified_base 20: mod_base = OTHER; note = 2'-O-methylcytidine-3'-phosphate
  modified_base 21: mod_base = OTHER; note = 2'-O-methyluridine-3'-phosphate ((2S,4R)-1-[29-[[2-(acetylamino)-2-deoxy-beta-D-galactopyra nosyl]oxy]-14,14-bis[[3-[[3-[[5-[[2-(acetylamino)-2-deoxy-b eta-D-galactopyranosyl]oxy]-1-oxopentyl]amino]propyl]amino] -3-oxopropoxy]methyl]-1,12,19,25-tetraoxo-16-oxa-13,20,24-t riazanonacos-1-yl]-4-hydroxy-2-pyrrolidinyl)methyl ester
gcagtataactattctgatct

SEQ ID NO: 4872 - RNA, 21 nt, synthetic construct
  source 1..21: mol_type = other RNA
  modified_base 1: mod_base = OTHER; note = 2'-O-methylguanosine-3'-phosphorothioate
  modified_base 2: mod_base = OTHER; note = 2'-O-methylguanosine-3'-phosphorothioate
  modified_base 3: mod_base = OTHER; note = 2'-O-methyluridine-3'-phosphate
  modified_base 4: mod_base = OTHER; note = 2'-O-methyluridine-3'-phosphate
  modified_base 5: mod_base = OTHER; note = 2'-O-methyluridine-3'-phosphate
  modified_base 6: mod_base = OTHER; note = 2'-O-docosanyl-uridine-3'-phosphate
  modified_base 7: mod_base = OTHER; note = 2'-deoxy-2'-fluorocytidine-3'-phosphate
  modified_base 8: mod_base = OTHER; note = 2'-O-methyluridine-3'-phosphate
  modified_base 9: mod_base = OTHER; note = 2'-deoxy-2'-fluorouridine-3'-phosphate
  modified_base 10: mod_base = OTHER; note = 2'-deoxy-2'-fluorouridine-3'-phosphate
  modified_base 11: mod_base = OTHER; note = 2'-deoxy-2'-fluoroguanosine-3'-phosphate
  modified_base 12: mod_base = OTHER; note = 2'-O-methyluridine-3'-phosphate
  modified_base 13: mod_base = OTHER; note = 2'-O-methylguanosine-3'-phosphate
  modified_base 14: mod_base = OTHER; note = 2'-O-methylcytidine-3'-phosphate
  modified_base 15: mod_base = OTHER; note = 2'-O-methyluridine-3'-phosphate
  modified_base 16: mod_base = OTHER; note = 2'-O-methyluridine-3'-phosphate
  modified_base 17: mod_base = OTHER; note = 2'-O-methylcytidine-3'-phosphate
  modified_base 18: mod_base = OTHER; note = 2'-O-methyluridine-3'-phosphate
  modified_base 19: mod_base = OTHER; note = 2'-O-methylcytidine-3'-phosphate
  modified_base 20: mod_base = OTHER; note = 2'-O-methyladenosine-3'-phosphate
  modified_base 21: mod_base = OTHER; note = 2'-O-methyluridine-3'-phosphate ((2S,4R)-1-[29-[[2-(acetylamino)-2-deoxy-beta-D-galactopyra nosyl]oxy]-14,14-bis[[3-[[3-[[5-[[2-(acetylamino)-2-deoxy-b eta-D-galactopyranosyl]oxy]-1-oxopentyl]amino]propyl]amino] -3-oxopropoxy]methyl]-1,12,19,25-tetraoxo-16-oxa-13,20,24-t riazanonacos-1-yl]-4-hydroxy-2-pyrrolidinyl)methyl ester
ggttttctttgtgcttctcat

SEQ ID NO: 4873 - RNA, 21 nt, synthetic construct
  source 1..21: mol_type = other RNA
  modified_base 1: mod_base = OTHER; note = 2'-O-methyladenosine-3'-phosphorothioate
  modified_base 2: mod_base = OTHER; note = 2'-O-methyluridine-3'-phosphorothioate
  modified_base 3: mod_base = OTHER; note = 2'-O-methylguanosine-3'-phosphate
  modified_base 4: mod_base = OTHER; note = 2'-O-methyladenosine-3'-phosphate
  modified_base 5: mod_base = OTHER; note = 2'-O-methylguanosine-3'-phosphate
  modified_base 6: mod_base = OTHER; note = 2'-O-docosanyl-adenosine-3'-phosphate
  modified_base 7: mod_base = OTHER; note = 2'-deoxy-2'-fluoroadenosine-3'-phosphate
  modified_base 8: mod_base = OTHER; note = 2'-O-methyluridine-3'-phosphate
  modified_base 9: mod_base = OTHER; note = 2'-deoxy-2'-fluoroadenosine-3'-phosphate
  modified_base 10: mod_base = OTHER; note = 2'-deoxy-2'-fluoroadenosine-3'-phosphate
  modified_base 11: mod_base = OTHER; note = 2'-deoxy-2'-fluoroadenosine-3'-phosphate
  modified_base 12: mod_base = OTHER; note = 2'-O-methylcytidine-3'-phosphate
  modified_base 13: mod_base = OTHER; note = 2'-O-methyladenosine-3'-phosphate
  modified_base 14: mod_base = OTHER; note = 2'-O-methyluridine-3'-phosphate
  modified_base 15: mod_base = OTHER; note = 2'-O-methyladenosine-3'-phosphate
  modified_base 16: mod_base = OTHER; note = 2'-O-methylcytidine-3'-phosphate
  modified_base 17: mod_base = OTHER; note = 2'-O-methylcytidine-3'-phosphate
  modified_base 18: mod_base = OTHER; note = 2'-O-methyladenosine-3'-phosphate
  modified_base 19: mod_base = OTHER; note = 2'-O-methyladenosine-3'-phosphate
  modified_base 20: mod_base = OTHER; note = 2'-O-methylcytidine-3'-phosphate
  modified_base 21: mod_base = OTHER; note = 2'-O-methyluridine-3'-phosphate ((2S,4R)-1-[29-[[2-(acetylamino)-2-deoxy-beta-D-galactopyra nosyl]oxy]-14,14-bis[[3-[[3-[[5-[[2-(acetylamino)-2-deoxy-b eta-D-galactopyranosyl]oxy]-1-oxopentyl]amino]propyl]amino] -3-oxopropoxy]methyl]-1,12,19,25-tetraoxo-16-oxa-13,20,24-t riazanonacos-1-yl]-4-hydroxy-2-pyrrolidinyl)methyl ester
atgagaataaacataccaact

SEQ ID NO: 4874 - RNA, 21 nt, synthetic construct
  source 1..21: mol_type = other RNA
  modified_base 1: mod_base = OTHER; note = 2'-O-methylguanosine-3'-phosphorothioate
  modified_base 2: mod_base = OTHER; note = 2'-O-methyladenosine-3'-phosphorothioate
  modified_base 3: mod_base = OTHER; note = 2'-O-methylguanosine-3'-phosphate
  modified_base 4: mod_base = OTHER; note = 2'-O-methyluridine-3'-phosphate
  modified_base 5: mod_base = OTHER; note = 2'-O-methylguanosine-3'-phosphate
  modified_base 6: mod_base = OTHER; note = 2'-O-docosanyl-adenosine-3'-phosphate
  modified_base 7: mod_base = OTHER; note = 2'-deoxy-2'-fluorouridine-3'-phosphate
  modified_base 8: mod_base = OTHER; note = 2'-O-methyluridine-3'-phosphate
  modified_base 9: mod_base = OTHER; note = 2'-deoxy-2'-fluorouridine-3'-phosphate
  modified_base 10: mod_base = OTHER; note = 2'-deoxy-2'-fluorocytidine-3'-phosphate
  modified_base 11: mod_base = OTHER; note = 2'-deoxy-2'-fluoroadenosine-3'-phosphate
  modified_base 12: mod_base = OTHER; note = 2'-O-methyluridine-3'-phosphate
  modified_base 13: mod_base = OTHER; note = 2'-O-methyluridine-3'-phosphate
  modified_base 14: mod_base = OTHER; note = 2'-O-methylguanosine-3'-phosphate
  modified_base 15: mod_base = OTHER; note = 2'-O-methyladenosine-3'-phosphate
  modified_base 16: mod_base = OTHER; note = 2'-O-methyladenosine-3'-phosphate
  modified_base 17: mod_base = OTHER; note = 2'-O-methyluridine-3'-phosphate
  modified_base 18: mod_base = OTHER; note = 2'-O-methyladenosine-3'-phosphate
  modified_base 19: mod_base = OTHER; note = 2'-O-methyladenosine-3'-phosphate
  modified_base 20: mod_base = OTHER; note = 2'-O-methyladenosine-3'-phosphate
  modified_base 21: mod_base = OTHER; note = 2'-O-methyluridine-3'-phosphate ((2S,4R)-1-[29-[[2-(acetylamino)-2-deoxy-beta-D-galactopyra nosyl]oxy]-14,14-bis[[3-[[3-[[5-[[2-(acetylamino)-2-deoxy-b eta-D-galactopyranosyl]oxy]-1-oxopentyl]amino]propyl]amino] -3-oxopropoxy]methyl]-1,12,19,25-tetraoxo-16-oxa-13,20,24-t riazanonacos-1-yl]-4-hydroxy-2-pyrrolidinyl)methyl ester
gagtgatttcattgaataaat

SEQ ID NO: 4875 - RNA, 21 nt, synthetic construct
  source 1..21: mol_type = other RNA
  modified_base 1: mod_base = OTHER; note = 2'-O-methylguanosine-3'-phosphorothioate
  modified_base 2: mod_base = OTHER; note = 2'-O-methyluridine-3'-phosphorothioate
  modified_base 3: mod_base = OTHER; note = 2'-O-methyluridine-3'-phosphate
  modified_base 4: mod_base = OTHER; note = 2'-O-methyluridine-3'-phosphate
  modified_base 5: mod_base = OTHER; note = 2'-O-methylcytidine-3'-phosphate
  modified_base 6: mod_base = OTHER; note = 2'-O-docosanyl-cytidine-3'-phosphate
  modified_base 7: mod_base = OTHER; note = 2'-deoxy-2'-fluoroadenosine-3'-phosphate
  modified_base 8: mod_base = OTHER; note = 2'-O-methyluridine-3'-phosphate
  modified_base 9: mod_base = OTHER; note = 2'-deoxy-2'-fluoroadenosine-3'-phosphate
  modified_base 10: mod_base = OTHER; note = 2'-deoxy-2'-fluorouridine-3'-phosphate
  modified_base 11: mod_base = OTHER; note = 2'-deoxy-2'-fluorouridine-3'-phosphate
  modified_base 12: mod_base = OTHER; note = 2'-O-methyluridine-3'-phosphate
  modified_base 13: mod_base = OTHER; note = 2'-O-methylguanosine-3'-phosphate
  modified_base 14: mod_base = OTHER; note = 2'-O-methyluridine-3'-phosphate
  modified_base 15: mod_base = OTHER; note = 2'-O-methyladenosine-3'-phosphate
  modified_base 16: mod_base = OTHER; note = 2'-O-methyladenosine-3'-phosphate
  modified_base 17: mod_base = OTHER; note = 2'-O-methyladenosine-3'-phosphate
  modified_base 18: mod_base = OTHER; note = 2'-O-methyladenosine-3'-phosphate
  modified_base 19: mod_base = OTHER; note = 2'-O-methyluridine-3'-phosphate
  modified_base 20: mod_base = OTHER; note = 2'-O-methylguanosine-3'-phosphate
  modified_base 21: mod_base = OTHER; note = 2'-O-methyluridine-3'-phosphate ((2S,4R)-1-[29-[[2-(acetylamino)-2-deoxy-beta-D-galactopyra nosyl]oxy]-14,14-bis[[3-[[3-[[5-[[2-(acetylamino)-2-deoxy-b eta-D-galactopyranosyl]oxy]-1-oxopentyl]amino]propyl]amino] -3-oxopropoxy]methyl]-1,12,19,25-tetraoxo-16-oxa-13,20,24-t riazanonacos-1-yl]-4-hydroxy-2-pyrrolidinyl)methyl ester
gtttccatatttgtaaaatgt

SEQ ID NO: 4876 - RNA, 21 nt, synthetic construct
  source 1..21: mol_type = other RNA
  modified_base 1: mod_base = OTHER; note = 2'-O-methylcytidine-3'-phosphorothioate
  modified_base 2: mod_base = OTHER; note = 2'-O-methyladenosine-3'-phosphorothioate
  modified_base 3: mod_base = OTHER; note = 2'-O-methyluridine-3'-phosphate
  modified_base 4: mod_base = OTHER; note = 2'-O-methylguanosine-3'-phosphate
  modified_base 5: mod_base = OTHER; note = 2'-O-methylcytidine-3'-phosphate
  modified_base 6: mod_base = OTHER; note = 2'-O-docosanyl-uridine-3'-phosphate
  modified_base 7: mod_base = OTHER; note = 2'-deoxy-2'-fluoroguanosine-3'-phosphate
  modified_base 8: mod_base = OTHER; note = 2'-O-methyluridine-3'-phosphate
  modified_base 9: mod_base = OTHER; note = 2'-deoxy-2'-fluorouridine-3'-phosphate
  modified_base 10: mod_base = OTHER; note = 2'-deoxy-2'-fluorouridine-3'-phosphate
  modified_base 11: mod_base = OTHER; note = 2'-deoxy-2'-fluorouridine-3'-phosphate
  modified_base 12: mod_base = OTHER; note = 2'-O-methyluridine-3'-phosphate
  modified_base 13: mod_base = OTHER; note = 2'-O-methylguanosine-3'-phosphate
  modified_base 14: mod_base = OTHER; note = 2'-O-methylguanosine-3'-phosphate
  modified_base 15: mod_base = OTHER; note = 2'-O-methyluridine-3'-phosphate
  modified_base 16: mod_base = OTHER; note = 2'-O-methylcytidine-3'-phosphate
  modified_base 17: mod_base = OTHER; note = 2'-O-methyladenosine-3'-phosphate
  modified_base 18: mod_base = OTHER; note = 2'-O-methyladenosine-3'-phosphate
  modified_base 19: mod_base = OTHER; note = 2'-O-methyladenosine-3'-phosphate
  modified_base 20: mod_base = OTHER; note = 2'-O-methylcytidine-3'-phosphate
  modified_base 21: mod_base = OTHER; note = 2'-O-methyluridine-3'-phosphate ((2S,4R)-1-[29-[[2-(acetylamino)-2-deoxy-beta-D-galactopyra nosyl]oxy]-14,14-bis[[3-[[3-[[5-[[2-(acetylamino)-2-deoxy-b eta-D-galactopyranosyl]oxy]-1-oxopentyl]amino]propyl]amino] -3-oxopropoxy]methyl]-1,12,19,25-tetraoxo-16-oxa-13,20,24-t riazanonacos-1-yl]-4-hydroxy-2-pyrrolidinyl)methyl ester
catgctgtttttggtcaaact

SEQ ID NO: 4877 - RNA, 21 nt, synthetic construct
  source 1..21: mol_type = other RNA
  modified_base 1: mod_base = OTHER; note = 2'-O-methylcytidine-3'-phosphorothioate
  modified_base 2: mod_base = OTHER; note = 2'-O-methyluridine-3'-phosphorothioate
  modified_base 3: mod_base = OTHER; note = 2'-O-methylcytidine-3'-phosphate
  modified_base 4: mod_base = OTHER; note = 2'-O-methyluridine-3'-phosphate
  modified_base 5: mod_base = OTHER; note = 2'-O-methyladenosine-3'-phosphate
  modified_base 6: mod_base = OTHER; note = 2'-O-docosanyl-cytidine-3'-phosphate
  modified_base 7: mod_base = OTHER; note = 2'-deoxy-2'-fluorouridine-3'-phosphate
  modified_base 8: mod_base = OTHER; note = 2'-O-methylguanosine-3'-phosphate
  modified_base 9: mod_base = OTHER; note = 2'-deoxy-2'-fluorocytidine-3'-phosphate
  modified_base 10: mod_base = OTHER; note = 2'-deoxy-2'-fluoroadenosine-3'-phosphate
  modified_base 11: mod_base = OTHER; note = 2'-deoxy-2'-fluoroguanosine-3'-phosphate
  modified_base 12: mod_base = OTHER; note = 2'-O-methyluridine-3'-phosphate
  modified_base 13: mod_base = OTHER; note = 2'-O-methyladenosine-3'-phosphate
  modified_base 14: mod_base = OTHER; note = 2'-O-methyluridine-3'-phosphate
  modified_base 15: mod_base = OTHER; note = 2'-O-methyladenosine-3'-phosphate
  modified_base 16: mod_base = OTHER; note = 2'-O-methyladenosine-3'-phosphate
  modified_base 17: mod_base = OTHER; note = 2'-O-methyluridine-3'-phosphate
  modified_base 18: mod_base = OTHER; note = 2'-O-methylguanosine-3'-phosphate
  modified_base 19: mod_base = OTHER; note = 2'-O-methyluridine-3'-phosphate
  modified_base 20: mod_base = OTHER; note = 2'-O-methylcytidine-3'-phosphate
  modified_base 21: mod_base = OTHER; note = 2'-O-methyluridine-3'-phosphate ((2S,4R)-1-[29-[[2-(acetylamino)-2-deoxy-beta-D-galactopyra nosyl]oxy]-14,14-bis[[3-[[3-[[5-[[2-(acetylamino)-2-deoxy-b eta-D-galactopyranosyl]oxy]-1-oxopentyl]amino]propyl]amino] -3-oxopropoxy]methyl]-1,12,19,25-tetraoxo-16-oxa-13,20,24-t riazanonacos-1-yl]-4-hydroxy-2-pyrrolidinyl)methyl ester
ctctactgcagtataatgtct

SEQ ID NO: 4878 - RNA, 21 nt, synthetic construct
  source 1..21: mol_type = other RNA
  modified_base 1: mod_base = OTHER; note = 2'-O-methyluridine-3'-phosphorothioate
  modified_base 2: mod_base = OTHER; note = 2'-O-methyluridine-3'-phosphorothioate
  modified_base 3: mod_base = OTHER; note = 2'-O-methylguanosine-3'-phosphate
  modified_base 4: mod_base = OTHER; note = 2'-O-methylguanosine-3'-phosphate
  modified_base 5: mod_base = OTHER; note = 2'-O-methyluridine-3'-phosphate
  modified_base 6: mod_base = OTHER; note = 2'-O-docosanyl-guanosine-3'-phosphate
  modified_base 7: mod_base = OTHER; note = 2'-deoxy-2'-fluorouridine-3'-phosphate
  modified_base 8: mod_base = OTHER; note = 2'-O-methyluridine-3'-phosphate
  modified_base 9: mod_base = OTHER; note = 2'-deoxy-2'-fluorouridine-3'-phosphate
  modified_base 10: mod_base = OTHER; note = 2'-deoxy-2'-fluoroguanosine-3'-phosphate
  modified_base 11: mod_base = OTHER; note = 2'-deoxy-2'-fluoroadenosine-3'-phosphate
  modified_base 12: mod_base = OTHER; note = 2'-O-methyluridine-3'-phosphate
  modified_base 13: mod_base = OTHER; note = 2'-O-methyluridine-3'-phosphate
  modified_base 14: mod_base = OTHER; note = 2'-O-methyluridine-3'-phosphate
  modified_base 15: mod_base = OTHER; note = 2'-O-methyladenosine-3'-phosphate
  modified_base 16: mod_base = OTHER; note = 2'-O-methylguanosine-3'-phosphate
  modified_base 17: mod_base = OTHER; note = 2'-O-methyluridine-3'-phosphate
  modified_base 18: mod_base = OTHER; note = 2'-O-methyluridine-3'-phosphate
  modified_base 19: mod_base = OTHER; note = 2'-O-methyladenosine-3'-phosphate
  modified_base 20: mod_base = OTHER; note = 2'-O-methylcytidine-3'-phosphate
  modified_base 21: mod_base = OTHER; note = 2'-O-methyluridine-3'-phosphate ((2S,4R)-1-[29-[[2-(acetylamino)-2-deoxy-beta-D-galactopyra nosyl]oxy]-14,14-bis[[3-[[3-[[5-[[2-(acetylamino)-2-deoxy-b eta-D-galactopyranosyl]oxy]-1-oxopentyl]amino]propyl]amino] -3-oxopropoxy]methyl]-1,12,19,25-tetraoxo-16-oxa-13,20,24-t riazanonacos-1-yl]-4-hydroxy-2-pyrrolidinyl)methyl ester
ttggtgtttgatttagttact

SEQ ID NO: 4879 - RNA, 21 nt, synthetic construct
  source 1..21: mol_type = other RNA
  modified_base 1: mod_base = OTHER; note = 2'-O-methyluridine-3'-phosphorothioate
  modified_base 2: mod_base = OTHER; note = 2'-O-methylcytidine-3'-phosphorothioate
  modified_base 3: mod_base = OTHER; note = 2'-O-methyluridine-3'-phosphate
  modified_base 4: mod_base = OTHER; note = 2'-O-methyluridine-3'-phosphate
  modified_base 5: mod_base = OTHER; note = 2'-O-methyluridine-3'-phosphate
  modified_base 6: mod_base = OTHER; note = 2'-O-docosanyl-cytidine-3'-phosphate
  modified_base 7: mod_base = OTHER; note = 2'-deoxy-2'-fluorouridine-3'-phosphate
  modified_base 8: mod_base = OTHER; note = 2'-O-methylcytidine-3'-phosphate
  modified_base 9: mod_base = OTHER; note = 2'-deoxy-2'-fluorocytidine-3'-phosphate
  modified_base 10: mod_base = OTHER; note = 2'-deoxy-2'-fluoroadenosine-3'-phosphate
  modified_base 11: mod_base = OTHER; note = 2'-deoxy-2'-fluoroguanosine-3'-phosphate
  modified_base 12: mod_base = OTHER; note = 2'-O-methyladenosine-3'-phosphate
  modified_base 13: mod_base = OTHER; note = 2'-O-methyladenosine-3'-phosphate
  modified_base 14: mod_base = OTHER; note = 2'-O-methylguanosine-3'-phosphate
  modified_base 15: mod_base = OTHER; note = 2'-O-methyluridine-3'-phosphate
  modified_base 16: mod_base = OTHER; note = 2'-O-methyluridine-3'-phosphate
  modified_base 17: mod_base = OTHER; note = 2'-O-methyluridine-3'-phosphate
  modified_base 18: mod_base = OTHER; note = 2'-O-methyluridine-3'-phosphate
  modified_base 19: mod_base = OTHER; note = 2'-O-methyladenosine-3'-phosphate
  modified_base 20: mod_base = OTHER; note = 2'-O-methylcytidine-3'-phosphate
  modified_base 21: mod_base = OTHER; note = 2'-O-methyluridine-3'-phosphate ((2S,4R)-1-[29-[[2-(acetylamino)-2-deoxy-beta-D-galactopyra nosyl]oxy]-14,14-bis[[3-[[3-[[5-[[2-(acetylamino)-2-deoxy-b eta-D-galactopyranosyl]oxy]-1-oxopentyl]amino]propyl]amino] -3-oxopropoxy]methyl]-1,12,19,25-tetraoxo-16-oxa-13,20,24-t riazanonacos-1-yl]-4-hydroxy-2-pyrrolidinyl)methyl ester
tctttctccagaagttttact

SEQ ID NO: 4880 - RNA, 21 nt, synthetic construct
  source 1..21: mol_type = other RNA
  modified_base 1: mod_base = OTHER; note = 2'-O-methyladenosine-3'-phosphorothioate
  modified_base 2: mod_base = OTHER; note = 2'-O-methylguanosine-3'-phosphorothioate
  modified_base 3: mod_base = OTHER; note = 2'-O-methyladenosine-3'-phosphate
  modified_base 4: mod_base = OTHER; note = 2'-O-methylguanosine-3'-phosphate
  modified_base 5: mod_base = OTHER; note = 2'-O-methyluridine-3'-phosphate
  modified_base 6: mod_base = OTHER; note = 2'-O-docosanyl-uridine-3'-phosphate
  modified_base 7: mod_base = OTHER; note = 2'-deoxy-2'-fluorocytidine-3'-phosphate
  modified_base 8: mod_base = OTHER; note = 2'-O-methyladenosine-3'-phosphate
  modified_base 9: mod_base = OTHER; note = 2'-deoxy-2'-fluoroadenosine-3'-phosphate
  modified_base 10: mod_base = OTHER; note = 2'-deoxy-2'-fluoroadenosine-3'-phosphate
  modified_base 11: mod_base = OTHER; note = 2'-deoxy-2'-fluorouridine-3'-phosphate
  modified_base 12: mod_base = OTHER; note = 2'-O-methyladenosine-3'-phosphate
  modified_base 13: mod_base = OTHER; note = 2'-O-methylcytidine-3'-phosphate
  modified_base 14: mod_base = OTHER; note = 2'-O-methyladenosine-3'-phosphate
  modified_base 15: mod_base = OTHER; note = 2'-O-methyladenosine-3'-phosphate
  modified_base 16: mod_base = OTHER; note = 2'-O-methylcytidine-3'-phosphate
  modified_base 17: mod_base = OTHER; note = 2'-O-methyladenosine-3'-phosphate
  modified_base 18: mod_base = OTHER; note = 2'-O-methyladenosine-3'-phosphate
  modified_base 19: mod_base = OTHER; note = 2'-O-methyluridine-3'-phosphate
  modified_base 20: mod_base = OTHER; note = 2'-O-methyluridine-3'-phosphate
  modified_base 21: mod_base = OTHER; note = 2'-O-methyluridine-3'-phosphate ((2S,4R)-1-[29-[[2-(acetylamino)-2-deoxy-beta-D-galactopyra nosyl]oxy]-14,14-bis[[3-[[3-[[5-[[2-(acetylamino)-2-deoxy-b eta-D-galactopyranosyl]oxy]-1-oxopentyl]amino]propyl]amino] -3-oxopropoxy]methyl]-1,12,19,25-tetraoxo-16-oxa-13,20,24-t riazanonacos-1-yl]-4-hydroxy-2-pyrrolidinyl)methyl ester
agagttcaaatacaacaattt

SEQ ID NO: 4881 - RNA, 21 nt, synthetic construct
  source 1..21: mol_type = other RNA
  modified_base 1: mod_base = OTHER; note = 2'-O-methyluridine-3'-phosphorothioate
  modified_base 2: mod_base = OTHER; note = 2'-O-methylcytidine-3'-phosphorothioate
  modified_base 3: mod_base = OTHER; note = 2'-O-methyluridine-3'-phosphate
  modified_base 4: mod_base = OTHER; note = 2'-O-methylguanosine-3'-phosphate
  modified_base 5: mod_base = OTHER; note = 2'-O-methyluridine-3'-phosphate
  modified_base 6: mod_base = OTHER; note = 2'-O-docosanyl-guanosine-3'-phosphate
  modified_base 7: mod_base = OTHER; note = 2'-deoxy-2'-fluorouridine-3'-phosphate
  modified_base 8: mod_base = OTHER; note = 2'-O-methyluridine-3'-phosphate
  modified_base 9: mod_base = OTHER; note = 2'-deoxy-2'-fluoroguanosine-3'-phosphate
  modified_base 10: mod_base = OTHER; note = 2'-deoxy-2'-fluoroadenosine-3'-phosphate
  modified_base 11: mod_base = OTHER; note = 2'-deoxy-2'-fluorouridine-3'-phosphate
  modified_base 12: mod_base = OTHER; note = 2'-O-methyluridine-3'-phosphate
  modified_base 13: mod_base = OTHER; note = 2'-O-methyladenosine-3'-phosphate
  modified_base 14: mod_base = OTHER; note = 2'-O-methylcytidine-3'-phosphate
  modified_base 15: mod_base = OTHER; note = 2'-O-methyluridine-3'-phosphate
  modified_base 16: mod_base = OTHER; note = 2'-O-methyladenosine-3'-phosphate
  modified_base 17: mod_base = OTHER; note = 2'-O-methyladenosine-3'-phosphate
  modified_base 18: mod_base = OTHER; note = 2'-O-methyluridine-3'-phosphate
  modified_base 19: mod_base = OTHER; note = 2'-O-methylcytidine-3'-phosphate
  modified_base 20: mod_base = OTHER; note = 2'-O-methyladenosine-3'-phosphate
  modified_base 21: mod_base = OTHER; note = 2'-O-methyluridine-3'-phosphate ((2S,4R)-1-[29-[[2-(acetylamino)-2-deoxy-beta-D-galactopyra nosyl]oxy]-14,14-bis[[3-[[3-[[5-[[2-(acetylamino)-2-deoxy-b eta-D-galactopyranosyl]oxy]-1-oxopentyl]amino]propyl]amino] -3-oxopropoxy]methyl]-1,12,19,25-tetraoxo-16-oxa-13,20,24-t riazanonacos-1-yl]-4-hydroxy-2-pyrrolidinyl)methyl ester
tctgtgttgattactaatcat

SEQ ID NO: 4882 - RNA, 21 nt, synthetic construct
  source 1..21: mol_type = other RNA
  modified_base 1: mod_base = OTHER; note = 2'-O-methyluridine-3'-phosphorothioate
  modified_base 2: mod_base = OTHER; note = 2'-O-methylguanosine-3'-phosphorothioate
  modified_base 3: mod_base = OTHER; note = 2'-O-methylcytidine-3'-phosphate
  modified_base 4: mod_base = OTHER; note = 2'-O-methyluridine-3'-phosphate
  modified_base 5: mod_base = OTHER; note = 2'-O-methyluridine-3'-phosphate
  modified_base 6: mod_base = OTHER; note = 2'-O-docosanyl-uridine-3'-phosphate
  modified_base 7: mod_base = OTHER; note = 2'-deoxy-2'-fluorouridine-3'-phosphate
  modified_base 8: mod_base = OTHER; note = 2'-O-methyluridine-3'-phosphate
  modified_base 9: mod_base = OTHER; note = 2'-deoxy-2'-fluorouridine-3'-phosphate
  modified_base 10: mod_base = OTHER; note = 2'-deoxy-2'-fluoroadenosine-3'-phosphate
  modified_base 11: mod_base = OTHER; note = 2'-deoxy-2'-fluoroguanosine-3'-phosphate
  modified_base 12: mod_base = OTHER; note = 2'-O-methylcytidine-3'-phosphate
  modified_base 13: mod_base = OTHER; note = 2'-O-methyluridine-3'-phosphate
  modified_base 14: mod_base = OTHER; note = 2'-O-methyluridine-3'-phosphate
  modified_base 15: mod_base = OTHER; note = 2'-O-methylcytidine-3'-phosphate
  modified_base 16: mod_base = OTHER; note = 2'-O-methyluridine-3'-phosphate
  modified_base 17: mod_base = OTHER; note = 2'-O-methylcytidine-3'-phosphate
  modified_base 18: mod_base = OTHER; note = 2'-O-methyluridine-3'-phosphate
  modified_base 19: mod_base = OTHER; note = 2'-O-methylcytidine-3'-phosphate
  modified_base 20: mod_base = OTHER; note = 2'-O-methyluridine-3'-phosphate
  modified_base 21: mod_base = OTHER; note = 2'-O-methyluridine-3'-phosphate ((2S,4R)-1-[29-[[2-(acetylamino)-2-deoxy-beta-D-galactopyra nosyl]oxy]-14,14-bis[[3-[[3-[[5-[[2-(acetylamino)-2-deoxy-b eta-D-galactopyranosyl]oxy]-1-oxopentyl]amino]propyl]amino] -3-oxopropoxy]methyl]-1,12,19,25-tetraoxo-16-oxa-13,20,24-t riazanonacos-1-yl]-4-hydroxy-2-pyrrolidinyl)methyl ester
tgcttttttagcttctctctt

SEQ ID NO: 4883 - RNA, 21 nt, synthetic construct
  source 1..21: mol_type = other RNA
  modified_base 1: mod_base = OTHER; note = 2'-O-methylcytidine-3'-phosphorothioate
  modified_base 2: mod_base = OTHER; note = 2'-O-methyluridine-3'-phosphorothioate
  modified_base 3: mod_base = OTHER; note = 2'-O-methylguanosine-3'-phosphate
  modified_base 4: mod_base = OTHER; note = 2'-O-methyluridine-3'-phosphate
  modified_base 5: mod_base = OTHER; note = 2'-O-methylguanosine-3'-phosphate
  modified_base 6: mod_base = OTHER; note = 2'-O-docosanyl-adenosine-3'-phosphate
  modified_base 7: mod_base = OTHER; note = 2'-deoxy-2'-fluorocytidine-3'-phosphate
  modified_base 8: mod_base = OTHER; note = 2'-O-methyluridine-3'-phosphate
  modified_base 9: mod_base = OTHER; note = 2'-deoxy-2'-fluoroguanosine-3'-phosphate
  modified_base 10: mod_base = OTHER; note = 2'-deoxy-2'-fluorocytidine-3'-phosphate
  modified_base 11: mod_base = OTHER; note = 2'-deoxy-2'-fluoroadenosine-3'-phosphate
  modified_base 12: mod_base = OTHER; note = 2'-O-methyladenosine-3'-phosphate
  modified_base 13: mod_base = OTHER; note = 2'-O-methylcytidine-3'-phosphate
  modified_base 14: mod_base = OTHER; note = 2'-O-methylguanosine-3'-phosphate
  modified_base 15: mod_base = OTHER; note = 2'-O-methyluridine-3'-phosphate
  modified_base 16: mod_base = OTHER; note = 2'-O-methylcytidine-3'-phosphate
  modified_base 17: mod_base = OTHER; note = 2'-O-methyluridine-3'-phosphate
  modified_base 18: mod_base = OTHER; note = 2'-O-methyluridine-3'-phosphate
  modified_base 19: mod_base = OTHER; note = 2'-O-methyladenosine-3'-phosphate
  modified_base 20: mod_base = OTHER; note = 2'-O-methylcytidine-3'-phosphate
  modified_base 21: mod_base = OTHER; note = 2'-O-methyluridine-3'-phosphate ((2S,4R)-1-[29-[[2-(acetylamino)-2-deoxy-beta-D-galactopyra nosyl]oxy]-14,14-bis[[3-[[3-[[5-[[2-(acetylamino)-2-deoxy-b eta-D-galactopyranosyl]oxy]-1-oxopentyl]amino]propyl]amino] -3-oxopropoxy]methyl]-1,12,19,25-tetraoxo-16-oxa-13,20,24-t riazanonacos-1-yl]-4-hydroxy-2-pyrrolidinyl)methyl ester
ctgtgactgcaacgtcttact

SEQ ID NO: 4884 - RNA, 21 nt, synthetic construct
  source 1..21: mol_type = other RNA
  modified_base 1: mod_base = OTHER; note = 2'-O-methylcytidine-3'-phosphorothioate
  modified_base 2: mod_base = OTHER; note = 2'-O-methyladenosine-3'-phosphorothioate
  modified_base 3: mod_base = OTHER; note = 2'-O-methylcytidine-3'-phosphate
  modified_base 4: mod_base = OTHER; note = 2'-O-methyluridine-3'-phosphate
  modified_base 5: mod_base = OTHER; note = 2'-O-methyluridine-3'-phosphate
  modified_base 6: mod_base = OTHER; note = 2'-O-docosanyl-cytidine-3'-phosphate
  modified_base 7: mod_base = OTHER; note = 2'-deoxy-2'-fluorouridine-3'-phosphate
  modified_base 8: mod_base = OTHER; note = 2'-O-methylguanosine-3'-phosphate
  modified_base 9: mod_base = OTHER; note = 2'-deoxy-2'-fluorocytidine-3'-phosphate
  modified_base 10: mod_base = OTHER; note = 2'-deoxy-2'-fluoroadenosine-3'-phosphate
  modified_base 11: mod_base = OTHER; note = 2'-deoxy-2'-fluorouridine-3'-phosphate
  modified_base 12: mod_base = OTHER; note = 2'-O-methyluridine-3'-phosphate
  modified_base 13: mod_base = OTHER; note = 2'-O-methylcytidine-3'-phosphate
  modified_base 14: mod_base = OTHER; note = 2'-O-methyluridine-3'-phosphate
  modified_base 15: mod_base = OTHER; note = 2'-O-methylcytidine-3'-phosphate
  modified_base 16: mod_base = OTHER; note = 2'-O-methyluridine-3'-phosphate
  modified_base 17: mod_base = OTHER; note = 2'-O-methylguanosine-3'-phosphate
  modified_base 18: mod_base = OTHER; note = 2'-O-methyluridine-3'-phosphate
  modified_base 19: mod_base = OTHER; note = 2'-O-methyluridine-3'-phosphate
  modified_base 20: mod_base = OTHER; note = 2'-O-methylcytidine-3'-phosphate
  modified_base 21: mod_base = OTHER; note = 2'-O-methyluridine-3'-phosphate ((2S,4R)-1-[29-[[2-(acetylamino)-2-deoxy-beta-D-galactopyra nosyl]oxy]-14,14-bis[[3-[[3-[[5-[[2-(acetylamino)-2-deoxy-b eta-D-galactopyranosyl]oxy]-1-oxopentyl]amino]propyl]amino] -3-oxopropoxy]methyl]-1,12,19,25-tetraoxo-16-oxa-13,20,24-t riazanonacos-1-yl]-4-hydroxy-2-pyrrolidinyl)methyl ester
cacttctgcattctctgttct

SEQ ID NO: 4885 - RNA, 21 nt, synthetic construct
  source 1..21: mol_type = other RNA
  modified_base 1: mod_base = OTHER; note = 2'-O-methylcytidine-3'-phosphorothioate
  modified_base 2: mod_base = OTHER; note = 2'-O-methyluridine-3'-phosphorothioate
  modified_base 3: mod_base = OTHER; note = 2'-O-methylcytidine-3'-phosphate
  modified_base 4: mod_base = OTHER; note = 2'-O-methyladenosine-3'-phosphate
  modified_base 5: mod_base = OTHER; note = 2'-O-methyluridine-3'-phosphate
  modified_base 6: mod_base = OTHER; note = 2'-O-docosanyl-uridine-3'-phosphate
  modified_base 7: mod_base = OTHER; note = 2'-deoxy-2'-fluorouridine-3'-phosphate
  modified_base 8: mod_base = OTHER; note = 2'-O-methyluridine-3'-phosphate
  modified_base 9: mod_base = OTHER; note = 2'-deoxy-2'-fluorouridine-3'-phosphate
  modified_base 10: mod_base = OTHER; note = 2'-deoxy-2'-fluorocytidine-3'-phosphate
  modified_base 11: mod_base = OTHER; note = 2'-deoxy-2'-fluorocytidine-3'-phosphate
  modified_base 12: mod_base = OTHER; note = 2'-O-methyluridine-3'-phosphate
  modified_base 13: mod_base = OTHER; note = 2'-O-methyluridine-3'-phosphate
  modified_base 14: mod_base = OTHER; note = 2'-O-methyluridine-3'-phosphate
  modified_base 15: mod_base = OTHER; note = 2'-O-methylguanosine-3'-phosphate
  modified_base 16: mod_base = OTHER; note = 2'-O-methyluridine-3'-phosphate
  modified_base 17: mod_base = OTHER; note = 2'-O-methyluridine-3'-phosphate
  modified_base 18: mod_base = OTHER; note = 2'-O-methylguanosine-3'-phosphate
  modified_base 19: mod_base = OTHER; note = 2'-O-methyladenosine-3'-phosphate
  modified_base 20: mod_base = OTHER; note = 2'-O-methyluridine-3'-phosphate
  modified_base 21: mod_base = OTHER; note = 2'-O-methyluridine-3'-phosphate ((2S,4R)-1-[29-[[2-(acetylamino)-2-deoxy-beta-D-galactopyra nosyl]oxy]-14,14-bis[[3-[[3-[[5-[[2-(acetylamino)-2-deoxy-b eta-D-galactopyranosyl]oxy]-1-oxopentyl]amino]propyl]amino] -3-oxopropoxy]methyl]-1,12,19,25-tetraoxo-16-oxa-13,20,24-t riazanonacos-1-yl]-4-hydroxy-2-pyrrolidinyl)methyl ester
ctcatttttcctttgttgatt

SEQ ID NO: 4886 - RNA, 21 nt, synthetic construct
  source 1..21: mol_type = other RNA
  modified_base 1: mod_base = OTHER; note = 2'-O-methylcytidine-3'-phosphorothioate
  modified_base 2: mod_base = OTHER; note = 2'-O-methylcytidine-3'-phosphorothioate
  modified_base 3: mod_base = OTHER; note = 2'-O-methyluridine-3'-phosphate
  modified_base 4: mod_base = OTHER; note = 2'-O-methylcytidine-3'-phosphate
  modified_base 5: mod_base = OTHER; note = 2'-O-methyladenosine-3'-phosphate
  modified_base 6: mod_base = OTHER; note = 2'-O-docosanyl-guanosine-3'-phosphate
  modified_base 7: mod_base = OTHER; note = 2'-deoxy-2'-fluoroadenosine-3'-phosphate
  modified_base 8: mod_base = OTHER; note = 2'-O-methyladenosine-3'-phosphate
  modified_base 9: mod_base = OTHER; note = 2'-deoxy-2'-fluoroguanosine-3'-phosphate
  modified_base 10: mod_base = OTHER; note = 2'-deoxy-2'-fluorocytidine-3'-phosphate
  modified_base 11: mod_base = OTHER; note = 2'-deoxy-2'-fluorocytidine-3'-phosphate
  modified_base 12: mod_base = OTHER; note = 2'-O-methyluridine-3'-phosphate
  modified_base 13: mod_base = OTHER; note = 2'-O-methyladenosine-3'-phosphate
  modified_base 14: mod_base = OTHER; note = 2'-O-methyluridine-3'-phosphate
  modified_base 15: mod_base = OTHER; note = 2'-O-methyluridine-3'-phosphate
  modified_base 16: mod_base = OTHER; note = 2'-O-methyluridine-3'-phosphate
  modified_base 17: mod_base = OTHER; note = 2'-O-methyluridine-3'-phosphate
  modified_base 18: mod_base = OTHER; note = 2'-O-methyluridine-3'-phosphate
  modified_base 19: mod_base = OTHER; note = 2'-O-methyladenosine-3'-phosphate
  modified_base 20: mod_base = OTHER; note = 2'-O-methyladenosine-3'-phosphate
  modified_base 21: mod_base = OTHER; note = 2'-O-methyluridine-3'-phosphate ((2S,4R)-1-[29-[[2-(acetylamino)-2-deoxy-beta-D-galactopyra nosyl]oxy]-14,14-bis[[3-[[3-[[5-[[2-(acetylamino)-2-deoxy-b eta-D-galactopyranosyl]oxy]-1-oxopentyl]amino]propyl]amino] -3-oxopropoxy]methyl]-1,12,19,25-tetraoxo-16-oxa-13,20,24-t riazanonacos-1-yl]-4-hydroxy-2-pyrrolidinyl)methyl ester
cctcagaagcctatttttaat

SEQ ID NO: 4887 - RNA, 21 nt, synthetic construct
  source 1..21: mol_type = other RNA
  modified_base 1: mod_base = OTHER; note = 2'-O-methyladenosine-3'-phosphorothioate
  modified_base 2: mod_base = OTHER; note = 2'-O-methyluridine-3'-phosphorothioate
  modified_base 3: mod_base = OTHER; note = 2'-O-methyladenosine-3'-phosphate
  modified_base 4: mod_base = OTHER; note = 2'-O-methylguanosine-3'-phosphate
  modified_base 5: mod_base = OTHER; note = 2'-O-methyluridine-3'-phosphate
  modified_base 6: mod_base = OTHER; note = 2'-O-docosanyl-adenosine-3'-phosphate
  modified_base 7: mod_base = OTHER; note = 2'-deoxy-2'-fluoroadenosine-3'-phosphate
  modified_base 8: mod_base = OTHER; note = 2'-O-methyluridine-3'-phosphate
  modified_base 9: mod_base = OTHER; note = 2'-deoxy-2'-fluorouridine-3'-phosphate
  modified_base 10: mod_base = OTHER; note = 2'-deoxy-2'-fluorocytidine-3'-phosphate
  modified_base 11: mod_base = OTHER; note = 2'-deoxy-2'-fluoroadenosine-3'-phosphate
  modified_base 12: mod_base = OTHER; note = 2'-O-methylcytidine-3'-phosphate
  modified_base 13: mod_base = OTHER; note = 2'-O-methyladenosine-3'-phosphate
  modified_base 14: mod_base = OTHER; note = 2'-O-methylguanosine-3'-phosphate
  modified_base 15: mod_base = OTHER; note = 2'-O-methyluridine-3'-phosphate
  modified_base 16: mod_base = OTHER; note = 2'-O-methylcytidine-3'-phosphate
  modified_base 17: mod_base = OTHER; note = 2'-O-methylcytidine-3'-phosphate
  modified_base 18: mod_base = OTHER; note = 2'-O-methyluridine-3'-phosphate
  modified_base 19: mod_base = OTHER; note = 2'-O-methylcytidine-3'-phosphate
  modified_base 20: mod_base = OTHER; note = 2'-O-methyladenosine-3'-phosphate
  modified_base 21: mod_base = OTHER; note = 2'-O-methyluridine-3'-phosphate ((2S,4R)-1-[29-[[2-(acetylamino)-2-deoxy-beta-D-galactopyra nosyl]oxy]-14,14-bis[[3-[[3-[[5-[[2-(acetylamino)-2-deoxy-b eta-D-galactopyranosyl]oxy]-1-oxopentyl]amino]propyl]amino] -3-oxopropoxy]methyl]-1,12,19,25-tetraoxo-16-oxa-13,20,24-t riazanonacos-1-yl]-4-hydroxy-2-pyrrolidinyl)methyl ester
atagtaattcacagtcctcat

SEQ ID NO: 4888 - RNA, 21 nt, synthetic construct
  source 1..21: mol_type = other RNA
  modified_base 1: mod_base = OTHER; note = 2'-O-methyluridine-3'-phosphorothioate
  modified_base 2: mod_base = OTHER; note = 2'-O-methyluridine-3'-phosphorothioate
  modified_base 3: mod_base = OTHER; note = 2'-O-methyluridine-3'-phosphate
  modified_base 4: mod_base = OTHER; note = 2'-O-methylcytidine-3'-phosphate
  modified_base 5: mod_base = OTHER; note = 2'-O-methyluridine-3'-phosphate
  modified_base 6: mod_base = OTHER; note = 2'-O-docosanyl-cytidine-3'-phosphate
  modified_base 7: mod_base = OTHER; note = 2'-deoxy-2'-fluoroadenosine-3'-phosphate
  modified_base 8: mod_base = OTHER; note = 2'-O-methyladenosine-3'-phosphate
  modified_base 9: mod_base = OTHER; note = 2'-deoxy-2'-fluoroadenosine-3'-phosphate
  modified_base 10: mod_base = OTHER; note = 2'-deoxy-2'-fluorouridine-3'-phosphate
  modified_base 11: mod_base = OTHER; note = 2'-deoxy-2'-fluorocytidine-3'-phosphate
  modified_base 12: mod_base = OTHER; note = 2'-O-methyluridine-3'-phosphate
  modified_base 13: mod_base = OTHER; note = 2'-O-methylguanosine-3'-phosphate
  modified_base 14: mod_base = OTHER; note = 2'-O-methyluridine-3'-phosphate
  modified_base 15: mod_base = OTHER; note = 2'-O-methylguanosine-3'-phosphate
  modified_base 16: mod_base = OTHER; note = 2'-O-methyladenosine-3'-phosphate
  modified_base 17: mod_base = OTHER; note = 2'-O-methyluridine-3'-phosphate
  modified_base 18: mod_base = OTHER; note = 2'-O-methylcytidine-3'-phosphate
  modified_base 19: mod_base = OTHER; note = 2'-O-methyluridine-3'-phosphate
  modified_base 20: mod_base = OTHER; note = 2'-O-methylcytidine-3'-phosphate
  modified_base 21: mod_base = OTHER; note = 2'-O-methyluridine-3'-phosphate ((2S,4R)-1-[29-[[2-(acetylamino)-2-deoxy-beta-D-galactopyra nosyl]oxy]-14,14-bis[[3-[[3-[[5-[[2-(acetylamino)-2-deoxy-b eta-D-galactopyranosyl]oxy]-1-oxopentyl]amino]propyl]amino] -3-oxopropoxy]methyl]-1,12,19,25-tetraoxo-16-oxa-13,20,24-t riazanonacos-1-yl]-4-hydroxy-2-pyrrolidinyl)methyl ester
tttctcaaatctgtgatctct

SEQ ID NO: 4889 - RNA, 21 nt, synthetic construct
  source 1..21: mol_type = other RNA
  modified_base 1: mod_base = OTHER; note = 2'-O-methylguanosine-3'-phosphorothioate
  modified_base 2: mod_base = OTHER; note = 2'-O-methylcytidine-3'-phosphorothioate
  modified_base 3: mod_base = OTHER; note = 2'-O-methyluridine-3'-phosphate
  modified_base 4: mod_base = OTHER; note = 2'-O-methylguanosine-3'-phosphate
  modified_base 5: mod_base = OTHER; note = 2'-O-methylcytidine-3'-phosphate
  modified_base 6: mod_base = OTHER; note = 2'-O-docosanyl-cytidine-3'-phosphate
  modified_base 7: mod_base = OTHER; note = 2'-deoxy-2'-fluoroadenosine-3'-phosphate
  modified_base 8: mod_base = OTHER; note = 2'-O-methyladenosine-3'-phosphate
  modified_base 9: mod_base = OTHER; note = 2'-deoxy-2'-fluoroadenosine-3'-phosphate
  modified_base 10: mod_base = OTHER; note = 2'-deoxy-2'-fluoroadenosine-3'-phosphate
  modified_base 11: mod_base = OTHER; note = 2'-deoxy-2'-fluorouridine-3'-phosphate
  modified_base 12: mod_base = OTHER; note = 2'-O-methyluridine-3'-phosphate
  modified_base 13: mod_base = OTHER; note = 2'-O-methyladenosine-3'-phosphate
  modified_base 14: mod_base = OTHER; note = 2'-O-methyluridine-3'-phosphate
  modified_base 15: mod_base = OTHER; note = 2'-O-methylcytidine-3'-phosphate
  modified_base 16: mod_base = OTHER; note = 2'-O-methyladenosine-3'-phosphate
  modified_base 17: mod_base = OTHER; note = 2'-O-methyladenosine-3'-phosphate
  modified_base 18: mod_base = OTHER; note = 2'-O-methylcytidine-3'-phosphate
  modified_base 19: mod_base = OTHER; note = 2'-O-methyladenosine-3'-phosphate
  modified_base 20: mod_base = OTHER; note = 2'-O-methylcytidine-3'-phosphate
  modified_base 21: mod_base = OTHER; note = 2'-O-methyluridine-3'-phosphate ((2S,4R)-1-[29-[[2-(acetylamino)-2-deoxy-beta-D-galactopyra nosyl]oxy]-14,14-bis[[3-[[3-[[5-[[2-(acetylamino)-2-deoxy-b eta-D-galactopyranosyl]oxy]-1-oxopentyl]amino]propyl]amino] -3-oxopropoxy]methyl]-1,12,19,25-tetraoxo-16-oxa-13,20,24-t riazanonacos-1-yl]-4-hydroxy-2-pyrrolidinyl)methyl ester
gctgccaaaattatcaacact

SEQ ID NO: 4890 - RNA, 21 nt, synthetic construct
  source 1..21: mol_type = other RNA
  modified_base 1: mod_base = OTHER; note = 2'-O-methylguanosine-3'-phosphorothioate
  modified_base 2: mod_base = OTHER; note = 2'-O-methyladenosine-3'-phosphorothioate
  modified_base 3: mod_base = OTHER; note = 2'-O-methylcytidine-3'-phosphate
  modified_base 4: mod_base = OTHER; note = 2'-O-methyluridine-3'-phosphate
  modified_base 5: mod_base = OTHER; note = 2'-O-methylguanosine-3'-phosphate
  modified_base 6: mod_base = OTHER; note = 2'-O-docosanyl-adenosine-3'-phosphate
  modified_base 7: mod_base = OTHER; note = 2'-deoxy-2'-fluorouridine-3'-phosphate
  modified_base 8: mod_base = OTHER; note = 2'-O-methyluridine-3'-phosphate
  modified_base 9: mod_base = OTHER; note = 2'-deoxy-2'-fluoroguanosine-3'-phosphate
  modified_base 10: mod_base = OTHER; note = 2'-deoxy-2'-fluoroadenosine-3'-phosphate
  modified_base 11: mod_base = OTHER; note = 2'-deoxy-2'-fluorouridine-3'-phosphate
  modified_base 12: mod_base = OTHER; note = 2'-O-methyladenosine-3'-phosphate
  modified_base 13: mod_base = OTHER; note = 2'-O-methyluridine-3'-phosphate
  modified_base 14: mod_base = OTHER; note = 2'-O-methyladenosine-3'-phosphate
  modified_base 15: mod_base = OTHER; note = 2'-O-methyluridine-3'-phosphate
  modified_base 16: mod_base = OTHER; note = 2'-O-methyluridine-3'-phosphate
  modified_base 17: mod_base = OTHER; note = 2'-O-methyluridine-3'-phosphate
  modified_base 18: mod_base = OTHER; note = 2'-O-methyladenosine-3'-phosphate
  modified_base 19: mod_base = OTHER; note = 2'-O-methyladenosine-3'-phosphate
  modified_base 20: mod_base = OTHER; note = 2'-O-methylguanosine-3'-phosphate
  modified_base 21: mod_base = OTHER; note = 2'-O-methyluridine-3'-phosphate ((2S,4R)-1-[29-[[2-(acetylamino)-2-deoxy-beta-D-galactopyra nosyl]oxy]-14,14-bis[[3-[[3-[[5-[[2-(acetylamino)-2-deoxy-b eta-D-galactopyranosyl]oxy]-1-oxopentyl]amino]propyl]amino] -3-oxopropoxy]methyl]-1,12,19,25-tetraoxo-16-oxa-13,20,24-t riazanonacos-1-yl]-4-hydroxy-2-pyrrolidinyl)methyl ester
gactgattgatatatttaagt

SEQ ID NO: 4891 - RNA, 21 nt, synthetic construct
  source 1..21: mol_type = other RNA
  modified_base 1: mod_base = OTHER; note = 2'-O-methyluridine-3'-phosphorothioate
  modified_base 2: mod_base = OTHER; note = 2'-O-methyladenosine-3'-phosphorothioate
  modified_base 3: mod_base = OTHER; note = 2'-O-methylcytidine-3'-phosphate
  modified_base 4: mod_base = OTHER; note = 2'-O-methyladenosine-3'-phosphate
  modified_base 5: mod_base = OTHER; note = 2'-O-methylcytidine-3'-phosphate
  modified_base 6: mod_base = OTHER; note = 2'-O-docosanyl-uridine-3'-phosphate
  modified_base 7: mod_base = OTHER; note = 2'-deoxy-2'-fluorouridine-3'-phosphate
  modified_base 8: mod_base = OTHER; note = 2'-O-methyluridine-3'-phosphate
  modified_base 9: mod_base = OTHER; note = 2'-deoxy-2'-fluorouridine-3'-phosphate
  modified_base 10: mod_base = OTHER; note = 2'-deoxy-2'-fluoroadenosine-3'-phosphate
  modified_base 11: mod_base = OTHER; note = 2'-deoxy-2'-fluoroadenosine-3'-phosphate
  modified_base 12: mod_base = OTHER; note = 2'-O-methylcytidine-3'-phosphate
  modified_base 13: mod_base = OTHER; note = 2'-O-methyluridine-3'-phosphate
  modified_base 14: mod_base = OTHER; note = 2'-O-methyluridine-3'-phosphate
  modified_base 15: mod_base = OTHER; note = 2'-O-methyladenosine-3'-phosphate
  modified_base 16: mod_base = OTHER; note = 2'-O-methylguanosine-3'-phosphate
  modified_base 17: mod_base = OTHER; note = 2'-O-methylcytidine-3'-phosphate
  modified_base 18: mod_base = OTHER; note = 2'-O-methyladenosine-3'-phosphate
  modified_base 19: mod_base = OTHER; note = 2'-O-methyluridine-3'-phosphate
  modified_base 20: mod_base = OTHER; note = 2'-O-methylguanosine-3'-phosphate
  modified_base 21: mod_base = OTHER; note = 2'-O-methyluridine-3'-phosphate ((2S,4R)-1-[29-[[2-(acetylamino)-2-deoxy-beta-D-galactopyra nosyl]oxy]-14,14-bis[[3-[[3-[[5-[[2-(acetylamino)-2-deoxy-b eta-D-galactopyranosyl]oxy]-1-oxopentyl]amino]propyl]amino] -3-oxopropoxy]methyl]-1,12,19,25-tetraoxo-16-oxa-13,20,24-t riazanonacos-1-yl]-4-hydroxy-2-pyrrolidinyl)methyl ester
tacacttttaacttagcatgt

SEQ ID NO: 4892 - RNA, 21 nt, synthetic construct
  source 1..21: mol_type = other RNA
  modified_base 1: mod_base = OTHER; note = 2'-O-methyluridine-3'-phosphorothioate
  modified_base 2: mod_base = OTHER; note = 2'-O-methylcytidine-3'-phosphorothioate
  modified_base 3: mod_base = OTHER; note = 2'-O-methyluridine-3'-phosphate
  modified_base 4: mod_base = OTHER; note = 2'-O-methylguanosine-3'-phosphate
  modified_base 5: mod_base = OTHER; note = 2'-O-methyladenosine-3'-phosphate
  modified_base 6: mod_base = OTHER; note = 2'-O-docosanyl-guanosine-3'-phosphate
  modified_base 7: mod_base = OTHER; note = 2'-deoxy-2'-fluorocytidine-3'-phosphate
  modified_base 8: mod_base = OTHER; note = 2'-O-methyladenosine-3'-phosphate
  modified_base 9: mod_base = OTHER; note = 2'-deoxy-2'-fluoroadenosine-3'-phosphate
  modified_base 10: mod_base = OTHER; note = 2'-deoxy-2'-fluoroguanosine-3'-phosphate
  modified_base 11: mod_base = OTHER; note = 2'-deoxy-2'-fluorouridine-3'-phosphate
  modified_base 12: mod_base = OTHER; note = 2'-O-methyluridine-3'-phosphate
  modified_base 13: mod_base = OTHER; note = 2'-O-methyladenosine-3'-phosphate
  modified_base 14: mod_base = OTHER; note = 2'-O-methylcytidine-3'-phosphate
  modified_base 15: mod_base = OTHER; note = 2'-O-methylcytidine-3'-phosphate
  modified_base 16: mod_base = OTHER; note = 2'-O-methyluridine-3'-phosphate
  modified_base 17: mod_base = OTHER; note = 2'-O-methylcytidine-3'-phosphate
  modified_base 18: mod_base = OTHER; note = 2'-O-methyluridine-3'-phosphate
  modified_base 19: mod_base = OTHER; note = 2'-O-methyluridine-3'-phosphate
  modified_base 20: mod_base = OTHER; note = 2'-O-methylcytidine-3'-phosphate
  modified_base 21: mod_base = OTHER; note = 2'-O-methyluridine-3'-phosphate ((2S,4R)-1-[29-[[2-(acetylamino)-2-deoxy-beta-D-galactopyra nosyl]oxy]-14,14-bis[[3-[[3-[[5-[[2-(acetylamino)-2-deoxy-b eta-D-galactopyranosyl]oxy]-1-oxopentyl]amino]propyl]amino] -3-oxopropoxy]methyl]-1,12,19,25-tetraoxo-16-oxa-13,20,24-t riazanonacos-1-yl]-4-hydroxy-2-pyrrolidinyl)methyl ester
tctgagcaagttacctcttct

SEQ ID NO: 4893 - RNA, 21 nt, synthetic construct
  source 1..21: mol_type = other RNA
  modified_base 1: mod_base = OTHER; note = 2'-O-methylguanosine-3'-phosphorothioate
  modified_base 2: mod_base = OTHER; note = 2'-O-methylcytidine-3'-phosphorothioate
  modified_base 3: mod_base = OTHER; note = 2'-O-methylcytidine-3'-phosphate
  modified_base 4: mod_base = OTHER; note = 2'-O-methylcytidine-3'-phosphate
  modified_base 5: mod_base = OTHER; note = 2'-O-methyluridine-3'-phosphate
  modified_base 6: mod_base = OTHER; note = 2'-O-docosanyl-cytidine-3'-phosphate
  modified_base 7: mod_base = OTHER; note = 2'-deoxy-2'-fluorouridine-3'-phosphate
  modified_base 8: mod_base = OTHER; note = 2'-O-methyluridine-3'-phosphate
  modified_base 9: mod_base = OTHER; note = 2'-deoxy-2'-fluorouridine-3'-phosphate
  modified_base 10: mod_base = OTHER; note = 2'-deoxy-2'-fluoroadenosine-3'-phosphate
  modified_base 11: mod_base = OTHER; note = 2'-deoxy-2'-fluorouridine-3'-phosphate
  modified_base 12: mod_base = OTHER; note = 2'-O-methylguanosine-3'-phosphate
  modified_base 13: mod_base = OTHER; note = 2'-O-methyluridine-3'-phosphate
  modified_base 14: mod_base = OTHER; note = 2'-O-methyladenosine-3'-phosphate
  modified_base 15: mod_base = OTHER; note = 2'-O-methylguanosine-3'-phosphate
  modified_base 16: mod_base = OTHER; note = 2'-O-methylguanosine-3'-phosphate
  modified_base 17: mod_base = OTHER; note = 2'-O-methyluridine-3'-phosphate
  modified_base 18: mod_base = OTHER; note = 2'-O-methyluridine-3'-phosphate
  modified_base 19: mod_base = OTHER; note = 2'-O-methyluridine-3'-phosphate
  modified_base 20: mod_base = OTHER; note = 2'-O-methyladenosine-3'-phosphate
  modified_base 21: mod_base = OTHER; note = 2'-O-methyluridine-3'-phosphate ((2S,4R)-1-[29-[[2-(acetylamino)-2-deoxy-beta-D-galactopyra nosyl]oxy]-14,14-bis[[3-[[3-[[5-[[2-(acetylamino)-2-deoxy-b eta-D-galactopyranosyl]oxy]-1-oxopentyl]amino]propyl]amino] -3-oxopropoxy]methyl]-1,12,19,25-tetraoxo-16-oxa-13,20,24-t riazanonacos-1-yl]-4-hydroxy-2-pyrrolidinyl)methyl ester
gccctctttatgtaggtttat

SEQ ID NO: 4894 - RNA, 21 nt, synthetic construct
  source 1..21: mol_type = other RNA
  modified_base 1: mod_base = OTHER; note = 2'-O-methylcytidine-3'-phosphorothioate
  modified_base 2: mod_base = OTHER; note = 2'-O-methyladenosine-3'-phosphorothioate
  modified_base 3: mod_base = OTHER; note = 2'-O-methyladenosine-3'-phosphate
  modified_base 4: mod_base = OTHER; note = 2'-O-methylguanosine-3'-phosphate
  modified_base 5: mod_base = OTHER; note = 2'-O-methylguanosine-3'-phosphate
  modified_base 6: mod_base = OTHER; note = 2'-O-docosanyl-adenosine-3'-phosphate
  modified_base 7: mod_base = OTHER; note = 2'-deoxy-2'-fluoroadenosine-3'-phosphate
  modified_base 8: mod_base = OTHER; note = 2'-O-methyluridine-3'-phosphate
  modified_base 9: mod_base = OTHER; note = 2'-deoxy-2'-fluoroadenosine-3'-phosphate
  modified_base 10: mod_base = OTHER; note = 2'-deoxy-2'-fluorouridine-3'-phosphate
  modified_base 11: mod_base = OTHER; note = 2'-deoxy-2'-fluorouridine-3'-phosphate
  modified_base 12: mod_base = OTHER; note = 2'-O-methyladenosine-3'-phosphate
  modified_base 13: mod_base = OTHER; note = 2'-O-methyladenosine-3'-phosphate
  modified_base 14: mod_base = OTHER; note = 2'-O-methyluridine-3'-phosphate
  modified_base 15: mod_base = OTHER; note = 2'-O-methylcytidine-3'-phosphate
  modified_base 16: mod_base = OTHER; note = 2'-O-methyluridine-3'-phosphate
  modified_base 17: mod_base = OTHER; note = 2'-O-methyluridine-3'-phosphate
  modified_base 18: mod_base = OTHER; note = 2'-O-methylcytidine-3'-phosphate
  modified_base 19: mod_base = OTHER; note = 2'-O-methyladenosine-3'-phosphate
  modified_base 20: mod_base = OTHER; note = 2'-O-methylcytidine-3'-phosphate
  modified_base 21: mod_base = OTHER; note = 2'-O-methyluridine-3'-phosphate ((2S,4R)-1-[29-[[2-(acetylamino)-2-deoxy-beta-D-galactopyra nosyl]oxy]-14,14-bis[[3-[[3-[[5-[[2-(acetylamino)-2-deoxy-b eta-D-galactopyranosyl]oxy]-1-oxopentyl]amino]propyl]amino] -3-oxopropoxy]methyl]-1,12,19,25-tetraoxo-16-oxa-13,20,24-t riazanonacos-1-yl]-4-hydroxy-2-pyrrolidinyl)methyl ester
caaggaatattaatcttcact

SEQ ID NO: 4895 - RNA, 21 nt, synthetic construct
  source 1..21: mol_type = other RNA
  modified_base 1: mod_base = OTHER; note = 2'-O-methyladenosine-3'-phosphorothioate
  modified_base 2: mod_base = OTHER; note = 2'-O-methyluridine-3'-phosphorothioate
  modified_base 3: mod_base = OTHER; note = 2'-O-methylguanosine-3'-phosphate
  modified_base 4: mod_base = OTHER; note = 2'-O-methyluridine-3'-phosphate
  modified_base 5: mod_base = OTHER; note = 2'-O-methyluridine-3'-phosphate
  modified_base 6: mod_base = OTHER; note = 2'-O-docosanyl-guanosine-3'-phosphate
  modified_base 7: mod_base = OTHER; note = 2'-deoxy-2'-fluorouridine-3'-phosphate
  modified_base 8: mod_base = OTHER; note = 2'-O-methyluridine-3'-phosphate
  modified_base 9: mod_base = OTHER; note = 2'-deoxy-2'-fluorouridine-3'-phosphate
  modified_base 10: mod_base = OTHER; note = 2'-deoxy-2'-fluoroadenosine-3'-phosphate
  modified_base 11: mod_base = OTHER; note = 2'-deoxy-2'-fluorouridine-3'-phosphate
  modified_base 12: mod_base = OTHER; note = 2'-O-methylguanosine-3'-phosphate
  modified_base 13: mod_base = OTHER; note = 2'-O-methyluridine-3'-phosphate
  modified_base 14: mod_base = OTHER; note = 2'-O-methyluridine-3'-phosphate
  modified_base 15: mod_base = OTHER; note = 2'-O-methyluridine-3'-phosphate
  modified_base 16: mod_base = OTHER; note = 2'-O-methylcytidine-3'-phosphate
  modified_base 17: mod_base = OTHER; note = 2'-O-methyluridine-3'-phosphate
  modified_base 18: mod_base = OTHER; note = 2'-O-methyluridine-3'-phosphate
  modified_base 19: mod_base = OTHER; note = 2'-O-methyladenosine-3'-phosphate
  modified_base 20: mod_base = OTHER; note = 2'-O-methylcytidine-3'-phosphate
  modified_base 21: mod_base = OTHER; note = 2'-O-methyluridine-3'-phosphate ((2S,4R)-1-[29-[[2-(acetylamino)-2-deoxy-beta-D-galactopyra nosyl]oxy]-14,14-bis[[3-[[3-[[5-[[2-(acetylamino)-2-deoxy-b eta-D-galactopyranosyl]oxy]-1-oxopentyl]amino]propyl]amino] -3-oxopropoxy]methyl]-1,12,19,25-tetraoxo-16-oxa-13,20,24-t riazanonacos-1-yl]-4-hydroxy-2-pyrrolidinyl)methyl ester
atgttgtttatgtttcttact

SEQ ID NO: 4896 - RNA, 21 nt, synthetic construct
  source 1..21: mol_type = other RNA
  modified_base 1: mod_base = OTHER; note = 2'-O-methyladenosine-3'-phosphorothioate
  modified_base 2: mod_base = OTHER; note = 2'-O-methyluridine-3'-phosphorothioate
  modified_base 3: mod_base = OTHER; note = 2'-O-methyladenosine-3'-phosphate
  modified_base 4: mod_base = OTHER; note = 2'-O-methylcytidine-3'-phosphate
  modified_base 5: mod_base = OTHER; note = 2'-O-methyluridine-3'-phosphate
  modified_base 6: mod_base = OTHER; note = 2'-O-docosanyl-cytidine-3'-phosphate
  modified_base 7: mod_base = OTHER; note = 2'-deoxy-2'-fluoroguanosine-3'-phosphate
  modified_base 8: mod_base = OTHER; note = 2'-O-methylguanosine-3'-phosphate
  modified_base 9: mod_base = OTHER; note = 2'-deoxy-2'-fluoroadenosine-3'-phosphate
  modified_base 10: mod_base = OTHER; note = 2'-deoxy-2'-fluorocytidine-3'-phosphate
  modified_base 11: mod_base = OTHER; note = 2'-deoxy-2'-fluorouridine-3'-phosphate
  modified_base 12: mod_base = OTHER; note = 2'-O-methylcytidine-3'-phosphate
  modified_base 13: mod_base = OTHER; note = 2'-O-methyladenosine-3'-phosphate
  modified_base 14: mod_base = OTHER; note = 2'-O-methyladenosine-3'-phosphate
  modified_base 15: mod_base = OTHER; note = 2'-O-methyladenosine-3'-phosphate
  modified_base 16: mod_base = OTHER; note = 2'-O-methyluridine-3'-phosphate
  modified_base 17: mod_base = OTHER; note = 2'-O-methylguanosine-3'-phosphate
  modified_base 18: mod_base = OTHER; note = 2'-O-methyluridine-3'-phosphate
  modified_base 19: mod_base = OTHER; note = 2'-O-methylcytidine-3'-phosphate
  modified_base 20: mod_base = OTHER; note = 2'-O-methyluridine-3'-phosphate
  modified_base 21: mod_base = OTHER; note = 2'-O-methyluridine-3'-phosphate ((2S,4R)-1-[29-[[2-(acetylamino)-2-deoxy-beta-D-galactopyra nosyl]oxy]-14,14-bis[[3-[[3-[[5-[[2-(acetylamino)-2-deoxy-b eta-D-galactopyranosyl]oxy]-1-oxopentyl]amino]propyl]amino] -3-oxopropoxy]methyl]-1,12,19,25-tetraoxo-16-oxa-13,20,24-t riazanonacos-1-yl]-4-hydroxy-2-pyrrolidinyl)methyl ester
atactcggactcaaatgtctt

SEQ ID NO: 4897 - RNA, 21 nt, synthetic construct
  source 1..21: mol_type = other RNA
  modified_base 1: mod_base = OTHER; note = 2'-O-methyluridine-3'-phosphorothioate
  modified_base 2: mod_base = OTHER; note = 2'-O-methylguanosine-3'-phosphorothioate
  modified_base 3: mod_base = OTHER; note = 2'-O-methyladenosine-3'-phosphate
  modified_base 4: mod_base = OTHER; note = 2'-O-methyladenosine-3'-phosphate
  modified_base 5: mod_base = OTHER; note = 2'-O-methylguanosine-3'-phosphate
  modified_base 6: mod_base = OTHER; note = 2'-O-docosanyl-cytidine-3'-phosphate
  modified_base 7: mod_base = OTHER; note = 2'-deoxy-2'-fluorouridine-3'-phosphate
  modified_base 8: mod_base = OTHER; note = 2'-O-methyluridine-3'-phosphate
  modified_base 9: mod_base = OTHER; note = 2'-deoxy-2'-fluorouridine-3'-phosphate
  modified_base 10: mod_base = OTHER; note = 2'-deoxy-2'-fluorouridine-3'-phosphate
  modified_base 11: mod_base = OTHER; note = 2'-deoxy-2'-fluorocytidine-3'-phosphate
  modified_base 12: mod_base = OTHER; note = 2'-O-methyluridine-3'-phosphate
  modified_base 13: mod_base = OTHER; note = 2'-O-methylguanosine-3'-phosphate
  modified_base 14: mod_base = OTHER; note = 2'-O-methyladenosine-3'-phosphate
  modified_base 15: mod_base = OTHER; note = 2'-O-methyluridine-3'-phosphate
  modified_base 16: mod_base = OTHER; note = 2'-O-methyladenosine-3'-phosphate
  modified_base 17: mod_base = OTHER; note = 2'-O-methyladenosine-3'-phosphate
  modified_base 18: mod_base = OTHER; note = 2'-O-methyluridine-3'-phosphate
  modified_base 19: mod_base = OTHER; note = 2'-O-methyluridine-3'-phosphate
  modified_base 20: mod_base = OTHER; note = 2'-O-methyladenosine-3'-phosphate
  modified_base 21: mod_base = OTHER; note = 2'-O-methyluridine-3'-phosphate ((2S,4R)-1-[29-[[2-(acetylamino)-2-deoxy-beta-D-galactopyra nosyl]oxy]-14,14-bis[[3-[[3-[[5-[[2-(acetylamino)-2-deoxy-b eta-D-galactopyranosyl]oxy]-1-oxopentyl]amino]propyl]amino] -3-oxopropoxy]methyl]-1,12,19,25-tetraoxo-16-oxa-13,20,24-t riazanonacos-1-yl]-4-hydroxy-2-pyrrolidinyl)methyl ester
tgaagcttttctgataattat

SEQ ID NO: 4898 - RNA, 21 nt, synthetic construct
  source 1..21: mol_type = other RNA
  modified_base 1: mod_base = OTHER; note = 2'-O-methylguanosine-3'-phosphorothioate
  modified_base 2: mod_base = OTHER; note = 2'-O-methyladenosine-3'-phosphorothioate
  modified_base 3: mod_base = OTHER; note = 2'-O-methyladenosine-3'-phosphate
  modified_base 4: mod_base = OTHER; note = 2'-O-methylcytidine-3'-phosphate
  modified_base 5: mod_base = OTHER; note = 2'-O-methyluridine-3'-phosphate
  modified_base 6: mod_base = OTHER; note = 2'-O-docosanyl-cytidine-3'-phosphate
  modified_base 7: mod_base = OTHER; note = 2'-deoxy-2'-fluorouridine-3'-phosphate
  modified_base 8: mod_base = OTHER; note = 2'-O-methyluridine-3'-phosphate
  modified_base 9: mod_base = OTHER; note = 2'-deoxy-2'-fluorouridine-3'-phosphate
  modified_base 10: mod_base = OTHER; note = 2'-deoxy-2'-fluoroguanosine-3'-phosphate
  modified_base 11: mod_base = OTHER; note = 2'-deoxy-2'-fluorocytidine-3'-phosphate
  modified_base 12: mod_base = OTHER; note = 2'-O-methyluridine-3'-phosphate
  modified_base 13: mod_base = OTHER; note = 2'-O-methylguanosine-3'-phosphate
  modified_base 14: mod_base = OTHER; note = 2'-O-methyluridine-3'-phosphate
  modified_base 15: mod_base = OTHER; note = 2'-O-methyluridine-3'-phosphate
  modified_base 16: mod_base = OTHER; note = 2'-O-methyladenosine-3'-phosphate
  modified_base 17: mod_base = OTHER; note = 2'-O-methyladenosine-3'-phosphate
  modified_base 18: mod_base = OTHER; note = 2'-O-methyluridine-3'-phosphate
  modified_base 19: mod_base = OTHER; note = 2'-O-methylcytidine-3'-phosphate
  modified_base 20: mod_base = OTHER; note = 2'-O-methyluridine-3'-phosphate
  modified_base 21: mod_base = OTHER; note = 2'-O-methyluridine-3'-phosphate ((2S,4R)-1-[29-[[2-(acetylamino)-2-deoxy-beta-D-galactopyra nosyl]oxy]-14,14-bis[[3-[[3-[[5-[[2-(acetylamino)-2-deoxy-b eta-D-galactopyranosyl]oxy]-1-oxopentyl]amino]propyl]amino] -3-oxopropoxy]methyl]-1,12,19,25-tetraoxo-16-oxa-13,20,24-t riazanonacos-1-yl]-4-hydroxy-2-pyrrolidinyl)methyl ester
gaactctttgctgttaatctt

SEQ ID NO: 4899 - RNA, 21 nt, synthetic construct
  source 1..21: mol_type = other RNA
  modified_base 1: mod_base = OTHER; note = 2'-O-methyluridine-3'-phosphorothioate
  modified_base 2: mod_base = OTHER; note = 2'-O-methyluridine-3'-phosphorothioate
  modified_base 3: mod_base = OTHER; note = 2'-O-methylguanosine-3'-phosphate
  modified_base 4: mod_base = OTHER; note = 2'-O-methyladenosine-3'-phosphate
  modified_base 5: mod_base = OTHER; note = 2'-O-methyladenosine-3'-phosphate
  modified_base 6: mod_base = OTHER; note = 2'-O-docosanyl-adenosine-3'-phosphate
  modified_base 7: mod_base = OTHER; note = 2'-deoxy-2'-fluoroguanosine-3'-phosphate
  modified_base 8: mod_base = OTHER; note = 2'-O-methyluridine-3'-phosphate
  modified_base 9: mod_base = OTHER; note = 2'-deoxy-2'-fluorouridine-3'-phosphate
  modified_base 10: mod_base = OTHER; note = 2'-deoxy-2'-fluorouridine-3'-phosphate
  modified_base 11: mod_base = OTHER; note = 2'-deoxy-2'-fluorouridine-3'-phosphate
  modified_base 12: mod_base = OTHER; note = 2'-O-methylguanosine-3'-phosphate
  modified_base 13: mod_base = OTHER; note = 2'-O-methylcytidine-3'-phosphate
  modified_base 14: mod_base = OTHER; note = 2'-O-methyluridine-3'-phosphate
  modified_base 15: mod_base = OTHER; note = 2'-O-methylguanosine-3'-phosphate
  modified_base 16: mod_base = OTHER; note = 2'-O-methyladenosine-3'-phosphate
  modified_base 17: mod_base = OTHER; note = 2'-O-methyluridine-3'-phosphate
  modified_base 18: mod_base = OTHER; note = 2'-O-methyluridine-3'-phosphate
  modified_base 19: mod_base = OTHER; note = 2'-O-methyladenosine-3'-phosphate
  modified_base 20: mod_base = OTHER; note = 2'-O-methyladenosine-3'-phosphate
  modified_base 21: mod_base = OTHER; note = 2'-O-methyluridine-3'-phosphate ((2S,4R)-1-[29-[[2-(acetylamino)-2-deoxy-beta-D-galactopyra nosyl]oxy]-14,14-bis[[3-[[3-[[5-[[2-(acetylamino)-2-deoxy-b eta-D-galactopyranosyl]oxy]-1-oxopentyl]amino]propyl]amino] -3-oxopropoxy]methyl]-1,12,19,25-tetraoxo-16-oxa-13,20,24-t riazanonacos-1-yl]-4-hydroxy-2-pyrrolidinyl)methyl ester
ttgaaagttttgctgattaat

SEQ ID NO: 4900 - RNA, 21 nt, synthetic construct
  source 1..21: mol_type = other RNA
  modified_base 1: mod_base = OTHER; note = 2'-O-methyladenosine-3'-phosphorothioate
  modified_base 2: mod_base = OTHER; note = 2'-O-methyluridine-3'-phosphorothioate
  modified_base 3: mod_base = OTHER; note = 2'-O-methylguanosine-3'-phosphate
  modified_base 4: mod_base = OTHER; note = 2'-O-methylcytidine-3'-phosphate
  modified_base 5: mod_base = OTHER; note = 2'-O-methyluridine-3'-phosphate
  modified_base 6: mod_base = OTHER; note = 2'-O-docosanyl-adenosine-3'-phosphate
  modified_base 7: mod_base = OTHER; note = 2'-deoxy-2'-fluoroguanosine-3'-phosphate
  modified_base 8: mod_base = OTHER; note = 2'-O-methyladenosine-3'-phosphate
  modified_base 9: mod_base = OTHER; note = 2'-deoxy-2'-fluoroadenosine-3'-phosphate
  modified_base 10: mod_base = OTHER; note = 2'-deoxy-2'-fluoroguanosine-3'-phosphate
  modified_base 11: mod_base = OTHER; note = 2'-deoxy-2'-fluoroadenosine-3'-phosphate
  modified_base 12: mod_base = OTHER; note = 2'-O-methyladenosine-3'-phosphate
  modified_base 13: mod_base = OTHER; note = 2'-O-methyladenosine-3'-phosphate
  modified_base 14: mod_base = OTHER; note = 2'-O-methyladenosine-3'-phosphate
  modified_base 15: mod_base = OTHER; note = 2'-O-methylcytidine-3'-phosphate
  modified_base 16: mod_base = OTHER; note = 2'-O-methyluridine-3'-phosphate
  modified_base 17: mod_base = OTHER; note = 2'-O-methyladenosine-3'-phosphate
  modified_base 18: mod_base = OTHER; note = 2'-O-methyladenosine-3'-phosphate
  modified_base 19: mod_base = OTHER; note = 2'-O-methyladenosine-3'-phosphate
  modified_base 20: mod_base = OTHER; note = 2'-O-methylguanosine-3'-phosphate
  modified_base 21: mod_base = OTHER; note = 2'-O-methyluridine-3'-phosphate ((2S,4R)-1-[29-[[2-(acetylamino)-2-deoxy-beta-D-galactopyra nosyl]oxy]-14,14-bis[[3-[[3-[[5-[[2-(acetylamino)-2-deoxy-b eta-D-galactopyranosyl]oxy]-1-oxopentyl]amino]propyl]amino] -3-oxopropoxy]methyl]-1,12,19,25-tetraoxo-16-oxa-13,20,24-t riazanonacos-1-yl]-4-hydroxy-2-pyrrolidinyl)methyl ester
atgctagaagaaaactaaagt

SEQ ID NO: 4901 - RNA, 21 nt, synthetic construct
  source 1..21: mol_type = other RNA
  modified_base 1: mod_base = OTHER; note = 2'-O-methylcytidine-3'-phosphorothioate
  modified_base 2: mod_base = OTHER; note = 2'-O-methylcytidine-3'-phosphorothioate
  modified_base 3: mod_base = OTHER; note = 2'-O-methyluridine-3'-phosphate
  modified_base 4: mod_base = OTHER; note = 2'-O-methylcytidine-3'-phosphate
  modified_base 5: mod_base = OTHER; note = 2'-O-methyluridine-3'-phosphate
  modified_base 6: mod_base = OTHER; note = 2'-O-docosanyl-uridine-3'-phosphate
  modified_base 7: mod_base = OTHER; note = 2'-deoxy-2'-fluorocytidine-3'-phosphate
  modified_base 8: mod_base = OTHER; note = 2'-O-methyladenosine-3'-phosphate
  modified_base 9: mod_base = OTHER; note = 2'-deoxy-2'-fluorouridine-3'-phosphate
  modified_base 10: mod_base = OTHER; note = 2'-deoxy-2'-fluoroguanosine-3'-phosphate
  modified_base 11: mod_base = OTHER; note = 2'-deoxy-2'-fluorocytidine-3'-phosphate
  modified_base 12: mod_base = OTHER; note = 2'-O-methyladenosine-3'-phosphate
  modified_base 13: mod_base = OTHER; note = 2'-O-methyluridine-3'-phosphate
  modified_base 14: mod_base = OTHER; note = 2'-O-methylguanosine-3'-phosphate
  modified_base 15: mod_base = OTHER; note = 2'-O-methyluridine-3'-phosphate
  modified_base 16: mod_base = OTHER; note = 2'-O-methyluridine-3'-phosphate
  modified_base 17: mod_base = OTHER; note = 2'-O-methyluridine-3'-phosphate
  modified_base 18: mod_base = OTHER; note = 2'-O-methylcytidine-3'-phosphate
  modified_base 19: mod_base = OTHER; note = 2'-O-methyluridine-3'-phosphate
  modified_base 20: mod_base = OTHER; note = 2'-O-methylguanosine-3'-phosphate
  modified_base 21: mod_base = OTHER; note = 2'-O-methyluridine-3'-phosphate ((2S,4R)-1-[29-[[2-(acetylamino)-2-deoxy-beta-D-galactopyra nosyl]oxy]-14,14-bis[[3-[[3-[[5-[[2-(acetylamino)-2-deoxy-b eta-D-galactopyranosyl]oxy]-1-oxopentyl]amino]propyl]amino] -3-oxopropoxy]methyl]-1,12,19,25-tetraoxo-16-oxa-13,20,24-t riazanonacos-1-yl]-4-hydroxy-2-pyrrolidinyl)methyl ester
cctcttcatgcatgtttctgt

SEQ ID NO: 4902 - RNA, 21 nt, synthetic construct
  source 1..21: mol_type = other RNA
  modified_base 1: mod_base = OTHER; note = 2'-O-methyluridine-3'-phosphorothioate
  modified_base 2: mod_base = OTHER; note = 2'-O-methyladenosine-3'-phosphorothioate
  modified_base 3: mod_base = OTHER; note = 2'-O-methylcytidine-3'-phosphate
  modified_base 4: mod_base = OTHER; note = 2'-O-methyluridine-3'-phosphate
  modified_base 5: mod_base = OTHER; note = 2'-O-methylguanosine-3'-phosphate
  modified_base 6: mod_base = OTHER; note = 2'-O-docosanyl-cytidine-3'-phosphate
  modified_base 7: mod_base = OTHER; note = 2'-deoxy-2'-fluorouridine-3'-phosphate
  modified_base 8: mod_base = OTHER; note = 2'-O-methyluridine-3'-phosphate
  modified_base 9: mod_base = OTHER; note = 2'-deoxy-2'-fluorouridine-3'-phosphate
  modified_base 10: mod_base = OTHER; note = 2'-deoxy-2'-fluorouridine-3'-phosphate
  modified_base 11: mod_base = OTHER; note = 2'-deoxy-2'-fluoroguanosine-3'-phosphate
  modified_base 12: mod_base = OTHER; note = 2'-O-methyladenosine-3'-phosphate
  modified_base 13: mod_base = OTHER; note = 2'-O-methyladenosine-3'-phosphate
  modified_base 14: mod_base = OTHER; note = 2'-O-methylcytidine-3'-phosphate
  modified_base 15: mod_base = OTHER; note = 2'-O-methylcytidine-3'-phosphate
  modified_base 16: mod_base = OTHER; note = 2'-O-methyluridine-3'-phosphate
  modified_base 17: mod_base = OTHER; note = 2'-O-methylguanosine-3'-phosphate
  modified_base 18: mod_base = OTHER; note = 2'-O-methyladenosine-3'-phosphate
  modified_base 19: mod_base = OTHER; note = 2'-O-methyladenosine-3'-phosphate
  modified_base 20: mod_base = OTHER; note = 2'-O-methylguanosine-3'-phosphate
  modified_base 21: mod_base = OTHER; note = 2'-O-methyluridine-3'-phosphate ((2S,4R)-1-[29-[[2-(acetylamino)-2-deoxy-beta-D-galactopyra nosyl]oxy]-14,14-bis[[3-[[3-[[5-[[2-(acetylamino)-2-deoxy-b eta-D-galactopyranosyl]oxy]-1-oxopentyl]amino]propyl]amino] -3-oxopropoxy]methyl]-1,12,19,25-tetraoxo-16-oxa-13,20,24-t riazanonacos-1-yl]-4-hydroxy-2-pyrrolidinyl)methyl ester
tactgcttttgaacctgaagt

SEQ ID NO: 4903 - RNA, 21 nt, synthetic construct
  source 1..21: mol_type = other RNA
  modified_base 1: mod_base = OTHER; note = 2'-O-methylcytidine-3'-phosphorothioate
  modified_base 2: mod_base = OTHER; note = 2'-O-methyladenosine-3'-phosphorothioate
  modified_base 3: mod_base = OTHER; note = 2'-O-methyladenosine-3'-phosphate
  modified_base 4: mod_base = OTHER; note = 2'-O-methylcytidine-3'-phosphate
  modified_base 5: mod_base = OTHER; note = 2'-O-methylguanosine-3'-phosphate
  modified_base 6: mod_base = OTHER; note = 2'-O-docosanyl-uridine-3'-phosphate
  modified_base 7: mod_base = OTHER; note = 2'-deoxy-2'-fluorouridine-3'-phosphate
  modified_base 8: mod_base = OTHER; note = 2'-O-methylcytidine-3'-phosphate
  modified_base 9: mod_base = OTHER; note = 2'-deoxy-2'-fluorouridine-3'-phosphate
  modified_base 10: mod_base = OTHER; note = 2'-deoxy-2'-fluoroadenosine-3'-phosphate
  modified_base 11: mod_base = OTHER; note = 2'-deoxy-2'-fluorocytidine-3'-phosphate
  modified_base 12: mod_base = OTHER; note = 2'-O-methyluridine-3'-phosphate
  modified_base 13: mod_base = OTHER; note = 2'-O-methylguanosine-3'-phosphate
  modified_base 14: mod_base = OTHER; note = 2'-O-methyluridine-3'-phosphate
  modified_base 15: mod_base = OTHER; note = 2'-O-methyluridine-3'-phosphate
  modified_base 16: mod_base = OTHER; note = 2'-O-methylguanosine-3'-phosphate
  modified_base 17: mod_base = OTHER; note = 2'-O-methylcytidine-3'-phosphate
  modified_base 18: mod_base = OTHER; note = 2'-O-methyluridine-3'-phosphate
  modified_base 19: mod_base = OTHER; note = 2'-O-methyluridine-3'-phosphate
  modified_base 20: mod_base = OTHER; note = 2'-O-methylcytidine-3'-phosphate
  modified_base 21: mod_base = OTHER; note = 2'-O-methyluridine-3'-phosphate ((2S,4R)-1-[29-[[2-(acetylamino)-2-deoxy-beta-D-galactopyra nosyl]oxy]-14,14-bis[[3-[[3-[[5-[[2-(acetylamino)-2-deoxy-b eta-D-galactopyranosyl]oxy]-1-oxopentyl]amino]propyl]amino] -3-oxopropoxy]methyl]-1,12,19,25-tetraoxo-16-oxa-13,20,24-t riazanonacos-1-yl]-4-hydroxy-2-pyrrolidinyl)methyl ester
caacgttctactgttgcttct

SEQ ID NO: 4904 - RNA, 21 nt, synthetic construct
  source 1..21: mol_type = other RNA
  modified_base 1: mod_base = OTHER; note = 2'-O-methylcytidine-3'-phosphorothioate
  modified_base 2: mod_base = OTHER; note = 2'-O-methyladenosine-3'-phosphorothioate
  modified_base 3: mod_base = OTHER; note = 2'-O-methylguanosine-3'-phosphate
  modified_base 4: mod_base = OTHER; note = 2'-O-methyladenosine-3'-phosphate
  modified_base 5: mod_base = OTHER; note = 2'-O-methyluridine-3'-phosphate
  modified_base 6: mod_base = OTHER; note = 2'-O-docosanyl-adenosine-3'-phosphate
  modified_base 7: mod_base = OTHER; note = 2'-deoxy-2'-fluoroguanosine-3'-phosphate
  modified_base 8: mod_base = OTHER; note = 2'-O-methyluridine-3'-phosphate
  modified_base 9: mod_base = OTHER; note = 2'-deoxy-2'-fluorocytidine-3'-phosphate
  modified_base 10: mod_base = OTHER; note = 2'-deoxy-2'-fluorocytidine-3'-phosphate
  modified_base 11: mod_base = OTHER; note = 2'-deoxy-2'-fluorouridine-3'-phosphate
  modified_base 12: mod_base = OTHER; note = 2'-O-methyluridine-3'-phosphate
  modified_base 13: mod_base = OTHER; note = 2'-O-methylguanosine-3'-phosphate
  modified_base 14: mod_base = OTHER; note = 2'-O-methyluridine-3'-phosphate
  modified_base 15: mod_base = OTHER; note = 2'-O-methyluridine-3'-phosphate
  modified_base 16: mod_base = OTHER; note = 2'-O-methyluridine-3'-phosphate
  modified_base 17: mod_base = OTHER; note = 2'-O-methyluridine-3'-phosphate
  modified_base 18: mod_base = OTHER; note = 2'-O-methyladenosine-3'-phosphate
  modified_base 19: mod_base = OTHER; note = 2'-O-methyladenosine-3'-phosphate
  modified_base 20: mod_base = OTHER; note = 2'-O-methyluridine-3'-phosphate
  modified_base 21: mod_base = OTHER; note = 2'-O-methyluridine-3'-phosphate ((2S,4R)-1-[29-[[2-(acetylamino)-2-deoxy-beta-D-galactopyra nosyl]oxy]-14,14-bis[[3-[[3-[[5-[[2-(acetylamino)-2-deoxy-b eta-D-galactopyranosyl]oxy]-1-oxopentyl]amino]propyl]amino] -3-oxopropoxy]methyl]-1,12,19,25-tetraoxo-16-oxa-13,20,24-t riazanonacos-1-yl]-4-hydroxy-2-pyrrolidinyl)methyl ester
cagatagtccttgttttaatt

SEQ ID NO: 4905 - RNA, 21 nt, synthetic construct
  source 1..21: mol_type = other RNA
  modified_base 1: mod_base = OTHER; note = 2'-O-methyladenosine-3'-phosphorothioate
  modified_base 2: mod_base = OTHER; note = 2'-O-methylcytidine-3'-phosphorothioate
  modified_base 3: mod_base = OTHER; note = 2'-O-methyladenosine-3'-phosphate
  modified_base 4: mod_base = OTHER; note = 2'-O-methylcytidine-3'-phosphate
  modified_base 5: mod_base = OTHER; note = 2'-O-methyluridine-3'-phosphate
  modified_base 6: mod_base = OTHER; note = 2'-O-docosanyl-guanosine-3'-phosphate
  modified_base 7: mod_base = OTHER; note = 2'-deoxy-2'-fluorouridine-3'-phosphate
  modified_base 8: mod_base = OTHER; note = 2'-O-methyladenosine-3'-phosphate
  modified_base 9: mod_base = OTHER; note = 2'-deoxy-2'-fluorouridine-3'-phosphate
  modified_base 10: mod_base = OTHER; note = 2'-deoxy-2'-fluoroadenosine-3'-phosphate
  modified_base 11: mod_base = OTHER; note = 2'-deoxy-2'-fluorouridine-3'-phosphate
  modified_base 12: mod_base = OTHER; note = 2'-O-methyladenosine-3'-phosphate
  modified_base 13: mod_base = OTHER; note = 2'-O-methyluridine-3'-phosphate
  modified_base 14: mod_base = OTHER; note = 2'-O-methyluridine-3'-phosphate
  modified_base 15: mod_base = OTHER; note = 2'-O-methyluridine-3'-phosphate
  modified_base 16: mod_base = OTHER; note = 2'-O-methylcytidine-3'-phosphate
  modified_base 17: mod_base = OTHER; note = 2'-O-methyluridine-3'-phosphate
  modified_base 18: mod_base = OTHER; note = 2'-O-methyluridine-3'-phosphate
  modified_base 19: mod_base = OTHER; note = 2'-O-methylguanosine-3'-phosphate
  modified_base 20: mod_base = OTHER; note = 2'-O-methylcytidine-3'-phosphate
  modified_base 21: mod_base = OTHER; note = 2'-O-methyluridine-3'-phosphate ((2S,4R)-1-[29-[[2-(acetylamino)-2-deoxy-beta-D-galactopyra nosyl]oxy]-14,14-bis[[3-[[3-[[5-[[2-(acetylamino)-2-deoxy-b eta-D-galactopyranosyl]oxy]-1-oxopentyl]amino]propyl]amino] -3-oxopropoxy]methyl]-1,12,19,25-tetraoxo-16-oxa-13,20,24-t riazanonacos-1-yl]-4-hydroxy-2-pyrrolidinyl)methyl ester
acactgtatatatttcttgct

SEQ ID NO: 4906 - RNA, 21 nt, synthetic construct
  source 1..21: mol_type = other RNA
  modified_base 1: mod_base = OTHER; note = 2'-O-methyladenosine-3'-phosphorothioate
  modified_base 2: mod_base = OTHER; note = 2'-O-methyladenosine-3'-phosphorothioate
  modified_base 3: mod_base = OTHER; note = 2'-O-methylcytidine-3'-phosphate
  modified_base 4: mod_base = OTHER; note = 2'-O-methyluridine-3'-phosphate
  modified_base 5: mod_base = OTHER; note = 2'-O-methyluridine-3'-phosphate
  modified_base 6: mod_base = OTHER; note = 2'-O-docosanyl-adenosine-3'-phosphate
  modified_base 7: mod_base = OTHER; note = 2'-deoxy-2'-fluoroadenosine-3'-phosphate
  modified_base 8: mod_base = OTHER; note = 2'-O-methyluridine-3'-phosphate
  modified_base 9: mod_base = OTHER; note = 2'-deoxy-2'-fluoroadenosine-3'-phosphate
  modified_base 10: mod_base = OTHER; note = 2'-deoxy-2'-fluoroadenosine-3'-phosphate
  modified_base 11: mod_base = OTHER; note = 2'-deoxy-2'-fluoroadenosine-3'-phosphate
  modified_base 12: mod_base = OTHER; note = 2'-O-methylguanosine-3'-phosphate
  modified_base 13: mod_base = OTHER; note = 2'-O-methyladenosine-3'-phosphate
  modified_base 14: mod_base = OTHER; note = 2'-O-methyluridine-3'-phosphate
  modified_base 15: mod_base = OTHER; note = 2'-O-methyladenosine-3'-phosphate
  modified_base 16: mod_base = OTHER; note = 2'-O-methyluridine-3'-phosphate
  modified_base 17: mod_base = OTHER; note = 2'-O-methyluridine-3'-phosphate
  modified_base 18: mod_base = OTHER; note = 2'-O-methylguanosine-3'-phosphate
  modified_base 19: mod_base = OTHER; note = 2'-O-methyluridine-3'-phosphate
  modified_base 20: mod_base = OTHER; note = 2'-O-methylguanosine-3'-phosphate
  modified_base 21: mod_base = OTHER; note = 2'-O-methyluridine-3'-phosphate ((2S,4R)-1-[29-[[2-(acetylamino)-2-deoxy-beta-D-galactopyra nosyl]oxy]-14,14-bis[[3-[[3-[[5-[[2-(acetylamino)-2-deoxy-b eta-D-galactopyranosyl]oxy]-1-oxopentyl]amino]propyl]amino] -3-oxopropoxy]methyl]-1,12,19,25-tetraoxo-16-oxa-13,20,24-t riazanonacos-1-yl]-4-hydroxy-2-pyrrolidinyl)methyl ester
aacttaataaagatattgtgt

SEQ ID NO: 4907 - RNA, 21 nt, synthetic construct
  source 1..21: mol_type = other RNA
  modified_base 1: mod_base = OTHER; note = 2'-O-methyluridine-3'-phosphorothioate
  modified_base 2: mod_base = OTHER; note = 2'-O-methyluridine-3'-phosphorothioate
  modified_base 3: mod_base = OTHER; note = 2'-O-methyluridine-3'-phosphate
  modified_base 4: mod_base = OTHER; note = 2'-O-methylcytidine-3'-phosphate
  modified_base 5: mod_base = OTHER; note = 2'-O-methyluridine-3'-phosphate
  modified_base 6: mod_base = OTHER; note = 2'-O-docosanyl-adenosine-3'-phosphate
  modified_base 7: mod_base = OTHER; note = 2'-deoxy-2'-fluorouridine-3'-phosphate
  modified_base 8: mod_base = OTHER; note = 2'-O-methyluridine-3'-phosphate
  modified_base 9: mod_base = OTHER; note = 2'-deoxy-2'-fluorouridine-3'-phosphate
  modified_base 10: mod_base = OTHER; note = 2'-deoxy-2'-fluoroguanosine-3'-phosphate
  modified_base 11: mod_base = OTHER; note = 2'-deoxy-2'-fluorouridine-3'-phosphate
  modified_base 12: mod_base = OTHER; note = 2'-O-methylguanosine-3'-phosphate
  modified_base 13: mod_base = OTHER; note = 2'-O-methyluridine-3'-phosphate
  modified_base 14: mod_base = OTHER; note = 2'-O-methylcytidine-3'-phosphate
  modified_base 15: mod_base = OTHER; note = 2'-O-methyluridine-3'-phosphate
  modified_base 16: mod_base = OTHER; note = 2'-O-methylcytidine-3'-phosphate
  modified_base 17: mod_base = OTHER; note = 2'-O-methylcytidine-3'-phosphate
  modified_base 18: mod_base = OTHER; note = 2'-O-methyluridine-3'-phosphate
  modified_base 19: mod_base = OTHER; note = 2'-O-methylcytidine-3'-phosphate
  modified_base 20: mod_base = OTHER; note = 2'-O-methyluridine-3'-phosphate
  modified_base 21: mod_base = OTHER; note = 2'-O-methyluridine-3'-phosphate ((2S,4R)-1-[29-[[2-(acetylamino)-2-deoxy-beta-D-galactopyra nosyl]oxy]-14,14-bis[[3-[[3-[[5-[[2-(acetylamino)-2-deoxy-b eta-D-galactopyranosyl]oxy]-1-oxopentyl]amino]propyl]amino] -3-oxopropoxy]methyl]-1,12,19,25-tetraoxo-16-oxa-13,20,24-t riazanonacos-1-yl]-4-hydroxy-2-pyrrolidinyl)methyl ester
tttctatttgtgtctcctctt

SEQ ID NO: 4908 - RNA, 21 nt, synthetic construct
  source 1..21: mol_type = other RNA
  modified_base 1: mod_base = OTHER; note = 2'-O-methylguanosine-3'-phosphorothioate
  modified_base 2: mod_base = OTHER; note = 2'-O-methylcytidine-3'-phosphorothioate
  modified_base 3: mod_base = OTHER; note = 2'-O-methyluridine-3'-phosphate
  modified_base 4: mod_base = OTHER; note = 2'-O-methyluridine-3'-phosphate
  modified_base 5: mod_base = OTHER; note = 2'-O-methyladenosine-3'-phosphate
  modified_base 6: mod_base = OTHER; note = 2'-O-docosanyl-cytidine-3'-phosphate
  modified_base 7: mod_base = OTHER; note = 2'-deoxy-2'-fluoroadenosine-3'-phosphate
  modified_base 8: mod_base = OTHER; note = 2'-O-methyladenosine-3'-phosphate
  modified_base 9: mod_base = OTHER; note = 2'-deoxy-2'-fluoroadenosine-3'-phosphate
  modified_base 10: mod_base = OTHER; note = 2'-deoxy-2'-fluorouridine-3'-phosphate
  modified_base 11: mod_base = OTHER; note = 2'-deoxy-2'-fluoroguanosine-3'-phosphate
  modified_base 12: mod_base = OTHER; note = 2'-O-methyluridine-3'-phosphate
  modified_base 13: mod_base = OTHER; note = 2'-O-methyluridine-3'-phosphate
  modified_base 14: mod_base = OTHER; note = 2'-O-methyluridine-3'-phosphate
  modified_base 15: mod_base = OTHER; note = 2'-O-methylguanosine-3'-phosphate
  modified_base 16: mod_base = OTHER; note = 2'-O-methylcytidine-3'-phosphate
  modified_base 17: mod_base = OTHER; note = 2'-O-methylcytidine-3'-phosphate
  modified_base 18: mod_base = OTHER; note = 2'-O-methyladenosine-3'-phosphate
  modified_base 19: mod_base = OTHER; note = 2'-O-methyluridine-3'-phosphate
  modified_base 20: mod_base = OTHER; note = 2'-O-methyluridine-3'-phosphate
  modified_base 21: mod_base = OTHER; note = 2'-O-methyluridine-3'-phosphate ((2S,4R)-1-[29-[[2-(acetylamino)-2-deoxy-beta-D-galactopyra nosyl]oxy]-14,14-bis[[3-[[3-[[5-[[2-(acetylamino)-2-deoxy-b eta-D-galactopyranosyl]oxy]-1-oxopentyl]amino]propyl]amino] -3-oxopropoxy]methyl]-1,12,19,25-tetraoxo-16-oxa-13,20,24-t riazanonacos-1-yl]-4-hydroxy-2-pyrrolidinyl)methyl ester
gcttacaaatgtttgccattt

SEQ ID NO: 4909 - RNA, 21 nt, synthetic construct
  source 1..21: mol_type = other RNA
  modified_base 1: mod_base = OTHER; note = 2'-O-methylcytidine-3'-phosphorothioate
  modified_base 2: mod_base = OTHER; note = 2'-O-methyluridine-3'-phosphorothioate
  modified_base 3: mod_base = OTHER; note = 2'-O-methylguanosine-3'-phosphate
  modified_base 4: mod_base = OTHER; note = 2'-O-methyluridine-3'-phosphate
  modified_base 5: mod_base = OTHER; note = 2'-O-methylguanosine-3'-phosphate
  modified_base 6: mod_base = OTHER; note = 2'-O-docosanyl-adenosine-3'-phosphate
  modified_base 7: mod_base = OTHER; note = 2'-deoxy-2'-fluorouridine-3'-phosphate
  modified_base 8: mod_base = OTHER; note = 2'-O-methyluridine-3'-phosphate
  modified_base 9: mod_base = OTHER; note = 2'-deoxy-2'-fluorouridine-3'-phosphate
  modified_base 10: mod_base = OTHER; note = 2'-deoxy-2'-fluorouridine-3'-phosphate
  modified_base 11: mod_base = OTHER; note = 2'-deoxy-2'-fluorouridine-3'-phosphate
  modified_base 12: mod_base = OTHER; note = 2'-O-methylguanosine-3'-phosphate
  modified_base 13: mod_base = OTHER; note = 2'-O-methyluridine-3'-phosphate
  modified_base 14: mod_base = OTHER; note = 2'-O-methyluridine-3'-phosphate
  modified_base 15: mod_base = OTHER; note = 2'-O-methylcytidine-3'-phosphate
  modified_base 16: mod_base = OTHER; note = 2'-O-methyluridine-3'-phosphate
  modified_base 17: mod_base = OTHER; note = 2'-O-methylcytidine-3'-phosphate
  modified_base 18: mod_base = OTHER; note = 2'-O-methyluridine-3'-phosphate
  modified_base 19: mod_base = OTHER; note = 2'-O-methyluridine-3'-phosphate
  modified_base 20: mod_base = OTHER; note = 2'-O-methylcytidine-3'-phosphate
  modified_base 21: mod_base = OTHER; note = 2'-O-methyluridine-3'-phosphate ((2S,4R)-1-[29-[[2-(acetylamino)-2-deoxy-beta-D-galactopyra nosyl]oxy]-14,14-bis[[3-[[3-[[5-[[2-(acetylamino)-2-deoxy-b eta-D-galactopyranosyl]oxy]-1-oxopentyl]amino]propyl]amino] -3-oxopropoxy]methyl]-1,12,19,25-tetraoxo-16-oxa-13,20,24-t riazanonacos-1-yl]-4-hydroxy-2-pyrrolidinyl)methyl ester
ctgtgatttttgttctcttct

SEQ ID NO: 4910 - RNA, 21 nt, synthetic construct
  source 1..21: mol_type = other RNA
  modified_base 1: mod_base = OTHER; note = 2'-O-methyluridine-3'-phosphorothioate
  modified_base 2: mod_base = OTHER; note = 2'-O-methylguanosine-3'-phosphorothioate
  modified_base 3: mod_base = OTHER; note = 2'-O-methyladenosine-3'-phosphate
  modified_base 4: mod_base = OTHER; note = 2'-O-methyluridine-3'-phosphate
  modified_base 5: mod_base = OTHER; note = 2'-O-methylcytidine-3'-phosphate
  modified_base 6: mod_base = OTHER; note = 2'-O-docosanyl-guanosine-3'-phosphate
  modified_base 7: mod_base = OTHER; note = 2'-deoxy-2'-fluoroadenosine-3'-phosphate
  modified_base 8: mod_base = OTHER; note = 2'-O-methyladenosine-3'-phosphate
  modified_base 9: mod_base = OTHER; note = 2'-deoxy-2'-fluoroguanosine-3'-phosphate
  modified_base 10: mod_base = OTHER; note = 2'-deoxy-2'-fluorocytidine-3'-phosphate
  modified_base 11: mod_base = OTHER; note = 2'-deoxy-2'-fluorouridine-3'-phosphate
  modified_base 12: mod_base = OTHER; note = 2'-O-methyladenosine-3'-phosphate
  modified_base 13: mod_base = OTHER; note = 2'-O-methyluridine-3'-phosphate
  modified_base 14: mod_base = OTHER; note = 2'-O-methylcytidine-3'-phosphate
  modified_base 15: mod_base = OTHER; note = 2'-O-methyladenosine-3'-phosphate
  modified_base 16: mod_base = OTHER; note = 2'-O-methyladenosine-3'-phosphate
  modified_base 17: mod_base = OTHER; note = 2'-O-methylcytidine-3'-phosphate
  modified_base 18: mod_base = OTHER; note = 2'-O-methyladenosine-3'-phosphate
  modified_base 19: mod_base = OTHER; note = 2'-O-methyladenosine-3'-phosphate
  modified_base 20: mod_base = OTHER; note = 2'-O-methyluridine-3'-phosphate
  modified_base 21: mod_base = OTHER; note = 2'-O-methyluridine-3'-phosphate ((2S,4R)-1-[29-[[2-(acetylamino)-2-deoxy-beta-D-galactopyra nosyl]oxy]-14,14-bis[[3-[[3-[[5-[[2-(acetylamino)-2-deoxy-b eta-D-galactopyranosyl]oxy]-1-oxopentyl]amino]propyl]amino] -3-oxopropoxy]methyl]-1,12,19,25-tetraoxo-16-oxa-13,20,24-t riazanonacos-1-yl]-4-hydroxy-2-pyrrolidinyl)methyl ester
tgatcgaagctatcaacaatt

SEQ ID NO: 4911 - RNA, 21 nt, synthetic construct
  source 1..21: mol_type = other RNA
  modified_base 1: mod_base = OTHER; note = 2'-O-methyladenosine-3'-phosphorothioate
  modified_base 2: mod_base = OTHER; note = 2'-O-methyluridine-3'-phosphorothioate
  modified_base 3: mod_base = OTHER; note = 2'-O-methylguanosine-3'-phosphate
  modified_base 4: mod_base = OTHER; note = 2'-O-methylcytidine-3'-phosphate
  modified_base 5: mod_base = OTHER; note = 2'-O-methylcytidine-3'-phosphate
  modified_base 6: mod_base = OTHER; note = 2'-O-docosanyl-uridine-3'-phosphate
  modified_base 7: mod_base = OTHER; note = 2'-deoxy-2'-fluoroguanosine-3'-phosphate
  modified_base 8: mod_base = OTHER; note = 2'-O-methyluridine-3'-phosphate
  modified_base 9: mod_base = OTHER; note = 2'-deoxy-2'-fluorouridine-3'-phosphate
  modified_base 10: mod_base = OTHER; note = 2'-deoxy-2'-fluorouridine-3'-phosphate
  modified_base 11: mod_base = OTHER; note = 2'-deoxy-2'-fluoroadenosine-3'-phosphate
  modified_base 12: mod_base = OTHER; note = 2'-O-methyluridine-3'-phosphate
  modified_base 13: mod_base = OTHER; note = 2'-O-methylguanosine-3'-phosphate
  modified_base 14: mod_base = OTHER; note = 2'-O-methylcytidine-3'-phosphate
  modified_base 15: mod_base = OTHER; note = 2'-O-methyluridine-3'-phosphate
  modified_base 16: mod_base = OTHER; note = 2'-O-methylguanosine-3'-phosphate
  modified_base 17: mod_base = OTHER; note = 2'-O-methyluridine-3'-phosphate
  modified_base 18: mod_base = OTHER; note = 2'-O-methyluridine-3'-phosphate
  modified_base 19: mod_base = OTHER; note = 2'-O-methylcytidine-3'-phosphate
  modified_base 20: mod_base = OTHER; note = 2'-O-methyladenosine-3'-phosphate
  modified_base 21: mod_base = OTHER; note = 2'-O-methyluridine-3'-phosphate ((2S,4R)-1-[29-[[2-(acetylamino)-2-deoxy-beta-D-galactopyra nosyl]oxy]-14,14-bis[[3-[[3-[[5-[[2-(acetylamino)-2-deoxy-b eta-D-galactopyranosyl]oxy]-1-oxopentyl]amino]propyl]amino] -3-oxopropoxy]methyl]-1,12,19,25-tetraoxo-16-oxa-13,20,24-t riazanonacos-1-yl]-4-hydroxy-2-pyrrolidinyl)methyl ester
atgcctgtttatgctgttcat

SEQ ID NO: 4912 - RNA, 21 nt, synthetic construct
  source 1..21: mol_type = other RNA
  modified_base 1: mod_base = OTHER; note = 2'-O-methyladenosine-3'-phosphorothioate
  modified_base 2: mod_base = OTHER; note = 2'-O-methylguanosine-3'-phosphorothioate
  modified_base 3: mod_base = OTHER; note = 2'-O-methyladenosine-3'-phosphate
  modified_base 4: mod_base = OTHER; note = 2'-O-methyladenosine-3'-phosphate
  modified_base 5: mod_base = OTHER; note = 2'-O-methyluridine-3'-phosphate
  modified_base 6: mod_base = OTHER; note = 2'-O-docosanyl-uridine-3'-phosphate
  modified_base 7: mod_base = OTHER; note = 2'-deoxy-2'-fluorouridine-3'-phosphate
  modified_base 8: mod_base = OTHER; note = 2'-O-methylcytidine-3'-phosphate
  modified_base 9: mod_base = OTHER; note = 2'-deoxy-2'-fluorocytidine-3'-phosphate
  modified_base 10: mod_base = OTHER; note = 2'-deoxy-2'-fluorocytidine-3'-phosphate
  modified_base 11: mod_base = OTHER; note = 2'-deoxy-2'-fluoroadenosine-3'-phosphate
  modified_base 12: mod_base = OTHER; note = 2'-O-methylguanosine-3'-phosphate
  modified_base 13: mod_base = OTHER; note = 2'-O-methyluridine-3'-phosphate
  modified_base 14: mod_base = OTHER; note = 2'-O-methyluridine-3'-phosphate
  modified_base 15: mod_base = OTHER; note = 2'-O-methyluridine-3'-phosphate
  modified_base 16: mod_base = OTHER; note = 2'-O-methyladenosine-3'-phosphate
  modified_base 17: mod_base = OTHER; note = 2'-O-methyladenosine-3'-phosphate
  modified_base 18: mod_base = OTHER; note = 2'-O-methyladenosine-3'-phosphate
  modified_base 19: mod_base = OTHER; note = 2'-O-methyladenosine-3'-phosphate
  modified_base 20: mod_base = OTHER; note = 2'-O-methylcytidine-3'-phosphate
  modified_base 21: mod_base = OTHER; note = 2'-O-methyluridine-3'-phosphate ((2S,4R)-1-[29-[[2-(acetylamino)-2-deoxy-beta-D-galactopyra nosyl]oxy]-14,14-bis[[3-[[3-[[5-[[2-(acetylamino)-2-deoxy-b eta-D-galactopyranosyl]oxy]-1-oxopentyl]amino]propyl]amino] -3-oxopropoxy]methyl]-1,12,19,25-tetraoxo-16-oxa-13,20,24-t riazanonacos-1-yl]-4-hydroxy-2-pyrrolidinyl)methyl ester
agaatttcccagtttaaaact

SEQ ID NO: 4913 - RNA, 21 nt, synthetic construct
  source 1..21: mol_type = other RNA
  modified_base 1: mod_base = OTHER; note = 2'-O-methylguanosine-3'-phosphorothioate
  modified_base 2: mod_base = OTHER; note = 2'-O-methyluridine-3'-phosphorothioate
  modified_base 3: mod_base = OTHER; note = 2'-O-methyladenosine-3'-phosphate
  modified_base 4: mod_base = OTHER; note = 2'-O-methylguanosine-3'-phosphate
  modified_base 5: mod_base = OTHER; note = 2'-O-methyladenosine-3'-phosphate
  modified_base 6: mod_base = OTHER; note = 2'-O-docosanyl-uridine-3'-phosphate
  modified_base 7: mod_base = OTHER; note = 2'-deoxy-2'-fluorocytidine-3'-phosphate
  modified_base 8: mod_base = OTHER; note = 2'-O-methyladenosine-3'-phosphate
  modified_base 9: mod_base = OTHER; note = 2'-deoxy-2'-fluoroadenosine-3'-phosphate
  modified_base 10: mod_base = OTHER; note = 2'-deoxy-2'-fluoroguanosine-3'-phosphate
  modified_base 11: mod_base = OTHER; note = 2'-deoxy-2'-fluorouridine-3'-phosphate
  modified_base 12: mod_base = OTHER; note = 2'-O-methyluridine-3'-phosphate
  modified_base 13: mod_base = OTHER; note = 2'-O-methyluridine-3'-phosphate
  modified_base 14: mod_base = OTHER; note = 2'-O-methylguanosine-3'-phosphate
  modified_base 15: mod_base = OTHER; note = 2'-O-methyluridine-3'-phosphate
  modified_base 16: mod_base = OTHER; note = 2'-O-methylcytidine-3'-phosphate
  modified_base 17: mod_base = OTHER; note = 2'-O-methyluridine-3'-phosphate
  modified_base 18: mod_base = OTHER; note = 2'-O-methyluridine-3'-phosphate
  modified_base 19: mod_base = OTHER; note = 2'-O-methylcytidine-3'-phosphate
  modified_base 20: mod_base = OTHER; note = 2'-O-methylcytidine-3'-phosphate
  modified_base 21: mod_base = OTHER; note = 2'-O-methyluridine-3'-phosphate ((2S,4R)-1-[29-[[2-(acetylamino)-2-deoxy-beta-D-galactopyra nosyl]oxy]-14,14-bis[[3-[[3-[[5-[[2-(acetylamino)-2-deoxy-b eta-D-galactopyranosyl]oxy]-1-oxopentyl]amino]propyl]amino] -3-oxopropoxy]methyl]-1,12,19,25-tetraoxo-16-oxa-13,20,24-t riazanonacos-1-yl]-4-hydroxy-2-pyrrolidinyl)methyl ester
gtagatcaagtttgtcttcct

SEQ ID NO: 4914 - RNA, 21 nt, synthetic construct
  source 1..21: mol_type = other RNA
  modified_base 1: mod_base = OTHER; note = 2'-O-methyladenosine-3'-phosphorothioate
  modified_base 2: mod_base = OTHER; note = 2'-O-methylcytidine-3'-phosphorothioate
  modified_base 3: mod_base = OTHER; note = 2'-O-methyladenosine-3'-phosphate
  modified_base 4: mod_base = OTHER; note = 2'-O-methyladenosine-3'-phosphate
  modified_base 5: mod_base = OTHER; note = 2'-O-methylcytidine-3'-phosphate
  modified_base 6: mod_base = OTHER; note = 2'-O-docosanyl-cytidine-3'-phosphate
  modified_base 7: mod_base = OTHER; note = 2'-deoxy-2'-fluorocytidine-3'-phosphate
  modified_base 8: mod_base = OTHER; note = 2'-O-methyluridine-3'-phosphate
  modified_base 9: mod_base = OTHER; note = 2'-deoxy-2'-fluorouridine-3'-phosphate
  modified_base 10: mod_base = OTHER; note = 2'-deoxy-2'-fluorocytidine-3'-phosphate
  modified_base 11: mod_base = OTHER; note = 2'-deoxy-2'-fluorocytidine-3'-phosphate
  modified_base 12: mod_base = OTHER; note = 2'-O-methyluridine-3'-phosphate
  modified_base 13: mod_base = OTHER; note = 2'-O-methylcytidine-3'-phosphate
  modified_base 14: mod_base = OTHER; note = 2'-O-methyluridine-3'-phosphate
  modified_base 15: mod_base = OTHER; note = 2'-O-methyluridine-3'-phosphate
  modified_base 16: mod_base = OTHER; note = 2'-O-methyluridine-3'-phosphate
  modified_base 17: mod_base = OTHER; note = 2'-O-methyluridine-3'-phosphate
  modified_base 18: mod_base = OTHER; note = 2'-O-methylcytidine-3'-phosphate
  modified_base 19: mod_base = OTHER; note = 2'-O-methyluridine-3'-phosphate
  modified_base 20: mod_base = OTHER; note = 2'-O-methylcytidine-3'-phosphate
  modified_base 21: mod_base = OTHER; note = 2'-O-methyluridine-3'-phosphate ((2S,4R)-1-[29-[[2-(acetylamino)-2-deoxy-beta-D-galactopyra nosyl]oxy]-14,14-bis[[3-[[3-[[5-[[2-(acetylamino)-2-deoxy-b eta-D-galactopyranosyl]oxy]-1-oxopentyl]amino]propyl]amino] -3-oxopropoxy]methyl]-1,12,19,25-tetraoxo-16-oxa-13,20,24-t riazanonacos-1-yl]-4-hydroxy-2-pyrrolidinyl)methyl ester
acaacccttcctcttttctct

SEQ ID NO: 4915 - RNA, 21 nt, synthetic construct
  source 1..21: mol_type = other RNA
  modified_base 1: mod_base = OTHER; note = 2'-O-methyladenosine-3'-phosphorothioate
  modified_base 2: mod_base = OTHER; note = 2'-O-methylguanosine-3'-phosphorothioate
  modified_base 3: mod_base = OTHER; note = 2'-O-methyluridine-3'-phosphate
  modified_base 4: mod_base = OTHER; note = 2'-O-methylguanosine-3'-phosphate
  modified_base 5: mod_base = OTHER; note = 2'-O-methyladenosine-3'-phosphate
  modified_base 6: mod_base = OTHER; note = 2'-O-docosanyl-adenosine-3'-phosphate
  modified_base 7: mod_base = OTHER; note = 2'-deoxy-2'-fluoroadenosine-3'-phosphate
  modified_base 8: mod_base = OTHER; note = 2'-O-methyluridine-3'-phosphate
  modified_base 9: mod_base = OTHER; note = 2'-deoxy-2'-fluorouridine-3'-phosphate
  modified_base 10: mod_base = OTHER; note = 2'-deoxy-2'-fluorouridine-3'-phosphate
  modified_base 11: mod_base = OTHER; note = 2'-deoxy-2'-fluoroguanosine-3'-phosphate
  modified_base 12: mod_base = OTHER; note = 2'-O-methylcytidine-3'-phosphate
  modified_base 13: mod_base = OTHER; note = 2'-O-methyladenosine-3'-phosphate
  modified_base 14: mod_base = OTHER; note = 2'-O-methyluridine-3'-phosphate
  modified_base 15: mod_base = OTHER; note = 2'-O-methyladenosine-3'-phosphate
  modified_base 16: mod_base = OTHER; note = 2'-O-methyladenosine-3'-phosphate
  modified_base 17: mod_base = OTHER; note = 2'-O-methyluridine-3'-phosphate
  modified_base 18: mod_base = OTHER; note = 2'-O-methylguanosine-3'-phosphate
  modified_base 19: mod_base = OTHER; note = 2'-O-methyladenosine-3'-phosphate
  modified_base 20: mod_base = OTHER; note = 2'-O-methyladenosine-3'-phosphate
  modified_base 21: mod_base = OTHER; note = 2'-O-methyluridine-3'-phosphate ((2S,4R)-1-[29-[[2-(acetylamino)-2-deoxy-beta-D-galactopyra nosyl]oxy]-14,14-bis[[3-[[3-[[5-[[2-(acetylamino)-2-deoxy-b eta-D-galactopyranosyl]oxy]-1-oxopentyl]amino]propyl]amino] -3-oxopropoxy]methyl]-1,12,19,25-tetraoxo-16-oxa-13,20,24-t riazanonacos-1-yl]-4-hydroxy-2-pyrrolidinyl)methyl ester
agtgaaatttgcataatgaat

SEQ ID NO: 4916 - RNA, 21 nt, synthetic construct
  source 1..21: mol_type = other RNA
  modified_base 1: mod_base = OTHER; note = 2'-O-methyluridine-3'-phosphorothioate
  modified_base 2: mod_base = OTHER; note = 2'-O-methyluridine-3'-phosphorothioate
  modified_base 3: mod_base = OTHER; note = 2'-O-methyladenosine-3'-phosphate
  modified_base 4: mod_base = OTHER; note = 2'-O-methylguanosine-3'-phosphate
  modified_base 5: mod_base = OTHER; note = 2'-O-methylguanosine-3'-phosphate
  modified_base 6: mod_base = OTHER; note = 2'-O-docosanyl-adenosine-3'-phosphate
  modified_base 7: mod_base = OTHER; note = 2'-deoxy-2'-fluorouridine-3'-phosphate
  modified_base 8: mod_base = OTHER; note = 2'-O-methyladenosine-3'-phosphate
  modified_base 9: mod_base = OTHER; note = 2'-deoxy-2'-fluorouridine-3'-phosphate
  modified_base 10: mod_base = OTHER; note = 2'-deoxy-2'-fluoroadenosine-3'-phosphate
  modified_base 11: mod_base = OTHER; note = 2'-deoxy-2'-fluorouridine-3'-phosphate
  modified_base 12: mod_base = OTHER; note = 2'-O-methyluridine-3'-phosphate
  modified_base 13: mod_base = OTHER; note = 2'-O-methylcytidine-3'-phosphate
  modified_base 14: mod_base = OTHER; note = 2'-O-methyladenosine-3'-phosphate
  modified_base 15: mod_base = OTHER; note = 2'-O-methylcytidine-3'-phosphate
  modified_base 16: mod_base = OTHER; note = 2'-O-methyladenosine-3'-phosphate
  modified_base 17: mod_base = OTHER; note = 2'-O-methyluridine-3'-phosphate
  modified_base 18: mod_base = OTHER; note = 2'-O-methyluridine-3'-phosphate
  modified_base 19: mod_base = OTHER; note = 2'-O-methylguanosine-3'-phosphate
  modified_base 20: mod_base = OTHER; note = 2'-O-methyluridine-3'-phosphate
  modified_base 21: mod_base = OTHER; note = 2'-O-methyluridine-3'-phosphate ((2S,4R)-1-[29-[[2-(acetylamino)-2-deoxy-beta-D-galactopyra nosyl]oxy]-14,14-bis[[3-[[3-[[5-[[2-(acetylamino)-2-deoxy-b eta-D-galactopyranosyl]oxy]-1-oxopentyl]amino]propyl]amino] -3-oxopropoxy]methyl]-1,12,19,25-tetraoxo-16-oxa-13,20,24-t riazanonacos-1-yl]-4-hydroxy-2-pyrrolidinyl)methyl ester
ttaggatatattcacattgtt

SEQ ID NO: 4917 - RNA, 21 nt, synthetic construct
  source 1..21: mol_type = other RNA
  modified_base 1: mod_base = OTHER; note = 2'-O-methyluridine-3'-phosphorothioate
  modified_base 2: mod_base = OTHER; note = 2'-O-methylcytidine-3'-phosphorothioate
  modified_base 3: mod_base = OTHER; note = 2'-O-methyluridine-3'-phosphate
  modified_base 4: mod_base = OTHER; note = 2'-O-methyluridine-3'-phosphate
  modified_base 5: mod_base = OTHER; note = 2'-O-methyladenosine-3'-phosphate
  modified_base 6: mod_base = OTHER; note = 2'-O-docosanyl-guanosine-3'-phosphate
  modified_base 7: mod_base = OTHER; note = 2'-deoxy-2'-fluoroadenosine-3'-phosphate
  modified_base 8: mod_base = OTHER; note = 2'-O-methyluridine-3'-phosphate
  modified_base 9: mod_base = OTHER; note = 2'-deoxy-2'-fluoroadenosine-3'-phosphate
  modified_base 10: mod_base = OTHER; note = 2'-deoxy-2'-fluorouridine-3'-phosphate
  modified_base 11: mod_base = OTHER; note = 2'-deoxy-2'-fluorouridine-3'-phosphate
  modified_base 12: mod_base = OTHER; note = 2'-O-methyladenosine-3'-phosphate
  modified_base 13: mod_base = OTHER; note = 2'-O-methyluridine-3'-phosphate
  modified_base 14: mod_base = OTHER; note = 2'-O-methyluridine-3'-phosphate
  modified_base 15: mod_base = OTHER; note = 2'-O-methylguanosine-3'-phosphate
  modified_base 16: mod_base = OTHER; note = 2'-O-methylcytidine-3'-phosphate
  modified_base 17: mod_base = OTHER; note = 2'-O-methyluridine-3'-phosphate
  modified_base 18: mod_base = OTHER; note = 2'-O-methyladenosine-3'-phosphate
  modified_base 19: mod_base = OTHER; note = 2'-O-methylguanosine-3'-phosphate
  modified_base 20: mod_base = OTHER; note = 2'-O-methyluridine-3'-phosphate
  modified_base 21: mod_base = OTHER; note = 2'-O-methyluridine-3'-phosphate ((2S,4R)-1-[29-[[2-(acetylamino)-2-deoxy-beta-D-galactopyra nosyl]oxy]-14,14-bis[[3-[[3-[[5-[[2-(acetylamino)-2-deoxy-b eta-D-galactopyranosyl]oxy]-1-oxopentyl]amino]propyl]amino] -3-oxopropoxy]methyl]-1,12,19,25-tetraoxo-16-oxa-13,20,24-t riazanonacos-1-yl]-4-hydroxy-2-pyrrolidinyl)methyl ester
tcttagatattattgctagtt

SEQ ID NO: 4918 - RNA, 21 nt, synthetic construct
  source 1..21: mol_type = other RNA
  modified_base 1: mod_base = OTHER; note = 2'-O-methylcytidine-3'-phosphorothioate
  modified_base 2: mod_base = OTHER; note = 2'-O-methyluridine-3'-phosphorothioate
  modified_base 3: mod_base = OTHER; note = 2'-O-methylguanosine-3'-phosphate
  modified_base 4: mod_base = OTHER; note = 2'-O-methylguanosine-3'-phosphate
  modified_base 5: mod_base = OTHER; note = 2'-O-methyluridine-3'-phosphate
  modified_base 6: mod_base = OTHER; note = 2'-O-docosanyl-uridine-3'-phosphate
  modified_base 7: mod_base = OTHER; note = 2'-deoxy-2'-fluoroadenosine-3'-phosphate
  modified_base 8: mod_base = OTHER; note = 2'-O-methyladenosine-3'-phosphate
  modified_base 9: mod_base = OTHER; note = 2'-deoxy-2'-fluoroadenosine-3'-phosphate
  modified_base 10: mod_base = OTHER; note = 2'-deoxy-2'-fluoroadenosine-3'-phosphate
  modified_base 11: mod_base = OTHER; note = 2'-deoxy-2'-fluorouridine-3'-phosphate
  modified_base 12: mod_base = OTHER; note = 2'-O-methylguanosine-3'-phosphate
  modified_base 13: mod_base = OTHER; note = 2'-O-methylguanosine-3'-phosphate
  modified_base 14: mod_base = OTHER; note = 2'-O-methyladenosine-3'-phosphate
  modified_base 15: mod_base = OTHER; note = 2'-O-methyluridine-3'-phosphate
  modified_base 16: mod_base = OTHER; note = 2'-O-methylguanosine-3'-phosphate
  modified_base 17: mod_base = OTHER; note = 2'-O-methyladenosine-3'-phosphate
  modified_base 18: mod_base = OTHER; note = 2'-O-methyluridine-3'-phosphate
  modified_base 19: mod_base = OTHER; note = 2'-O-methyluridine-3'-phosphate
  modified_base 20: mod_base = OTHER; note = 2'-O-methyluridine-3'-phosphate
  modified_base 21: mod_base = OTHER; note = 2'-O-methyluridine-3'-phosphate ((2S,4R)-1-[29-[[2-(acetylamino)-2-deoxy-beta-D-galactopyra nosyl]oxy]-14,14-bis[[3-[[3-[[5-[[2-(acetylamino)-2-deoxy-b eta-D-galactopyranosyl]oxy]-1-oxopentyl]amino]propyl]amino] -3-oxopropoxy]methyl]-1,12,19,25-tetraoxo-16-oxa-13,20,24-t riazanonacos-1-yl]-4-hydroxy-2-pyrrolidinyl)methyl ester
ctggttaaaatggatgatttt

SEQ ID NO: 4919 - RNA, 21 nt, synthetic construct
  source 1..21: mol_type = other RNA
  modified_base 1: mod_base = OTHER; note = 2'-O-methylcytidine-3'-phosphorothioate
  modified_base 2: mod_base = OTHER; note = 2'-O-methyluridine-3'-phosphorothioate
  modified_base 3: mod_base = OTHER; note = 2'-O-methyluridine-3'-phosphate
  modified_base 4: mod_base = OTHER; note = 2'-O-methylcytidine-3'-phosphate
  modified_base 5: mod_base = OTHER; note = 2'-O-methylcytidine-3'-phosphate
  modified_base 6: mod_base = OTHER; note = 2'-O-docosanyl-cytidine-3'-phosphate
  modified_base 7: mod_base = OTHER; note = 2'-deoxy-2'-fluorouridine-3'-phosphate
  modified_base 8: mod_base = OTHER; note = 2'-O-methylguanosine-3'-phosphate
  modified_base 9: mod_base = OTHER; note = 2'-deoxy-2'-fluoroadenosine-3'-phosphate
  modified_base 10: mod_base = OTHER; note = 2'-deoxy-2'-fluoroadenosine-3'-phosphate
  modified_base 11: mod_base = OTHER; note = 2'-deoxy-2'-fluoroguanosine-3'-phosphate
  modified_base 12: mod_base = OTHER; note = 2'-O-methyluridine-3'-phosphate
  modified_base 13: mod_base = OTHER; note = 2'-O-methylguanosine-3'-phosphate
  modified_base 14: mod_base = OTHER; note = 2'-O-methylcytidine-3'-phosphate
  modified_base 15: mod_base = OTHER; note = 2'-O-methyluridine-3'-phosphate
  modified_base 16: mod_base = OTHER; note = 2'-O-methyluridine-3'-phosphate
  modified_base 17: mod_base = OTHER; note = 2'-O-methyluridine-3'-phosphate
  modified_base 18: mod_base = OTHER; note = 2'-O-methyladenosine-3'-phosphate
  modified_base 19: mod_base = OTHER; note = 2'-O-methylcytidine-3'-phosphate
  modified_base 20: mod_base = OTHER; note = 2'-O-methyladenosine-3'-phosphate
  modified_base 21: mod_base = OTHER; note = 2'-O-methyluridine-3'-phosphate ((2S,4R)-1-[29-[[2-(acetylamino)-2-deoxy-beta-D-galactopyra nosyl]oxy]-14,14-bis[[3-[[3-[[5-[[2-(acetylamino)-2-deoxy-b eta-D-galactopyranosyl]oxy]-1-oxopentyl]amino]propyl]amino] -3-oxopropoxy]methyl]-1,12,19,25-tetraoxo-16-oxa-13,20,24-t riazanonacos-1-yl]-4-hydroxy-2-pyrrolidinyl)methyl ester
cttccctgaagtgctttacat

SEQ ID NO: 4920 - RNA, 21 nt, synthetic construct
  source 1..21: mol_type = other RNA
  modified_base 1: mod_base = OTHER; note = 2'-O-methylcytidine-3'-phosphorothioate
  modified_base 2: mod_base = OTHER; note = 2'-O-methyladenosine-3'-phosphorothioate
  modified_base 3: mod_base = OTHER; note = 2'-O-methylcytidine-3'-phosphate
  modified_base 4: mod_base = OTHER; note = 2'-O-methylcytidine-3'-phosphate
  modified_base 5: mod_base = OTHER; note = 2'-O-methyladenosine-3'-phosphate
  modified_base 6: mod_base = OTHER; note = 2'-O-docosanyl-cytidine-3'-phosphate
  modified_base 7: mod_base = OTHER; note = 2'-deoxy-2'-fluorouridine-3'-phosphate
  modified_base 8: mod_base = OTHER; note = 2'-O-methylguanosine-3'-phosphate
  modified_base 9: mod_base = OTHER; note = 2'-deoxy-2'-fluorouridine-3'-phosphate
  modified_base 10: mod_base = OTHER; note = 2'-deoxy-2'-fluorocytidine-3'-phosphate
  modified_base 11: mod_base = OTHER; note = 2'-deoxy-2'-fluorouridine-3'-phosphate
  modified_base 12: mod_base = OTHER; note = 2'-O-methyluridine-3'-phosphate
  modified_base 13: mod_base = OTHER; note = 2'-O-methylguanosine-3'-phosphate
  modified_base 14: mod_base = OTHER; note = 2'-O-methyladenosine-3'-phosphate
  modified_base 15: mod_base = OTHER; note = 2'-O-methyluridine-3'-phosphate
  modified_base 16: mod_base = OTHER; note = 2'-O-methylguanosine-3'-phosphate
  modified_base 17: mod_base = OTHER; note = 2'-O-methylcytidine-3'-phosphate
  modified_base 18: mod_base = OTHER; note = 2'-O-methyluridine-3'-phosphate
  modified_base 19: mod_base = OTHER; note = 2'-O-methylcytidine-3'-phosphate
  modified_base 20: mod_base = OTHER; note = 2'-O-methyluridine-3'-phosphate
  modified_base 21: mod_base = OTHER; note = 2'-O-methyluridine-3'-phosphate ((2S,4R)-1-[29-[[2-(acetylamino)-2-deoxy-beta-D-galactopyra nosyl]oxy]-14,14-bis[[3-[[3-[[5-[[2-(acetylamino)-2-deoxy-b eta-D-galactopyranosyl]oxy]-1-oxopentyl]amino]propyl]amino] -3-oxopropoxy]methyl]-1,12,19,25-tetraoxo-16-oxa-13,20,24-t riazanonacos-1-yl]-4-hydroxy-2-pyrrolidinyl)methyl ester
caccactgtcttgatgctctt

SEQ ID NO: 4921 - RNA, 21 nt, synthetic construct
  source 1..21: mol_type = other RNA
  modified_base 1: mod_base = OTHER; note = 2'-O-methyladenosine-3'-phosphorothioate
  modified_base 2: mod_base = OTHER; note = 2'-O-methylcytidine-3'-phosphorothioate
  modified_base 3: mod_base = OTHER; note = 2'-O-methyladenosine-3'-phosphate
  modified_base 4: mod_base = OTHER; note = 2'-O-methyladenosine-3'-phosphate
  modified_base 5: mod_base = OTHER; note = 2'-O-methylcytidine-3'-phosphate
  modified_base 6: mod_base = OTHER; note = 2'-O-docosanyl-uridine-3'-phosphate
  modified_base 7: mod_base = OTHER; note = 2'-deoxy-2'-fluorocytidine-3'-phosphate
  modified_base 8: mod_base = OTHER; note = 2'-O-methyluridine-3'-phosphate
  modified_base 9: mod_base = OTHER; note = 2'-deoxy-2'-fluorouridine-3'-phosphate
  modified_base 10: mod_base = OTHER; note = 2'-deoxy-2'-fluoroguanosine-3'-phosphate
  modified_base 11: mod_base = OTHER; note = 2'-deoxy-2'-fluorouridine-3'-phosphate
  modified_base 12: mod_base = OTHER; note = 2'-O-methyluridine-3'-phosphate
  modified_base 13: mod_base = OTHER; note = 2'-O-methyluridine-3'-phosphate
  modified_base 14: mod_base = OTHER; note = 2'-O-methyluridine-3'-phosphate
  modified_base 15: mod_base = OTHER; note = 2'-O-methylguanosine-3'-phosphate
  modified_base 16: mod_base = OTHER; note = 2'-O-methylcytidine-3'-phosphate
  modified_base 17: mod_base = OTHER; note = 2'-O-methyluridine-3'-phosphate
  modified_base 18: mod_base = OTHER; note = 2'-O-methylguanosine-3'-phosphate
  modified_base 19: mod_base = OTHER; note = 2'-O-methyluridine-3'-phosphate
  modified_base 20: mod_base = OTHER; note = 2'-O-methyluridine-3'-phosphate
  modified_base 21: mod_base = OTHER; note = 2'-O-methyluridine-3'-phosphate ((2S,4R)-1-[29-[[2-(acetylamino)-2-deoxy-beta-D-galactopyra nosyl]oxy]-14,14-bis[[3-[[3-[[5-[[2-(acetylamino)-2-deoxy-b eta-D-galactopyranosyl]oxy]-1-oxopentyl]amino]propyl]amino] -3-oxopropoxy]methyl]-1,12,19,25-tetraoxo-16-oxa-13,20,24-t riazanonacos-1-yl]-4-hydroxy-2-pyrrolidinyl)methyl ester
acaactcttgttttgctgttt

SEQ ID NO: 4922 - RNA, 21 nt, synthetic construct
  source 1..21: mol_type = other RNA
  modified_base 1: mod_base = OTHER; note = 2'-O-methylcytidine-3'-phosphorothioate
  modified_base 2: mod_base = OTHER; note = 2'-O-methylcytidine-3'-phosphorothioate
  modified_base 3: mod_base = OTHER; note = 2'-O-methyluridine-3'-phosphate
  modified_base 4: mod_base = OTHER; note = 2'-O-methyluridine-3'-phosphate
  modified_base 5: mod_base = OTHER; note = 2'-O-methyluridine-3'-phosphate
  modified_base 6: mod_base = OTHER; note = 2'-O-docosanyl-cytidine-3'-phosphate
  modified_base 7: mod_base = OTHER; note = 2'-deoxy-2'-fluoroguanosine-3'-phosphate
  modified_base 8: mod_base = OTHER; note = 2'-O-methyluridine-3'-phosphate
  modified_base 9: mod_base = OTHER; note = 2'-deoxy-2'-fluorouridine-3'-phosphate
  modified_base 10: mod_base = OTHER; note = 2'-deoxy-2'-fluorouridine-3'-phosphate
  modified_base 11: mod_base = OTHER; note = 2'-deoxy-2'-fluoroguanosine-3'-phosphate
  modified_base 12: mod_base = OTHER; note = 2'-O-methylcytidine-3'-phosphate
  modified_base 13: mod_base = OTHER; note = 2'-O-methyluridine-3'-phosphate
  modified_base 14: mod_base = OTHER; note = 2'-O-methyluridine-3'-phosphate
  modified_base 15: mod_base = OTHER; note = 2'-O-methyluridine-3'-phosphate
  modified_base 16: mod_base = OTHER; note = 2'-O-methylcytidine-3'-phosphate
  modified_base 17: mod_base = OTHER; note = 2'-O-methyluridine-3'-phosphate
  modified_base 18: mod_base = OTHER; note = 2'-O-methyluridine-3'-phosphate
  modified_base 19: mod_base = OTHER; note = 2'-O-methyladenosine-3'-phosphate
  modified_base 20: mod_base = OTHER; note = 2'-O-methyluridine-3'-phosphate
  modified_base 21: mod_base = OTHER; note = 2'-O-methyluridine-3'-phosphate ((2S,4R)-1-[29-[[2-(acetylamino)-2-deoxy-beta-D-galactopyra nosyl]oxy]-14,14-bis[[3-[[3-[[5-[[2-(acetylamino)-2-deoxy-b eta-D-galactopyranosyl]oxy]-1-oxopentyl]amino]propyl]amino] -3-oxopropoxy]methyl]-1,12,19,25-tetraoxo-16-oxa-13,20,24-t riazanonacos-1-yl]-4-hydroxy-2-pyrrolidinyl)methyl ester
cctttcgtttgctttcttatt

SEQ ID NO: 4923 - RNA, 21 nt, synthetic construct
  source 1..21: mol_type = other RNA
  modified_base 1: mod_base = OTHER; note = 2'-O-methylguanosine-3'-phosphorothioate
  modified_base 2: mod_base = OTHER; note = 2'-O-methylguanosine-3'-phosphorothioate
  modified_base 3: mod_base = OTHER; note = 2'-O-methylguanosine-3'-phosphate
  modified_base 4: mod_base = OTHER; note = 2'-O-methylcytidine-3'-phosphate
  modified_base 5: mod_base = OTHER; note = 2'-O-methyladenosine-3'-phosphate
  modified_base 6: mod_base = OTHER; note = 2'-O-docosanyl-adenosine-3'-phosphate
  modified_base 7: mod_base = OTHER; note = 2'-deoxy-2'-fluoroadenosine-3'-phosphate
  modified_base 8: mod_base = OTHER; note = 2'-O-methyladenosine-3'-phosphate
  modified_base 9: mod_base = OTHER; note = 2'-deoxy-2'-fluorouridine-3'-phosphate
  modified_base 10: mod_base = OTHER; note = 2'-deoxy-2'-fluorocytidine-3'-phosphate
  modified_base 11: mod_base = OTHER; note = 2'-deoxy-2'-fluoroadenosine-3'-phosphate
  modified_base 12: mod_base = OTHER; note = 2'-O-methylcytidine-3'-phosphate
  modified_base 13: mod_base = OTHER; note = 2'-O-methyluridine-3'-phosphate
  modified_base 14: mod_base = OTHER; note = 2'-O-methyluridine-3'-phosphate
  modified_base 15: mod_base = OTHER; note = 2'-O-methyladenosine-3'-phosphate
  modified_base 16: mod_base = OTHER; note = 2'-O-methyluridine-3'-phosphate
  modified_base 17: mod_base = OTHER; note = 2'-O-methylguanosine-3'-phosphate
  modified_base 18: mod_base = OTHER; note = 2'-O-methyladenosine-3'-phosphate
  modified_base 19: mod_base = OTHER; note = 2'-O-methyladenosine-3'-phosphate
  modified_base 20: mod_base = OTHER; note = 2'-O-methyladenosine-3'-phosphate
  modified_base 21: mod_base = OTHER; note = 2'-O-methyluridine-3'-phosphate ((2S,4R)-1-[29-[[2-(acetylamino)-2-deoxy-beta-D-galactopyra nosyl]oxy]-14,14-bis[[3-[[3-[[5-[[2-(acetylamino)-2-deoxy-b eta-D-galactopyranosyl]oxy]-1-oxopentyl]amino]propyl]amino] -3-oxopropoxy]methyl]-1,12,19,25-tetraoxo-16-oxa-13,20,24-t riazanonacos-1-yl]-4-hydroxy-2-pyrrolidinyl)methyl ester
gggcaaaatcacttatgaaat

SEQ ID NO: 4924 - RNA, 21 nt, synthetic construct
  source 1..21: mol_type = other RNA
  modified_base 1: mod_base = OTHER; note = 2'-O-methyladenosine-3'-phosphorothioate
  modified_base 2: mod_base = OTHER; note = 2'-O-methyladenosine-3'-phosphorothioate
  modified_base 3: mod_base = OTHER; note = 2'-O-methylcytidine-3'-phosphate
  modified_base 4: mod_base = OTHER; note = 2'-O-methyladenosine-3'-phosphate
  modified_base 5: mod_base = OTHER; note = 2'-O-methylcytidine-3'-phosphate
  modified_base 6: mod_base = OTHER; note = 2'-O-docosanyl-uridine-3'-phosphate
  modified_base 7: mod_base = OTHER; note = 2'-deoxy-2'-fluorouridine-3'-phosphate
  modified_base 8: mod_base = OTHER; note = 2'-O-methyluridine-3'-phosphate
  modified_base 9: mod_base = OTHER; note = 2'-deoxy-2'-fluoroguanosine-3'-phosphate
  modified_base 10: mod_base = OTHER; note = 2'-deoxy-2'-fluoroadenosine-3'-phosphate
  modified_base 11: mod_base = OTHER; note = 2'-deoxy-2'-fluorouridine-3'-phosphate
  modified_base 12: mod_base = OTHER; note = 2'-O-methylguanosine-3'-phosphate
  modified_base 13: mod_base = OTHER; note = 2'-O-methyluridine-3'-phosphate
  modified_base 14: mod_base = OTHER; note = 2'-O-methyluridine-3'-phosphate
  modified_base 15: mod_base = OTHER; note = 2'-O-methyladenosine-3'-phosphate
  modified_base 16: mod_base = OTHER; note = 2'-O-methyluridine-3'-phosphate
  modified_base 17: mod_base = OTHER; note = 2'-O-methylcytidine-3'-phosphate
  modified_base 18: mod_base = OTHER; note = 2'-O-methyladenosine-3'-phosphate
  modified_base 19: mod_base = OTHER; note = 2'-O-methyluridine-3'-phosphate
  modified_base 20: mod_base = OTHER; note = 2'-O-methyluridine-3'-phosphate
  modified_base 21: mod_base = OTHER; note = 2'-O-methyluridine-3'-phosphate ((2S,4R)-1-[29-[[2-(acetylamino)-2-deoxy-beta-D-galactopyra nosyl]oxy]-14,14-bis[[3-[[3-[[5-[[2-(acetylamino)-2-deoxy-b eta-D-galactopyranosyl]oxy]-1-oxopentyl]amino]propyl]amino] -3-oxopropoxy]methyl]-1,12,19,25-tetraoxo-16-oxa-13,20,24-t riazanonacos-1-yl]-4-hydroxy-2-pyrrolidinyl)methyl ester
aacactttgatgttatcattt

SEQ ID NO: 4925 - RNA, 21 nt, synthetic construct
  source 1..21: mol_type = other RNA
  modified_base 1: mod_base = OTHER; note = 2'-O-methyluridine-3'-phosphorothioate
  modified_base 2: mod_base = OTHER; note = 2'-O-methyluridine-3'-phosphorothioate
  modified_base 3: mod_base = OTHER; note = 2'-O-methylcytidine-3'-phosphate
  modified_base 4: mod_base = OTHER; note = 2'-O-methylcytidine-3'-phosphate
  modified_base 5: mod_base = OTHER; note = 2'-O-methyluridine-3'-phosphate
  modified_base 6: mod_base = OTHER; note = 2'-O-docosanyl-cytidine-3'-phosphate
  modified_base 7: mod_base = OTHER; note = 2'-deoxy-2'-fluorocytidine-3'-phosphate
  modified_base 8: mod_base = OTHER; note = 2'-O-methyladenosine-3'-phosphate
  modified_base 9: mod_base = OTHER; note = 2'-deoxy-2'-fluoroadenosine-3'-phosphate
  modified_base 10: mod_base = OTHER; note = 2'-deoxy-2'-fluoroguanosine-3'-phosphate
  modified_base 11: mod_base = OTHER; note = 2'-deoxy-2'-fluoroguanosine-3'-phosphate
  modified_base 12: mod_base = OTHER; note = 2'-O-methyladenosine-3'-phosphate
  modified_base 13: mod_base = OTHER; note = 2'-O-methylguanosine-3'-phosphate
  modified_base 14: mod_base = OTHER; note = 2'-O-methyluridine-3'-phosphate
  modified_base 15: mod_base = OTHER; note = 2'-O-methyluridine-3'-phosphate
  modified_base 16: mod_base = OTHER; note = 2'-O-methyladenosine-3'-phosphate
  modified_base 17: mod_base = OTHER; note = 2'-O-methylguanosine-3'-phosphate
  modified_base 18: mod_base = OTHER; note = 2'-O-methyladenosine-3'-phosphate
  modified_base 19: mod_base = OTHER; note = 2'-O-methyladenosine-3'-phosphate
  modified_base 20: mod_base = OTHER; note = 2'-O-methyluridine-3'-phosphate
  modified_base 21: mod_base = OTHER; note = 2'-O-methyluridine-3'-phosphate ((2S,4R)-1-[29-[[2-(acetylamino)-2-deoxy-beta-D-galactopyra nosyl]oxy]-14,14-bis[[3-[[3-[[5-[[2-(acetylamino)-2-deoxy-b eta-D-galactopyranosyl]oxy]-1-oxopentyl]amino]propyl]amino] -3-oxopropoxy]methyl]-1,12,19,25-tetraoxo-16-oxa-13,20,24-t riazanonacos-1-yl]-4-hydroxy-2-pyrrolidinyl)methyl ester
ttcctccaaggagttagaatt

SEQ ID NO: 4926 - RNA, 21 nt, synthetic construct
  source 1..21: mol_type = other RNA
  modified_base 1: mod_base = OTHER; note = 2'-O-methyladenosine-3'-phosphorothioate
  modified_base 2: mod_base = OTHER; note = 2'-O-methyladenosine-3'-phosphorothioate
  modified_base 3: mod_base = OTHER; note = 2'-O-methylguanosine-3'-phosphate
  modified_base 4: mod_base = OTHER; note = 2'-O-methyluridine-3'-phosphate
  modified_base 5: mod_base = OTHER; note = 2'-O-methylguanosine-3'-phosphate
  modified_base 6: mod_base = OTHER; note = 2'-O-docosanyl-uridine-3'-phosphate
  modified_base 7: mod_base = OTHER; note = 2'-deoxy-2'-fluorouridine-3'-phosphate
  modified_base 8: mod_base = OTHER; note = 2'-O-methyluridine-3'-phosphate
  modified_base 9: mod_base = OTHER; note = 2'-deoxy-2'-fluorouridine-3'-phosphate
  modified_base 10: mod_base = OTHER; note = 2'-deoxy-2'-fluoroguanosine-3'-phosphate
  modified_base 11: mod_base = OTHER; note = 2'-deoxy-2'-fluoroadenosine-3'-phosphate
  modified_base 12: mod_base = OTHER; note = 2'-O-methyladenosine-3'-phosphate
  modified_base 13: mod_base = OTHER; note = 2'-O-methylcytidine-3'-phosphate
  modified_base 14: mod_base = OTHER; note = 2'-O-methyluridine-3'-phosphate
  modified_base 15: mod_base = OTHER; note = 2'-O-methyluridine-3'-phosphate
  modified_base 16: mod_base = OTHER; note = 2'-O-methylguanosine-3'-phosphate
  modified_base 17: mod_base = OTHER; note = 2'-O-methyladenosine-3'-phosphate
  modified_base 18: mod_base = OTHER; note = 2'-O-methyluridine-3'-phosphate
  modified_base 19: mod_base = OTHER; note = 2'-O-methylcytidine-3'-phosphate
  modified_base 20: mod_base = OTHER; note = 2'-O-methyluridine-3'-phosphate
  modified_base 21: mod_base = OTHER; note = 2'-O-methyluridine-3'-phosphate ((2S,4R)-1-[29-[[2-(acetylamino)-2-deoxy-beta-D-galactopyra nosyl]oxy]-14,14-bis[[3-[[3-[[5-[[2-(acetylamino)-2-deoxy-b eta-D-galactopyranosyl]oxy]-1-oxopentyl]amino]propyl]amino] -3-oxopropoxy]methyl]-1,12,19,25-tetraoxo-16-oxa-13,20,24-t riazanonacos-1-yl]-4-hydroxy-2-pyrrolidinyl)methyl ester
aagtgttttgaacttgatctt

SEQ ID NO: 4927 - RNA, 21 nt, synthetic construct
  source 1..21: mol_type = other RNA
  modified_base 1: mod_base = OTHER; note = 2'-O-methyluridine-3'-phosphorothioate
  modified_base 2: mod_base = OTHER; note = 2'-O-methylguanosine-3'-phosphorothioate
  modified_base 3: mod_base = OTHER; note = 2'-O-methylguanosine-3'-phosphate
  modified_base 4: mod_base = OTHER; note = 2'-O-methylcytidine-3'-phosphate
  modified_base 5: mod_base = OTHER; note = 2'-O-methylcytidine-3'-phosphate
  modified_base 6: mod_base = OTHER; note = 2'-O-docosanyl-uridine-3'-phosphate
  modified_base 7: mod_base = OTHER; note = 2'-deoxy-2'-fluorocytidine-3'-phosphate
  modified_base 8: mod_base = OTHER; note = 2'-O-methyladenosine-3'-phosphate
  modified_base 9: mod_base = OTHER; note = 2'-deoxy-2'-fluorouridine-3'-phosphate
  modified_base 10: mod_base = OTHER; note = 2'-deoxy-2'-fluorouridine-3'-phosphate
  modified_base 11: mod_base = OTHER; note = 2'-deoxy-2'-fluorouridine-3'-phosphate
  modified_base 12: mod_base = OTHER; note = 2'-O-methyluridine-3'-phosphate
  modified_base 13: mod_base = OTHER; note = 2'-O-methyluridine-3'-phosphate
  modified_base 14: mod_base = OTHER; note = 2'-O-methylcytidine-3'-phosphate
  modified_base 15: mod_base = OTHER; note = 2'-O-methyluridine-3'-phosphate
  modified_base 16: mod_base = OTHER; note = 2'-O-methylcytidine-3'-phosphate
  modified_base 17: mod_base = OTHER; note = 2'-O-methyluridine-3'-phosphate
  modified_base 18: mod_base = OTHER; note = 2'-O-methyluridine-3'-phosphate
  modified_base 19: mod_base = OTHER; note = 2'-O-methyluridine-3'-phosphate
  modified_base 20: mod_base = OTHER; note = 2'-O-methyluridine-3'-phosphate
  modified_base 21: mod_base = OTHER; note = 2'-O-methyluridine-3'-phosphate ((2S,4R)-1-[29-[[2-(acetylamino)-2-deoxy-beta-D-galactopyra nosyl]oxy]-14,14-bis[[3-[[3-[[5-[[2-(acetylamino)-2-deoxy-b eta-D-galactopyranosyl]oxy]-1-oxopentyl]amino]propyl]amino] -3-oxopropoxy]methyl]-1,12,19,25-tetraoxo-16-oxa-13,20,24-t riazanonacos-1-yl]-4-hydroxy-2-pyrrolidinyl)methyl ester
tggcctcatttttctcttttt

SEQ ID NO: 4928 - RNA, 21 nt, synthetic construct
  source 1..21: mol_type = other RNA
  modified_base 1: mod_base = OTHER; note = 2'-O-methyladenosine-3'-phosphorothioate
  modified_base 2: mod_base = OTHER; note = 2'-O-methylguanosine-3'-phosphorothioate
  modified_base 3: mod_base = OTHER; note = 2'-O-methylguanosine-3'-phosphate
  modified_base 4: mod_base = OTHER; note = 2'-O-methyluridine-3'-phosphate
  modified_base 5: mod_base = OTHER; note = 2'-O-methyladenosine-3'-phosphate
  modified_base 6: mod_base = OTHER; note = 2'-O-docosanyl-uridine-3'-phosphate
  modified_base 7: mod_base = OTHER; note = 2'-deoxy-2'-fluorouridine-3'-phosphate
  modified_base 8: mod_base = OTHER; note = 2'-O-methyluridine-3'-phosphate
  modified_base 9: mod_base = OTHER; note = 2'-deoxy-2'-fluoroguanosine-3'-phosphate
  modified_base 10: mod_base = OTHER; note = 2'-deoxy-2'-fluorocytidine-3'-phosphate
  modified_base 11: mod_base = OTHER; note = 2'-deoxy-2'-fluoroadenosine-3'-phosphate
  modified_base 12: mod_base = OTHER; note = 2'-O-methyluridine-3'-phosphate
  modified_base 13: mod_base = OTHER; note = 2'-O-methyluridine-3'-phosphate
  modified_base 14: mod_base = OTHER; note = 2'-O-methylguanosine-3'-phosphate
  modified_base 15: mod_base = OTHER; note = 2'-O-methyluridine-3'-phosphate
  modified_base 16: mod_base = OTHER; note = 2'-O-methyluridine-3'-phosphate
  modified_base 17: mod_base = OTHER; note = 2'-O-methyluridine-3'-phosphate
  modified_base 18: mod_base = OTHER; note = 2'-O-methyladenosine-3'-phosphate
  modified_base 19: mod_base = OTHER; note = 2'-O-methyladenosine-3'-phosphate
  modified_base 20: mod_base = OTHER; note = 2'-O-methyladenosine-3'-phosphate
  modified_base 21: mod_base = OTHER; note = 2'-O-methyluridine-3'-phosphate ((2S,4R)-1-[29-[[2-(acetylamino)-2-deoxy-beta-D-galactopyra nosyl]oxy]-14,14-bis[[3-[[3-[[5-[[2-(acetylamino)-2-deoxy-b eta-D-galactopyranosyl]oxy]-1-oxopentyl]amino]propyl]amino] -3-oxopropoxy]methyl]-1,12,19,25-tetraoxo-16-oxa-13,20,24-t riazanonacos-1-yl]-4-hydroxy-2-pyrrolidinyl)methyl ester
aggtatttgcattgtttaaat

SEQ ID NO: 4929 - RNA, 21 nt, synthetic construct
  source 1..21: mol_type = other RNA
  modified_base 1: mod_base = OTHER; note = 2'-O-methylcytidine-3'-phosphorothioate
  modified_base 2: mod_base = OTHER; note = 2'-O-methylcytidine-3'-phosphorothioate
  modified_base 3: mod_base = OTHER; note = 2'-O-methyluridine-3'-phosphate
  modified_base 4: mod_base = OTHER; note = 2'-O-methyladenosine-3'-phosphate
  modified_base 5: mod_base = OTHER; note = 2'-O-methyladenosine-3'-phosphate
  modified_base 6: mod_base = OTHER; note = 2'-O-docosanyl-uridine-3'-phosphate
  modified_base 7: mod_base = OTHER; note = 2'-deoxy-2'-fluoroadenosine-3'-phosphate
  modified_base 8: mod_base = OTHER; note = 2'-O-methyluridine-3'-phosphate
  modified_base 9: mod_base = OTHER; note = 2'-deoxy-2'-fluorouridine-3'-phosphate
  modified_base 10: mod_base = OTHER; note = 2'-deoxy-2'-fluoroguanosine-3'-phosphate
  modified_base 11: mod_base = OTHER; note = 2'-deoxy-2'-fluorouridine-3'-phosphate
  modified_base 12: mod_base = OTHER; note = 2'-O-methylguanosine-3'-phosphate
  modified_base 13: mod_base = OTHER; note = 2'-O-methylcytidine-3'-phosphate
  modified_base 14: mod_base = OTHER; note = 2'-O-methylguanosine-3'-phosphate
  modified_base 15: mod_base = OTHER; note = 2'-O-methyladenosine-3'-phosphate
  modified_base 16: mod_base = OTHER; note = 2'-O-methylcytidine-3'-phosphate
  modified_base 17: mod_base = OTHER; note = 2'-O-methyluridine-3'-phosphate
  modified_base 18: mod_base = OTHER; note = 2'-O-methyluridine-3'-phosphate
  modified_base 19: mod_base = OTHER; note = 2'-O-methylcytidine-3'-phosphate
  modified_base 20: mod_base = OTHER; note = 2'-O-methyladenosine-3'-phosphate
  modified_base 21: mod_base = OTHER; note = 2'-O-methyluridine-3'-phosphate ((2S,4R)-1-[29-[[2-(acetylamino)-2-deoxy-beta-D-galactopyra nosyl]oxy]-14,14-bis[[3-[[3-[[5-[[2-(acetylamino)-2-deoxy-b eta-D-galactopyranosyl]oxy]-1-oxopentyl]amino]propyl]amino] -3-oxopropoxy]methyl]-1,12,19,25-tetraoxo-16-oxa-13,20,24-t riazanonacos-1-yl]-4-hydroxy-2-pyrrolidinyl)methyl ester
cctaatattgtgcgacttcat

SEQ ID NO: 4930 - RNA, 21 nt, synthetic construct
  source 1..21: mol_type = other RNA
  modified_base 1: mod_base = OTHER; note = 2'-O-methyladenosine-3'-phosphorothioate
  modified_base 2: mod_base = OTHER; note = 2'-O-methylcytidine-3'-phosphorothioate
  modified_base 3: mod_base = OTHER; note = 2'-O-methyladenosine-3'-phosphate
  modified_base 4: mod_base = OTHER; note = 2'-O-methylcytidine-3'-phosphate
  modified_base 5: mod_base = OTHER; note = 2'-O-methylcytidine-3'-phosphate
  modified_base 6: mod_base = OTHER; note = 2'-O-docosanyl-adenosine-3'-phosphate
  modified_base 7: mod_base = OTHER; note = 2'-deoxy-2'-fluoroadenosine-3'-phosphate
  modified_base 8: mod_base = OTHER; note = 2'-O-methyladenosine-3'-phosphate
  modified_base 9: mod_base = OTHER; note = 2'-deoxy-2'-fluorouridine-3'-phosphate
  modified_base 10: mod_base = OTHER; note = 2'-deoxy-2'-fluoroguanosine-3'-phosphate
  modified_base 11: mod_base = OTHER; note = 2'-deoxy-2'-fluoroadenosine-3'-phosphate
  modified_base 12: mod_base = OTHER; note = 2'-O-methyladenosine-3'-phosphate
  modified_base 13: mod_base = OTHER; note = 2'-O-methylguanosine-3'-phosphate
  modified_base 14: mod_base = OTHER; note = 2'-O-methyluridine-3'-phosphate
  modified_base 15: mod_base = OTHER; note = 2'-O-methylguanosine-3'-phosphate
  modified_base 16: mod_base = OTHER; note = 2'-O-methylguanosine-3'-phosphate
  modified_base 17: mod_base = OTHER; note = 2'-O-methyluridine-3'-phosphate
  modified_base 18: mod_base = OTHER; note = 2'-O-methylcytidine-3'-phosphate
  modified_base 19: mod_base = OTHER; note = 2'-O-methyladenosine-3'-phosphate
  modified_base 20: mod_base = OTHER; note = 2'-O-methyluridine-3'-phosphate
  modified_base 21: mod_base = OTHER; note = 2'-O-methyluridine-3'-phosphate ((2S,4R)-1-[29-[[2-(acetylamino)-2-deoxy-beta-D-galactopyra nosyl]oxy]-14,14-bis[[3-[[3-[[5-[[2-(acetylamino)-2-deoxy-b eta-D-galactopyranosyl]oxy]-1-oxopentyl]amino]propyl]amino] -3-oxopropoxy]methyl]-1,12,19,25-tetraoxo-16-oxa-13,20,24-t riazanonacos-1-yl]-4-hydroxy-2-pyrrolidinyl)methyl ester
acaccaaatgaagtggtcatt

SEQ ID NO: 4931 - RNA, 21 nt, synthetic construct
  source 1..21: mol_type = other RNA
  modified_base 1: mod_base = OTHER; note = 2'-O-methylguanosine-3'-phosphorothioate
  modified_base 2: mod_base = OTHER; note = 2'-O-methyluridine-3'-phosphorothioate
  modified_base 3: mod_base = OTHER; note = 2'-O-methyladenosine-3'-phosphate
  modified_base 4: mod_base = OTHER; note = 2'-O-methylguanosine-3'-phosphate
  modified_base 5: mod_base = OTHER; note = 2'-O-methylcytidine-3'-phosphate
  modified_base 6: mod_base = OTHER; note = 2'-O-docosanyl-adenosine-3'-phosphate
  modified_base 7: mod_base = OTHER; note = 2'-deoxy-2'-fluoroadenosine-3'-phosphate
  modified_base 8: mod_base = OTHER; note = 2'-O-methyladenosine-3'-phosphate
  modified_base 9: mod_base = OTHER; note = 2'-deoxy-2'-fluorouridine-3'-phosphate
  modified_base 10: mod_base = OTHER; note = 2'-deoxy-2'-fluorocytidine-3'-phosphate
  modified_base 11: mod_base = OTHER; note = 2'-deoxy-2'-fluoroadenosine-3'-phosphate
  modified_base 12: mod_base = OTHER; note = 2'-O-methylguanosine-3'-phosphate
  modified_base 13: mod_base = OTHER; note = 2'-O-methyluridine-3'-phosphate
  modified_base 14: mod_base = OTHER; note = 2'-O-methyladenosine-3'-phosphate
  modified_base 15: mod_base = OTHER; note = 2'-O-methyluridine-3'-phosphate
  modified_base 16: mod_base = OTHER; note = 2'-O-methyladenosine-3'-phosphate
  modified_base 17: mod_base = OTHER; note = 2'-O-methyluridine-3'-phosphate
  modified_base 18: mod_base = OTHER; note = 2'-O-methyluridine-3'-phosphate
  modified_base 19: mod_base = OTHER; note = 2'-O-methylcytidine-3'-phosphate
  modified_base 20: mod_base = OTHER; note = 2'-O-methyluridine-3'-phosphate
  modified_base 21: mod_base = OTHER; note = 2'-O-methyluridine-3'-phosphate ((2S,4R)-1-[29-[[2-(acetylamino)-2-deoxy-beta-D-galactopyra nosyl]oxy]-14,14-bis[[3-[[3-[[5-[[2-(acetylamino)-2-deoxy-b eta-D-galactopyranosyl]oxy]-1-oxopentyl]amino]propyl]amino] -3-oxopropoxy]methyl]-1,12,19,25-tetraoxo-16-oxa-13,20,24-t riazanonacos-1-yl]-4-hydroxy-2-pyrrolidinyl)methyl ester
gtagcaaatcagtatattctt

SEQ ID NO: 4932 - RNA, 21 nt, synthetic construct
  source 1..21: mol_type = other RNA
  modified_base 1: mod_base = OTHER; note = 2'-O-methylcytidine-3'-phosphorothioate
  modified_base 2: mod_base = OTHER; note = 2'-O-methylguanosine-3'-phosphorothioate
  modified_base 3: mod_base = OTHER; note = 2'-O-methyladenosine-3'-phosphate
  modified_base 4: mod_base = OTHER; note = 2'-O-methyladenosine-3'-phosphate
  modified_base 5: mod_base = OTHER; note = 2'-O-methyladenosine-3'-phosphate
  modified_base 6: mod_base = OTHER; note = 2'-O-docosanyl-guanosine-3'-phosphate
  modified_base 7: mod_base = OTHER; note = 2'-deoxy-2'-fluorocytidine-3'-phosphate
  modified_base 8: mod_base = OTHER; note = 2'-O-methyladenosine-3'-phosphate
  modified_base 9: mod_base = OTHER; note = 2'-deoxy-2'-fluoroadenosine-3'-phosphate
  modified_base 10: mod_base = OTHER; note = 2'-deoxy-2'-fluoroguanosine-3'-phosphate
  modified_base 11: mod_base = OTHER; note = 2'-deoxy-2'-fluoroadenosine-3'-phosphate
  modified_base 12: mod_base = OTHER; note = 2'-O-methylguanosine-3'-phosphate
  modified_base 13: mod_base = OTHER; note = 2'-O-methyladenosine-3'-phosphate
  modified_base 14: mod_base = OTHER; note = 2'-O-methyluridine-3'-phosphate
  modified_base 15: mod_base = OTHER; note = 2'-O-methyluridine-3'-phosphate
  modified_base 16: mod_base = OTHER; note = 2'-O-methyladenosine-3'-phosphate
  modified_base 17: mod_base = OTHER; note = 2'-O-methyluridine-3'-phosphate
  modified_base 18: mod_base = OTHER; note = 2'-O-methylcytidine-3'-phosphate
  modified_base 19: mod_base = OTHER; note = 2'-O-methyladenosine-3'-phosphate
  modified_base 20: mod_base = OTHER; note = 2'-O-methyladenosine-3'-phosphate
  modified_base 21: mod_base = OTHER; note = 2'-O-methyluridine-3'-phosphate ((2S,4R)-1-[29-[[2-(acetylamino)-2-deoxy-beta-D-galactopyra nosyl]oxy]-14,14-bis[[3-[[3-[[5-[[2-(acetylamino)-2-deoxy-b eta-D-galactopyranosyl]oxy]-1-oxopentyl]amino]propyl]amino] -3-oxopropoxy]methyl]-1,12,19,25-tetraoxo-16-oxa-13,20,24-t riazanonacos-1-yl]-4-hydroxy-2-pyrrolidinyl)methyl ester
cgaaagcaagagattatcaat

SEQ ID NO: 4933 - RNA, 21 nt, synthetic construct
  source 1..21: mol_type = other RNA
  modified_base 1: mod_base = OTHER; note = 2'-O-methylcytidine-3'-phosphorothioate
  modified_base 2: mod_base = OTHER; note = 2'-O-methylcytidine-3'-phosphorothioate
  modified_base 3: mod_base = OTHER; note = 2'-O-methyladenosine-3'-phosphate
  modified_base 4: mod_base = OTHER; note = 2'-O-methyladenosine-3'-phosphate
  modified_base 5: mod_base = OTHER; note = 2'-O-methylcytidine-3'-phosphate
  modified_base 6: mod_base = OTHER; note = 2'-O-docosanyl-adenosine-3'-phosphate
  modified_base 7: mod_base = OTHER; note = 2'-deoxy-2'-fluorocytidine-3'-phosphate
  modified_base 8: mod_base = OTHER; note = 2'-O-methyladenosine-3'-phosphate
  modified_base 9: mod_base = OTHER; note = 2'-deoxy-2'-fluoroguanosine-3'-phosphate
  modified_base 10: mod_base = OTHER; note = 2'-deoxy-2'-fluoroadenosine-3'-phosphate
  modified_base 11: mod_base = OTHER; note = 2'-deoxy-2'-fluorocytidine-3'-phosphate
  modified_base 12: mod_base = OTHER; note = 2'-O-methyluridine-3'-phosphate
  modified_base 13: mod_base = OTHER; note = 2'-O-methylcytidine-3'-phosphate
  modified_base 14: mod_base = OTHER; note = 2'-O-methyluridine-3'-phosphate
  modified_base 15: mod_base = OTHER; note = 2'-O-methyladenosine-3'-phosphate
  modified_base 16: mod_base = OTHER; note = 2'-O-methyluridine-3'-phosphate
  modified_base 17: mod_base = OTHER; note = 2'-O-methylcytidine-3'-phosphate
  modified_base 18: mod_base = OTHER; note = 2'-O-methyladenosine-3'-phosphate
  modified_base 19: mod_base = OTHER; note = 2'-O-methylguanosine-3'-phosphate
  modified_base 20: mod_base = OTHER; note = 2'-O-methylcytidine-3'-phosphate
  modified_base 21: mod_base = OTHER; note = 2'-O-methyluridine-3'-phosphate ((2S,4R)-1-[29-[[2-(acetylamino)-2-deoxy-beta-D-galactopyra nosyl]oxy]-14,14-bis[[3-[[3-[[5-[[2-(acetylamino)-2-deoxy-b eta-D-galactopyranosyl]oxy]-1-oxopentyl]amino]propyl]amino] -3-oxopropoxy]methyl]-1,12,19,25-tetraoxo-16-oxa-13,20,24-t riazanonacos-1-yl]-4-hydroxy-2-pyrrolidinyl)methyl ester
ccaacacagactctatcagct

SEQ ID NO: 4934 - RNA, 21 nt, synthetic construct
  source 1..21: mol_type = other RNA
  modified_base 1: mod_base = OTHER; note = 2'-O-methylguanosine-3'-phosphorothioate
  modified_base 2: mod_base = OTHER; note = 2'-O-methyladenosine-3'-phosphorothioate
  modified_base 3: mod_base = OTHER; note = 2'-O-methylcytidine-3'-phosphate
  modified_base 4: mod_base = OTHER; note = 2'-O-methyluridine-3'-phosphate
  modified_base 5: mod_base = OTHER; note = 2'-O-methyladenosine-3'-phosphate
  modified_base 6: mod_base = OTHER; note = 2'-O-docosanyl-guanosine-3'-phosphate
  modified_base 7: mod_base = OTHER; note = 2'-deoxy-2'-fluoroadenosine-3'-phosphate
  modified_base 8: mod_base = OTHER; note = 2'-O-methyladenosine-3'-phosphate
  modified_base 9: mod_base = OTHER; note = 2'-deoxy-2'-fluorouridine-3'-phosphate
  modified_base 10: mod_base = OTHER; note = 2'-deoxy-2'-fluoroguanosine-3'-phosphate
  modified_base 11: mod_base = OTHER; note = 2'-deoxy-2'-fluoroadenosine-3'-phosphate
  modified_base 12: mod_base = OTHER; note = 2'-O-methyluridine-3'-phosphate
  modified_base 13: mod_base = OTHER; note = 2'-O-methyladenosine-3'-phosphate
  modified_base 14: mod_base = OTHER; note = 2'-O-methyluridine-3'-phosphate
  modified_base 15: mod_base = OTHER; note = 2'-O-methyluridine-3'-phosphate
  modified_base 16: mod_base = OTHER; note = 2'-O-methyluridine-3'-phosphate
  modified_base 17: mod_base = OTHER; note = 2'-O-methylguanosine-3'-phosphate
  modified_base 18: mod_base = OTHER; note = 2'-O-methyladenosine-3'-phosphate
  modified_base 19: mod_base = OTHER; note = 2'-O-methyluridine-3'-phosphate
  modified_base 20: mod_base = OTHER; note = 2'-O-methyladenosine-3'-phosphate
  modified_base 21: mod_base = OTHER; note = 2'-O-methyluridine-3'-phosphate ((2S,4R)-1-[29-[[2-(acetylamino)-2-deoxy-beta-D-galactopyra nosyl]oxy]-14,14-bis[[3-[[3-[[5-[[2-(acetylamino)-2-deoxy-b eta-D-galactopyranosyl]oxy]-1-oxopentyl]amino]propyl]amino] -3-oxopropoxy]methyl]-1,12,19,25-tetraoxo-16-oxa-13,20,24-t riazanonacos-1-yl]-4-hydroxy-2-pyrrolidinyl)methyl ester
gactagaatgatatttgatat

SEQ ID NO: 4935 - RNA, 21 nt, synthetic construct
  source 1..21: mol_type = other RNA
  modified_base 1: mod_base = OTHER; note = 2'-O-methylguanosine-3'-phosphorothioate
  modified_base 2: mod_base = OTHER; note = 2'-O-methylcytidine-3'-phosphorothioate
  modified_base 3: mod_base = OTHER; note = 2'-O-methylcytidine-3'-phosphate
  modified_base 4: mod_base = OTHER; note = 2'-O-methyluridine-3'-phosphate
  modified_base 5: mod_base = OTHER; note = 2'-O-methylguanosine-3'-phosphate
  modified_base 6: mod_base = OTHER; note = 2'-O-docosanyl-adenosine-3'-phosphate
  modified_base 7: mod_base = OTHER; note = 2'-deoxy-2'-fluoroguanosine-3'-phosphate
  modified_base 8: mod_base = OTHER; note = 2'-O-methyladenosine-3'-phosphate
  modified_base 9: mod_base = OTHER; note = 2'-deoxy-2'-fluoroadenosine-3'-phosphate
  modified_base 10: mod_base = OTHER; note = 2'-deoxy-2'-fluorouridine-3'-phosphate
  modified_base 11: mod_base = OTHER; note = 2'-deoxy-2'-fluorouridine-3'-phosphate
  modified_base 12: mod_base = OTHER; note = 2'-O-methyluridine-3'-phosphate
  modified_base 13: mod_base = OTHER; note = 2'-O-methylguanosine-3'-phosphate
  modified_base 14: mod_base = OTHER; note = 2'-O-methylcytidine-3'-phosphate
  modified_base 15: mod_base = OTHER; note = 2'-O-methyluridine-3'-phosphate
  modified_base 16: mod_base = OTHER; note = 2'-O-methyluridine-3'-phosphate
  modified_base 17: mod_base = OTHER; note = 2'-O-methyluridine-3'-phosphate
  modified_base 18: mod_base = OTHER; note = 2'-O-methyluridine-3'-phosphate
  modified_base 19: mod_base = OTHER; note = 2'-O-methyladenosine-3'-phosphate
  modified_base 20: mod_base = OTHER; note = 2'-O-methylguanosine-3'-phosphate
  modified_base 21: mod_base = OTHER; note = 2'-O-methyluridine-3'-phosphate ((2S,4R)-1-[29-[[2-(acetylamino)-2-deoxy-beta-D-galactopyra nosyl]oxy]-14,14-bis[[3-[[3-[[5-[[2-(acetylamino)-2-deoxy-b eta-D-galactopyranosyl]oxy]-1-oxopentyl]amino]propyl]amino] -3-oxopropoxy]methyl]-1,12,19,25-tetraoxo-16-oxa-13,20,24-t riazanonacos-1-yl]-4-hydroxy-2-pyrrolidinyl)methyl ester
gcctgagaatttgcttttagt

SEQ ID NO: 4936 - RNA, 21 nt, synthetic construct
  source 1..21: mol_type = other RNA
  modified_base 1: mod_base = OTHER; note = 2'-O-methylcytidine-3'-phosphorothioate
  modified_base 2: mod_base = OTHER; note = 2'-O-methyladenosine-3'-phosphorothioate
  modified_base 3: mod_base = OTHER; note = 2'-O-methyladenosine-3'-phosphate
  modified_base 4: mod_base = OTHER; note = 2'-O-methyladenosine-3'-phosphate
  modified_base 5: mod_base = OTHER; note = 2'-O-methyladenosine-3'-phosphate
  modified_base 6: mod_base = OTHER; note = 2'-O-docosanyl-cytidine-3'-phosphate
  modified_base 7: mod_base = OTHER; note = 2'-deoxy-2'-fluoroadenosine-3'-phosphate
  modified_base 8: mod_base = OTHER; note = 2'-O-methyladenosine-3'-phosphate
  modified_base 9: mod_base = OTHER; note = 2'-deoxy-2'-fluorouridine-3'-phosphate
  modified_base 10: mod_base = OTHER; note = 2'-deoxy-2'-fluoroguanosine-3'-phosphate
  modified_base 11: mod_base = OTHER; note = 2'-deoxy-2'-fluoroguanosine-3'-phosphate
  modified_base 12: mod_base = OTHER; note = 2'-O-methyluridine-3'-phosphate
  modified_base 13: mod_base = OTHER; note = 2'-O-methylcytidine-3'-phosphate
  modified_base 14: mod_base = OTHER; note = 2'-O-methyluridine-3'-phosphate
  modified_base 15: mod_base = OTHER; note = 2'-O-methylcytidine-3'-phosphate
  modified_base 16: mod_base = OTHER; note = 2'-O-methyluridine-3'-phosphate
  modified_base 17: mod_base = OTHER; note = 2'-O-methyluridine-3'-phosphate
  modified_base 18: mod_base = OTHER; note = 2'-O-methylcytidine-3'-phosphate
  modified_base 19: mod_base = OTHER; note = 2'-O-methyluridine-3'-phosphate
  modified_base 20: mod_base = OTHER; note = 2'-O-methylguanosine-3'-phosphate
  modified_base 21: mod_base = OTHER; note = 2'-O-methyluridine-3'-phosphate ((2S,4R)-1-[29-[[2-(acetylamino)-2-deoxy-beta-D-galactopyra nosyl]oxy]-14,14-bis[[3-[[3-[[5-[[2-(acetylamino)-2-deoxy-b eta-D-galactopyranosyl]oxy]-1-oxopentyl]amino]propyl]amino] -3-oxopropoxy]methyl]-1,12,19,25-tetraoxo-16-oxa-13,20,24-t riazanonacos-1-yl]-4-hydroxy-2-pyrrolidinyl)methyl ester
caaaacaatggtctcttctgt

SEQ ID NO: 4937 - RNA, 21 nt, synthetic construct
  source 1..21: mol_type = other RNA
  modified_base 1: mod_base = OTHER; note = 2'-O-methylguanosine-3'-phosphorothioate
  modified_base 2: mod_base = OTHER; note = 2'-O-methyladenosine-3'-phosphorothioate
  modified_base 3: mod_base = OTHER; note = 2'-O-methyluridine-3'-phosphate
  modified_base 4: mod_base = OTHER; note = 2'-O-methyladenosine-3'-phosphate
  modified_base 5: mod_base = OTHER; note = 2'-O-methyladenosine-3'-phosphate
  modified_base 6: mod_base = OTHER; note = 2'-O-docosanyl-adenosine-3'-phosphate
  modified_base 7: mod_base = OTHER; note = 2'-deoxy-2'-fluorocytidine-3'-phosphate
  modified_base 8: mod_base = OTHER; note = 2'-O-methyladenosine-3'-phosphate
  modified_base 9: mod_base = OTHER; note = 2'-deoxy-2'-fluoroadenosine-3'-phosphate
  modified_base 10: mod_base = OTHER; note = 2'-deoxy-2'-fluorocytidine-3'-phosphate
  modified_base 11: mod_base = OTHER; note = 2'-deoxy-2'-fluoroadenosine-3'-phosphate
  modified_base 12: mod_base = OTHER; note = 2'-O-methyladenosine-3'-phosphate
  modified_base 13: mod_base = OTHER; note = 2'-O-methyladenosine-3'-phosphate
  modified_base 14: mod_base = OTHER; note = 2'-O-methylguanosine-3'-phosphate
  modified_base 15: mod_base = OTHER; note = 2'-O-methylcytidine-3'-phosphate
  modified_base 16: mod_base = OTHER; note = 2'-O-methylcytidine-3'-phosphate
  modified_base 17: mod_base = OTHER; note = 2'-O-methyladenosine-3'-phosphate
  modified_base 18: mod_base = OTHER; note = 2'-O-methyladenosine-3'-phosphate
  modified_base 19: mod_base = OTHER; note = 2'-O-methylcytidine-3'-phosphate
  modified_base 20: mod_base = OTHER; note = 2'-O-methylguanosine-3'-phosphate
  modified_base 21: mod_base = OTHER; note = 2'-O-methyluridine-3'-phosphate ((2S,4R)-1-[29-[[2-(acetylamino)-2-deoxy-beta-D-galactopyra nosyl]oxy]-14,14-bis[[3-[[3-[[5-[[2-(acetylamino)-2-deoxy-b eta-D-galactopyranosyl]oxy]-1-oxopentyl]amino]propyl]amino] -3-oxopropoxy]methyl]-1,12,19,25-tetraoxo-16-oxa-13,20,24-t riazanonacos-1-yl]-4-hydroxy-2-pyrrolidinyl)methyl ester
gataaacaacaaagccaacgt

SEQ ID NO: 4938 - RNA, 21 nt, synthetic construct
  source 1..21: mol_type = other RNA
  modified_base 1: mod_base = OTHER; note = 2'-O-methyluridine-3'-phosphorothioate
  modified_base 2: mod_base = OTHER; note = 2'-O-methyluridine-3'-phosphorothioate
  modified_base 3: mod_base = OTHER; note = 2'-O-methyluridine-3'-phosphate
  modified_base 4: mod_base = OTHER; note = 2'-O-methyluridine-3'-phosphate
  modified_base 5: mod_base = OTHER; note = 2'-O-methyluridine-3'-phosphate
  modified_base 6: mod_base = OTHER; note = 2'-O-docosanyl-uridine-3'-phosphate
  modified_base 7: mod_base = OTHER; note = 2'-deoxy-2'-fluoroadenosine-3'-phosphate
  modified_base 8: mod_base = OTHER; note = 2'-O-methyladenosine-3'-phosphate
  modified_base 9: mod_base = OTHER; note = 2'-deoxy-2'-fluorouridine-3'-phosphate
  modified_base 10: mod_base = OTHER; note = 2'-deoxy-2'-fluoroadenosine-3'-phosphate
  modified_base 11: mod_base = OTHER; note = 2'-deoxy-2'-fluorocytidine-3'-phosphate
  modified_base 12: mod_base = OTHER; note = 2'-O-methylguanosine-3'-phosphate
  modified_base 13: mod_base = OTHER; note = 2'-O-methyladenosine-3'-phosphate
  modified_base 14: mod_base = OTHER; note = 2'-O-methyladenosine-3'-phosphate
  modified_base 15: mod_base = OTHER; note = 2'-O-methylcytidine-3'-phosphate
  modified_base 16: mod_base = OTHER; note = 2'-O-methylcytidine-3'-phosphate
  modified_base 17: mod_base = OTHER; note = 2'-O-methyluridine-3'-phosphate
  modified_base 18: mod_base = OTHER; note = 2'-O-methylguanosine-3'-phosphate
  modified_base 19: mod_base = OTHER; note = 2'-O-methyluridine-3'-phosphate
  modified_base 20: mod_base = OTHER; note = 2'-O-methylcytidine-3'-phosphate
  modified_base 21: mod_base = OTHER; note = 2'-O-methyluridine-3'-phosphate ((2S,4R)-1-[29-[[2-(acetylamino)-2-deoxy-beta-D-galactopyra nosyl]oxy]-14,14-bis[[3-[[3-[[5-[[2-(acetylamino)-2-deoxy-b eta-D-galactopyranosyl]oxy]-1-oxopentyl]amino]propyl]amino] -3-oxopropoxy]methyl]-1,12,19,25-tetraoxo-16-oxa-13,20,24-t riazanonacos-1-yl]-4-hydroxy-2-pyrrolidinyl)methyl ester
ttttttaatacgaacctgtct

SEQ ID NO: 4939 - RNA, 21 nt, synthetic construct
  source 1..21: mol_type = other RNA
  modified_base 1: mod_base = OTHER; note = 2'-O-methylguanosine-3'-phosphorothioate
  modified_base 2: mod_base = OTHER; note = 2'-O-methylguanosine-3'-phosphorothioate
  modified_base 3: mod_base = OTHER; note = 2'-O-methyluridine-3'-phosphate
  modified_base 4: mod_base = OTHER; note = 2'-O-methyluridine-3'-phosphate
  modified_base 5: mod_base = OTHER; note = 2'-O-methyluridine-3'-phosphate
  modified_base 6: mod_base = OTHER; note = 2'-O-docosanyl-adenosine-3'-phosphate
  modified_base 7: mod_base = OTHER; note = 2'-deoxy-2'-fluorouridine-3'-phosphate
  modified_base 8: mod_base = OTHER; note = 2'-O-methyladenosine-3'-phosphate
  modified_base 9: mod_base = OTHER; note = 2'-deoxy-2'-fluoroadenosine-3'-phosphate
  modified_base 10: mod_base = OTHER; note = 2'-deoxy-2'-fluorouridine-3'-phosphate
  modified_base 11: mod_base = OTHER; note = 2'-deoxy-2'-fluorouridine-3'-phosphate
  modified_base 12: mod_base = OTHER; note = 2'-O-methylcytidine-3'-phosphate
  modified_base 13: mod_base = OTHER; note = 2'-O-methyluridine-3'-phosphate
  modified_base 14: mod_base = OTHER; note = 2'-O-methylguanosine-3'-phosphate
  modified_base 15: mod_base = OTHER; note = 2'-O-methylcytidine-3'-phosphate
  modified_base 16: mod_base = OTHER; note = 2'-O-methyluridine-3'-phosphate
  modified_base 17: mod_base = OTHER; note = 2'-O-methyluridine-3'-phosphate
  modified_base 18: mod_base = OTHER; note = 2'-O-methyladenosine-3'-phosphate
  modified_base 19: mod_base = OTHER; note = 2'-O-methyladenosine-3'-phosphate
  modified_base 20: mod_base = OTHER; note = 2'-O-methylguanosine-3'-phosphate
  modified_base 21: mod_base = OTHER; note = 2'-O-methyluridine-3'-phosphate ((2S,4R)-1-[29-[[2-(acetylamino)-2-deoxy-beta-D-galactopyra nosyl]oxy]-14,14-bis[[3-[[3-[[5-[[2-(acetylamino)-2-deoxy-b eta-D-galactopyranosyl]oxy]-1-oxopentyl]amino]propyl]amino] -3-oxopropoxy]methyl]-1,12,19,25-tetraoxo-16-oxa-13,20,24-t riazanonacos-1-yl]-4-hydroxy-2-pyrrolidinyl)methyl ester
ggtttataattctgcttaagt

SEQ ID NO: 4940 - RNA, 21 nt, synthetic construct
  source 1..21: mol_type = other RNA
  modified_base 1: mod_base = OTHER; note = 2'-O-methyladenosine-3'-phosphorothioate
  modified_base 2: mod_base = OTHER; note = 2'-O-methylguanosine-3'-phosphorothioate
  modified_base 3: mod_base = OTHER; note = 2'-O-methylguanosine-3'-phosphate
  modified_base 4: mod_base = OTHER; note = 2'-O-methyladenosine-3'-phosphate
  modified_base 5: mod_base = OTHER; note = 2'-O-methyluridine-3'-phosphate
  modified_base 6: mod_base = OTHER; note = 2'-O-docosanyl-adenosine-3'-phosphate
  modified_base 7: mod_base = OTHER; note = 2'-deoxy-2'-fluoroadenosine-3'-phosphate
  modified_base 8: mod_base = OTHER; note = 2'-O-methyladenosine-3'-phosphate
  modified_base 9: mod_base = OTHER; note = 2'-deoxy-2'-fluoroadenosine-3'-phosphate
  modified_base 10: mod_base = OTHER; note = 2'-deoxy-2'-fluoroguanosine-3'-phosphate
  modified_base 11: mod_base = OTHER; note = 2'-deoxy-2'-fluorocytidine-3'-phosphate
  modified_base 12: mod_base = OTHER; note = 2'-O-methyladenosine-3'-phosphate
  modified_base 13: mod_base = OTHER; note = 2'-O-methyladenosine-3'-phosphate
  modified_base 14: mod_base = OTHER; note = 2'-O-methylguanosine-3'-phosphate
  modified_base 15: mod_base = OTHER; note = 2'-O-methyluridine-3'-phosphate
  modified_base 16: mod_base = OTHER; note = 2'-O-methyluridine-3'-phosphate
  modified_base 17: mod_base = OTHER; note = 2'-O-methylcytidine-3'-phosphate
  modified_base 18: mod_base = OTHER; note = 2'-O-methylcytidine-3'-phosphate
  modified_base 19: mod_base = OTHER; note = 2'-O-methyluridine-3'-phosphate
  modified_base 20: mod_base = OTHER; note = 2'-O-methylcytidine-3'-phosphate
  modified_base 21: mod_base = OTHER; note = 2'-O-methyluridine-3'-phosphate ((2S,4R)-1-[29-[[2-(acetylamino)-2-deoxy-beta-D-galactopyra nosyl]oxy]-14,14-bis[[3-[[3-[[5-[[2-(acetylamino)-2-deoxy-b eta-D-galactopyranosyl]oxy]-1-oxopentyl]amino]propyl]amino] -3-oxopropoxy]methyl]-1,12,19,25-tetraoxo-16-oxa-13,20,24-t riazanonacos-1-yl]-4-hydroxy-2-pyrrolidinyl)methyl ester
aggataaaagcaagttcctct

SEQ ID NO: 4941 - RNA, 21 nt, synthetic construct
  source 1..21: mol_type = other RNA
  modified_base 1: mod_base = OTHER; note = 2'-O-methyluridine-3'-phosphorothioate
  modified_base 2: mod_base = OTHER; note = 2'-O-methylguanosine-3'-phosphorothioate
  modified_base 3: mod_base = OTHER; note = 2'-O-methyluridine-3'-phosphate
  modified_base 4: mod_base = OTHER; note = 2'-O-methyladenosine-3'-phosphate
  modified_base 5: mod_base = OTHER; note = 2'-O-methylguanosine-3'-phosphate
  modified_base 6: mod_base = OTHER; note = 2'-O-docosanyl-adenosine-3'-phosphate
  modified_base 7: mod_base = OTHER; note = 2'-deoxy-2'-fluoroguanosine-3'-phosphate
  modified_base 8: mod_base = OTHER; note = 2'-O-methyluridine-3'-phosphate
  modified_base 9: mod_base = OTHER; note = 2'-deoxy-2'-fluoroguanosine-3'-phosphate
  modified_base 10: mod_base = OTHER; note = 2'-deoxy-2'-fluorouridine-3'-phosphate
  modified_base 11: mod_base = OTHER; note = 2'-deoxy-2'-fluorouridine-3'-phosphate
  modified_base 12: mod_base = OTHER; note = 2'-O-methyluridine-3'-phosphate
  modified_base 13: mod_base = OTHER; note = 2'-O-methyluridine-3'-phosphate
  modified_base 14: mod_base = OTHER; note = 2'-O-methyluridine-3'-phosphate
  modified_base 15: mod_base = OTHER; note = 2'-O-methyluridine-3'-phosphate
  modified_base 16: mod_base = OTHER; note = 2'-O-methyluridine-3'-phosphate
  modified_base 17: mod_base = OTHER; note = 2'-O-methyluridine-3'-phosphate
  modified_base 18: mod_base = OTHER; note = 2'-O-methyladenosine-3'-phosphate
  modified_base 19: mod_base = OTHER; note = 2'-O-methylcytidine-3'-phosphate
  modified_base 20: mod_base = OTHER; note = 2'-O-methyladenosine-3'-phosphate
  modified_base 21: mod_base = OTHER; note = 2'-O-methyluridine-3'-phosphate ((2S,4R)-1-[29-[[2-(acetylamino)-2-deoxy-beta-D-galactopyra nosyl]oxy]-14,14-bis[[3-[[3-[[5-[[2-(acetylamino)-2-deoxy-b eta-D-galactopyranosyl]oxy]-1-oxopentyl]amino]propyl]amino] -3-oxopropoxy]methyl]-1,12,19,25-tetraoxo-16-oxa-13,20,24-t riazanonacos-1-yl]-4-hydroxy-2-pyrrolidinyl)methyl ester
tgtagagtgttttttttacat

SEQ ID NO: 4942 - RNA, 21 nt, synthetic construct
  source 1..21: mol_type = other RNA
  modified_base 1: mod_base = OTHER; note = 2'-O-methyluridine-3'-phosphorothioate
  modified_base 2: mod_base = OTHER; note = 2'-O-methyluridine-3'-phosphorothioate
  modified_base 3: mod_base = OTHER; note = 2'-O-methylcytidine-3'-phosphate
  modified_base 4: mod_base = OTHER; note = 2'-O-methyluridine-3'-phosphate
  modified_base 5: mod_base = OTHER; note = 2'-O-methylcytidine-3'-phosphate
  modified_base 6: mod_base = OTHER; note = 2'-O-docosanyl-uridine-3'-phosphate
  modified_base 7: mod_base = OTHER; note = 2'-deoxy-2'-fluoroguanosine-3'-phosphate
  modified_base 8: mod_base = OTHER; note = 2'-O-methyladenosine-3'-phosphate
  modified_base 9: mod_base = OTHER; note = 2'-deoxy-2'-fluoroadenosine-3'-phosphate
  modified_base 10: mod_base = OTHER; note = 2'-deoxy-2'-fluorouridine-3'-phosphate
  modified_base 11: mod_base = OTHER; note = 2'-deoxy-2'-fluoroguanosine-3'-phosphate
  modified_base 12: mod_base = OTHER; note = 2'-O-methyladenosine-3'-phosphate
  modified_base 13: mod_base = OTHER; note = 2'-O-methylcytidine-3'-phosphate
  modified_base 14: mod_base = OTHER; note = 2'-O-methyladenosine-3'-phosphate
  modified_base 15: mod_base = OTHER; note = 2'-O-methylguanosine-3'-phosphate
  modified_base 16: mod_base = OTHER; note = 2'-O-methyluridine-3'-phosphate
  modified_base 17: mod_base = OTHER; note = 2'-O-methyluridine-3'-phosphate
  modified_base 18: mod_base = OTHER; note = 2'-O-methylguanosine-3'-phosphate
  modified_base 19: mod_base = OTHER; note = 2'-O-methyluridine-3'-phosphate
  modified_base 20: mod_base = OTHER; note = 2'-O-methyladenosine-3'-phosphate
  modified_base 21: mod_base = OTHER; note = 2'-O-methyluridine-3'-phosphate ((2S,4R)-1-[29-[[2-(acetylamino)-2-deoxy-beta-D-galactopyra nosyl]oxy]-14,14-bis[[3-[[3-[[5-[[2-(acetylamino)-2-deoxy-b eta-D-galactopyranosyl]oxy]-1-oxopentyl]amino]propyl]amino] -3-oxopropoxy]methyl]-1,12,19,25-tetraoxo-16-oxa-13,20,24-t riazanonacos-1-yl]-4-hydroxy-2-pyrrolidinyl)methyl ester
ttctctgaatgacagttgtat

SEQ ID NO: 4943 - RNA, 21 nt, synthetic construct
  source 1..21: mol_type = other RNA
  modified_base 1: mod_base = OTHER; note = 2'-O-methyladenosine-3'-phosphorothioate
  modified_base 2: mod_base = OTHER; note = 2'-O-methyluridine-3'-phosphorothioate
  modified_base 3: mod_base = OTHER; note = 2'-O-methyluridine-3'-phosphate
  modified_base 4: mod_base = OTHER; note = 2'-O-methylguanosine-3'-phosphate
  modified_base 5: mod_base = OTHER; note = 2'-O-methyluridine-3'-phosphate
  modified_base 6: mod_base = OTHER; note = 2'-O-docosanyl-adenosine-3'-phosphate
  modified_base 7: mod_base = OTHER; note = 2'-deoxy-2'-fluorouridine-3'-phosphate
  modified_base 8: mod_base = OTHER; note = 2'-O-methyluridine-3'-phosphate
  modified_base 9: mod_base = OTHER; note = 2'-deoxy-2'-fluorouridine-3'-phosphate
  modified_base 10: mod_base = OTHER; note = 2'-deoxy-2'-fluoroadenosine-3'-phosphate
  modified_base 11: mod_base = OTHER; note = 2'-deoxy-2'-fluorocytidine-3'-phosphate
  modified_base 12: mod_base = OTHER; note = 2'-O-methylcytidine-3'-phosphate
  modified_base 13: mod_base = OTHER; note = 2'-O-methyluridine-3'-phosphate
  modified_base 14: mod_base = OTHER; note = 2'-O-methylcytidine-3'-phosphate
  modified_base 15: mod_base = OTHER; note = 2'-O-methyluridine-3'-phosphate
  modified_base 16: mod_base = OTHER; note = 2'-O-methylcytidine-3'-phosphate
  modified_base 17: mod_base = OTHER; note = 2'-O-methylcytidine-3'-phosphate
  modified_base 18: mod_base = OTHER; note = 2'-O-methyluridine-3'-phosphate
  modified_base 19: mod_base = OTHER; note = 2'-O-methylguanosine-3'-phosphate
  modified_base 20: mod_base = OTHER; note = 2'-O-methyluridine-3'-phosphate
  modified_base 21: mod_base = OTHER; note = 2'-O-methyluridine-3'-phosphate ((2S,4R)-1-[29-[[2-(acetylamino)-2-deoxy-beta-D-galactopyra nosyl]oxy]-14,14-bis[[3-[[3-[[5-[[2-(acetylamino)-2-deoxy-b eta-D-galactopyranosyl]oxy]-1-oxopentyl]amino]propyl]amino] -3-oxopropoxy]methyl]-1,12,19,25-tetraoxo-16-oxa-13,20,24-t riazanonacos-1-yl]-4-hydroxy-2-pyrrolidinyl)methyl ester
attgtatttacctctcctgtt

SEQ ID NO: 4944 - RNA, 21 nt, synthetic construct
  source 1..21: mol_type = other RNA
  modified_base 1: mod_base = OTHER; note = 2'-O-methyluridine-3'-phosphorothioate
  modified_base 2: mod_base = OTHER; note = 2'-O-methylguanosine-3'-phosphorothioate
  modified_base 3: mod_base = OTHER; note = 2'-O-methylguanosine-3'-phosphate
  modified_base 4: mod_base = OTHER; note = 2'-O-methylcytidine-3'-phosphate
  modified_base 5: mod_base = OTHER; note = 2'-O-methyladenosine-3'-phosphate
  modified_base 6: mod_base = OTHER; note = 2'-O-docosanyl-uridine-3'-phosphate
  modified_base 7: mod_base = OTHER; note = 2'-deoxy-2'-fluoroadenosine-3'-phosphate
  modified_base 8: mod_base = OTHER; note = 2'-O-methylcytidine-3'-phosphate
  modified_base 9: mod_base = OTHER; note = 2'-deoxy-2'-fluoroadenosine-3'-phosphate
  modified_base 10: mod_base = OTHER; note = 2'-deoxy-2'-fluorouridine-3'-phosphate
  modified_base 11: mod_base = OTHER; note = 2'-deoxy-2'-fluoroguanosine-3'-phosphate
  modified_base 12: mod_base = OTHER; note = 2'-O-methyluridine-3'-phosphate
  modified_base 13: mod_base = OTHER; note = 2'-O-methyladenosine-3'-phosphate
  modified_base 14: mod_base = OTHER; note = 2'-O-methyluridine-3'-phosphate
  modified_base 15: mod_base = OTHER; note = 2'-O-methyluridine-3'-phosphate
  modified_base 16: mod_base = OTHER; note = 2'-O-methyluridine-3'-phosphate
  modified_base 17: mod_base = OTHER; note = 2'-O-methyladenosine-3'-phosphate
  modified_base 18: mod_base = OTHER; note = 2'-O-methyladenosine-3'-phosphate
  modified_base 19: mod_base = OTHER; note = 2'-O-methyladenosine-3'-phosphate
  modified_base 20: mod_base = OTHER; note = 2'-O-methylguanosine-3'-phosphate
  modified_base 21: mod_base = OTHER; note = 2'-O-methyluridine-3'-phosphate ((2S,4R)-1-[29-[[2-(acetylamino)-2-deoxy-beta-D-galactopyra nosyl]oxy]-14,14-bis[[3-[[3-[[5-[[2-(acetylamino)-2-deoxy-b eta-D-galactopyranosyl]oxy]-1-oxopentyl]amino]propyl]amino] -3-oxopropoxy]methyl]-1,12,19,25-tetraoxo-16-oxa-13,20,24-t riazanonacos-1-yl]-4-hydroxy-2-pyrrolidinyl)methyl ester
tggcatacatgtatttaaagt

SEQ ID NO: 4945 - RNA, 21 nt, synthetic construct
  source 1..21: mol_type = other RNA
  modified_base 1: mod_base = OTHER; note = 2'-O-methyluridine-3'-phosphorothioate
  modified_base 2: mod_base = OTHER; note = 2'-O-methyluridine-3'-phosphorothioate
  modified_base 3: mod_base = OTHER; note = 2'-O-methylguanosine-3'-phosphate
  modified_base 4: mod_base = OTHER; note = 2'-O-methyluridine-3'-phosphate
  modified_base 5: mod_base = OTHER; note = 2'-O-methylcytidine-3'-phosphate
  modified_base 6: mod_base = OTHER; note = 2'-O-docosanyl-adenosine-3'-phosphate
  modified_base 7: mod_base = OTHER; note = 2'-deoxy-2'-fluoroadenosine-3'-phosphate
  modified_base 8: mod_base = OTHER; note = 2'-O-methylguanosine-3'-phosphate
  modified_base 9: mod_base = OTHER; note = 2'-deoxy-2'-fluoroadenosine-3'-phosphate
  modified_base 10: mod_base = OTHER; note = 2'-deoxy-2'-fluorouridine-3'-phosphate
  modified_base 11: mod_base = OTHER; note = 2'-deoxy-2'-fluorouridine-3'-phosphate
  modified_base 12: mod_base = OTHER; note = 2'-O-methyluridine-3'-phosphate
  modified_base 13: mod_base = OTHER; note = 2'-O-methyluridine-3'-phosphate
  modified_base 14: mod_base = OTHER; note = 2'-O-methyladenosine-3'-phosphate
  modified_base 15: mod_base = OTHER; note = 2'-O-methyladenosine-3'-phosphate
  modified_base 16: mod_base = OTHER; note = 2'-O-methyladenosine-3'-phosphate
  modified_base 17: mod_base = OTHER; note = 2'-O-methylguanosine-3'-phosphate
  modified_base 18: mod_base = OTHER; note = 2'-O-methylguanosine-3'-phosphate
  modified_base 19: mod_base = OTHER; note = 2'-O-methyluridine-3'-phosphate
  modified_base 20: mod_base = OTHER; note = 2'-O-methyluridine-3'-phosphate
  modified_base 21: mod_base = OTHER; note = 2'-O-methyluridine-3'-phosphate ((2S,4R)-1-[29-[[2-(acetylamino)-2-deoxy-beta-D-galactopyra nosyl]oxy]-14,14-bis[[3-[[3-[[5-[[2-(acetylamino)-2-deoxy-b eta-D-galactopyranosyl]oxy]-1-oxopentyl]amino]propyl]amino] -3-oxopropoxy]methyl]-1,12,19,25-tetraoxo-16-oxa-13,20,24-t riazanonacos-1-yl]-4-hydroxy-2-pyrrolidinyl)methyl ester
ttgtcaagattttaaaggttt

SEQ ID NO: 4946 - RNA, 21 nt, synthetic construct
  source 1..21: mol_type = other RNA
  modified_base 1: mod_base = OTHER; note = 2'-O-methyluridine-3'-phosphorothioate
  modified_base 2: mod_base = OTHER; note = 2'-O-methyladenosine-3'-phosphorothioate
  modified_base 3: mod_base = OTHER; note = 2'-O-methyluridine-3'-phosphate
  modified_base 4: mod_base = OTHER; note = 2'-O-methylguanosine-3'-phosphate
  modified_base 5: mod_base = OTHER; note = 2'-O-methyladenosine-3'-phosphate
  modified_base 6: mod_base = OTHER; note = 2'-O-docosanyl-adenosine-3'-phosphate
  modified_base 7: mod_base = OTHER; note = 2'-deoxy-2'-fluoroadenosine-3'-phosphate
  modified_base 8: mod_base = OTHER; note = 2'-O-methyladenosine-3'-phosphate
  modified_base 9: mod_base = OTHER; note = 2'-deoxy-2'-fluorouridine-3'-phosphate
  modified_base 10: mod_base = OTHER; note = 2'-deoxy-2'-fluorouridine-3'-phosphate
  modified_base 11: mod_base = OTHER; note = 2'-deoxy-2'-fluorocytidine-3'-phosphate
  modified_base 12: mod_base = OTHER; note = 2'-O-methylcytidine-3'-phosphate
  modified_base 13: mod_base = OTHER; note = 2'-O-methyluridine-3'-phosphate
  modified_base 14: mod_base = OTHER; note = 2'-O-methyladenosine-3'-phosphate
  modified_base 15: mod_base = OTHER; note = 2'-O-methylcytidine-3'-phosphate
  modified_base 16: mod_base = OTHER; note = 2'-O-methyluridine-3'-phosphate
  modified_base 17: mod_base = OTHER; note = 2'-O-methylguanosine-3'-phosphate
  modified_base 18: mod_base = OTHER; note = 2'-O-methylguanosine-3'-phosphate
  modified_base 19: mod_base = OTHER; note = 2'-O-methyladenosine-3'-phosphate
  modified_base 20: mod_base = OTHER; note = 2'-O-methylcytidine-3'-phosphate
  modified_base 21: mod_base = OTHER; note = 2'-O-methyluridine-3'-phosphate ((2S,4R)-1-[29-[[2-(acetylamino)-2-deoxy-beta-D-galactopyra nosyl]oxy]-14,14-bis[[3-[[3-[[5-[[2-(acetylamino)-2-deoxy-b eta-D-galactopyranosyl]oxy]-1-oxopentyl]amino]propyl]amino] -3-oxopropoxy]methyl]-1,12,19,25-tetraoxo-16-oxa-13,20,24-t riazanonacos-1-yl]-4-hydroxy-2-pyrrolidinyl)methyl ester
tatgaaaattcctactggact

SEQ ID NO: 4947 - RNA, 21 nt, synthetic construct
  source 1..21: mol_type = other RNA
  modified_base 1: mod_base = OTHER; note = 2'-O-methylcytidine-3'-phosphorothioate
  modified_base 2: mod_base = OTHER; note = 2'-O-methylcytidine-3'-phosphorothioate
  modified_base 3: mod_base = OTHER; note = 2'-O-methyluridine-3'-phosphate
  modified_base 4: mod_base = OTHER; note = 2'-O-methylcytidine-3'-phosphate
  modified_base 5: mod_base = OTHER; note = 2'-O-methyluridine-3'-phosphate
  modified_base 6: mod_base = OTHER; note = 2'-O-docosanyl-uridine-3'-phosphate
  modified_base 7: mod_base = OTHER; note = 2'-deoxy-2'-fluorouridine-3'-phosphate
  modified_base 8: mod_base = OTHER; note = 2'-O-methylguanosine-3'-phosphate
  modified_base 9: mod_base = OTHER; note = 2'-deoxy-2'-fluorouridine-3'-phosphate
  modified_base 10: mod_base = OTHER; note = 2'-deoxy-2'-fluoroguanosine-3'-phosphate
  modified_base 11: mod_base = OTHER; note = 2'-deoxy-2'-fluoroguanosine-3'-phosphate
  modified_base 12: mod_base = OTHER; note = 2'-O-methylcytidine-3'-phosphate
  modified_base 13: mod_base = OTHER; note = 2'-O-methyladenosine-3'-phosphate
  modified_base 14: mod_base = OTHER; note = 2'-O-methyladenosine-3'-phosphate
  modified_base 15: mod_base = OTHER; note = 2'-O-methyladenosine-3'-phosphate
  modified_base 16: mod_base = OTHER; note = 2'-O-methyladenosine-3'-phosphate
  modified_base 17: mod_base = OTHER; note = 2'-O-methylcytidine-3'-phosphate
  modified_base 18: mod_base = OTHER; note = 2'-O-methyladenosine-3'-phosphate
  modified_base 19: mod_base = OTHER; note = 2'-O-methyluridine-3'-phosphate
  modified_base 20: mod_base = OTHER; note = 2'-O-methylcytidine-3'-phosphate
  modified_base 21: mod_base = OTHER; note = 2'-O-methyluridine-3'-phosphate ((2S,4R)-1-[29-[[2-(acetylamino)-2-deoxy-beta-D-galactopyra nosyl]oxy]-14,14-bis[[3-[[3-[[5-[[2-(acetylamino)-2-deoxy-b eta-D-galactopyranosyl]oxy]-1-oxopentyl]amino]propyl]amino] -3-oxopropoxy]methyl]-1,12,19,25-tetraoxo-16-oxa-13,20,24-t riazanonacos-1-yl]-4-hydroxy-2-pyrrolidinyl)methyl ester
cctctttgtggcaaaacatct

SEQ ID NO: 4948 - RNA, 21 nt, synthetic construct
  source 1..21: mol_type = other RNA
  modified_base 1: mod_base = OTHER; note = 2'-O-methylcytidine-3'-phosphorothioate
  modified_base 2: mod_base = OTHER; note = 2'-O-methyladenosine-3'-phosphorothioate
  modified_base 3: mod_base = OTHER; note = 2'-O-methylguanosine-3'-phosphate
  modified_base 4: mod_base = OTHER; note = 2'-O-methyluridine-3'-phosphate
  modified_base 5: mod_base = OTHER; note = 2'-O-methylcytidine-3'-phosphate
  modified_base 6: mod_base = OTHER; note = 2'-O-docosanyl-adenosine-3'-phosphate
  modified_base 7: mod_base = OTHER; note = 2'-deoxy-2'-fluoroguanosine-3'-phosphate
  modified_base 8: mod_base = OTHER; note = 2'-O-methyladenosine-3'-phosphate
  modified_base 9: mod_base = OTHER; note = 2'-deoxy-2'-fluoroadenosine-3'-phosphate
  modified_base 10: mod_base = OTHER; note = 2'-deoxy-2'-fluoroguanosine-3'-phosphate
  modified_base 11: mod_base = OTHER; note = 2'-deoxy-2'-fluoroadenosine-3'-phosphate
  modified_base 12: mod_base = OTHER; note = 2'-O-methylguanosine-3'-phosphate
  modified_base 13: mod_base = OTHER; note = 2'-O-methyladenosine-3'-phosphate
  modified_base 14: mod_base = OTHER; note = 2'-O-methylcytidine-3'-phosphate
  modified_base 15: mod_base = OTHER; note = 2'-O-methyluridine-3'-phosphate
  modified_base 16: mod_base = OTHER; note = 2'-O-methylcytidine-3'-phosphate
  modified_base 17: mod_base = OTHER; note = 2'-O-methylguanosine-3'-phosphate
  modified_base 18: mod_base = OTHER; note = 2'-O-methyluridine-3'-phosphate
  modified_base 19: mod_base = OTHER; note = 2'-O-methylguanosine-3'-phosphate
  modified_base 20: mod_base = OTHER; note = 2'-O-methyluridine-3'-phosphate
  modified_base 21: mod_base = OTHER; note = 2'-O-methyluridine-3'-phosphate ((2S,4R)-1-[29-[[2-(acetylamino)-2-deoxy-beta-D-galactopyra nosyl]oxy]-14,14-bis[[3-[[3-[[5-[[2-(acetylamino)-2-deoxy-b eta-D-galactopyranosyl]oxy]-1-oxopentyl]amino]propyl]amino] -3-oxopropoxy]methyl]-1,12,19,25-tetraoxo-16-oxa-13,20,24-t riazanonacos-1-yl]-4-hydroxy-2-pyrrolidinyl)methyl ester
cagtcagaagagactcgtgtt

SEQ ID NO: 4949 - RNA, 21 nt, synthetic construct
  source 1..21: mol_type = other RNA
  modified_base 1: mod_base = OTHER; note = 2'-O-methyladenosine-3'-phosphorothioate
  modified_base 2: mod_base = OTHER; note = 2'-O-methyladenosine-3'-phosphorothioate
  modified_base 3: mod_base = OTHER; note = 2'-O-methylguanosine-3'-phosphate
  modified_base 4: mod_base = OTHER; note = 2'-O-methyluridine-3'-phosphate
  modified_base 5: mod_base = OTHER; note = 2'-O-methylcytidine-3'-phosphate
  modified_base 6: mod_base = OTHER; note = 2'-O-docosanyl-adenosine-3'-phosphate
  modified_base 7: mod_base = OTHER; note = 2'-deoxy-2'-fluorocytidine-3'-phosphate
  modified_base 8: mod_base = OTHER; note = 2'-O-methyluridine-3'-phosphate
  modified_base 9: mod_base = OTHER; note = 2'-deoxy-2'-fluoroguanosine-3'-phosphate
  modified_base 10: mod_base = OTHER; note = 2'-deoxy-2'-fluoroadenosine-3'-phosphate
  modified_base 11: mod_base = OTHER; note = 2'-deoxy-2'-fluoroadenosine-3'-phosphate
  modified_base 12: mod_base = OTHER; note = 2'-O-methylcytidine-3'-phosphate
  modified_base 13: mod_base = OTHER; note = 2'-O-methyladenosine-3'-phosphate
  modified_base 14: mod_base = OTHER; note = 2'-O-methyladenosine-3'-phosphate
  modified_base 15: mod_base = OTHER; note = 2'-O-methylcytidine-3'-phosphate
  modified_base 16: mod_base = OTHER; note = 2'-O-methyluridine-3'-phosphate
  modified_base 17: mod_base = OTHER; note = 2'-O-methylguanosine-3'-phosphate
  modified_base 18: mod_base = OTHER; note = 2'-O-methyladenosine-3'-phosphate
  modified_base 19: mod_base = OTHER; note = 2'-O-methyluridine-3'-phosphate
  modified_base 20: mod_base = OTHER; note = 2'-O-methylcytidine-3'-phosphate
  modified_base 21: mod_base = OTHER; note = 2'-O-methyluridine-3'-phosphate ((2S,4R)-1-[29-[[2-(acetylamino)-2-deoxy-beta-D-galactopyra nosyl]oxy]-14,14-bis[[3-[[3-[[5-[[2-(acetylamino)-2-deoxy-b eta-D-galactopyranosyl]oxy]-1-oxopentyl]amino]propyl]amino] -3-oxopropoxy]methyl]-1,12,19,25-tetraoxo-16-oxa-13,20,24-t riazanonacos-1-yl]-4-hydroxy-2-pyrrolidinyl)methyl ester
aagtcactgaacaactgatct

SEQ ID NO: 4950 - RNA, 21 nt, synthetic construct
  source 1..21: mol_type = other RNA
  modified_base 1: mod_base = OTHER; note = 2'-O-methylguanosine-3'-phosphorothioate
  modified_base 2: mod_base = OTHER; note = 2'-O-methylguanosine-3'-phosphorothioate
  modified_base 3: mod_base = OTHER; note = 2'-O-methyladenosine-3'-phosphate
  modified_base 4: mod_base = OTHER; note = 2'-O-methylguanosine-3'-phosphate
  modified_base 5: mod_base = OTHER; note = 2'-O-methylcytidine-3'-phosphate
  modified_base 6: mod_base = OTHER; note = 2'-O-docosanyl-uridine-3'-phosphate
  modified_base 7: mod_base = OTHER; note = 2'-deoxy-2'-fluorouridine-3'-phosphate
  modified_base 8: mod_base = OTHER; note = 2'-O-methyladenosine-3'-phosphate
  modified_base 9: mod_base = OTHER; note = 2'-deoxy-2'-fluorouridine-3'-phosphate
  modified_base 10: mod_base = OTHER; note = 2'-deoxy-2'-fluoroguanosine-3'-phosphate
  modified_base 11: mod_base = OTHER; note = 2'-deoxy-2'-fluoroadenosine-3'-phosphate
  modified_base 12: mod_base = OTHER; note = 2'-O-methyluridine-3'-phosphate
  modified_base 13: mod_base = OTHER; note = 2'-O-methyluridine-3'-phosphate
  modified_base 14: mod_base = OTHER; note = 2'-O-methyluridine-3'-phosphate
  modified_base 15: mod_base = OTHER; note = 2'-O-methyluridine-3'-phosphate
  modified_base 16: mod_base = OTHER; note = 2'-O-methylcytidine-3'-phosphate
  modified_base 17: mod_base = OTHER; note = 2'-O-methylcytidine-3'-phosphate
  modified_base 18: mod_base = OTHER; note = 2'-O-methyladenosine-3'-phosphate
  modified_base 19: mod_base = OTHER; note = 2'-O-methyluridine-3'-phosphate
  modified_base 20: mod_base = OTHER; note = 2'-O-methylcytidine-3'-phosphate
  modified_base 21: mod_base = OTHER; note = 2'-O-methyluridine-3'-phosphate ((2S,4R)-1-[29-[[2-(acetylamino)-2-deoxy-beta-D-galactopyra nosyl]oxy]-14,14-bis[[3-[[3-[[5-[[2-(acetylamino)-2-deoxy-b eta-D-galactopyranosyl]oxy]-1-oxopentyl]amino]propyl]amino] -3-oxopropoxy]methyl]-1,12,19,25-tetraoxo-16-oxa-13,20,24-t riazanonacos-1-yl]-4-hydroxy-2-pyrrolidinyl)methyl ester
ggagcttatgattttccatct

SEQ ID NO: 4951 - RNA, 21 nt, synthetic construct
  source 1..21: mol_type = other RNA
  modified_base 1: mod_base = OTHER; note = 2'-O-methylguanosine-3'-phosphorothioate
  modified_base 2: mod_base = OTHER; note = 2'-O-methyluridine-3'-phosphorothioate
  modified_base 3: mod_base = OTHER; note = 2'-O-methylguanosine-3'-phosphate
  modified_base 4: mod_base = OTHER; note = 2'-O-methylcytidine-3'-phosphate
  modified_base 5: mod_base = OTHER; note = 2'-O-methylguanosine-3'-phosphate
  modified_base 6: mod_base = OTHER; note = 2'-O-docosanyl-guanosine-3'-phosphate
  modified_base 7: mod_base = OTHER; note = 2'-deoxy-2'-fluoroadenosine-3'-phosphate
  modified_base 8: mod_base = OTHER; note = 2'-O-methyluridine-3'-phosphate
  modified_base 9: mod_base = OTHER; note = 2'-deoxy-2'-fluorocytidine-3'-phosphate
  modified_base 10: mod_base = OTHER; note = 2'-deoxy-2'-fluoroguanosine-3'-phosphate
  modified_base 11: mod_base = OTHER; note = 2'-deoxy-2'-fluorouridine-3'-phosphate
  modified_base 12: mod_base = OTHER; note = 2'-O-methyluridine-3'-phosphate
  modified_base 13: mod_base = OTHER; note = 2'-O-methyluridine-3'-phosphate
  modified_base 14: mod_base = OTHER; note = 2'-O-methylcytidine-3'-phosphate
  modified_base 15: mod_base = OTHER; note = 2'-O-methylguanosine-3'-phosphate
  modified_base 16: mod_base = OTHER; note = 2'-O-methylcytidine-3'-phosphate
  modified_base 17: mod_base = OTHER; note = 2'-O-methyladenosine-3'-phosphate
  modified_base 18: mod_base = OTHER; note = 2'-O-methyladenosine-3'-phosphate
  modified_base 19: mod_base = OTHER; note = 2'-O-methylcytidine-3'-phosphate
  modified_base 20: mod_base = OTHER; note = 2'-O-methyluridine-3'-phosphate
  modified_base 21: mod_base = OTHER; note = 2'-O-methyluridine-3'-phosphate ((2S,4R)-1-[29-[[2-(acetylamino)-2-deoxy-beta-D-galactopyra nosyl]oxy]-14,14-bis[[3-[[3-[[5-[[2-(acetylamino)-2-deoxy-b eta-D-galactopyranosyl]oxy]-1-oxopentyl]amino]propyl]amino] -3-oxopropoxy]methyl]-1,12,19,25-tetraoxo-16-oxa-13,20,24-t riazanonacos-1-yl]-4-hydroxy-2-pyrrolidinyl)methyl ester
gtgcggatcgtttcgcaactt

SEQ ID NO: 4952 - RNA, 21 nt, synthetic construct
  source 1..21: mol_type = other RNA
  modified_base 1: mod_base = OTHER; note = 2'-O-methyladenosine-3'-phosphorothioate
  modified_base 2: mod_base = OTHER; note = 2'-O-methyladenosine-3'-phosphorothioate
  modified_base 3: mod_base = OTHER; note = 2'-O-methyluridine-3'-phosphate
  modified_base 4: mod_base = OTHER; note = 2'-O-methylcytidine-3'-phosphate
  modified_base 5: mod_base = OTHER; note = 2'-O-methyluridine-3'-phosphate
  modified_base 6: mod_base = OTHER; note = 2'-O-docosanyl-guanosine-3'-phosphate
  modified_base 7: mod_base = OTHER; note = 2'-deoxy-2'-fluorocytidine-3'-phosphate
  modified_base 8: mod_base = OTHER; note = 2'-O-methylcytidine-3'-phosphate
  modified_base 9: mod_base = OTHER; note = 2'-deoxy-2'-fluoroguanosine-3'-phosphate
  modified_base 10: mod_base = OTHER; note = 2'-deoxy-2'-fluorouridine-3'-phosphate
  modified_base 11: mod_base = OTHER; note = 2'-deoxy-2'-fluorocytidine-3'-phosphate
  modified_base 12: mod_base = OTHER; note = 2'-O-methyluridine-3'-phosphate
  modified_base 13: mod_base = OTHER; note = 2'-O-methyluridine-3'-phosphate
  modified_base 14: mod_base = OTHER; note = 2'-O-methyluridine-3'-phosphate
  modified_base 15: mod_base = OTHER; note = 2'-O-methyluridine-3'-phosphate
  modified_base 16: mod_base = OTHER; note = 2'-O-methylguanosine-3'-phosphate
  modified_base 17: mod_base = OTHER; note = 2'-O-methyladenosine-3'-phosphate
  modified_base 18: mod_base = OTHER; note = 2'-O-methyladenosine-3'-phosphate
  modified_base 19: mod_base = OTHER; note = 2'-O-methylguanosine-3'-phosphate
  modified_base 20: mod_base = OTHER; note = 2'-O-methylcytidine-3'-phosphate
  modified_base 21: mod_base = OTHER; note = 2'-O-methyluridine-3'-phosphate ((2S,4R)-1-[29-[[2-(acetylamino)-2-deoxy-beta-D-galactopyra nosyl]oxy]-14,14-bis[[3-[[3-[[5-[[2-(acetylamino)-2-deoxy-b eta-D-galactopyranosyl]oxy]-1-oxopentyl]amino]propyl]amino] -3-oxopropoxy]methyl]-1,12,19,25-tetraoxo-16-oxa-13,20,24-t riazanonacos-1-yl]-4-hydroxy-2-pyrrolidinyl)methyl ester
aatctgccgtcttttgaagct

SEQ ID NO: 4953 - RNA, 21 nt, synthetic construct
  source 1..21: mol_type = other RNA
  modified_base 1: mod_base = OTHER; note = 2'-O-methyluridine-3'-phosphorothioate
  modified_base 2: mod_base = OTHER; note = 2'-O-methyladenosine-3'-phosphorothioate
  modified_base 3: mod_base = OTHER; note = 2'-O-methylcytidine-3'-phosphate
  modified_base 4: mod_base = OTHER; note = 2'-O-methyluridine-3'-phosphate
  modified_base 5: mod_base = OTHER; note = 2'-O-methyluridine-3'-phosphate
  modified_base 6: mod_base = OTHER; note = 2'-O-docosanyl-cytidine-3'-phosphate
  modified_base 7: mod_base = OTHER; note = 2'-deoxy-2'-fluorouridine-3'-phosphate
  modified_base 8: mod_base = OTHER; note = 2'-O-methyluridine-3'-phosphate
  modified_base 9: mod_base = OTHER; note = 2'-deoxy-2'-fluorouridine-3'-phosphate
  modified_base 10: mod_base = OTHER; note = 2'-deoxy-2'-fluorouridine-3'-phosphate
  modified_base 11: mod_base = OTHER; note = 2'-deoxy-2'-fluorocytidine-3'-phosphate
  modified_base 12: mod_base = OTHER; note = 2'-O-methylcytidine-3'-phosphate
  modified_base 13: mod_base = OTHER; note = 2'-O-methylcytidine-3'-phosphate
  modified_base 14: mod_base = OTHER; note = 2'-O-methylguanosine-3'-phosphate
  modified_base 15: mod_base = OTHER; note = 2'-O-methyladenosine-3'-phosphate
  modified_base 16: mod_base = OTHER; note = 2'-O-methylcytidine-3'-phosphate
  modified_base 17: mod_base = OTHER; note = 2'-O-methyluridine-3'-phosphate
  modified_base 18: mod_base = OTHER; note = 2'-O-methyluridine-3'-phosphate
  modified_base 19: mod_base = OTHER; note = 2'-O-methylcytidine-3'-phosphate
  modified_base 20: mod_base = OTHER; note = 2'-O-methyluridine-3'-phosphate
  modified_base 21: mod_base = OTHER; note = 2'-O-methyluridine-3'-phosphate ((2S,4R)-1-[29-[[2-(acetylamino)-2-deoxy-beta-D-galactopyra nosyl]oxy]-14,14-bis[[3-[[3-[[5-[[2-(acetylamino)-2-deoxy-b eta-D-galactopyranosyl]oxy]-1-oxopentyl]amino]propyl]amino] -3-oxopropoxy]methyl]-1,12,19,25-tetraoxo-16-oxa-13,20,24-t riazanonacos-1-yl]-4-hydroxy-2-pyrrolidinyl)methyl ester
tacttcttttcccgacttctt

SEQ ID NO: 4954 - RNA, 21 nt, synthetic construct
  source 1..21: mol_type = other RNA
  modified_base 1: mod_base = OTHER; note = 2'-O-methylcytidine-3'-phosphorothioate
  modified_base 2: mod_base = OTHER; note = 2'-O-methyluridine-3'-phosphorothioate
  modified_base 3: mod_base = OTHER; note = 2'-O-methyladenosine-3'-phosphate
  modified_base 4: mod_base = OTHER; note = 2'-O-methylcytidine-3'-phosphate
  modified_base 5: mod_base = OTHER; note = 2'-O-methyluridine-3'-phosphate
  modified_base 6: mod_base = OTHER; note = 2'-O-docosanyl-guanosine-3'-phosphate
  modified_base 7: mod_base = OTHER; note = 2'-deoxy-2'-fluorouridine-3'-phosphate
  modified_base 8: mod_base = OTHER; note = 2'-O-methyladenosine-3'-phosphate
  modified_base 9: mod_base = OTHER; note = 2'-deoxy-2'-fluoroadenosine-3'-phosphate
  modified_base 10: mod_base = OTHER; note = 2'-deoxy-2'-fluorouridine-3'-phosphate
  modified_base 11: mod_base = OTHER; note = 2'-deoxy-2'-fluorocytidine-3'-phosphate
  modified_base 12: mod_base = OTHER; note = 2'-O-methylcytidine-3'-phosphate
  modified_base 13: mod_base = OTHER; note = 2'-O-methyladenosine-3'-phosphate
  modified_base 14: mod_base = OTHER; note = 2'-O-methylcytidine-3'-phosphate
  modified_base 15: mod_base = OTHER; note = 2'-O-methyladenosine-3'-phosphate
  modified_base 16: mod_base = OTHER; note = 2'-O-methyladenosine-3'-phosphate
  modified_base 17: mod_base = OTHER; note = 2'-O-methylcytidine-3'-phosphate
  modified_base 18: mod_base = OTHER; note = 2'-O-methylcytidine-3'-phosphate
  modified_base 19: mod_base = OTHER; note = 2'-O-methylcytidine-3'-phosphate
  modified_base 20: mod_base = OTHER; note = 2'-O-methyluridine-3'-phosphate
  modified_base 21: mod_base = OTHER; note = 2'-O-methyluridine-3'-phosphate ((2S,4R)-1-[29-[[2-(acetylamino)-2-deoxy-beta-D-galactopyra nosyl]oxy]-14,14-bis[[3-[[3-[[5-[[2-(acetylamino)-2-deoxy-b eta-D-galactopyranosyl]oxy]-1-oxopentyl]amino]propyl]amino] -3-oxopropoxy]methyl]-1,12,19,25-tetraoxo-16-oxa-13,20,24-t riazanonacos-1-yl]-4-hydroxy-2-pyrrolidinyl)methyl ester
ctactgtaatccacaaccctt

SEQ ID NO: 4955 - RNA, 21 nt, synthetic construct
  source 1..21: mol_type = other RNA
  modified_base 1: mod_base = OTHER; note = 2'-O-methyluridine-3'-phosphorothioate
  modified_base 2: mod_base = OTHER; note = 2'-O-methyluridine-3'-phosphorothioate
  modified_base 3: mod_base = OTHER; note = 2'-O-methyluridine-3'-phosphate
  modified_base 4: mod_base = OTHER; note = 2'-O-methylguanosine-3'-phosphate
  modified_base 5: mod_base = OTHER; note = 2'-O-methyluridine-3'-phosphate
  modified_base 6: mod_base = OTHER; note = 2'-O-docosanyl-uridine-3'-phosphate
  modified_base 7: mod_base = OTHER; note = 2'-deoxy-2'-fluorocytidine-3'-phosphate
  modified_base 8: mod_base = OTHER; note = 2'-O-methylcytidine-3'-phosphate
  modified_base 9: mod_base = OTHER; note = 2'-deoxy-2'-fluoroadenosine-3'-phosphate
  modified_base 10: mod_base = OTHER; note = 2'-deoxy-2'-fluorouridine-3'-phosphate
  modified_base 11: mod_base = OTHER; note = 2'-deoxy-2'-fluorouridine-3'-phosphate
  modified_base 12: mod_base = OTHER; note = 2'-O-methylcytidine-3'-phosphate
  modified_base 13: mod_base = OTHER; note = 2'-O-methyluridine-3'-phosphate
  modified_base 14: mod_base = OTHER; note = 2'-O-methyluridine-3'-phosphate
  modified_base 15: mod_base = OTHER; note = 2'-O-methyluridine-3'-phosphate
  modified_base 16: mod_base = OTHER; note = 2'-O-methyluridine-3'-phosphate
  modified_base 17: mod_base = OTHER; note = 2'-O-methylcytidine-3'-phosphate
  modified_base 18: mod_base = OTHER; note = 2'-O-methyluridine-3'-phosphate
  modified_base 19: mod_base = OTHER; note = 2'-O-methyluridine-3'-phosphate
  modified_base 20: mod_base = OTHER; note = 2'-O-methyladenosine-3'-phosphate
  modified_base 21: mod_base = OTHER; note = 2'-O-methyluridine-3'-phosphate ((2S,4R)-1-[29-[[2-(acetylamino)-2-deoxy-beta-D-galactopyra nosyl]oxy]-14,14-bis[[3-[[3-[[5-[[2-(acetylamino)-2-deoxy-b eta-D-galactopyranosyl]oxy]-1-oxopentyl]amino]propyl]amino] -3-oxopropoxy]methyl]-1,12,19,25-tetraoxo-16-oxa-13,20,24-t riazanonacos-1-yl]-4-hydroxy-2-pyrrolidinyl)methyl ester
tttgttccattcttttcttat

SEQ ID NO: 4956 - RNA, 21 nt, synthetic construct
  source 1..21: mol_type = other RNA
  modified_base 1: mod_base = OTHER; note = 2'-O-methylguanosine-3'-phosphorothioate
  modified_base 2: mod_base = OTHER; note = 2'-O-methyladenosine-3'-phosphorothioate
  modified_base 3: mod_base = OTHER; note = 2'-O-methyladenosine-3'-phosphate
  modified_base 4: mod_base = OTHER; note = 2'-O-methylguanosine-3'-phosphate
  modified_base 5: mod_base = OTHER; note = 2'-O-methyladenosine-3'-phosphate
  modified_base 6: mod_base = OTHER; note = 2'-O-docosanyl-uridine-3'-phosphate
  modified_base 7: mod_base = OTHER; note = 2'-deoxy-2'-fluoroguanosine-3'-phosphate
  modified_base 8: mod_base = OTHER; note = 2'-O-methyluridine-3'-phosphate
  modified_base 9: mod_base = OTHER; note = 2'-deoxy-2'-fluoroguanosine-3'-phosphate
  modified_base 10: mod_base = OTHER; note = 2'-deoxy-2'-fluoroadenosine-3'-phosphate
  modified_base 11: mod_base = OTHER; note = 2'-deoxy-2'-fluoroadenosine-3'-phosphate
  modified_base 12: mod_base = OTHER; note = 2'-O-methyladenosine-3'-phosphate
  modified_base 13: mod_base = OTHER; note = 2'-O-methylguanosine-3'-phosphate
  modified_base 14: mod_base = OTHER; note = 2'-O-methylcytidine-3'-phosphate
  modified_base 15: mod_base = OTHER; note = 2'-O-methyladenosine-3'-phosphate
  modified_base 16: mod_base = OTHER; note = 2'-O-methylcytidine-3'-phosphate
  modified_base 17: mod_base = OTHER; note = 2'-O-methylguanosine-3'-phosphate
  modified_base 18: mod_base = OTHER; note = 2'-O-methyladenosine-3'-phosphate
  modified_base 19: mod_base = OTHER; note = 2'-O-methyladenosine-3'-phosphate
  modified_base 20: mod_base = OTHER; note = 2'-O-methyladenosine-3'-phosphate
  modified_base 21: mod_base = OTHER; note = 2'-O-methyluridine-3'-phosphate ((2S,4R)-1-[29-[[2-(acetylamino)-2-deoxy-beta-D-galactopyra nosyl]oxy]-14,14-bis[[3-[[3-[[5-[[2-(acetylamino)-2-deoxy-b eta-D-galactopyranosyl]oxy]-1-oxopentyl]amino]propyl]amino] -3-oxopropoxy]methyl]-1,12,19,25-tetraoxo-16-oxa-13,20,24-t riazanonacos-1-yl]-4-hydroxy-2-pyrrolidinyl)methyl ester
gaagatgtgaaagcacgaaat

SEQ ID NO: 4957 - RNA, 21 nt, synthetic construct
  source 1..21: mol_type = other RNA
  modified_base 1: mod_base = OTHER; note = 2'-O-methylcytidine-3'-phosphorothioate
  modified_base 2: mod_base = OTHER; note = 2'-O-methyladenosine-3'-phosphorothioate
  modified_base 3: mod_base = OTHER; note = 2'-O-methylguanosine-3'-phosphate
  modified_base 4: mod_base = OTHER; note = 2'-O-methyluridine-3'-phosphate
  modified_base 5: mod_base = OTHER; note = 2'-O-methyladenosine-3'-phosphate
  modified_base 6: mod_base = OTHER; note = 2'-O-docosanyl-adenosine-3'-phosphate
  modified_base 7: mod_base = OTHER; note = 2'-deoxy-2'-fluoroadenosine-3'-phosphate
  modified_base 8: mod_base = OTHER; note = 2'-O-methyluridine-3'-phosphate
  modified_base 9: mod_base = OTHER; note = 2'-deoxy-2'-fluoroadenosine-3'-phosphate
  modified_base 10: mod_base = OTHER; note = 2'-deoxy-2'-fluorouridine-3'-phosphate
  modified_base 11: mod_base = OTHER; note = 2'-deoxy-2'-fluoroadenosine-3'-phosphate
  modified_base 12: mod_base = OTHER; note = 2'-O-methyluridine-3'-phosphate
  modified_base 13: mod_base = OTHER; note = 2'-O-methyluridine-3'-phosphate
  modified_base 14: mod_base = OTHER; note = 2'-O-methylguanosine-3'-phosphate
  modified_base 15: mod_base = OTHER; note = 2'-O-methyladenosine-3'-phosphate
  modified_base 16: mod_base = OTHER; note = 2'-O-methylguanosine-3'-phosphate
  modified_base 17: mod_base = OTHER; note = 2'-O-methylcytidine-3'-phosphate
  modified_base 18: mod_base = OTHER; note = 2'-O-methylcytidine-3'-phosphate
  modified_base 19: mod_base = OTHER; note = 2'-O-methyladenosine-3'-phosphate
  modified_base 20: mod_base = OTHER; note = 2'-O-methyluridine-3'-phosphate
  modified_base 21: mod_base = OTHER; note = 2'-O-methyluridine-3'-phosphate ((2S,4R)-1-[29-[[2-(acetylamino)-2-deoxy-beta-D-galactopyra nosyl]oxy]-14,14-bis[[3-[[3-[[5-[[2-(acetylamino)-2-deoxy-b eta-D-galactopyranosyl]oxy]-1-oxopentyl]amino]propyl]amino] -3-oxopropoxy]methyl]-1,12,19,25-tetraoxo-16-oxa-13,20,24-t riazanonacos-1-yl]-4-hydroxy-2-pyrrolidinyl)methyl ester
cagtaaatatattgagccatt

SEQ ID NO: 4958 - RNA, 21 nt, synthetic construct
  source 1..21: mol_type = other RNA
  modified_base 1: mod_base = OTHER; note = 2'-O-methyladenosine-3'-phosphorothioate
  modified_base 2: mod_base = OTHER; note = 2'-O-methyladenosine-3'-phosphorothioate
  modified_base 3: mod_base = OTHER; note = 2'-O-methyluridine-3'-phosphate
  modified_base 4: mod_base = OTHER; note = 2'-O-methylguanosine-3'-phosphate
  modified_base 5: mod_base = OTHER; note = 2'-O-methylguanosine-3'-phosphate
  modified_base 6: mod_base = OTHER; note = 2'-O-docosanyl-guanosine-3'-phosphate
  modified_base 7: mod_base = OTHER; note = 2'-deoxy-2'-fluoroadenosine-3'-phosphate
  modified_base 8: mod_base = OTHER; note = 2'-O-methyladenosine-3'-phosphate
  modified_base 9: mod_base = OTHER; note = 2'-deoxy-2'-fluoroadenosine-3'-phosphate
  modified_base 10: mod_base = OTHER; note = 2'-deoxy-2'-fluoroguanosine-3'-phosphate
  modified_base 11: mod_base = OTHER; note = 2'-deoxy-2'-fluoroadenosine-3'-phosphate
  modified_base 12: mod_base = OTHER; note = 2'-O-methyladenosine-3'-phosphate
  modified_base 13: mod_base = OTHER; note = 2'-O-methyladenosine-3'-phosphate
  modified_base 14: mod_base = OTHER; note = 2'-O-methyladenosine-3'-phosphate
  modified_base 15: mod_base = OTHER; note = 2'-O-methylcytidine-3'-phosphate
  modified_base 16: mod_base = OTHER; note = 2'-O-methyluridine-3'-phosphate
  modified_base 17: mod_base = OTHER; note = 2'-O-methyluridine-3'-phosphate
  modified_base 18: mod_base = OTHER; note = 2'-O-methylcytidine-3'-phosphate
  modified_base 19: mod_base = OTHER; note = 2'-O-methyluridine-3'-phosphate
  modified_base 20: mod_base = OTHER; note = 2'-O-methylcytidine-3'-phosphate
  modified_base 21: mod_base = OTHER; note = 2'-O-methyluridine-3'-phosphate ((2S,4R)-1-[29-[[2-(acetylamino)-2-deoxy-beta-D-galactopyra nosyl]oxy]-14,14-bis[[3-[[3-[[5-[[2-(acetylamino)-2-deoxy-b eta-D-galactopyranosyl]oxy]-1-oxopentyl]amino]propyl]amino] -3-oxopropoxy]methyl]-1,12,19,25-tetraoxo-16-oxa-13,20,24-t riazanonacos-1-yl]-4-hydroxy-2-pyrrolidinyl)methyl ester
aatgggaaagaaaacttctct

SEQ ID NO: 4959 - RNA, 21 nt, synthetic construct
  source 1..21: mol_type = other RNA
  modified_base 1: mod_base = OTHER; note = 2'-O-methylguanosine-3'-phosphorothioate
  modified_base 2: mod_base = OTHER; note = 2'-O-methylguanosine-3'-phosphorothioate
  modified_base 3: mod_base = OTHER; note = 2'-O-methylcytidine-3'-phosphate
  modified_base 4: mod_base = OTHER; note = 2'-O-methyladenosine-3'-phosphate
  modified_base 5: mod_base = OTHER; note = 2'-O-methylguanosine-3'-phosphate
  modified_base 6: mod_base = OTHER; note = 2'-O-docosanyl-adenosine-3'-phosphate
  modified_base 7: mod_base = OTHER; note = 2'-deoxy-2'-fluoroadenosine-3'-phosphate
  modified_base 8: mod_base = OTHER; note = 2'-O-methyluridine-3'-phosphate
  modified_base 9: mod_base = OTHER; note = 2'-deoxy-2'-fluoroguanosine-3'-phosphate
  modified_base 10: mod_base = OTHER; note = 2'-deoxy-2'-fluorouridine-3'-phosphate
  modified_base 11: mod_base = OTHER; note = 2'-deoxy-2'-fluorouridine-3'-phosphate
  modified_base 12: mod_base = OTHER; note = 2'-O-methylcytidine-3'-phosphate
  modified_base 13: mod_base = OTHER; note = 2'-O-methyladenosine-3'-phosphate
  modified_base 14: mod_base = OTHER; note = 2'-O-methyluridine-3'-phosphate
  modified_base 15: mod_base = OTHER; note = 2'-O-methyluridine-3'-phosphate
  modified_base 16: mod_base = OTHER; note = 2'-O-methyluridine-3'-phosphate
  modified_base 17: mod_base = OTHER; note = 2'-O-methyluridine-3'-phosphate
  modified_base 18: mod_base = OTHER; note = 2'-O-methylcytidine-3'-phosphate
  modified_base 19: mod_base = OTHER; note = 2'-O-methyladenosine-3'-phosphate
  modified_base 20: mod_base = OTHER; note = 2'-O-methyluridine-3'-phosphate
  modified_base 21: mod_base = OTHER; note = 2'-O-methyluridine-3'-phosphate ((2S,4R)-1-[29-[[2-(acetylamino)-2-deoxy-beta-D-galactopyra nosyl]oxy]-14,14-bis[[3-[[3-[[5-[[2-(acetylamino)-2-deoxy-b eta-D-galactopyranosyl]oxy]-1-oxopentyl]amino]propyl]amino] -3-oxopropoxy]methyl]-1,12,19,25-tetraoxo-16-oxa-13,20,24-t riazanonacos-1-yl]-4-hydroxy-2-pyrrolidinyl)methyl ester
ggcagaatgttcattttcatt

SEQ ID NO: 4960 - RNA, 21 nt, synthetic construct
  source 1..21: mol_type = other RNA
  modified_base 1: mod_base = OTHER; note = 2'-O-methylcytidine-3'-phosphorothioate
  modified_base 2: mod_base = OTHER; note = 2'-O-methylguanosine-3'-phosphorothioate
  modified_base 3: mod_base = OTHER; note = 2'-O-methylcytidine-3'-phosphate
  modified_base 4: mod_base = OTHER; note = 2'-O-methylcytidine-3'-phosphate
  modified_base 5: mod_base = OTHER; note = 2'-O-methyluridine-3'-phosphate
  modified_base 6: mod_base = OTHER; note = 2'-O-docosanyl-guanosine-3'-phosphate
  modified_base 7: mod_base = OTHER; note = 2'-deoxy-2'-fluorocytidine-3'-phosphate
  modified_base 8: mod_base = OTHER; note = 2'-O-methyladenosine-3'-phosphate
  modified_base 9: mod_base = OTHER; note = 2'-deoxy-2'-fluorouridine-3'-phosphate
  modified_base 10: mod_base = OTHER; note = 2'-deoxy-2'-fluoroadenosine-3'-phosphate
  modified_base 11: mod_base = OTHER; note = 2'-deoxy-2'-fluoroguanosine-3'-phosphate
  modified_base 12: mod_base = OTHER; note = 2'-O-methylcytidine-3'-phosphate
  modified_base 13: mod_base = OTHER; note = 2'-O-methyladenosine-3'-phosphate
  modified_base 14: mod_base = OTHER; note = 2'-O-methyluridine-3'-phosphate
  modified_base 15: mod_base = OTHER; note = 2'-O-methyladenosine-3'-phosphate
  modified_base 16: mod_base = OTHER; note = 2'-O-methyluridine-3'-phosphate
  modified_base 17: mod_base = OTHER; note = 2'-O-methyladenosine-3'-phosphate
  modified_base 18: mod_base = OTHER; note = 2'-O-methyluridine-3'-phosphate
  modified_base 19: mod_base = OTHER; note = 2'-O-methyluridine-3'-phosphate
  modified_base 20: mod_base = OTHER; note = 2'-O-methyladenosine-3'-phosphate
  modified_base 21: mod_base = OTHER; note = 2'-O-methyluridine-3'-phosphate ((2S,4R)-1-[29-[[2-(acetylamino)-2-deoxy-beta-D-galactopyra nosyl]oxy]-14,14-bis[[3-[[3-[[5-[[2-(acetylamino)-2-deoxy-b eta-D-galactopyranosyl]oxy]-1-oxopentyl]amino]propyl]amino] -3-oxopropoxy]methyl]-1,12,19,25-tetraoxo-16-oxa-13,20,24-t riazanonacos-1-yl]-4-hydroxy-2-pyrrolidinyl)methyl ester
cgcctgcatagcatatattat

SEQ ID NO: 4961 - RNA, 21 nt, synthetic construct
  source 1..21: mol_type = other RNA
  modified_base 1: mod_base = OTHER; note = 2'-O-methylcytidine-3'-phosphorothioate
  modified_base 2: mod_base = OTHER; note = 2'-O-methyluridine-3'-phosphorothioate
  modified_base 3: mod_base = OTHER; note = 2'-O-methylguanosine-3'-phosphate
  modified_base 4: mod_base = OTHER; note = 2'-O-methylguanosine-3'-phosphate
  modified_base 5: mod_base = OTHER; note = 2'-O-methylcytidine-3'-phosphate
  modified_base 6: mod_base = OTHER; note = 2'-O-docosanyl-uridine-3'-phosphate
  modified_base 7: mod_base = OTHER; note = 2'-deoxy-2'-fluoroguanosine-3'-phosphate
  modified_base 8: mod_base = OTHER; note = 2'-O-methyluridine-3'-phosphate
  modified_base 9: mod_base = OTHER; note = 2'-deoxy-2'-fluorouridine-3'-phosphate
  modified_base 10: mod_base = OTHER; note = 2'-deoxy-2'-fluorouridine-3'-phosphate
  modified_base 11: mod_base = OTHER; note = 2'-deoxy-2'-fluorouridine-3'-phosphate
  modified_base 12: mod_base = OTHER; note = 2'-O-methyluridine-3'-phosphate
  modified_base 13: mod_base = OTHER; note = 2'-O-methylcytidine-3'-phosphate
  modified_base 14: mod_base = OTHER; note = 2'-O-methylcytidine-3'-phosphate
  modified_base 15: mod_base = OTHER; note = 2'-O-methyladenosine-3'-phosphate
  modified_base 16: mod_base = OTHER; note = 2'-O-methyluridine-3'-phosphate
  modified_base 17: mod_base = OTHER; note = 2'-O-methyluridine-3'-phosphate
  modified_base 18: mod_base = OTHER; note = 2'-O-methyluridine-3'-phosphate
  modified_base 19: mod_base = OTHER; note = 2'-O-methylcytidine-3'-phosphate
  modified_base 20: mod_base = OTHER; note = 2'-O-methylcytidine-3'-phosphate
  modified_base 21: mod_base = OTHER; note = 2'-O-methyluridine-3'-phosphate ((2S,4R)-1-[29-[[2-(acetylamino)-2-deoxy-beta-D-galactopyra nosyl]oxy]-14,14-bis[[3-[[3-[[5-[[2-(acetylamino)-2-deoxy-b eta-D-galactopyranosyl]oxy]-1-oxopentyl]amino]propyl]amino] -3-oxopropoxy]methyl]-1,12,19,25-tetraoxo-16-oxa-13,20,24-t riazanonacos-1-yl]-4-hydroxy-2-pyrrolidinyl)methyl ester
ctggctgtttttccatttcct

SEQ ID NO: 4962 - RNA, 21 nt, synthetic construct
  source 1..21: mol_type = other RNA
  modified_base 1: mod_base = OTHER; note = 2'-O-methyladenosine-3'-phosphorothioate
  modified_base 2: mod_base = OTHER; note = 2'-O-methylguanosine-3'-phosphorothioate
  modified_base 3: mod_base = OTHER; note = 2'-O-methylguanosine-3'-phosphate
  modified_base 4: mod_base = OTHER; note = 2'-O-methylguanosine-3'-phosphate
  modified_base 5: mod_base = OTHER; note = 2'-O-methyladenosine-3'-phosphate
  modified_base 6: mod_base = OTHER; note = 2'-O-docosanyl-adenosine-3'-phosphate
  modified_base 7: mod_base = OTHER; note = 2'-deoxy-2'-fluoroadenosine-3'-phosphate
  modified_base 8: mod_base = OTHER; note = 2'-O-methyluridine-3'-phosphate
  modified_base 9: mod_base = OTHER; note = 2'-deoxy-2'-fluoroadenosine-3'-phosphate
  modified_base 10: mod_base = OTHER; note = 2'-deoxy-2'-fluoroadenosine-3'-phosphate
  modified_base 11: mod_base = OTHER; note = 2'-deoxy-2'-fluoroadenosine-3'-phosphate
  modified_base 12: mod_base = OTHER; note = 2'-O-methyladenosine-3'-phosphate
  modified_base 13: mod_base = OTHER; note = 2'-O-methylguanosine-3'-phosphate
  modified_base 14: mod_base = OTHER; note = 2'-O-methyluridine-3'-phosphate
  modified_base 15: mod_base = OTHER; note = 2'-O-methylcytidine-3'-phosphate
  modified_base 16: mod_base = OTHER; note = 2'-O-methyluridine-3'-phosphate
  modified_base 17: mod_base = OTHER; note = 2'-O-methyluridine-3'-phosphate
  modified_base 18: mod_base = OTHER; note = 2'-O-methyluridine-3'-phosphate
  modified_base 19: mod_base = OTHER; note = 2'-O-methyluridine-3'-phosphate
  modified_base 20: mod_base = OTHER; note = 2'-O-methylguanosine-3'-phosphate
  modified_base 21: mod_base = OTHER; note = 2'-O-methyluridine-3'-phosphate ((2S,4R)-1-[29-[[2-(acetylamino)-2-deoxy-beta-D-galactopyra nosyl]oxy]-14,14-bis[[3-[[3-[[5-[[2-(acetylamino)-2-deoxy-b eta-D-galactopyranosyl]oxy]-1-oxopentyl]amino]propyl]amino] -3-oxopropoxy]methyl]-1,12,19,25-tetraoxo-16-oxa-13,20,24-t riazanonacos-1-yl]-4-hydroxy-2-pyrrolidinyl)methyl ester
agggaaataaaagtcttttgt

SEQ ID NO: 4963 - RNA, 21 nt, synthetic construct
  source 1..21: mol_type = other RNA
  modified_base 1: mod_base = OTHER; note = 2'-O-methylcytidine-3'-phosphorothioate
  modified_base 2: mod_base = OTHER; note = 2'-O-methylcytidine-3'-phosphorothioate
  modified_base 3: mod_base = OTHER; note = 2'-O-methyladenosine-3'-phosphate
  modified_base 4: mod_base = OTHER; note = 2'-O-methylcytidine-3'-phosphate
  modified_base 5: mod_base = OTHER; note = 2'-O-methylcytidine-3'-phosphate
  modified_base 6: mod_base = OTHER; note = 2'-O-docosanyl-cytidine-3'-phosphate
  modified_base 7: mod_base = OTHER; note = 2'-deoxy-2'-fluorouridine-3'-phosphate
  modified_base 8: mod_base = OTHER; note = 2'-O-methyluridine-3'-phosphate
  modified_base 9: mod_base = OTHER; note = 2'-deoxy-2'-fluorouridine-3'-phosphate
  modified_base 10: mod_base = OTHER; note = 2'-deoxy-2'-fluorocytidine-3'-phosphate
  modified_base 11: mod_base = OTHER; note = 2'-deoxy-2'-fluorouridine-3'-phosphate
  modified_base 12: mod_base = OTHER; note = 2'-O-methylguanosine-3'-phosphate
  modified_base 13: mod_base = OTHER; note = 2'-O-methylguanosine-3'-phosphate
  modified_base 14: mod_base = OTHER; note = 2'-O-methyluridine-3'-phosphate
  modified_base 15: mod_base = OTHER; note = 2'-O-methylcytidine-3'-phosphate
  modified_base 16: mod_base = OTHER; note = 2'-O-methyladenosine-3'-phosphate
  modified_base 17: mod_base = OTHER; note = 2'-O-methyluridine-3'-phosphate
  modified_base 18: mod_base = OTHER; note = 2'-O-methylcytidine-3'-phosphate
  modified_base 19: mod_base = OTHER; note = 2'-O-methyluridine-3'-phosphate
  modified_base 20: mod_base = OTHER; note = 2'-O-methylcytidine-3'-phosphate
  modified_base 21: mod_base = OTHER; note = 2'-O-methyluridine-3'-phosphate ((2S,4R)-1-[29-[[2-(acetylamino)-2-deoxy-beta-D-galactopyra nosyl]oxy]-14,14-bis[[3-[[3-[[5-[[2-(acetylamino)-2-deoxy-b eta-D-galactopyranosyl]oxy]-1-oxopentyl]amino]propyl]amino] -3-oxopropoxy]methyl]-1,12,19,25-tetraoxo-16-oxa-13,20,24-t riazanonacos-1-yl]-4-hydroxy-2-pyrrolidinyl)methyl ester
ccaccctttctggtcatctct

SEQ ID NO: 4964 - RNA, 21 nt, synthetic construct
  source 1..21: mol_type = other RNA
  modified_base 1: mod_base = OTHER; note = 2'-O-methyluridine-3'-phosphorothioate
  modified_base 2: mod_base = OTHER; note = 2'-O-methylguanosine-3'-phosphorothioate
  modified_base 3: mod_base = OTHER; note = 2'-O-methylcytidine-3'-phosphate
  modified_base 4: mod_base = OTHER; note = 2'-O-methylcytidine-3'-phosphate
  modified_base 5: mod_base = OTHER; note = 2'-O-methyladenosine-3'-phosphate
  modified_base 6: mod_base = OTHER; note = 2'-O-docosanyl-uridine-3'-phosphate
  modified_base 7: mod_base = OTHER; note = 2'-deoxy-2'-fluoroadenosine-3'-phosphate
  modified_base 8: mod_base = OTHER; note = 2'-O-methyladenosine-3'-phosphate
  modified_base 9: mod_base = OTHER; note = 2'-deoxy-2'-fluorouridine-3'-phosphate
  modified_base 10: mod_base = OTHER; note = 2'-deoxy-2'-fluoroguanosine-3'-phosphate
  modified_base 11: mod_base = OTHER; note = 2'-deoxy-2'-fluoroguanosine-3'-phosphate
  modified_base 12: mod_base = OTHER; note = 2'-O-methyluridine-3'-phosphate
  modified_base 13: mod_base = OTHER; note = 2'-O-methyladenosine-3'-phosphate
  modified_base 14: mod_base = OTHER; note = 2'-O-methyladenosine-3'-phosphate
  modified_base 15: mod_base = OTHER; note = 2'-O-methyladenosine-3'-phosphate
  modified_base 16: mod_base = OTHER; note = 2'-O-methylguanosine-3'-phosphate
  modified_base 17: mod_base = OTHER; note = 2'-O-methylguanosine-3'-phosphate
  modified_base 18: mod_base = OTHER; note = 2'-O-methyladenosine-3'-phosphate
  modified_base 19: mod_base = OTHER; note = 2'-O-methylcytidine-3'-phosphate
  modified_base 20: mod_base = OTHER; note = 2'-O-methyluridine-3'-phosphate
  modified_base 21: mod_base = OTHER; note = 2'-O-methyluridine-3'-phosphate ((2S,4R)-1-[29-[[2-(acetylamino)-2-deoxy-beta-D-galactopyra nosyl]oxy]-14,14-bis[[3-[[3-[[5-[[2-(acetylamino)-2-deoxy-b eta-D-galactopyranosyl]oxy]-1-oxopentyl]amino]propyl]amino] -3-oxopropoxy]methyl]-1,12,19,25-tetraoxo-16-oxa-13,20,24-t riazanonacos-1-yl]-4-hydroxy-2-pyrrolidinyl)methyl ester
tgccataatggtaaaggactt

SEQ ID NO: 4965 - RNA, 21 nt, synthetic construct
  source 1..21: mol_type = other RNA
  modified_base 1: mod_base = OTHER; note = 2'-O-methylcytidine-3'-phosphorothioate
  modified_base 2: mod_base = OTHER; note = 2'-O-methyladenosine-3'-phosphorothioate
  modified_base 3: mod_base = OTHER; note = 2'-O-methyladenosine-3'-phosphate
  modified_base 4: mod_base = OTHER; note = 2'-O-methyladenosine-3'-phosphate
  modified_base 5: mod_base = OTHER; note = 2'-O-methylcytidine-3'-phosphate
  modified_base 6: mod_base = OTHER; note = 2'-O-docosanyl-uridine-3'-phosphate
  modified_base 7: mod_base = OTHER; note = 2'-deoxy-2'-fluoroguanosine-3'-phosphate
  modified_base 8: mod_base = OTHER; note = 2'-O-methyluridine-3'-phosphate
  modified_base 9: mod_base = OTHER; note = 2'-deoxy-2'-fluoroguanosine-3'-phosphate
  modified_base 10: mod_base = OTHER; note = 2'-deoxy-2'-fluorouridine-3'-phosphate
  modified_base 11: mod_base = OTHER; note = 2'-deoxy-2'-fluoroadenosine-3'-phosphate
  modified_base 12: mod_base = OTHER; note = 2'-O-methyladenosine-3'-phosphate
  modified_base 13: mod_base = OTHER; note = 2'-O-methyladenosine-3'-phosphate
  modified_base 14: mod_base = OTHER; note = 2'-O-methylcytidine-3'-phosphate
  modified_base 15: mod_base = OTHER; note = 2'-O-methyluridine-3'-phosphate
  modified_base 16: mod_base = OTHER; note = 2'-O-methylguanosine-3'-phosphate
  modified_base 17: mod_base = OTHER; note = 2'-O-methylguanosine-3'-phosphate
  modified_base 18: mod_base = OTHER; note = 2'-O-methyladenosine-3'-phosphate
  modified_base 19: mod_base = OTHER; note = 2'-O-methyladenosine-3'-phosphate
  modified_base 20: mod_base = OTHER; note = 2'-O-methyladenosine-3'-phosphate
  modified_base 21: mod_base = OTHER; note = 2'-O-methyluridine-3'-phosphate ((2S,4R)-1-[29-[[2-(acetylamino)-2-deoxy-beta-D-galactopyra nosyl]oxy]-14,14-bis[[3-[[3-[[5-[[2-(acetylamino)-2-deoxy-b eta-D-galactopyranosyl]oxy]-1-oxopentyl]amino]propyl]amino] -3-oxopropoxy]methyl]-1,12,19,25-tetraoxo-16-oxa-13,20,24-t riazanonacos-1-yl]-4-hydroxy-2-pyrrolidinyl)methyl ester
caaactgtgtaaactggaaat

SEQ ID NO: 4966 - RNA, 21 nt, synthetic construct
  source 1..21: mol_type = other RNA
  modified_base 1: mod_base = OTHER; note = 2'-O-methyluridine-3'-phosphorothioate
  modified_base 2: mod_base = OTHER; note = 2'-O-methyladenosine-3'-phosphorothioate
  modified_base 3: mod_base = OTHER; note = 2'-O-methyladenosine-3'-phosphate
  modified_base 4: mod_base = OTHER; note = 2'-O-methyladenosine-3'-phosphate
  modified_base 5: mod_base = OTHER; note = 2'-O-methylcytidine-3'-phosphate
  modified_base 6: mod_base = OTHER; note = 2'-O-docosanyl-cytidine-3'-phosphate
  modified_base 7: mod_base = OTHER; note = 2'-deoxy-2'-fluorocytidine-3'-phosphate
  modified_base 8: mod_base = OTHER; note = 2'-O-methyluridine-3'-phosphate
  modified_base 9: mod_base = OTHER; note = 2'-deoxy-2'-fluorocytidine-3'-phosphate
  modified_base 10: mod_base = OTHER; note = 2'-deoxy-2'-fluoroadenosine-3'-phosphate
  modified_base 11: mod_base = OTHER; note = 2'-deoxy-2'-fluorouridine-3'-phosphate
  modified_base 12: mod_base = OTHER; note = 2'-O-methylguanosine-3'-phosphate
  modified_base 13: mod_base = OTHER; note = 2'-O-methyluridine-3'-phosphate
  modified_base 14: mod_base = OTHER; note = 2'-O-methyladenosine-3'-phosphate
  modified_base 15: mod_base = OTHER; note = 2'-O-methylcytidine-3'-phosphate
  modified_base 16: mod_base = OTHER; note = 2'-O-methyladenosine-3'-phosphate
  modified_base 17: mod_base = OTHER; note = 2'-O-methyluridine-3'-phosphate
  modified_base 18: mod_base = OTHER; note = 2'-O-methylcytidine-3'-phosphate
  modified_base 19: mod_base = OTHER; note = 2'-O-methyluridine-3'-phosphate
  modified_base 20: mod_base = OTHER; note = 2'-O-methylguanosine-3'-phosphate
  modified_base 21: mod_base = OTHER; note = 2'-O-methyluridine-3'-phosphate ((2S,4R)-1-[29-[[2-(acetylamino)-2-deoxy-beta-D-galactopyra nosyl]oxy]-14,14-bis[[3-[[3-[[5-[[2-(acetylamino)-2-deoxy-b eta-D-galactopyranosyl]oxy]-1-oxopentyl]amino]propyl]amino] -3-oxopropoxy]methyl]-1,12,19,25-tetraoxo-16-oxa-13,20,24-t riazanonacos-1-yl]-4-hydroxy-2-pyrrolidinyl)methyl ester
taaaccctcatgtacatctgt

SEQ ID NO: 4967 - RNA, 21 nt, synthetic construct
  source 1..21: mol_type = other RNA
  modified_base 1: mod_base = OTHER; note = 2'-O-methyluridine-3'-phosphorothioate
  modified_base 2: mod_base = OTHER; note = 2'-O-methyluridine-3'-phosphorothioate
  modified_base 3: mod_base = OTHER; note = 2'-O-methyluridine-3'-phosphate
  modified_base 4: mod_base = OTHER; note = 2'-O-methyluridine-3'-phosphate
  modified_base 5: mod_base = OTHER; note = 2'-O-methylguanosine-3'-phosphate
  modified_base 6: mod_base = OTHER; note = 2'-O-docosanyl-uridine-3'-phosphate
  modified_base 7: mod_base = OTHER; note = 2'-deoxy-2'-fluoroguanosine-3'-phosphate
  modified_base 8: mod_base = OTHER; note = 2'-O-methyladenosine-3'-phosphate
  modified_base 9: mod_base = OTHER; note = 2'-deoxy-2'-fluoroadenosine-3'-phosphate
  modified_base 10: mod_base = OTHER; note = 2'-deoxy-2'-fluoroguanosine-3'-phosphate
  modified_base 11: mod_base = OTHER; note = 2'-deoxy-2'-fluorocytidine-3'-phosphate
  modified_base 12: mod_base = OTHER; note = 2'-O-methyladenosine-3'-phosphate
  modified_base 13: mod_base = OTHER; note = 2'-O-methylguanosine-3'-phosphate
  modified_base 14: mod_base = OTHER; note = 2'-O-methylcytidine-3'-phosphate
  modified_base 15: mod_base = OTHER; note = 2'-O-methyluridine-3'-phosphate
  modified_base 16: mod_base = OTHER; note = 2'-O-methyladenosine-3'-phosphate
  modified_base 17: mod_base = OTHER; note = 2'-O-methyluridine-3'-phosphate
  modified_base 18: mod_base = OTHER; note = 2'-O-methyladenosine-3'-phosphate
  modified_base 19: mod_base = OTHER; note = 2'-O-methylcytidine-3'-phosphate
  modified_base 20: mod_base = OTHER; note = 2'-O-methylguanosine-3'-phosphate
  modified_base 21: mod_base = OTHER; note = 2'-O-methyluridine-3'-phosphate ((2S,4R)-1-[29-[[2-(acetylamino)-2-deoxy-beta-D-galactopyra nosyl]oxy]-14,14-bis[[3-[[3-[[5-[[2-(acetylamino)-2-deoxy-b eta-D-galactopyranosyl]oxy]-1-oxopentyl]amino]propyl]amino] -3-oxopropoxy]methyl]-1,12,19,25-tetraoxo-16-oxa-13,20,24-t riazanonacos-1-yl]-4-hydroxy-2-pyrrolidinyl)methyl ester
ttttgtgaagcagctatacgt

SEQ ID NO: 4968 - RNA, 21 nt, synthetic construct
  source 1..21: mol_type = other RNA
  modified_base 1: mod_base = OTHER; note = 2'-O-methyladenosine-3'-phosphorothioate
  modified_base 2: mod_base = OTHER; note = 2'-O-methyluridine-3'-phosphorothioate
  modified_base 3: mod_base = OTHER; note = 2'-O-methylguanosine-3'-phosphate
  modified_base 4: mod_base = OTHER; note = 2'-O-methylguanosine-3'-phosphate
  modified_base 5: mod_base = OTHER; note = 2'-O-methyladenosine-3'-phosphate
  modified_base 6: mod_base = OTHER; note = 2'-O-docosanyl-guanosine-3'-phosphate
  modified_base 7: mod_base = OTHER; note = 2'-deoxy-2'-fluoroadenosine-3'-phosphate
  modified_base 8: mod_base = OTHER; note = 2'-O-methyluridine-3'-phosphate
  modified_base 9: mod_base = OTHER; note = 2'-deoxy-2'-fluoroadenosine-3'-phosphate
  modified_base 10: mod_base = OTHER; note = 2'-deoxy-2'-fluorouridine-3'-phosphate
  modified_base 11: mod_base = OTHER; note = 2'-deoxy-2'-fluorocytidine-3'-phosphate
  modified_base 12: mod_base = OTHER; note = 2'-O-methyladenosine-3'-phosphate
  modified_base 13: mod_base = OTHER; note = 2'-O-methyluridine-3'-phosphate
  modified_base 14: mod_base = OTHER; note = 2'-O-methyluridine-3'-phosphate
  modified_base 15: mod_base = OTHER; note = 2'-O-methylguanosine-3'-phosphate
  modified_base 16: mod_base = OTHER; note = 2'-O-methyladenosine-3'-phosphate
  modified_base 17: mod_base = OTHER; note = 2'-O-methyluridine-3'-phosphate
  modified_base 18: mod_base = OTHER; note = 2'-O-methyladenosine-3'-phosphate
  modified_base 19: mod_base = OTHER; note = 2'-O-methyladenosine-3'-phosphate
  modified_base 20: mod_base = OTHER; note = 2'-O-methyladenosine-3'-phosphate
  modified_base 21: mod_base = OTHER; note = 2'-O-methyluridine-3'-phosphate ((2S,4R)-1-[29-[[2-(acetylamino)-2-deoxy-beta-D-galactopyra nosyl]oxy]-14,14-bis[[3-[[3-[[5-[[2-(acetylamino)-2-deoxy-b eta-D-galactopyranosyl]oxy]-1-oxopentyl]amino]propyl]amino] -3-oxopropoxy]methyl]-1,12,19,25-tetraoxo-16-oxa-13,20,24-t riazanonacos-1-yl]-4-hydroxy-2-pyrrolidinyl)methyl ester
atggagatatcattgataaat

SEQ ID NO: 4969 - RNA, 21 nt, synthetic construct
  source 1..21: mol_type = other RNA
  modified_base 1: mod_base = OTHER; note = 2'-O-methylguanosine-3'-phosphorothioate
  modified_base 2: mod_base = OTHER; note = 2'-O-methyluridine-3'-phosphorothioate
  modified_base 3: mod_base = OTHER; note = 2'-O-methylguanosine-3'-phosphate
  modified_base 4: mod_base = OTHER; note = 2'-O-methyluridine-3'-phosphate
  modified_base 5: mod_base = OTHER; note = 2'-O-methyladenosine-3'-phosphate
  modified_base 6: mod_base = OTHER; note = 2'-O-docosanyl-uridine-3'-phosphate
  modified_base 7: mod_base = OTHER; note = 2'-deoxy-2'-fluorouridine-3'-phosphate
  modified_base 8: mod_base = OTHER; note = 2'-O-methylcytidine-3'-phosphate
  modified_base 9: mod_base = OTHER; note = 2'-deoxy-2'-fluoroadenosine-3'-phosphate
  modified_base 10: mod_base = OTHER; note = 2'-deoxy-2'-fluorouridine-3'-phosphate
  modified_base 11: mod_base = OTHER; note = 2'-deoxy-2'-fluorocytidine-3'-phosphate
  modified_base 12: mod_base = OTHER; note = 2'-O-methyladenosine-3'-phosphate
  modified_base 13: mod_base = OTHER; note = 2'-O-methyluridine-3'-phosphate
  modified_base 14: mod_base = OTHER; note = 2'-O-methyluridine-3'-phosphate
  modified_base 15: mod_base = OTHER; note = 2'-O-methylguanosine-3'-phosphate
  modified_base 16: mod_base = OTHER; note = 2'-O-methylcytidine-3'-phosphate
  modified_base 17: mod_base = OTHER; note = 2'-O-methyladenosine-3'-phosphate
  modified_base 18: mod_base = OTHER; note = 2'-O-methyluridine-3'-phosphate
  modified_base 19: mod_base = OTHER; note = 2'-O-methyluridine-3'-phosphate
  modified_base 20: mod_base = OTHER; note = 2'-O-methylcytidine-3'-phosphate
  modified_base 21: mod_base = OTHER; note = 2'-O-methyluridine-3'-phosphate ((2S,4R)-1-[29-[[2-(acetylamino)-2-deoxy-beta-D-galactopyra nosyl]oxy]-14,14-bis[[3-[[3-[[5-[[2-(acetylamino)-2-deoxy-b eta-D-galactopyranosyl]oxy]-1-oxopentyl]amino]propyl]amino] -3-oxopropoxy]methyl]-1,12,19,25-tetraoxo-16-oxa-13,20,24-t riazanonacos-1-yl]-4-hydroxy-2-pyrrolidinyl)methyl ester
gtgtattcatcattgcattct

SEQ ID NO: 4970 - RNA, 21 nt, synthetic construct
  source 1..21: mol_type = other RNA
  modified_base 1: mod_base = OTHER; note = 2'-O-methylguanosine-3'-phosphorothioate
  modified_base 2: mod_base = OTHER; note = 2'-O-methyladenosine-3'-phosphorothioate
  modified_base 3: mod_base = OTHER; note = 2'-O-methyladenosine-3'-phosphate
  modified_base 4: mod_base = OTHER; note = 2'-O-methylguanosine-3'-phosphate
  modified_base 5: mod_base = OTHER; note = 2'-O-methylcytidine-3'-phosphate
  modified_base 6: mod_base = OTHER; note = 2'-O-docosanyl-uridine-3'-phosphate
  modified_base 7: mod_base = OTHER; note = 2'-deoxy-2'-fluorouridine-3'-phosphate
  modified_base 8: mod_base = OTHER; note = 2'-O-methyluridine-3'-phosphate
  modified_base 9: mod_base = OTHER; note = 2'-deoxy-2'-fluoroguanosine-3'-phosphate
  modified_base 10: mod_base = OTHER; note = 2'-deoxy-2'-fluoroguanosine-3'-phosphate
  modified_base 11: mod_base = OTHER; note = 2'-deoxy-2'-fluoroguanosine-3'-phosphate
  modified_base 12: mod_base = OTHER; note = 2'-O-methyluridine-3'-phosphate
  modified_base 13: mod_base = OTHER; note = 2'-O-methyladenosine-3'-phosphate
  modified_base 14: mod_base = OTHER; note = 2'-O-methyladenosine-3'-phosphate
  modified_base 15: mod_base = OTHER; note = 2'-O-methyluridine-3'-phosphate
  modified_base 16: mod_base = OTHER; note = 2'-O-methyluridine-3'-phosphate
  modified_base 17: mod_base = OTHER; note = 2'-O-methyluridine-3'-phosphate
  modified_base 18: mod_base = OTHER; note = 2'-O-methyladenosine-3'-phosphate
  modified_base 19: mod_base = OTHER; note = 2'-O-methylguanosine-3'-phosphate
  modified_base 20: mod_base = OTHER; note = 2'-O-methyluridine-3'-phosphate
  modified_base 21: mod_base = OTHER; note = 2'-O-methyluridine-3'-phosphate ((2S,4R)-1-[29-[[2-(acetylamino)-2-deoxy-beta-D-galactopyra nosyl]oxy]-14,14-bis[[3-[[3-[[5-[[2-(acetylamino)-2-deoxy-b eta-D-galactopyranosyl]oxy]-1-oxopentyl]amino]propyl]amino] -3-oxopropoxy]methyl]-1,12,19,25-tetraoxo-16-oxa-13,20,24-t riazanonacos-1-yl]-4-hydroxy-2-pyrrolidinyl)methyl ester
gaagctttgggtaatttagtt

SEQ ID NO: 4971 - RNA, 21 nt, synthetic construct
  source 1..21: mol_type = other RNA
  modified_base 1: mod_base = OTHER; note = 2'-O-methylguanosine-3'-phosphorothioate
  modified_base 2: mod_base = OTHER; note = 2'-O-methylcytidine-3'-phosphorothioate
  modified_base 3: mod_base = OTHER; note = 2'-O-methyluridine-3'-phosphate
  modified_base 4: mod_base = OTHER; note = 2'-O-methylguanosine-3'-phosphate
  modified_base 5: mod_base = OTHER; note = 2'-O-methyluridine-3'-phosphate
  modified_base 6: mod_base = OTHER; note = 2'-O-docosanyl-guanosine-3'-phosphate
  modified_base 7: mod_base = OTHER; note = 2'-deoxy-2'-fluoroadenosine-3'-phosphate
  modified_base 8: mod_base = OTHER; note = 2'-O-methyladenosine-3'-phosphate
  modified_base 9: mod_base = OTHER; note = 2'-deoxy-2'-fluoroadenosine-3'-phosphate
  modified_base 10: mod_base = OTHER; note = 2'-deoxy-2'-fluorouridine-3'-phosphate
  modified_base 11: mod_base = OTHER; note = 2'-deoxy-2'-fluorouridine-3'-phosphate
  modified_base 12: mod_base = OTHER; note = 2'-O-methylguanosine-3'-phosphate
  modified_base 13: mod_base = OTHER; note = 2'-O-methylguanosine-3'-phosphate
  modified_base 14: mod_base = OTHER; note = 2'-O-methylcytidine-3'-phosphate
  modified_base 15: mod_base = OTHER; note = 2'-O-methyladenosine-3'-phosphate
  modified_base 16: mod_base = OTHER; note = 2'-O-methylguanosine-3'-phosphate
  modified_base 17: mod_base = OTHER; note = 2'-O-methyladenosine-3'-phosphate
  modified_base 18: mod_base = OTHER; note = 2'-O-methylcytidine-3'-phosphate
  modified_base 19: mod_base = OTHER; note = 2'-O-methyluridine-3'-phosphate
  modified_base 20: mod_base = OTHER; note = 2'-O-methyluridine-3'-phosphate
  modified_base 21: mod_base = OTHER; note = 2'-O-methyluridine-3'-phosphate ((2S,4R)-1-[29-[[2-(acetylamino)-2-deoxy-beta-D-galactopyra nosyl]oxy]-14,14-bis[[3-[[3-[[5-[[2-(acetylamino)-2-deoxy-b eta-D-galactopyranosyl]oxy]-1-oxopentyl]amino]propyl]amino] -3-oxopropoxy]methyl]-1,12,19,25-tetraoxo-16-oxa-13,20,24-t riazanonacos-1-yl]-4-hydroxy-2-pyrrolidinyl)methyl ester
gctgtgaaattggcagacttt

SEQ ID NO: 4972 - RNA, 21 nt, synthetic construct
  source 1..21: mol_type = other RNA
  modified_base 1: mod_base = OTHER; note = 2'-O-methyluridine-3'-phosphorothioate
  modified_base 2: mod_base = OTHER; note = 2'-O-methyladenosine-3'-phosphorothioate
  modified_base 3: mod_base = OTHER; note = 2'-O-methyladenosine-3'-phosphate
  modified_base 4: mod_base = OTHER; note = 2'-O-methylcytidine-3'-phosphate
  modified_base 5: mod_base = OTHER; note = 2'-O-methyladenosine-3'-phosphate
  modified_base 6: mod_base = OTHER; note = 2'-O-docosanyl-adenosine-3'-phosphate
  modified_base 7: mod_base = OTHER; note = 2'-deoxy-2'-fluorouridine-3'-phosphate
  modified_base 8: mod_base = OTHER; note = 2'-O-methyluridine-3'-phosphate
  modified_base 9: mod_base = OTHER; note = 2'-deoxy-2'-fluoroadenosine-3'-phosphate
  modified_base 10: mod_base = OTHER; note = 2'-deoxy-2'-fluoroadenosine-3'-phosphate
  modified_base 11: mod_base = OTHER; note = 2'-deoxy-2'-fluoroadenosine-3'-phosphate
  modified_base 12: mod_base = OTHER; note = 2'-O-methylguanosine-3'-phosphate
  modified_base 13: mod_base = OTHER; note = 2'-O-methyluridine-3'-phosphate
  modified_base 14: mod_base = OTHER; note = 2'-O-methylguanosine-3'-phosphate
  modified_base 15: mod_base = OTHER; note = 2'-O-methylguanosine-3'-phosphate
  modified_base 16: mod_base = OTHER; note = 2'-O-methylguanosine-3'-phosphate
  modified_base 17: mod_base = OTHER; note = 2'-O-methyladenosine-3'-phosphate
  modified_base 18: mod_base = OTHER; note = 2'-O-methyluridine-3'-phosphate
  modified_base 19: mod_base = OTHER; note = 2'-O-methylguanosine-3'-phosphate
  modified_base 20: mod_base = OTHER; note = 2'-O-methyladenosine-3'-phosphate
  modified_base 21: mod_base = OTHER; note = 2'-O-methyluridine-3'-phosphate ((2S,4R)-1-[29-[[2-(acetylamino)-2-deoxy-beta-D-galactopyra nosyl]oxy]-14,14-bis[[3-[[3-[[5-[[2-(acetylamino)-2-deoxy-b eta-D-galactopyranosyl]oxy]-1-oxopentyl]amino]propyl]amino] -3-oxopropoxy]methyl]-1,12,19,25-tetraoxo-16-oxa-13,20,24-t riazanonacos-1-yl]-4-hydroxy-2-pyrrolidinyl)methyl ester
taacaattaaagtgggatgat

SEQ ID NO: 4973 - RNA, 21 nt, synthetic construct
  source 1..21: mol_type = other RNA
  modified_base 1: mod_base = OTHER; note = 2'-O-methylguanosine-3'-phosphorothioate
  modified_base 2: mod_base = OTHER; note = 2'-O-methylcytidine-3'-phosphorothioate
  modified_base 3: mod_base = OTHER; note = 2'-O-methyluridine-3'-phosphate
  modified_base 4: mod_base = OTHER; note = 2'-O-methylguanosine-3'-phosphate
  modified_base 5: mod_base = OTHER; note = 2'-O-methylguanosine-3'-phosphate
  modified_base 6: mod_base = OTHER; note = 2'-O-docosanyl-cytidine-3'-phosphate
  modified_base 7: mod_base = OTHER; note = 2'-deoxy-2'-fluorouridine-3'-phosphate
  modified_base 8: mod_base = OTHER; note = 2'-O-methyladenosine-3'-phosphate
  modified_base 9: mod_base = OTHER; note = 2'-deoxy-2'-fluorocytidine-3'-phosphate
  modified_base 10: mod_base = OTHER; note = 2'-deoxy-2'-fluoroadenosine-3'-phosphate
  modified_base 11: mod_base = OTHER; note = 2'-deoxy-2'-fluoroadenosine-3'-phosphate
  modified_base 12: mod_base = OTHER; note = 2'-O-methylguanosine-3'-phosphate
  modified_base 13: mod_base = OTHER; note = 2'-O-methylguanosine-3'-phosphate
  modified_base 14: mod_base = OTHER; note = 2'-O-methyladenosine-3'-phosphate
  modified_base 15: mod_base = OTHER; note = 2'-O-methyladenosine-3'-phosphate
  modified_base 16: mod_base = OTHER; note = 2'-O-methyluridine-3'-phosphate
  modified_base 17: mod_base = OTHER; note = 2'-O-methyluridine-3'-phosphate
  modified_base 18: mod_base = OTHER; note = 2'-O-methyluridine-3'-phosphate
  modified_base 19: mod_base = OTHER; note = 2'-O-methylcytidine-3'-phosphate
  modified_base 20: mod_base = OTHER; note = 2'-O-methyluridine-3'-phosphate
  modified_base 21: mod_base = OTHER; note = 2'-O-methyluridine-3'-phosphate ((2S,4R)-1-[29-[[2-(acetylamino)-2-deoxy-beta-D-galactopyra nosyl]oxy]-14,14-bis[[3-[[3-[[5-[[2-(acetylamino)-2-deoxy-b eta-D-galactopyranosyl]oxy]-1-oxopentyl]amino]propyl]amino] -3-oxopropoxy]methyl]-1,12,19,25-tetraoxo-16-oxa-13,20,24-t riazanonacos-1-yl]-4-hydroxy-2-pyrrolidinyl)methyl ester
gctggctacaaggaatttctt

SEQ ID NO: 4974 - RNA, 21 nt, synthetic construct
  source 1..21: mol_type = other RNA
  modified_base 1: mod_base = OTHER; note = 2'-O-methyluridine-3'-phosphorothioate
  modified_base 2: mod_base = OTHER; note = 2'-O-methylguanosine-3'-phosphorothioate
  modified_base 3: mod_base = OTHER; note = 2'-O-methyluridine-3'-phosphate
  modified_base 4: mod_base = OTHER; note = 2'-O-methyluridine-3'-phosphate
  modified_base 5: mod_base = OTHER; note = 2'-O-methyladenosine-3'-phosphate
  modified_base 6: mod_base = OTHER; note = 2'-O-docosanyl-uridine-3'-phosphate
  modified_base 7: mod_base = OTHER; note = 2'-deoxy-2'-fluorouridine-3'-phosphate
  modified_base 8: mod_base = OTHER; note = 2'-O-methyladenosine-3'-phosphate
  modified_base 9: mod_base = OTHER; note = 2'-deoxy-2'-fluorouridine-3'-phosphate
  modified_base 10: mod_base = OTHER; note = 2'-deoxy-2'-fluorouridine-3'-phosphate
  modified_base 11: mod_base = OTHER; note = 2'-deoxy-2'-fluorocytidine-3'-phosphate
  modified_base 12: mod_base = OTHER; note = 2'-O-methyluridine-3'-phosphate
  modified_base 13: mod_base = OTHER; note = 2'-O-methyluridine-3'-phosphate
  modified_base 14: mod_base = OTHER; note = 2'-O-methyluridine-3'-phosphate
  modified_base 15: mod_base = OTHER; note = 2'-O-methylguanosine-3'-phosphate
  modified_base 16: mod_base = OTHER; note = 2'-O-methylcytidine-3'-phosphate
  modified_base 17: mod_base = OTHER; note = 2'-O-methyluridine-3'-phosphate
  modified_base 18: mod_base = OTHER; note = 2'-O-methylcytidine-3'-phosphate
  modified_base 19: mod_base = OTHER; note = 2'-O-methyladenosine-3'-phosphate
  modified_base 20: mod_base = OTHER; note = 2'-O-methylcytidine-3'-phosphate
  modified_base 21: mod_base = OTHER; note = 2'-O-methyluridine-3'-phosphate ((2S,4R)-1-[29-[[2-(acetylamino)-2-deoxy-beta-D-galactopyra nosyl]oxy]-14,14-bis[[3-[[3-[[5-[[2-(acetylamino)-2-deoxy-b eta-D-galactopyranosyl]oxy]-1-oxopentyl]amino]propyl]amino] -3-oxopropoxy]methyl]-1,12,19,25-tetraoxo-16-oxa-13,20,24-t riazanonacos-1-yl]-4-hydroxy-2-pyrrolidinyl)methyl ester
tgttattattctttgctcact

SEQ ID NO: 4975 - RNA, 21 nt, synthetic construct
  source 1..21: mol_type = other RNA
  modified_base 1: mod_base = OTHER; note = 2'-O-methyladenosine-3'-phosphorothioate
  modified_base 2: mod_base = OTHER; note = 2'-O-methyluridine-3'-phosphorothioate
  modified_base 3: mod_base = OTHER; note = 2'-O-methyladenosine-3'-phosphate
  modified_base 4: mod_base = OTHER; note = 2'-O-methyladenosine-3'-phosphate
  modified_base 5: mod_base = OTHER; note = 2'-O-methylcytidine-3'-phosphate
  modified_base 6: mod_base = OTHER; note = 2'-O-docosanyl-adenosine-3'-phosphate
  modified_base 7: mod_base = OTHER; note = 2'-deoxy-2'-fluoroadenosine-3'-phosphate
  modified_base 8: mod_base = OTHER; note = 2'-O-methyluridine-3'-phosphate
  modified_base 9: mod_base = OTHER; note = 2'-deoxy-2'-fluorouridine-3'-phosphate
  modified_base 10: mod_base = OTHER; note = 2'-deoxy-2'-fluorouridine-3'-phosphate
  modified_base 11: mod_base = OTHER; note = 2'-deoxy-2'-fluoroguanosine-3'-phosphate
  modified_base 12: mod_base = OTHER; note = 2'-O-methylcytidine-3'-phosphate
  modified_base 13: mod_base = OTHER; note = 2'-O-methyladenosine-3'-phosphate
  modified_base 14: mod_base = OTHER; note = 2'-O-methylcytidine-3'-phosphate
  modified_base 15: mod_base = OTHER; note = 2'-O-methyluridine-3'-phosphate
  modified_base 16: mod_base = OTHER; note = 2'-O-methyluridine-3'-phosphate
  modified_base 17: mod_base = OTHER; note = 2'-O-methylguanosine-3'-phosphate
  modified_base 18: mod_base = OTHER; note = 2'-O-methylguanosine-3'-phosphate
  modified_base 19: mod_base = OTHER; note = 2'-O-methyluridine-3'-phosphate
  modified_base 20: mod_base = OTHER; note = 2'-O-methylguanosine-3'-phosphate
  modified_base 21: mod_base = OTHER; note = 2'-O-methyluridine-3'-phosphate ((2S,4R)-1-[29-[[2-(acetylamino)-2-deoxy-beta-D-galactopyra nosyl]oxy]-14,14-bis[[3-[[3-[[5-[[2-(acetylamino)-2-deoxy-b eta-D-galactopyranosyl]oxy]-1-oxopentyl]amino]propyl]amino] -3-oxopropoxy]methyl]-1,12,19,25-tetraoxo-16-oxa-13,20,24-t riazanonacos-1-yl]-4-hydroxy-2-pyrrolidinyl)methyl ester
ataacaatttgcacttggtgt

SEQ ID NO: 4976 - RNA, 21 nt, synthetic construct
  source 1..21: mol_type = other RNA
  modified_base 1: mod_base = OTHER; note = 2'-O-methylcytidine-3'-phosphorothioate
  modified_base 2: mod_base = OTHER; note = 2'-O-methyluridine-3'-phosphorothioate
  modified_base 3: mod_base = OTHER; note = 2'-O-methyluridine-3'-phosphate
  modified_base 4: mod_base = OTHER; note = 2'-O-methylcytidine-3'-phosphate
  modified_base 5: mod_base = OTHER; note = 2'-O-methylcytidine-3'-phosphate
  modified_base 6: mod_base = OTHER; note = 2'-O-docosanyl-guanosine-3'-phosphate
  modified_base 7: mod_base = OTHER; note = 2'-deoxy-2'-fluorocytidine-3'-phosphate
  modified_base 8: mod_base = OTHER; note = 2'-O-methyladenosine-3'-phosphate
  modified_base 9: mod_base = OTHER; note = 2'-deoxy-2'-fluorocytidine-3'-phosphate
  modified_base 10: mod_base = OTHER; note = 2'-deoxy-2'-fluorouridine-3'-phosphate
  modified_base 11: mod_base = OTHER; note = 2'-deoxy-2'-fluoroadenosine-3'-phosphate
  modified_base 12: mod_base = OTHER; note = 2'-O-methyladenosine-3'-phosphate
  modified_base 13: mod_base = OTHER; note = 2'-O-methylguanosine-3'-phosphate
  modified_base 14: mod_base = OTHER; note = 2'-O-methyladenosine-3'-phosphate
  modified_base 15: mod_base = OTHER; note = 2'-O-methyluridine-3'-phosphate
  modified_base 16: mod_base = OTHER; note = 2'-O-methylguanosine-3'-phosphate
  modified_base 17: mod_base = OTHER; note = 2'-O-methyluridine-3'-phosphate
  modified_base 18: mod_base = OTHER; note = 2'-O-methylguanosine-3'-phosphate
  modified_base 19: mod_base = OTHER; note = 2'-O-methyladenosine-3'-phosphate
  modified_base 20: mod_base = OTHER; note = 2'-O-methylguanosine-3'-phosphate
  modified_base 21: mod_base = OTHER; note = 2'-O-methyluridine-3'-phosphate ((2S,4R)-1-[29-[[2-(acetylamino)-2-deoxy-beta-D-galactopyra nosyl]oxy]-14,14-bis[[3-[[3-[[5-[[2-(acetylamino)-2-deoxy-b eta-D-galactopyranosyl]oxy]-1-oxopentyl]amino]propyl]amino] -3-oxopropoxy]methyl]-1,12,19,25-tetraoxo-16-oxa-13,20,24-t riazanonacos-1-yl]-4-hydroxy-2-pyrrolidinyl)methyl ester
cttccgcactaagatgtgagt

SEQ ID NO: 4977 - RNA, 21 nt, synthetic construct
  source 1..21: mol_type = other RNA
  modified_base 1: mod_base = OTHER; note = 2'-O-methylcytidine-3'-phosphorothioate
  modified_base 2: mod_base = OTHER; note = 2'-O-methyluridine-3'-phosphorothioate
  modified_base 3: mod_base = OTHER; note = 2'-O-methylcytidine-3'-phosphate
  modified_base 4: mod_base = OTHER; note = 2'-O-methyluridine-3'-phosphate
  modified_base 5: mod_base = OTHER; note = 2'-O-methylcytidine-3'-phosphate
  modified_base 6: mod_base = OTHER; note = 2'-O-docosanyl-adenosine-3'-phosphate
  modified_base 7: mod_base = OTHER; note = 2'-deoxy-2'-fluorouridine-3'-phosphate
  modified_base 8: mod_base = OTHER; note = 2'-O-methylcytidine-3'-phosphate
  modified_base 9: mod_base = OTHER; note = 2'-deoxy-2'-fluorouridine-3'-phosphate
  modified_base 10: mod_base = OTHER; note = 2'-deoxy-2'-fluorocytidine-3'-phosphate
  modified_base 11: mod_base = OTHER; note = 2'-deoxy-2'-fluoroadenosine-3'-phosphate
  modified_base 12: mod_base = OTHER; note = 2'-O-methylcytidine-3'-phosphate
  modified_base 13: mod_base = OTHER; note = 2'-O-methylcytidine-3'-phosphate
  modified_base 14: mod_base = OTHER; note = 2'-O-methyluridine-3'-phosphate
  modified_base 15: mod_base = OTHER; note = 2'-O-methylcytidine-3'-phosphate
  modified_base 16: mod_base = OTHER; note = 2'-O-methyluridine-3'-phosphate
  modified_base 17: mod_base = OTHER; note = 2'-O-methylcytidine-3'-phosphate
  modified_base 18: mod_base = OTHER; note = 2'-O-methyluridine-3'-phosphate
  modified_base 19: mod_base = OTHER; note = 2'-O-methylguanosine-3'-phosphate
  modified_base 20: mod_base = OTHER; note = 2'-O-methyluridine-3'-phosphate
  modified_base 21: mod_base = OTHER; note = 2'-O-methyluridine-3'-phosphate ((2S,4R)-1-[29-[[2-(acetylamino)-2-deoxy-beta-D-galactopyra nosyl]oxy]-14,14-bis[[3-[[3-[[5-[[2-(acetylamino)-2-deoxy-b eta-D-galactopyranosyl]oxy]-1-oxopentyl]amino]propyl]amino] -3-oxopropoxy]methyl]-1,12,19,25-tetraoxo-16-oxa-13,20,24-t riazanonacos-1-yl]-4-hydroxy-2-pyrrolidinyl)methyl ester
ctctcatctcacctctctgtt

SEQ ID NO: 4978 - RNA, 21 nt, synthetic construct
  source 1..21: mol_type = other RNA
  modified_base 1: mod_base = OTHER; note = 2'-O-methylcytidine-3'-phosphorothioate
  modified_base 2: mod_base = OTHER; note = 2'-O-methyladenosine-3'-phosphorothioate
  modified_base 3: mod_base = OTHER; note = 2'-O-methylcytidine-3'-phosphate
  modified_base 4: mod_base = OTHER; note = 2'-O-methylcytidine-3'-phosphate
  modified_base 5: mod_base = OTHER; note = 2'-O-methylcytidine-3'-phosphate
  modified_base 6: mod_base = OTHER; note = 2'-O-docosanyl-adenosine-3'-phosphate
  modified_base 7: mod_base = OTHER; note = 2'-deoxy-2'-fluorouridine-3'-phosphate
  modified_base 8: mod_base = OTHER; note = 2'-O-methylguanosine-3'-phosphate
  modified_base 9: mod_base = OTHER; note = 2'-deoxy-2'-fluoroguanosine-3'-phosphate
  modified_base 10: mod_base = OTHER; note = 2'-deoxy-2'-fluoroadenosine-3'-phosphate
  modified_base 11: mod_base = OTHER; note = 2'-deoxy-2'-fluorouridine-3'-phosphate
  modified_base 12: mod_base = OTHER; note = 2'-O-methylcytidine-3'-phosphate
  modified_base 13: mod_base = OTHER; note = 2'-O-methyluridine-3'-phosphate
  modified_base 14: mod_base = OTHER; note = 2'-O-methylguanosine-3'-phosphate
  modified_base 15: mod_base = OTHER; note = 2'-O-methyluridine-3'-phosphate
  modified_base 16: mod_base = OTHER; note = 2'-O-methylcytidine-3'-phosphate
  modified_base 17: mod_base = OTHER; note = 2'-O-methyladenosine-3'-phosphate
  modified_base 18: mod_base = OTHER; note = 2'-O-methyladenosine-3'-phosphate
  modified_base 19: mod_base = OTHER; note = 2'-O-methylcytidine-3'-phosphate
  modified_base 20: mod_base = OTHER; note = 2'-O-methylguanosine-3'-phosphate
  modified_base 21: mod_base = OTHER; note = 2'-O-methyluridine-3'-phosphate ((2S,4R)-1-[29-[[2-(acetylamino)-2-deoxy-beta-D-galactopyra nosyl]oxy]-14,14-bis[[3-[[3-[[5-[[2-(acetylamino)-2-deoxy-b eta-D-galactopyranosyl]oxy]-1-oxopentyl]amino]propyl]amino] -3-oxopropoxy]methyl]-1,12,19,25-tetraoxo-16-oxa-13,20,24-t riazanonacos-1-yl]-4-hydroxy-2-pyrrolidinyl)methyl ester
cacccatggatctgtcaacgt

SEQ ID NO: 4979 - RNA, 21 nt, synthetic construct
  source 1..21: mol_type = other RNA
  modified_base 1: mod_base = OTHER; note = 2'-O-methyladenosine-3'-phosphorothioate
  modified_base 2: mod_base = OTHER; note = 2'-O-methyluridine-3'-phosphorothioate
  modified_base 3: mod_base = OTHER; note = 2'-O-methyladenosine-3'-phosphate
  modified_base 4: mod_base = OTHER; note = 2'-O-methyladenosine-3'-phosphate
  modified_base 5: mod_base = OTHER; note = 2'-O-methyladenosine-3'-phosphate
  modified_base 6: mod_base = OTHER; note = 2'-O-docosanyl-adenosine-3'-phosphate
  modified_base 7: mod_base = OTHER; note = 2'-deoxy-2'-fluorouridine-3'-phosphate
  modified_base 8: mod_base = OTHER; note = 2'-O-methyluridine-3'-phosphate
  modified_base 9: mod_base = OTHER; note = 2'-deoxy-2'-fluorocytidine-3'-phosphate
  modified_base 10: mod_base = OTHER; note = 2'-deoxy-2'-fluorouridine-3'-phosphate
  modified_base 11: mod_base = OTHER; note = 2'-deoxy-2'-fluoroadenosine-3'-phosphate
  modified_base 12: mod_base = OTHER; note = 2'-O-methylcytidine-3'-phosphate
  modified_base 13: mod_base = OTHER; note = 2'-O-methyluridine-3'-phosphate
  modified_base 14: mod_base = OTHER; note = 2'-O-methylguanosine-3'-phosphate
  modified_base 15: mod_base = OTHER; note = 2'-O-methyladenosine-3'-phosphate
  modified_base 16: mod_base = OTHER; note = 2'-O-methylcytidine-3'-phosphate
  modified_base 17: mod_base = OTHER; note = 2'-O-methyluridine-3'-phosphate
  modified_base 18: mod_base = OTHER; note = 2'-O-methyluridine-3'-phosphate
  modified_base 19: mod_base = OTHER; note = 2'-O-methylcytidine-3'-phosphate
  modified_base 20: mod_base = OTHER; note = 2'-O-methyluridine-3'-phosphate
  modified_base 21: mod_base = OTHER; note = 2'-O-methyluridine-3'-phosphate ((2S,4R)-1-[29-[[2-(acetylamino)-2-deoxy-beta-D-galactopyra nosyl]oxy]-14,14-bis[[3-[[3-[[5-[[2-(acetylamino)-2-deoxy-b eta-D-galactopyranosyl]oxy]-1-oxopentyl]amino]propyl]amino] -3-oxopropoxy]methyl]-1,12,19,25-tetraoxo-16-oxa-13,20,24-t riazanonacos-1-yl]-4-hydroxy-2-pyrrolidinyl)methyl ester
ataaaattctactgacttctt

SEQ ID NO: 4980 - RNA, 21 nt, synthetic construct
  source 1..21: mol_type = other RNA
  modified_base 1: mod_base = OTHER; note = 2'-O-methyluridine-3'-phosphorothioate
  modified_base 2: mod_base = OTHER; note = 2'-O-methylguanosine-3'-phosphorothioate
  modified_base 3: mod_base = OTHER; note = 2'-O-methylcytidine-3'-phosphate
  modified_base 4: mod_base = OTHER; note = 2'-O-methylcytidine-3'-phosphate
  modified_base 5: mod_base = OTHER; note = 2'-O-methyladenosine-3'-phosphate
  modified_base 6: mod_base = OTHER; note = 2'-O-docosanyl-uridine-3'-phosphate
  modified_base 7: mod_base = OTHER; note = 2'-deoxy-2'-fluorocytidine-3'-phosphate
  modified_base 8: mod_base = OTHER; note = 2'-O-methyluridine-3'-phosphate
  modified_base 9: mod_base = OTHER; note = 2'-deoxy-2'-fluorouridine-3'-phosphate
  modified_base 10: mod_base = OTHER; note = 2'-deoxy-2'-fluoroguanosine-3'-phosphate
  modified_base 11: mod_base = OTHER; note = 2'-deoxy-2'-fluoroadenosine-3'-phosphate
  modified_base 12: mod_base = OTHER; note = 2'-O-methylcytidine-3'-phosphate
  modified_base 13: mod_base = OTHER; note = 2'-O-methyladenosine-3'-phosphate
  modified_base 14: mod_base = OTHER; note = 2'-O-methyladenosine-3'-phosphate
  modified_base 15: mod_base = OTHER; note = 2'-O-methylcytidine-3'-phosphate
  modified_base 16: mod_base = OTHER; note = 2'-O-methyluridine-3'-phosphate
  modified_base 17: mod_base = OTHER; note = 2'-O-methyladenosine-3'-phosphate
  modified_base 18: mod_base = OTHER; note = 2'-O-methyluridine-3'-phosphate
  modified_base 19: mod_base = OTHER; note = 2'-O-methylguanosine-3'-phosphate
  modified_base 20: mod_base = OTHER; note = 2'-O-methylcytidine-3'-phosphate
  modified_base 21: mod_base = OTHER; note = 2'-O-methyluridine-3'-phosphate ((2S,4R)-1-[29-[[2-(acetylamino)-2-deoxy-beta-D-galactopyra nosyl]oxy]-14,14-bis[[3-[[3-[[5-[[2-(acetylamino)-2-deoxy-b eta-D-galactopyranosyl]oxy]-1-oxopentyl]amino]propyl]amino] -3-oxopropoxy]methyl]-1,12,19,25-tetraoxo-16-oxa-13,20,24-t riazanonacos-1-yl]-4-hydroxy-2-pyrrolidinyl)methyl ester
tgccatcttgacaactatgct

SEQ ID NO: 4981 - RNA, 21 nt, synthetic construct
  source 1..21: mol_type = other RNA
  modified_base 1: mod_base = OTHER; note = 2'-O-methyladenosine-3'-phosphorothioate
  modified_base 2: mod_base = OTHER; note = 2'-O-methylcytidine-3'-phosphorothioate
  modified_base 3: mod_base = OTHER; note = 2'-O-methyluridine-3'-phosphate
  modified_base 4: mod_base = OTHER; note = 2'-O-methyluridine-3'-phosphate
  modified_base 5: mod_base = OTHER; note = 2'-O-methyladenosine-3'-phosphate
  modified_base 6: mod_base = OTHER; note = 2'-O-docosanyl-guanosine-3'-phosphate
  modified_base 7: mod_base = OTHER; note = 2'-deoxy-2'-fluoroguanosine-3'-phosphate
  modified_base 8: mod_base = OTHER; note = 2'-O-methyluridine-3'-phosphate
  modified_base 9: mod_base = OTHER; note = 2'-deoxy-2'-fluoroadenosine-3'-phosphate
  modified_base 10: mod_base = OTHER; note = 2'-deoxy-2'-fluorouridine-3'-phosphate
  modified_base 11: mod_base = OTHER; note = 2'-deoxy-2'-fluorocytidine-3'-phosphate
  modified_base 12: mod_base = OTHER; note = 2'-O-methylcytidine-3'-phosphate
  modified_base 13: mod_base = OTHER; note = 2'-O-methyluridine-3'-phosphate
  modified_base 14: mod_base = OTHER; note = 2'-O-methyladenosine-3'-phosphate
  modified_base 15: mod_base = OTHER; note = 2'-O-methyladenosine-3'-phosphate
  modified_base 16: mod_base = OTHER; note = 2'-O-methylcytidine-3'-phosphate
  modified_base 17: mod_base = OTHER; note = 2'-O-methyluridine-3'-phosphate
  modified_base 18: mod_base = OTHER; note = 2'-O-methyladenosine-3'-phosphate
  modified_base 19: mod_base = OTHER; note = 2'-O-methyluridine-3'-phosphate
  modified_base 20: mod_base = OTHER; note = 2'-O-methylguanosine-3'-phosphate
  modified_base 21: mod_base = OTHER; note = 2'-O-methyluridine-3'-phosphate ((2S,4R)-1-[29-[[2-(acetylamino)-2-deoxy-beta-D-galactopyra nosyl]oxy]-14,14-bis[[3-[[3-[[5-[[2-(acetylamino)-2-deoxy-b eta-D-galactopyranosyl]oxy]-1-oxopentyl]amino]propyl]amino] -3-oxopropoxy]methyl]-1,12,19,25-tetraoxo-16-oxa-13,20,24-t riazanonacos-1-yl]-4-hydroxy-2-pyrrolidinyl)methyl ester
acttaggtatcctaactatgt

SEQ ID NO: 4982 - RNA, 21 nt, synthetic construct
  source 1..21: mol_type = other RNA
  modified_base 1: mod_base = OTHER; note = 2'-O-methylcytidine-3'-phosphorothioate
  modified_base 2: mod_base = OTHER; note = 2'-O-methyluridine-3'-phosphorothioate
  modified_base 3: mod_base = OTHER; note = 2'-O-methylguanosine-3'-phosphate
  modified_base 4: mod_base = OTHER; note = 2'-O-methylcytidine-3'-phosphate
  modified_base 5: mod_base = OTHER; note = 2'-O-methyluridine-3'-phosphate
  modified_base 6: mod_base = OTHER; note = 2'-O-docosanyl-uridine-3'-phosphate
  modified_base 7: mod_base = OTHER; note = 2'-deoxy-2'-fluorocytidine-3'-phosphate
  modified_base 8: mod_base = OTHER; note = 2'-O-methyluridine-3'-phosphate
  modified_base 9: mod_base = OTHER; note = 2'-deoxy-2'-fluoroadenosine-3'-phosphate
  modified_base 10: mod_base = OTHER; note = 2'-deoxy-2'-fluorocytidine-3'-phosphate
  modified_base 11: mod_base = OTHER; note = 2'-deoxy-2'-fluorouridine-3'-phosphate
  modified_base 12: mod_base = OTHER; note = 2'-O-methylcytidine-3'-phosphate
  modified_base 13: mod_base = OTHER; note = 2'-O-methylcytidine-3'-phosphate
  modified_base 14: mod_base = OTHER; note = 2'-O-methyluridine-3'-phosphate
  modified_base 15: mod_base = OTHER; note = 2'-O-methylcytidine-3'-phosphate
  modified_base 16: mod_base = OTHER; note = 2'-O-methylcytidine-3'-phosphate
  modified_base 17: mod_base = OTHER; note = 2'-O-methyluridine-3'-phosphate
  modified_base 18: mod_base = OTHER; note = 2'-O-methylguanosine-3'-phosphate
  modified_base 19: mod_base = OTHER; note = 2'-O-methylcytidine-3'-phosphate
  modified_base 20: mod_base = OTHER; note = 2'-O-methyluridine-3'-phosphate
  modified_base 21: mod_base = OTHER; note = 2'-O-methyluridine-3'-phosphate ((2S,4R)-1-[29-[[2-(acetylamino)-2-deoxy-beta-D-galactopyra nosyl]oxy]-14,14-bis[[3-[[3-[[5-[[2-(acetylamino)-2-deoxy-b eta-D-galactopyranosyl]oxy]-1-oxopentyl]amino]propyl]amino] -3-oxopropoxy]methyl]-1,12,19,25-tetraoxo-16-oxa-13,20,24-t riazanonacos-1-yl]-4-hydroxy-2-pyrrolidinyl)methyl ester
ctgcttctactcctcctgctt

SEQ ID NO: 4983 - RNA, 21 nt, synthetic construct
  source 1..21: mol_type = other RNA
  modified_base 1: mod_base = OTHER; note = 2'-O-methyluridine-3'-phosphorothioate
  modified_base 2: mod_base = OTHER; note = 2'-O-methylguanosine-3'-phosphorothioate
  modified_base 3: mod_base = OTHER; note = 2'-O-methyladenosine-3'-phosphate
  modified_base 4: mod_base = OTHER; note = 2'-O-methylguanosine-3'-phosphate
  modified_base 5: mod_base = OTHER; note = 2'-O-methylguanosine-3'-phosphate
  modified_base 6: mod_base = OTHER; note = 2'-O-docosanyl-adenosine-3'-phosphate
  modified_base 7: mod_base = OTHER; note = 2'-deoxy-2'-fluoroadenosine-3'-phosphate
  modified_base 8: mod_base = OTHER; note = 2'-O-methyladenosine-3'-phosphate
  modified_base 9: mod_base = OTHER; note = 2'-deoxy-2'-fluorouridine-3'-phosphate
  modified_base 10: mod_base = OTHER; note = 2'-deoxy-2'-fluorouridine-3'-phosphate
  modified_base 11: mod_base = OTHER; note = 2'-deoxy-2'-fluoroguanosine-3'-phosphate
  modified_base 12: mod_base = OTHER; note = 2'-O-methyluridine-3'-phosphate
  modified_base 13: mod_base = OTHER; note = 2'-O-methylguanosine-3'-phosphate
  modified_base 14: mod_base = OTHER; note = 2'-O-methyladenosine-3'-phosphate
  modified_base 15: mod_base = OTHER; note = 2'-O-methyluridine-3'-phosphate
  modified_base 16: mod_base = OTHER; note = 2'-O-methyluridine-3'-phosphate
  modified_base 17: mod_base = OTHER; note = 2'-O-methyluridine-3'-phosphate
  modified_base 18: mod_base = OTHER; note = 2'-O-methylguanosine-3'-phosphate
  modified_base 19: mod_base = OTHER; note = 2'-O-methyluridine-3'-phosphate
  modified_base 20: mod_base = OTHER; note = 2'-O-methyluridine-3'-phosphate
  modified_base 21: mod_base = OTHER; note = 2'-O-methyluridine-3'-phosphate ((2S,4R)-1-[29-[[2-(acetylamino)-2-deoxy-beta-D-galactopyra nosyl]oxy]-14,14-bis[[3-[[3-[[5-[[2-(acetylamino)-2-deoxy-b eta-D-galactopyranosyl]oxy]-1-oxopentyl]amino]propyl]amino] -3-oxopropoxy]methyl]-1,12,19,25-tetraoxo-16-oxa-13,20,24-t riazanonacos-1-yl]-4-hydroxy-2-pyrrolidinyl)methyl ester
tgaggaaattgtgatttgttt

SEQ ID NO: 4984 - RNA, 21 nt, synthetic construct
  source 1..21: mol_type = other RNA
  modified_base 1: mod_base = OTHER; note = 2'-O-methylguanosine-3'-phosphorothioate
  modified_base 2: mod_base = OTHER; note = 2'-O-methyladenosine-3'-phosphorothioate
  modified_base 3: mod_base = OTHER; note = 2'-O-methylcytidine-3'-phosphate
  modified_base 4: mod_base = OTHER; note = 2'-O-methylguanosine-3'-phosphate
  modified_base 5: mod_base = OTHER; note = 2'-O-methyladenosine-3'-phosphate
  modified_base 6: mod_base = OTHER; note = 2'-O-docosanyl-guanosine-3'-phosphate
  modified_base 7: mod_base = OTHER; note = 2'-deoxy-2'-fluorouridine-3'-phosphate
  modified_base 8: mod_base = OTHER; note = 2'-O-methyladenosine-3'-phosphate
  modified_base 9: mod_base = OTHER; note = 2'-deoxy-2'-fluorouridine-3'-phosphate
  modified_base 10: mod_base = OTHER; note = 2'-deoxy-2'-fluorocytidine-3'-phosphate
  modified_base 11: mod_base = OTHER; note = 2'-deoxy-2'-fluoroadenosine-3'-phosphate
  modified_base 12: mod_base = OTHER; note = 2'-O-methylguanosine-3'-phosphate
  modified_base 13: mod_base = OTHER; note = 2'-O-methylcytidine-3'-phosphate
  modified_base 14: mod_base = OTHER; note = 2'-O-methyluridine-3'-phosphate
  modified_base 15: mod_base = OTHER; note = 2'-O-methyluridine-3'-phosphate
  modified_base 16: mod_base = OTHER; note = 2'-O-methyluridine-3'-phosphate
  modified_base 17: mod_base = OTHER; note = 2'-O-methyluridine-3'-phosphate
  modified_base 18: mod_base = OTHER; note = 2'-O-methylcytidine-3'-phosphate
  modified_base 19: mod_base = OTHER; note = 2'-O-methylguanosine-3'-phosphate
  modified_base 20: mod_base = OTHER; note = 2'-O-methyladenosine-3'-phosphate
  modified_base 21: mod_base = OTHER; note = 2'-O-methyluridine-3'-phosphate ((2S,4R)-1-[29-[[2-(acetylamino)-2-deoxy-beta-D-galactopyra nosyl]oxy]-14,14-bis[[3-[[3-[[5-[[2-(acetylamino)-2-deoxy-b eta-D-galactopyranosyl]oxy]-1-oxopentyl]amino]propyl]amino] -3-oxopropoxy]methyl]-1,12,19,25-tetraoxo-16-oxa-13,20,24-t riazanonacos-1-yl]-4-hydroxy-2-pyrrolidinyl)methyl ester
gacgagtatcagcttttcgat

SEQ ID NO: 4985 - RNA, 21 nt, synthetic construct
  source 1..21: mol_type = other RNA
  modified_base 1: mod_base = OTHER; note = 2'-O-methyluridine-3'-phosphorothioate
  modified_base 2: mod_base = OTHER; note = 2'-O-methylcytidine-3'-phosphorothioate
  modified_base 3: mod_base = OTHER; note = 2'-O-methylcytidine-3'-phosphate
  modified_base 4: mod_base = OTHER; note = 2'-O-methylcytidine-3'-phosphate
  modified_base 5: mod_base = OTHER; note = 2'-O-methyluridine-3'-phosphate
  modified_base 6: mod_base = OTHER; note = 2'-O-docosanyl-cytidine-3'-phosphate
  modified_base 7: mod_base = OTHER; note = 2'-deoxy-2'-fluorouridine-3'-phosphate
  modified_base 8: mod_base = OTHER; note = 2'-O-methylguanosine-3'-phosphate
  modified_base 9: mod_base = OTHER; note = 2'-deoxy-2'-fluoroadenosine-3'-phosphate
  modified_base 10: mod_base = OTHER; note = 2'-deoxy-2'-fluorocytidine-3'-phosphate
  modified_base 11: mod_base = OTHER; note = 2'-deoxy-2'-fluorocytidine-3'-phosphate
  modified_base 12: mod_base = OTHER; note = 2'-O-methylcytidine-3'-phosphate
  modified_base 13: mod_base = OTHER; note = 2'-O-methyluridine-3'-phosphate
  modified_base 14: mod_base = OTHER; note = 2'-O-methylcytidine-3'-phosphate
  modified_base 15: mod_base = OTHER; note = 2'-O-methyladenosine-3'-phosphate
  modified_base 16: mod_base = OTHER; note = 2'-O-methylguanosine-3'-phosphate
  modified_base 17: mod_base = OTHER; note = 2'-O-methyluridine-3'-phosphate
  modified_base 18: mod_base = OTHER; note = 2'-O-methyluridine-3'-phosphate
  modified_base 19: mod_base = OTHER; note = 2'-O-methyluridine-3'-phosphate
  modified_base 20: mod_base = OTHER; note = 2'-O-methylcytidine-3'-phosphate
  modified_base 21: mod_base = OTHER; note = 2'-O-methyluridine-3'-phosphate ((2S,4R)-1-[29-[[2-(acetylamino)-2-deoxy-beta-D-galactopyra nosyl]oxy]-14,14-bis[[3-[[3-[[5-[[2-(acetylamino)-2-deoxy-b eta-D-galactopyranosyl]oxy]-1-oxopentyl]amino]propyl]amino] -3-oxopropoxy]methyl]-1,12,19,25-tetraoxo-16-oxa-13,20,24-t riazanonacos-1-yl]-4-hydroxy-2-pyrrolidinyl)methyl ester
tccctctgaccctcagtttct

SEQ ID NO: 4986 - RNA, 21 nt, synthetic construct
  source 1..21: mol_type = other RNA
  modified_base 1: mod_base = OTHER; note = 2'-O-methylguanosine-3'-phosphorothioate
  modified_base 2: mod_base = OTHER; note = 2'-O-methylcytidine-3'-phosphorothioate
  modified_base 3: mod_base = OTHER; note = 2'-O-methylcytidine-3'-phosphate
  modified_base 4: mod_base = OTHER; note = 2'-O-methylcytidine-3'-phosphate
  modified_base 5: mod_base = OTHER; note = 2'-O-methyluridine-3'-phosphate
  modified_base 6: mod_base = OTHER; note = 2'-O-docosanyl-uridine-3'-phosphate
  modified_base 7: mod_base = OTHER; note = 2'-deoxy-2'-fluorouridine-3'-phosphate
  modified_base 8: mod_base = OTHER; note = 2'-O-methyluridine-3'-phosphate
  modified_base 9: mod_base = OTHER; note = 2'-deoxy-2'-fluoroguanosine-3'-phosphate
  modified_base 10: mod_base = OTHER; note = 2'-deoxy-2'-fluoroadenosine-3'-phosphate
  modified_base 11: mod_base = OTHER; note = 2'-deoxy-2'-fluorouridine-3'-phosphate
  modified_base 12: mod_base = OTHER; note = 2'-O-methyladenosine-3'-phosphate
  modified_base 13: mod_base = OTHER; note = 2'-O-methyladenosine-3'-phosphate
  modified_base 14: mod_base = OTHER; note = 2'-O-methylcytidine-3'-phosphate
  modified_base 15: mod_base = OTHER; note = 2'-O-methyladenosine-3'-phosphate
  modified_base 16: mod_base = OTHER; note = 2'-O-methylguanosine-3'-phosphate
  modified_base 17: mod_base = OTHER; note = 2'-O-methyladenosine-3'-phosphate
  modified_base 18: mod_base = OTHER; note = 2'-O-methyladenosine-3'-phosphate
  modified_base 19: mod_base = OTHER; note = 2'-O-methylguanosine-3'-phosphate
  modified_base 20: mod_base = OTHER; note = 2'-O-methylcytidine-3'-phosphate
  modified_base 21: mod_base = OTHER; note = 2'-O-methyluridine-3'-phosphate ((2S,4R)-1-[29-[[2-(acetylamino)-2-deoxy-beta-D-galactopyra nosyl]oxy]-14,14-bis[[3-[[3-[[5-[[2-(acetylamino)-2-deoxy-b eta-D-galactopyranosyl]oxy]-1-oxopentyl]amino]propyl]amino] -3-oxopropoxy]methyl]-1,12,19,25-tetraoxo-16-oxa-13,20,24-t riazanonacos-1-yl]-4-hydroxy-2-pyrrolidinyl)methyl ester
gcccttttgataacagaagct

SEQ ID NO: 4987 - RNA, 21 nt, synthetic construct
  source 1..21: mol_type = other RNA
  modified_base 1: mod_base = OTHER; note = 2'-O-methyladenosine-3'-phosphorothioate
  modified_base 2: mod_base = OTHER; note = 2'-O-methylguanosine-3'-phosphorothioate
  modified_base 3: mod_base = OTHER; note = 2'-O-methyladenosine-3'-phosphate
  modified_base 4: mod_base = OTHER; note = 2'-O-methyladenosine-3'-phosphate
  modified_base 5: mod_base = OTHER; note = 2'-O-methyladenosine-3'-phosphate
  modified_base 6: mod_base = OTHER; note = 2'-O-docosanyl-uridine-3'-phosphate
  modified_base 7: mod_base = OTHER; note = 2'-deoxy-2'-fluorouridine-3'-phosphate
  modified_base 8: mod_base = OTHER; note = 2'-O-methyladenosine-3'-phosphate
  modified_base 9: mod_base = OTHER; note = 2'-deoxy-2'-fluoroadenosine-3'-phosphate
  modified_base 10: mod_base = OTHER; note = 2'-deoxy-2'-fluoroadenosine-3'-phosphate
  modified_base 11: mod_base = OTHER; note = 2'-deoxy-2'-fluorouridine-3'-phosphate
  modified_base 12: mod_base = OTHER; note = 2'-O-methylguanosine-3'-phosphate
  modified_base 13: mod_base = OTHER; note = 2'-O-methylguanosine-3'-phosphate
  modified_base 14: mod_base = OTHER; note = 2'-O-methyluridine-3'-phosphate
  modified_base 15: mod_base = OTHER; note = 2'-O-methyladenosine-3'-phosphate
  modified_base 16: mod_base = OTHER; note = 2'-O-methylguanosine-3'-phosphate
  modified_base 17: mod_base = OTHER; note = 2'-O-methylcytidine-3'-phosphate
  modified_base 18: mod_base = OTHER; note = 2'-O-methyladenosine-3'-phosphate
  modified_base 19: mod_base = OTHER; note = 2'-O-methylguanosine-3'-phosphate
  modified_base 20: mod_base = OTHER; note = 2'-O-methyluridine-3'-phosphate
  modified_base 21: mod_base = OTHER; note = 2'-O-methyluridine-3'-phosphate ((2S,4R)-1-[29-[[2-(acetylamino)-2-deoxy-beta-D-galactopyra nosyl]oxy]-14,14-bis[[3-[[3-[[5-[[2-(acetylamino)-2-deoxy-b eta-D-galactopyranosyl]oxy]-1-oxopentyl]amino]propyl]amino] -3-oxopropoxy]methyl]-1,12,19,25-tetraoxo-16-oxa-13,20,24-t riazanonacos-1-yl]-4-hydroxy-2-pyrrolidinyl)methyl ester
agaaattaaatggtagcagtt

SEQ ID NO: 4988 - RNA, 21 nt, synthetic construct
  source 1..21: mol_type = other RNA
  modified_base 1: mod_base = OTHER; note = 2'-O-methylguanosine-3'-phosphorothioate
  modified_base 2: mod_base = OTHER; note = 2'-O-methyladenosine-3'-phosphorothioate
  modified_base 3: mod_base = OTHER; note = 2'-O-methyluridine-3'-phosphate
  modified_base 4: mod_base = OTHER; note = 2'-O-methylguanosine-3'-phosphate
  modified_base 5: mod_base = OTHER; note = 2'-O-methylguanosine-3'-phosphate
  modified_base 6: mod_base = OTHER; note = 2'-O-docosanyl-adenosine-3'-phosphate
  modified_base 7: mod_base = OTHER; note = 2'-deoxy-2'-fluorouridine-3'-phosphate
  modified_base 8: mod_base = OTHER; note = 2'-O-methyluridine-3'-phosphate
  modified_base 9: mod_base = OTHER; note = 2'-deoxy-2'-fluorouridine-3'-phosphate
  modified_base 10: mod_base = OTHER; note = 2'-deoxy-2'-fluorouridine-3'-phosphate
  modified_base 11: mod_base = OTHER; note = 2'-deoxy-2'-fluorocytidine-3'-phosphate
  modified_base 12: mod_base = OTHER; note = 2'-O-methyladenosine-3'-phosphate
  modified_base 13: mod_base = OTHER; note = 2'-O-methylcytidine-3'-phosphate
  modified_base 14: mod_base = OTHER; note = 2'-O-methylcytidine-3'-phosphate
  modified_base 15: mod_base = OTHER; note = 2'-O-methylguanosine-3'-phosphate
  modified_base 16: mod_base = OTHER; note = 2'-O-methyladenosine-3'-phosphate
  modified_base 17: mod_base = OTHER; note = 2'-O-methyluridine-3'-phosphate
  modified_base 18: mod_base = OTHER; note = 2'-O-methyluridine-3'-phosphate
  modified_base 19: mod_base = OTHER; note = 2'-O-methylcytidine-3'-phosphate
  modified_base 20: mod_base = OTHER; note = 2'-O-methyluridine-3'-phosphate
  modified_base 21: mod_base = OTHER; note = 2'-O-methyluridine-3'-phosphate ((2S,4R)-1-[29-[[2-(acetylamino)-2-deoxy-beta-D-galactopyra nosyl]oxy]-14,14-bis[[3-[[3-[[5-[[2-(acetylamino)-2-deoxy-b eta-D-galactopyranosyl]oxy]-1-oxopentyl]amino]propyl]amino] -3-oxopropoxy]methyl]-1,12,19,25-tetraoxo-16-oxa-13,20,24-t riazanonacos-1-yl]-4-hydroxy-2-pyrrolidinyl)methyl ester
gatggattttcaccgattctt

SEQ ID NO: 4989 - RNA, 21 nt, synthetic construct
  source 1..21: mol_type = other RNA
  modified_base 1: mod_base = OTHER; note = 2'-O-methyladenosine-3'-phosphorothioate
  modified_base 2: mod_base = OTHER; note = 2'-O-methylcytidine-3'-phosphorothioate
  modified_base 3: mod_base = OTHER; note = 2'-O-methyladenosine-3'-phosphate
  modified_base 4: mod_base = OTHER; note = 2'-O-methyluridine-3'-phosphate
  modified_base 5: mod_base = OTHER; note = 2'-O-methylcytidine-3'-phosphate
  modified_base 6: mod_base = OTHER; note = 2'-O-docosanyl-adenosine-3'-phosphate
  modified_base 7: mod_base = OTHER; note = 2'-deoxy-2'-fluorocytidine-3'-phosphate
  modified_base 8: mod_base = OTHER; note = 2'-O-methyladenosine-3'-phosphate
  modified_base 9: mod_base = OTHER; note = 2'-deoxy-2'-fluorocytidine-3'-phosphate
  modified_base 10: mod_base = OTHER; note = 2'-deoxy-2'-fluorouridine-3'-phosphate
  modified_base 11: mod_base = OTHER; note = 2'-deoxy-2'-fluorouridine-3'-phosphate
  modified_base 12: mod_base = OTHER; note = 2'-O-methylguanosine-3'-phosphate
  modified_base 13: mod_base = OTHER; note = 2'-O-methylcytidine-3'-phosphate
  modified_base 14: mod_base = OTHER; note = 2'-O-methyluridine-3'-phosphate
  modified_base 15: mod_base = OTHER; note = 2'-O-methylcytidine-3'-phosphate
  modified_base 16: mod_base = OTHER; note = 2'-O-methyladenosine-3'-phosphate
  modified_base 17: mod_base = OTHER; note = 2'-O-methylcytidine-3'-phosphate
  modified_base 18: mod_base = OTHER; note = 2'-O-methyladenosine-3'-phosphate
  modified_base 19: mod_base = OTHER; note = 2'-O-methyluridine-3'-phosphate
  modified_base 20: mod_base = OTHER; note = 2'-O-methylguanosine-3'-phosphate
  modified_base 21: mod_base = OTHER; note = 2'-O-methyluridine-3'-phosphate ((2S,4R)-1-[29-[[2-(acetylamino)-2-deoxy-beta-D-galactopyra nosyl]oxy]-14,14-bis[[3-[[3-[[5-[[2-(acetylamino)-2-deoxy-b eta-D-galactopyranosyl]oxy]-1-oxopentyl]amino]propyl]amino] -3-oxopropoxy]methyl]-1,12,19,25-tetraoxo-16-oxa-13,20,24-t riazanonacos-1-yl]-4-hydroxy-2-pyrrolidinyl)methyl ester
acatcacacttgctcacatgt

SEQ ID NO: 4990 - RNA, 21 nt, synthetic construct
  source 1..21: mol_type = other RNA
  modified_base 1: mod_base = OTHER; note = 2'-O-methyluridine-3'-phosphorothioate
  modified_base 2: mod_base = OTHER; note = 2'-O-methylcytidine-3'-phosphorothioate
  modified_base 3: mod_base = OTHER; note = 2'-O-methyluridine-3'-phosphate
  modified_base 4: mod_base = OTHER; note = 2'-O-methyladenosine-3'-phosphate
  modified_base 5: mod_base = OTHER; note = 2'-O-methyladenosine-3'-phosphate
  modified_base 6: mod_base = OTHER; note = 2'-O-docosanyl-guanosine-3'-phosphate
  modified_base 7: mod_base = OTHER; note = 2'-deoxy-2'-fluoroguanosine-3'-phosphate
  modified_base 8: mod_base = OTHER; note = 2'-O-methylcytidine-3'-phosphate
  modified_base 9: mod_base = OTHER; note = 2'-deoxy-2'-fluorocytidine-3'-phosphate
  modified_base 10: mod_base = OTHER; note = 2'-deoxy-2'-fluorouridine-3'-phosphate
  modified_base 11: mod_base = OTHER; note = 2'-deoxy-2'-fluoroguanosine-3'-phosphate
  modified_base 12: mod_base = OTHER; note = 2'-O-methyladenosine-3'-phosphate
  modified_base 13: mod_base = OTHER; note = 2'-O-methyladenosine-3'-phosphate
  modified_base 14: mod_base = OTHER; note = 2'-O-methyladenosine-3'-phosphate
  modified_base 15: mod_base = OTHER; note = 2'-O-methyladenosine-3'-phosphate
  modified_base 16: mod_base = OTHER; note = 2'-O-methylcytidine-3'-phosphate
  modified_base 17: mod_base = OTHER; note = 2'-O-methylcytidine-3'-phosphate
  modified_base 18: mod_base = OTHER; note = 2'-O-methyladenosine-3'-phosphate
  modified_base 19: mod_base = OTHER; note = 2'-O-methyluridine-3'-phosphate
  modified_base 20: mod_base = OTHER; note = 2'-O-methyluridine-3'-phosphate
  modified_base 21: mod_base = OTHER; note = 2'-O-methyluridine-3'-phosphate ((2S,4R)-1-[29-[[2-(acetylamino)-2-deoxy-beta-D-galactopyra nosyl]oxy]-14,14-bis[[3-[[3-[[5-[[2-(acetylamino)-2-deoxy-b eta-D-galactopyranosyl]oxy]-1-oxopentyl]amino]propyl]amino] -3-oxopropoxy]methyl]-1,12,19,25-tetraoxo-16-oxa-13,20,24-t riazanonacos-1-yl]-4-hydroxy-2-pyrrolidinyl)methyl ester
tctaaggcctgaaaaccattt

SEQ ID NO: 4991 - RNA, 21 nt, synthetic construct
  source 1..21: mol_type = other RNA
  modified_base 1: mod_base = OTHER; note = 2'-O-methyluridine-3'-phosphorothioate
  modified_base 2: mod_base = OTHER; note = 2'-O-methyluridine-3'-phosphorothioate
  modified_base 3: mod_base = OTHER; note = 2'-O-methyladenosine-3'-phosphate
  modified_base 4: mod_base = OTHER; note = 2'-O-methylcytidine-3'-phosphate
  modified_base 5: mod_base = OTHER; note = 2'-O-methylguanosine-3'-phosphate
  modified_base 6: mod_base = OTHER; note = 2'-O-docosanyl-uridine-3'-phosphate
  modified_base 7: mod_base = OTHER; note = 2'-deoxy-2'-fluoroadenosine-3'-phosphate
  modified_base 8: mod_base = OTHER; note = 2'-O-methyladenosine-3'-phosphate
  modified_base 9: mod_base = OTHER; note = 2'-deoxy-2'-fluoroadenosine-3'-phosphate
  modified_base 10: mod_base = OTHER; note = 2'-deoxy-2'-fluoroguanosine-3'-phosphate
  modified_base 11: mod_base = OTHER; note = 2'-deoxy-2'-fluoroadenosine-3'-phosphate
  modified_base 12: mod_base = OTHER; note = 2'-O-methyluridine-3'-phosphate
  modified_base 13: mod_base = OTHER; note = 2'-O-methylcytidine-3'-phosphate
  modified_base 14: mod_base = OTHER; note = 2'-O-methylcytidine-3'-phosphate
  modified_base 15: mod_base = OTHER; note = 2'-O-methyluridine-3'-phosphate
  modified_base 16: mod_base = OTHER; note = 2'-O-methyluridine-3'-phosphate
  modified_base 17: mod_base = OTHER; note = 2'-O-methyladenosine-3'-phosphate
  modified_base 18: mod_base = OTHER; note = 2'-O-methyluridine-3'-phosphate
  modified_base 19: mod_base = OTHER; note = 2'-O-methylguanosine-3'-phosphate
  modified_base 20: mod_base = OTHER; note = 2'-O-methylguanosine-3'-phosphate
  modified_base 21: mod_base = OTHER; note = 2'-O-methyluridine-3'-phosphate ((2S,4R)-1-[29-[[2-(acetylamino)-2-deoxy-beta-D-galactopyra nosyl]oxy]-14,14-bis[[3-[[3-[[5-[[2-(acetylamino)-2-deoxy-b eta-D-galactopyranosyl]oxy]-1-oxopentyl]amino]propyl]amino] -3-oxopropoxy]methyl]-1,12,19,25-tetraoxo-16-oxa-13,20,24-t riazanonacos-1-yl]-4-hydroxy-2-pyrrolidinyl)methyl ester
ttacgtaaagatccttatggt

SEQ ID NO: 4992 - RNA, 21 nt, synthetic construct
  source 1..21: mol_type = other RNA
  modified_base 1: mod_base = OTHER; note = 2'-O-methyluridine-3'-phosphorothioate
  modified_base 2: mod_base = OTHER; note = 2'-O-methyladenosine-3'-phosphorothioate
  modified_base 3: mod_base = OTHER; note = 2'-O-methylcytidine-3'-phosphate
  modified_base 4: mod_base = OTHER; note = 2'-O-methyladenosine-3'-phosphate
  modified_base 5: mod_base = OTHER; note = 2'-O-methylguanosine-3'-phosphate
  modified_base 6: mod_base = OTHER; note = 2'-O-docosanyl-uridine-3'-phosphate
  modified_base 7: mod_base = OTHER; note = 2'-deoxy-2'-fluoroguanosine-3'-phosphate
  modified_base 8: mod_base = OTHER; note = 2'-O-methyladenosine-3'-phosphate
  modified_base 9: mod_base = OTHER; note = 2'-deoxy-2'-fluoroadenosine-3'-phosphate
  modified_base 10: mod_base = OTHER; note = 2'-deoxy-2'-fluoroguanosine-3'-phosphate
  modified_base 11: mod_base = OTHER; note = 2'-deoxy-2'-fluorocytidine-3'-phosphate
  modified_base 12: mod_base = OTHER; note = 2'-O-methyluridine-3'-phosphate
  modified_base 13: mod_base = OTHER; note = 2'-O-methylguanosine-3'-phosphate
  modified_base 14: mod_base = OTHER; note = 2'-O-methyladenosine-3'-phosphate
  modified_base 15: mod_base = OTHER; note = 2'-O-methyluridine-3'-phosphate
  modified_base 16: mod_base = OTHER; note = 2'-O-methylguanosine-3'-phosphate
  modified_base 17: mod_base = OTHER; note = 2'-O-methylcytidine-3'-phosphate
  modified_base 18: mod_base = OTHER; note = 2'-O-methylcytidine-3'-phosphate
  modified_base 19: mod_base = OTHER; note = 2'-O-methyladenosine-3'-phosphate
  modified_base 20: mod_base = OTHER; note = 2'-O-methylguanosine-3'-phosphate
  modified_base 21: mod_base = OTHER; note = 2'-O-methyluridine-3'-phosphate ((2S,4R)-1-[29-[[2-(acetylamino)-2-deoxy-beta-D-galactopyra nosyl]oxy]-14,14-bis[[3-[[3-[[5-[[2-(acetylamino)-2-deoxy-b eta-D-galactopyranosyl]oxy]-1-oxopentyl]amino]propyl]amino] -3-oxopropoxy]methyl]-1,12,19,25-tetraoxo-16-oxa-13,20,24-t riazanonacos-1-yl]-4-hydroxy-2-pyrrolidinyl)methyl ester
tacagtgaagctgatgccagt

SEQ ID NO: 4993 - RNA, 21 nt, synthetic construct
  source 1..21: mol_type = other RNA
  modified_base 1: mod_base = OTHER; note = 2'-O-methyladenosine-3'-phosphorothioate
  modified_base 2: mod_base = OTHER; note = 2'-O-methyluridine-3'-phosphorothioate
  modified_base 3: mod_base = OTHER; note = 2'-O-methyluridine-3'-phosphate
  modified_base 4: mod_base = OTHER; note = 2'-O-methyluridine-3'-phosphate
  modified_base 5: mod_base = OTHER; note = 2'-O-methylguanosine-3'-phosphate
  modified_base 6: mod_base = OTHER; note = 2'-O-docosanyl-cytidine-3'-phosphate
  modified_base 7: mod_base = OTHER; note = 2'-deoxy-2'-fluorouridine-3'-phosphate
  modified_base 8: mod_base = OTHER; note = 2'-O-methylguanosine-3'-phosphate
  modified_base 9: mod_base = OTHER; note = 2'-deoxy-2'-fluoroadenosine-3'-phosphate
  modified_base 10: mod_base = OTHER; note = 2'-deoxy-2'-fluoroadenosine-3'-phosphate
  modified_base 11: mod_base = OTHER; note = 2'-deoxy-2'-fluorouridine-3'-phosphate
  modified_base 12: mod_base = OTHER; note = 2'-O-methyluridine-3'-phosphate
  modified_base 13: mod_base = OTHER; note = 2'-O-methylguanosine-3'-phosphate
  modified_base 14: mod_base = OTHER; note = 2'-O-methyladenosine-3'-phosphate
  modified_base 15: mod_base = OTHER; note = 2'-O-methyladenosine-3'-phosphate
  modified_base 16: mod_base = OTHER; note = 2'-O-methyluridine-3'-phosphate
  modified_base 17: mod_base = OTHER; note = 2'-O-methyluridine-3'-phosphate
  modified_base 18: mod_base = OTHER; note = 2'-O-methylguanosine-3'-phosphate
  modified_base 19: mod_base = OTHER; note = 2'-O-methyluridine-3'-phosphate
  modified_base 20: mod_base = OTHER; note = 2'-O-methyluridine-3'-phosphate
  modified_base 21: mod_base = OTHER; note = 2'-O-methyluridine-3'-phosphate ((2S,4R)-1-[29-[[2-(acetylamino)-2-deoxy-beta-D-galactopyra nosyl]oxy]-14,14-bis[[3-[[3-[[5-[[2-(acetylamino)-2-deoxy-b eta-D-galactopyranosyl]oxy]-1-oxopentyl]amino]propyl]amino] -3-oxopropoxy]methyl]-1,12,19,25-tetraoxo-16-oxa-13,20,24-t riazanonacos-1-yl]-4-hydroxy-2-pyrrolidinyl)methyl ester
atttgctgaattgaattgttt

SEQ ID NO: 4994 - RNA, 21 nt, synthetic construct
  source 1..21: mol_type = other RNA
  modified_base 1: mod_base = OTHER; note = 2'-O-methyluridine-3'-phosphorothioate
  modified_base 2: mod_base = OTHER; note = 2'-O-methyladenosine-3'-phosphorothioate
  modified_base 3: mod_base = OTHER; note = 2'-O-methyladenosine-3'-phosphate
  modified_base 4: mod_base = OTHER; note = 2'-O-methylguanosine-3'-phosphate
  modified_base 5: mod_base = OTHER; note = 2'-O-methylcytidine-3'-phosphate
  modified_base 6: mod_base = OTHER; note = 2'-O-docosanyl-uridine-3'-phosphate
  modified_base 7: mod_base = OTHER; note = 2'-deoxy-2'-fluorocytidine-3'-phosphate
  modified_base 8: mod_base = OTHER; note = 2'-O-methyluridine-3'-phosphate
  modified_base 9: mod_base = OTHER; note = 2'-deoxy-2'-fluoroadenosine-3'-phosphate
  modified_base 10: mod_base = OTHER; note = 2'-deoxy-2'-fluoroguanosine-3'-phosphate
  modified_base 11: mod_base = OTHER; note = 2'-deoxy-2'-fluorouridine-3'-phosphate
  modified_base 12: mod_base = OTHER; note = 2'-O-methyluridine-3'-phosphate
  modified_base 13: mod_base = OTHER; note = 2'-O-methyluridine-3'-phosphate
  modified_base 14: mod_base = OTHER; note = 2'-O-methylguanosine-3'-phosphate
  modified_base 15: mod_base = OTHER; note = 2'-O-methylguanosine-3'-phosphate
  modified_base 16: mod_base = OTHER; note = 2'-O-methyladenosine-3'-phosphate
  modified_base 17: mod_base = OTHER; note = 2'-O-methylcytidine-3'-phosphate
  modified_base 18: mod_base = OTHER; note = 2'-O-methyluridine-3'-phosphate
  modified_base 19: mod_base = OTHER; note = 2'-O-methyluridine-3'-phosphate
  modified_base 20: mod_base = OTHER; note = 2'-O-methyladenosine-3'-phosphate
  modified_base 21: mod_base = OTHER; note = 2'-O-methyluridine-3'-phosphate ((2S,4R)-1-[29-[[2-(acetylamino)-2-deoxy-beta-D-galactopyra nosyl]oxy]-14,14-bis[[3-[[3-[[5-[[2-(acetylamino)-2-deoxy-b eta-D-galactopyranosyl]oxy]-1-oxopentyl]amino]propyl]amino] -3-oxopropoxy]methyl]-1,12,19,25-tetraoxo-16-oxa-13,20,24-t riazanonacos-1-yl]-4-hydroxy-2-pyrrolidinyl)methyl ester
taagctctagtttggacttat

SEQ ID NO: 4995 - RNA, 21 nt, synthetic construct
  source 1..21: mol_type = other RNA
  modified_base 1: mod_base = OTHER; note = 2'-O-methylcytidine-3'-phosphorothioate
  modified_base 2: mod_base = OTHER; note = 2'-O-methyluridine-3'-phosphorothioate
  modified_base 3: mod_base = OTHER; note = 2'-O-methylguanosine-3'-phosphate
  modified_base 4: mod_base = OTHER; note = 2'-O-methylguanosine-3'-phosphate
  modified_base 5: mod_base = OTHER; note = 2'-O-methylcytidine-3'-phosphate
  modified_base 6: mod_base = OTHER; note = 2'-O-docosanyl-uridine-3'-phosphate
  modified_base 7: mod_base = OTHER; note = 2'-deoxy-2'-fluoroadenosine-3'-phosphate
  modified_base 8: mod_base = OTHER; note = 2'-O-methylguanosine-3'-phosphate
  modified_base 9: mod_base = OTHER; note = 2'-deoxy-2'-fluorouridine-3'-phosphate
  modified_base 10: mod_base = OTHER; note = 2'-deoxy-2'-fluoroadenosine-3'-phosphate
  modified_base 11: mod_base = OTHER; note = 2'-deoxy-2'-fluoroguanosine-3'-phosphate
  modified_base 12: mod_base = OTHER; note = 2'-O-methyluridine-3'-phosphate
  modified_base 13: mod_base = OTHER; note = 2'-O-methylguanosine-3'-phosphate
  modified_base 14: mod_base = OTHER; note = 2'-O-methyluridine-3'-phosphate
  modified_base 15: mod_base = OTHER; note = 2'-O-methylguanosine-3'-phosphate
  modified_base 16: mod_base = OTHER; note = 2'-O-methyluridine-3'-phosphate
  modified_base 17: mod_base = OTHER; note = 2'-O-methylguanosine-3'-phosphate
  modified_base 18: mod_base = OTHER; note = 2'-O-methyladenosine-3'-phosphate
  modified_base 19: mod_base = OTHER; note = 2'-O-methylguanosine-3'-phosphate
  modified_base 20: mod_base = OTHER; note = 2'-O-methyladenosine-3'-phosphate
  modified_base 21: mod_base = OTHER; note = 2'-O-methyluridine-3'-phosphate ((2S,4R)-1-[29-[[2-(acetylamino)-2-deoxy-beta-D-galactopyra nosyl]oxy]-14,14-bis[[3-[[3-[[5-[[2-(acetylamino)-2-deoxy-b eta-D-galactopyranosyl]oxy]-1-oxopentyl]amino]propyl]amino] -3-oxopropoxy]methyl]-1,12,19,25-tetraoxo-16-oxa-13,20,24-t riazanonacos-1-yl]-4-hydroxy-2-pyrrolidinyl)methyl ester
ctggctagtagtgtgtgagat

SEQ ID NO: 4996 - RNA, 21 nt, synthetic construct
  source 1..21: mol_type = other RNA
  modified_base 1: mod_base = OTHER; note = 2'-O-methyladenosine-3'-phosphorothioate
  modified_base 2: mod_base = OTHER; note = 2'-O-methyluridine-3'-phosphorothioate
  modified_base 3: mod_base = OTHER; note = 2'-O-methylguanosine-3'-phosphate
  modified_base 4: mod_base = OTHER; note = 2'-O-methyluridine-3'-phosphate
  modified_base 5: mod_base = OTHER; note = 2'-O-methylguanosine-3'-phosphate
  modified_base 6: mod_base = OTHER; note = 2'-O-docosanyl-adenosine-3'-phosphate
  modified_base 7: mod_base = OTHER; note = 2'-deoxy-2'-fluorouridine-3'-phosphate
  modified_base 8: mod_base = OTHER; note = 2'-O-methylguanosine-3'-phosphate
  modified_base 9: mod_base = OTHER; note = 2'-deoxy-2'-fluorocytidine-3'-phosphate
  modified_base 10: mod_base = OTHER; note = 2'-deoxy-2'-fluoroadenosine-3'-phosphate
  modified_base 11: mod_base = OTHER; note = 2'-deoxy-2'-fluorouridine-3'-phosphate
  modified_base 12: mod_base = OTHER; note = 2'-O-methylcytidine-3'-phosphate
  modified_base 13: mod_base = OTHER; note = 2'-O-methyladenosine-3'-phosphate
  modified_base 14: mod_base = OTHER; note = 2'-O-methyluridine-3'-phosphate
  modified_base 15: mod_base = OTHER; note = 2'-O-methylcytidine-3'-phosphate
  modified_base 16: mod_base = OTHER; note = 2'-O-methyluridine-3'-phosphate
  modified_base 17: mod_base = OTHER; note = 2'-O-methyluridine-3'-phosphate
  modified_base 18: mod_base = OTHER; note = 2'-O-methyladenosine-3'-phosphate
  modified_base 19: mod_base = OTHER; note = 2'-O-methyluridine-3'-phosphate
  modified_base 20: mod_base = OTHER; note = 2'-O-methylcytidine-3'-phosphate
  modified_base 21: mod_base = OTHER; note = 2'-O-methyluridine-3'-phosphate ((2S,4R)-1-[29-[[2-(acetylamino)-2-deoxy-beta-D-galactopyra nosyl]oxy]-14,14-bis[[3-[[3-[[5-[[2-(acetylamino)-2-deoxy-b eta-D-galactopyranosyl]oxy]-1-oxopentyl]amino]propyl]amino] -3-oxopropoxy]methyl]-1,12,19,25-tetraoxo-16-oxa-13,20,24-t riazanonacos-1-yl]-4-hydroxy-2-pyrrolidinyl)methyl ester
atgtgatgcatcatcttatct

SEQ ID NO: 4997 - RNA, 21 nt, synthetic construct
  source 1..21: mol_type = other RNA
  modified_base 1: mod_base = OTHER; note = 2'-O-methylcytidine-3'-phosphorothioate
  modified_base 2: mod_base = OTHER; note = 2'-O-methylcytidine-3'-phosphorothioate
  modified_base 3: mod_base = OTHER; note = 2'-O-methyluridine-3'-phosphate
  modified_base 4: mod_base = OTHER; note = 2'-O-methyladenosine-3'-phosphate
  modified_base 5: mod_base = OTHER; note = 2'-O-methylcytidine-3'-phosphate
  modified_base 6: mod_base = OTHER; note = 2'-O-docosanyl-adenosine-3'-phosphate
  modified_base 7: mod_base = OTHER; note = 2'-deoxy-2'-fluorouridine-3'-phosphate
  modified_base 8: mod_base = OTHER; note = 2'-O-methylguanosine-3'-phosphate
  modified_base 9: mod_base = OTHER; note = 2'-deoxy-2'-fluorouridine-3'-phosphate
  modified_base 10: mod_base = OTHER; note = 2'-deoxy-2'-fluoroadenosine-3'-phosphate
  modified_base 11: mod_base = OTHER; note = 2'-deoxy-2'-fluoroadenosine-3'-phosphate
  modified_base 12: mod_base = OTHER; note = 2'-O-methyluridine-3'-phosphate
  modified_base 13: mod_base = OTHER; note = 2'-O-methylguanosine-3'-phosphate
  modified_base 14: mod_base = OTHER; note = 2'-O-methylcytidine-3'-phosphate
  modified_base 15: mod_base = OTHER; note = 2'-O-methyladenosine-3'-phosphate
  modified_base 16: mod_base = OTHER; note = 2'-O-methyluridine-3'-phosphate
  modified_base 17: mod_base = OTHER; note = 2'-O-methyladenosine-3'-phosphate
  modified_base 18: mod_base = OTHER; note = 2'-O-methyluridine-3'-phosphate
  modified_base 19: mod_base = OTHER; note = 2'-O-methylguanosine-3'-phosphate
  modified_base 20: mod_base = OTHER; note = 2'-O-methyluridine-3'-phosphate
  modified_base 21: mod_base = OTHER; note = 2'-O-methyluridine-3'-phosphate ((2S,4R)-1-[29-[[2-(acetylamino)-2-deoxy-beta-D-galactopyra nosyl]oxy]-14,14-bis[[3-[[3-[[5-[[2-(acetylamino)-2-deoxy-b eta-D-galactopyranosyl]oxy]-1-oxopentyl]amino]propyl]amino] -3-oxopropoxy]methyl]-1,12,19,25-tetraoxo-16-oxa-13,20,24-t riazanonacos-1-yl]-4-hydroxy-2-pyrrolidinyl)methyl ester
cctacatgtaatgcatatgtt

SEQ ID NO: 4998 - RNA, 21 nt, synthetic construct
  source 1..21: mol_type = other RNA
  modified_base 1: mod_base = OTHER; note = 2'-O-methylcytidine-3'-phosphorothioate
  modified_base 2: mod_base = OTHER; note = 2'-O-methyladenosine-3'-phosphorothioate
  modified_base 3: mod_base = OTHER; note = 2'-O-methylguanosine-3'-phosphate
  modified_base 4: mod_base = OTHER; note = 2'-O-methylcytidine-3'-phosphate
  modified_base 5: mod_base = OTHER; note = 2'-O-methyladenosine-3'-phosphate
  modified_base 6: mod_base = OTHER; note = 2'-O-docosanyl-guanosine-3'-phosphate
  modified_base 7: mod_base = OTHER; note = 2'-deoxy-2'-fluorocytidine-3'-phosphate
  modified_base 8: mod_base = OTHER; note = 2'-O-methylcytidine-3'-phosphate
  modified_base 9: mod_base = OTHER; note = 2'-deoxy-2'-fluoroadenosine-3'-phosphate
  modified_base 10: mod_base = OTHER; note = 2'-deoxy-2'-fluoroadenosine-3'-phosphate
  modified_base 11: mod_base = OTHER; note = 2'-deoxy-2'-fluoroguanosine-3'-phosphate
  modified_base 12: mod_base = OTHER; note = 2'-O-methyladenosine-3'-phosphate
  modified_base 13: mod_base = OTHER; note = 2'-O-methylguanosine-3'-phosphate
  modified_base 14: mod_base = OTHER; note = 2'-O-methyluridine-3'-phosphate
  modified_base 15: mod_base = OTHER; note = 2'-O-methyluridine-3'-phosphate
  modified_base 16: mod_base = OTHER; note = 2'-O-methyluridine-3'-phosphate
  modified_base 17: mod_base = OTHER; note = 2'-O-methylguanosine-3'-phosphate
  modified_base 18: mod_base = OTHER; note = 2'-O-methyluridine-3'-phosphate
  modified_base 19: mod_base = OTHER; note = 2'-O-methyluridine-3'-phosphate
  modified_base 20: mod_base = OTHER; note = 2'-O-methylguanosine-3'-phosphate
  modified_base 21: mod_base = OTHER; note = 2'-O-methyluridine-3'-phosphate ((2S,4R)-1-[29-[[2-(acetylamino)-2-deoxy-beta-D-galactopyra nosyl]oxy]-14,14-bis[[3-[[3-[[5-[[2-(acetylamino)-2-deoxy-b eta-D-galactopyranosyl]oxy]-1-oxopentyl]amino]propyl]amino] -3-oxopropoxy]methyl]-1,12,19,25-tetraoxo-16-oxa-13,20,24-t riazanonacos-1-yl]-4-hydroxy-2-pyrrolidinyl)methyl ester
cagcagccaagagtttgttgt

SEQ ID NO: 4999 - RNA, 21 nt, synthetic construct
  source 1..21: mol_type = other RNA
  modified_base 1: mod_base = OTHER; note = 2'-O-methyluridine-3'-phosphorothioate
  modified_base 2: mod_base = OTHER; note = 2'-O-methylcytidine-3'-phosphorothioate
  modified_base 3: mod_base = OTHER; note = 2'-O-methylcytidine-3'-phosphate
  modified_base 4: mod_base = OTHER; note = 2'-O-methyladenosine-3'-phosphate
  modified_base 5: mod_base = OTHER; note = 2'-O-methyladenosine-3'-phosphate
  modified_base 6: mod_base = OTHER; note = 2'-O-docosanyl-uridine-3'-phosphate
  modified_base 7: mod_base = OTHER; note = 2'-deoxy-2'-fluorocytidine-3'-phosphate
  modified_base 8: mod_base = OTHER; note = 2'-O-methylcytidine-3'-phosphate
  modified_base 9: mod_base = OTHER; note = 2'-deoxy-2'-fluoroadenosine-3'-phosphate
  modified_base 10: mod_base = OTHER; note = 2'-deoxy-2'-fluoroguanosine-3'-phosphate
  modified_base 11: mod_base = OTHER; note = 2'-deoxy-2'-fluorocytidine-3'-phosphate
  modified_base 12: mod_base = OTHER; note = 2'-O-methylcytidine-3'-phosphate
  modified_base 13: mod_base = OTHER; note = 2'-O-methyluridine-3'-phosphate
  modified_base 14: mod_base = OTHER; note = 2'-O-methyluridine-3'-phosphate
  modified_base 15: mod_base = OTHER; note = 2'-O-methylcytidine-3'-phosphate
  modified_base 16: mod_base = OTHER; note = 2'-O-methyladenosine-3'-phosphate
  modified_base 17: mod_base = OTHER; note = 2'-O-methylcytidine-3'-phosphate
  modified_base 18: mod_base = OTHER; note = 2'-O-methyladenosine-3'-phosphate
  modified_base 19: mod_base = OTHER; note = 2'-O-methyluridine-3'-phosphate
  modified_base 20: mod_base = OTHER; note = 2'-O-methylguanosine-3'-phosphate
  modified_base 21: mod_base = OTHER; note = 2'-O-methyluridine-3'-phosphate ((2S,4R)-1-[29-[[2-(acetylamino)-2-deoxy-beta-D-galactopyra nosyl]oxy]-14,14-bis[[3-[[3-[[5-[[2-(acetylamino)-2-deoxy-b eta-D-galactopyranosyl]oxy]-1-oxopentyl]amino]propyl]amino] -3-oxopropoxy]methyl]-1,12,19,25-tetraoxo-16-oxa-13,20,24-t riazanonacos-1-yl]-4-hydroxy-2-pyrrolidinyl)methyl ester
tccaatccagccttcacatgt

SEQ ID NO: 5000 - RNA, 21 nt, synthetic construct
  source 1..21: mol_type = other RNA
  modified_base 1: mod_base = OTHER; note = 2'-O-methyladenosine-3'-phosphorothioate
  modified_base 2: mod_base = OTHER; note = 2'-O-methylcytidine-3'-phosphorothioate
  modified_base 3: mod_base = OTHER; note = 2'-O-methylcytidine-3'-phosphate
  modified_base 4: mod_base = OTHER; note = 2'-O-methyladenosine-3'-phosphate
  modified_base 5: mod_base = OTHER; note = 2'-O-methyladenosine-3'-phosphate
  modified_base 6: mod_base = OTHER; note = 2'-O-docosanyl-cytidine-3'-phosphate
  modified_base 7: mod_base = OTHER; note = 2'-deoxy-2'-fluoroadenosine-3'-phosphate
  modified_base 8: mod_base = OTHER; note = 2'-O-methylguanosine-3'-phosphate
  modified_base 9: mod_base = OTHER; note = 2'-deoxy-2'-fluorouridine-3'-phosphate
  modified_base 10: mod_base = OTHER; note = 2'-deoxy-2'-fluoroadenosine-3'-phosphate
  modified_base 11: mod_base = OTHER; note = 2'-deoxy-2'-fluorocytidine-3'-phosphate
  modified_base 12: mod_base = OTHER; note = 2'-O-methylcytidine-3'-phosphate
  modified_base 13: mod_base = OTHER; note = 2'-O-methylcytidine-3'-phosphate
  modified_base 14: mod_base = OTHER; note = 2'-O-methyladenosine-3'-phosphate
  modified_base 15: mod_base = OTHER; note = 2'-O-methyluridine-3'-phosphate
  modified_base 16: mod_base = OTHER; note = 2'-O-methylcytidine-3'-phosphate
  modified_base 17: mod_base = OTHER; note = 2'-O-methyladenosine-3'-phosphate
  modified_base 18: mod_base = OTHER; note = 2'-O-methyladenosine-3'-phosphate
  modified_base 19: mod_base = OTHER; note = 2'-O-methylguanosine-3'-phosphate
  modified_base 20: mod_base = OTHER; note = 2'-O-methylcytidine-3'-phosphate
  modified_base 21: mod_base = OTHER; note = 2'-O-methyluridine-3'-phosphate ((2S,4R)-1-[29-[[2-(acetylamino)-2-deoxy-beta-D-galactopyra nosyl]oxy]-14,14-bis[[3-[[3-[[5-[[2-(acetylamino)-2-deoxy-b eta-D-galactopyranosyl]oxy]-1-oxopentyl]amino]propyl]amino] -3-oxopropoxy]methyl]-1,12,19,25-tetraoxo-16-oxa-13,20,24-t riazanonacos-1-yl]-4-hydroxy-2-pyrrolidinyl)methyl ester
accaacagtacccatcaagct

SEQ ID NO: 5001 - RNA, 21 nt, synthetic construct
  source 1..21: mol_type = other RNA
  modified_base 1: mod_base = OTHER; note = 2'-O-methylcytidine-3'-phosphorothioate
  modified_base 2: mod_base = OTHER; note = 2'-O-methyluridine-3'-phosphorothioate
  modified_base 3: mod_base = OTHER; note = 2'-O-methylguanosine-3'-phosphate
  modified_base 4: mod_base = OTHER; note = 2'-O-methylcytidine-3'-phosphate
  modified_base 5: mod_base = OTHER; note = 2'-O-methyluridine-3'-phosphate
  modified_base 6: mod_base = OTHER; note = 2'-O-docosanyl-adenosine-3'-phosphate
  modified_base 7: mod_base = OTHER; note = 2'-deoxy-2'-fluoroguanosine-3'-phosphate
  modified_base 8: mod_base = OTHER; note = 2'-O-methylguanosine-3'-phosphate
  modified_base 9: mod_base = OTHER; note = 2'-deoxy-2'-fluoroguanosine-3'-phosphate
  modified_base 10: mod_base = OTHER; note = 2'-deoxy-2'-fluoroadenosine-3'-phosphate
  modified_base 11: mod_base = OTHER; note = 2'-deoxy-2'-fluorouridine-3'-phosphate
  modified_base 12: mod_base = OTHER; note = 2'-O-methylcytidine-3'-phosphate
  modified_base 13: mod_base = OTHER; note = 2'-O-methyladenosine-3'-phosphate
  modified_base 14: mod_base = OTHER; note = 2'-O-methyluridine-3'-phosphate
  modified_base 15: mod_base = OTHER; note = 2'-O-methylcytidine-3'-phosphate
  modified_base 16: mod_base = OTHER; note = 2'-O-methyladenosine-3'-phosphate
  modified_base 17: mod_base = OTHER; note = 2'-O-methylguanosine-3'-phosphate
  modified_base 18: mod_base = OTHER; note = 2'-O-methyladenosine-3'-phosphate
  modified_base 19: mod_base = OTHER; note = 2'-O-methyladenosine-3'-phosphate
  modified_base 20: mod_base = OTHER; note = 2'-O-methyladenosine-3'-phosphate
  modified_base 21: mod_base = OTHER; note = 2'-O-methyluridine-3'-phosphate ((2S,4R)-1-[29-[[2-(acetylamino)-2-deoxy-beta-D-galactopyra nosyl]oxy]-14,14-bis[[3-[[3-[[5-[[2-(acetylamino)-2-deoxy-b eta-D-galactopyranosyl]oxy]-1-oxopentyl]amino]propyl]amino] -3-oxopropoxy]methyl]-1,12,19,25-tetraoxo-16-oxa-13,20,24-t riazanonacos-1-yl]-4-hydroxy-2-pyrrolidinyl)methyl ester
ctgctagggatcatcagaaat

SEQ ID NO: 5002 - RNA, 21 nt, synthetic construct
  source 1..21: mol_type = other RNA
  modified_base 1: mod_base = OTHER; note = 2'-O-methylguanosine-3'-phosphorothioate
  modified_base 2: mod_base = OTHER; note = 2'-O-methylguanosine-3'-phosphorothioate
  modified_base 3: mod_base = OTHER; note = 2'-O-methyluridine-3'-phosphate
  modified_base 4: mod_base = OTHER; note = 2'-O-methyluridine-3'-phosphate
  modified_base 5: mod_base = OTHER; note = 2'-O-methyluridine-3'-phosphate
  modified_base 6: mod_base = OTHER; note = 2'-O-docosanyl-guanosine-3'-phosphate
  modified_base 7: mod_base = OTHER; note = 2'-deoxy-2'-fluorocytidine-3'-phosphate
  modified_base 8: mod_base = OTHER; note = 2'-O-methyluridine-3'-phosphate
  modified_base 9: mod_base = OTHER; note = 2'-deoxy-2'-fluoroadenosine-3'-phosphate
  modified_base 10: mod_base = OTHER; note = 2'-deoxy-2'-fluorocytidine-3'-phosphate
  modified_base 11: mod_base = OTHER; note = 2'-deoxy-2'-fluorocytidine-3'-phosphate
  modified_base 12: mod_base = OTHER; note = 2'-O-methyladenosine-3'-phosphate
  modified_base 13: mod_base = OTHER; note = 2'-O-methylcytidine-3'-phosphate
  modified_base 14: mod_base = OTHER; note = 2'-O-methyladenosine-3'-phosphate
  modified_base 15: mod_base = OTHER; note = 2'-O-methyluridine-3'-phosphate
  modified_base 16: mod_base = OTHER; note = 2'-O-methyladenosine-3'-phosphate
  modified_base 17: mod_base = OTHER; note = 2'-O-methyladenosine-3'-phosphate
  modified_base 18: mod_base = OTHER; note = 2'-O-methyladenosine-3'-phosphate
  modified_base 19: mod_base = OTHER; note = 2'-O-methylguanosine-3'-phosphate
  modified_base 20: mod_base = OTHER; note = 2'-O-methylcytidine-3'-phosphate
  modified_base 21: mod_base = OTHER; note = 2'-O-methyluridine-3'-phosphate ((2S,4R)-1-[29-[[2-(acetylamino)-2-deoxy-beta-D-galactopyra nosyl]oxy]-14,14-bis[[3-[[3-[[5-[[2-(acetylamino)-2-deoxy-b eta-D-galactopyranosyl]oxy]-1-oxopentyl]amino]propyl]amino] -3-oxopropoxy]methyl]-1,12,19,25-tetraoxo-16-oxa-13,20,24-t riazanonacos-1-yl]-4-hydroxy-2-pyrrolidinyl)methyl ester
ggtttgctaccacataaagct

SEQ ID NO: 5003 - RNA, 21 nt, synthetic construct
  source 1..21: mol_type = other RNA
  modified_base 1: mod_base = OTHER; note = 2'-O-methyladenosine-3'-phosphorothioate
  modified_base 2: mod_base = OTHER; note = 2'-O-methylguanosine-3'-phosphorothioate
  modified_base 3: mod_base = OTHER; note = 2'-O-methyluridine-3'-phosphate
  modified_base 4: mod_base = OTHER; note = 2'-O-methylguanosine-3'-phosphate
  modified_base 5: mod_base = OTHER; note = 2'-O-methyluridine-3'-phosphate
  modified_base 6: mod_base = OTHER; note = 2'-O-docosanyl-adenosine-3'-phosphate
  modified_base 7: mod_base = OTHER; note = 2'-deoxy-2'-fluorocytidine-3'-phosphate
  modified_base 8: mod_base = OTHER; note = 2'-O-methyladenosine-3'-phosphate
  modified_base 9: mod_base = OTHER; note = 2'-deoxy-2'-fluoroguanosine-3'-phosphate
  modified_base 10: mod_base = OTHER; note = 2'-deoxy-2'-fluorocytidine-3'-phosphate
  modified_base 11: mod_base = OTHER; note = 2'-deoxy-2'-fluoroadenosine-3'-phosphate
  modified_base 12: mod_base = OTHER; note = 2'-O-methyluridine-3'-phosphate
  modified_base 13: mod_base = OTHER; note = 2'-O-methylcytidine-3'-phosphate
  modified_base 14: mod_base = OTHER; note = 2'-O-methyladenosine-3'-phosphate
  modified_base 15: mod_base = OTHER; note = 2'-O-methyluridine-3'-phosphate
  modified_base 16: mod_base = OTHER; note = 2'-O-methylguanosine-3'-phosphate
  modified_base 17: mod_base = OTHER; note = 2'-O-methylcytidine-3'-phosphate
  modified_base 18: mod_base = OTHER; note = 2'-O-methyluridine-3'-phosphate
  modified_base 19: mod_base = OTHER; note = 2'-O-methylcytidine-3'-phosphate
  modified_base 20: mod_base = OTHER; note = 2'-O-methylcytidine-3'-phosphate
  modified_base 21: mod_base = OTHER; note = 2'-O-methyluridine-3'-phosphate ((2S,4R)-1-[29-[[2-(acetylamino)-2-deoxy-beta-D-galactopyra nosyl]oxy]-14,14-bis[[3-[[3-[[5-[[2-(acetylamino)-2-deoxy-b eta-D-galactopyranosyl]oxy]-1-oxopentyl]amino]propyl]amino] -3-oxopropoxy]methyl]-1,12,19,25-tetraoxo-16-oxa-13,20,24-t riazanonacos-1-yl]-4-hydroxy-2-pyrrolidinyl)methyl ester
agtgtacagcatcatgctcct

SEQ ID NO: 5004 - RNA, 21 nt, synthetic construct
  source 1..21: mol_type = other RNA
  modified_base 1: mod_base = OTHER; note = 2'-O-methyluridine-3'-phosphorothioate
  modified_base 2: mod_base = OTHER; note = 2'-O-methylguanosine-3'-phosphorothioate
  modified_base 3: mod_base = OTHER; note = 2'-O-methylguanosine-3'-phosphate
  modified_base 4: mod_base = OTHER; note = 2'-O-methylcytidine-3'-phosphate
  modified_base 5: mod_base = OTHER; note = 2'-O-methyluridine-3'-phosphate
  modified_base 6: mod_base = OTHER; note = 2'-O-docosanyl-uridine-3'-phosphate
  modified_base 7: mod_base = OTHER; note = 2'-deoxy-2'-fluorocytidine-3'-phosphate
  modified_base 8: mod_base = OTHER; note = 2'-O-methylguanosine-3'-phosphate
  modified_base 9: mod_base = OTHER; note = 2'-deoxy-2'-fluoroadenosine-3'-phosphate
  modified_base 10: mod_base = OTHER; note = 2'-deoxy-2'-fluorocytidine-3'-phosphate
  modified_base 11: mod_base = OTHER; note = 2'-deoxy-2'-fluorocytidine-3'-phosphate
  modified_base 12: mod_base = OTHER; note = 2'-O-methyladenosine-3'-phosphate
  modified_base 13: mod_base = OTHER; note = 2'-O-methylcytidine-3'-phosphate
  modified_base 14: mod_base = OTHER; note = 2'-O-methyladenosine-3'-phosphate
  modified_base 15: mod_base = OTHER; note = 2'-O-methyladenosine-3'-phosphate
  modified_base 16: mod_base = OTHER; note = 2'-O-methylcytidine-3'-phosphate
  modified_base 17: mod_base = OTHER; note = 2'-O-methylcytidine-3'-phosphate
  modified_base 18: mod_base = OTHER; note = 2'-O-methyluridine-3'-phosphate
  modified_base 19: mod_base = OTHER; note = 2'-O-methylguanosine-3'-phosphate
  modified_base 20: mod_base = OTHER; note = 2'-O-methylcytidine-3'-phosphate
  modified_base 21: mod_base = OTHER; note = 2'-O-methyluridine-3'-phosphate ((2S,4R)-1-[29-[[2-(acetylamino)-2-deoxy-beta-D-galactopyra nosyl]oxy]-14,14-bis[[3-[[3-[[5-[[2-(acetylamino)-2-deoxy-b eta-D-galactopyranosyl]oxy]-1-oxopentyl]amino]propyl]amino] -3-oxopropoxy]methyl]-1,12,19,25-tetraoxo-16-oxa-13,20,24-t riazanonacos-1-yl]-4-hydroxy-2-pyrrolidinyl)methyl ester
tggcttcgaccacaacctgct

SEQ ID NO: 5005 - RNA, 21 nt, synthetic construct
  source 1..21: mol_type = other RNA
  modified_base 1: mod_base = OTHER; note = 2'-O-methylcytidine-3'-phosphorothioate
  modified_base 2: mod_base = OTHER; note = 2'-O-methylcytidine-3'-phosphorothioate
  modified_base 3: mod_base = OTHER; note = 2'-O-methyladenosine-3'-phosphate
  modified_base 4: mod_base = OTHER; note = 2'-O-methylguanosine-3'-phosphate
  modified_base 5: mod_base = OTHER; note = 2'-O-methyluridine-3'-phosphate
  modified_base 6: mod_base = OTHER; note = 2'-O-docosanyl-cytidine-3'-phosphate
  modified_base 7: mod_base = OTHER; note = 2'-deoxy-2'-fluoroadenosine-3'-phosphate
  modified_base 8: mod_base = OTHER; note = 2'-O-methyluridine-3'-phosphate
  modified_base 9: mod_base = OTHER; note = 2'-deoxy-2'-fluorouridine-3'-phosphate
  modified_base 10: mod_base = OTHER; note = 2'-deoxy-2'-fluoroguanosine-3'-phosphate
  modified_base 11: mod_base = OTHER; note = 2'-deoxy-2'-fluorocytidine-3'-phosphate
  modified_base 12: mod_base = OTHER; note = 2'-O-methyladenosine-3'-phosphate
  modified_base 13: mod_base = OTHER; note = 2'-O-methyluridine-3'-phosphate
  modified_base 14: mod_base = OTHER; note = 2'-O-methyluridine-3'-phosphate
  modified_base 15: mod_base = OTHER; note = 2'-O-methylcytidine-3'-phosphate
  modified_base 16: mod_base = OTHER; note = 2'-O-methyladenosine-3'-phosphate
  modified_base 17: mod_base = OTHER; note = 2'-O-methylguanosine-3'-phosphate
  modified_base 18: mod_base = OTHER; note = 2'-O-methylcytidine-3'-phosphate
  modified_base 19: mod_base = OTHER; note = 2'-O-methyladenosine-3'-phosphate
  modified_base 20: mod_base = OTHER; note = 2'-O-methylguanosine-3'-phosphate
  modified_base 21: mod_base = OTHER; note = 2'-O-methyluridine-3'-phosphate ((2S,4R)-1-[29-[[2-(acetylamino)-2-deoxy-beta-D-galactopyra nosyl]oxy]-14,14-bis[[3-[[3-[[5-[[2-(acetylamino)-2-deoxy-b eta-D-galactopyranosyl]oxy]-1-oxopentyl]amino]propyl]amino] -3-oxopropoxy]methyl]-1,12,19,25-tetraoxo-16-oxa-13,20,24-t riazanonacos-1-yl]-4-hydroxy-2-pyrrolidinyl)methyl ester
ccagtcattgcattcagcagt

SEQ ID NO: 5006 - RNA, 21 nt, synthetic construct
  source 1..21: mol_type = other RNA
  modified_base 1: mod_base = OTHER; note = 2'-O-methylcytidine-3'-phosphorothioate
  modified_base 2: mod_base = OTHER; note = 2'-O-methyluridine-3'-phosphorothioate
  modified_base 3: mod_base = OTHER; note = 2'-O-methyluridine-3'-phosphate
  modified_base 4: mod_base = OTHER; note = 2'-O-methylcytidine-3'-phosphate
  modified_base 5: mod_base = OTHER; note = 2'-O-methylcytidine-3'-phosphate
  modified_base 6: mod_base = OTHER; note = 2'-O-docosanyl-adenosine-3'-phosphate
  modified_base 7: mod_base = OTHER; note = 2'-deoxy-2'-fluorouridine-3'-phosphate
  modified_base 8: mod_base = OTHER; note = 2'-O-methylguanosine-3'-phosphate
  modified_base 9: mod_base = OTHER; note = 2'-deoxy-2'-fluoroadenosine-3'-phosphate
  modified_base 10: mod_base = OTHER; note = 2'-deoxy-2'-fluorouridine-3'-phosphate
  modified_base 11: mod_base = OTHER; note = 2'-deoxy-2'-fluoroguanosine-3'-phosphate
  modified_base 12: mod_base = OTHER; note = 2'-O-methylcytidine-3'-phosphate
  modified_base 13: mod_base = OTHER; note = 2'-O-methyladenosine-3'-phosphate
  modified_base 14: mod_base = OTHER; note = 2'-O-methylcytidine-3'-phosphate
  modified_base 15: mod_base = OTHER; note = 2'-O-methyladenosine-3'-phosphate
  modified_base 16: mod_base = OTHER; note = 2'-O-methylguanosine-3'-phosphate
  modified_base 17: mod_base = OTHER; note = 2'-O-methyladenosine-3'-phosphate
  modified_base 18: mod_base = OTHER; note = 2'-O-methylcytidine-3'-phosphate
  modified_base 19: mod_base = OTHER; note = 2'-O-methyladenosine-3'-phosphate
  modified_base 20: mod_base = OTHER; note = 2'-O-methylguanosine-3'-phosphate
  modified_base 21: mod_base = OTHER; note = 2'-O-methyluridine-3'-phosphate ((2S,4R)-1-[29-[[2-(acetylamino)-2-deoxy-beta-D-galactopyra nosyl]oxy]-14,14-bis[[3-[[3-[[5-[[2-(acetylamino)-2-deoxy-b eta-D-galactopyranosyl]oxy]-1-oxopentyl]amino]propyl]amino] -3-oxopropoxy]methyl]-1,12,19,25-tetraoxo-16-oxa-13,20,24-t riazanonacos-1-yl]-4-hydroxy-2-pyrrolidinyl)methyl ester
cttccatgatgcacagacagt

SEQ ID NO: 5007 - RNA, 21 nt, synthetic construct
  source 1..21: mol_type = other RNA
  modified_base 1: mod_base = OTHER; note = 2'-O-methylcytidine-3'-phosphorothioate
  modified_base 2: mod_base = OTHER; note = 2'-O-methyladenosine-3'-phosphorothioate
  modified_base 3: mod_base = OTHER; note = 2'-O-methylguanosine-3'-phosphate
  modified_base 4: mod_base = OTHER; note = 2'-O-methylguanosine-3'-phosphate
  modified_base 5: mod_base = OTHER; note = 2'-O-methyladenosine-3'-phosphate
  modified_base 6: mod_base = OTHER; note = 2'-O-docosanyl-guanosine-3'-phosphate
  modified_base 7: mod_base = OTHER; note = 2'-deoxy-2'-fluoroguanosine-3'-phosphate
  modified_base 8: mod_base = OTHER; note = 2'-O-methyladenosine-3'-phosphate
  modified_base 9: mod_base = OTHER; note = 2'-deoxy-2'-fluorouridine-3'-phosphate
  modified_base 10: mod_base = OTHER; note = 2'-deoxy-2'-fluoroadenosine-3'-phosphate
  modified_base 11: mod_base = OTHER; note = 2'-deoxy-2'-fluorocytidine-3'-phosphate
  modified_base 12: mod_base = OTHER; note = 2'-O-methylcytidine-3'-phosphate
  modified_base 13: mod_base = OTHER; note = 2'-O-methyladenosine-3'-phosphate
  modified_base 14: mod_base = OTHER; note = 2'-O-methyladenosine-3'-phosphate
  modified_base 15: mod_base = OTHER; note = 2'-O-methylcytidine-3'-phosphate
  modified_base 16: mod_base = OTHER; note = 2'-O-methyluridine-3'-phosphate
  modified_base 17: mod_base = OTHER; note = 2'-O-methyluridine-3'-phosphate
  modified_base 18: mod_base = OTHER; note = 2'-O-methylguanosine-3'-phosphate
  modified_base 19: mod_base = OTHER; note = 2'-O-methyladenosine-3'-phosphate
  modified_base 20: mod_base = OTHER; note = 2'-O-methyluridine-3'-phosphate
  modified_base 21: mod_base = OTHER; note = 2'-O-methyluridine-3'-phosphate ((2S,4R)-1-[29-[[2-(acetylamino)-2-deoxy-beta-D-galactopyra nosyl]oxy]-14,14-bis[[3-[[3-[[5-[[2-(acetylamino)-2-deoxy-b eta-D-galactopyranosyl]oxy]-1-oxopentyl]amino]propyl]amino] -3-oxopropoxy]methyl]-1,12,19,25-tetraoxo-16-oxa-13,20,24-t riazanonacos-1-yl]-4-hydroxy-2-pyrrolidinyl)methyl ester
caggaggataccaacttgatt

SEQ ID NO: 5008 - RNA, 21 nt, synthetic construct
  source 1..21: mol_type = other RNA
  modified_base 1: mod_base = OTHER; note = 2'-O-methyluridine-3'-phosphorothioate
  modified_base 2: mod_base = OTHER; note = 2'-O-methylguanosine-3'-phosphorothioate
  modified_base 3: mod_base = OTHER; note = 2'-O-methyladenosine-3'-phosphate
  modified_base 4: mod_base = OTHER; note = 2'-O-methyluridine-3'-phosphate
  modified_base 5: mod_base = OTHER; note = 2'-O-methylguanosine-3'-phosphate
  modified_base 6: mod_base = OTHER; note = 2'-O-docosanyl-guanosine-3'-phosphate
  modified_base 7: mod_base = OTHER; note = 2'-deoxy-2'-fluoroadenosine-3'-phosphate
  modified_base 8: mod_base = OTHER; note = 2'-O-methyladenosine-3'-phosphate
  modified_base 9: mod_base = OTHER; note = 2'-deoxy-2'-fluoroadenosine-3'-phosphate
  modified_base 10: mod_base = OTHER; note = 2'-deoxy-2'-fluorocytidine-3'-phosphate
  modified_base 11: mod_base = OTHER; note = 2'-deoxy-2'-fluoroadenosine-3'-phosphate
  modified_base 12: mod_base = OTHER; note = 2'-O-methyladenosine-3'-phosphate
  modified_base 13: mod_base = OTHER; note = 2'-O-methylguanosine-3'-phosphate
  modified_base 14: mod_base = OTHER; note = 2'-O-methylguanosine-3'-phosphate
  modified_base 15: mod_base = OTHER; note = 2'-O-methyladenosine-3'-phosphate
  modified_base 16: mod_base = OTHER; note = 2'-O-methylguanosine-3'-phosphate
  modified_base 17: mod_base = OTHER; note = 2'-O-methyluridine-3'-phosphate
  modified_base 18: mod_base = OTHER; note = 2'-O-methylcytidine-3'-phosphate
  modified_base 19: mod_base = OTHER; note = 2'-O-methyladenosine-3'-phosphate
  modified_base 20: mod_base = OTHER; note = 2'-O-methyladenosine-3'-phosphate
  modified_base 21: mod_base = OTHER; note = 2'-O-methyluridine-3'-phosphate ((2S,4R)-1-[29-[[2-(acetylamino)-2-deoxy-beta-D-galactopyra nosyl]oxy]-14,14-bis[[3-[[3-[[5-[[2-(acetylamino)-2-deoxy-b eta-D-galactopyranosyl]oxy]-1-oxopentyl]amino]propyl]amino] -3-oxopropoxy]methyl]-1,12,19,25-tetraoxo-16-oxa-13,20,24-t riazanonacos-1-yl]-4-hydroxy-2-pyrrolidinyl)methyl ester
tgatggaaacaaggagtcaat

SEQ ID NO: 5009 - RNA, 21 nt, synthetic construct
  source 1..21: mol_type = other RNA
  modified_base 1: mod_base = OTHER; note = 2'-O-methyladenosine-3'-phosphorothioate
  modified_base 2: mod_base = OTHER; note = 2'-O-methyladenosine-3'-phosphorothioate
  modified_base 3: mod_base = OTHER; note = 2'-O-methylguanosine-3'-phosphate
  modified_base 4: mod_base = OTHER; note = 2'-O-methylcytidine-3'-phosphate
  modified_base 5: mod_base = OTHER; note = 2'-O-methyladenosine-3'-phosphate
  modified_base 6: mod_base = OTHER; note = 2'-O-docosanyl-adenosine-3'-phosphate
  modified_base 7: mod_base = OTHER; note = 2'-deoxy-2'-fluoroguanosine-3'-phosphate
  modified_base 8: mod_base = OTHER; note = 2'-O-methyladenosine-3'-phosphate
  modified_base 9: mod_base = OTHER; note = 2'-deoxy-2'-fluoroadenosine-3'-phosphate
  modified_base 10: mod_base = OTHER; note = 2'-deoxy-2'-fluorouridine-3'-phosphate
  modified_base 11: mod_base = OTHER; note = 2'-deoxy-2'-fluorocytidine-3'-phosphate
  modified_base 12: mod_base = OTHER; note = 2'-O-methyladenosine-3'-phosphate
  modified_base 13: mod_base = OTHER; note = 2'-O-methylguanosine-3'-phosphate
  modified_base 14: mod_base = OTHER; note = 2'-O-methyluridine-3'-phosphate
  modified_base 15: mod_base = OTHER; note = 2'-O-methyluridine-3'-phosphate
  modified_base 16: mod_base = OTHER; note = 2'-O-methylguanosine-3'-phosphate
  modified_base 17: mod_base = OTHER; note = 2'-O-methylguanosine-3'-phosphate
  modified_base 18: mod_base = OTHER; note = 2'-O-methyluridine-3'-phosphate
  modified_base 19: mod_base = OTHER; note = 2'-O-methyluridine-3'-phosphate
  modified_base 20: mod_base = OTHER; note = 2'-O-methyluridine-3'-phosphate
  modified_base 21: mod_base = OTHER; note = 2'-O-methyluridine-3'-phosphate ((2S,4R)-1-[29-[[2-(acetylamino)-2-deoxy-beta-D-galactopyra nosyl]oxy]-14,14-bis[[3-[[3-[[5-[[2-(acetylamino)-2-deoxy-b eta-D-galactopyranosyl]oxy]-1-oxopentyl]amino]propyl]amino] -3-oxopropoxy]methyl]-1,12,19,25-tetraoxo-16-oxa-13,20,24-t riazanonacos-1-yl]-4-hydroxy-2-pyrrolidinyl)methyl ester
aagcaagaatcagttggtttt

SEQ ID NO: 5010 - RNA, 21 nt, synthetic construct
  source 1..21: mol_type = other RNA
  modified_base 1: mod_base = OTHER; note = 2'-O-methylcytidine-3'-phosphorothioate
  modified_base 2: mod_base = OTHER; note = 2'-O-methyladenosine-3'-phosphorothioate
  modified_base 3: mod_base = OTHER; note = 2'-O-methyladenosine-3'-phosphate
  modified_base 4: mod_base = OTHER; note = 2'-O-methylcytidine-3'-phosphate
  modified_base 5: mod_base = OTHER; note = 2'-O-methyluridine-3'-phosphate
  modified_base 6: mod_base = OTHER; note = 2'-O-docosanyl-guanosine-3'-phosphate
  modified_base 7: mod_base = OTHER; note = 2'-deoxy-2'-fluorocytidine-3'-phosphate
  modified_base 8: mod_base = OTHER; note = 2'-O-methyluridine-3'-phosphate
  modified_base 9: mod_base = OTHER; note = 2'-deoxy-2'-fluorouridine-3'-phosphate
  modified_base 10: mod_base = OTHER; note = 2'-deoxy-2'-fluoroguanosine-3'-phosphate
  modified_base 11: mod_base = OTHER; note = 2'-deoxy-2'-fluorocytidine-3'-phosphate
  modified_base 12: mod_base = OTHER; note = 2'-O-methylcytidine-3'-phosphate
  modified_base 13: mod_base = OTHER; note = 2'-O-methyladenosine-3'-phosphate
  modified_base 14: mod_base = OTHER; note = 2'-O-methylcytidine-3'-phosphate
  modified_base 15: mod_base = OTHER; note = 2'-O-methyluridine-3'-phosphate
  modified_base 16: mod_base = OTHER; note = 2'-O-methylcytidine-3'-phosphate
  modified_base 17: mod_base = OTHER; note = 2'-O-methylguanosine-3'-phosphate
  modified_base 18: mod_base = OTHER; note = 2'-O-methyluridine-3'-phosphate
  modified_base 19: mod_base = OTHER; note = 2'-O-methylcytidine-3'-phosphate
  modified_base 20: mod_base = OTHER; note = 2'-O-methylcytidine-3'-phosphate
  modified_base 21: mod_base = OTHER; note = 2'-O-methyluridine-3'-phosphate ((2S,4R)-1-[29-[[2-(acetylamino)-2-deoxy-beta-D-galactopyra nosyl]oxy]-14,14-bis[[3-[[3-[[5-[[2-(acetylamino)-2-deoxy-b eta-D-galactopyranosyl]oxy]-1-oxopentyl]amino]propyl]amino] -3-oxopropoxy]methyl]-1,12,19,25-tetraoxo-16-oxa-13,20,24-t riazanonacos-1-yl]-4-hydroxy-2-pyrrolidinyl)methyl ester
caactgcttgccactcgtcct

SEQ ID NO: 5011 - RNA, 21 nt, synthetic construct
  source 1..21: mol_type = other RNA
  modified_base 1: mod_base = OTHER; note = 2'-O-methylguanosine-3'-phosphorothioate
  modified_base 2: mod_base = OTHER; note = 2'-O-methyluridine-3'-phosphorothioate
  modified_base 3: mod_base = OTHER; note = 2'-O-methylguanosine-3'-phosphate
  modified_base 4: mod_base = OTHER; note = 2'-O-methyluridine-3'-phosphate
  modified_base 5: mod_base = OTHER; note = 2'-O-methyluridine-3'-phosphate
  modified_base 6: mod_base = OTHER; note = 2'-O-docosanyl-guanosine-3'-phosphate
  modified_base 7: mod_base = OTHER; note = 2'-deoxy-2'-fluoroadenosine-3'-phosphate
  modified_base 8: mod_base = OTHER; note = 2'-O-methyladenosine-3'-phosphate
  modified_base 9: mod_base = OTHER; note = 2'-deoxy-2'-fluoroguanosine-3'-phosphate
  modified_base 10: mod_base = OTHER; note = 2'-deoxy-2'-fluorouridine-3'-phosphate
  modified_base 11: mod_base = OTHER; note = 2'-deoxy-2'-fluoroadenosine-3'-phosphate
  modified_base 12: mod_base = OTHER; note = 2'-O-methyluridine-3'-phosphate
  modified_base 13: mod_base = OTHER; note = 2'-O-methyluridine-3'-phosphate
  modified_base 14: mod_base = OTHER; note = 2'-O-methyladenosine-3'-phosphate
  modified_base 15: mod_base = OTHER; note = 2'-O-methylcytidine-3'-phosphate
  modified_base 16: mod_base = OTHER; note = 2'-O-methyluridine-3'-phosphate
  modified_base 17: mod_base = OTHER; note = 2'-O-methylguanosine-3'-phosphate
  modified_base 18: mod_base = OTHER; note = 2'-O-methyluridine-3'-phosphate
  modified_base 19: mod_base = OTHER; note = 2'-O-methyladenosine-3'-phosphate
  modified_base 20: mod_base = OTHER; note = 2'-O-methylguanosine-3'-phosphate
  modified_base 21: mod_base = OTHER; note = 2'-O-methyluridine-3'-phosphate ((2S,4R)-1-[29-[[2-(acetylamino)-2-deoxy-beta-D-galactopyra nosyl]oxy]-14,14-bis[[3-[[3-[[5-[[2-(acetylamino)-2-deoxy-b eta-D-galactopyranosyl]oxy]-1-oxopentyl]amino]propyl]amino] -3-oxopropoxy]methyl]-1,12,19,25-tetraoxo-16-oxa-13,20,24-t riazanonacos-1-yl]-4-hydroxy-2-pyrrolidinyl)methyl ester
gtgttgaagtattactgtagt

SEQ ID NO: 5012 - RNA, 21 nt, synthetic construct
  source 1..21: mol_type = other RNA
  modified_base 1: mod_base = OTHER; note = 2'-O-methyluridine-3'-phosphorothioate
  modified_base 2: mod_base = OTHER; note = 2'-O-methyluridine-3'-phosphorothioate
  modified_base 3: mod_base = OTHER; note = 2'-O-methyladenosine-3'-phosphate
  modified_base 4: mod_base = OTHER; note = 2'-O-methylcytidine-3'-phosphate
  modified_base 5: mod_base = OTHER; note = 2'-O-methyluridine-3'-phosphate
  modified_base 6: mod_base = OTHER; note = 2'-O-docosanyl-guanosine-3'-phosphate
  modified_base 7: mod_base = OTHER; note = 2'-deoxy-2'-fluorouridine-3'-phosphate
  modified_base 8: mod_base = OTHER; note = 2'-O-methyluridine-3'-phosphate
  modified_base 9: mod_base = OTHER; note = 2'-deoxy-2'-fluoroguanosine-3'-phosphate
  modified_base 10: mod_base = OTHER; note = 2'-deoxy-2'-fluoroguanosine-3'-phosphate
  modified_base 11: mod_base = OTHER; note = 2'-deoxy-2'-fluorocytidine-3'-phosphate
  modified_base 12: mod_base = OTHER; note = 2'-O-methyladenosine-3'-phosphate
  modified_base 13: mod_base = OTHER; note = 2'-O-methyladenosine-3'-phosphate
  modified_base 14: mod_base = OTHER; note = 2'-O-methyladenosine-3'-phosphate
  modified_base 15: mod_base = OTHER; note = 2'-O-methyladenosine-3'-phosphate
  modified_base 16: mod_base = OTHER; note = 2'-O-methylcytidine-3'-phosphate
  modified_base 17: mod_base = OTHER; note = 2'-O-methyladenosine-3'-phosphate
  modified_base 18: mod_base = OTHER; note = 2'-O-methyladenosine-3'-phosphate
  modified_base 19: mod_base = OTHER; note = 2'-O-methyluridine-3'-phosphate
  modified_base 20: mod_base = OTHER; note = 2'-O-methyladenosine-3'-phosphate
  modified_base 21: mod_base = OTHER; note = 2'-O-methyluridine-3'-phosphate ((2S,4R)-1-[29-[[2-(acetylamino)-2-deoxy-beta-D-galactopyra nosyl]oxy]-14,14-bis[[3-[[3-[[5-[[2-(acetylamino)-2-deoxy-b eta-D-galactopyranosyl]oxy]-1-oxopentyl]amino]propyl]amino] -3-oxopropoxy]methyl]-1,12,19,25-tetraoxo-16-oxa-13,20,24-t riazanonacos-1-yl]-4-hydroxy-2-pyrrolidinyl)methyl ester
ttactgttggcaaaacaatat

SEQ ID NO: 5013 - RNA, 21 nt, synthetic construct
  source 1..21: mol_type = other RNA
  modified_base 1: mod_base = OTHER; note = 2'-O-methylcytidine-3'-phosphorothioate
  modified_base 2: mod_base = OTHER; note = 2'-O-methyladenosine-3'-phosphorothioate
  modified_base 3: mod_base = OTHER; note = 2'-O-methylguanosine-3'-phosphate
  modified_base 4: mod_base = OTHER; note = 2'-O-methyluridine-3'-phosphate
  modified_base 5: mod_base = OTHER; note = 2'-O-methylguanosine-3'-phosphate
  modified_base 6: mod_base = OTHER; note = 2'-O-docosanyl-uridine-3'-phosphate
  modified_base 7: mod_base = OTHER; note = 2'-deoxy-2'-fluoroguanosine-3'-phosphate
  modified_base 8: mod_base = OTHER; note = 2'-O-methyluridine-3'-phosphate
  modified_base 9: mod_base = OTHER; note = 2'-deoxy-2'-fluorocytidine-3'-phosphate
  modified_base 10: mod_base = OTHER; note = 2'-deoxy-2'-fluorocytidine-3'-phosphate
  modified_base 11: mod_base = OTHER; note = 2'-deoxy-2'-fluorouridine-3'-phosphate
  modified_base 12: mod_base = OTHER; note = 2'-O-methyladenosine-3'-phosphate
  modified_base 13: mod_base = OTHER; note = 2'-O-methylcytidine-3'-phosphate
  modified_base 14: mod_base = OTHER; note = 2'-O-methyluridine-3'-phosphate
  modified_base 15: mod_base = OTHER; note = 2'-O-methylcytidine-3'-phosphate
  modified_base 16: mod_base = OTHER; note = 2'-O-methyluridine-3'-phosphate
  modified_base 17: mod_base = OTHER; note = 2'-O-methylguanosine-3'-phosphate
  modified_base 18: mod_base = OTHER; note = 2'-O-methylguanosine-3'-phosphate
  modified_base 19: mod_base = OTHER; note = 2'-O-methyluridine-3'-phosphate
  modified_base 20: mod_base = OTHER; note = 2'-O-methylcytidine-3'-phosphate
  modified_base 21: mod_base = OTHER; note = 2'-O-methyluridine-3'-phosphate ((2S,4R)-1-[29-[[2-(acetylamino)-2-deoxy-beta-D-galactopyra nosyl]oxy]-14,14-bis[[3-[[3-[[5-[[2-(acetylamino)-2-deoxy-b eta-D-galactopyranosyl]oxy]-1-oxopentyl]amino]propyl]amino] -3-oxopropoxy]methyl]-1,12,19,25-tetraoxo-16-oxa-13,20,24-t riazanonacos-1-yl]-4-hydroxy-2-pyrrolidinyl)methyl ester
cagtgtgtcctactctggtct

SEQ ID NO: 5014 - RNA, 21 nt, synthetic construct
  source 1..21: mol_type = other RNA
  modified_base 1: mod_base = OTHER; note = 2'-O-methyladenosine-3'-phosphorothioate
  modified_base 2: mod_base = OTHER; note = 2'-O-methylguanosine-3'-phosphorothioate
  modified_base 3: mod_base = OTHER; note = 2'-O-methyladenosine-3'-phosphate
  modified_base 4: mod_base = OTHER; note = 2'-O-methyladenosine-3'-phosphate
  modified_base 5: mod_base = OTHER; note = 2'-O-methyladenosine-3'-phosphate
  modified_base 6: mod_base = OTHER; note = 2'-O-docosanyl-cytidine-3'-phosphate
  modified_base 7: mod_base = OTHER; note = 2'-deoxy-2'-fluorocytidine-3'-phosphate
  modified_base 8: mod_base = OTHER; note = 2'-O-methyladenosine-3'-phosphate
  modified_base 9: mod_base = OTHER; note = 2'-deoxy-2'-fluoroguanosine-3'-phosphate
  modified_base 10: mod_base = OTHER; note = 2'-deoxy-2'-fluoroadenosine-3'-phosphate
  modified_base 11: mod_base = OTHER; note = 2'-deoxy-2'-fluorouridine-3'-phosphate
  modified_base 12: mod_base = OTHER; note = 2'-O-methylguanosine-3'-phosphate
  modified_base 13: mod_base = OTHER; note = 2'-O-methylguanosine-3'-phosphate
  modified_base 14: mod_base = OTHER; note = 2'-O-methyladenosine-3'-phosphate
  modified_base 15: mod_base = OTHER; note = 2'-O-methylguanosine-3'-phosphate
  modified_base 16: mod_base = OTHER; note = 2'-O-methyluridine-3'-phosphate
  modified_base 17: mod_base = OTHER; note = 2'-O-methyladenosine-3'-phosphate
  modified_base 18: mod_base = OTHER; note = 2'-O-methyladenosine-3'-phosphate
  modified_base 19: mod_base = OTHER; note = 2'-O-methyladenosine-3'-phosphate
  modified_base 20: mod_base = OTHER; note = 2'-O-methylguanosine-3'-phosphate
  modified_base 21: mod_base = OTHER; note = 2'-O-methyluridine-3'-phosphate ((2S,4R)-1-[29-[[2-(acetylamino)-2-deoxy-beta-D-galactopyra nosyl]oxy]-14,14-bis[[3-[[3-[[5-[[2-(acetylamino)-2-deoxy-b eta-D-galactopyranosyl]oxy]-1-oxopentyl]amino]propyl]amino] -3-oxopropoxy]methyl]-1,12,19,25-tetraoxo-16-oxa-13,20,24-t riazanonacos-1-yl]-4-hydroxy-2-pyrrolidinyl)methyl ester
agaaaccagatggagtaaagt

SEQ ID NO: 5015 - RNA, 21 nt, synthetic construct
  source 1..21: mol_type = other RNA
  modified_base 1: mod_base = OTHER; note = 2'-O-methylguanosine-3'-phosphorothioate
  modified_base 2: mod_base = OTHER; note = 2'-O-methylcytidine-3'-phosphorothioate
  modified_base 3: mod_base = OTHER; note = 2'-O-methyluridine-3'-phosphate
  modified_base 4: mod_base = OTHER; note = 2'-O-methylcytidine-3'-phosphate
  modified_base 5: mod_base = OTHER; note = 2'-O-methylcytidine-3'-phosphate
  modified_base 6: mod_base = OTHER; note = 2'-O-docosanyl-adenosine-3'-phosphate
  modified_base 7: mod_base = OTHER; note = 2'-deoxy-2'-fluorocytidine-3'-phosphate
  modified_base 8: mod_base = OTHER; note = 2'-O-methyladenosine-3'-phosphate
  modified_base 9: mod_base = OTHER; note = 2'-deoxy-2'-fluoroguanosine-3'-phosphate
  modified_base 10: mod_base = OTHER; note = 2'-deoxy-2'-fluorocytidine-3'-phosphate
  modified_base 11: mod_base = OTHER; note = 2'-deoxy-2'-fluoroadenosine-3'-phosphate
  modified_base 12: mod_base = OTHER; note = 2'-O-methyladenosine-3'-phosphate
  modified_base 13: mod_base = OTHER; note = 2'-O-methyladenosine-3'-phosphate
  modified_base 14: mod_base = OTHER; note = 2'-O-methylcytidine-3'-phosphate
  modified_base 15: mod_base = OTHER; note = 2'-O-methylcytidine-3'-phosphate
  modified_base 16: mod_base = OTHER; note = 2'-O-methyluridine-3'-phosphate
  modified_base 17: mod_base = OTHER; note = 2'-O-methyluridine-3'-phosphate
  modified_base 18: mod_base = OTHER; note = 2'-O-methylcytidine-3'-phosphate
  modified_base 19: mod_base = OTHER; note = 2'-O-methylcytidine-3'-phosphate
  modified_base 20: mod_base = OTHER; note = 2'-O-methyluridine-3'-phosphate
  modified_base 21: mod_base = OTHER; note = 2'-O-methyluridine-3'-phosphate ((2S,4R)-1-[29-[[2-(acetylamino)-2-deoxy-beta-D-galactopyra nosyl]oxy]-14,14-bis[[3-[[3-[[5-[[2-(acetylamino)-2-deoxy-b eta-D-galactopyranosyl]oxy]-1-oxopentyl]amino]propyl]amino] -3-oxopropoxy]methyl]-1,12,19,25-tetraoxo-16-oxa-13,20,24-t riazanonacos-1-yl]-4-hydroxy-2-pyrrolidinyl)methyl ester
gctccacagcaaaccttcctt

SEQ ID NO: 5016 - RNA, 21 nt, synthetic construct
  source 1..21: mol_type = other RNA
  modified_base 1: mod_base = OTHER; note = 2'-O-methylguanosine-3'-phosphorothioate
  modified_base 2: mod_base = OTHER; note = 2'-O-methyladenosine-3'-phosphorothioate
  modified_base 3: mod_base = OTHER; note = 2'-O-methylcytidine-3'-phosphate
  modified_base 4: mod_base = OTHER; note = 2'-O-methyluridine-3'-phosphate
  modified_base 5: mod_base = OTHER; note = 2'-O-methyluridine-3'-phosphate
  modified_base 6: mod_base = OTHER; note = 2'-O-docosanyl-uridine-3'-phosphate
  modified_base 7: mod_base = OTHER; note = 2'-deoxy-2'-fluoroguanosine-3'-phosphate
  modified_base 8: mod_base = OTHER; note = 2'-O-methyladenosine-3'-phosphate
  modified_base 9: mod_base = OTHER; note = 2'-deoxy-2'-fluoroadenosine-3'-phosphate
  modified_base 10: mod_base = OTHER; note = 2'-deoxy-2'-fluoroguanosine-3'-phosphate
  modified_base 11: mod_base = OTHER; note = 2'-deoxy-2'-fluorocytidine-3'-phosphate
  modified_base 12: mod_base = OTHER; note = 2'-O-methylcytidine-3'-phosphate
  modified_base 13: mod_base = OTHER; note = 2'-O-methyluridine-3'-phosphate
  modified_base 14: mod_base = OTHER; note = 2'-O-methyladenosine-3'-phosphate
  modified_base 15: mod_base = OTHER; note = 2'-O-methylcytidine-3'-phosphate
  modified_base 16: mod_base = OTHER; note = 2'-O-methyladenosine-3'-phosphate
  modified_base 17: mod_base = OTHER; note = 2'-O-methylcytidine-3'-phosphate
  modified_base 18: mod_base = OTHER; note = 2'-O-methyladenosine-3'-phosphate
  modified_base 19: mod_base = OTHER; note = 2'-O-methyladenosine-3'-phosphate
  modified_base 20: mod_base = OTHER; note = 2'-O-methyladenosine-3'-phosphate
  modified_base 21: mod_base = OTHER; note = 2'-O-methyluridine-3'-phosphate ((2S,4R)-1-[29-[[2-(acetylamino)-2-deoxy-beta-D-galactopyra nosyl]oxy]-14,14-bis[[3-[[3-[[5-[[2-(acetylamino)-2-deoxy-b eta-D-galactopyranosyl]oxy]-1-oxopentyl]amino]propyl]amino] -3-oxopropoxy]methyl]-1,12,19,25-tetraoxo-16-oxa-13,20,24-t riazanonacos-1-yl]-4-hydroxy-2-pyrrolidinyl)methyl ester
gactttgaagcctacacaaat

SEQ ID NO: 5017 - RNA, 23 nt, synthetic construct
  source 1..23: mol_type = other RNA
  modified_base 1: mod_base = OTHER; note = 2'-O-methyladenosine-3'-phosphorothioate
  modified_base 2: mod_base = OTHER; note = 2'-deoxy-2'-fluoroadenosine-3'-phosphorothioate
  modified_base 3: mod_base = OTHER; note = 2'-O-methylguanosine-3'-phosphate
  modified_base 4: mod_base = OTHER; note = 2'-O-methyluridine-3'-phosphate
  modified_base 5: mod_base = OTHER; note = 2'-O-methyladenosine-3'-phosphate
  modified_base 6: mod_base = OTHER; note = 2'-deoxy-2'-fluoroadenosine-3'-phosphate
  modified_base 7: mod_base = OTHER; note = 2'-O-methyluridine-3'-phosphate
  modified_base 8: mod_base = OTHER; note = 2'-deoxy-2'-fluorouridine-3'-phosphate
  modified_base 9: mod_base = OTHER; note = 2'-deoxy-2'-fluorouridine-3'-phosphate
  modified_base 10: mod_base = OTHER; note = 2'-O-methyladenosine-3'-phosphate
  modified_base 11: mod_base = OTHER; note = 2'-O-methyladenosine-3'-phosphate
  modified_base 12: mod_base = OTHER; note = 2'-O-methylguanosine-3'-phosphate
  modified_base 13: mod_base = OTHER; note = 2'-O-methyluridine-3'-phosphate
  modified_base 14: mod_base = OTHER; note = 2'-deoxy-2'-fluorouridine-3'-phosphate
  modified_base 15: mod_base = OTHER; note = 2'-O-methyluridine-3'-phosphate
  modified_base 16: mod_base = OTHER; note = 2'-deoxy-2'-fluoroguanosine-3'-phosphate
  modified_base 17: mod_base = OTHER; note = 2'-O-methyluridine-3'-phosphate
  modified_base 18: mod_base = OTHER; note = 2'-O-methylguanosine-3'-phosphate
  modified_base 19: mod_base = OTHER; note = 2'-O-methyluridine-3'-phosphate
  modified_base 20: mod_base = OTHER; note = 2'-O-methylguanosine-3'-phosphate
  modified_base 21: mod_base = OTHER; note = 2'-O-methylguanosine-3'-phosphorothioate
  modified_base 22: mod_base = OTHER; note = 2'-O-methyladenosine-3'-phosphorothioate
  modified_base 23: mod_base = OTHER; note = 2'-O-methyladenosine
aagtaatttaagtttgtgtggaa

SEQ ID NO: 5018 - RNA, 23 nt, synthetic construct
  source 1..23: mol_type = other RNA
  modified_base 1: mod_base = OTHER; note = 2'-O-methyladenosine-3'-phosphorothioate
  modified_base 2: mod_base = OTHER; note = 2'-deoxy-2'-fluoroguanosine-3'-phosphorothioate
  modified_base 3: mod_base = OTHER; note = 2'-O-methyladenosine-3'-phosphate
  modified_base 4: mod_base = OTHER; note = 2'-O-methyladenosine-3'-phosphate
  modified_base 5: mod_base = OTHER; note = 2'-O-methylguanosine-3'-phosphate
  modified_base 6: mod_base = OTHER; note = 2'-deoxy-2'-fluoroadenosine-3'-phosphate
  modified_base 7: mod_base = OTHER; note = 2'-O-methyluridine-3'-phosphate
  modified_base 8: mod_base = OTHER; note = 2'-deoxy-2'-fluoroguanosine-3'-phosphate
  modified_base 9: mod_base = OTHER; note = 2'-deoxy-2'-fluoroadenosine-3'-phosphate
  modified_base 10: mod_base = OTHER; note = 2'-O-methyluridine-3'-phosphate
  modified_base 11: mod_base = OTHER; note = 2'-O-methylcytidine-3'-phosphate
  modified_base 12: mod_base = OTHER; note = 2'-O-methyladenosine-3'-phosphate
  modified_base 13: mod_base = OTHER; note = 2'-O-methyladenosine-3'-phosphate
  modified_base 14: mod_base = OTHER; note = 2'-deoxy-2'-fluoroadenosine-3'-phosphate
  modified_base 15: mod_base = OTHER; note = 2'-O-methyladenosine-3'-phosphate
  modified_base 16: mod_base = OTHER; note = 2'-deoxy-2'-fluoroguanosine-3'-phosphate
  modified_base 17: mod_base = OTHER; note = 2'-O-methyluridine-3'-phosphate
  modified_base 18: mod_base = OTHER; note = 2'-O-methylguanosine-3'-phosphate
  modified_base 19: mod_base = OTHER; note = 2'-O-methylcytidine-3'-phosphate
  modified_base 20: mod_base = OTHER; note = 2'-O-methyluridine-3'-phosphate
  modified_base 21: mod_base = OTHER; note = 2'-O-methyladenosine-3'-phosphorothioate
  modified_base 22: mod_base = OTHER; note = 2'-O-methylguanosine-3'-phosphorothioate
  modified_base 23: mod_base = OTHER; note = 2'-O-methyluridine
agaagatgatcaaaagtgctagt

SEQ ID NO: 5019 - RNA, 23 nt, synthetic construct
  source 1..23: mol_type = other RNA
  modified_base 1: mod_base = OTHER; note = 2'-O-methyladenosine-3'-phosphorothioate
  modified_base 2: mod_base = OTHER; note = 2'-deoxy-2'-fluorouridine-3'-phosphorothioate
  modified_base 3: mod_base = OTHER; note = 2'-O-methyladenosine-3'-phosphate
  modified_base 4: mod_base = OTHER; note = 2'-O-methyladenosine-3'-phosphate
  modified_base 5: mod_base = OTHER; note = 2'-O-methylguanosine-3'-phosphate
  modified_base 6: mod_base = OTHER; note = 2'-deoxy-2'-fluorocytidine-3'-phosphate
  modified_base 7: mod_base = OTHER; note = 2'-O-methyladenosine-3'-phosphate
  modified_base 8: mod_base = OTHER; note = 2'-deoxy-2'-fluorouridine-3'-phosphate
  modified_base 9: mod_base = OTHER; note = 2'-deoxy-2'-fluorouridine-3'-phosphate
  modified_base 10: mod_base = OTHER; note = 2'-O-methyluridine-3'-phosphate
  modified_base 11: mod_base = OTHER; note = 2'-O-methyluridine-3'-phosphate
  modified_base 12: mod_base = OTHER; note = 2'-O-methyladenosine-3'-phosphate
  modified_base 13: mod_base = OTHER; note = 2'-O-methyluridine-3'-phosphate
  modified_base 14: mod_base = OTHER; note = 2'-deoxy-2'-fluorouridine-3'-phosphate
  modified_base 15: mod_base = OTHER; note = 2'-O-methylguanosine-3'-phosphate
  modified_base 16: mod_base = OTHER; note = 2'-deoxy-2'-fluoroadenosine-3'-phosphate
  modified_base 17: mod_base = OTHER; note = 2'-O-methyluridine-3'-phosphate
  modified_base 18: mod_base = OTHER; note = 2'-O-methylguanosine-3'-phosphate
  modified_base 19: mod_base = OTHER; note = 2'-O-methyladenosine-3'-phosphate
  modified_base 20: mod_base = OTHER; note = 2'-O-methylguanosine-3'-phosphate
  modified_base 21: mod_base = OTHER; note = 2'-O-methylguanosine-3'-phosphorothioate
  modified_base 22: mod_base = OTHER; note = 2'-O-methyluridine-3'-phosphorothioate
  modified_base 23: mod_base = OTHER; note = 2'-O-methylcytidine
ataagcattttattgatgaggtc

SEQ ID NO: 5020 - RNA, 23 nt, synthetic construct
  source 1..23: mol_type = other RNA
  modified_base 1: mod_base = OTHER; note = 2'-O-methyladenosine-3'-phosphorothioate
  modified_base 2: mod_base = OTHER; note = 2'-deoxy-2'-fluoroguanosine-3'-phosphorothioate
  modified_base 3: mod_base = OTHER; note = 2'-O-methyluridine-3'-phosphate
  modified_base 4: mod_base = OTHER; note = 2'-O-methyluridine-3'-phosphate
  modified_base 5: mod_base = OTHER; note = 2'-O-methyladenosine-3'-phosphate
  modified_base 6: mod_base = OTHER; note = 2'-deoxy-2'-fluoroadenosine-3'-phosphate
  modified_base 7: mod_base = OTHER; note = 2'-O-methyladenosine-3'-phosphate
  modified_base 8: mod_base = OTHER; note = 2'-deoxy-2'-fluoroadenosine-3'-phosphate
  modified_base 9: mod_base = OTHER; note = 2'-deoxy-2'-fluorouridine-3'-phosphate
  modified_base 10: mod_base = OTHER; note = 2'-O-methyladenosine-3'-phosphate
  modified_base 11: mod_base = OTHER; note = 2'-O-methyladenosine-3'-phosphate
  modified_base 12: mod_base = OTHER; note = 2'-O-methylcytidine-3'-phosphate
  modified_base 13: mod_base = OTHER; note = 2'-O-methyladenosine-3'-phosphate
  modified_base 14: mod_base = OTHER; note = 2'-deoxy-2'-fluoroadenosine-3'-phosphate
  modified_base 15: mod_base = OTHER; note = 2'-O-methyluridine-3'-phosphate
  modified_base 16: mod_base = OTHER; note = 2'-deoxy-2'-fluoroguanosine-3'-phosphate
  modified_base 17: mod_base = OTHER; note = 2'-O-methyladenosine-3'-phosphate
  modified_base 18: mod_base = OTHER; note = 2'-O-methyluridine-3'-phosphate
  modified_base 19: mod_base = OTHER; note = 2'-O-methylguanosine-3'-phosphate
  modified_base 20: mod_base = OTHER; note = 2'-O-methylguanosine-3'-phosphate
  modified_base 21: mod_base = OTHER; note = 2'-O-methyladenosine-3'-phosphorothioate
  modified_base 22: mod_base = OTHER; note = 2'-O-methylguanosine-3'-phosphorothioate
  modified_base 23: mod_base = OTHER; note = 2'-O-methyladenosine
agttaaaataacaatgatggaga

SEQ ID NO: 5021 - RNA, 23 nt, synthetic construct
  source 1..23: mol_type = other RNA
  modified_base 1: mod_base = OTHER; note = 2'-O-methyladenosine-3'-phosphorothioate
  modified_base 2: mod_base = OTHER; note = 2'-deoxy-2'-fluoroguanosine-3'-phosphorothioate
  modified_base 3: mod_base = OTHER; note = 2'-O-methyluridine-3'-phosphate
  modified_base 4: mod_base = OTHER; note = 2'-O-methyluridine-3'-phosphate
  modified_base 5: mod_base = OTHER; note = 2'-O-methyluridine-3'-phosphate
  modified_base 6: mod_base = OTHER; note = 2'-deoxy-2'-fluoroadenosine-3'-phosphate
  modified_base 7: mod_base = OTHER; note = 2'-O-methylguanosine-3'-phosphate
  modified_base 8: mod_base = OTHER; note = 2'-deoxy-2'-fluoroadenosine-3'-phosphate
  modified_base 9: mod_base = OTHER; note = 2'-deoxy-2'-fluoroadenosine-3'-phosphate
  modified_base 10: mod_base = OTHER; note = 2'-O-methyluridine-3'-phosphate
  modified_base 11: mod_base = OTHER; note = 2'-O-methyladenosine-3'-phosphate
  modified_base 12: mod_base = OTHER; note = 2'-O-methyladenosine-3'-phosphate
  modified_base 13: mod_base = OTHER; note = 2'-O-methyluridine-3'-phosphate
  modified_base 14: mod_base = OTHER; note = 2'-deoxy-2'-fluoroadenosine-3'-phosphate
  modified_base 15: mod_base = OTHER; note = 2'-O-methylguanosine-3'-phosphate
  modified_base 16: mod_base = OTHER; note = 2'-deoxy-2'-fluorouridine-3'-phosphate
  modified_base 17: mod_base = OTHER; note = 2'-O-methylguanosine-3'-phosphate
  modified_base 18: mod_base = OTHER; note = 2'-O-methyluridine-3'-phosphate
  modified_base 19: mod_base = OTHER; note = 2'-O-methylguanosine-3'-phosphate
  modified_base 20: mod_base = OTHER; note = 2'-O-methylguanosine-3'-phosphate
  modified_base 21: mod_base = OTHER; note = 2'-O-methyladenosine-3'-phosphorothioate
  modified_base 22: mod_base = OTHER; note = 2'-O-methyluridine-3'-phosphorothioate
  modified_base 23: mod_base = OTHER; note = 2'-O-methyluridine
agtttagaataatagtgtggatt

SEQ ID NO: 5022 - RNA, 23 nt, synthetic construct
  source 1..23: mol_type = other RNA
  modified_base 1: mod_base = OTHER; note = 2'-O-methyladenosine-3'-phosphorothioate
  modified_base 2: mod_base = OTHER; note = 2'-deoxy-2'-fluorouridine-3'-phosphorothioate
  modified_base 3: mod_base = OTHER; note = 2'-O-methyluridine-3'-phosphate
  modified_base 4: mod_base = OTHER; note = 2'-O-methyluridine-3'-phosphate
  modified_base 5: mod_base = OTHER; note = 2'-O-methyladenosine-3'-phosphate
  modified_base 6: mod_base = OTHER; note = 2'-deoxy-2'-fluoroguanosine-3'-phosphate
  modified_base 7: mod_base = OTHER; note = 2'-O-methyladenosine-3'-phosphate
  modified_base 8: mod_base = OTHER; note = 2'-deoxy-2'-fluoroguanosine-3'-phosphate
  modified_base 9: mod_base = OTHER; note = 2'-deoxy-2'-fluoroadenosine-3'-phosphate
  modified_base 10: mod_base = OTHER; note = 2'-O-methyladenosine-3'-phosphate
  modified_base 11: mod_base = OTHER; note = 2'-O-methylguanosine-3'-phosphate
  modified_base 12: mod_base = OTHER; note = 2'-O-methylcytidine-3'-phosphate
  modified_base 13: mod_base = OTHER; note = 2'-O-methyluridine-3'-phosphate
  modified_base 14: mod_base = OTHER; note = 2'-deoxy-2'-fluorouridine-3'-phosphate
  modified_base 15: mod_base = OTHER; note = 2'-O-methyluridine-3'-phosphate
  modified_base 16: mod_base = OTHER; note = 2'-deoxy-2'-fluorouridine-3'-phosphate
  modified_base 17: mod_base = OTHER; note = 2'-O-methyladenosine-3'-phosphate
  modified_base 18: mod_base = OTHER; note = 2'-O-methylguanosine-3'-phosphate
  modified_base 19: mod_base = OTHER; note = 2'-O-methylguanosine-3'-phosphate
  modified_base 20: mod_base = OTHER; note = 2'-O-methyladenosine-3'-phosphate
  modified_base 21: mod_base = OTHER; note = 2'-O-methylguanosine-3'-phosphorothioate
  modified_base 22: mod_base = OTHER; note = 2'-O-methyluridine-3'-phosphorothioate
  modified_base 23: mod_base = OTHER; note = 2'-O-methylcytidine
atttagagaagcttttaggagtc

SEQ ID NO: 5023 - RNA, 23 nt, synthetic construct
  source 1..23: mol_type = other RNA
  modified_base 1: mod_base = OTHER; note = 2'-O-methyladenosine-3'-phosphorothioate
  modified_base 2: mod_base = OTHER; note = 2'-deoxy-2'-fluoroguanosine-3'-phosphorothioate
  modified_base 3: mod_base = OTHER; note = 2'-O-methyluridine-3'-phosphate
  modified_base 4: mod_base = OTHER; note = 2'-O-methyluridine-3'-phosphate
  modified_base 5: mod_base = OTHER; note = 2'-O-methyladenosine-3'-phosphate
  modified_base 6: mod_base = OTHER; note = 2'-deoxy-2'-fluorouridine-3'-phosphate
  modified_base 7: mod_base = OTHER; note = 2'-O-methylguanosine-3'-phosphate
  modified_base 8: mod_base = OTHER; note = 2'-deoxy-2'-fluorouridine-3'-phosphate
  modified_base 9: mod_base = OTHER; note = 2'-deoxy-2'-fluoroadenosine-3'-phosphate
  modified_base 10: mod_base = OTHER; note = 2'-O-methylcytidine-3'-phosphate
  modified_base 11: mod_base = OTHER; note = 2'-O-methyluridine-3'-phosphate
  modified_base 12: mod_base = OTHER; note = 2'-O-methyladenosine-3'-phosphate
  modified_base 13: mod_base = OTHER; note = 2'-O-methyladenosine-3'-phosphate
  modified_base 14: mod_base = OTHER; note = 2'-deoxy-2'-fluoroadenosine-3'-phosphate
  modified_base 15: mod_base = OTHER; note = 2'-O-methyluridine-3'-phosphate
  modified_base 16: mod_base = OTHER; note = 2'-deoxy-2'-fluoroguanosine-3'-phosphate
  modified_base 17: mod_base = OTHER; note = 2'-O-methyladenosine-3'-phosphate
  modified_base 18: mod_base = OTHER; note = 2'-O-methylguanosine-3'-phosphate
  modified_base 19: mod_base = OTHER; note = 2'-O-methyladenosine-3'-phosphate
  modified_base 20: mod_base = OTHER; note = 2'-O-methylcytidine-3'-phosphate
  modified_base 21: mod_base = OTHER; note = 2'-O-methylcytidine-3'-phosphorothioate
  modified_base 22: mod_base = OTHER; note = 2'-O-methyladenosine-3'-phosphorothioate
  modified_base 23: mod_base = OTHER; note = 2'-O-methylguanosine
agttatgtactaaatgagaccag

SEQ ID NO: 5024 - RNA, 23 nt, synthetic construct
  source 1..23: mol_type = other RNA
  modified_base 1: mod_base = OTHER; note = 2'-O-methyladenosine-3'-phosphorothioate
  modified_base 2: mod_base = OTHER; note = 2'-deoxy-2'-fluoroadenosine-3'-phosphorothioate
  modified_base 3: mod_base = OTHER; note = 2'-O-methyladenosine-3'-phosphate
  modified_base 4: mod_base = OTHER; note = 2'-O-methylcytidine-3'-phosphate
  modified_base 5: mod_base = OTHER; note = 2'-O-methyladenosine-3'-phosphate
  modified_base 6: mod_base = OTHER; note = 2'-deoxy-2'-fluoroadenosine-3'-phosphate
  modified_base 7: mod_base = OTHER; note = 2'-O-methyluridine-3'-phosphate
  modified_base 8: mod_base = OTHER; note = 2'-deoxy-2'-fluoroadenosine-3'-phosphate
  modified_base 9: mod_base = OTHER; note = 2'-deoxy-2'-fluoroguanosine-3'-phosphate
  modified_base 10: mod_base = OTHER; note = 2'-O-methyluridine-3'-phosphate
  modified_base 11: mod_base = OTHER; note = 2'-O-methyluridine-3'-phosphate
  modified_base 12: mod_base = OTHER; note = 2'-O-methylcytidine-3'-phosphate
  modified_base 13: mod_base = OTHER; note = 2'-O-methyluridine-3'-phosphate
  modified_base 14: mod_base = OTHER; note = 2'-deoxy-2'-fluorouridine-3'-phosphate
  modified_base 15: mod_base = OTHER; note = 2'-O-methyladenosine-3'-phosphate
  modified_base 16: mod_base = OTHER; note = 2'-deoxy-2'-fluoroadenosine-3'-phosphate
  modified_base 17: mod_base = OTHER; note = 2'-O-methylguanosine-3'-phosphate
  modified_base 18: mod_base = OTHER; note = 2'-O-methyluridine-3'-phosphate
  modified_base 19: mod_base = OTHER; note = 2'-O-methylcytidine-3'-phosphate
  modified_base 20: mod_base = OTHER; note = 2'-O-methyluridine-3'-phosphate
  modified_base 21: mod_base = OTHER; note = 2'-O-methylguanosine-3'-phosphorothioate
  modified_base 22: mod_base = OTHER; note = 2'-O-methyluridine-3'-phosphorothioate
  modified_base 23: mod_base = OTHER; note = 2'-O-methyluridine
aaacaatagttcttaagtctgtt

SEQ ID NO: 5025 - RNA, 23 nt, synthetic construct
  source 1..23: mol_type = other RNA
  modified_base 1: mod_base = OTHER; note = 2'-O-methyladenosine-3'-phosphorothioate
  modified_base 2: mod_base = OTHER; note = 2'-deoxy-2'-fluoroadenosine-3'-phosphorothioate
  modified_base 3: mod_base = OTHER; note = 2'-O-methyluridine-3'-phosphate
  modified_base 4: mod_base = OTHER; note = 2'-O-methyluridine-3'-phosphate
  modified_base 5: mod_base = OTHER; note = 2'-O-methyladenosine-3'-phosphate
  modified_base 6: mod_base = OTHER; note = 2'-deoxy-2'-fluoroadenosine-3'-phosphate
  modified_base 7: mod_base = OTHER; note = 2'-O-methylcytidine-3'-phosphate
  modified_base 8: mod_base = OTHER; note = 2'-deoxy-2'-fluoroadenosine-3'-phosphate
  modified_base 9: mod_base = OTHER; note = 2'-deoxy-2'-fluoroguanosine-3'-phosphate
  modified_base 10: mod_base = OTHER; note = 2'-O-methyladenosine-3'-phosphate
  modified_base 11: mod_base = OTHER; note = 2'-O-methylguanosine-3'-phosphate
  modified_base 12: mod_base = OTHER; note = 2'-O-methyladenosine-3'-phosphate
  modified_base 13: mod_base = OTHER; note = 2'-O-methyladenosine-3'-phosphate
  modified_base 14: mod_base = OTHER; note = 2'-deoxy-2'-fluoroadenosine-3'-phosphate
  modified_base 15: mod_base = OTHER; note = 2'-O-methylcytidine-3'-phosphate
  modified_base 16: mod_base = OTHER; note = 2'-deoxy-2'-fluorouridine-3'-phosphate
  modified_base 17: mod_base = OTHER; note = 2'-O-methyluridine-3'-phosphate
  modified_base 18: mod_base = OTHER; note = 2'-O-methylguanosine-3'-phosphate
  modified_base 19: mod_base = OTHER; note = 2'-O-methyladenosine-3'-phosphate
  modified_base 20: mod_base = OTHER; note = 2'-O-methyluridine-3'-phosphate
  modified_base 21: mod_base = OTHER; note = 2'-O-methylguanosine-3'-phosphorothioate
  modified_base 22: mod_base = OTHER; note = 2'-O-methyladenosine-3'-phosphorothioate
  modified_base 23: mod_base = OTHER; note = 2'-O-methyladenosine
aattaacagagaaacttgatgaa

SEQ ID NO: 5026 - RNA, 23 nt, synthetic construct
  source 1..23: mol_type = other RNA
  modified_base 1: mod_base = OTHER; note = 2'-O-methyladenosine-3'-phosphorothioate
  modified_base 2: mod_base = OTHER; note = 2'-deoxy-2'-fluoroadenosine-3'-phosphorothioate
  modified_base 3: mod_base = OTHER; note = 2'-O-methylcytidine-3'-phosphate
  modified_base 4: mod_base = OTHER; note = 2'-O-methyladenosine-3'-phosphate
  modified_base 5: mod_base = OTHER; note = 2'-O-methyladenosine-3'-phosphate
  modified_base 6: mod_base = OTHER; note = 2'-deoxy-2'-fluoroguanosine-3'-phosphate
  modified_base 7: mod_base = OTHER; note = 2'-O-methyluridine-3'-phosphate
  modified_base 8: mod_base = OTHER; note = 2'-deoxy-2'-fluoroadenosine-3'-phosphate
  modified_base 9: mod_base = OTHER; note = 2'-deoxy-2'-fluoroguanosine-3'-phosphate
  modified_base 10: mod_base = OTHER; note = 2'-O-methyladenosine-3'-phosphate
  modified_base 11: mod_base = OTHER; note = 2'-O-methyladenosine-3'-phosphate
  modified_base 12: mod_base = OTHER; note = 2'-O-methyluridine-3'-phosphate
  modified_base 13: mod_base = OTHER; note = 2'-O-methyladenosine-3'-phosphate
  modified_base 14: mod_base = OTHER; note = 2'-deoxy-2'-fluorouridine-3'-phosphate
  modified_base 15: mod_base = OTHER; note = 2'-O-methyladenosine-3'-phosphate
  modified_base 16: mod_base = OTHER; note = 2'-deoxy-2'-fluoroguanosine-3'-phosphate
  modified_base 17: mod_base = OTHER; note = 2'-O-methyladenosine-3'-phosphate
  modified_base 18: mod_base = OTHER; note = 2'-O-methylguanosine-3'-phosphate
  modified_base 19: mod_base = OTHER; note = 2'-O-methyladenosine-3'-phosphate
  modified_base 20: mod_base = OTHER; note = 2'-O-methyladenosine-3'-phosphate
  modified_base 21: mod_base = OTHER; note = 2'-O-methyluridine-3'-phosphorothioate
  modified_base 22: mod_base = OTHER; note = 2'-O-methylguanosine-3'-phosphorothioate
  modified_base 23: mod_base = OTHER; note = 2'-O-methyladenosine
aacaagtagaatatagagaatga

SEQ ID NO: 5027 - RNA, 23 nt, synthetic construct
  source 1..23: mol_type = other RNA
  modified_base 1: mod_base = OTHER; note = 2'-O-methyladenosine-3'-phosphorothioate
  modified_base 2: mod_base = OTHER; note = 2'-deoxy-2'-fluorocytidine-3'-phosphorothioate
  modified_base 3: mod_base = OTHER; note = 2'-O-methyladenosine-3'-phosphate
  modified_base 4: mod_base = OTHER; note = 2'-O-methyluridine-3'-phosphate
  modified_base 5: mod_base = OTHER; note = 2'-O-methyluridine-3'-phosphate
  modified_base 6: mod_base = OTHER; note = 2'-deoxy-2'-fluoroadenosine-3'-phosphate
  modified_base 7: mod_base = OTHER; note = 2'-O-methyladenosine-3'-phosphate
  modified_base 8: mod_base = OTHER; note = 2'-deoxy-2'-fluoroadenosine-3'-phosphate
  modified_base 9: mod_base = OTHER; note = 2'-deoxy-2'-fluorouridine-3'-phosphate
  modified_base 10: mod_base = OTHER; note = 2'-O-methyluridine-3'-phosphate
  modified_base 11: mod_base = OTHER; note = 2'-O-methyluridine-3'-phosphate
  modified_base 12: mod_base = OTHER; note = 2'-O-methylcytidine-3'-phosphate
  modified_base 13: mod_base = OTHER; note = 2'-O-methyluridine-3'-phosphate
  modified_base 14: mod_base = OTHER; note = 2'-deoxy-2'-fluorouridine-3'-phosphate
  modified_base 15: mod_base = OTHER; note = 2'-O-methylcytidine-3'-phosphate
  modified_base 16: mod_base = OTHER; note = 2'-deoxy-2'-fluoroadenosine-3'-phosphate
  modified_base 17: mod_base = OTHER; note = 2'-O-methyladenosine-3'-phosphate
  modified_base 18: mod_base = OTHER; note = 2'-O-methylguanosine-3'-phosphate
  modified_base 19: mod_base = OTHER; note = 2'-O-methylcytidine-3'-phosphate
  modified_base 20: mod_base = OTHER; note = 2'-O-methyladenosine-3'-phosphate
  modified_base 21: mod_base = OTHER; note = 2'-O-methylguanosine-3'-phosphorothioate
  modified_base 22: mod_base = OTHER; note = 2'-O-methyluridine-3'-phosphorothioate
  modified_base 23: mod_base = OTHER; note = 2'-O-methylcytidine
acattaaatttcttcaagcagtc

SEQ ID NO: 5028 - RNA, 23 nt, synthetic construct
  source 1..23: mol_type = other RNA
  modified_base 1: mod_base = OTHER; note = 2'-O-methyladenosine-3'-phosphorothioate
  modified_base 2: mod_base = OTHER; note = 2'-deoxy-2'-fluorouridine-3'-phosphorothioate
  modified_base 3: mod_base = OTHER; note = 2'-O-methyladenosine-3'-phosphate
  modified_base 4: mod_base = OTHER; note = 2'-O-methylguanosine-3'-phosphate
  modified_base 5: mod_base = OTHER; note = 2'-O-methylguanosine-3'-phosphate
  modified_base 6: mod_base = OTHER; note = 2'-deoxy-2'-fluoroadenosine-3'-phosphate
  modified_base 7: mod_base = OTHER; note = 2'-O-methyladenosine-3'-phosphate
  modified_base 8: mod_base = OTHER; note = 2'-deoxy-2'-fluorouridine-3'-phosphate
  modified_base 9: mod_base = OTHER; note = 2'-deoxy-2'-fluoroadenosine-3'-phosphate
  modified_base 10: mod_base = OTHER; note = 2'-O-methyluridine-3'-phosphate
  modified_base 11: mod_base = OTHER; note = 2'-O-methyluridine-3'-phosphate
  modified_base 12: mod_base = OTHER; note = 2'-O-methyladenosine-3'-phosphate
  modified_base 13: mod_base = OTHER; note = 2'-O-methyladenosine-3'-phosphate
  modified_base 14: mod_base = OTHER; note = 2'-deoxy-2'-fluorouridine-3'-phosphate
  modified_base 15: mod_base = OTHER; note = 2'-O-methylguanosine-3'-phosphate
  modified_base 16: mod_base = OTHER; note = 2'-deoxy-2'-fluorouridine-3'-phosphate
  modified_base 17: mod_base = OTHER; note = 2'-O-methylcytidine-3'-phosphate
  modified_base 18: mod_base = OTHER; note = 2'-O-methyladenosine-3'-phosphate
  modified_base 19: mod_base = OTHER; note = 2'-O-methylguanosine-3'-phosphate
  modified_base 20: mod_base = OTHER; note = 2'-O-methyluridine-3'-phosphate
  modified_base 21: mod_base = OTHER; note = 2'-O-methylguanosine-3'-phosphorothioate
  modified_base 22: mod_base = OTHER; note = 2'-O-methyladenosine-3'-phosphorothioate
  modified_base 23: mod_base = OTHER; note = 2'-O-methyluridine
ataggaatattaatgtcagtgat

SEQ ID NO: 5029 - RNA, 23 nt, synthetic construct
  source 1..23: mol_type = other RNA
  modified_base 1: mod_base = OTHER; note = 2'-O-methyladenosine-3'-phosphorothioate
  modified_base 2: mod_base = OTHER; note = 2'-deoxy-2'-fluoroadenosine-3'-phosphorothioate
  modified_base 3: mod_base = OTHER; note = 2'-O-methyluridine-3'-phosphate
  modified_base 4: mod_base = OTHER; note = 2'-O-methyluridine-3'-phosphate
  modified_base 5: mod_base = OTHER; note = 2'-O-methyluridine-3'-phosphate
  modified_base 6: mod_base = OTHER; note = 2'-deoxy-2'-fluorouridine-3'-phosphate
  modified_base 7: mod_base = OTHER; note = 2'-O-methylcytidine-3'-phosphate
  modified_base 8: mod_base = OTHER; note = 2'-deoxy-2'-fluoroadenosine-3'-phosphate
  modified_base 9: mod_base = OTHER; note = 2'-deoxy-2'-fluoroadenosine-3'-phosphate
  modified_base 10: mod_base = OTHER; note = 2'-O-methyladenosine-3'-phosphate
  modified_base 11: mod_base = OTHER; note = 2'-O-methyladenosine-3'-phosphate
  modified_base 12: mod_base = OTHER; note = 2'-O-methylcytidine-3'-phosphate
  modified_base 13: mod_base = OTHER; note = 2'-O-methyladenosine-3'-phosphate
  modified_base 14: mod_base = OTHER; note = 2'-deoxy-2'-fluoroadenosine-3'-phosphate
  modified_base 15: mod_base = OTHER; note = 2'-O-methyluridine-3'-phosphate
  modified_base 16: mod_base = OTHER; note = 2'-deoxy-2'-fluoroguanosine-3'-phosphate
  modified_base 17: mod_base = OTHER; note = 2'-O-methyluridine-3'-phosphate
  modified_base 18: mod_base = OTHER; note = 2'-O-methylguanosine-3'-phosphate
  modified_base 19: mod_base = OTHER; note = 2'-O-methylguanosine-3'-phosphate
  modified_base 20: mod_base = OTHER; note = 2'-O-methyluridine-3'-phosphate
  modified_base 21: mod_base = OTHER; note = 2'-O-methyluridine-3'-phosphorothioate
  modified_base 22: mod_base = OTHER; note = 2'-O-methylguanosine-3'-phosphorothioate
  modified_base 23: mod_base = OTHER; note = 2'-O-methyladenosine
aattttcaaaacaatgtggttga

SEQ ID NO: 5030 - RNA, 23 nt, synthetic construct
  source 1..23: mol_type = other RNA
  modified_base 1: mod_base = OTHER; note = 2'-O-methyladenosine-3'-phosphorothioate
  modified_base 2: mod_base = OTHER; note = 2'-deoxy-2'-fluoroadenosine-3'-phosphorothioate
  modified_base 3: mod_base = OTHER; note = 2'-O-methylguanosine-3'-phosphate
  modified_base 4: mod_base = OTHER; note = 2'-O-methyladenosine-3'-phosphate
  modified_base 5: mod_base = OTHER; note = 2'-O-methyladenosine-3'-phosphate
  modified_base 6: mod_base = OTHER; note = 2'-deoxy-2'-fluoroadenosine-3'-phosphate
  modified_base 7: mod_base = OTHER; note = 2'-O-methyladenosine-3'-phosphate
  modified_base 8: mod_base = OTHER; note = 2'-deoxy-2'-fluorocytidine-3'-phosphate
  modified_base 9: mod_base = OTHER; note = 2'-deoxy-2'-fluorouridine-3'-phosphate
  modified_base 10: mod_base = OTHER; note = 2'-O-methyladenosine-3'-phosphate
  modified_base 11: mod_base = OTHER; note = 2'-O-methylguanosine-3'-phosphate
  modified_base 12: mod_base = OTHER; note = 2'-O-methylcytidine-3'-phosphate
  modified_base 13: mod_base = OTHER; note = 2'-O-methyluridine-3'-phosphate
  modified_base 14: mod_base = OTHER; note = 2'-deoxy-2'-fluoroadenosine-3'-phosphate
  modified_base 15: mod_base = OTHER; note = 2'-O-methylguanosine-3'-phosphate
  modified_base 16: mod_base = OTHER; note = 2'-deoxy-2'-fluorouridine-3'-phosphate
  modified_base 17: mod_base = OTHER; note = 2'-O-methylguanosine-3'-phosphate
  modified_base 18: mod_base = OTHER; note = 2'-O-methyladenosine-3'-phosphate
  modified_base 19: mod_base = OTHER; note = 2'-O-methyluridine-3'-phosphate
  modified_base 20: mod_base = OTHER; note = 2'-O-methylguanosine-3'-phosphate
  modified_base 21: mod_base = OTHER; note = 2'-O-methyladenosine-3'-phosphorothioate
  modified_base 22: mod_base = OTHER; note = 2'-O-methyluridine-3'-phosphorothioate
  modified_base 23: mod_base = OTHER; note = 2'-O-methylguanosine
aagaaaactagctagtgatgatg

SEQ ID NO: 5031 - RNA, 23 nt, synthetic construct
  source 1..23: mol_type = other RNA
  modified_base 1: mod_base = OTHER; note = 2'-O-methyladenosine-3'-phosphorothioate
  modified_base 2: mod_base = OTHER; note = 2'-deoxy-2'-fluorouridine-3'-phosphorothioate
  modified_base 3: mod_base = OTHER; note = 2'-O-methylguanosine-3'-phosphate
  modified_base 4: mod_base = OTHER; note = 2'-O-methyladenosine-3'-phosphate
  modified_base 5: mod_base = OTHER; note = 2'-O-methyladenosine-3'-phosphate
  modified_base 6: mod_base = OTHER; note = 2'-deoxy-2'-fluorouridine-3'-phosphate
  modified_base 7: mod_base = OTHER; note = 2'-O-methylcytidine-3'-phosphate
  modified_base 8: mod_base = OTHER; note = 2'-deoxy-2'-fluorouridine-3'-phosphate
  modified_base 9: mod_base = OTHER; note = 2'-deoxy-2'-fluorouridine-3'-phosphate
  modified_base 10: mod_base = OTHER; note = 2'-O-methyladenosine-3'-phosphate
  modified_base 11: mod_base = OTHER; note = 2'-O-methylguanosine-3'-phosphate
  modified_base 12: mod_base = OTHER; note = 2'-O-methylguanosine-3'-phosphate
  modified_base 13: mod_base = OTHER; note = 2'-O-methyladenosine-3'-phosphate
  modified_base 14: mod_base = OTHER; note = 2'-deoxy-2'-fluoroadenosine-3'-phosphate
  modified_base 15: mod_base = OTHER; note = 2'-O-methyladenosine-3'-phosphate
  modified_base 16: mod_base = OTHER; note = 2'-deoxy-2'-fluoroadenosine-3'-phosphate
  modified_base 17: mod_base = OTHER; note = 2'-O-methyladenosine-3'-phosphate
  modified_base 18: mod_base = OTHER; note = 2'-O-methylguanosine-3'-phosphate
  modified_base 19: mod_base = OTHER; note = 2'-O-methyluridine-3'-phosphate
  modified_base 20: mod_base = OTHER; note = 2'-O-methyladenosine-3'-phosphate
  modified_base 21: mod_base = OTHER; note = 2'-O-methyladenosine-3'-phosphorothioate
  modified_base 22: mod_base = OTHER; note = 2'-O-methylguanosine-3'-phosphorothioate
  modified_base 23: mod_base = OTHER; note = 2'-O-methyladenosine
atgaatcttaggaaaaagtaaga

SEQ ID NO: 5032 - RNA, 23 nt, synthetic construct
  source 1..23: mol_type = other RNA
  modified_base 1: mod_base = OTHER; note = 2'-O-methyladenosine-3'-phosphorothioate
  modified_base 2: mod_base = OTHER; note = 2'-deoxy-2'-fluoroadenosine-3'-phosphorothioate
  modified_base 3: mod_base = OTHER; note = 2'-O-methylguanosine-3'-phosphate
  modified_base 4: mod_base = OTHER; note = 2'-O-methyladenosine-3'-phosphate
  modified_base 5: mod_base = OTHER; note = 2'-O-methylcytidine-3'-phosphate
  modified_base 6: mod_base = OTHER; note = 2'-deoxy-2'-fluorouridine-3'-phosphate
  modified_base 7: mod_base = OTHER; note = 2'-O-methyladenosine-3'-phosphate
  modified_base 8: mod_base = OTHER; note = 2'-deoxy-2'-fluorouridine-3'-phosphate
  modified_base 9: mod_base = OTHER; note = 2'-deoxy-2'-fluorouridine-3'-phosphate
  modified_base 10: mod_base = OTHER; note = 2'-O-methyluridine-3'-phosphate
  modified_base 11: mod_base = OTHER; note = 2'-O-methyladenosine-3'-phosphate
  modified_base 12: mod_base = OTHER; note = 2'-O-methyluridine-3'-phosphate
  modified_base 13: mod_base = OTHER; note = 2'-O-methyluridine-3'-phosphate
  modified_base 14: mod_base = OTHER; note = 2'-deoxy-2'-fluorocytidine-3'-phosphate
  modified_base 15: mod_base = OTHER; note = 2'-O-methyluridine-3'-phosphate
  modified_base 16: mod_base = OTHER; note = 2'-deoxy-2'-fluoroadenosine-3'-phosphate
  modified_base 17: mod_base = OTHER; note = 2'-O-methylguanosine-3'-phosphate
  modified_base 18: mod_base = OTHER; note = 2'-O-methylguanosine-3'-phosphate
  modified_base 19: mod_base = OTHER; note = 2'-O-methyluridine-3'-phosphate
  modified_base 20: mod_base = OTHER; note = 2'-O-methyladenosine-3'-phosphate
  modified_base 21: mod_base = OTHER; note = 2'-O-methyladenosine-3'-phosphorothioate
  modified_base 22: mod_base = OTHER; note = 2'-O-methylguanosine-3'-phosphorothioate
  modified_base 23: mod_base = OTHER; note = 2'-O-methyladenosine
aagactatttattctaggtaaga

SEQ ID NO: 5033 - RNA, 23 nt, synthetic construct
  source 1..23: mol_type = other RNA
  modified_base 1: mod_base = OTHER; note = 2'-O-methyladenosine-3'-phosphorothioate
  modified_base 2: mod_base = OTHER; note = 2'-deoxy-2'-fluorocytidine-3'-phosphorothioate
  modified_base 3: mod_base = OTHER; note = 2'-O-methyluridine-3'-phosphate
  modified_base 4: mod_base = OTHER; note = 2'-O-methylguanosine-3'-phosphate
  modified_base 5: mod_base = OTHER; note = 2'-O-methyluridine-3'-phosphate
  modified_base 6: mod_base = OTHER; note = 2'-deoxy-2'-fluorouridine-3'-phosphate
  modified_base 7: mod_base = OTHER; note = 2'-O-methylguanosine-3'-phosphate
  modified_base 8: mod_base = OTHER; note = 2'-deoxy-2'-fluoroadenosine-3'-phosphate
  modified_base 9: mod_base = OTHER; note = 2'-deoxy-2'-fluoroadenosine-3'-phosphate
  modified_base 10: mod_base = OTHER; note = 2'-O-methyladenosine-3'-phosphate
  modified_base 11: mod_base = OTHER; note = 2'-O-methyluridine-3'-phosphate
  modified_base 12: mod_base = OTHER; note = 2'-O-methyluridine-3'-phosphate
  modified_base 13: mod_base = OTHER; note = 2'-O-methyluridine-3'-phosphate
  modified_base 14: mod_base = OTHER; note = 2'-deoxy-2'-fluoroadenosine-3'-phosphate
  modified_base 15: mod_base = OTHER; note = 2'-O-methylguanosine-3'-phosphate
  modified_base 16: mod_base = OTHER; note = 2'-deoxy-2'-fluoroadenosine-3'-phosphate
  modified_base 17: mod_base = OTHER; note = 2'-O-methyladenosine-3'-phosphate
  modified_base 18: mod_base = OTHER; note = 2'-O-methylguanosine-3'-phosphate
  modified_base 19: mod_base = OTHER; note = 2'-O-methyladenosine-3'-phosphate
  modified_base 20: mod_base = OTHER; note = 2'-O-methylcytidine-3'-phosphate
  modified_base 21: mod_base = OTHER; note = 2'-O-methylcytidine-3'-phosphorothioate
  modified_base 22: mod_base = OTHER; note = 2'-O-methylcytidine-3'-phosphorothioate
  modified_base 23: mod_base = OTHER; note = 2'-O-methyladenosine
actgttgaaatttagaagaccca

SEQ ID NO: 5034 - RNA, 23 nt, synthetic construct
  source 1..23: mol_type = other RNA
  modified_base 1: mod_base = OTHER; note = 2'-O-methyladenosine-3'-phosphorothioate
  modified_base 2: mod_base = OTHER; note = 2'-deoxy-2'-fluoroadenosine-3'-phosphorothioate
  modified_base 3: mod_base = OTHER; note = 2'-O-methyladenosine-3'-phosphate
  modified_base 4: mod_base = OTHER; note = 2'-O-methylguanosine-3'-phosphate
  modified_base 5: mod_base = OTHER; note = 2'-O-methyluridine-3'-phosphate
  modified_base 6: mod_base = OTHER; note = 2'-deoxy-2'-fluoroguanosine-3'-phosphate
  modified_base 7: mod_base = OTHER; note = 2'-O-methyluridine-3'-phosphate
  modified_base 8: mod_base = OTHER; note = 2'-deoxy-2'-fluoroadenosine-3'-phosphate
  modified_base 9: mod_base = OTHER; note = 2'-deoxy-2'-fluoroadenosine-3'-phosphate
  modified_base 10: mod_base = OTHER; note = 2'-O-methyladenosine-3'-phosphate
  modified_base 11: mod_base = OTHER; note = 2'-O-methylcytidine-3'-phosphate
  modified_base 12: mod_base = OTHER; note = 2'-O-methyladenosine-3'-phosphate
  modified_base 13: mod_base = OTHER; note = 2'-O-methyladenosine-3'-phosphate
  modified_base 14: mod_base = OTHER; note = 2'-deoxy-2'-fluorouridine-3'-phosphate
  modified_base 15: mod_base = OTHER; note = 2'-O-methylguanosine-3'-phosphate
  modified_base 16: mod_base = OTHER; note = 2'-deoxy-2'-fluorouridine-3'-phosphate
  modified_base 17: mod_base = OTHER; note = 2'-O-methyladenosine-3'-phosphate
  modified_base 18: mod_base = OTHER; note = 2'-O-methyluridine-3'-phosphate
  modified_base 19: mod_base = OTHER; note = 2'-O-methyladenosine-3'-phosphate
  modified_base 20: mod_base = OTHER; note = 2'-O-methylguanosine-3'-phosphate
  modified_base 21: mod_base = OTHER; note = 2'-O-methylguanosine-3'-phosphorothioate
  modified_base 22: mod_base = OTHER; note = 2'-O-methyladenosine-3'-phosphorothioate
  modified_base 23: mod_base = OTHER; note = 2'-O-methyladenosine
aaagtgtaaacaatgtataggaa

SEQ ID NO: 5035 - RNA, 23 nt, synthetic construct
  source 1..23: mol_type = other RNA
  modified_base 1: mod_base = OTHER; note = 2'-O-methyladenosine-3'-phosphorothioate
  modified_base 2: mod_base = OTHER; note = 2'-deoxy-2'-fluorouridine-3'-phosphorothioate
  modified_base 3: mod_base = OTHER; note = 2'-O-methylguanosine-3'-phosphate
  modified_base 4: mod_base = OTHER; note = 2'-O-methyladenosine-3'-phosphate
  modified_base 5: mod_base = OTHER; note = 2'-O-methyluridine-3'-phosphate
  modified_base 6: mod_base = OTHER; note = 2'-deoxy-2'-fluoroadenosine-3'-phosphate
  modified_base 7: mod_base = OTHER; note = 2'-O-methylcytidine-3'-phosphate
  modified_base 8: mod_base = OTHER; note = 2'-deoxy-2'-fluorouridine-3'-phosphate
  modified_base 9: mod_base = OTHER; note = 2'-deoxy-2'-fluorocytidine-3'-phosphate
  modified_base 10: mod_base = OTHER; note = 2'-O-methyluridine-3'-phosphate
  modified_base 11: mod_base = OTHER; note = 2'-O-methylguanosine-3'-phosphate
  modified_base 12: mod_base = OTHER; note = 2'-O-methyladenosine-3'-phosphate
  modified_base 13: mod_base = OTHER; note = 2'-O-methyluridine-3'-phosphate
  modified_base 14: mod_base = OTHER; note = 2'-deoxy-2'-fluorouridine-3'-phosphate
  modified_base 15: mod_base = OTHER; note = 2'-O-methylcytidine-3'-phosphate
  modified_base 16: mod_base = OTHER; note = 2'-deoxy-2'-fluoroadenosine-3'-phosphate
  modified_base 17: mod_base = OTHER; note = 2'-O-methyladenosine-3'-phosphate
  modified_base 18: mod_base = OTHER; note = 2'-O-methylguanosine-3'-phosphate
  modified_base 19: mod_base = OTHER; note = 2'-O-methyladenosine-3'-phosphate
  modified_base 20: mod_base = OTHER; note = 2'-O-methylguanosine-3'-phosphate
  modified_base 21: mod_base = OTHER; note = 2'-O-methyladenosine-3'-phosphorothioate
  modified_base 22: mod_base = OTHER; note = 2'-O-methylguanosine-3'-phosphorothioate
  modified_base 23: mod_base = OTHER; note = 2'-O-methyladenosine
atgatactctgattcaagagaga

SEQ ID NO: 5036 - RNA, 23 nt, synthetic construct
  source 1..23: mol_type = other RNA
  modified_base 1: mod_base = OTHER; note = 2'-O-methyladenosine-3'-phosphorothioate
  modified_base 2: mod_base = OTHER; note = 2'-deoxy-2'-fluorouridine-3'-phosphorothioate
  modified_base 3: mod_base = OTHER; note = 2'-O-methyluridine-3'-phosphate
  modified_base 4: mod_base = OTHER; note = 2'-O-methyladenosine-3'-phosphate
  modified_base 5: mod_base = OTHER; note = 2'-O-methyladenosine-3'-phosphate
  modified_base 6: mod_base = OTHER; note = 2'-deoxy-2'-fluorocytidine-3'-phosphate
  modified_base 7: mod_base = OTHER; note = 2'-O-methyluridine-3'-phosphate
  modified_base 8: mod_base = OTHER; note = 2'-deoxy-2'-fluoroadenosine-3'-phosphate
  modified_base 9: mod_base = OTHER; note = 2'-deoxy-2'-fluorouridine-3'-phosphate
  modified_base 10: mod_base = OTHER; note = 2'-O-methyladenosine-3'-phosphate
  modified_base 11: mod_base = OTHER; note = 2'-O-methyluridine-3'-phosphate
  modified_base 12: mod_base = OTHER; note = 2'-O-methyluridine-3'-phosphate
  modified_base 13: mod_base = OTHER; note = 2'-O-methylguanosine-3'-phosphate
  modified_base 14: mod_base = OTHER; note = 2'-deoxy-2'-fluorouridine-3'-phosphate
  modified_base 15: mod_base = OTHER; note = 2'-O-methyluridine-3'-phosphate
  modified_base 16: mod_base = OTHER; note = 2'-deoxy-2'-fluorocytidine-3'-phosphate
  modified_base 17: mod_base = OTHER; note = 2'-O-methyluridine-3'-phosphate
  modified_base 18: mod_base = OTHER; note = 2'-O-methylcytidine-3'-phosphate
  modified_base 19: mod_base = OTHER; note = 2'-O-methyladenosine-3'-phosphate
  modified_base 20: mod_base = OTHER; note = 2'-O-methylguanosine-3'-phosphate
  modified_base 21: mod_base = OTHER; note = 2'-O-methylcytidine-3'-phosphorothioate
  modified_base 22: mod_base = OTHER; note = 2'-O-methyladenosine-3'-phosphorothioate
  modified_base 23: mod_base = OTHER; note = 2'-O-methyladenosine
attaactatattgttctcagcaa

SEQ ID NO: 5037 - RNA, 23 nt, synthetic construct
  source 1..23: mol_type = other RNA
  modified_base 1: mod_base = OTHER; note = 2'-O-methyladenosine-3'-phosphorothioate
  modified_base 2: mod_base = OTHER; note = 2'-deoxy-2'-fluorouridine-3'-phosphorothioate
  modified_base 3: mod_base = OTHER; note = 2'-O-methylguanosine-3'-phosphate
  modified_base 4: mod_base = OTHER; note = 2'-O-methyladenosine-3'-phosphate
  modified_base 5: mod_base = OTHER; note = 2'-O-methyladenosine-3'-phosphate
  modified_base 6: mod_base = OTHER; note = 2'-deoxy-2'-fluoroguanosine-3'-phosphate
  modified_base 7: mod_base = OTHER; note = 2'-O-methyladenosine-3'-phosphate
  modified_base 8: mod_base = OTHER; note = 2'-deoxy-2'-fluoroadenosine-3'-phosphate
  modified_base 9: mod_base = OTHER; note = 2'-deoxy-2'-fluoroadenosine-3'-phosphate
  modified_base 10: mod_base = OTHER; note = 2'-O-methyluridine-3'-phosphate
  modified_base 11: mod_base = OTHER; note = 2'-O-methyladenosine-3'-phosphate
  modified_base 12: mod_base = OTHER; note = 2'-O-methyladenosine-3'-phosphate
  modified_base 13: mod_base = OTHER; note = 2'-O-methyladenosine-3'-phosphate
  modified_base 14: mod_base = OTHER; note = 2'-deoxy-2'-fluoroguanosine-3'-phosphate
  modified_base 15: mod_base = OTHER; note = 2'-O-methyladenosine-3'-phosphate
  modified_base 16: mod_base = OTHER; note = 2'-deoxy-2'-fluorouridine-3'-phosphate
  modified_base 17: mod_base = OTHER; note = 2'-O-methylguanosine-3'-phosphate
  modified_base 18: mod_base = OTHER; note = 2'-O-methylguanosine-3'-phosphate
  modified_base 19: mod_base = OTHER; note = 2'-O-methyladenosine-3'-phosphate
  modified_base 20: mod_base = OTHER; note = 2'-O-methylcytidine-3'-phosphate
  modified_base 21: mod_base = OTHER; note = 2'-O-methylguanosine-3'-phosphorothioate
  modified_base 22: mod_base = OTHER; note = 2'-O-methylcytidine-3'-phosphorothioate
  modified_base 23: mod_base = OTHER; note = 2'-O-methyladenosine
atgaagaaataaagatggacgca

SEQ ID NO: 5038 - RNA, 23 nt, synthetic construct
  source 1..23: mol_type = other RNA
  modified_base 1: mod_base = OTHER; note = 2'-O-methyladenosine-3'-phosphorothioate
  modified_base 2: mod_base = OTHER; note = 2'-deoxy-2'-fluorouridine-3'-phosphorothioate
  modified_base 3: mod_base = OTHER; note = 2'-O-methyluridine-3'-phosphate
  modified_base 4: mod_base = OTHER; note = 2'-O-methyladenosine-3'-phosphate
  modified_base 5: mod_base = OTHER; note = 2'-O-methylguanosine-3'-phosphate
  modified_base 6: mod_base = OTHER; note = 2'-deoxy-2'-fluorocytidine-3'-phosphate
  modified_base 7: mod_base = OTHER; note = 2'-O-methyladenosine-3'-phosphate
  modified_base 8: mod_base = OTHER; note = 2'-deoxy-2'-fluoroadenosine-3'-phosphate
  modified_base 9: mod_base = OTHER; note = 2'-deoxy-2'-fluoroadenosine-3'-phosphate
  modified_base 10: mod_base = OTHER; note = 2'-O-methyluridine-3'-phosphate
  modified_base 11: mod_base = OTHER; note = 2'-O-methylcytidine-3'-phosphate
  modified_base 12: mod_base = OTHER; note = 2'-O-methyladenosine-3'-phosphate
  modified_base 13: mod_base = OTHER; note = 2'-O-methyladenosine-3'-phosphate
  modified_base 14: mod_base = OTHER; note = 2'-deoxy-2'-fluoroadenosine-3'-phosphate
  modified_base 15: mod_base = OTHER; note = 2'-O-methyladenosine-3'-phosphate
  modified_base 16: mod_base = OTHER; note = 2'-deoxy-2'-fluoroguanosine-3'-phosphate
  modified_base 17: mod_base = OTHER; note = 2'-O-methyladenosine-3'-phosphate
  modified_base 18: mod_base = OTHER; note = 2'-O-methyladenosine-3'-phosphate
  modified_base 19: mod_base = OTHER; note = 2'-O-methylguanosine-3'-phosphate
  modified_base 20: mod_base = OTHER; note = 2'-O-methylcytidine-3'-phosphate
  modified_base 21: mod_base = OTHER; note = 2'-O-methyluridine-3'-phosphorothioate
  modified_base 22: mod_base = OTHER; note = 2'-O-methylguanosine-3'-phosphorothioate
  modified_base 23: mod_base = OTHER; note = 2'-O-methyladenosine
attagcaaatcaaaagaagctga

SEQ ID NO: 5039 - RNA, 23 nt, synthetic construct
  source 1..23: mol_type = other RNA
  modified_base 1: mod_base = OTHER; note = 2'-O-methyladenosine-3'-phosphorothioate
  modified_base 2: mod_base = OTHER; note = 2'-deoxy-2'-fluoroadenosine-3'-phosphorothioate
  modified_base 3: mod_base = OTHER; note = 2'-O-methylcytidine-3'-phosphate
  modified_base 4: mod_base = OTHER; note = 2'-O-methyladenosine-3'-phosphate
  modified_base 5: mod_base = OTHER; note = 2'-O-methylguanosine-3'-phosphate
  modified_base 6: mod_base = OTHER; note = 2'-deoxy-2'-fluoroguanosine-3'-phosphate
  modified_base 7: mod_base = OTHER; note = 2'-O-methyladenosine-3'-phosphate
  modified_base 8: mod_base = OTHER; note = 2'-deoxy-2'-fluorouridine-3'-phosphate
  modified_base 9: mod_base = OTHER; note = 2'-deoxy-2'-fluoroadenosine-3'-phosphate
  modified_base 10: mod_base = OTHER; note = 2'-O-methyladenosine-3'-phosphate
  modified_base 11: mod_base = OTHER; note = 2'-O-methyladenosine-3'-phosphate
  modified_base 12: mod_base = OTHER; note = 2'-O-methylguanosine-3'-phosphate
  modified_base 13: mod_base = OTHER; note = 2'-O-methyladenosine-3'-phosphate
  modified_base 14: mod_base = OTHER; note = 2'-deoxy-2'-fluoroadenosine-3'-phosphate
  modified_base 15: mod_base = OTHER; note = 2'-O-methyladenosine-3'-phosphate
  modified_base 16: mod_base = OTHER; note = 2'-deoxy-2'-fluoroadenosine-3'-phosphate
  modified_base 17: mod_base = OTHER; note = 2'-O-methylguanosine-3'-phosphate
  modified_base 18: mod_base = OTHER; note = 2'-O-methyladenosine-3'-phosphate
  modified_base 19: mod_base = OTHER; note = 2'-O-methylguanosine-3'-phosphate
  modified_base 20: mod_base = OTHER; note = 2'-O-methyladenosine-3'-phosphate
  modified_base 21: mod_base = OTHER; note = 2'-O-methyluridine-3'-phosphorothioate
  modified_base 22: mod_base = OTHER; note = 2'-O-methylcytidine-3'-phosphorothioate
  modified_base 23: mod_base = OTHER; note = 2'-O-methyladenosine
aacaggataaagaaaagagatca

SEQ ID NO: 5040 - RNA, 23 nt, synthetic construct
  source 1..23: mol_type = other RNA
  modified_base 1: mod_base = OTHER; note = 2'-O-methyladenosine-3'-phosphorothioate
  modified_base 2: mod_base = OTHER; note = 2'-deoxy-2'-fluoroadenosine-3'-phosphorothioate
  modified_base 3: mod_base = OTHER; note = 2'-O-methyladenosine-3'-phosphate
  modified_base 4: mod_base = OTHER; note = 2'-O-methyladenosine-3'-phosphate
  modified_base 5: mod_base = OTHER; note = 2'-O-methyluridine-3'-phosphate
  modified_base 6: mod_base = OTHER; note = 2'-deoxy-2'-fluoroguanosine-3'-phosphate
  modified_base 7: mod_base = OTHER; note = 2'-O-methyluridine-3'-phosphate
  modified_base 8: mod_base = OTHER; note = 2'-deoxy-2'-fluoroguanosine-3'-phosphate
  modified_base 9: mod_base = OTHER; note = 2'-deoxy-2'-fluorouridine-3'-phosphate
  modified_base 10: mod_base = OTHER; note = 2'-O-methyladenosine-3'-phosphate
  modified_base 11: mod_base = OTHER; note = 2'-O-methyladenosine-3'-phosphate
  modified_base 12: mod_base = OTHER; note = 2'-O-methyluridine-3'-phosphate
  modified_base 13: mod_base = OTHER; note = 2'-O-methyluridine-3'-phosphate
  modified_base 14: mod_base = OTHER; note = 2'-deoxy-2'-fluorocytidine-3'-phosphate
  modified_base 15: mod_base = OTHER; note = 2'-O-methyladenosine-3'-phosphate
  modified_base 16: mod_base = OTHER; note = 2'-deoxy-2'-fluorouridine-3'-phosphate
  modified_base 17: mod_base = OTHER; note = 2'-O-methyluridine-3'-phosphate
  modified_base 18: mod_base = OTHER; note = 2'-O-methyluridine-3'-phosphate
  modified_base 19: mod_base = OTHER; note = 2'-O-methylguanosine-3'-phosphate
  modified_base 20: mod_base = OTHER; note = 2'-O-methyluridine-3'-phosphate
  modified_base 21: mod_base = OTHER; note = 2'-O-methylguanosine-3'-phosphorothioate
  modified_base 22: mod_base = OTHER; note = 2'-O-methylguanosine-3'-phosphorothioate
  modified_base 23: mod_base = OTHER; note = 2'-O-methyluridine
aaaatgtgtaattcatttgtggt

SEQ ID NO: 5041 - RNA, 23 nt, synthetic construct
  source 1..23: mol_type = other RNA
  modified_base 1: mod_base = OTHER; note = 2'-O-methyladenosine-3'-phosphorothioate
  modified_base 2: mod_base = OTHER; note = 2'-deoxy-2'-fluoroguanosine-3'-phosphorothioate
  modified_base 3: mod_base = OTHER; note = 2'-O-methyluridine-3'-phosphate
  modified_base 4: mod_base = OTHER; note = 2'-O-methyluridine-3'-phosphate
  modified_base 5: mod_base = OTHER; note = 2'-O-methyluridine-3'-phosphate
  modified_base 6: mod_base = OTHER; note = 2'-deoxy-2'-fluoroadenosine-3'-phosphate
  modified_base 7: mod_base = OTHER; note = 2'-O-methyluridine-3'-phosphate
  modified_base 8: mod_base = OTHER; note = 2'-deoxy-2'-fluorouridine-3'-phosphate
  modified_base 9: mod_base = OTHER; note = 2'-deoxy-2'-fluoroguanosine-3'-phosphate
  modified_base 10: mod_base = OTHER; note = 2'-O-methylcytidine-3'-phosphate
  modified_base 11: mod_base = OTHER; note = 2'-O-methyluridine-3'-phosphate
  modified_base 12: mod_base = OTHER; note = 2'-O-methyluridine-3'-phosphate
  modified_base 13: mod_base = OTHER; note = 2'-O-methyluridine-3'-phosphate
  modified_base 14: mod_base = OTHER; note = 2'-deoxy-2'-fluorouridine-3'-phosphate
  modified_base 15: mod_base = OTHER; note = 2'-O-methylguanosine-3'-phosphate
  modified_base 16: mod_base = OTHER; note = 2'-deoxy-2'-fluoroguanosine-3'-phosphate
  modified_base 17: mod_base = OTHER; note = 2'-O-methyladenosine-3'-phosphate
  modified_base 18: mod_base = OTHER; note = 2'-O-methylcytidine-3'-phosphate
  modified_base 19: mod_base = OTHER; note = 2'-O-methyladenosine-3'-phosphate
  modified_base 20: mod_base = OTHER; note = 2'-O-methyladenosine-3'-phosphate
  modified_base 21: mod_base = OTHER; note = 2'-O-methyladenosine-3'-phosphorothioate
  modified_base 22: mod_base = OTHER; note = 2'-O-methylguanosine-3'-phosphorothioate
  modified_base 23: mod_base = OTHER; note = 2'-O-methylcytidine
agtttattgcttttggacaaagc

SEQ ID NO: 5042 - RNA, 23 nt, synthetic construct
  source 1..23: mol_type = other RNA
  modified_base 1: mod_base = OTHER; note = 2'-O-methyladenosine-3'-phosphorothioate
  modified_base 2: mod_base = OTHER; note = 2'-deoxy-2'-fluorocytidine-3'-phosphorothioate
  modified_base 3: mod_base = OTHER; note = 2'-O-methyluridine-3'-phosphate
  modified_base 4: mod_base = OTHER; note = 2'-O-methyladenosine-3'-phosphate
  modified_base 5: mod_base = OTHER; note = 2'-O-methyladenosine-3'-phosphate
  modified_base 6: mod_base = OTHER; note = 2'-deoxy-2'-fluoroadenosine-3'-phosphate
  modified_base 7: mod_base = OTHER; note = 2'-O-methylguanosine-3'-phosphate
  modified_base 8: mod_base = OTHER; note = 2'-deoxy-2'-fluorouridine-3'-phosphate
  modified_base 9: mod_base = OTHER; note = 2'-deoxy-2'-fluoroguanosine-3'-phosphate
  modified_base 10: mod_base = OTHER; note = 2'-O-methyladenosine-3'-phosphate
  modified_base 11: mod_base = OTHER; note = 2'-O-methyluridine-3'-phosphate
  modified_base 12: mod_base = OTHER; note = 2'-O-methyluridine-3'-phosphate
  modified_base 13: mod_base = OTHER; note = 2'-O-methyladenosine-3'-phosphate
  modified_base 14: mod_base = OTHER; note = 2'-deoxy-2'-fluoroadenosine-3'-phosphate
  modified_base 15: mod_base = OTHER; note = 2'-O-methyladenosine-3'-phosphate
  modified_base 16: mod_base = OTHER; note = 2'-deoxy-2'-fluorocytidine-3'-phosphate
  modified_base 17: mod_base = OTHER; note = 2'-O-methyluridine-3'-phosphate
  modified_base 18: mod_base = OTHER; note = 2'-O-methylcytidine-3'-phosphate
  modified_base 19: mod_base = OTHER; note = 2'-O-methyladenosine-3'-phosphate
  modified_base 20: mod_base = OTHER; note = 2'-O-methylguanosine-3'-phosphate
  modified_base 21: mod_base = OTHER; note = 2'-O-methyladenosine-3'-phosphorothioate
  modified_base 22: mod_base = OTHER; note = 2'-O-methyladenosine-3'-phosphorothioate
  modified_base 23: mod_base = OTHER; note = 2'-O-methyladenosine
actaaagtgattaaactcagaaa

SEQ ID NO: 5043 - RNA, 23 nt, synthetic construct
  source 1..23: mol_type = other RNA
  modified_base 1: mod_base = OTHER; note = 2'-O-methyladenosine-3'-phosphorothioate
  modified_base 2: mod_base = OTHER; note = 2'-deoxy-2'-fluorouridine-3'-phosphorothioate
  modified_base 3: mod_base = OTHER; note = 2'-O-methylguanosine-3'-phosphate
  modified_base 4: mod_base = OTHER; note = 2'-O-methyladenosine-3'-phosphate
  modified_base 5: mod_base = OTHER; note = 2'-O-methyluridine-3'-phosphate
  modified_base 6: mod_base = OTHER; note = 2'-deoxy-2'-fluoroguanosine-3'-phosphate
  modified_base 7: mod_base = OTHER; note = 2'-O-methyladenosine-3'-phosphate
  modified_base 8: mod_base = OTHER; note = 2'-deoxy-2'-fluoroadenosine-3'-phosphate
  modified_base 9: mod_base = OTHER; note = 2'-deoxy-2'-fluoroguanosine-3'-phosphate
  modified_base 10: mod_base = OTHER; note = 2'-O-methyladenosine-3'-phosphate
  modified_base 11: mod_base = OTHER; note = 2'-O-methylguanosine-3'-phosphate
  modified_base 12: mod_base = OTHER; note = 2'-O-methyluridine-3'-phosphate
  modified_base 13: mod_base = OTHER; note = 2'-O-methyluridine-3'-phosphate
  modified_base 14: mod_base = OTHER; note = 2'-deoxy-2'-fluoroguanosine-3'-phosphate
  modified_base 15: mod_base = OTHER; note = 2'-O-methyluridine-3'-phosphate
  modified_base 16: mod_base = OTHER; note = 2'-deoxy-2'-fluoroadenosine-3'-phosphate
  modified_base 17: mod_base = OTHER; note = 2'-O-methylcytidine-3'-phosphate
  modified_base 18: mod_base = OTHER; note = 2'-O-methyluridine-3'-phosphate
  modified_base 19: mod_base = OTHER; note = 2'-O-methyluridine-3'-phosphate
  modified_base 20: mod_base = OTHER; note = 2'-O-methylguanosine-3'-phosphate
  modified_base 21: mod_base = OTHER; note = 2'-O-methylguanosine-3'-phosphorothioate
  modified_base 22: mod_base = OTHER; note = 2'-O-methyladenosine-3'-phosphorothioate
  modified_base 23: mod_base = OTHER; note = 2'-O-methyladenosine
atgatgaagagttgtacttggaa

SEQ ID NO: 5044 - RNA, 23 nt, synthetic construct
  source 1..23: mol_type = other RNA
  modified_base 1: mod_base = OTHER; note = 2'-O-methyladenosine-3'-phosphorothioate
  modified_base 2: mod_base = OTHER; note = 2'-deoxy-2'-fluoroadenosine-3'-phosphorothioate
  modified_base 3: mod_base = OTHER; note = 2'-O-methyladenosine-3'-phosphate
  modified_base 4: mod_base = OTHER; note = 2'-O-methyladenosine-3'-phosphate
  modified_base 5: mod_base = OTHER; note = 2'-O-methylguanosine-3'-phosphate
  modified_base 6: mod_base = OTHER; note = 2'-deoxy-2'-fluorocytidine-3'-phosphate
  modified_base 7: mod_base = OTHER; note = 2'-O-methyladenosine-3'-phosphate
  modified_base 8: mod_base = OTHER; note = 2'-deoxy-2'-fluorouridine-3'-phosphate
  modified_base 9: mod_base = OTHER; note = 2'-deoxy-2'-fluorouridine-3'-phosphate
  modified_base 10: mod_base = OTHER; note = 2'-O-methyluridine-3'-phosphate
  modified_base 11: mod_base = OTHER; note = 2'-O-methyluridine-3'-phosphate
  modified_base 12: mod_base = OTHER; note = 2'-O-methylcytidine-3'-phosphate
  modified_base 13: mod_base = OTHER; note = 2'-O-methyladenosine-3'-phosphate
  modified_base 14: mod_base = OTHER; note = 2'-deoxy-2'-fluoroadenosine-3'-phosphate
  modified_base 15: mod_base = OTHER; note = 2'-O-methyladenosine-3'-phosphate
  modified_base 16: mod_base = OTHER; note = 2'-deoxy-2'-fluoroguanosine-3'-phosphate
  modified_base 17: mod_base = OTHER; note = 2'-O-methyluridine-3'-phosphate
  modified_base 18: mod_base = OTHER; note = 2'-O-methyladenosine-3'-phosphate
  modified_base 19: mod_base = OTHER; note = 2'-O-methylguanosine-3'-phosphate
  modified_base 20: mod_base = OTHER; note = 2'-O-methyladenosine-3'-phosphate
  modified_base 21: mod_base = OTHER; note = 2'-O-methyladenosine-3'-phosphorothioate
  modified_base 22: mod_base = OTHER; note = 2'-O-methyluridine-3'-phosphorothioate
  modified_base 23: mod_base = OTHER; note = 2'-O-methylcytidine
aaaagcattttcaaagtagaatc

SEQ ID NO: 5045 - RNA, 23 nt, synthetic construct
  source 1..23: mol_type = other RNA
  modified_base 1: mod_base = OTHER; note = 2'-O-methyladenosine-3'-phosphorothioate
  modified_base 2: mod_base = OTHER; note = 2'-deoxy-2'-fluoroadenosine-3'-phosphorothioate
  modified_base 3: mod_base = OTHER; note = 2'-O-methyluridine-3'-phosphate
  modified_base 4: mod_base = OTHER; note = 2'-O-methyladenosine-3'-phosphate
  modified_base 5: mod_base = OTHER; note = 2'-O-methylguanosine-3'-phosphate
  modified_base 6: mod_base = OTHER; note = 2'-deoxy-2'-fluoroguanosine-3'-phosphate
  modified_base 7: mod_base = OTHER; note = 2'-O-methyladenosine-3'-phosphate
  modified_base 8: mod_base = OTHER; note = 2'-deoxy-2'-fluoroadenosine-3'-phosphate
  modified_base 9: mod_base = OTHER; note = 2'-deoxy-2'-fluoroguanosine-3'-phosphate
  modified_base 10: mod_base = OTHER; note = 2'-O-methylguanosine-3'-phosphate
  modified_base 11: mod_base = OTHER; note = 2'-O-methyladenosine-3'-phosphate
  modified_base 12: mod_base = OTHER; note = 2'-O-methyladenosine-3'-phosphate
  modified_base 13: mod_base = OTHER; note = 2'-O-methyluridine-3'-phosphate
  modified_base 14: mod_base = OTHER; note = 2'-deoxy-2'-fluoroadenosine-3'-phosphate
  modified_base 15: mod_base = OTHER; note = 2'-O-methyluridine-3'-phosphate
  modified_base 16: mod_base = OTHER; note = 2'-deoxy-2'-fluoroadenosine-3'-phosphate
  modified_base 17: mod_base = OTHER; note = 2'-O-methyluridine-3'-phosphate
  modified_base 18: mod_base = OTHER; note = 2'-O-methylguanosine-3'-phosphate
  modified_base 19: mod_base = OTHER; note = 2'-O-methyladenosine-3'-phosphate
  modified_base 20: mod_base = OTHER; note = 2'-O-methyluridine-3'-phosphate
  modified_base 21: mod_base = OTHER; note = 2'-O-methyladenosine-3'-phosphorothioate
  modified_base 22: mod_base = OTHER; note = 2'-O-methyladenosine-3'-phosphorothioate
  modified_base 23: mod_base = OTHER; note = 2'-O-methylguanosine
aataggaaggaatatatgataag

SEQ ID NO: 5046 - RNA, 23 nt, synthetic construct
  source 1..23: mol_type = other RNA
  modified_base 1: mod_base = OTHER; note = 2'-O-methyladenosine-3'-phosphorothioate
  modified_base 2: mod_base = OTHER; note = 2'-deoxy-2'-fluoroadenosine-3'-phosphorothioate
  modified_base 3: mod_base = OTHER; note = 2'-O-methyluridine-3'-phosphate
  modified_base 4: mod_base = OTHER; note = 2'-O-methyluridine-3'-phosphate
  modified_base 5: mod_base = OTHER; note = 2'-O-methyladenosine-3'-phosphate
  modified_base 6: mod_base = OTHER; note = 2'-deoxy-2'-fluorouridine-3'-phosphate
  modified_base 7: mod_base = OTHER; note = 2'-O-methylguanosine-3'-phosphate
  modified_base 8: mod_base = OTHER; note = 2'-deoxy-2'-fluorouridine-3'-phosphate
  modified_base 9: mod_base = OTHER; note = 2'-deoxy-2'-fluoroadenosine-3'-phosphate
  modified_base 10: mod_base = OTHER; note = 2'-O-methylguanosine-3'-phosphate
  modified_base 11: mod_base = OTHER; note = 2'-O-methylguanosine-3'-phosphate
  modified_base 12: mod_base = OTHER; note = 2'-O-methyluridine-3'-phosphate
  modified_base 13: mod_base = OTHER; note = 2'-O-methyluridine-3'-phosphate
  modified_base 14: mod_base = OTHER; note = 2'-deoxy-2'-fluorouridine-3'-phosphate
  modified_base 15: mod_base = OTHER; note = 2'-O-methyluridine-3'-phosphate
  modified_base 16: mod_base = OTHER; note = 2'-deoxy-2'-fluoroguanosine-3'-phosphate
  modified_base 17: mod_base = OTHER; note = 2'-O-methyladenosine-3'-phosphate
  modified_base 18: mod_base = OTHER; note = 2'-O-methylguanosine-3'-phosphate
  modified_base 19: mod_base = OTHER; note = 2'-O-methyladenosine-3'-phosphate
  modified_base 20: mod_base = OTHER; note = 2'-O-methylguanosine-3'-phosphate
  modified_base 21: mod_base = OTHER; note = 2'-O-methylguanosine-3'-phosphorothioate
  modified_base 22: mod_base = OTHER; note = 2'-O-methylguanosine-3'-phosphorothioate
  modified_base 23: mod_base = OTHER; note = 2'-O-methyladenosine
aattatgtaggttttgagaggga

SEQ ID NO: 5047 - RNA, 23 nt, synthetic construct
  source 1..23: mol_type = other RNA
  modified_base 1: mod_base = OTHER; note = 2'-O-methyladenosine-3'-phosphorothioate
  modified_base 2: mod_base = OTHER; note = 2'-deoxy-2'-fluorocytidine-3'-phosphorothioate
  modified_base 3: mod_base = OTHER; note = 2'-O-methyluridine-3'-phosphate
  modified_base 4: mod_base = OTHER; note = 2'-O-methylcytidine-3'-phosphate
  modified_base 5: mod_base = OTHER; note = 2'-O-methyladenosine-3'-phosphate
  modified_base 6: mod_base = OTHER; note = 2'-deoxy-2'-fluorocytidine-3'-phosphate
  modified_base 7: mod_base = OTHER; note = 2'-O-methyladenosine-3'-phosphate
  modified_base 8: mod_base = OTHER; note = 2'-deoxy-2'-fluoroguanosine-3'-phosphate
  modified_base 9: mod_base = OTHER; note = 2'-deoxy-2'-fluoroadenosine-3'-phosphate
  modified_base 10: mod_base = OTHER; note = 2'-O-methylguanosine-3'-phosphate
  modified_base 11: mod_base = OTHER; note = 2'-O-methyladenosine-3'-phosphate
  modified_base 12: mod_base = OTHER; note = 2'-O-methyladenosine-3'-phosphate
  modified_base 13: mod_base = OTHER; note = 2'-O-methylcytidine-3'-phosphate
  modified_base 14: mod_base = OTHER; note = 2'-deoxy-2'-fluoroadenosine-3'-phosphate
  modified_base 15: mod_base = OTHER; note = 2'-O-methyladenosine-3'-phosphate
  modified_base 16: mod_base = OTHER; note = 2'-deoxy-2'-fluorouridine-3'-phosphate
  modified_base 17: mod_base = OTHER; note = 2'-O-methyluridine-3'-phosphate
  modified_base 18: mod_base = OTHER; note = 2'-O-methyladenosine-3'-phosphate
  modified_base 19: mod_base = OTHER; note = 2'-O-methyladenosine-3'-phosphate
  modified_base 20: mod_base = OTHER; note = 2'-O-methylcytidine-3'-phosphate
  modified_base 21: mod_base = OTHER; note = 2'-O-methyluridine-3'-phosphorothioate
  modified_base 22: mod_base = OTHER; note = 2'-O-methyluridine-3'-phosphorothioate
  modified_base 23: mod_base = OTHER; note = 2'-O-methylguanosine
actcacagagaacaattaacttg

SEQ ID NO: 5048 - RNA, 23 nt, synthetic construct
  source 1..23: mol_type = other RNA
  modified_base 1: mod_base = OTHER; note = 2'-O-methyladenosine-3'-phosphorothioate
  modified_base 2: mod_base = OTHER; note = 2'-deoxy-2'-fluoroadenosine-3'-phosphorothioate
  modified_base 3: mod_base = OTHER; note = 2'-O-methylguanosine-3'-phosphate
  modified_base 4: mod_base = OTHER; note = 2'-O-methyluridine-3'-phosphate
  modified_base 5: mod_base = OTHER; note = 2'-O-methylguanosine-3'-phosphate
  modified_base 6: mod_base = OTHER; note = 2'-deoxy-2'-fluorouridine-3'-phosphate
  modified_base 7: mod_base = OTHER; note = 2'-O-methyluridine-3'-phosphate
  modified_base 8: mod_base = OTHER; note = 2'-deoxy-2'-fluorouridine-3'-phosphate
  modified_base 9: mod_base = OTHER; note = 2'-deoxy-2'-fluorocytidine-3'-phosphate
  modified_base 10: mod_base = OTHER; note = 2'-O-methyladenosine-3'-phosphate
  modified_base 11: mod_base = OTHER; note = 2'-O-methyladenosine-3'-phosphate
  modified_base 12: mod_base = OTHER; note = 2'-O-methyladenosine-3'-phosphate
  modified_base 13: mod_base = OTHER; note = 2'-O-methyladenosine-3'-phosphate
  modified_base 14: mod_base = OTHER; note = 2'-deoxy-2'-fluorouridine-3'-phosphate
  modified_base 15: mod_base = OTHER; note = 2'-O-methylguanosine-3'-phosphate
  modified_base 16: mod_base = OTHER; note = 2'-deoxy-2'-fluoroadenosine-3'-phosphate
  modified_base 17: mod_base = OTHER; note = 2'-O-methyluridine-3'-phosphate
  modified_base 18: mod_base = OTHER; note = 2'-O-methyladenosine-3'-phosphate
  modified_base 19: mod_base = OTHER; note = 2'-O-methylguanosine-3'-phosphate
  modified_base 20: mod_base = OTHER; note = 2'-O-methyladenosine-3'-phosphate
  modified_base 21: mod_base = OTHER; note = 2'-O-methyladenosine-3'-phosphorothioate
  modified_base 22: mod_base = OTHER; note = 2'-O-methylguanosine-3'-phosphorothioate
  modified_base 23: mod_base = OTHER; note = 2'-O-methyladenosine
aagtgtttcaaaatgatagaaga

SEQ ID NO: 5049 - RNA, 23 nt, synthetic construct
  source 1..23: mol_type = other RNA
  modified_base 1: mod_base = OTHER; note = 2'-O-methyladenosine-3'-phosphorothioate
  modified_base 2: mod_base = OTHER; note = 2'-deoxy-2'-fluoroguanosine-3'-phosphorothioate
  modified_base 3: mod_base = OTHER; note = 2'-O-methyluridine-3'-phosphate
  modified_base 4: mod_base = OTHER; note = 2'-O-methyladenosine-3'-phosphate
  modified_base 5: mod_base = OTHER; note = 2'-O-methyluridine-3'-phosphate
  modified_base 6: mod_base = OTHER; note = 2'-deoxy-2'-fluoroguanosine-3'-phosphate
  modified_base 7: mod_base = OTHER; note = 2'-O-methylcytidine-3'-phosphate
  modified_base 8: mod_base = OTHER; note = 2'-deoxy-2'-fluorouridine-3'-phosphate
  modified_base 9: mod_base = OTHER; note = 2'-deoxy-2'-fluorocytidine-3'-phosphate
  modified_base 10: mod_base = OTHER; note = 2'-O-methyladenosine-3'-phosphate
  modified_base 11: mod_base = OTHER; note = 2'-O-methyladenosine-3'-phosphate
  modified_base 12: mod_base = OTHER; note = 2'-O-methylguanosine-3'-phosphate
  modified_base 13: mod_base = OTHER; note = 2'-O-methyluridine-3'-phosphate
  modified_base 14: mod_base = OTHER; note = 2'-deoxy-2'-fluorouridine-3'-phosphate
  modified_base 15: mod_base = OTHER; note = 2'-O-methylcytidine-3'-phosphate
  modified_base 16: mod_base = OTHER; note = 2'-deoxy-2'-fluoroadenosine-3'-phosphate
  modified_base 17: mod_base = OTHER; note = 2'-O-methyladenosine-3'-phosphate
  modified_base 18: mod_base = OTHER; note = 2'-O-methylguanosine-3'-phosphate
  modified_base 19: mod_base = OTHER; note = 2'-O-methylcytidine-3'-phosphate
  modified_base 20: mod_base = OTHER; note = 2'-O-methyluridine-3'-phosphate
  modified_base 21: mod_base = OTHER; note = 2'-O-methylguanosine-3'-phosphorothioate
  modified_base 22: mod_base = OTHER; note = 2'-O-methylguanosine-3'-phosphorothioate
  modified_base 23: mod_base = OTHER; note = 2'-O-methylguanosine
agtatgctcaagttcaagctggg

SEQ ID NO: 5050 - RNA, 23 nt, synthetic construct
  source 1..23: mol_type = other RNA
  modified_base 1: mod_base = OTHER; note = 2'-O-methyladenosine-3'-phosphorothioate
  modified_base 2: mod_base = OTHER; note = 2'-deoxy-2'-fluoroadenosine-3'-phosphorothioate
  modified_base 3: mod_base = OTHER; note = 2'-O-methyladenosine-3'-phosphate
  modified_base 4: mod_base = OTHER; note = 2'-O-methyladenosine-3'-phosphate
  modified_base 5: mod_base = OTHER; note = 2'-O-methyladenosine-3'-phosphate
  modified_base 6: mod_base = OTHER; note = 2'-deoxy-2'-fluorouridine-3'-phosphate
  modified_base 7: mod_base = OTHER; note = 2'-O-methyluridine-3'-phosphate
  modified_base 8: mod_base = OTHER; note = 2'-deoxy-2'-fluorocytidine-3'-phosphate
  modified_base 9: mod_base = OTHER; note = 2'-deoxy-2'-fluoroadenosine-3'-phosphate
  modified_base 10: mod_base = OTHER; note = 2'-O-methyladenosine-3'-phosphate
  modified_base 11: mod_base = OTHER; note = 2'-O-methyladenosine-3'-phosphate
  modified_base 12: mod_base = OTHER; note = 2'-O-methyladenosine-3'-phosphate
  modified_base 13: mod_base = OTHER; note = 2'-O-methyluridine-3'-phosphate
  modified_base 14: mod_base = OTHER; note = 2'-deoxy-2'-fluorouridine-3'-phosphate
  modified_base 15: mod_base = OTHER; note = 2'-O-methyluridine-3'-phosphate
  modified_base 16: mod_base = OTHER; note = 2'-deoxy-2'-fluoroguanosine-3'-phosphate
  modified_base 17: mod_base = OTHER; note = 2'-O-methylguanosine-3'-phosphate
  modified_base 18: mod_base = OTHER; note = 2'-O-methylguanosine-3'-phosphate
  modified_base 19: mod_base = OTHER; note = 2'-O-methyluridine-3'-phosphate
  modified_base 20: mod_base = OTHER; note = 2'-O-methylguanosine-3'-phosphate
  modified_base 21: mod_base = OTHER; note = 2'-O-methyladenosine-3'-phosphorothioate
  modified_base 22: mod_base = OTHER; note = 2'-O-methyladenosine-3'-phosphorothioate
  modified_base 23: mod_base = OTHER; note = 2'-O-methylguanosine
aaaaattcaaaatttgggtgaag

SEQ ID NO: 5051 - RNA, 23 nt, synthetic construct
  source 1..23: mol_type = other RNA
  modified_base 1: mod_base = OTHER; note = 2'-O-methyladenosine-3'-phosphorothioate
  modified_base 2: mod_base = OTHER; note = 2'-deoxy-2'-fluoroguanosine-3'-phosphorothioate
  modified_base 3: mod_base = OTHER; note = 2'-O-methyladenosine-3'-phosphate
  modified_base 4: mod_base = OTHER; note = 2'-O-methyluridine-3'-phosphate
  modified_base 5: mod_base = OTHER; note = 2'-O-methylcytidine-3'-phosphate
  modified_base 6: mod_base = OTHER; note = 2'-deoxy-2'-fluoroadenosine-3'-phosphate
  modified_base 7: mod_base = OTHER; note = 2'-O-methylguanosine-3'-phosphate
  modified_base 8: mod_base = OTHER; note = 2'-deoxy-2'-fluoroadenosine-3'-phosphate
  modified_base 9: mod_base = OTHER; note = 2'-deoxy-2'-fluoroadenosine-3'-phosphate
  modified_base 10: mod_base = OTHER; note = 2'-O-methyluridine-3'-phosphate
  modified_base 11: mod_base = OTHER; note = 2'-O-methyladenosine-3'-phosphate
  modified_base 12: mod_base = OTHER; note = 2'-O-methylguanosine-3'-phosphate
  modified_base 13: mod_base = OTHER; note = 2'-O-methyluridine-3'-phosphate
  modified_base 14: mod_base = OTHER; note = 2'-deoxy-2'-fluorouridine-3'-phosphate
  modified_base 15: mod_base = OTHER; note = 2'-O-methyladenosine-3'-phosphate
  modified_base 16: mod_base = OTHER; note = 2'-deoxy-2'-fluorouridine-3'-phosphate
  modified_base 17: mod_base = OTHER; note = 2'-O-methyladenosine-3'-phosphate
  modified_base 18: mod_base = OTHER; note = 2'-O-methylcytidine-3'-phosphate
  modified_base 19: mod_base = OTHER; note = 2'-O-methyluridine-3'-phosphate
  modified_base 20: mod_base = OTHER; note = 2'-O-methylguanosine-3'-phosphate
  modified_base 21: mod_base = OTHER; note = 2'-O-methylcytidine-3'-phosphorothioate
  modified_base 22: mod_base = OTHER; note = 2'-O-methyluridine-3'-phosphorothioate
  modified_base 23: mod_base = OTHER; note = 2'-O-methyladenosine
agatcagaatagttatactgcta

SEQ ID NO: 5052 - RNA, 23 nt, synthetic construct
  source 1..23: mol_type = other RNA
  modified_base 1: mod_base = OTHER; note = 2'-O-methyladenosine-3'-phosphorothioate
  modified_base 2: mod_base = OTHER; note = 2'-deoxy-2'-fluorouridine-3'-phosphorothioate
  modified_base 3: mod_base = OTHER; note = 2'-O-methylguanosine-3'-phosphate
  modified_base 4: mod_base = OTHER; note = 2'-O-methyladenosine-3'-phosphate
  modified_base 5: mod_base = OTHER; note = 2'-O-methylguanosine-3'-phosphate
  modified_base 6: mod_base = OTHER; note = 2'-deoxy-2'-fluoroadenosine-3'-phosphate
  modified_base 7: mod_base = OTHER; note = 2'-O-methyladenosine-3'-phosphate
  modified_base 8: mod_base = OTHER; note = 2'-deoxy-2'-fluoroguanosine-3'-phosphate
  modified_base 9: mod_base = OTHER; note = 2'-deoxy-2'-fluorocytidine-3'-phosphate
  modified_base 10: mod_base = OTHER; note = 2'-O-methyladenosine-3'-phosphate
  modified_base 11: mod_base = OTHER; note = 2'-O-methylcytidine-3'-phosphate
  modified_base 12: mod_base = OTHER; note = 2'-O-methyladenosine-3'-phosphate
  modified_base 13: mod_base = OTHER; note = 2'-O-methyladenosine-3'-phosphate
  modified_base 14: mod_base = OTHER; note = 2'-deoxy-2'-fluoroadenosine-3'-phosphate
  modified_base 15: mod_base = OTHER; note = 2'-O-methylguanosine-3'-phosphate
  modified_base 16: mod_base = OTHER; note = 2'-deoxy-2'-fluoroadenosine-3'-phosphate
  modified_base 17: mod_base = OTHER; note = 2'-O-methyladenosine-3'-phosphate
  modified_base 18: mod_base = OTHER; note = 2'-O-methyladenosine-3'-phosphate
  modified_base 19: mod_base = OTHER; note = 2'-O-methyladenosine-3'-phosphate
  modified_base 20: mod_base = OTHER; note = 2'-O-methylcytidine-3'-phosphate
  modified_base 21: mod_base = OTHER; note = 2'-O-methylcytidine-3'-phosphorothioate
  modified_base 22: mod_base = OTHER; note = 2'-O-methyluridine-3'-phosphorothioate
  modified_base 23: mod_base = OTHER; note = 2'-O-methyladenosine
atgagaagcacaaagaaaaccta

SEQ ID NO: 5053 - RNA, 23 nt, synthetic construct
  source 1..23: mol_type = other RNA
  modified_base 1: mod_base = OTHER; note = 2'-O-methyladenosine-3'-phosphorothioate
  modified_base 2: mod_base = OTHER; note = 2'-deoxy-2'-fluoroguanosine-3'-phosphorothioate
  modified_base 3: mod_base = OTHER; note = 2'-O-methyluridine-3'-phosphate
  modified_base 4: mod_base = OTHER; note = 2'-O-methyluridine-3'-phosphate
  modified_base 5: mod_base = OTHER; note = 2'-O-methylguanosine-3'-phosphate
  modified_base 6: mod_base = OTHER; note = 2'-deoxy-2'-fluoroguanosine-3'-phosphate
  modified_base 7: mod_base = OTHER; note = 2'-O-methyluridine-3'-phosphate
  modified_base 8: mod_base = OTHER; note = 2'-deoxy-2'-fluoroadenosine-3'-phosphate
  modified_base 9: mod_base = OTHER; note = 2'-deoxy-2'-fluorouridine-3'-phosphate
  modified_base 10: mod_base = OTHER; note = 2'-O-methylguanosine-3'-phosphate
  modified_base 11: mod_base = OTHER; note = 2'-O-methyluridine-3'-phosphate
  modified_base 12: mod_base = OTHER; note = 2'-O-methyluridine-3'-phosphate
  modified_base 13: mod_base = OTHER; note = 2'-O-methyluridine-3'-phosphate
  modified_base 14: mod_base = OTHER; note = 2'-deoxy-2'-fluoroadenosine-3'-phosphate
  modified_base 15: mod_base = OTHER; note = 2'-O-methyluridine-3'-phosphate
  modified_base 16: mod_base = OTHER; note = 2'-deoxy-2'-fluorouridine-3'-phosphate
  modified_base 17: mod_base = OTHER; note = 2'-O-methylcytidine-3'-phosphate
  modified_base 18: mod_base = OTHER; note = 2'-O-methyluridine-3'-phosphate
  modified_base 19: mod_base = OTHER; note = 2'-O-methylcytidine-3'-phosphate
  modified_base 20: mod_base = OTHER; note = 2'-O-methyladenosine-3'-phosphate
  modified_base 21: mod_base = OTHER; note = 2'-O-methyluridine-3'-phosphorothioate
  modified_base 22: mod_base = OTHER; note = 2'-O-methyluridine-3'-phosphorothioate
  modified_base 23: mod_base = OTHER; note = 2'-O-methyluridine
agttggtatgtttattctcattt

SEQ ID NO: 5054 - RNA, 23 nt, synthetic construct
  source 1..23: mol_type = other RNA
  modified_base 1: mod_base = OTHER; note = 2'-O-methyladenosine-3'-phosphorothioate
  modified_base 2: mod_base = OTHER; note = 2'-deoxy-2'-fluorouridine-3'-phosphorothioate
  modified_base 3: mod_base = OTHER; note = 2'-O-methyluridine-3'-phosphate
  modified_base 4: mod_base = OTHER; note = 2'-O-methyluridine-3'-phosphate
  modified_base 5: mod_base = OTHER; note = 2'-O-methyladenosine-3'-phosphate
  modified_base 6: mod_base = OTHER; note = 2'-deoxy-2'-fluorouridine-3'-phosphate
  modified_base 7: mod_base = OTHER; note = 2'-O-methyluridine-3'-phosphate
  modified_base 8: mod_base = OTHER; note = 2'-deoxy-2'-fluorocytidine-3'-phosphate
  modified_base 9: mod_base = OTHER; note = 2'-deoxy-2'-fluoroadenosine-3'-phosphate
  modified_base 10: mod_base = OTHER; note = 2'-O-methyladenosine-3'-phosphate
  modified_base 11: mod_base = OTHER; note = 2'-O-methyluridine-3'-phosphate
  modified_base 12: mod_base = OTHER; note = 2'-O-methylguanosine-3'-phosphate
  modified_base 13: mod_base = OTHER; note = 2'-O-methyladenosine-3'-phosphate
  modified_base 14: mod_base = OTHER; note = 2'-deoxy-2'-fluoroadenosine-3'-phosphate
  modified_base 15: mod_base = OTHER; note = 2'-O-methyladenosine-3'-phosphate
  modified_base 16: mod_base = OTHER; note = 2'-deoxy-2'-fluorouridine-3'-phosphate
  modified_base 17: mod_base = OTHER; note = 2'-O-methylcytidine-3'-phosphate
  modified_base 18: mod_base = OTHER; note = 2'-O-methyladenosine-3'-phosphate
  modified_base 19: mod_base = OTHER; note = 2'-O-methylcytidine-3'-phosphate
  modified_base 20: mod_base = OTHER; note = 2'-O-methyluridine-3'-phosphate
  modified_base 21: mod_base = OTHER; note = 2'-O-methylcytidine-3'-phosphorothioate
  modified_base 22: mod_base = OTHER; note = 2'-O-methylguanosine-3'-phosphorothioate
  modified_base 23: mod_base = OTHER; note = 2'-O-methyladenosine
atttattcaatgaaatcactcga

SEQ ID NO: 5055 - RNA, 23 nt, synthetic construct
  source 1..23: mol_type = other RNA
  modified_base 1: mod_base = OTHER; note = 2'-O-methyladenosine-3'-phosphorothioate
  modified_base 2: mod_base = OTHER; note = 2'-deoxy-2'-fluorocytidine-3'-phosphorothioate
  modified_base 3: mod_base = OTHER; note = 2'-O-methyladenosine-3'-phosphate
  modified_base 4: mod_base = OTHER; note = 2'-O-methyluridine-3'-phosphate
  modified_base 5: mod_base = OTHER; note = 2'-O-methyluridine-3'-phosphate
  modified_base 6: mod_base = OTHER; note = 2'-deoxy-2'-fluorouridine-3'-phosphate
  modified_base 7: mod_base = OTHER; note = 2'-O-methyluridine-3'-phosphate
  modified_base 8: mod_base = OTHER; note = 2'-deoxy-2'-fluoroadenosine-3'-phosphate
  modified_base 9: mod_base = OTHER; note = 2'-deoxy-2'-fluorocytidine-3'-phosphate
  modified_base 10: mod_base = OTHER; note = 2'-O-methyladenosine-3'-phosphate
  modified_base 11: mod_base = OTHER; note = 2'-O-methyladenosine-3'-phosphate
  modified_base 12: mod_base = OTHER; note = 2'-O-methyladenosine-3'-phosphate
  modified_base 13: mod_base = OTHER; note = 2'-O-methyluridine-3'-phosphate
  modified_base 14: mod_base = OTHER; note = 2'-deoxy-2'-fluoroadenosine-3'-phosphate
  modified_base 15: mod_base = OTHER; note = 2'-O-methyluridine-3'-phosphate
  modified_base 16: mod_base = OTHER; note = 2'-deoxy-2'-fluoroguanosine-3'-phosphate
  modified_base 17: mod_base = OTHER; note = 2'-O-methylguanosine-3'-phosphate
  modified_base 18: mod_base = OTHER; note = 2'-O-methyladenosine-3'-phosphate
  modified_base 19: mod_base = OTHER; note = 2'-O-methyladenosine-3'-phosphate
  modified_base 20: mod_base = OTHER; note = 2'-O-methyladenosine-3'-phosphate
  modified_base 21: mod_base = OTHER; note = 2'-O-methylcytidine-3'-phosphorothioate
  modified_base 22: mod_base = OTHER; note = 2'-O-methyluridine-3'-phosphorothioate
  modified_base 23: mod_base = OTHER; note = 2'-O-methylguanosine
acattttacaaatatggaaactg

SEQ ID NO: 5056 - RNA, 23 nt, synthetic construct
  source 1..23: mol_type = other RNA
  modified_base 1: mod_base = OTHER; note = 2'-O-methyladenosine-3'-phosphorothioate
  modified_base 2: mod_base = OTHER; note = 2'-deoxy-2'-fluoroguanosine-3'-phosphorothioate
  modified_base 3: mod_base = OTHER; note = 2'-O-methyluridine-3'-phosphate
  modified_base 4: mod_base = OTHER; note = 2'-O-methyluridine-3'-phosphate
  modified_base 5: mod_base = OTHER; note = 2'-O-methyluridine-3'-phosphate
  modified_base 6: mod_base = OTHER; note = 2'-deoxy-2'-fluoroguanosine-3'-phosphate
  modified_base 7: mod_base = OTHER; note = 2'-O-methyladenosine-3'-phosphate
  modified_base 8: mod_base = OTHER; note = 2'-deoxy-2'-fluorocytidine-3'-phosphate
  modified_base 9: mod_base = OTHER; note = 2'-deoxy-2'-fluorocytidine-3'-phosphate
  modified_base 10: mod_base = OTHER; note = 2'-O-methyladenosine-3'-phosphate
  modified_base 11: mod_base = OTHER; note = 2'-O-methyladenosine-3'-phosphate
  modified_base 12: mod_base = OTHER; note = 2'-O-methyladenosine-3'-phosphate
  modified_base 13: mod_base = OTHER; note = 2'-O-methyladenosine-3'-phosphate
  modified_base 14: mod_base = OTHER; note = 2'-deoxy-2'-fluoroadenosine-3'-phosphate
  modified_base 15: mod_base = OTHER; note = 2'-O-methylcytidine-3'-phosphate
  modified_base 16: mod_base = OTHER; note = 2'-deoxy-2'-fluoroadenosine-3'-phosphate
  modified_base 17: mod_base = OTHER; note = 2'-O-methylguanosine-3'-phosphate
  modified_base 18: mod_base = OTHER; note = 2'-O-methylcytidine-3'-phosphate
  modified_base 19: mod_base = OTHER; note = 2'-O-methyladenosine-3'-phosphate
  modified_base 20: mod_base = OTHER; note = 2'-O-methyluridine-3'-phosphate
  modified_base 21: mod_base = OTHER; note = 2'-O-methylguanosine-3'-phosphorothioate
  modified_base 22: mod_base = OTHER; note = 2'-O-methylguanosine-3'-phosphorothioate
  modified_base 23: mod_base = OTHER; note = 2'-O-methylcytidine
agtttgaccaaaaacagcatggc

SEQ ID NO: 5057 - RNA, 23 nt, synthetic construct
  source 1..23: mol_type = other RNA
  modified_base 1: mod_base = OTHER; note = 2'-O-methyladenosine-3'-phosphorothioate
  modified_base 2: mod_base = OTHER; note = 2'-deoxy-2'-fluoroguanosine-3'-phosphorothioate
  modified_base 3: mod_base = OTHER; note = 2'-O-methyladenosine-3'-phosphate
  modified_base 4: mod_base = OTHER; note = 2'-O-methylcytidine-3'-phosphate
  modified_base 5: mod_base = OTHER; note = 2'-O-methyladenosine-3'-phosphate
  modified_base 6: mod_base = OTHER; note = 2'-deoxy-2'-fluorouridine-3'-phosphate
  modified_base 7: mod_base = OTHER; note = 2'-O-methyluridine-3'-phosphate
  modified_base 8: mod_base = OTHER; note = 2'-deoxy-2'-fluoroadenosine-3'-phosphate
  modified_base 9: mod_base = OTHER; note = 2'-deoxy-2'-fluorouridine-3'-phosphate
  modified_base 10: mod_base = OTHER; note = 2'-O-methyladenosine-3'-phosphate
  modified_base 11: mod_base = OTHER; note = 2'-O-methylcytidine-3'-phosphate
  modified_base 12: mod_base = OTHER; note = 2'-O-methyluridine-3'-phosphate
  modified_base 13: mod_base = OTHER; note = 2'-O-methylguanosine-3'-phosphate
  modified_base 14: mod_base = OTHER; note = 2'-deoxy-2'-fluorocytidine-3'-phosphate
  modified_base 15: mod_base = OTHER; note = 2'-O-methyladenosine-3'-phosphate
  modified_base 16: mod_base = OTHER; note = 2'-deoxy-2'-fluoroguanosine-3'-phosphate
  modified_base 17: mod_base = OTHER; note = 2'-O-methyluridine-3'-phosphate
  modified_base 18: mod_base = OTHER; note = 2'-O-methyladenosine-3'-phosphate
  modified_base 19: mod_base = OTHER; note = 2'-O-methylguanosine-3'-phosphate
  modified_base 20: mod_base = OTHER; note = 2'-O-methyladenosine-3'-phosphate
  modified_base 21: mod_base = OTHER; note = 2'-O-methylguanosine-3'-phosphorothioate
  modified_base 22: mod_base = OTHER; note = 2'-O-methylguanosine-3'-phosphorothioate
  modified_base 23: mod_base = OTHER; note = 2'-O-methyladenosine
agacattatactgcagtagagga

SEQ ID NO: 5058 - RNA, 23 nt, synthetic construct
  source 1..23: mol_type = other RNA
  modified_base 1: mod_base = OTHER; note = 2'-O-methyladenosine-3'-phosphorothioate
  modified_base 2: mod_base = OTHER; note = 2'-deoxy-2'-fluoroguanosine-3'-phosphorothioate
  modified_base 3: mod_base = OTHER; note = 2'-O-methyluridine-3'-phosphate
  modified_base 4: mod_base = OTHER; note = 2'-O-methyladenosine-3'-phosphate
  modified_base 5: mod_base = OTHER; note = 2'-O-methyladenosine-3'-phosphate
  modified_base 6: mod_base = OTHER; note = 2'-deoxy-2'-fluorocytidine-3'-phosphate
  modified_base 7: mod_base = OTHER; note = 2'-O-methyluridine-3'-phosphate
  modified_base 8: mod_base = OTHER; note = 2'-deoxy-2'-fluoroadenosine-3'-phosphate
  modified_base 9: mod_base = OTHER; note = 2'-deoxy-2'-fluoroadenosine-3'-phosphate
  modified_base 10: mod_base = OTHER; note = 2'-O-methyladenosine-3'-phosphate
  modified_base 11: mod_base = OTHER; note = 2'-O-methyluridine-3'-phosphate
  modified_base 12: mod_base = OTHER; note = 2'-O-methylcytidine-3'-phosphate
  modified_base 13: mod_base = OTHER; note = 2'-O-methyladenosine-3'-phosphate
  modified_base 14: mod_base = OTHER; note = 2'-deoxy-2'-fluoroadenosine-3'-phosphate
  modified_base 15: mod_base = OTHER; note = 2'-O-methyladenosine-3'-phosphate
  modified_base 16: mod_base = OTHER; note = 2'-deoxy-2'-fluorocytidine-3'-phosphate
  modified_base 17: mod_base = OTHER; note = 2'-O-methyladenosine-3'-phosphate
  modified_base 18: mod_base = OTHER; note = 2'-O-methylcytidine-3'-phosphate
  modified_base 19: mod_base = OTHER; note = 2'-O-methylcytidine-3'-phosphate
  modified_base 20: mod_base = OTHER; note = 2'-O-methyladenosine-3'-phosphate
  modified_base 21: mod_base = OTHER; note = 2'-O-methyladenosine-3'-phosphorothioate
  modified_base 22: mod_base = OTHER; note = 2'-O-methylguanosine-3'-phosphorothioate
  modified_base 23: mod_base = OTHER; note = 2'-O-methyluridine
agtaactaaatcaaacaccaagt

SEQ ID NO: 5059 - RNA, 23 nt, synthetic construct
  source 1..23: mol_type = other RNA
  modified_base 1: mod_base = OTHER; note = 2'-O-methyladenosine-3'-phosphorothioate
  modified_base 2: mod_base = OTHER; note = 2'-deoxy-2'-fluoroguanosine-3'-phosphorothioate
  modified_base 3: mod_base = OTHER; note = 2'-O-methyluridine-3'-phosphate
  modified_base 4: mod_base = OTHER; note = 2'-O-methyladenosine-3'-phosphate
  modified_base 5: mod_base = OTHER; note = 2'-O-methyladenosine-3'-phosphate
  modified_base 6: mod_base = OTHER; note = 2'-deoxy-2'-fluoroadenosine-3'-phosphate
  modified_base 7: mod_base = OTHER; note = 2'-O-methyladenosine-3'-phosphate
  modified_base 8: mod_base = OTHER; note = 2'-deoxy-2'-fluorocytidine-3'-phosphate
  modified_base 9: mod_base = OTHER; note = 2'-deoxy-2'-fluorouridine-3'-phosphate
  modified_base 10: mod_base = OTHER; note = 2'-O-methyluridine-3'-phosphate
  modified_base 11: mod_base = OTHER; note = 2'-O-methylcytidine-3'-phosphate
  modified_base 12: mod_base = OTHER; note = 2'-O-methyluridine-3'-phosphate
  modified_base 13: mod_base = OTHER; note = 2'-O-methylguanosine-3'-phosphate
  modified_base 14: mod_base = OTHER; note = 2'-deoxy-2'-fluoroguanosine-3'-phosphate
  modified_base 15: mod_base = OTHER; note = 2'-O-methyladenosine-3'-phosphate
  modified_base 16: mod_base = OTHER; note = 2'-deoxy-2'-fluoroguanosine-3'-phosphate
  modified_base 17: mod_base = OTHER; note = 2'-O-methyladenosine-3'-phosphate
  modified_base 18: mod_base = OTHER; note = 2'-O-methyladenosine-3'-phosphate
  modified_base 19: mod_base = OTHER; note = 2'-O-methyladenosine-3'-phosphate
  modified_base 20: mod_base = OTHER; note = 2'-O-methylguanosine-3'-phosphate
  modified_base 21: mod_base = OTHER; note = 2'-O-methyladenosine-3'-phosphorothioate
  modified_base 22: mod_base = OTHER; note = 2'-O-methyluridine-3'-phosphorothioate
  modified_base 23: mod_base = OTHER; note = 2'-O-methyladenosine
agtaaaacttctggagaaagata

SEQ ID NO: 5060 - RNA, 23 nt, synthetic construct
  source 1..23: mol_type = other RNA
  modified_base 1: mod_base = OTHER; note = 2'-O-methyladenosine-3'-phosphorothioate
  modified_base 2: mod_base = OTHER; note = 2'-deoxy-2'-fluoroadenosine-3'-phosphorothioate
  modified_base 3: mod_base = OTHER; note = 2'-O-methyladenosine-3'-phosphate
  modified_base 4: mod_base = OTHER; note = 2'-O-methyluridine-3'-phosphate
  modified_base 5: mod_base = OTHER; note = 2'-O-methyluridine-3'-phosphate
  modified_base 6: mod_base = OTHER; note = 2'-deoxy-2'-fluoroguanosine-3'-phosphate
  modified_base 7: mod_base = OTHER; note = 2'-O-methyluridine-3'-phosphate
  modified_base 8: mod_base = OTHER; note = 2'-deoxy-2'-fluorouridine-3'-phosphate
  modified_base 9: mod_base = OTHER; note = 2'-deoxy-2'-fluoroguanosine-3'-phosphate
  modified_base 10: mod_base = OTHER; note = 2'-O-methyluridine-3'-phosphate
  modified_base 11: mod_base = OTHER; note = 2'-O-methyladenosine-3'-phosphate
  modified_base 12: mod_base = OTHER; note = 2'-O-methyluridine-3'-phosphate
  modified_base 13: mod_base = OTHER; note = 2'-O-methyluridine-3'-phosphate
  modified_base 14: mod_base = OTHER; note = 2'-deoxy-2'-fluorouridine-3'-phosphate
  modified_base 15: mod_base = OTHER; note = 2'-O-methylguanosine-3'-phosphate
  modified_base 16: mod_base = OTHER; note = 2'-deoxy-2'-fluoroadenosine-3'-phosphate
  modified_base 17: mod_base = OTHER; note = 2'-O-methyladenosine-3'-phosphate
  modified_base 18: mod_base = OTHER; note = 2'-O-methylcytidine-3'-phosphate
  modified_base 19: mod_base = OTHER; note = 2'-O-methyluridine-3'-phosphate
  modified_base 20: mod_base = OTHER; note = 2'-O-methylcytidine-3'-phosphate
  modified_base 21: mod_base = OTHER; note = 2'-O-methyluridine-3'-phosphorothioate
  modified_base 22: mod_base = OTHER; note = 2'-O-methylcytidine-3'-phosphorothioate
  modified_base 23: mod_base = OTHER; note = 2'-O-methyladenosine
aaattgttgtatttgaactctca

SEQ ID NO: 5061 - RNA, 23 nt, synthetic construct
  source 1..23: mol_type = other RNA
  modified_base 1: mod_base = OTHER; note = 2'-O-methyladenosine-3'-phosphorothioate
  modified_base 2: mod_base = OTHER; note = 2'-deoxy-2'-fluorouridine-3'-phosphorothioate
  modified_base 3: mod_base = OTHER; note = 2'-O-methylguanosine-3'-phosphate
  modified_base 4: mod_base = OTHER; note = 2'-O-methyladenosine-3'-phosphate
  modified_base 5: mod_base = OTHER; note = 2'-O-methyluridine-3'-phosphate
  modified_base 6: mod_base = OTHER; note = 2'-deoxy-2'-fluorouridine-3'-phosphate
  modified_base 7: mod_base = OTHER; note = 2'-O-methyladenosine-3'-phosphate
  modified_base 8: mod_base = OTHER; note = 2'-deoxy-2'-fluoroguanosine-3'-phosphate
  modified_base 9: mod_base = OTHER; note = 2'-deoxy-2'-fluorouridine-3'-phosphate
  modified_base 10: mod_base = OTHER; note = 2'-O-methyladenosine-3'-phosphate
  modified_base 11: mod_base = OTHER; note = 2'-O-methyladenosine-3'-phosphate
  modified_base 12: mod_base = OTHER; note = 2'-O-methyluridine-3'-phosphate
  modified_base 13: mod_base = OTHER; note = 2'-O-methylcytidine-3'-phosphate
  modified_base 14: mod_base = OTHER; note = 2'-deoxy-2'-fluoroadenosine-3'-phosphate
  modified_base 15: mod_base = OTHER; note = 2'-O-methyladenosine-3'-phosphate
  modified_base 16: mod_base = OTHER; note = 2'-deoxy-2'-fluorocytidine-3'-phosphate
  modified_base 17: mod_base = OTHER; note = 2'-O-methyladenosine-3'-phosphate
  modified_base 18: mod_base = OTHER; note = 2'-O-methylcytidine-3'-phosphate
  modified_base 19: mod_base = OTHER; note = 2'-O-methyladenosine-3'-phosphate
  modified_base 20: mod_base = OTHER; note = 2'-O-methylguanosine-3'-phosphate
  modified_base 21: mod_base = OTHER; note = 2'-O-methyladenosine-3'-phosphorothioate
  modified_base 22: mod_base = OTHER; note = 2'-O-methylguanosine-3'-phosphorothioate
  modified_base 23: mod_base = OTHER; note = 2'-O-methyladenosine
atgattagtaatcaacacagaga

SEQ ID NO: 5062 - RNA, 23 nt, synthetic construct
  source 1..23: mol_type = other RNA
  modified_base 1: mod_base = OTHER; note = 2'-O-methyladenosine-3'-phosphorothioate
  modified_base 2: mod_base = OTHER; note = 2'-deoxy-2'-fluoroadenosine-3'-phosphorothioate
  modified_base 3: mod_base = OTHER; note = 2'-O-methylguanosine-3'-phosphate
  modified_base 4: mod_base = OTHER; note = 2'-O-methyladenosine-3'-phosphate
  modified_base 5: mod_base = OTHER; note = 2'-O-methylguanosine-3'-phosphate
  modified_base 6: mod_base = OTHER; note = 2'-deoxy-2'-fluoroadenosine-3'-phosphate
  modified_base 7: mod_base = OTHER; note = 2'-O-methylguanosine-3'-phosphate
  modified_base 8: mod_base = OTHER; note = 2'-deoxy-2'-fluoroadenosine-3'-phosphate
  modified_base 9: mod_base = OTHER; note = 2'-deoxy-2'-fluoroadenosine-3'-phosphate
  modified_base 10: mod_base = OTHER; note = 2'-O-methylguanosine-3'-phosphate
  modified_base 11: mod_base = OTHER; note = 2'-O-methylcytidine-3'-phosphate
  modified_base 12: mod_base = OTHER; note = 2'-O-methyluridine-3'-phosphate
  modified_base 13: mod_base = OTHER; note = 2'-O-methyladenosine-3'-phosphate
  modified_base 14: mod_base = OTHER; note = 2'-deoxy-2'-fluoroadenosine-3'-phosphate
  modified_base 15: mod_base = OTHER; note = 2'-O-methyladenosine-3'-phosphate
  modified_base 16: mod_base = OTHER; note = 2'-deoxy-2'-fluoroadenosine-3'-phosphate
  modified_base 17: mod_base = OTHER; note = 2'-O-methyladenosine-3'-phosphate
  modified_base 18: mod_base = OTHER; note = 2'-O-methyladenosine-3'-phosphate
  modified_base 19: mod_base = OTHER; note = 2'-O-methylguanosine-3'-phosphate
  modified_base 20: mod_base = OTHER; note = 2'-O-methylcytidine-3'-phosphate
  modified_base 21: mod_base = OTHER; note = 2'-O-methyladenosine-3'-phosphorothioate
  modified_base 22: mod_base = OTHER; note = 2'-O-methylcytidine-3'-phosphorothioate
  modified_base 23: mod_base = OTHER; note = 2'-O-methyladenosine
aagagagaagctaaaaaagcaca

SEQ ID NO: 5063 - RNA, 23 nt, synthetic construct
  source 1..23: mol_type = other RNA
  modified_base 1: mod_base = OTHER; note = 2'-O-methyladenosine-3'-phosphorothioate
  modified_base 2: mod_base = OTHER; note = 2'-deoxy-2'-fluoroguanosine-3'-phosphorothioate
  modified_base 3: mod_base = OTHER; note = 2'-O-methyluridine-3'-phosphate
  modified_base 4: mod_base = OTHER; note = 2'-O-methyladenosine-3'-phosphate
  modified_base 5: mod_base = OTHER; note = 2'-O-methyladenosine-3'-phosphate
  modified_base 6: mod_base = OTHER; note = 2'-deoxy-2'-fluoroguanosine-3'-phosphate
  modified_base 7: mod_base = OTHER; note = 2'-O-methyladenosine-3'-phosphate
  modified_base 8: mod_base = OTHER; note = 2'-deoxy-2'-fluorocytidine-3'-phosphate
  modified_base 9: mod_base = OTHER; note = 2'-deoxy-2'-fluoroguanosine-3'-phosphate
  modified_base 10: mod_base = OTHER; note = 2'-O-methyluridine-3'-phosphate
  modified_base 11: mod_base = OTHER; note = 2'-O-methyluridine-3'-phosphate
  modified_base 12: mod_base = OTHER; note = 2'-O-methylguanosine-3'-phosphate
  modified_base 13: mod_base = OTHER; note = 2'-O-methylcytidine-3'-phosphate
  modified_base 14: mod_base = OTHER; note = 2'-deoxy-2'-fluoroadenosine-3'-phosphate
  modified_base 15: mod_base = OTHER; note = 2'-O-methylguanosine-3'-phosphate
  modified_base 16: mod_base = OTHER; note = 2'-deoxy-2'-fluorouridine-3'-phosphate
  modified_base 17: mod_base = OTHER; note = 2'-O-methylcytidine-3'-phosphate
  modified_base 18: mod_base = OTHER; note = 2'-O-methyladenosine-3'-phosphate
  modified_base 19: mod_base = OTHER; note = 2'-O-methylcytidine-3'-phosphate
  modified_base 20: mod_base = OTHER; note = 2'-O-methyladenosine-3'-phosphate
  modified_base 21: mod_base = OTHER; note = 2'-O-methylguanosine-3'-phosphorothioate
  modified_base 22: mod_base = OTHER; note = 2'-O-methylguanosine-3'-phosphorothioate
  modified_base 23: mod_base = OTHER; note = 2'-O-methyladenosine
agtaagacgttgcagtcacagga

SEQ ID NO: 5064 - RNA, 23 nt, synthetic construct
  source 1..23: mol_type = other RNA
  modified_base 1: mod_base = OTHER; note = 2'-O-methyladenosine-3'-phosphorothioate
  modified_base 2: mod_base = OTHER; note = 2'-deoxy-2'-fluoroguanosine-3'-phosphorothioate
  modified_base 3: mod_base = OTHER; note = 2'-O-methyladenosine-3'-phosphate
  modified_base 4: mod_base = OTHER; note = 2'-O-methyladenosine-3'-phosphate
  modified_base 5: mod_base = OTHER; note = 2'-O-methylcytidine-3'-phosphate
  modified_base 6: mod_base = OTHER; note = 2'-deoxy-2'-fluoroadenosine-3'-phosphate
  modified_base 7: mod_base = OTHER; note = 2'-O-methylguanosine-3'-phosphate
  modified_base 8: mod_base = OTHER; note = 2'-deoxy-2'-fluoroadenosine-3'-phosphate
  modified_base 9: mod_base = OTHER; note = 2'-deoxy-2'-fluoroguanosine-3'-phosphate
  modified_base 10: mod_base = OTHER; note = 2'-O-methyladenosine-3'-phosphate
  modified_base 11: mod_base = OTHER; note = 2'-O-methyladenosine-3'-phosphate
  modified_base 12: mod_base = OTHER; note = 2'-O-methyluridine-3'-phosphate
  modified_base 13: mod_base = OTHER; note = 2'-O-methylguanosine-3'-phosphate
  modified_base 14: mod_base = OTHER; note = 2'-deoxy-2'-fluorocytidine-3'-phosphate
  modified_base 15: mod_base = OTHER; note = 2'-O-methyladenosine-3'-phosphate
  modified_base 16: mod_base = OTHER; note = 2'-deoxy-2'-fluoroguanosine-3'-phosphate
  modified_base 17: mod_base = OTHER; note = 2'-O-methyladenosine-3'-phosphate
  modified_base 18: mod_base = OTHER; note = 2'-O-methyladenosine-3'-phosphate
  modified_base 19: mod_base = OTHER; note = 2'-O-methylguanosine-3'-phosphate
  modified_base 20: mod_base = OTHER; note = 2'-O-methyluridine-3'-phosphate
  modified_base 21: mod_base = OTHER; note = 2'-O-methylguanosine-3'-phosphorothioate
  modified_base 22: mod_base = OTHER; note = 2'-O-methylguanosine-3'-phosphorothioate
  modified_base 23: mod_base = OTHER; note = 2'-O-methylcytidine
agaacagagaatgcagaagtggc

SEQ ID NO: 5065 - RNA, 23 nt, synthetic construct
  source 1..23: mol_type = other RNA
  modified_base 1: mod_base = OTHER; note = 2'-O-methyladenosine-3'-phosphorothioate
  modified_base 2: mod_base = OTHER; note = 2'-deoxy-2'-fluoroadenosine-3'-phosphorothioate
  modified_base 3: mod_base = OTHER; note = 2'-O-methyluridine-3'-phosphate
  modified_base 4: mod_base = OTHER; note = 2'-O-methylcytidine-3'-phosphate
  modified_base 5: mod_base = OTHER; note = 2'-O-methyladenosine-3'-phosphate
  modified_base 6: mod_base = OTHER; note = 2'-deoxy-2'-fluoroadenosine-3'-phosphate
  modified_base 7: mod_base = OTHER; note = 2'-O-methylcytidine-3'-phosphate
  modified_base 8: mod_base = OTHER; note = 2'-deoxy-2'-fluoroadenosine-3'-phosphate
  modified_base 9: mod_base = OTHER; note = 2'-deoxy-2'-fluoroadenosine-3'-phosphate
  modified_base 10: mod_base = OTHER; note = 2'-O-methyladenosine-3'-phosphate
  modified_base 11: mod_base = OTHER; note = 2'-O-methylguanosine-3'-phosphate
  modified_base 12: mod_base = OTHER; note = 2'-O-methylguanosine-3'-phosphate
  modified_base 13: mod_base = OTHER; note = 2'-O-methyladenosine-3'-phosphate
  modified_base 14: mod_base = OTHER; note = 2'-deoxy-2'-fluoroadenosine-3'-phosphate
  modified_base 15: mod_base = OTHER; note = 2'-O-methyladenosine-3'-phosphate
  modified_base 16: mod_base = OTHER; note = 2'-deoxy-2'-fluoroadenosine-3'-phosphate
  modified_base 17: mod_base = OTHER; note = 2'-O-methyladenosine-3'-phosphate
  modified_base 18: mod_base = OTHER; note = 2'-O-methyluridine-3'-phosphate
  modified_base 19: mod_base = OTHER; note = 2'-O-methylguanosine-3'-phosphate
  modified_base 20: mod_base = OTHER; note = 2'-O-methyladenosine-3'-phosphate
  modified_base 21: mod_base = OTHER; note = 2'-O-methylguanosine-3'-phosphorothioate
  modified_base 22: mod_base = OTHER; note = 2'-O-methyladenosine-3'-phosphorothioate
  modified_base 23: mod_base = OTHER; note = 2'-O-methyladenosine
aatcaacaaaggaaaaatgagaa

SEQ ID NO: 5066 - RNA, 23 nt, synthetic construct
  source 1..23: mol_type = other RNA
  modified_base 1: mod_base = OTHER; note = 2'-O-methyladenosine-3'-phosphorothioate
  modified_base 2: mod_base = OTHER; note = 2'-deoxy-2'-fluorouridine-3'-phosphorothioate
  modified_base 3: mod_base = OTHER; note = 2'-O-methyluridine-3'-phosphate
  modified_base 4: mod_base = OTHER; note = 2'-O-methyladenosine-3'-phosphate
  modified_base 5: mod_base = OTHER; note = 2'-O-methyladenosine-3'-phosphate
  modified_base 6: mod_base = OTHER; note = 2'-deoxy-2'-fluoroadenosine-3'-phosphate
  modified_base 7: mod_base = OTHER; note = 2'-O-methyladenosine-3'-phosphate
  modified_base 8: mod_base = OTHER; note = 2'-deoxy-2'-fluoroadenosine-3'-phosphate
  modified_base 9: mod_base = OTHER; note = 2'-deoxy-2'-fluorouridine-3'-phosphate
  modified_base 10: mod_base = OTHER; note = 2'-O-methyladenosine-3'-phosphate
  modified_base 11: mod_base = OTHER; note = 2'-O-methylguanosine-3'-phosphate
  modified_base 12: mod_base = OTHER; note = 2'-O-methylguanosine-3'-phosphate
  modified_base 13: mod_base = OTHER; note = 2'-O-methylcytidine-3'-phosphate
  modified_base 14: mod_base = OTHER; note = 2'-deoxy-2'-fluorouridine-3'-phosphate
  modified_base 15: mod_base = OTHER; note = 2'-O-methyluridine-3'-phosphate
  modified_base 16: mod_base = OTHER; note = 2'-deoxy-2'-fluorocytidine-3'-phosphate
  modified_base 17: mod_base = OTHER; note = 2'-O-methyluridine-3'-phosphate
  modified_base 18: mod_base = OTHER; note = 2'-O-methylguanosine-3'-phosphate
  modified_base 19: mod_base = OTHER; note = 2'-O-methyladenosine-3'-phosphate
  modified_base 20: mod_base = OTHER; note = 2'-O-methylguanosine-3'-phosphate
  modified_base 21: mod_base = OTHER; note = 2'-O-methylguanosine-3'-phosphorothioate
  modified_base 22: mod_base = OTHER; note = 2'-O-methyladenosine-3'-phosphorothioate
  modified_base 23: mod_base = OTHER; note = 2'-O-methylcytidine
attaaaaataggcttctgaggac

SEQ ID NO: 5067 - RNA, 23 nt, synthetic construct
  source 1..23: mol_type = other RNA
  modified_base 1: mod_base = OTHER; note = 2'-O-methyladenosine-3'-phosphorothioate
  modified_base 2: mod_base = OTHER; note = 2'-deoxy-2'-fluorouridine-3'-phosphorothioate
  modified_base 3: mod_base = OTHER; note = 2'-O-methylguanosine-3'-phosphate
  modified_base 4: mod_base = OTHER; note = 2'-O-methyladenosine-3'-phosphate
  modified_base 5: mod_base = OTHER; note = 2'-O-methylguanosine-3'-phosphate
  modified_base 6: mod_base = OTHER; note = 2'-deoxy-2'-fluoroguanosine-3'-phosphate
  modified_base 7: mod_base = OTHER; note = 2'-O-methyladenosine-3'-phosphate
  modified_base 8: mod_base = OTHER; note = 2'-deoxy-2'-fluorocytidine-3'-phosphate
  modified_base 9: mod_base = OTHER; note = 2'-deoxy-2'-fluorouridine-3'-phosphate
  modified_base 10: mod_base = OTHER; note = 2'-O-methylguanosine-3'-phosphate
  modified_base 11: mod_base = OTHER; note = 2'-O-methyluridine-3'-phosphate
  modified_base 12: mod_base = OTHER; note = 2'-O-methylguanosine-3'-phosphate
  modified_base 13: mod_base = OTHER; note = 2'-O-methyladenosine-3'-phosphate
  modified_base 14: mod_base = OTHER; note = 2'-deoxy-2'-fluoroadenosine-3'-phosphate
  modified_base 15: mod_base = OTHER; note = 2'-O-methyluridine-3'-phosphate
  modified_base 16: mod_base = OTHER; note = 2'-deoxy-2'-fluorouridine-3'-phosphate
  modified_base 17: mod_base = OTHER; note = 2'-O-methyladenosine-3'-phosphate
  modified_base 18: mod_base = OTHER; note = 2'-O-methylcytidine-3'-phosphate
  modified_base 19: mod_base = OTHER; note = 2'-O-methyluridine-3'-phosphate
  modified_base 20: mod_base = OTHER; note = 2'-O-methyladenosine-3'-phosphate
  modified_base 21: mod_base = OTHER; note = 2'-O-methyluridine-3'-phosphorothioate
  modified_base 22: mod_base = OTHER; note = 2'-O-methylcytidine-3'-phosphorothioate
  modified_base 23: mod_base = OTHER; note = 2'-O-methylguanosine
atgaggactgtgaattactatcg

SEQ ID NO: 5068 - RNA, 23 nt, synthetic construct
  source 1..23: mol_type = other RNA
  modified_base 1: mod_base = OTHER; note = 2'-O-methyladenosine-3'-phosphorothioate
  modified_base 2: mod_base = OTHER; note = 2'-deoxy-2'-fluoroguanosine-3'-phosphorothioate
  modified_base 3: mod_base = OTHER; note = 2'-O-methyladenosine-3'-phosphate
  modified_base 4: mod_base = OTHER; note = 2'-O-methylguanosine-3'-phosphate
  modified_base 5: mod_base = OTHER; note = 2'-O-methyladenosine-3'-phosphate
  modified_base 6: mod_base = OTHER; note = 2'-deoxy-2'-fluorouridine-3'-phosphate
  modified_base 7: mod_base = OTHER; note = 2'-O-methylcytidine-3'-phosphate
  modified_base 8: mod_base = OTHER; note = 2'-deoxy-2'-fluoroadenosine-3'-phosphate
  modified_base 9: mod_base = OTHER; note = 2'-deoxy-2'-fluorocytidine-3'-phosphate
  modified_base 10: mod_base = OTHER; note = 2'-O-methyladenosine-3'-phosphate
  modified_base 11: mod_base = OTHER; note = 2'-O-methylguanosine-3'-phosphate
  modified_base 12: mod_base = OTHER; note = 2'-O-methyladenosine-3'-phosphate
  modified_base 13: mod_base = OTHER; note = 2'-O-methyluridine-3'-phosphate
  modified_base 14: mod_base = OTHER; note = 2'-deoxy-2'-fluorouridine-3'-phosphate
  modified_base 15: mod_base = OTHER; note = 2'-O-methyluridine-3'-phosphate
  modified_base 16: mod_base = OTHER; note = 2'-deoxy-2'-fluoroguanosine-3'-phosphate
  modified_base 17: mod_base = OTHER; note = 2'-O-methyladenosine-3'-phosphate
  modified_base 18: mod_base = OTHER; note = 2'-O-methylguanosine-3'-phosphate
  modified_base 19: mod_base = OTHER; note = 2'-O-methyladenosine-3'-phosphate
  modified_base 20: mod_base = OTHER; note = 2'-O-methyladenosine-3'-phosphate
  modified_base 21: mod_base = OTHER; note = 2'-O-methyladenosine-3'-phosphorothioate
  modified_base 22: mod_base = OTHER; note = 2'-O-methylguanosine-3'-phosphorothioate
  modified_base 23: mod_base = OTHER; note = 2'-O-methyladenosine
agagatcacagatttgagaaaga

SEQ ID NO: 5069 - RNA, 23 nt, synthetic construct
  source 1..23: mol_type = other RNA
  modified_base 1: mod_base = OTHER; note = 2'-O-methyladenosine-3'-phosphorothioate
  modified_base 2: mod_base = OTHER; note = 2'-deoxy-2'-fluoroguanosine-3'-phosphorothioate
  modified_base 3: mod_base = OTHER; note = 2'-O-methyluridine-3'-phosphate
  modified_base 4: mod_base = OTHER; note = 2'-O-methylguanosine-3'-phosphate
  modified_base 5: mod_base = OTHER; note = 2'-O-methyluridine-3'-phosphate
  modified_base 6: mod_base = OTHER; note = 2'-deoxy-2'-fluorouridine-3'-phosphate
  modified_base 7: mod_base = OTHER; note = 2'-O-methylguanosine-3'-phosphate
  modified_base 8: mod_base = OTHER; note = 2'-deoxy-2'-fluoroadenosine-3'-phosphate
  modified_base 9: mod_base = OTHER; note = 2'-deoxy-2'-fluorouridine-3'-phosphate
  modified_base 10: mod_base = OTHER; note = 2'-O-methyladenosine-3'-phosphate
  modified_base 11: mod_base = OTHER; note = 2'-O-methyladenosine-3'-phosphate
  modified_base 12: mod_base = OTHER; note = 2'-O-methyluridine-3'-phosphate
  modified_base 13: mod_base = OTHER; note = 2'-O-methyluridine-3'-phosphate
  modified_base 14: mod_base = OTHER; note = 2'-deoxy-2'-fluorouridine-3'-phosphate
  modified_base 15: mod_base = OTHER; note = 2'-O-methyluridine-3'-phosphate
  modified_base 16: mod_base = OTHER; note = 2'-deoxy-2'-fluoroguanosine-3'-phosphate
  modified_base 17: mod_base = OTHER; note = 2'-O-methylguanosine-3'-phosphate
  modified_base 18: mod_base = OTHER; note = 2'-O-methylcytidine-3'-phosphate
  modified_base 19: mod_base = OTHER; note = 2'-O-methyladenosine-3'-phosphate
  modified_base 20: mod_base = OTHER; note = 2'-O-methylguanosine-3'-phosphate
  modified_base 21: mod_base = OTHER; note = 2'-O-methylcytidine-3'-phosphorothioate
  modified_base 22: mod_base = OTHER; note = 2'-O-methyladenosine-3'-phosphorothioate
  modified_base 23: mod_base = OTHER; note = 2'-O-methyluridine
agtgttgataattttggcagcat

SEQ ID NO: 5070 - RNA, 23 nt, synthetic construct
  source 1..23: mol_type = other RNA
  modified_base 1: mod_base = OTHER; note = 2'-O-methyladenosine-3'-phosphorothioate
  modified_base 2: mod_base = OTHER; note = 2'-deoxy-2'-fluorocytidine-3'-phosphorothioate
  modified_base 3: mod_base = OTHER; note = 2'-O-methyluridine-3'-phosphate
  modified_base 4: mod_base = OTHER; note = 2'-O-methyluridine-3'-phosphate
  modified_base 5: mod_base = OTHER; note = 2'-O-methyladenosine-3'-phosphate
  modified_base 6: mod_base = OTHER; note = 2'-deoxy-2'-fluoroadenosine-3'-phosphate
  modified_base 7: mod_base = OTHER; note = 2'-O-methyladenosine-3'-phosphate
  modified_base 8: mod_base = OTHER; note = 2'-deoxy-2'-fluorouridine-3'-phosphate
  modified_base 9: mod_base = OTHER; note = 2'-deoxy-2'-fluoroadenosine-3'-phosphate
  modified_base 10: mod_base = OTHER; note = 2'-O-methyluridine-3'-phosphate
  modified_base 11: mod_base = OTHER; note = 2'-O-methyladenosine-3'-phosphate
  modified_base 12: mod_base = OTHER; note = 2'-O-methyluridine-3'-phosphate
  modified_base 13: mod_base = OTHER; note = 2'-O-methylcytidine-3'-phosphate
  modified_base 14: mod_base = OTHER; note = 2'-deoxy-2'-fluoroadenosine-3'-phosphate
  modified_base 15: mod_base = OTHER; note = 2'-O-methyladenosine-3'-phosphate
  modified_base 16: mod_base = OTHER; note = 2'-deoxy-2'-fluorouridine-3'-phosphate
  modified_base 17: mod_base = OTHER; note = 2'-O-methylcytidine-3'-phosphate
  modified_base 18: mod_base = OTHER; note = 2'-O-methyladenosine-3'-phosphate
  modified_base 19: mod_base = OTHER; note = 2'-O-methylguanosine-3'-phosphate
  modified_base 20: mod_base = OTHER; note = 2'-O-methyluridine-3'-phosphate
  modified_base 21: mod_base = OTHER; note = 2'-O-methylcytidine-3'-phosphorothioate
  modified_base 22: mod_base = OTHER; note = 2'-O-methylcytidine-3'-phosphorothioate
  modified_base 23: mod_base = OTHER; note = 2'-O-methyluridine
acttaaatatatcaatcagtcct

SEQ ID NO: 5071 - RNA, 23 nt, synthetic construct
  source 1..23: mol_type = other RNA
  modified_base 1: mod_base = OTHER; note = 2'-O-methyladenosine-3'-phosphorothioate
  modified_base 2: mod_base = OTHER; note = 2'-deoxy-2'-fluorocytidine-3'-phosphorothioate
  modified_base 3: mod_base = OTHER; note = 2'-O-methyladenosine-3'-phosphate
  modified_base 4: mod_base = OTHER; note = 2'-O-methyluridine-3'-phosphate
  modified_base 5: mod_base = OTHER; note = 2'-O-methylguanosine-3'-phosphate
  modified_base 6: mod_base = OTHER; note = 2'-deoxy-2'-fluorocytidine-3'-phosphate
  modified_base 7: mod_base = OTHER; note = 2'-O-methyluridine-3'-phosphate
  modified_base 8: mod_base = OTHER; note = 2'-deoxy-2'-fluoroadenosine-3'-phosphate
  modified_base 9: mod_base = OTHER; note = 2'-deoxy-2'-fluoroadenosine-3'-phosphate
  modified_base 10: mod_base = OTHER; note = 2'-O-methylguanosine-3'-phosphate
  modified_base 11: mod_base = OTHER; note = 2'-O-methyluridine-3'-phosphate
  modified_base 12: mod_base = OTHER; note = 2'-O-methyluridine-3'-phosphate
  modified_base 13: mod_base = OTHER; note = 2'-O-methyladenosine-3'-phosphate
  modified_base 14: mod_base = OTHER; note = 2'-deoxy-2'-fluoroadenosine-3'-phosphate
  modified_base 15: mod_base = OTHER; note = 2'-O-methyladenosine-3'-phosphate
  modified_base 16: mod_base = OTHER; note = 2'-deoxy-2'-fluoroadenosine-3'-phosphate
  modified_base 17: mod_base = OTHER; note = 2'-O-methylguanosine-3'-phosphate
  modified_base 18: mod_base = OTHER; note = 2'-O-methyluridine-3'-phosphate
  modified_base 19: mod_base = OTHER; note = 2'-O-methylguanosine-3'-phosphate
  modified_base 20: mod_base = OTHER; note = 2'-O-methyluridine-3'-phosphate
  modified_base 21: mod_base = OTHER; note = 2'-O-methyladenosine-3'-phosphorothioate
  modified_base 22: mod_base = OTHER; note = 2'-O-methyladenosine-3'-phosphorothioate
  modified_base 23: mod_base = OTHER; note = 2'-O-methyladenosine
acatgctaagttaaaagtgtaaa

SEQ ID NO: 5072 - RNA, 23 nt, synthetic construct
  source 1..23: mol_type = other RNA
  modified_base 1: mod_base = OTHER; note = 2'-O-methyladenosine-3'-phosphorothioate
  modified_base 2: mod_base = OTHER; note = 2'-deoxy-2'-fluoroguanosine-3'-phosphorothioate
  modified_base 3: mod_base = OTHER; note = 2'-O-methyladenosine-3'-phosphate
  modified_base 4: mod_base = OTHER; note = 2'-O-methyladenosine-3'-phosphate
  modified_base 5: mod_base = OTHER; note = 2'-O-methylguanosine-3'-phosphate
  modified_base 6: mod_base = OTHER; note = 2'-deoxy-2'-fluoroadenosine-3'-phosphate
  modified_base 7: mod_base = OTHER; note = 2'-O-methylguanosine-3'-phosphate
  modified_base 8: mod_base = OTHER; note = 2'-deoxy-2'-fluoroguanosine-3'-phosphate
  modified_base 9: mod_base = OTHER; note = 2'-deoxy-2'-fluorouridine-3'-phosphate
  modified_base 10: mod_base = OTHER; note = 2'-O-methyladenosine-3'-phosphate
  modified_base 11: mod_base = OTHER; note = 2'-O-methyladenosine-3'-phosphate
  modified_base 12: mod_base = OTHER; note = 2'-O-methylcytidine-3'-phosphate
  modified_base 13: mod_base = OTHER; note = 2'-O-methyluridine-3'-phosphate
  modified_base 14: mod_base = OTHER; note = 2'-deoxy-2'-fluorouridine-3'-phosphate
  modified_base 15: mod_base = OTHER; note = 2'-O-methylguanosine-3'-phosphate
  modified_base 16: mod_base = OTHER; note = 2'-deoxy-2'-fluorocytidine-3'-phosphate
  modified_base 17: mod_base = OTHER; note = 2'-O-methyluridine-3'-phosphate
  modified_base 18: mod_base = OTHER; note = 2'-O-methylcytidine-3'-phosphate
  modified_base 19: mod_base = OTHER; note = 2'-O-methyladenosine-3'-phosphate
  modified_base 20: mod_base = OTHER; note = 2'-O-methylguanosine-3'-phosphate
  modified_base 21: mod_base = OTHER; note = 2'-O-methyladenosine-3'-phosphorothioate
  modified_base 22: mod_base = OTHER; note = 2'-O-methylguanosine-3'-phosphorothioate
  modified_base 23: mod_base = OTHER; note = 2'-O-methylcytidine
agaagaggtaacttgctcagagc

SEQ ID NO: 5073 - RNA, 23 nt, synthetic construct
  source 1..23: mol_type = other RNA
  modified_base 1: mod_base = OTHER; note = 2'-O-methyladenosine-3'-phosphorothioate
  modified_base 2: mod_base = OTHER; note = 2'-deoxy-2'-fluorouridine-3'-phosphorothioate
  modified_base 3: mod_base = OTHER; note = 2'-O-methyladenosine-3'-phosphate
  modified_base 4: mod_base = OTHER; note = 2'-O-methyladenosine-3'-phosphate
  modified_base 5: mod_base = OTHER; note = 2'-O-methyladenosine-3'-phosphate
  modified_base 6: mod_base = OTHER; note = 2'-deoxy-2'-fluorocytidine-3'-phosphate
  modified_base 7: mod_base = OTHER; note = 2'-O-methylcytidine-3'-phosphate
  modified_base 8: mod_base = OTHER; note = 2'-deoxy-2'-fluorouridine-3'-phosphate
  modified_base 9: mod_base = OTHER; note = 2'-deoxy-2'-fluoroadenosine-3'-phosphate
  modified_base 10: mod_base = OTHER; note = 2'-O-methylcytidine-3'-phosphate
  modified_base 11: mod_base = OTHER; note = 2'-O-methyladenosine-3'-phosphate
  modified_base 12: mod_base = OTHER; note = 2'-O-methyluridine-3'-phosphate
  modified_base 13: mod_base = OTHER; note = 2'-O-methyladenosine-3'-phosphate
  modified_base 14: mod_base = OTHER; note = 2'-deoxy-2'-fluoroadenosine-3'-phosphate
  modified_base 15: mod_base = OTHER; note = 2'-O-methyladenosine-3'-phosphate
  modified_base 16: mod_base = OTHER; note = 2'-deoxy-2'-fluoroguanosine-3'-phosphate
  modified_base 17: mod_base = OTHER; note = 2'-O-methyladenosine-3'-phosphate
  modified_base 18: mod_base = OTHER; note = 2'-O-methylguanosine-3'-phosphate
  modified_base 19: mod_base = OTHER; note = 2'-O-methylguanosine-3'-phosphate
  modified_base 20: mod_base = OTHER; note = 2'-O-methylguanosine-3'-phosphate
  modified_base 21: mod_base = OTHER; note = 2'-O-methylcytidine-3'-phosphorothioate
  modified_base 22: mod_base = OTHER; note = 2'-O-methyladenosine-3'-phosphorothioate
  modified_base 23: mod_base = OTHER; note = 2'-O-methylguanosine
ataaacctacataaagagggcag

SEQ ID NO: 5074 - RNA, 23 nt, synthetic construct
  source 1..23: mol_type = other RNA
  modified_base 1: mod_base = OTHER; note = 2'-O-methyladenosine-3'-phosphorothioate
  modified_base 2: mod_base = OTHER; note = 2'-deoxy-2'-fluoroguanosine-3'-phosphorothioate
  modified_base 3: mod_base = OTHER; note = 2'-O-methyluridine-3'-phosphate
  modified_base 4: mod_base = OTHER; note = 2'-O-methylguanosine-3'-phosphate
  modified_base 5: mod_base = OTHER; note = 2'-O-methyladenosine-3'-phosphate
  modified_base 6: mod_base = OTHER; note = 2'-deoxy-2'-fluoroadenosine-3'-phosphate
  modified_base 7: mod_base = OTHER; note = 2'-O-methylguanosine-3'-phosphate
  modified_base 8: mod_base = OTHER; note = 2'-deoxy-2'-fluoroadenosine-3'-phosphate
  modified_base 9: mod_base = OTHER; note = 2'-deoxy-2'-fluorouridine-3'-phosphate
  modified_base 10: mod_base = OTHER; note = 2'-O-methyluridine-3'-phosphate
  modified_base 11: mod_base = OTHER; note = 2'-O-methyladenosine-3'-phosphate
  modified_base 12: mod_base = OTHER; note = 2'-O-methyladenosine-3'-phosphate
  modified_base 13: mod_base = OTHER; note = 2'-O-methyluridine-3'-phosphate
  modified_base 14: mod_base = OTHER; note = 2'-deoxy-2'-fluoroadenosine-3'-phosphate
  modified_base 15: mod_base = OTHER; note = 2'-O-methyluridine-3'-phosphate
  modified_base 16: mod_base = OTHER; note = 2'-deoxy-2'-fluorouridine-3'-phosphate
  modified_base 17: mod_base = OTHER; note = 2'-O-methylcytidine-3'-phosphate
  modified_base 18: mod_base = OTHER; note = 2'-O-methylcytidine-3'-phosphate
  modified_base 19: mod_base = OTHER; note = 2'-O-methyluridine-3'-phosphate
  modified_base 20: mod_base = OTHER; note = 2'-O-methyluridine-3'-phosphate
  modified_base 21: mod_base = OTHER; note = 2'-O-methylguanosine-3'-phosphorothioate
  modified_base 22: mod_base = OTHER; note = 2'-O-methyladenosine-3'-phosphorothioate
  modified_base 23: mod_base = OTHER; note = 2'-O-methyladenosine
agtgaagattaatattccttgaa

SEQ ID NO: 5075 - RNA, 23 nt, synthetic construct
  source 1..23: mol_type = other RNA
  modified_base 1: mod_base = OTHER; note = 2'-O-methyladenosine-3'-phosphorothioate
  modified_base 2: mod_base = OTHER; note = 2'-deoxy-2'-fluoroguanosine-3'-phosphorothioate
  modified_base 3: mod_base = OTHER; note = 2'-O-methyluridine-3'-phosphate
  modified_base 4: mod_base = OTHER; note = 2'-O-methyladenosine-3'-phosphate
  modified_base 5: mod_base = OTHER; note = 2'-O-methyladenosine-3'-phosphate
  modified_base 6: mod_base = OTHER; note = 2'-deoxy-2'-fluoroguanosine-3'-phosphate
  modified_base 7: mod_base = OTHER; note = 2'-O-methyladenosine-3'-phosphate
  modified_base 8: mod_base = OTHER; note = 2'-deoxy-2'-fluoroadenosine-3'-phosphate
  modified_base 9: mod_base = OTHER; note = 2'-deoxy-2'-fluoroadenosine-3'-phosphate
  modified_base 10: mod_base = OTHER; note = 2'-O-methylcytidine-3'-phosphate
  modified_base 11: mod_base = OTHER; note = 2'-O-methyladenosine-3'-phosphate
  modified_base 12: mod_base = OTHER; note = 2'-O-methyluridine-3'-phosphate
  modified_base 13: mod_base = OTHER; note = 2'-O-methyladenosine-3'-phosphate
  modified_base 14: mod_base = OTHER; note = 2'-deoxy-2'-fluoroadenosine-3'-phosphate
  modified_base 15: mod_base = OTHER; note = 2'-O-methyladenosine-3'-phosphate
  modified_base 16: mod_base = OTHER; note = 2'-deoxy-2'-fluorocytidine-3'-phosphate
  modified_base 17: mod_base = OTHER; note = 2'-O-methyladenosine-3'-phosphate
  modified_base 18: mod_base = OTHER; note = 2'-O-methyladenosine-3'-phosphate
  modified_base 19: mod_base = OTHER; note = 2'-O-methylcytidine-3'-phosphate
  modified_base 20: mod_base = OTHER; note = 2'-O-methyladenosine-3'-phosphate
  modified_base 21: mod_base = OTHER; note = 2'-O-methyluridine-3'-phosphorothioate
  modified_base 22: mod_base = OTHER; note = 2'-O-methylguanosine-3'-phosphorothioate
  modified_base 23: mod_base = OTHER; note = 2'-O-methyladenosine
agtaagaaacataaacaacatga

SEQ ID NO: 5076 - RNA, 23 nt, synthetic construct
  source 1..23: mol_type = other RNA
  modified_base 1: mod_base = OTHER; note = 2'-O-methyladenosine-3'-phosphorothioate
  modified_base 2: mod_base = OTHER; note = 2'-deoxy-2'-fluoroadenosine-3'-phosphorothioate
  modified_base 3: mod_base = OTHER; note = 2'-O-methylguanosine-3'-phosphate
  modified_base 4: mod_base = OTHER; note = 2'-O-methyladenosine-3'-phosphate
  modified_base 5: mod_base = OTHER; note = 2'-O-methylcytidine-3'-phosphate
  modified_base 6: mod_base = OTHER; note = 2'-deoxy-2'-fluoroadenosine-3'-phosphate
  modified_base 7: mod_base = OTHER; note = 2'-O-methyluridine-3'-phosphate
  modified_base 8: mod_base = OTHER; note = 2'-deoxy-2'-fluorouridine-3'-phosphate
  modified_base 9: mod_base = OTHER; note = 2'-deoxy-2'-fluorouridine-3'-phosphate
  modified_base 10: mod_base = OTHER; note = 2'-O-methylguanosine-3'-phosphate
  modified_base 11: mod_base = OTHER; note = 2'-O-methyladenosine-3'-phosphate
  modified_base 12: mod_base = OTHER; note = 2'-O-methylguanosine-3'-phosphate
  modified_base 13: mod_base = OTHER; note = 2'-O-methyluridine-3'-phosphate
  modified_base 14: mod_base = OTHER; note = 2'-deoxy-2'-fluorocytidine-3'-phosphate
  modified_base 15: mod_base = OTHER; note = 2'-O-methylcytidine-3'-phosphate
  modified_base 16: mod_base = OTHER; note = 2'-deoxy-2'-fluoroguanosine-3'-phosphate
  modified_base 17: mod_base = OTHER; note = 2'-O-methyladenosine-3'-phosphate
  modified_base 18: mod_base = OTHER; note = 2'-O-methylguanosine-3'-phosphate
  modified_base 19: mod_base = OTHER; note = 2'-O-methyluridine-3'-phosphate
  modified_base 20: mod_base = OTHER; note = 2'-O-methyladenosine-3'-phosphate
  modified_base 21: mod_base = OTHER; note = 2'-O-methyluridine-3'-phosphorothioate
  modified_base 22: mod_base = OTHER; note = 2'-O-methyladenosine-3'-phosphorothioate
  modified_base 23: mod_base = OTHER; note = 2'-O-methyluridine
aagacatttgagtccgagtatat

SEQ ID NO: 5077 - RNA, 23 nt, synthetic construct
  source 1..23: mol_type = other RNA
  modified_base 1: mod_base = OTHER; note = 2'-O-methyladenosine-3'-phosphorothioate
  modified_base 2: mod_base = OTHER; note = 2'-deoxy-2'-fluorouridine-3'-phosphorothioate
  modified_base 3: mod_base = OTHER; note = 2'-O-methyladenosine-3'-phosphate
  modified_base 4: mod_base = OTHER; note = 2'-O-methyladenosine-3'-phosphate
  modified_base 5: mod_base = OTHER; note = 2'-O-methyluridine-3'-phosphate
  modified_base 6: mod_base = OTHER; note = 2'-deoxy-2'-fluorouridine-3'-phosphate
  modified_base 7: mod_base = OTHER; note = 2'-O-methyladenosine-3'-phosphate
  modified_base 8: mod_base = OTHER; note = 2'-deoxy-2'-fluorouridine-3'-phosphate
  modified_base 9: mod_base = OTHER; note = 2'-deoxy-2'-fluorocytidine-3'-phosphate
  modified_base 10: mod_base = OTHER; note = 2'-O-methyladenosine-3'-phosphate
  modified_base 11: mod_base = OTHER; note = 2'-O-methylguanosine-3'-phosphate
  modified_base 12: mod_base = OTHER; note = 2'-O-methyladenosine-3'-phosphate
  modified_base 13: mod_base = OTHER; note = 2'-O-methyladenosine-3'-phosphate
  modified_base 14: mod_base = OTHER; note = 2'-deoxy-2'-fluoroadenosine-3'-phosphate
  modified_base 15: mod_base = OTHER; note = 2'-O-methyladenosine-3'-phosphate
  modified_base 16: mod_base = OTHER; note = 2'-deoxy-2'-fluoroguanosine-3'-phosphate
  modified_base 17: mod_base = OTHER; note = 2'-O-methylcytidine-3'-phosphate
  modified_base 18: mod_base = OTHER; note = 2'-O-methyluridine-3'-phosphate
  modified_base 19: mod_base = OTHER; note = 2'-O-methyluridine-3'-phosphate
  modified_base 20: mod_base = OTHER; note = 2'-O-methylcytidine-3'-phosphate
  modified_base 21: mod_base = OTHER; note = 2'-O-methyladenosine-3'-phosphorothioate
  modified_base 22: mod_base = OTHER; note = 2'-O-methyladenosine-3'-phosphorothioate
  modified_base 23: mod_base = OTHER; note = 2'-O-methylcytidine
ataattatcagaaaagcttcaac

SEQ ID NO: 5078 - RNA, 23 nt, synthetic construct
  source 1..23: mol_type = other RNA
  modified_base 1: mod_base = OTHER; note = 2'-O-methyladenosine-3'-phosphorothioate
  modified_base 2: mod_base = OTHER; note = 2'-deoxy-2'-fluoroadenosine-3'-phosphorothioate
  modified_base 3: mod_base = OTHER; note = 2'-O-methylguanosine-3'-phosphate
  modified_base 4: mod_base = OTHER; note = 2'-O-methyladenosine-3'-phosphate
  modified_base 5: mod_base = OTHER; note = 2'-O-methyluridine-3'-phosphate
  modified_base 6: mod_base = OTHER; note = 2'-deoxy-2'-fluorouridine-3'-phosphate
  modified_base 7: mod_base = OTHER; note = 2'-O-methyladenosine-3'-phosphate
  modified_base 8: mod_base = OTHER; note = 2'-deoxy-2'-fluoroadenosine-3'-phosphate
  modified_base 9: mod_base = OTHER; note = 2'-deoxy-2'-fluorocytidine-3'-phosphate
  modified_base 10: mod_base = OTHER; note = 2'-O-methyladenosine-3'-phosphate
  modified_base 11: mod_base = OTHER; note = 2'-O-methylguanosine-3'-phosphate
  modified_base 12: mod_base = OTHER; note = 2'-O-methylcytidine-3'-phosphate
  modified_base 13: mod_base = OTHER; note = 2'-O-methyladenosine-3'-phosphate
  modified_base 14: mod_base = OTHER; note = 2'-deoxy-2'-fluoroadenosine-3'-phosphate
  modified_base 15: mod_base = OTHER; note = 2'-O-methyladenosine-3'-phosphate
  modified_base 16: mod_base = OTHER; note = 2'-deoxy-2'-fluoroguanosine-3'-phosphate
  modified_base 17: mod_base = OTHER; note = 2'-O-methyladenosine-3'-phosphate
  modified_base 18: mod_base = OTHER; note = 2'-O-methylguanosine-3'-phosphate
  modified_base 19: mod_base = OTHER; note = 2'-O-methyluridine-3'-phosphate
  modified_base 20: mod_base = OTHER; note = 2'-O-methyluridine-3'-phosphate
  modified_base 21: mod_base = OTHER; note = 2'-O-methylcytidine-3'-phosphorothioate
  modified_base 22: mod_base = OTHER; note = 2'-O-methyluridine-3'-phosphorothioate
  modified_base 23: mod_base = OTHER; note = 2'-O-methyladenosine
aagattaacagcaaagagttcta

SEQ ID NO: 5079 - RNA, 23 nt, synthetic construct
  source 1..23: mol_type = other RNA
  modified_base 1: mod_base = OTHER; note = 2'-O-methyladenosine-3'-phosphorothioate
  modified_base 2: mod_base = OTHER; note = 2'-deoxy-2'-fluorouridine-3'-phosphorothioate
  modified_base 3: mod_base = OTHER; note = 2'-O-methyluridine-3'-phosphate
  modified_base 4: mod_base = OTHER; note = 2'-O-methyladenosine-3'-phosphate
  modified_base 5: mod_base = OTHER; note = 2'-O-methyladenosine-3'-phosphate
  modified_base 6: mod_base = OTHER; note = 2'-deoxy-2'-fluorouridine-3'-phosphate
  modified_base 7: mod_base = OTHER; note = 2'-O-methylcytidine-3'-phosphate
  modified_base 8: mod_base = OTHER; note = 2'-deoxy-2'-fluoroadenosine-3'-phosphate
  modified_base 9: mod_base = OTHER; note = 2'-deoxy-2'-fluoroguanosine-3'-phosphate
  modified_base 10: mod_base = OTHER; note = 2'-O-methylcytidine-3'-phosphate
  modified_base 11: mod_base = OTHER; note = 2'-O-methyladenosine-3'-phosphate
  modified_base 12: mod_base = OTHER; note = 2'-O-methyladenosine-3'-phosphate
  modified_base 13: mod_base = OTHER; note = 2'-O-methyladenosine-3'-phosphate
  modified_base 14: mod_base = OTHER; note = 2'-deoxy-2'-fluoroadenosine-3'-phosphate
  modified_base 15: mod_base = OTHER; note = 2'-O-methylcytidine-3'-phosphate
  modified_base 16: mod_base = OTHER; note = 2'-deoxy-2'-fluorouridine-3'-phosphate
  modified_base 17: mod_base = OTHER; note = 2'-O-methyluridine-3'-phosphate
  modified_base 18: mod_base = OTHER; note = 2'-O-methyluridine-3'-phosphate
  modified_base 19: mod_base = OTHER; note = 2'-O-methylcytidine-3'-phosphate
  modified_base 20: mod_base = OTHER; note = 2'-O-methyladenosine-3'-phosphate
  modified_base 21: mod_base = OTHER; note = 2'-O-methyladenosine-3'-phosphorothioate
  modified_base 22: mod_base = OTHER; note = 2'-O-methyluridine-3'-phosphorothioate
  modified_base 23: mod_base = OTHER; note = 2'-O-methylguanosine
attaatcagcaaaactttcaatg

SEQ ID NO: 5080 - RNA, 23 nt, synthetic construct
  source 1..23: mol_type = other RNA
  modified_base 1: mod_base = OTHER; note = 2'-O-methyladenosine-3'-phosphorothioate
  modified_base 2: mod_base = OTHER; note = 2'-deoxy-2'-fluorocytidine-3'-phosphorothioate
  modified_base 3: mod_base = OTHER; note = 2'-O-methyluridine-3'-phosphate
  modified_base 4: mod_base = OTHER; note = 2'-O-methyluridine-3'-phosphate
  modified_base 5: mod_base = OTHER; note = 2'-O-methyluridine-3'-phosphate
  modified_base 6: mod_base = OTHER; note = 2'-deoxy-2'-fluoroadenosine-3'-phosphate
  modified_base 7: mod_base = OTHER; note = 2'-O-methylguanosine-3'-phosphate
  modified_base 8: mod_base = OTHER; note = 2'-deoxy-2'-fluorouridine-3'-phosphate
  modified_base 9: mod_base = OTHER; note = 2'-deoxy-2'-fluorouridine-3'-phosphate
  modified_base 10: mod_base = OTHER; note = 2'-O-methyluridine-3'-phosphate
  modified_base 11: mod_base = OTHER; note = 2'-O-methyluridine-3'-phosphate
  modified_base 12: mod_base = OTHER; note = 2'-O-methylcytidine-3'-phosphate
  modified_base 13: mod_base = OTHER; note = 2'-O-methyluridine-3'-phosphate
  modified_base 14: mod_base = OTHER; note = 2'-deoxy-2'-fluorouridine-3'-phosphate
  modified_base 15: mod_base = OTHER; note = 2'-O-methylcytidine-3'-phosphate
  modified_base 16: mod_base = OTHER; note = 2'-deoxy-2'-fluorouridine-3'-phosphate
  modified_base 17: mod_base = OTHER; note = 2'-O-methyladenosine-3'-phosphate
  modified_base 18: mod_base = OTHER; note = 2'-O-methylguanosine-3'-phosphate
  modified_base 19: mod_base = OTHER; note = 2'-O-methylcytidine-3'-phosphate
  modified_base 20: mod_base = OTHER; note = 2'-O-methyladenosine-3'-phosphate
  modified_base 21: mod_base = OTHER; note = 2'-O-methyluridine-3'-phosphorothioate
  modified_base 22: mod_base = OTHER; note = 2'-O-methyluridine-3'-phosphorothioate
  modified_base 23: mod_base = OTHER; note = 2'-O-methyladenosine
actttagttttcttctagcatta

SEQ ID NO: 5081 - RNA, 23 nt, synthetic construct
  source 1..23: mol_type = other RNA
  modified_base 1: mod_base = OTHER; note = 2'-O-methyladenosine-3'-phosphorothioate
  modified_base 2: mod_base = OTHER; note = 2'-deoxy-2'-fluorocytidine-3'-phosphorothioate
  modified_base 3: mod_base = OTHER; note = 2'-O-methyladenosine-3'-phosphate
  modified_base 4: mod_base = OTHER; note = 2'-O-methylguanosine-3'-phosphate
  modified_base 5: mod_base = OTHER; note = 2'-O-methyladenosine-3'-phosphate
  modified_base 6: mod_base = OTHER; note = 2'-deoxy-2'-fluoroadenosine-3'-phosphate
  modified_base 7: mod_base = OTHER; note = 2'-O-methyladenosine-3'-phosphate
  modified_base 8: mod_base = OTHER; note = 2'-deoxy-2'-fluorocytidine-3'-phosphate
  modified_base 9: mod_base = OTHER; note = 2'-deoxy-2'-fluoroadenosine-3'-phosphate
  modified_base 10: mod_base = OTHER; note = 2'-O-methyluridine-3'-phosphate
  modified_base 11: mod_base = OTHER; note = 2'-O-methylguanosine-3'-phosphate
  modified_base 12: mod_base = OTHER; note = 2'-O-methylcytidine-3'-phosphate
  modified_base 13: mod_base = OTHER; note = 2'-O-methyladenosine-3'-phosphate
  modified_base 14: mod_base = OTHER; note = 2'-deoxy-2'-fluorouridine-3'-phosphate
  modified_base 15: mod_base = OTHER; note = 2'-O-methylguanosine-3'-phosphate
  modified_base 16: mod_base = OTHER; note = 2'-deoxy-2'-fluoroadenosine-3'-phosphate
  modified_base 17: mod_base = OTHER; note = 2'-O-methyladenosine-3'-phosphate
  modified_base 18: mod_base = OTHER; note = 2'-O-methylguanosine-3'-phosphate
  modified_base 19: mod_base = OTHER; note = 2'-O-methyladenosine-3'-phosphate
  modified_base 20: mod_base = OTHER; note = 2'-O-methylguanosine-3'-phosphate
  modified_base 21: mod_base = OTHER; note = 2'-O-methylguanosine-3'-phosphorothioate
  modified_base 22: mod_base = OTHER; note = 2'-O-methyladenosine-3'-phosphorothioate
  modified_base 23: mod_base = OTHER; note = 2'-O-methylguanosine
acagaaacatgcatgaagaggag

SEQ ID NO: 5082 - RNA, 23 nt, synthetic construct
  source 1..23: mol_type = other RNA
  modified_base 1: mod_base = OTHER; note = 2'-O-methyladenosine-3'-phosphorothioate
  modified_base 2: mod_base = OTHER; note = 2'-deoxy-2'-fluorocytidine-3'-phosphorothioate
  modified_base 3: mod_base = OTHER; note = 2'-O-methyluridine-3'-phosphate
  modified_base 4: mod_base = OTHER; note = 2'-O-methyluridine-3'-phosphate
  modified_base 5: mod_base = OTHER; note = 2'-O-methylcytidine-3'-phosphate
  modified_base 6: mod_base = OTHER; note = 2'-deoxy-2'-fluoroadenosine-3'-phosphate
  modified_base 7: mod_base = OTHER; note = 2'-O-methylguanosine-3'-phosphate
  modified_base 8: mod_base = OTHER; note = 2'-deoxy-2'-fluoroguanosine-3'-phosphate
  modified_base 9: mod_base = OTHER; note = 2'-deoxy-2'-fluorouridine-3'-phosphate
  modified_base 10: mod_base = OTHER; note = 2'-O-methyluridine-3'-phosphate
  modified_base 11: mod_base = OTHER; note = 2'-O-methylcytidine-3'-phosphate
  modified_base 12: mod_base = OTHER; note = 2'-O-methyladenosine-3'-phosphate
  modified_base 13: mod_base = OTHER; note = 2'-O-methyladenosine-3'-phosphate
  modified_base 14: mod_base = OTHER; note = 2'-deoxy-2'-fluoroadenosine-3'-phosphate
  modified_base 15: mod_base = OTHER; note = 2'-O-methyladenosine-3'-phosphate
  modified_base 16: mod_base = OTHER; note = 2'-deoxy-2'-fluoroguanosine-3'-phosphate
  modified_base 17: mod_base = OTHER; note = 2'-O-methylcytidine-3'-phosphate
  modified_base 18: mod_base = OTHER; note = 2'-O-methyladenosine-3'-phosphate
  modified_base 19: mod_base = OTHER; note = 2'-O-methylguanosine-3'-phosphate
  modified_base 20: mod_base = OTHER; note = 2'-O-methyluridine-3'-phosphate
  modified_base 21: mod_base = OTHER; note = 2'-O-methyladenosine-3'-phosphorothioate
  modified_base 22: mod_base = OTHER; note = 2'-O-methyladenosine-3'-phosphorothioate
  modified_base 23: mod_base = OTHER; note = 2'-O-methylguanosine
acttcaggttcaaaagcagtaag

SEQ ID NO: 5083 - RNA, 23 nt, synthetic construct
  source 1..23: mol_type = other RNA
  modified_base 1: mod_base = OTHER; note = 2'-O-methyladenosine-3'-phosphorothioate
  modified_base 2: mod_base = OTHER; note = 2'-deoxy-2'-fluoroguanosine-3'-phosphorothioate
  modified_base 3: mod_base = OTHER; note = 2'-O-methyladenosine-3'-phosphate
  modified_base 4: mod_base = OTHER; note = 2'-O-methyladenosine-3'-phosphate
  modified_base 5: mod_base = OTHER; note = 2'-O-methylguanosine-3'-phosphate
  modified_base 6: mod_base = OTHER; note = 2'-deoxy-2'-fluorocytidine-3'-phosphate
  modified_base 7: mod_base = OTHER; note = 2'-O-methyladenosine-3'-phosphate
  modified_base 8: mod_base = OTHER; note = 2'-deoxy-2'-fluoroadenosine-3'-phosphate
  modified_base 9: mod_base = OTHER; note = 2'-deoxy-2'-fluorocytidine-3'-phosphate
  modified_base 10: mod_base = OTHER; note = 2'-O-methyladenosine-3'-phosphate
  modified_base 11: mod_base = OTHER; note = 2'-O-methylguanosine-3'-phosphate
  modified_base 12: mod_base = OTHER; note = 2'-O-methyluridine-3'-phosphate
  modified_base 13: mod_base = OTHER; note = 2'-O-methyladenosine-3'-phosphate
  modified_base 14: mod_base = OTHER; note = 2'-deoxy-2'-fluoroguanosine-3'-phosphate
  modified_base 15: mod_base = OTHER; note = 2'-O-methyladenosine-3'-phosphate
  modified_base 16: mod_base = OTHER; note = 2'-deoxy-2'-fluoroadenosine-3'-phosphate
  modified_base 17: mod_base = OTHER; note = 2'-O-methylcytidine-3'-phosphate
  modified_base 18: mod_base = OTHER; note = 2'-O-methylguanosine-3'-phosphate
  modified_base 19: mod_base = OTHER; note = 2'-O-methyluridine-3'-phosphate
  modified_base 20: mod_base = OTHER; note = 2'-O-methyluridine-3'-phosphate
  modified_base 21: mod_base = OTHER; note = 2'-O-methylguanosine-3'-phosphorothioate
  modified_base 22: mod_base = OTHER; note = 2'-O-methyladenosine-3'-phosphorothioate
  modified_base 23: mod_base = OTHER; note = 2'-O-methylcytidine
agaagcaacagtagaacgttgac

SEQ ID NO: 5084 - RNA, 23 nt, synthetic construct
  source 1..23: mol_type = other RNA
  modified_base 1: mod_base = OTHER; note = 2'-O-methyladenosine-3'-phosphorothioate
  modified_base 2: mod_base = OTHER; note = 2'-deoxy-2'-fluoroadenosine-3'-phosphorothioate
  modified_base 3: mod_base = OTHER; note = 2'-O-methyluridine-3'-phosphate
  modified_base 4: mod_base = OTHER; note = 2'-O-methyluridine-3'-phosphate
  modified_base 5: mod_base = OTHER; note = 2'-O-methyladenosine-3'-phosphate
  modified_base 6: mod_base = OTHER; note = 2'-deoxy-2'-fluoroadenosine-3'-phosphate
  modified_base 7: mod_base = OTHER; note = 2'-O-methyladenosine-3'-phosphate
  modified_base 8: mod_base = OTHER; note = 2'-deoxy-2'-fluoroadenosine-3'-phosphate
  modified_base 9: mod_base = OTHER; note = 2'-deoxy-2'-fluorocytidine-3'-phosphate
  modified_base 10: mod_base = OTHER; note = 2'-O-methyladenosine-3'-phosphate
  modified_base 11: mod_base = OTHER; note = 2'-O-methyladenosine-3'-phosphate
  modified_base 12: mod_base = OTHER; note = 2'-O-methylguanosine-3'-phosphate
  modified_base 13: mod_base = OTHER; note = 2'-O-methylguanosine-3'-phosphate
  modified_base 14: mod_base = OTHER; note = 2'-deoxy-2'-fluoroadenosine-3'-phosphate
  modified_base 15: mod_base = OTHER; note = 2'-O-methylcytidine-3'-phosphate
  modified_base 16: mod_base = OTHER; note = 2'-deoxy-2'-fluorouridine-3'-phosphate
  modified_base 17: mod_base = OTHER; note = 2'-O-methyladenosine-3'-phosphate
  modified_base 18: mod_base = OTHER; note = 2'-O-methyluridine-3'-phosphate
  modified_base 19: mod_base = OTHER; note = 2'-O-methylcytidine-3'-phosphate
  modified_base 20: mod_base = OTHER; note = 2'-O-methyluridine-3'-phosphate
  modified_base 21: mod_base = OTHER; note = 2'-O-methylguanosine-3'-phosphorothioate
  modified_base 22: mod_base = OTHER; note = 2'-O-methylguanosine-3'-phosphorothioate
  modified_base 23: mod_base = OTHER; note = 2'-O-methylguanosine
aattaaaacaaggactatctggg

SEQ ID NO: 5085 - RNA, 23 nt, synthetic construct
  source 1..23: mol_type = other RNA
  modified_base 1: mod_base = OTHER; note = 2'-O-methyladenosine-3'-phosphorothioate
  modified_base 2: mod_base = OTHER; note = 2'-deoxy-2'-fluoroguanosine-3'-phosphorothioate
  modified_base 3: mod_base = OTHER; note = 2'-O-methylcytidine-3'-phosphate
  modified_base 4: mod_base = OTHER; note = 2'-O-methyladenosine-3'-phosphate
  modified_base 5: mod_base = OTHER; note = 2'-O-methyladenosine-3'-phosphate
  modified_base 6: mod_base = OTHER; note = 2'-deoxy-2'-fluoroguanosine-3'-phosphate
  modified_base 7: mod_base = OTHER; note = 2'-O-methyladenosine-3'-phosphate
  modified_base 8: mod_base = OTHER; note = 2'-deoxy-2'-fluoroadenosine-3'-phosphate
  modified_base 9: mod_base = OTHER; note = 2'-deoxy-2'-fluoroadenosine-3'-phosphate
  modified_base 10: mod_base = OTHER; note = 2'-O-methyluridine-3'-phosphate
  modified_base 11: mod_base = OTHER; note = 2'-O-methyladenosine-3'-phosphate
  modified_base 12: mod_base = OTHER; note = 2'-O-methyluridine-3'-phosphate
  modified_base 13: mod_base = OTHER; note = 2'-O-methyladenosine-3'-phosphate
  modified_base 14: mod_base = OTHER; note = 2'-deoxy-2'-fluorouridine-3'-phosphate
  modified_base 15: mod_base = OTHER; note = 2'-O-methyladenosine-3'-phosphate
  modified_base 16: mod_base = OTHER; note = 2'-deoxy-2'-fluorocytidine-3'-phosphate
  modified_base 17: mod_base = OTHER; note = 2'-O-methyladenosine-3'-phosphate
  modified_base 18: mod_base = OTHER; note = 2'-O-methylguanosine-3'-phosphate
  modified_base 19: mod_base = OTHER; note = 2'-O-methyluridine-3'-phosphate
  modified_base 20: mod_base = OTHER; note = 2'-O-methylguanosine-3'-phosphate
  modified_base 21: mod_base = OTHER; note = 2'-O-methyluridine-3'-phosphorothioate
  modified_base 22: mod_base = OTHER; note = 2'-O-methylcytidine-3'-phosphorothioate
  modified_base 23: mod_base = OTHER; note = 2'-O-methylcytidine
agcaagaaatatatacagtgtcc

SEQ ID NO: 5086 - RNA, 23 nt, synthetic construct
  source 1..23: mol_type = other RNA
  modified_base 1: mod_base = OTHER; note = 2'-O-methyladenosine-3'-phosphorothioate
  modified_base 2: mod_base = OTHER; note = 2'-deoxy-2'-fluorocytidine-3'-phosphorothioate
  modified_base 3: mod_base = OTHER; note = 2'-O-methyladenosine-3'-phosphate
  modified_base 4: mod_base = OTHER; note = 2'-O-methylcytidine-3'-phosphate
  modified_base 5: mod_base = OTHER; note = 2'-O-methyladenosine-3'-phosphate
  modified_base 6: mod_base = OTHER; note = 2'-deoxy-2'-fluoroadenosine-3'-phosphate
  modified_base 7: mod_base = OTHER; note = 2'-O-methyluridine-3'-phosphate
  modified_base 8: mod_base = OTHER; note = 2'-deoxy-2'-fluoroadenosine-3'-phosphate
  modified_base 9: mod_base = OTHER; note = 2'-deoxy-2'-fluorouridine-3'-phosphate
  modified_base 10: mod_base = OTHER; note = 2'-O-methylcytidine-3'-phosphate
  modified_base 11: mod_base = OTHER; note = 2'-O-methyluridine-3'-phosphate
  modified_base 12: mod_base = OTHER; note = 2'-O-methyluridine-3'-phosphate
  modified_base 13: mod_base = OTHER; note = 2'-O-methyluridine-3'-phosphate
  modified_base 14: mod_base = OTHER; note = 2'-deoxy-2'-fluoroadenosine-3'-phosphate
  modified_base 15: mod_base = OTHER; note = 2'-O-methyluridine-3'-phosphate
  modified_base 16: mod_base = OTHER; note = 2'-deoxy-2'-fluorouridine-3'-phosphate
  modified_base 17: mod_base = OTHER; note = 2'-O-methyladenosine-3'-phosphate
  modified_base 18: mod_base = OTHER; note = 2'-O-methyladenosine-3'-phosphate
  modified_base 19: mod_base = OTHER; note = 2'-O-methylguanosine-3'-phosphate
  modified_base 20: mod_base = OTHER; note = 2'-O-methyluridine-3'-phosphate
  modified_base 21: mod_base = OTHER; note = 2'-O-methyluridine-3'-phosphorothioate
  modified_base 22: mod_base = OTHER; note = 2'-O-methylguanosine-3'-phosphorothioate
  modified_base 23: mod_base = OTHER; note = 2'-O-methylguanosine
acacaatatctttattaagttgg

SEQ ID NO: 5087 - RNA, 23 nt, synthetic construct
  source 1..23: mol_type = other RNA
  modified_base 1: mod_base = OTHER; note = 2'-O-methyladenosine-3'-phosphorothioate
  modified_base 2: mod_base = OTHER; note = 2'-deoxy-2'-fluoroadenosine-3'-phosphorothioate
  modified_base 3: mod_base = OTHER; note = 2'-O-methylguanosine-3'-phosphate
  modified_base 4: mod_base = OTHER; note = 2'-O-methyladenosine-3'-phosphate
  modified_base 5: mod_base = OTHER; note = 2'-O-methylguanosine-3'-phosphate
  modified_base 6: mod_base = OTHER; note = 2'-deoxy-2'-fluoroguanosine-3'-phosphate
  modified_base 7: mod_base = OTHER; note = 2'-O-methyladenosine-3'-phosphate
  modified_base 8: mod_base = OTHER; note = 2'-deoxy-2'-fluoroguanosine-3'-phosphate
  modified_base 9: mod_base = OTHER; note = 2'-deoxy-2'-fluoroadenosine-3'-phosphate
  modified_base 10: mod_base = OTHER; note = 2'-O-methylcytidine-3'-phosphate
  modified_base 11: mod_base = OTHER; note = 2'-O-methyladenosine-3'-phosphate
  modified_base 12: mod_base = OTHER; note = 2'-O-methylcytidine-3'-phosphate
  modified_base 13: mod_base = OTHER; note = 2'-O-methyladenosine-3'-phosphate
  modified_base 14: mod_base = OTHER; note = 2'-deoxy-2'-fluoroadenosine-3'-phosphate
  modified_base 15: mod_base = OTHER; note = 2'-O-methyladenosine-3'-phosphate
  modified_base 16: mod_base = OTHER; note = 2'-deoxy-2'-fluorouridine-3'-phosphate
  modified_base 17: mod_base = OTHER; note = 2'-O-methyladenosine-3'-phosphate
  modified_base 18: mod_base = OTHER; note = 2'-O-methylguanosine-3'-phosphate
  modified_base 19: mod_base = OTHER; note = 2'-O-methyladenosine-3'-phosphate
  modified_base 20: mod_base = OTHER; note = 2'-O-methyladenosine-3'-phosphate
  modified_base 21: mod_base = OTHER; note = 2'-O-methyladenosine-3'-phosphorothioate
  modified_base 22: mod_base = OTHER; note = 2'-O-methyluridine-3'-phosphorothioate
  modified_base 23: mod_base = OTHER; note = 2'-O-methyladenosine
aagaggagacacaaatagaaata

SEQ ID NO: 5088 - RNA, 23 nt, synthetic construct
  source 1..23: mol_type = other RNA
  modified_base 1: mod_base = OTHER; note = 2'-O-methyladenosine-3'-phosphorothioate
  modified_base 2: mod_base = OTHER; note = 2'-deoxy-2'-fluoroadenosine-3'-phosphorothioate
  modified_base 3: mod_base = OTHER; note = 2'-O-methyladenosine-3'-phosphate
  modified_base 4: mod_base = OTHER; note = 2'-O-methyluridine-3'-phosphate
  modified_base 5: mod_base = OTHER; note = 2'-O-methylguanosine-3'-phosphate
  modified_base 6: mod_base = OTHER; note = 2'-deoxy-2'-fluoroguanosine-3'-phosphate
  modified_base 7: mod_base = OTHER; note = 2'-O-methylcytidine-3'-phosphate
  modified_base 8: mod_base = OTHER; note = 2'-deoxy-2'-fluoroadenosine-3'-phosphate
  modified_base 9: mod_base = OTHER; note = 2'-deoxy-2'-fluoroadenosine-3'-phosphate
  modified_base 10: mod_base = OTHER; note = 2'-O-methyladenosine-3'-phosphate
  modified_base 11: mod_base = OTHER; note = 2'-O-methylcytidine-3'-phosphate
  modified_base 12: mod_base = OTHER; note = 2'-O-methyladenosine-3'-phosphate
  modified_base 13: mod_base = OTHER; note = 2'-O-methyluridine-3'-phosphate
  modified_base 14: mod_base = OTHER; note = 2'-deoxy-2'-fluorouridine-3'-phosphate
  modified_base 15: mod_base = OTHER; note = 2'-O-methyluridine-3'-phosphate
  modified_base 16: mod_base = OTHER; note = 2'-deoxy-2'-fluoroguanosine-3'-phosphate
  modified_base 17: mod_base = OTHER; note = 2'-O-methyluridine-3'-phosphate
  modified_base 18: mod_base = OTHER; note = 2'-O-methyladenosine-3'-phosphate
  modified_base 19: mod_base = OTHER; note = 2'-O-methyladenosine-3'-phosphate
  modified_base 20: mod_base = OTHER; note = 2'-O-methylguanosine-3'-phosphate
  modified_base 21: mod_base = OTHER; note = 2'-O-methylcytidine-3'-phosphorothioate
  modified_base 22: mod_base = OTHER; note = 2'-O-methylcytidine-3'-phosphorothioate
  modified_base 23: mod_base = OTHER; note = 2'-O-methyluridine
aaatggcaaacatttgtaagcct

SEQ ID NO: 5089 - RNA, 23 nt, synthetic construct
  source 1..23: mol_type = other RNA
  modified_base 1: mod_base = OTHER; note = 2'-O-methyladenosine-3'-phosphorothioate
  modified_base 2: mod_base = OTHER; note = 2'-deoxy-2'-fluoroguanosine-3'-phosphorothioate
  modified_base 3: mod_base = OTHER; note = 2'-O-methyladenosine-3'-phosphate
  modified_base 4: mod_base = OTHER; note = 2'-O-methyladenosine-3'-phosphate
  modified_base 5: mod_base = OTHER; note = 2'-O-methylguanosine-3'-phosphate
  modified_base 6: mod_base = OTHER; note = 2'-deoxy-2'-fluoroadenosine-3'-phosphate
  modified_base 7: mod_base = OTHER; note = 2'-O-methylguanosine-3'-phosphate
  modified_base 8: mod_base = OTHER; note = 2'-deoxy-2'-fluoroadenosine-3'-phosphate
  modified_base 9: mod_base = OTHER; note = 2'-deoxy-2'-fluoroadenosine-3'-phosphate
  modified_base 10: mod_base = OTHER; note = 2'-O-methylcytidine-3'-phosphate
  modified_base 11: mod_base = OTHER; note = 2'-O-methyladenosine-3'-phosphate
  modified_base 12: mod_base = OTHER; note = 2'-O-methyladenosine-3'-phosphate
  modified_base 13: mod_base = OTHER; note = 2'-O-methyladenosine-3'-phosphate
  modified_base 14: mod_base = OTHER; note = 2'-deoxy-2'-fluoroadenosine-3'-phosphate
  modified_base 15: mod_base = OTHER; note = 2'-O-methyladenosine-3'-phosphate
  modified_base 16: mod_base = OTHER; note = 2'-deoxy-2'-fluorouridine-3'-phosphate
  modified_base 17: mod_base = OTHER; note = 2'-O-methylcytidine-3'-phosphate
  modified_base 18: mod_base = OTHER; note = 2'-O-methyladenosine-3'-phosphate
  modified_base 19: mod_base = OTHER; note = 2'-O-methylcytidine-3'-phosphate
  modified_base 20: mod_base = OTHER; note = 2'-O-methyladenosine-3'-phosphate
  modified_base 21: mod_base = OTHER; note = 2'-O-methylguanosine-3'-phosphorothioate
  modified_base 22: mod_base = OTHER; note = 2'-O-methylguanosine-3'-phosphorothioate
  modified_base 23: mod_base = OTHER; note = 2'-O-methyladenosine
agaagagaacaaaaatcacagga

SEQ ID NO: 5090 - RNA, 23 nt, synthetic construct
  source 1..23: mol_type = other RNA
  modified_base 1: mod_base = OTHER; note = 2'-O-methyladenosine-3'-phosphorothioate
  modified_base 2: mod_base = OTHER; note = 2'-deoxy-2'-fluoroadenosine-3'-phosphorothioate
  modified_base 3: mod_base = OTHER; note = 2'-O-methyluridine-3'-phosphate
  modified_base 4: mod_base = OTHER; note = 2'-O-methyluridine-3'-phosphate
  modified_base 5: mod_base = OTHER; note = 2'-O-methylguanosine-3'-phosphate
  modified_base 6: mod_base = OTHER; note = 2'-deoxy-2'-fluorouridine-3'-phosphate
  modified_base 7: mod_base = OTHER; note = 2'-O-methyluridine-3'-phosphate
  modified_base 8: mod_base = OTHER; note = 2'-deoxy-2'-fluoroguanosine-3'-phosphate
  modified_base 9: mod_base = OTHER; note = 2'-deoxy-2'-fluoroadenosine-3'-phosphate
  modified_base 10: mod_base = OTHER; note = 2'-O-methyluridine-3'-phosphate
  modified_base 11: mod_base = OTHER; note = 2'-O-methyladenosine-3'-phosphate
  modified_base 12: mod_base = OTHER; note = 2'-O-methylguanosine-3'-phosphate
  modified_base 13: mod_base = OTHER; note = 2'-O-methylcytidine-3'-phosphate
  modified_base 14: mod_base = OTHER; note = 2'-deoxy-2'-fluorouridine-3'-phosphate
  modified_base 15: mod_base = OTHER; note = 2'-O-methyluridine-3'-phosphate
  modified_base 16: mod_base = OTHER; note = 2'-deoxy-2'-fluorocytidine-3'-phosphate
  modified_base 17: mod_base = OTHER; note = 2'-O-methylguanosine-3'-phosphate
  modified_base 18: mod_base = OTHER; note = 2'-O-methyladenosine-3'-phosphate
  modified_base 19: mod_base = OTHER; note = 2'-O-methyluridine-3'-phosphate
  modified_base 20: mod_base = OTHER; note = 2'-O-methylcytidine-3'-phosphate
  modified_base 21: mod_base = OTHER; note = 2'-O-methyladenosine-3'-phosphorothioate
  modified_base 22: mod_base = OTHER; note = 2'-O-methylguanosine-3'-phosphorothioate
  modified_base 23: mod_base = OTHER; note = 2'-O-methyluridine
aattgttgatagcttcgatcagt

SEQ ID NO: 5091 - RNA, 23 nt, synthetic construct
  source 1..23: mol_type = other RNA
  modified_base 1: mod_base = OTHER; note = 2'-O-methyladenosine-3'-phosphorothioate
  modified_base 2: mod_base = OTHER; note = 2'-deoxy-2'-fluorouridine-3'-phosphorothioate
  modified_base 3: mod_base = OTHER; note = 2'-O-methylguanosine-3'-phosphate
  modified_base 4: mod_base = OTHER; note = 2'-O-methyladenosine-3'-phosphate
  modified_base 5: mod_base = OTHER; note = 2'-O-methyladenosine-3'-phosphate
  modified_base 6: mod_base = OTHER; note = 2'-deoxy-2'-fluorocytidine-3'-phosphate
  modified_base 7: mod_base = OTHER; note = 2'-O-methyladenosine-3'-phosphate
  modified_base 8: mod_base = OTHER; note = 2'-deoxy-2'-fluoroguanosine-3'-phosphate
  modified_base 9: mod_base = OTHER; note = 2'-deoxy-2'-fluorocytidine-3'-phosphate
  modified_base 10: mod_base = OTHER; note = 2'-O-methyladenosine-3'-phosphate
  modified_base 11: mod_base = OTHER; note = 2'-O-methyluridine-3'-phosphate
  modified_base 12: mod_base = OTHER; note = 2'-O-methyladenosine-3'-phosphate
  modified_base 13: mod_base = OTHER; note = 2'-O-methyladenosine-3'-phosphate
  modified_base 14: mod_base = OTHER; note = 2'-deoxy-2'-fluoroadenosine-3'-phosphate
  modified_base 15: mod_base = OTHER; note = 2'-O-methylcytidine-3'-phosphate
  modified_base 16: mod_base = OTHER; note = 2'-deoxy-2'-fluoroadenosine-3'-phosphate
  modified_base 17: mod_base = OTHER; note = 2'-O-methylguanosine-3'-phosphate
  modified_base 18: mod_base = OTHER; note = 2'-O-methylguanosine-3'-phosphate
  modified_base 19: mod_base = OTHER; note = 2'-O-methylcytidine-3'-phosphate
  modified_base 20: mod_base = OTHER; note = 2'-O-methyladenosine-3'-phosphate
  modified_base 21: mod_base = OTHER; note = 2'-O-methyluridine-3'-phosphorothioate
  modified_base 22: mod_base = OTHER; note = 2'-O-methylguanosine-3'-phosphorothioate
  modified_base 23: mod_base = OTHER; note = 2'-O-methyluridine
atgaacagcataaacaggcatgt

SEQ ID NO: 5092 - RNA, 23 nt, synthetic construct
  source 1..23: mol_type = other RNA
  modified_base 1: mod_base = OTHER; note = 2'-O-methyladenosine-3'-phosphorothioate
  modified_base 2: mod_base = OTHER; note = 2'-deoxy-2'-fluoroguanosine-3'-phosphorothioate
  modified_base 3: mod_base = OTHER; note = 2'-O-methyluridine-3'-phosphate
  modified_base 4: mod_base = OTHER; note = 2'-O-methyluridine-3'-phosphate
  modified_base 5: mod_base = OTHER; note = 2'-O-methyluridine-3'-phosphate
  modified_base 6: mod_base = OTHER; note = 2'-deoxy-2'-fluorouridine-3'-phosphate
  modified_base 7: mod_base = OTHER; note = 2'-O-methyladenosine-3'-phosphate
  modified_base 8: mod_base = OTHER; note = 2'-deoxy-2'-fluoroadenosine-3'-phosphate
  modified_base 9: mod_base = OTHER; note = 2'-deoxy-2'-fluoroadenosine-3'-phosphate
  modified_base 10: mod_base = OTHER; note = 2'-O-methylcytidine-3'-phosphate
  modified_base 11: mod_base = OTHER; note = 2'-O-methyluridine-3'-phosphate
  modified_base 12: mod_base = OTHER; note = 2'-O-methylguanosine-3'-phosphate
  modified_base 13: mod_base = OTHER; note = 2'-O-methylguanosine-3'-phosphate
  modified_base 14: mod_base = OTHER; note = 2'-deoxy-2'-fluoroguanosine-3'-phosphate
  modified_base 15: mod_base = OTHER; note = 2'-O-methyladenosine-3'-phosphate
  modified_base 16: mod_base = OTHER; note = 2'-deoxy-2'-fluoroadenosine-3'-phosphate
  modified_base 17: mod_base = OTHER; note = 2'-O-methyladenosine-3'-phosphate
  modified_base 18: mod_base = OTHER; note = 2'-O-methyluridine-3'-phosphate
  modified_base 19: mod_base = OTHER; note = 2'-O-methyluridine-3'-phosphate
  modified_base 20: mod_base = OTHER; note = 2'-O-methylcytidine-3'-phosphate
  modified_base 21: mod_base = OTHER; note = 2'-O-methyluridine-3'-phosphorothioate
  modified_base 22: mod_base = OTHER; note = 2'-O-methyladenosine-3'-phosphorothioate
  modified_base 23: mod_base = OTHER; note = 2'-O-methyladenosine
agttttaaactgggaaattctaa

SEQ ID NO: 5093 - RNA, 23 nt, synthetic construct
  source 1..23: mol_type = other RNA
  modified_base 1: mod_base = OTHER; note = 2'-O-methyladenosine-3'-phosphorothioate
  modified_base 2: mod_base = OTHER; note = 2'-deoxy-2'-fluoroguanosine-3'-phosphorothioate
  modified_base 3: mod_base = OTHER; note = 2'-O-methylguanosine-3'-phosphate
  modified_base 4: mod_base = OTHER; note = 2'-O-methyladenosine-3'-phosphate
  modified_base 5: mod_base = OTHER; note = 2'-O-methyladenosine-3'-phosphate
  modified_base 6: mod_base = OTHER; note = 2'-deoxy-2'-fluoroguanosine-3'-phosphate
  modified_base 7: mod_base = OTHER; note = 2'-O-methyladenosine-3'-phosphate
  modified_base 8: mod_base = OTHER; note = 2'-deoxy-2'-fluorocytidine-3'-phosphate
  modified_base 9: mod_base = OTHER; note = 2'-deoxy-2'-fluoroadenosine-3'-phosphate
  modified_base 10: mod_base = OTHER; note = 2'-O-methyladenosine-3'-phosphate
  modified_base 11: mod_base = OTHER; note = 2'-O-methyladenosine-3'-phosphate
  modified_base 12: mod_base = OTHER; note = 2'-O-methylcytidine-3'-phosphate
  modified_base 13: mod_base = OTHER; note = 2'-O-methyluridine-3'-phosphate
  modified_base 14: mod_base = OTHER; note = 2'-deoxy-2'-fluorouridine-3'-phosphate
  modified_base 15: mod_base = OTHER; note = 2'-O-methylguanosine-3'-phosphate
  modified_base 16: mod_base = OTHER; note = 2'-deoxy-2'-fluoroadenosine-3'-phosphate
  modified_base 17: mod_base = OTHER; note = 2'-O-methyluridine-3'-phosphate
  modified_base 18: mod_base = OTHER; note = 2'-O-methylcytidine-3'-phosphate
  modified_base 19: mod_base = OTHER; note = 2'-O-methyluridine-3'-phosphate
  modified_base 20: mod_base = OTHER; note = 2'-O-methyladenosine-3'-phosphate
  modified_base 21: mod_base = OTHER; note = 2'-O-methylcytidine-3'-phosphorothioate
  modified_base 22: mod_base = OTHER; note = 2'-O-methyladenosine-3'-phosphorothioate
  modified_base 23: mod_base = OTHER; note = 2'-O-methylguanosine
aggaagacaaacttgatctacag

SEQ ID NO: 5094 - RNA, 23 nt, synthetic construct
  source 1..23: mol_type = other RNA
  modified_base 1: mod_base = OTHER; note = 2'-O-methyladenosine-3'-phosphorothioate
  modified_base 2: mod_base = OTHER; note = 2'-deoxy-2'-fluoroguanosine-3'-phosphorothioate
  modified_base 3: mod_base = OTHER; note = 2'-O-methyladenosine-3'-phosphate
  modified_base 4: mod_base = OTHER; note = 2'-O-methylguanosine-3'-phosphate
  modified_base 5: mod_base = OTHER; note = 2'-O-methyladenosine-3'-phosphate
  modified_base 6: mod_base = OTHER; note = 2'-deoxy-2'-fluoroadenosine-3'-phosphate
  modified_base 7: mod_base = OTHER; note = 2'-O-methyladenosine-3'-phosphate
  modified_base 8: mod_base = OTHER; note = 2'-deoxy-2'-fluoroadenosine-3'-phosphate
  modified_base 9: mod_base = OTHER; note = 2'-deoxy-2'-fluoroguanosine-3'-phosphate
  modified_base 10: mod_base = OTHER; note = 2'-O-methyladenosine-3'-phosphate
  modified_base 11: mod_base = OTHER; note = 2'-O-methylguanosine-3'-phosphate
  modified_base 12: mod_base = OTHER; note = 2'-O-methylguanosine-3'-phosphate
  modified_base 13: mod_base = OTHER; note = 2'-O-methyladenosine-3'-phosphate
  modified_base 14: mod_base = OTHER; note = 2'-deoxy-2'-fluoroadenosine-3'-phosphate
  modified_base 15: mod_base = OTHER; note = 2'-O-methylguanosine-3'-phosphate
  modified_base 16: mod_base = OTHER; note = 2'-deoxy-2'-fluoroguanosine-3'-phosphate
  modified_base 17: mod_base = OTHER; note = 2'-O-methylguanosine-3'-phosphate
  modified_base 18: mod_base = OTHER; note = 2'-O-methyluridine-3'-phosphate
  modified_base 19: mod_base = OTHER; note = 2'-O-methyluridine-3'-phosphate
  modified_base 20: mod_base = OTHER; note = 2'-O-methylguanosine-3'-phosphate
  modified_base 21: mod_base = OTHER; note = 2'-O-methyluridine-3'-phosphorothioate
  modified_base 22: mod_base = OTHER; note = 2'-O-methyluridine-3'-phosphorothioate
  modified_base 23: mod_base = OTHER; note = 2'-O-methyluridine
agagaaaagaggaagggttgttt

SEQ ID NO: 5095 - RNA, 23 nt, synthetic construct
  source 1..23: mol_type = other RNA
  modified_base 1: mod_base = OTHER; note = 2'-O-methyladenosine-3'-phosphorothioate
  modified_base 2: mod_base = OTHER; note = 2'-deoxy-2'-fluorouridine-3'-phosphorothioate
  modified_base 3: mod_base = OTHER; note = 2'-O-methyluridine-3'-phosphate
  modified_base 4: mod_base = OTHER; note = 2'-O-methylcytidine-3'-phosphate
  modified_base 5: mod_base = OTHER; note = 2'-O-methyladenosine-3'-phosphate
  modified_base 6: mod_base = OTHER; note = 2'-deoxy-2'-fluorouridine-3'-phosphate
  modified_base 7: mod_base = OTHER; note = 2'-O-methyluridine-3'-phosphate
  modified_base 8: mod_base = OTHER; note = 2'-deoxy-2'-fluoroadenosine-3'-phosphate
  modified_base 9: mod_base = OTHER; note = 2'-deoxy-2'-fluorouridine-3'-phosphate
  modified_base 10: mod_base = OTHER; note = 2'-O-methylguanosine-3'-phosphate
  modified_base 11: mod_base = OTHER; note = 2'-O-methylcytidine-3'-phosphate
  modified_base 12: mod_base = OTHER; note = 2'-O-methyladenosine-3'-phosphate
  modified_base 13: mod_base = OTHER; note = 2'-O-methyladenosine-3'-phosphate
  modified_base 14: mod_base = OTHER; note = 2'-deoxy-2'-fluoroadenosine-3'-phosphate
  modified_base 15: mod_base = OTHER; note = 2'-O-methyluridine-3'-phosphate
  modified_base 16: mod_base = OTHER; note = 2'-deoxy-2'-fluorouridine-3'-phosphate
  modified_base 17: mod_base = OTHER; note = 2'-O-methyluridine-3'-phosphate
  modified_base 18: mod_base = OTHER; note = 2'-O-methylcytidine-3'-phosphate
  modified_base 19: mod_base = OTHER; note = 2'-O-methyladenosine-3'-phosphate
  modified_base 20: mod_base = OTHER; note = 2'-O-methylcytidine-3'-phosphate
  modified_base 21: mod_base = OTHER; note = 2'-O-methyluridine-3'-phosphorothioate
  modified_base 22: mod_base = OTHER; note = 2'-O-methyluridine-3'-phosphorothioate
  modified_base 23: mod_base = OTHER; note = 2'-O-methylcytidine
attcattatgcaaatttcacttc

SEQ ID NO: 5096 - RNA, 23 nt, synthetic construct
  source 1..23: mol_type = other RNA
  modified_base 1: mod_base = OTHER; note = 2'-O-methyladenosine-3'-phosphorothioate
  modified_base 2: mod_base = OTHER; note = 2'-deoxy-2'-fluoroadenosine-3'-phosphorothioate
  modified_base 3: mod_base = OTHER; note = 2'-O-methylcytidine-3'-phosphate
  modified_base 4: mod_base = OTHER; note = 2'-O-methyladenosine-3'-phosphate
  modified_base 5: mod_base = OTHER; note = 2'-O-methyladenosine-3'-phosphate
  modified_base 6: mod_base = OTHER; note = 2'-deoxy-2'-fluorouridine-3'-phosphate
  modified_base 7: mod_base = OTHER; note = 2'-O-methylguanosine-3'-phosphate
  modified_base 8: mod_base = OTHER; note = 2'-deoxy-2'-fluorouridine-3'-phosphate
  modified_base 9: mod_base = OTHER; note = 2'-deoxy-2'-fluoroguanosine-3'-phosphate
  modified_base 10: mod_base = OTHER; note = 2'-O-methyladenosine-3'-phosphate
  modified_base 11: mod_base = OTHER; note = 2'-O-methyladenosine-3'-phosphate
  modified_base 12: mod_base = OTHER; note = 2'-O-methyluridine-3'-phosphate
  modified_base 13: mod_base = OTHER; note = 2'-O-methyladenosine-3'-phosphate
  modified_base 14: mod_base = OTHER; note = 2'-deoxy-2'-fluorouridine-3'-phosphate
  modified_base 15: mod_base = OTHER; note = 2'-O-methyladenosine-3'-phosphate
  modified_base 16: mod_base = OTHER; note = 2'-deoxy-2'-fluorouridine-3'-phosphate
  modified_base 17: mod_base = OTHER; note = 2'-O-methylcytidine-3'-phosphate
  modified_base 18: mod_base = OTHER; note = 2'-O-methylcytidine-3'-phosphate
  modified_base 19: mod_base = OTHER; note = 2'-O-methyluridine-3'-phosphate
  modified_base 20: mod_base = OTHER; note = 2'-O-methyladenosine-3'-phosphate
  modified_base 21: mod_base = OTHER; note = 2'-O-methyladenosine-3'-phosphorothioate
  modified_base 22: mod_base = OTHER; note = 2'-O-methyladenosine-3'-phosphorothioate
  modified_base 23: mod_base = OTHER; note = 2'-O-methylguanosine
aacaatgtgaatatatcctaaag

SEQ ID NO: 5097 - RNA, 23 nt, synthetic construct
  source 1..23: mol_type = other RNA
  modified_base 1: mod_base = OTHER; note = 2'-O-methyladenosine-3'-phosphorothioate
  modified_base 2: mod_base = OTHER; note = 2'-deoxy-2'-fluoroadenosine-3'-phosphorothioate
  modified_base 3: mod_base = OTHER; note = 2'-O-methylcytidine-3'-phosphate
  modified_base 4: mod_base = OTHER; note = 2'-O-methyluridine-3'-phosphate
  modified_base 5: mod_base = OTHER; note = 2'-O-methyladenosine-3'-phosphate
  modified_base 6: mod_base = OTHER; note = 2'-deoxy-2'-fluoroguanosine-3'-phosphate
  modified_base 7: mod_base = OTHER; note = 2'-O-methylcytidine-3'-phosphate
  modified_base 8: mod_base = OTHER; note = 2'-deoxy-2'-fluoroadenosine-3'-phosphate
  modified_base 9: mod_base = OTHER; note = 2'-deoxy-2'-fluoroadenosine-3'-phosphate
  modified_base 10: mod_base = OTHER; note = 2'-O-methyluridine-3'-phosphate
  modified_base 11: mod_base = OTHER; note = 2'-O-methyladenosine-3'-phosphate
  modified_base 12: mod_base = OTHER; note = 2'-O-methyladenosine-3'-phosphate
  modified_base 13: mod_base = OTHER; note = 2'-O-methyluridine-3'-phosphate
  modified_base 14: mod_base = OTHER; note = 2'-deoxy-2'-fluoroadenosine-3'-phosphate
  modified_base 15: mod_base = OTHER; note = 2'-O-methyluridine-3'-phosphate
  modified_base 16: mod_base = OTHER; note = 2'-deoxy-2'-fluorocytidine-3'-phosphate
  modified_base 17: mod_base = OTHER; note = 2'-O-methyluridine-3'-phosphate
  modified_base 18: mod_base = OTHER; note = 2'-O-methyladenosine-3'-phosphate
  modified_base 19: mod_base = OTHER; note = 2'-O-methyladenosine-3'-phosphate
  modified_base 20: mod_base = OTHER; note = 2'-O-methylguanosine-3'-phosphate
  modified_base 21: mod_base = OTHER; note = 2'-O-methyladenosine-3'-phosphorothioate
  modified_base 22: mod_base = OTHER; note = 2'-O-methyluridine-3'-phosphorothioate
  modified_base 23: mod_base = OTHER; note = 2'-O-methylguanosine
aactagcaataatatctaagatg

SEQ ID NO: 5098 - RNA, 23 nt, synthetic construct
  source 1..23: mol_type = other RNA
  modified_base 1: mod_base = OTHER; note = 2'-O-methyladenosine-3'-phosphorothioate
  modified_base 2: mod_base = OTHER; note = 2'-deoxy-2'-fluoroadenosine-3'-phosphorothioate
  modified_base 3: mod_base = OTHER; note = 2'-O-methyladenosine-3'-phosphate
  modified_base 4: mod_base = OTHER; note = 2'-O-methyladenosine-3'-phosphate
  modified_base 5: mod_base = OTHER; note = 2'-O-methyluridine-3'-phosphate
  modified_base 6: mod_base = OTHER; note = 2'-deoxy-2'-fluorocytidine-3'-phosphate
  modified_base 7: mod_base = OTHER; note = 2'-O-methyladenosine-3'-phosphate
  modified_base 8: mod_base = OTHER; note = 2'-deoxy-2'-fluorouridine-3'-phosphate
  modified_base 9: mod_base = OTHER; note = 2'-deoxy-2'-fluorocytidine-3'-phosphate
  modified_base 10: mod_base = OTHER; note = 2'-O-methylcytidine-3'-phosphate
  modified_base 11: mod_base = OTHER; note = 2'-O-methyladenosine-3'-phosphate
  modified_base 12: mod_base = OTHER; note = 2'-O-methyluridine-3'-phosphate
  modified_base 13: mod_base = OTHER; note = 2'-O-methyluridine-3'-phosphate
  modified_base 14: mod_base = OTHER; note = 2'-deoxy-2'-fluorouridine-3'-phosphate
  modified_base 15: mod_base = OTHER; note = 2'-O-methyluridine-3'-phosphate
  modified_base 16: mod_base = OTHER; note = 2'-deoxy-2'-fluoroadenosine-3'-phosphate
  modified_base 17: mod_base = OTHER; note = 2'-O-methyladenosine-3'-phosphate
  modified_base 18: mod_base = OTHER; note = 2'-O-methylcytidine-3'-phosphate
  modified_base 19: mod_base = OTHER; note = 2'-O-methylcytidine-3'-phosphate
  modified_base 20: mod_base = OTHER; note = 2'-O-methyladenosine-3'-phosphate
  modified_base 21: mod_base = OTHER; note = 2'-O-methylguanosine-3'-phosphorothioate
  modified_base 22: mod_base = OTHER; note = 2'-O-methylguanosine-3'-phosphorothioate
  modified_base 23: mod_base = OTHER; note = 2'-O-methyladenosine
aaaatcatccattttaaccagga

SEQ ID NO: 5099 - RNA, 23 nt, synthetic construct
  source 1..23: mol_type = other RNA
  modified_base 1: mod_base = OTHER; note = 2'-O-methyladenosine-3'-phosphorothioate
  modified_base 2: mod_base = OTHER; note = 2'-deoxy-2'-fluorouridine-3'-phosphorothioate
  modified_base 3: mod_base = OTHER; note = 2'-O-methylguanosine-3'-phosphate
  modified_base 4: mod_base = OTHER; note = 2'-O-methyluridine-3'-phosphate
  modified_base 5: mod_base = OTHER; note = 2'-O-methyladenosine-3'-phosphate
  modified_base 6: mod_base = OTHER; note = 2'-deoxy-2'-fluoroadenosine-3'-phosphate
  modified_base 7: mod_base = OTHER; note = 2'-O-methyladenosine-3'-phosphate
  modified_base 8: mod_base = OTHER; note = 2'-deoxy-2'-fluoroguanosine-3'-phosphate
  modified_base 9: mod_base = OTHER; note = 2'-deoxy-2'-fluorocytidine-3'-phosphate
  modified_base 10: mod_base = OTHER; note = 2'-O-methyladenosine-3'-phosphate
  modified_base 11: mod_base = OTHER; note = 2'-O-methylcytidine-3'-phosphate
  modified_base 12: mod_base = OTHER; note = 2'-O-methyluridine-3'-phosphate
  modified_base 13: mod_base = OTHER; note = 2'-O-methyluridine-3'-phosphate
  modified_base 14: mod_base = OTHER; note = 2'-deoxy-2'-fluorocytidine-3'-phosphate
  modified_base 15: mod_base = OTHER; note = 2'-O-methyladenosine-3'-phosphate
  modified_base 16: mod_base = OTHER; note = 2'-deoxy-2'-fluoroguanosine-3'-phosphate
  modified_base 17: mod_base = OTHER; note = 2'-O-methylguanosine-3'-phosphate
  modified_base 18: mod_base = OTHER; note = 2'-O-methylguanosine-3'-phosphate
  modified_base 19: mod_base = OTHER; note = 2'-O-methyladenosine-3'-phosphate
  modified_base 20: mod_base = OTHER; note = 2'-O-methyladenosine-3'-phosphate
  modified_base 21: mod_base = OTHER; note = 2'-O-methylguanosine-3'-phosphorothioate
  modified_base 22: mod_base = OTHER; note = 2'-O-methyladenosine-3'-phosphorothioate
  modified_base 23: mod_base = OTHER; note = 2'-O-methylguanosine
atgtaaagcacttcagggaagag

SEQ ID NO: 5100 - RNA, 23 nt, synthetic construct
  source 1..23: mol_type = other RNA
  modified_base 1: mod_base = OTHER; note = 2'-O-methyladenosine-3'-phosphorothioate
  modified_base 2: mod_base = OTHER; note = 2'-deoxy-2'-fluoroadenosine-3'-phosphorothioate
  modified_base 3: mod_base = OTHER; note = 2'-O-methylguanosine-3'-phosphate
  modified_base 4: mod_base = OTHER; note = 2'-O-methyladenosine-3'-phosphate
  modified_base 5: mod_base = OTHER; note = 2'-O-methylguanosine-3'-phosphate
  modified_base 6: mod_base = OTHER; note = 2'-deoxy-2'-fluorocytidine-3'-phosphate
  modified_base 7: mod_base = OTHER; note = 2'-O-methyladenosine-3'-phosphate
  modified_base 8: mod_base = OTHER; note = 2'-deoxy-2'-fluorouridine-3'-phosphate
  modified_base 9: mod_base = OTHER; note = 2'-deoxy-2'-fluorocytidine-3'-phosphate
  modified_base 10: mod_base = OTHER; note = 2'-O-methyladenosine-3'-phosphate
  modified_base 11: mod_base = OTHER; note = 2'-O-methyladenosine-3'-phosphate
  modified_base 12: mod_base = OTHER; note = 2'-O-methylguanosine-3'-phosphate
  modified_base 13: mod_base = OTHER; note = 2'-O-methyladenosine-3'-phosphate
  modified_base 14: mod_base = OTHER; note = 2'-deoxy-2'-fluorocytidine-3'-phosphate
  modified_base 15: mod_base = OTHER; note = 2'-O-methyladenosine-3'-phosphate
  modified_base 16: mod_base = OTHER; note = 2'-deoxy-2'-fluoroguanosine-3'-phosphate
  modified_base 17: mod_base = OTHER; note = 2'-O-methyluridine-3'-phosphate
  modified_base 18: mod_base = OTHER; note = 2'-O-methylguanosine-3'-phosphate
  modified_base 19: mod_base = OTHER; note = 2'-O-methylguanosine-3'-phosphate
  modified_base 20: mod_base = OTHER; note = 2'-O-methyluridine-3'-phosphate
  modified_base 21: mod_base = OTHER; note = 2'-O-methylguanosine-3'-phosphorothioate
  modified_base 22: mod_base = OTHER; note = 2'-O-methyladenosine-3'-phosphorothioate
  modified_base 23: mod_base = OTHER; note = 2'-O-methylguanosine
aagagcatcaagacagtggtgag

SEQ ID NO: 5101 - RNA, 23 nt, synthetic construct
  source 1..23: mol_type = other RNA
  modified_base 1: mod_base = OTHER; note = 2'-O-methyladenosine-3'-phosphorothioate
  modified_base 2: mod_base = OTHER; note = 2'-deoxy-2'-fluoroadenosine-3'-phosphorothioate
  modified_base 3: mod_base = OTHER; note = 2'-O-methyladenosine-3'-phosphate
  modified_base 4: mod_base = OTHER; note = 2'-O-methylcytidine-3'-phosphate
  modified_base 5: mod_base = OTHER; note = 2'-O-methyladenosine-3'-phosphate
  modified_base 6: mod_base = OTHER; note = 2'-deoxy-2'-fluoroguanosine-3'-phosphate
  modified_base 7: mod_base = OTHER; note = 2'-O-methylcytidine-3'-phosphate
  modified_base 8: mod_base = OTHER; note = 2'-deoxy-2'-fluoroadenosine-3'-phosphate
  modified_base 9: mod_base = OTHER; note = 2'-deoxy-2'-fluoroadenosine-3'-phosphate
  modified_base 10: mod_base = OTHER; note = 2'-O-methyladenosine-3'-phosphate
  modified_base 11: mod_base = OTHER; note = 2'-O-methyladenosine-3'-phosphate
  modified_base 12: mod_base = OTHER; note = 2'-O-methylcytidine-3'-phosphate
  modified_base 13: mod_base = OTHER; note = 2'-O-methyladenosine-3'-phosphate
  modified_base 14: mod_base = OTHER; note = 2'-deoxy-2'-fluoroadenosine-3'-phosphate
  modified_base 15: mod_base = OTHER; note = 2'-O-methylguanosine-3'-phosphate
  modified_base 16: mod_base = OTHER; note = 2'-deoxy-2'-fluoroadenosine-3'-phosphate
  modified_base 17: mod_base = OTHER; note = 2'-O-methylguanosine-3'-phosphate
  modified_base 18: mod_base = OTHER; note = 2'-O-methyluridine-3'-phosphate
  modified_base 19: mod_base = OTHER; note = 2'-O-methyluridine-3'-phosphate
  modified_base 20: mod_base = OTHER; note = 2'-O-methylguanosine-3'-phosphate
  modified_base 21: mod_base = OTHER; note = 2'-O-methyluridine-3'-phosphorothioate
  modified_base 22: mod_base = OTHER; note = 2'-O-methyladenosine-3'-phosphorothioate
  modified_base 23: mod_base = OTHER; note = 2'-O-methyluridine
aaacagcaaaacaagagttgtat

SEQ ID NO: 5102 - RNA, 23 nt, synthetic construct
  source 1..23: mol_type = other RNA
  modified_base 1: mod_base = OTHER; note = 2'-O-methyladenosine-3'-phosphorothioate
  modified_base 2: mod_base = OTHER; note = 2'-deoxy-2'-fluoroadenosine-3'-phosphorothioate
  modified_base 3: mod_base = OTHER; note = 2'-O-methyluridine-3'-phosphate
  modified_base 4: mod_base = OTHER; note = 2'-O-methyladenosine-3'-phosphate
  modified_base 5: mod_base = OTHER; note = 2'-O-methyladenosine-3'-phosphate
  modified_base 6: mod_base = OTHER; note = 2'-deoxy-2'-fluoroguanosine-3'-phosphate
  modified_base 7: mod_base = OTHER; note = 2'-O-methyladenosine-3'-phosphate
  modified_base 8: mod_base = OTHER; note = 2'-deoxy-2'-fluoroadenosine-3'-phosphate
  modified_base 9: mod_base = OTHER; note = 2'-deoxy-2'-fluoroadenosine-3'-phosphate
  modified_base 10: mod_base = OTHER; note = 2'-O-methylguanosine-3'-phosphate
  modified_base 11: mod_base = OTHER; note = 2'-O-methylcytidine-3'-phosphate
  modified_base 12: mod_base = OTHER; note = 2'-O-methyladenosine-3'-phosphate
  modified_base 13: mod_base = OTHER; note = 2'-O-methyladenosine-3'-phosphate
  modified_base 14: mod_base = OTHER; note = 2'-deoxy-2'-fluoroadenosine-3'-phosphate
  modified_base 15: mod_base = OTHER; note = 2'-O-methylcytidine-3'-phosphate
  modified_base 16: mod_base = OTHER; note = 2'-deoxy-2'-fluoroguanosine-3'-phosphate
  modified_base 17: mod_base = OTHER; note = 2'-O-methyladenosine-3'-phosphate
  modified_base 18: mod_base = OTHER; note = 2'-O-methyladenosine-3'-phosphate
  modified_base 19: mod_base = OTHER; note = 2'-O-methyladenosine-3'-phosphate
  modified_base 20: mod_base = OTHER; note = 2'-O-methylguanosine-3'-phosphate
  modified_base 21: mod_base = OTHER; note = 2'-O-methylguanosine-3'-phosphorothioate
  modified_base 22: mod_base = OTHER; note = 2'-O-methyladenosine-3'-phosphorothioate
  modified_base 23: mod_base = OTHER; note = 2'-O-methyladenosine
aataagaaagcaaacgaaaggaa

SEQ ID NO: 5103 - RNA, 23 nt, synthetic construct
  source 1..23: mol_type = other RNA
  modified_base 1: mod_base = OTHER; note = 2'-O-methyladenosine-3'-phosphorothioate
  modified_base 2: mod_base = OTHER; note = 2'-deoxy-2'-fluorouridine-3'-phosphorothioate
  modified_base 3: mod_base = OTHER; note = 2'-O-methyluridine-3'-phosphate
  modified_base 4: mod_base = OTHER; note = 2'-O-methyluridine-3'-phosphate
  modified_base 5: mod_base = OTHER; note = 2'-O-methylcytidine-3'-phosphate
  modified_base 6: mod_base = OTHER; note = 2'-deoxy-2'-fluoroadenosine-3'-phosphate
  modified_base 7: mod_base = OTHER; note = 2'-O-methyluridine-3'-phosphate
  modified_base 8: mod_base = OTHER; note = 2'-deoxy-2'-fluoroadenosine-3'-phosphate
  modified_base 9: mod_base = OTHER; note = 2'-deoxy-2'-fluoroadenosine-3'-phosphate
  modified_base 10: mod_base = OTHER; note = 2'-O-methylguanosine-3'-phosphate
  modified_base 11: mod_base = OTHER; note = 2'-O-methyluridine-3'-phosphate
  modified_base 12: mod_base = OTHER; note = 2'-O-methylguanosine-3'-phosphate
  modified_base 13: mod_base = OTHER; note = 2'-O-methyladenosine-3'-phosphate
  modified_base 14: mod_base = OTHER; note = 2'-deoxy-2'-fluorouridine-3'-phosphate
  modified_base 15: mod_base = OTHER; note = 2'-O-methyluridine-3'-phosphate
  modified_base 16: mod_base = OTHER; note = 2'-deoxy-2'-fluorouridine-3'-phosphate
  modified_base 17: mod_base = OTHER; note = 2'-O-methyluridine-3'-phosphate
  modified_base 18: mod_base = OTHER; note = 2'-O-methylguanosine-3'-phosphate
  modified_base 19: mod_base = OTHER; note = 2'-O-methylcytidine-3'-phosphate
  modified_base 20: mod_base = OTHER; note = 2'-O-methylcytidine-3'-phosphate
  modified_base 21: mod_base = OTHER; note = 2'-O-methylcytidine-3'-phosphorothioate
  modified_base 22: mod_base = OTHER; note = 2'-O-methyladenosine-3'-phosphorothioate
  modified_base 23: mod_base = OTHER; note = 2'-O-methylcytidine
atttcataagtgattttgcccac

SEQ ID NO: 5104 - RNA, 23 nt, synthetic construct
  source 1..23: mol_type = other RNA
  modified_base 1: mod_base = OTHER; note = 2'-O-methyladenosine-3'-phosphorothioate
  modified_base 2: mod_base = OTHER; note = 2'-deoxy-2'-fluoroadenosine-3'-phosphorothioate
  modified_base 3: mod_base = OTHER; note = 2'-O-methyladenosine-3'-phosphate
  modified_base 4: mod_base = OTHER; note = 2'-O-methyluridine-3'-phosphate
  modified_base 5: mod_base = OTHER; note = 2'-O-methylguanosine-3'-phosphate
  modified_base 6: mod_base = OTHER; note = 2'-deoxy-2'-fluoroadenosine-3'-phosphate
  modified_base 7: mod_base = OTHER; note = 2'-O-methyluridine-3'-phosphate
  modified_base 8: mod_base = OTHER; note = 2'-deoxy-2'-fluoroadenosine-3'-phosphate
  modified_base 9: mod_base = OTHER; note = 2'-deoxy-2'-fluoroadenosine-3'-phosphate
  modified_base 10: mod_base = OTHER; note = 2'-O-methylcytidine-3'-phosphate
  modified_base 11: mod_base = OTHER; note = 2'-O-methyladenosine-3'-phosphate
  modified_base 12: mod_base = OTHER; note = 2'-O-methyluridine-3'-phosphate
  modified_base 13: mod_base = OTHER; note = 2'-O-methylcytidine-3'-phosphate
  modified_base 14: mod_base = OTHER; note = 2'-deoxy-2'-fluoroadenosine-3'-phosphate
  modified_base 15: mod_base = OTHER; note = 2'-O-methyladenosine-3'-phosphate
  modified_base 16: mod_base = OTHER; note = 2'-deoxy-2'-fluoroadenosine-3'-phosphate
  modified_base 17: mod_base = OTHER; note = 2'-O-methylguanosine-3'-phosphate
  modified_base 18: mod_base = OTHER; note = 2'-O-methyluridine-3'-phosphate
  modified_base 19: mod_base = OTHER; note = 2'-O-methylguanosine-3'-phosphate
  modified_base 20: mod_base = OTHER; note = 2'-O-methyluridine-3'-phosphate
  modified_base 21: mod_base = OTHER; note = 2'-O-methyluridine-3'-phosphorothioate
  modified_base 22: mod_base = OTHER; note = 2'-O-methyladenosine-3'-phosphorothioate
  modified_base 23: mod_base = OTHER; note = 2'-O-methylcytidine
aaatgataacatcaaagtgttac

SEQ ID NO: 5105 - RNA, 23 nt, synthetic construct
  source 1..23: mol_type = other RNA
  modified_base 1: mod_base = OTHER; note = 2'-O-methyladenosine-3'-phosphorothioate
  modified_base 2: mod_base = OTHER; note = 2'-deoxy-2'-fluoroadenosine-3'-phosphorothioate
  modified_base 3: mod_base = OTHER; note = 2'-O-methyluridine-3'-phosphate
  modified_base 4: mod_base = OTHER; note = 2'-O-methyluridine-3'-phosphate
  modified_base 5: mod_base = OTHER; note = 2'-O-methylcytidine-3'-phosphate
  modified_base 6: mod_base = OTHER; note = 2'-deoxy-2'-fluorouridine-3'-phosphate
  modified_base 7: mod_base = OTHER; note = 2'-O-methyladenosine-3'-phosphate
  modified_base 8: mod_base = OTHER; note = 2'-deoxy-2'-fluoroadenosine-3'-phosphate
  modified_base 9: mod_base = OTHER; note = 2'-deoxy-2'-fluorocytidine-3'-phosphate
  modified_base 10: mod_base = OTHER; note = 2'-O-methyluridine-3'-phosphate
  modified_base 11: mod_base = OTHER; note = 2'-O-methylcytidine-3'-phosphate
  modified_base 12: mod_base = OTHER; note = 2'-O-methylcytidine-3'-phosphate
  modified_base 13: mod_base = OTHER; note = 2'-O-methyluridine-3'-phosphate
  modified_base 14: mod_base = OTHER; note = 2'-deoxy-2'-fluorouridine-3'-phosphate
  modified_base 15: mod_base = OTHER; note = 2'-O-methylguanosine-3'-phosphate
  modified_base 16: mod_base = OTHER; note = 2'-deoxy-2'-fluoroguanosine-3'-phosphate
  modified_base 17: mod_base = OTHER; note = 2'-O-methyladenosine-3'-phosphate
  modified_base 18: mod_base = OTHER; note = 2'-O-methylguanosine-3'-phosphate
  modified_base 19: mod_base = OTHER; note = 2'-O-methylguanosine-3'-phosphate
  modified_base 20: mod_base = OTHER; note = 2'-O-methyladenosine-3'-phosphate
  modified_base 21: mod_base = OTHER; note = 2'-O-methyladenosine-3'-phosphorothioate
  modified_base 22: mod_base = OTHER; note = 2'-O-methylguanosine-3'-phosphorothioate
  modified_base 23: mod_base = OTHER; note = 2'-O-methyladenosine
aattctaactccttggaggaaga

SEQ ID NO: 5106 - RNA, 23 nt, synthetic construct
  source 1..23: mol_type = other RNA
  modified_base 1: mod_base = OTHER; note = 2'-O-methyladenosine-3'-phosphorothioate
  modified_base 2: mod_base = OTHER; note = 2'-deoxy-2'-fluoroadenosine-3'-phosphorothioate
  modified_base 3: mod_base = OTHER; note = 2'-O-methylguanosine-3'-phosphate
  modified_base 4: mod_base = OTHER; note = 2'-O-methyladenosine-3'-phosphate
  modified_base 5: mod_base = OTHER; note = 2'-O-methyluridine-3'-phosphate
  modified_base 6: mod_base = OTHER; note = 2'-deoxy-2'-fluorocytidine-3'-phosphate
  modified_base 7: mod_base = OTHER; note = 2'-O-methyladenosine-3'-phosphate
  modified_base 8: mod_base = OTHER; note = 2'-deoxy-2'-fluoroadenosine-3'-phosphate
  modified_base 9: mod_base = OTHER; note = 2'-deoxy-2'-fluoroguanosine-3'-phosphate
  modified_base 10: mod_base = OTHER; note = 2'-O-methyluridine-3'-phosphate
  modified_base 11: mod_base = OTHER; note = 2'-O-methyluridine-3'-phosphate
  modified_base 12: mod_base = OTHER; note = 2'-O-methylcytidine-3'-phosphate
  modified_base 13: mod_base = OTHER; note = 2'-O-methyladenosine-3'-phosphate
  modified_base 14: mod_base = OTHER; note = 2'-deoxy-2'-fluoroadenosine-3'-phosphate
  modified_base 15: mod_base = OTHER; note = 2'-O-methyladenosine-3'-phosphate
  modified_base 16: mod_base = OTHER; note = 2'-deoxy-2'-fluoroadenosine-3'-phosphate
  modified_base 17: mod_base = OTHER; note = 2'-O-methylcytidine-3'-phosphate
  modified_base 18: mod_base = OTHER; note = 2'-O-methyladenosine-3'-phosphate
  modified_base 19: mod_base = OTHER; note = 2'-O-methylcytidine-3'-phosphate
  modified_base 20: mod_base = OTHER; note = 2'-O-methyluridine-3'-phosphate
  modified_base 21: mod_base = OTHER; note = 2'-O-methyluridine-3'-phosphorothioate
  modified_base 22: mod_base = OTHER; note = 2'-O-methyladenosine-3'-phosphorothioate
  modified_base 23: mod_base = OTHER; note = 2'-O-methyluridine
aagatcaagttcaaaacacttat

SEQ ID NO: 5107 - RNA, 23 nt, synthetic construct
  source 1..23: mol_type = other RNA
  modified_base 1: mod_base = OTHER; note = 2'-O-methyladenosine-3'-phosphorothioate
  modified_base 2: mod_base = OTHER; note = 2'-deoxy-2'-fluoroadenosine-3'-phosphorothioate
  modified_base 3: mod_base = OTHER; note = 2'-O-methyladenosine-3'-phosphate
  modified_base 4: mod_base = OTHER; note = 2'-O-methyladenosine-3'-phosphate
  modified_base 5: mod_base = OTHER; note = 2'-O-methyladenosine-3'-phosphate
  modified_base 6: mod_base = OTHER; note = 2'-deoxy-2'-fluoroguanosine-3'-phosphate
  modified_base 7: mod_base = OTHER; note = 2'-O-methyladenosine-3'-phosphate
  modified_base 8: mod_base = OTHER; note = 2'-deoxy-2'-fluoroguanosine-3'-phosphate
  modified_base 9: mod_base = OTHER; note = 2'-deoxy-2'-fluoroadenosine-3'-phosphate
  modified_base 10: mod_base = OTHER; note = 2'-O-methyladenosine-3'-phosphate
  modified_base 11: mod_base = OTHER; note = 2'-O-methyladenosine-3'-phosphate
  modified_base 12: mod_base = OTHER; note = 2'-O-methyladenosine-3'-phosphate
  modified_base 13: mod_base = OTHER; note = 2'-O-methyladenosine-3'-phosphate
  modified_base 14: mod_base = OTHER; note = 2'-deoxy-2'-fluorouridine-3'-phosphate
  modified_base 15: mod_base = OTHER; note = 2'-O-methylguanosine-3'-phosphate
  modified_base 16: mod_base = OTHER; note = 2'-deoxy-2'-fluoroadenosine-3'-phosphate
  modified_base 17: mod_base = OTHER; note = 2'-O-methylguanosine-3'-phosphate
  modified_base 18: mod_base = OTHER; note = 2'-O-methylguanosine-3'-phosphate
  modified_base 19: mod_base = OTHER; note = 2'-O-methylcytidine-3'-phosphate
  modified_base 20: mod_base = OTHER; note = 2'-O-methylcytidine-3'-phosphate
  modified_base 21: mod_base = OTHER; note = 2'-O-methyladenosine-3'-phosphorothioate
  modified_base 22: mod_base = OTHER; note = 2'-O-methyluridine-3'-phosphorothioate
  modified_base 23: mod_base = OTHER; note = 2'-O-methyluridine
aaaaagagaaaaatgaggccatt

SEQ ID NO: 5108 - RNA, 23 nt, synthetic construct
  source 1..23: mol_type = other RNA
  modified_base 1: mod_base = OTHER; note = 2'-O-methyladenosine-3'-phosphorothioate
  modified_base 2: mod_base = OTHER; note = 2'-deoxy-2'-fluorouridine-3'-phosphorothioate
  modified_base 3: mod_base = OTHER; note = 2'-O-methyluridine-3'-phosphate
  modified_base 4: mod_base = OTHER; note = 2'-O-methyluridine-3'-phosphate
  modified_base 5: mod_base = OTHER; note = 2'-O-methyladenosine-3'-phosphate
  modified_base 6: mod_base = OTHER; note = 2'-deoxy-2'-fluoroadenosine-3'-phosphate
  modified_base 7: mod_base = OTHER; note = 2'-O-methyladenosine-3'-phosphate
  modified_base 8: mod_base = OTHER; note = 2'-deoxy-2'-fluorocytidine-3'-phosphate
  modified_base 9: mod_base = OTHER; note = 2'-deoxy-2'-fluoroadenosine-3'-phosphate
  modified_base 10: mod_base = OTHER; note = 2'-O-methyladenosine-3'-phosphate
  modified_base 11: mod_base = OTHER; note = 2'-O-methyluridine-3'-phosphate
  modified_base 12: mod_base = OTHER; note = 2'-O-methylguanosine-3'-phosphate
  modified_base 13: mod_base = OTHER; note = 2'-O-methylcytidine-3'-phosphate
  modified_base 14: mod_base = OTHER; note = 2'-deoxy-2'-fluoroadenosine-3'-phosphate
  modified_base 15: mod_base = OTHER; note = 2'-O-methyladenosine-3'-phosphate
  modified_base 16: mod_base = OTHER; note = 2'-deoxy-2'-fluoroadenosine-3'-phosphate
  modified_base 17: mod_base = OTHER; note = 2'-O-methyluridine-3'-phosphate
  modified_base 18: mod_base = OTHER; note = 2'-O-methyladenosine-3'-phosphate
  modified_base 19: mod_base = OTHER; note = 2'-O-methylcytidine-3'-phosphate
  modified_base 20: mod_base = OTHER; note = 2'-O-methylcytidine-3'-phosphate
  modified_base 21: mod_base = OTHER; note = 2'-O-methyluridine-3'-phosphorothioate
  modified_base 22: mod_base = OTHER; note = 2'-O-methylcytidine-3'-phosphorothioate
  modified_base 23: mod_base = OTHER; note = 2'-O-methylcytidine
atttaaacaatgcaaatacctcc

SEQ ID NO: 5109 - RNA, 23 nt, synthetic construct
  source 1..23: mol_type = other RNA
  modified_base 1: mod_base = OTHER; note = 2'-O-methyladenosine-3'-phosphorothioate
  modified_base 2: mod_base = OTHER; note = 2'-deoxy-2'-fluorouridine-3'-phosphorothioate
  modified_base 3: mod_base = OTHER; note = 2'-O-methylguanosine-3'-phosphate
  modified_base 4: mod_base = OTHER; note = 2'-O-methyladenosine-3'-phosphate
  modified_base 5: mod_base = OTHER; note = 2'-O-methyladenosine-3'-phosphate
  modified_base 6: mod_base = OTHER; note = 2'-deoxy-2'-fluoroguanosine-3'-phosphate
  modified_base 7: mod_base = OTHER; note = 2'-O-methyluridine-3'-phosphate
  modified_base 8: mod_base = OTHER; note = 2'-deoxy-2'-fluorocytidine-3'-phosphate
  modified_base 9: mod_base = OTHER; note = 2'-deoxy-2'-fluoroguanosine-3'-phosphate
  modified_base 10: mod_base = OTHER; note = 2'-O-methylcytidine-3'-phosphate
  modified_base 11: mod_base = OTHER; note = 2'-O-methyladenosine-3'-phosphate
  modified_base 12: mod_base = OTHER; note = 2'-O-methylcytidine-3'-phosphate
  modified_base 13: mod_base = OTHER; note = 2'-O-methyladenosine-3'-phosphate
  modified_base 14: mod_base = OTHER; note = 2'-deoxy-2'-fluoroadenosine-3'-phosphate
  modified_base 15: mod_base = OTHER; note = 2'-O-methyluridine-3'-phosphate
  modified_base 16: mod_base = OTHER; note = 2'-deoxy-2'-fluoroadenosine-3'-phosphate
  modified_base 17: mod_base = OTHER; note = 2'-O-methyluridine-3'-phosphate
  modified_base 18: mod_base = OTHER; note = 2'-O-methyluridine-3'-phosphate
  modified_base 19: mod_base = OTHER; note = 2'-O-methyladenosine-3'-phosphate
  modified_base 20: mod_base = OTHER; note = 2'-O-methylguanosine-3'-phosphate
  modified_base 21: mod_base = OTHER; note = 2'-O-methylguanosine-3'-phosphorothioate
  modified_base 22: mod_base = OTHER; note = 2'-O-methylguanosine-3'-phosphorothioate
  modified_base 23: mod_base = OTHER; note = 2'-O-methyluridine
atgaagtcgcacaatattagggt

SEQ ID NO: 5110 - RNA, 23 nt, synthetic construct
  source 1..23: mol_type = other RNA
  modified_base 1: mod_base = OTHER; note = 2'-O-methyladenosine-3'-phosphorothioate
  modified_base 2: mod_base = OTHER; note = 2'-deoxy-2'-fluoroadenosine-3'-phosphorothioate
  modified_base 3: mod_base = OTHER; note = 2'-O-methyluridine-3'-phosphate
  modified_base 4: mod_base = OTHER; note = 2'-O-methylguanosine-3'-phosphate
  modified_base 5: mod_base = OTHER; note = 2'-O-methyladenosine-3'-phosphate
  modified_base 6: mod_base = OTHER; note = 2'-deoxy-2'-fluorocytidine-3'-phosphate
  modified_base 7: mod_base = OTHER; note = 2'-O-methylcytidine-3'-phosphate
  modified_base 8: mod_base = OTHER; note = 2'-deoxy-2'-fluoroadenosine-3'-phosphate
  modified_base 9: mod_base = OTHER; note = 2'-deoxy-2'-fluorocytidine-3'-phosphate
  modified_base 10: mod_base = OTHER; note = 2'-O-methyluridine-3'-phosphate
  modified_base 11: mod_base = OTHER; note = 2'-O-methyluridine-3'-phosphate
  modified_base 12: mod_base = OTHER; note = 2'-O-methylcytidine-3'-phosphate
  modified_base 13: mod_base = OTHER; note = 2'-O-methyladenosine-3'-phosphate
  modified_base 14: mod_base = OTHER; note = 2'-deoxy-2'-fluorouridine-3'-phosphate
  modified_base 15: mod_base = OTHER; note = 2'-O-methyluridine-3'-phosphate
  modified_base 16: mod_base = OTHER; note = 2'-deoxy-2'-fluorouridine-3'-phosphate
  modified_base 17: mod_base = OTHER; note = 2'-O-methylguanosine-3'-phosphate
  modified_base 18: mod_base = OTHER; note = 2'-O-methylguanosine-3'-phosphate
  modified_base 19: mod_base = OTHER; note = 2'-O-methyluridine-3'-phosphate
  modified_base 20: mod_base = OTHER; note = 2'-O-methylguanosine-3'-phosphate
  modified_base 21: mod_base = OTHER; note = 2'-O-methyluridine-3'-phosphorothioate
  modified_base 22: mod_base = OTHER; note = 2'-O-methylcytidine-3'-phosphorothioate
  modified_base 23: mod_base = OTHER; note = 2'-O-methyluridine
aatgaccacttcatttggtgtct
